United States Patent Application Publication US 2024/0175014 A1 - sequence listing, part 3

SEQ ID NO: 44628 - DNA, 22 bp, synthetic construct
  misc_feature 1..22: note = chemically synthesized
  source 1..22: mol_type = other DNA
gctgaaaaataaatagccattg

SEQ ID NO: 44629 - DNA, 22 bp, synthetic construct
  misc_feature 1..22: note = chemically synthesized
  source 1..22: mol_type = other DNA
aaaaataaatagccattgtagc

SEQ ID NO: 44630 - DNA, 22 bp, synthetic construct
  misc_feature 1..22: note = chemically synthesized
  source 1..22: mol_type = other DNA
tagctaactatgcaaaggatgg

SEQ ID NO: 44631 - DNA, 22 bp, synthetic construct
  misc_feature 1..22: note = chemically synthesized
  source 1..22: mol_type = other DNA
actatgcaaaggatggctaagc

SEQ ID NO: 44632 - DNA, 22 bp, synthetic construct
  misc_feature 1..22: note = chemically synthesized
  source 1..22: mol_type = other DNA
tgcaaaggatggctaagctctt

SEQ ID NO: 44633 - DNA, 22 bp, synthetic construct
  misc_feature 1..22: note = chemically synthesized
  source 1..22: mol_type = other DNA
agctcttcgcttggttctcagt

SEQ ID NO: 44634 - DNA, 22 bp, synthetic construct
  misc_feature 1..22: note = chemically synthesized
  source 1..22: mol_type = other DNA
ttcgcttggttctcagtttcat

SEQ ID NO: 44635 - DNA, 22 bp, synthetic construct
  misc_feature 1..22: note = chemically synthesized
  source 1..22: mol_type = other DNA
cgcttggttctcagtttcatta

SEQ ID NO: 44636 - DNA, 22 bp, synthetic construct
  misc_feature 1..22: note = chemically synthesized
  source 1..22: mol_type = other DNA
gcttggttctcagtttcattaa

SEQ ID NO: 44637 - DNA, 22 bp, synthetic construct
  misc_feature 1..22: note = chemically synthesized
  source 1..22: mol_type = other DNA
ggttctcagtttcattaattta

SEQ ID NO: 44638 - DNA, 22 bp, synthetic construct
  misc_feature 1..22: note = chemically synthesized
  source 1..22: mol_type = other DNA
gttctcagtttcattaatttat

SEQ ID NO: 44639 - DNA, 22 bp, synthetic construct
  misc_feature 1..22: note = chemically synthesized
  source 1..22: mol_type = other DNA
tcagtttcattaatttatatca

SEQ ID NO: 44640 - DNA, 22 bp, synthetic construct
  misc_feature 1..22: note = chemically synthesized
  source 1..22: mol_type = other DNA
agtttcattaatttatatcatc

SEQ ID NO: 44641 - DNA, 22 bp, synthetic construct
  misc_feature 1..22: note = chemically synthesized
  source 1..22: mol_type = other DNA
cattaatttatatcatctctgt

SEQ ID NO: 44642 - DNA, 22 bp, synthetic construct
  misc_feature 1..22: note = chemically synthesized
  source 1..22: mol_type = other DNA
attaatttatatcatctctgtt

SEQ ID NO: 44643 - DNA, 22 bp, synthetic construct
  misc_feature 1..22: note = chemically synthesized
  source 1..22: mol_type = other DNA
atttatatcatctctgttcagg

SEQ ID NO: 44644 - DNA, 22 bp, synthetic construct
  misc_feature 1..22: note = chemically synthesized
  source 1..22: mol_type = other DNA
atatcatctctgttcaggtgcc

SEQ ID NO: 44645 - DNA, 22 bp, synthetic construct
  misc_feature 1..22: note = chemically synthesized
  source 1..22: mol_type = other DNA
tatcatctctgttcaggtgcca

SEQ ID NO: 44646 - DNA, 22 bp, synthetic construct
  misc_feature 1..22: note = chemically synthesized
  source 1..22: mol_type = other DNA
tgttcaggtgccatgctcccct

SEQ ID NO: 44647 - DNA, 22 bp, synthetic construct
  misc_feature 1..22: note = chemically synthesized
  source 1..22: mol_type = other DNA
ttcaggtgccatgctcccctca

SEQ ID NO: 44648 - DNA, 22 bp, synthetic construct
  misc_feature 1..22: note = chemically synthesized
  source 1..22: mol_type = other DNA
aggtgccatgctcccctcacta

SEQ ID NO: 44649 - DNA, 22 bp, synthetic construct
  misc_feature 1..22: note = chemically synthesized
  source 1..22: mol_type = other DNA
ccctcactagcaagttgaaaca

SEQ ID NO: 44650 - DNA, 22 bp, synthetic construct
  misc_feature 1..22: note = chemically synthesized
  source 1..22: mol_type = other DNA
actagcaagttgaaacaatgaa

SEQ ID NO: 44651 - DNA, 22 bp, synthetic construct
  misc_feature 1..22: note = chemically synthesized
  source 1..22: mol_type = other DNA
gcaagttgaaacaatgaaataa

SEQ ID NO: 44652 - DNA, 22 bp, synthetic construct
  misc_feature 1..22: note = chemically synthesized
  source 1..22: mol_type = other DNA
aaacaatgaaataactctttga

SEQ ID NO: 44653 - DNA, 22 bp, synthetic construct
  misc_feature 1..22: note = chemically synthesized
  source 1..22: mol_type = other DNA
tttgaatatgtttggttccttg

SEQ ID NO: 44654 - DNA, 22 bp, synthetic construct
  misc_feature 1..22: note = chemically synthesized
  source 1..22: mol_type = other DNA
tgaatatgtttggttccttgac

SEQ ID NO: 44655 - DNA, 22 bp, synthetic construct
  misc_feature 1..22: note = chemically synthesized
  source 1..22: mol_type = other DNA
gaatatgtttggttccttgacc

SEQ ID NO: 44656 - DNA, 22 bp, synthetic construct
  misc_feature 1..22: note = chemically synthesized
  source 1..22: mol_type = other DNA
aatatgtttggttccttgacct

SEQ ID NO: 44657 - DNA, 22 bp, synthetic construct
  misc_feature 1..22: note = chemically synthesized
  source 1..22: mol_type = other DNA
ggttccttgacctgttcatgga

SEQ ID NO: 44658 - DNA, 22 bp, synthetic construct
  misc_feature 1..22: note = chemically synthesized
  source 1..22: mol_type = other DNA
gttccttgacctgttcatggag

SEQ ID NO: 44659 - DNA, 22 bp, synthetic construct
  misc_feature 1..22: note = chemically synthesized
  source 1..22: mol_type = other DNA
cttgacctgttcatggagtggg

SEQ ID NO: 44660 - DNA, 22 bp, synthetic construct
  misc_feature 1..22: note = chemically synthesized
  source 1..22: mol_type = other DNA
gacctgttcatggagtgggact

SEQ ID NO: 44661 - DNA, 22 bp, synthetic construct
  misc_feature 1..22: note = chemically synthesized
  source 1..22: mol_type = other DNA
acctgttcatggagtgggactc

SEQ ID NO: 44662 - DNA, 22 bp, synthetic construct
  misc_feature 1..22: note = chemically synthesized
  source 1..22: mol_type = other DNA
ttcatggagtgggactcagcat

SEQ ID NO: 44663 - DNA, 22 bp, synthetic construct
  misc_feature 1..22: note = chemically synthesized
  source 1..22: mol_type = other DNA
atggagtgggactcagcatttc

SEQ ID NO: 44664 - DNA, 22 bp, synthetic construct
  misc_feature 1..22: note = chemically synthesized
  source 1..22: mol_type = other DNA
agcatttctctctttgttatgg

SEQ ID NO: 44665 - DNA, 22 bp, synthetic construct
  misc_feature 1..22: note = chemically synthesized
  source 1..22: mol_type = other DNA
ctctctttgttatggcctgagt

SEQ ID NO: 44666 - DNA, 22 bp, synthetic construct
  misc_feature 1..22: note = chemically synthesized
  source 1..22: mol_type = other DNA
tctctttgttatggcctgagta

SEQ ID NO: 44667 - DNA, 22 bp, synthetic construct
  misc_feature 1..22: note = chemically synthesized
  source 1..22: mol_type = other DNA
tctttgttatggcctgagtaag

SEQ ID NO: 44668 - DNA, 22 bp, synthetic construct
  misc_feature 1..22: note = chemically synthesized
  source 1..22: mol_type = other DNA
tttgttatggcctgagtaaggc

SEQ ID NO: 44669 - DNA, 22 bp, synthetic construct
  misc_feature 1..22: note = chemically synthesized
  source 1..22: mol_type = other DNA
tgttatggcctgagtaaggctt

SEQ ID NO: 44670 - DNA, 22 bp, synthetic construct
  misc_feature 1..22: note = chemically synthesized
  source 1..22: mol_type = other DNA
gttatggcctgagtaaggcttt

SEQ ID NO: 44671 - DNA, 22 bp, synthetic construct
  misc_feature 1..22: note = chemically synthesized
  source 1..22: mol_type = other DNA
ttatggcctgagtaaggctttc

SEQ ID NO: 44672 - DNA, 22 bp, synthetic construct
  misc_feature 1..22: note = chemically synthesized
  source 1..22: mol_type = other DNA
tggcctgagtaaggctttccat

SEQ ID NO: 44673 - DNA, 22 bp, synthetic construct
  misc_feature 1..22: note = chemically synthesized
  source 1..22: mol_type = other DNA
agtaaggctttccatcggtata

SEQ ID NO: 44674 - DNA, 22 bp, synthetic construct
  misc_feature 1..22: note = chemically synthesized
  source 1..22: mol_type = other DNA
tccatcggtatacatttgcttc

SEQ ID NO: 44675 - DNA, 22 bp, synthetic construct
  misc_feature 1..22: note = chemically synthesized
  source 1..22: mol_type = other DNA
ccatcggtatacatttgcttct

SEQ ID NO: 44676 - DNA, 22 bp, synthetic construct
  misc_feature 1..22: note = chemically synthesized
  source 1..22: mol_type = other DNA
catcggtatacatttgcttctt

SEQ ID NO: 44677 - DNA, 22 bp, synthetic construct
  misc_feature 1..22: note = chemically synthesized
  source 1..22: mol_type = other DNA
gcttcttatccctggagaaatt

SEQ ID NO: 44678 - DNA, 22 bp, synthetic construct
  misc_feature 1..22: note = chemically synthesized
  source 1..22: mol_type = other DNA
cttcttatccctggagaaatta

SEQ ID NO: 44679 - DNA, 22 bp, synthetic construct
  misc_feature 1..22: note = chemically synthesized
  source 1..22: mol_type = other DNA
cttatccctggagaaattatac

SEQ ID NO: 44680 - DNA, 22 bp, synthetic construct
  misc_feature 1..22: note = chemically synthesized
  source 1..22: mol_type = other DNA
ttatccctggagaaattataca

SEQ ID NO: 44681 - DNA, 22 bp, synthetic construct
  misc_feature 1..22: note = chemically synthesized
  source 1..22: mol_type = other DNA
atccctggagaaattatacaca

SEQ ID NO: 44682 - DNA, 22 bp, synthetic construct
  misc_feature 1..22: note = chemically synthesized
  source 1..22: mol_type = other DNA
tccctggagaaattatacacat

SEQ ID NO: 44683 - DNA, 22 bp, synthetic construct
  misc_feature 1..22: note = chemically synthesized
  source 1..22: mol_type = other DNA
gagaaattatacacatccattt

SEQ ID NO: 44684 - DNA, 22 bp, synthetic construct
  misc_feature 1..22: note = chemically synthesized
  source 1..22: mol_type = other DNA
tacacatccatttgccagatga

SEQ ID NO: 44685 - DNA, 22 bp, synthetic construct
  misc_feature 1..22: note = chemically synthesized
  source 1..22: mol_type = other DNA
gccagatgatatacgcatataa

SEQ ID NO: 44686 - DNA, 22 bp, synthetic construct
  misc_feature 1..22: note = chemically synthesized
  source 1..22: mol_type = other DNA
ccagatgatatacgcatataat

SEQ ID NO: 44687 - DNA, 22 bp, synthetic construct
  misc_feature 1..22: note = chemically synthesized
  source 1..22: mol_type = other DNA
aacaaatactcagggtatttgt

SEQ ID NO: 44688 - DNA, 22 bp, synthetic construct
  misc_feature 1..22: note = chemically synthesized
  source 1..22: mol_type = other DNA
agggtatttgttgagtgggtta

SEQ ID NO: 44689 - DNA, 22 bp, synthetic construct
  misc_feature 1..22: note = chemically synthesized
  source 1..22: mol_type = other DNA
gttgagtgggttaggtccccac

SEQ ID NO: 44690 - DNA, 22 bp, synthetic construct
  misc_feature 1..22: note = chemically synthesized
  source 1..22: mol_type = other DNA
ttgagtgggttaggtccccaca

SEQ ID NO: 44691 - DNA, 22 bp, synthetic construct
  misc_feature 1..22: note = chemically synthesized
  source 1..22: mol_type = other DNA
agtgggttaggtccccacattt

SEQ ID NO: 44692 - DNA, 22 bp, synthetic construct
  misc_feature 1..22: note = chemically synthesized
  source 1..22: mol_type = other DNA
ggtccccacatttttatacata

SEQ ID NO: 44693 - DNA, 22 bp, synthetic construct
  misc_feature 1..22: note = chemically synthesized
  source 1..22: mol_type = other DNA
ttatacatacatacacacatac

SEQ ID NO: 44694 - DNA, 22 bp, synthetic construct
  misc_feature 1..22: note = chemically synthesized
  source 1..22: mol_type = other DNA
tatacatacatacacacataca

SEQ ID NO: 44695 - DNA, 22 bp, synthetic construct
  misc_feature 1..22: note = chemically synthesized
  source 1..22: mol_type = other DNA
atacatacatacacacatacac

SEQ ID NO: 44696 - DNA, 22 bp, synthetic construct
  misc_feature 1..22: note = chemically synthesized
  source 1..22: mol_type = other DNA
tacatacatacacacatacaca

SEQ ID NO: 44697 - DNA, 22 bp, synthetic construct
  misc_feature 1..22: note = chemically synthesized
  source 1..22: mol_type = other DNA
tgaatgtaagtgtgtgtccttt

SEQ ID NO: 44698 - DNA, 22 bp, synthetic construct
  misc_feature 1..22: note = chemically synthesized
  source 1..22: mol_type = other DNA
tacaaatactagcttatttagc

SEQ ID NO: 44699 - DNA, 22 bp, synthetic construct
  misc_feature 1..22: note = chemically synthesized
  source 1..22: mol_type = other DNA
acaaatactagcttatttagct

SEQ ID NO: 44700 - DNA, 22 bp, synthetic construct
  misc_feature 1..22: note = chemically synthesized
  source 1..22: mol_type = other DNA
caaatactagcttatttagctc

SEQ ID NO: 44701 - DNA, 22 bp, synthetic construct
  misc_feature 1..22: note = chemically synthesized
  source 1..22: mol_type = other DNA
gcttatttagctcatggtatag

SEQ ID NO: 44702 - DNA, 22 bp, synthetic construct
  misc_feature 1..22: note = chemically synthesized
  source 1..22: mol_type = other DNA
atttagctcatggtataggtag

SEQ ID NO: 44703 - DNA, 22 bp, synthetic construct
  misc_feature 1..22: note = chemically synthesized
  source 1..22: mol_type = other DNA
tttagctcatggtataggtagg

SEQ ID NO: 44704 - DNA, 22 bp, synthetic construct
  misc_feature 1..22: note = chemically synthesized
  source 1..22: mol_type = other DNA
agctcatggtataggtagggta

SEQ ID NO: 44705 - DNA, 22 bp, synthetic construct
  misc_feature 1..22: note = chemically synthesized
  source 1..22: mol_type = other DNA
gctcatggtataggtagggtag

SEQ ID NO: 44706 - DNA, 22 bp, synthetic construct
  misc_feature 1..22: note = chemically synthesized
  source 1..22: mol_type = other DNA
atggtataggtagggtagcata

SEQ ID NO: 44707 - DNA, 22 bp, synthetic construct
  misc_feature 1..22: note = chemically synthesized
  source 1..22: mol_type = other DNA
tataaacaaagaaatctagact

SEQ ID NO: 44708 - DNA, 22 bp, synthetic construct
  misc_feature 1..22: note = chemically synthesized
  source 1..22: mol_type = other DNA
ataaacaaagaaatctagactt

SEQ ID NO: 44709 - DNA, 22 bp, synthetic construct
  misc_feature 1..22: note = chemically synthesized
  source 1..22: mol_type = other DNA
taaacaaagaaatctagactta

SEQ ID NO: 44710 - DNA, 22 bp, synthetic construct
  misc_feature 1..22: note = chemically synthesized
  source 1..22: mol_type = other DNA
gacttaggaaaatcatgttatt

SEQ ID NO: 44711 - DNA, 22 bp, synthetic construct
  misc_feature 1..22: note = chemically synthesized
  source 1..22: mol_type = other DNA
aggaaaatcatgttatttgtct

SEQ ID NO: 44712 - DNA, 22 bp, synthetic construct
  misc_feature 1..22: note = chemically synthesized
  source 1..22: mol_type = other DNA
ggaaaatcatgttatttgtctc

SEQ ID NO: 44713 - DNA, 22 bp, synthetic construct
  misc_feature 1..22: note = chemically synthesized
  source 1..22: mol_type = other DNA
tttgtctcgtgaccaaattccc

SEQ ID NO: 44714 - DNA, 22 bp, synthetic construct
  misc_feature 1..22: note = chemically synthesized
  source 1..22: mol_type = other DNA
gtctcgtgaccaaattcccaaa

SEQ ID NO: 44715 - DNA, 22 bp, synthetic construct
  misc_feature 1..22: note = chemically synthesized
  source 1..22: mol_type = other DNA
tctcgtgaccaaattcccaaat

SEQ ID NO: 44716 - DNA, 22 bp, synthetic construct
  misc_feature 1..22: note = chemically synthesized
  source 1..22: mol_type = other DNA
gtgaccaaattcccaaatcaag

SEQ ID NO: 44717 - DNA, 22 bp, synthetic construct
  misc_feature 1..22: note = chemically synthesized
  source 1..22: mol_type = other DNA
ccaaatcaaggaaataaagaaa

SEQ ID NO: 44718 - DNA, 22 bp, synthetic construct
  misc_feature 1..22: note = chemically synthesized
  source 1..22: mol_type = other DNA
gatttaagccagatttccaaga

SEQ ID NO: 44719 - DNA, 22 bp, synthetic construct
  misc_feature 1..22: note = chemically synthesized
  source 1..22: mol_type = other DNA
aagccagatttccaagaaaaaa

SEQ ID NO: 44720 - DNA, 22 bp, synthetic construct
  misc_feature 1..22: note = chemically synthesized
  source 1..22: mol_type = other DNA
agccagatttccaagaaaaaat

SEQ ID NO: 44721 - DNA, 22 bp, synthetic construct
  misc_feature 1..22: note = chemically synthesized
  source 1..22: mol_type = other DNA
ccaagaaaaaatctagggctct

SEQ ID NO: 44722 - DNA, 22 bp, synthetic construct
  misc_feature 1..22: note = chemically synthesized
  source 1..22: mol_type = other DNA
caagaaaaaatctagggctctt

SEQ ID NO: 44723 - DNA, 22 bp, synthetic construct
  misc_feature 1..22: note = chemically synthesized
  source 1..22: mol_type = other DNA
gggctcttctcactttttcatc

SEQ ID NO: 44724 - DNA, 22 bp, synthetic construct
  misc_feature 1..22: note = chemically synthesized
  source 1..22: mol_type = other DNA
ttctcactttttcatctttgtt

SEQ ID NO: 44725 - DNA, 22 bp, synthetic construct
  misc_feature 1..22: note = chemically synthesized
  source 1..22: mol_type = other DNA
ctcactttttcatctttgttcc

SEQ ID NO: 44726 - DNA, 22 bp, synthetic construct
  misc_feature 1..22: note = chemically synthesized
  source 1..22: mol_type = other DNA
tcactttttcatctttgttcca

SEQ ID NO: 44727 - DNA, 22 bp, synthetic construct
  misc_feature 1..22: note = chemically synthesized
  source 1..22: mol_type = other DNA
actttttcatctttgttccaac

SEQ ID NO: 44728 - DNA, 22 bp, synthetic construct
  misc_feature 1..22: note = chemically synthesized
  source 1..22: mol_type = other DNA
tttcatctttgttccaacattt

SEQ ID NO: 44729 - DNA, 22 bp, synthetic construct
  misc_feature 1..22: note = chemically synthesized
  source 1..22: mol_type = other DNA
ttcatctttgttccaacatttg

SEQ ID NO: 44730 - DNA, 22 bp, synthetic construct
  misc_feature 1..22: note = chemically synthesized
  source 1..22: mol_type = other DNA
tcatctttgttccaacatttga

SEQ ID NO: 44731 - DNA, 22 bp, synthetic construct
  misc_feature 1..22: note = chemically synthesized
  source 1..22: mol_type = other DNA
catctttgttccaacatttgaa

SEQ ID NO: 44732 - DNA, 22 bp, synthetic construct
  misc_feature 1..22: note = chemically synthesized
  source 1..22: mol_type = other DNA
atctttgttccaacatttgaaa

SEQ ID NO: 44733 - DNA, 22 bp, synthetic construct
  misc_feature 1..22: note = chemically synthesized
  source 1..22: mol_type = other DNA
tgttccaacatttgaaaaaata

SEQ ID NO: 44734 - DNA, 22 bp, synthetic construct
  misc_feature 1..22: note = chemically synthesized
  source 1..22: mol_type = other DNA
gttccaacatttgaaaaaataa

SEQ ID NO: 44735 - DNA, 22 bp, synthetic construct
  misc_feature 1..22: note = chemically synthesized
  source 1..22: mol_type = other DNA
ttccaacatttgaaaaaataaa

SEQ ID NO: 44736 - DNA, 22 bp, synthetic construct
  misc_feature 1..22: note = chemically synthesized
  source 1..22: mol_type = other DNA
caacatttgaaaaaataaatct

SEQ ID NO: 44737 - DNA, 22 bp, synthetic construct
  misc_feature 1..22: note = chemically synthesized
  source 1..22: mol_type = other DNA
gaaaaaataaatctaaacacat

SEQ ID NO: 44738 - DNA, 22 bp, synthetic construct
  misc_feature 1..22: note = chemically synthesized
  source 1..22: mol_type = other DNA
aaaaaataaatctaaacacatt

SEQ ID NO: 44739 - DNA, 22 bp, synthetic construct
  misc_feature 1..22: note = chemically synthesized
  source 1..22: mol_type = other DNA
aacacattccaatgtaactgaa

SEQ ID NO: 44740 - DNA, 22 bp, synthetic construct
  misc_feature 1..22: note = chemically synthesized
  source 1..22: mol_type = other DNA
caatgtaactgaagagcaggtt

SEQ ID NO: 44741 - DNA, 22 bp, synthetic construct
  misc_feature 1..22: note = chemically synthesized
  source 1..22: mol_type = other DNA
aagagcaggttaattgtttgcc

SEQ ID NO: 44742 - DNA, 22 bp, synthetic construct
  misc_feature 1..22: note = chemically synthesized
  source 1..22: mol_type = other DNA
attgtttgccacttgcagaatc

SEQ ID NO: 44743 - DNA, 22 bp, synthetic construct
  misc_feature 1..22: note = chemically synthesized
  source 1..22: mol_type = other DNA
tttgccacttgcagaatccaat

SEQ ID NO: 44744 - DNA, 22 bp, synthetic construct
  misc_feature 1..22: note = chemically synthesized
  source 1..22: mol_type = other DNA
gccacttgcagaatccaattaa

SEQ ID NO: 44745 - DNA, 22 bp, synthetic construct
  misc_feature 1..22: note = chemically synthesized
  source 1..22: mol_type = other DNA
ccacttgcagaatccaattaag

SEQ ID NO: 44746 - DNA, 22 bp, synthetic construct
  misc_feature 1..22: note = chemically synthesized
  source 1..22: mol_type = other DNA
gcagaatccaattaagaagaga

SEQ ID NO: 44747 - DNA, 22 bp, synthetic construct
  misc_feature 1..22: note = chemically synthesized
  source 1..22: mol_type = other DNA
cagaatccaattaagaagagag

SEQ ID NO: 44748 - DNA, 22 bp, synthetic construct
  misc_feature 1..22: note = chemically synthesized
  source 1..22: mol_type = other DNA
agaagagagaagtctggtataa

SEQ ID NO: 44749 - DNA, 22 bp, synthetic construct
  misc_feature 1..22: note = chemically synthesized
  source 1..22: mol_type = other DNA
gtataaagaaagtgatttgctt

SEQ ID NO: 44750 - DNA, 22 bp, synthetic construct
  misc_feature 1..22: note = chemically synthesized
  source 1..22: mol_type = other DNA
gcttccaaagctagcttagggg

SEQ ID NO: 44751 - DNA, 22 bp, synthetic construct
  misc_feature 1..22: note = chemically synthesized
  source 1..22: mol_type = other DNA
cttccaaagctagcttagggga

SEQ ID NO: 44752 - DNA, 22 bp, synthetic construct
  misc_feature 1..22: note = chemically synthesized
  source 1..22: mol_type = other DNA
ccaaagctagcttaggggaaga

SEQ ID NO: 44753 - DNA, 22 bp, synthetic construct
  misc_feature 1..22: note = chemically synthesized
  source 1..22: mol_type = other DNA
caaagctagcttaggggaagaa

SEQ ID NO: 44754 - DNA, 22 bp, synthetic construct
  misc_feature 1..22: note = chemically synthesized
  source 1..22: mol_type = other DNA
gcttaggggaagaaatgcagca

SEQ ID NO: 44755 - DNA, 22 bp, synthetic construct
  misc_feature 1..22: note = chemically synthesized
  source 1..22: mol_type = other DNA
aggggaagaaatgcagcagtcc

SEQ ID NO: 44756 - DNA, 22 bp, synthetic construct
  misc_feature 1..22: note = chemically synthesized
  source 1..22: mol_type = other DNA
ggggaagaaatgcagcagtcct

SEQ ID NO: 44757 - DNA, 22 bp, synthetic construct
  misc_feature 1..22: note = chemically synthesized
  source 1..22: mol_type = other DNA
ccgtactacttcactttaggag

SEQ ID NO: 44758 - DNA, 22 bp, synthetic construct
  misc_feature 1..22: note = chemically synthesized
  source 1..22: mol_type = other DNA
cttcactttaggagcagaaagt

SEQ ID NO: 44759 - DNA, 22 bp, synthetic construct
  misc_feature 1..22: note = chemically synthesized
  source 1..22: mol_type = other DNA
cactttaggagcagaaagtggc

SEQ ID NO: 44760 - DNA, 22 bp, synthetic construct
  misc_feature 1..22: note = chemically synthesized
  source 1..22: mol_type = other DNA
actttaggagcagaaagtggca

SEQ ID NO: 44761 - DNA, 22 bp, synthetic construct
  misc_feature 1..22: note = chemically synthesized
  source 1..22: mol_type = other DNA
taggagcagaaagtggcacttt

SEQ ID NO: 44762 - DNA, 22 bp, synthetic construct
  misc_feature 1..22: note = chemically synthesized
  source 1..22: mol_type = other DNA
aggagcagaaagtggcactttt

SEQ ID NO: 44763 - DNA, 22 bp, synthetic construct
  misc_feature 1..22: note = chemically synthesized
  source 1..22: mol_type = other DNA
ggagcagaaagtggcactttta

SEQ ID NO: 44764 - DNA, 22 bp, synthetic construct
  misc_feature 1..22: note = chemically synthesized
  source 1..22: mol_type = other DNA
ttaaaaggcaacagaggaggcg

SEQ ID NO: 44765 - DNA, 22 bp, synthetic construct
  misc_feature 1..22: note = chemically synthesized
  source 1..22: mol_type = other DNA
taaaaggcaacagaggaggcga

SEQ ID NO: 44766 - DNA, 22 bp, synthetic construct
  misc_feature 1..22: note = chemically synthesized
  source 1..22: mol_type = other DNA
aaaaggcaacagaggaggcgag

SEQ ID NO: 44767 - DNA, 22 bp, synthetic construct
  misc_feature 1..22: note = chemically synthesized
  source 1..22: mol_type = other DNA
aaaggcaacagaggaggcgagc

SEQ ID NO: 44768 - DNA, 22 bp, synthetic construct
  misc_feature 1..22: note = chemically synthesized
  source 1..22: mol_type = other DNA
aggggtccatgctagcttgggc

SEQ ID NO: 44769 - DNA, 22 bp, synthetic construct
  misc_feature 1..22: note = chemically synthesized
  source 1..22: mol_type = other DNA
gcttgggcaccttatccaccag

SEQ ID NO: 44770 - DNA, 22 bp, synthetic construct
  misc_feature 1..22: note = chemically synthesized
  source 1..22: mol_type = other DNA
gggcaccttatccaccaggtag

SEQ ID NO: 44771 - DNA, 22 bp, synthetic construct
  misc_feature 1..22: note = chemically synthesized
  source 1..22: mol_type = other DNA
ggcaccttatccaccaggtagt

SEQ ID NO: 44772 - DNA, 22 bp, synthetic construct
  misc_feature 1..22: note = chemically synthesized
  source 1..22: mol_type = other DNA
atccaccaggtagttgagcagt

SEQ ID NO: 44773 - DNA, 22 bp, synthetic construct
  misc_feature 1..22: note = chemically synthesized
  source 1..22: mol_type = other DNA
tccaccaggtagttgagcagtt

SEQ ID NO: 44774 - DNA, 22 bp, synthetic construct
  misc_feature 1..22: note = chemically synthesized
  source 1..22: mol_type = other DNA
agcagttgcctgctggtgcctt

SEQ ID NO: 44775 - DNA, 22 bp, synthetic construct
  misc_feature 1..22: note = chemically synthesized
  source 1..22: mol_type = other DNA
cctgctggtgcctttgtgagca

SEQ ID NO: 44776 - DNA, 22 bp, synthetic construct
  misc_feature 1..22: note = chemically synthesized
  source 1..22: mol_type = other DNA
ctggtgcctttgtgagcagggt

SEQ ID NO: 44777 - DNA, 22 bp, synthetic construct
  misc_feature 1..22: note = chemically synthesized
  source 1..22: mol_type = other DNA
gtgcctttgtgagcagggtgtt

SEQ ID NO: 44778 - DNA, 22 bp, synthetic construct
  misc_feature 1..22: note = chemically synthesized
  source 1..22: mol_type = other DNA
tgtgagcagggtgttgtccctt

SEQ ID NO: 44779 - DNA, 22 bp, synthetic construct
  misc_feature 1..22: note = chemically synthesized
  source 1..22: mol_type = other DNA
gtgagcagggtgttgtcccttg

SEQ ID NO: 44780 - DNA, 22 bp, synthetic construct
  misc_feature 1..22: note = chemically synthesized
  source 1..22: mol_type = other DNA
tgagcagggtgttgtcccttga

SEQ ID NO: 44781 - DNA, 22 bp, synthetic construct
  misc_feature 1..22: note = chemically synthesized
  source 1..22: mol_type = other DNA
tcccttgaggcaaatctctgga

SEQ ID NO: 44782 - DNA, 22 bp, synthetic construct
  misc_feature 1..22: note = chemically synthesized
  source 1..22: mol_type = other DNA
gaggcaaatctctggagggtga

SEQ ID NO: 44783 - DNA, 22 bp, synthetic construct
  misc_feature 1..22: note = chemically synthesized
  source 1..22: mol_type = other DNA
aggcaaatctctggagggtgag

SEQ ID NO: 44784 - DNA, 22 bp, synthetic construct
  misc_feature 1..22: note = chemically synthesized
  source 1..22: mol_type = other DNA
tggagggtgagagttttgtagt

SEQ ID NO: 44785 - DNA, 22 bp, synthetic construct
  misc_feature 1..22: note = chemically synthesized
  source 1..22: mol_type = other DNA
gagggtgagagttttgtagtgg

SEQ ID NO: 44786 - DNA, 22 bp, synthetic construct
  misc_feature 1..22: note = chemically synthesized
  source 1..22: mol_type = other DNA
tgtagtgggcatgctttggttt

SEQ ID NO: 44787 - DNA, 22 bp, synthetic construct
  misc_feature 1..22: note = chemically synthesized
  source 1..22: mol_type = other DNA
gtagtgggcatgctttggttta

SEQ ID NO: 44788 - DNA, 22 bp, synthetic construct
  misc_feature 1..22: note = chemically synthesized
  source 1..22: mol_type = other DNA
tagtgggcatgctttggtttat

SEQ ID NO: 44789 - DNA, 22 bp, synthetic construct
  misc_feature 1..22: note = chemically synthesized
  source 1..22: mol_type = other DNA
tggtttataaatcacctgtgaa

SEQ ID NO: 44790 - DNA, 22 bp, synthetic construct
  misc_feature 1..22: note = chemically synthesized
  source 1..22: mol_type = other DNA
ggtttataaatcacctgtgaac

SEQ ID NO: 44791 - DNA, 22 bp, synthetic construct
  misc_feature 1..22: note = chemically synthesized
  source 1..22: mol_type = other DNA
gtttataaatcacctgtgaact

SEQ ID NO: 44792 - DNA, 22 bp, synthetic construct
  misc_feature 1..22: note = chemically synthesized
  source 1..22: mol_type = other DNA
ataaatcacctgtgaactcagg

SEQ ID NO: 44793 - DNA, 22 bp, synthetic construct
  misc_feature 1..22: note = chemically synthesized
  source 1..22: mol_type = other DNA
taaatcacctgtgaactcagga

SEQ ID NO: 44794 - DNA, 22 bp, synthetic construct
  misc_feature 1..22: note = chemically synthesized
  source 1..22: mol_type = other DNA
tgaactcaggagttccatcttg

SEQ ID NO: 44795 - DNA, 22 bp, synthetic construct
  misc_feature 1..22: note = chemically synthesized
  source 1..22: mol_type = other DNA
aggagttccatcttgaagcaca

SEQ ID NO: 44796 - DNA, 22 bp, synthetic construct
  misc_feature 1..22: note = chemically synthesized
  source 1..22: mol_type = other DNA
catcttgaagcacatacatagt

SEQ ID NO: 44797 - DNA, 22 bp, synthetic construct
  misc_feature 1..22: note = chemically synthesized
  source 1..22: mol_type = other DNA
gaagcacatacatagttagatg

SEQ ID NO: 44798 - DNA, 22 bp, synthetic construct
  misc_feature 1..22: note = chemically synthesized
  source 1..22: mol_type = other DNA
aagcacatacatagttagatga

SEQ ID NO: 44799 - DNA, 22 bp, synthetic construct
  misc_feature 1..22: note = chemically synthesized
  source 1..22: mol_type = other DNA
gatgaacttgccctgcagggag

SEQ ID NO: 44800 - DNA, 22 bp, synthetic construct
  misc_feature 1..22: note = chemically synthesized
  source 1..22: mol_type = other DNA
gccctgcagggagagtctgatg

SEQ ID NO: 44801 - DNA, 22 bp, synthetic construct
  misc_feature 1..22: note = chemically synthesized
  source 1..22: mol_type = other DNA
ccctgcagggagagtctgatga

SEQ ID NO: 44802 - DNA, 22 bp, synthetic construct
  misc_feature 1..22: note = chemically synthesized
  source 1..22: mol_type = other DNA
cagggagagtctgatgaaaggg

SEQ ID NO: 44803 - DNA, 22 bp, synthetic construct
  misc_feature 1..22: note = chemically synthesized
  source 1..22: mol_type = other DNA
atgaaagggaggtagatgcttg

SEQ ID NO: 44804 - DNA, 22 bp, synthetic construct
  misc_feature 1..22: note = chemically synthesized
  source 1..22: mol_type = other DNA
gcaatttaatctataaattacc

SEQ ID NO: 44805 - DNA, 22 bp, synthetic construct
  misc_feature 1..22: note = chemically synthesized
  source 1..22: mol_type = other DNA
caatttaatctataaattacca

SEQ ID NO: 44806 - DNA, 22 bp, synthetic construct
  misc_feature 1..22: note = chemically synthesized
  source 1..22: mol_type = other DNA
aatctataaattaccagataaa

SEQ ID NO: 44807 - DNA, 22 bp, synthetic construct
  misc_feature 1..22: note = chemically synthesized
  source 1..22: mol_type = other DNA
atctataaattaccagataaaa

SEQ ID NO: 44808 - DNA, 22 bp, synthetic construct
  misc_feature 1..22: note = chemically synthesized
  source 1..22: mol_type = other DNA
taaattaccagataaaatttta

SEQ ID NO: 44809 - DNA, 22 bp, synthetic construct
  misc_feature 1..22: note = chemically synthesized
  source 1..22: mol_type = other DNA
ccagataaaattttacaagttg

SEQ ID NO: 44810 - DNA, 22 bp, synthetic construct
  misc_feature 1..22: note = chemically synthesized
  source 1..22: mol_type = other DNA
tacaagttgactttaaagtcaa

SEQ ID NO: 44811 - DNA, 22 bp, synthetic construct
  misc_feature 1..22: note = chemically synthesized
  source 1..22: mol_type = other DNA
acaagttgactttaaagtcaaa

SEQ ID NO: 44812 - DNA, 22 bp, synthetic construct
  misc_feature 1..22: note = chemically synthesized
  source 1..22: mol_type = other DNA
caagttgactttaaagtcaaac

SEQ ID NO: 44813 - DNA, 22 bp, synthetic construct
  misc_feature 1..22: note = chemically synthesized
  source 1..22: mol_type = other DNA
actttaaagtcaaacacatttg

SEQ ID NO: 44814 - DNA, 22 bp, synthetic construct
  misc_feature 1..22: note = chemically synthesized
  source 1..22: mol_type = other DNA
taaagtcaaacacatttgaatt

SEQ ID NO: 44815 - DNA, 22 bp, synthetic construct
  misc_feature 1..22: note = chemically synthesized
  source 1..22: mol_type = other DNA
aaagtcaaacacatttgaattt

SEQ ID NO: 44816 - DNA, 22 bp, synthetic construct
  misc_feature 1..22: note = chemically synthesized
  source 1..22: mol_type = other DNA
aagtcaaacacatttgaattta

SEQ ID NO: 44817 - DNA, 22 bp, synthetic construct
  misc_feature 1..22: note = chemically synthesized
  source 1..22: mol_type = other DNA
gaatttagtggaagccattcaa

SEQ ID NO: 44818 - DNA, 22 bp, synthetic construct
  misc_feature 1..22: note = chemically synthesized
  source 1..22: mol_type = other DNA
aatttagtggaagccattcaag

SEQ ID NO: 44819 - DNA, 22 bp, synthetic construct
  misc_feature 1..22: note = chemically synthesized
  source 1..22: mol_type = other DNA
agtggaagccattcaagaaaat

SEQ ID NO: 44820 - DNA, 22 bp, synthetic construct
  misc_feature 1..22: note = chemically synthesized
  source 1..22: mol_type = other DNA
gtggaagccattcaagaaaata

SEQ ID NO: 44821 - DNA, 22 bp, synthetic construct
  misc_feature 1..22: note = chemically synthesized
  source 1..22: mol_type = other DNA
aagaaaatatcaaagaaaatac

SEQ ID NO: 44822 - DNA, 22 bp, synthetic construct
  misc_feature 1..22: note = chemically synthesized
  source 1..22: mol_type = other DNA
agcaaagagttttttggggaaa

SEQ ID NO: 44823 - DNA, 22 bp, synthetic construct
  misc_feature 1..22: note = chemically synthesized
  source 1..22: mol_type = other DNA
tttggggaaattggtgtctatg

SEQ ID NO: 44824 - DNA, 22 bp, synthetic construct
  misc_feature 1..22: note = chemically synthesized
  source 1..22: mol_type = other DNA
ttggggaaattggtgtctatgt

SEQ ID NO: 44825 - DNA, 22 bp, synthetic construct
  misc_feature 1..22: note = chemically synthesized
  source 1..22: mol_type = other DNA
tggggaaattggtgtctatgtc

SEQ ID NO: 44826 - DNA, 22 bp, synthetic construct
  misc_feature 1..22: note = chemically synthesized
  source 1..22: mol_type = other DNA
ggggaaattggtgtctatgtct

SEQ ID NO: 44827 - DNA, 22 bp, synthetic construct
  misc_feature 1..22: note = chemically synthesized
  source 1..22: mol_type = other DNA
gggaaattggtgtctatgtctg

SEQ ID NO: 44828 - DNA, 22 bp, synthetic construct
  misc_feature 1..22: note = chemically synthesized
  source 1..22: mol_type = other DNA
gtgtctatgtctgtgtgtgtag

SEQ ID NO: 44829 - DNA, 22 bp, synthetic construct
  misc_feature 1..22: note = chemically synthesized
  source 1..22: mol_type = other DNA
tgtctgtgtgtgtagggagtgc

SEQ ID NO: 44830 - DNA, 22 bp, synthetic construct
  misc_feature 1..22: note = chemically synthesized
  source 1..22: mol_type = other DNA
tgtgtgtagggagtgcagggga

SEQ ID NO: 44831 - DNA, 22 bp, synthetic construct
  misc_feature 1..22: note = chemically synthesized
  source 1..22: mol_type = other DNA
tatttcagcccatggaaactag

SEQ ID NO: 44832 - DNA, 22 bp, synthetic construct
  misc_feature 1..22: note = chemically synthesized
  source 1..22: mol_type = other DNA
tttcagcccatggaaactagga

SEQ ID NO: 44833 - DNA, 22 bp, synthetic construct
  misc_feature 1..22: note = chemically synthesized
  source 1..22: mol_type = other DNA
cagcccatggaaactaggatgt

SEQ ID NO: 44834 - DNA, 22 bp, synthetic construct
  misc_feature 1..22: note = chemically synthesized
  source 1..22: mol_type = other DNA
agcccatggaaactaggatgta

SEQ ID NO: 44835 - DNA, 22 bp, synthetic construct
  misc_feature 1..22: note = chemically synthesized
  source 1..22: mol_type = other DNA
ggatgtagatcactgtgaactt

SEQ ID NO: 44836 - DNA, 22 bp, synthetic construct
  misc_feature 1..22: note = chemically synthesized
  source 1..22: mol_type = other DNA
tgaacttattcagcaggctaca

SEQ ID NO: 44837 - DNA, 22 bp, synthetic construct
  misc_feature 1..22: note = chemically synthesized
  source 1..22: mol_type = other DNA
attcagcaggctacacccaaag

SEQ ID NO: 44838 - DNA, 22 bp, synthetic construct
  misc_feature 1..22: note = chemically synthesized
  source 1..22: mol_type = other DNA
ttcagcaggctacacccaaagg

SEQ ID NO: 44839 - DNA, 22 bp, synthetic construct
  misc_feature 1..22: note = chemically synthesized
  source 1..22: mol_type = other DNA
agcaggctacacccaaaggcta

SEQ ID NO: 44840 - DNA, 22 bp, synthetic construct
  misc_feature 1..22: note = chemically synthesized
  source 1..22: mol_type = other DNA
cacccaaaggctagaacaaact

SEQ ID NO: 44841 - DNA, 22 bp, synthetic construct
  misc_feature 1..22: note = chemically synthesized
  source 1..22: mol_type = other DNA
gaacaaacttctctgccacagg

SEQ ID NO: 44842 - DNA, 22 bp, synthetic construct
  misc_feature 1..22: note = chemically synthesized
  source 1..22: mol_type = other DNA
ctctgccacaggattaacatat

SEQ ID NO: 44843 - DNA, 22 bp, synthetic construct
  misc_feature 1..22: note = chemically synthesized
  source 1..22: mol_type = other DNA
tctgccacaggattaacatatg

SEQ ID NO: 44844 - DNA, 22 bp, synthetic construct
  misc_feature 1..22: note = chemically synthesized
  source 1..22: mol_type = other DNA
tgccacaggattaacatatgtt

SEQ ID NO: 44845 - DNA, 22 bp, synthetic construct
  misc_feature 1..22: note = chemically synthesized
  source 1..22: mol_type = other DNA
ccacaggattaacatatgtttt

SEQ ID NO: 44846 - DNA, 22 bp, synthetic construct
  misc_feature 1..22: note = chemically synthesized
  source 1..22: mol_type = other DNA
acatatgttttaatcgacctgg

SEQ ID NO: 44847 - DNA, 22 bp, synthetic construct
  misc_feature 1..22: note = chemically synthesized
  source 1..22: mol_type = other DNA
taatcgacctggggggcacatt

SEQ ID NO: 44848 - DNA, 22 bp, synthetic construct
  misc_feature 1..22: note = chemically synthesized
  source 1..22: mol_type = other DNA
aatcgacctggggggcacattc

SEQ ID NO: 44849 - DNA, 22 bp, synthetic construct
  misc_feature 1..22: note = chemically synthesized
  source 1..22: mol_type = other DNA
atcgacctggggggcacattct

SEQ ID NO: 44850 - DNA, 22 bp, synthetic construct
  misc_feature 1..22: note = chemically synthesized
  source 1..22: mol_type = other DNA
gggggcacattctctgataagc

SEQ ID NO: 44851 - DNA, 22 bp, synthetic construct
  misc_feature 1..22: note = chemically synthesized
  source 1..22: mol_type = other DNA
tctgataagctcttttggaaag

SEQ ID NO: 44852 - DNA, 22 bp, synthetic construct
  misc_feature 1..22: note = chemically synthesized
  source 1..22: mol_type = other DNA
tgataagctcttttggaaagcc

SEQ ID NO: 44853 - DNA, 22 bp, synthetic construct
  misc_feature 1..22: note = chemically synthesized
  source 1..22: mol_type = other DNA
ataagctcttttggaaagccag

SEQ ID NO: 44854 - DNA, 22 bp, synthetic construct
  misc_feature 1..22: note = chemically synthesized
  source 1..22: mol_type = other DNA
ttttggaaagccaggctttctg

SEQ ID NO: 44855 - DNA, 22 bp, synthetic construct
  misc_feature 1..22: note = chemically synthesized
  source 1..22: mol_type = other DNA
ttggaaagccaggctttctgtg

SEQ ID NO: 44856 - DNA, 22 bp, synthetic construct
  misc_feature 1..22: note = chemically synthesized
  source 1..22: mol_type = other DNA
tggaaagccaggctttctgtgg

SEQ ID NO: 44857 - DNA, 22 bp, synthetic construct
  misc_feature 1..22: note = chemically synthesized
  source 1..22: mol_type = other DNA
ggaaagccaggctttctgtgga

SEQ ID NO: 44858 - DNA, 22 bp, synthetic construct
  misc_feature 1..22: note = chemically synthesized
  source 1..22: mol_type = other DNA
gaaagccaggctttctgtggac

SEQ ID NO: 44859 - DNA, 22 bp, synthetic construct
  misc_feature 1..22: note = chemically synthesized
  source 1..22: mol_type = other DNA
tctgtggacgtgttatctttcc

SEQ ID NO: 44860 - DNA, 22 bp, synthetic construct
  misc_feature 1..22: note = chemically synthesized
  source 1..22: mol_type = other DNA
ctgtggacgtgttatctttcca

SEQ ID NO: 44861 - DNA, 22 bp, synthetic construct
  misc_feature 1..22: note = chemically synthesized
  source 1..22: mol_type = other DNA
tgtggacgtgttatctttccaa

SEQ ID NO: 44862 - DNA, 22 bp, synthetic construct
  misc_feature 1..22: note = chemically synthesized
  source 1..22: mol_type = other DNA
tggacgtgttatctttccaatg

SEQ ID NO: 44863 - DNA, 22 bp, synthetic construct
  misc_feature 1..22: note = chemically synthesized
  source 1..22: mol_type = other DNA
tctttccaatgtgtgctggaat

SEQ ID NO: 44864 - DNA, 22 bp, synthetic construct
  misc_feature 1..22: note = chemically synthesized
  source 1..22: mol_type = other DNA
tccaatgtgtgctggaatgccc

SEQ ID NO: 44865 - DNA, 22 bp, synthetic construct
  misc_feature 1..22: note = chemically synthesized
  source 1..22: mol_type = other DNA
ccaatgtgtgctggaatgcccg

SEQ ID NO: 44866 - DNA, 22 bp, synthetic construct
  misc_feature 1..22: note = chemically synthesized
  source 1..22: mol_type = other DNA
caatgtgtgctggaatgcccgg

SEQ ID NO: 44867 - DNA, 22 bp, synthetic construct
  misc_feature 1..22: note = chemically synthesized
  source 1..22: mol_type = other DNA
gaatgcccggggagaggaaaaa

SEQ ID NO: 44868 - DNA, 22 bp, synthetic construct
  misc_feature 1..22: note = chemically synthesized
  source 1..22: mol_type = other DNA
cttttacagccatgctcagtga

SEQ ID NO: 44869 - DNA, 22 bp, synthetic construct
  misc_feature 1..22: note = chemically synthesized
  source 1..22: mol_type = other DNA
ttttacagccatgctcagtgag

SEQ ID NO: 44870 - DNA, 22 bp, synthetic construct
  misc_feature 1..22: note = chemically synthesized
  source 1..22: mol_type = other DNA
ttacagccatgctcagtgagaa

SEQ ID NO: 44871 - DNA, 22 bp, synthetic construct
  misc_feature 1..22: note = chemically synthesized
  source 1..22: mol_type = other DNA
tacagccatgctcagtgagaag

SEQ ID NO: 44872 - DNA, 22 bp, synthetic construct
  misc_feature 1..22: note = chemically synthesized
  source 1..22: mol_type = other DNA
acagccatgctcagtgagaagc

SEQ ID NO: 44873 - DNA, 22 bp, synthetic construct
  misc_feature 1..22: note = chemically synthesized
  source 1..22: mol_type = other DNA
cagccatgctcagtgagaagcg

SEQ ID NO: 44874 - DNA, 22 bp, synthetic construct
  misc_feature 1..22: note = chemically synthesized
  source 1..22: mol_type = other DNA
agtgagaagcggagaaacatct

SEQ ID NO: 44875 - DNA, 22 bp, synthetic construct
  misc_feature 1..22: note = chemically synthesized
  source 1..22: mol_type = other DNA
ctattcacaaattgctaagtct

SEQ ID NO: 44876 - DNA, 22 bp, synthetic construct
  misc_feature 1..22: note = chemically synthesized
  source 1..22: mol_type = other DNA
tattcacaaattgctaagtctt

SEQ ID NO: 44877 - DNA, 22 bp, synthetic construct
  misc_feature 1..22: note = chemically synthesized
  source 1..22: mol_type = other DNA
ttcacaaattgctaagtctttt

SEQ ID NO: 44878 - DNA, 22 bp, synthetic construct
  misc_feature 1..22: note = chemically synthesized
  source 1..22: mol_type = other DNA
acaaattgctaagtcttttaca

SEQ ID NO: 44879 - DNA, 22 bp, synthetic construct
  misc_feature 1..22: note = chemically synthesized
  source 1..22: mol_type = other DNA
ctaagtcttttacacatgcaaa

SEQ ID NO: 44880 - DNA, 22 bp, synthetic construct
  misc_feature 1..22: note = chemically synthesized
  source 1..22: mol_type = other DNA
agtcttttacacatgcaaatat

SEQ ID NO: 44881 - DNA, 22 bp, synthetic construct
  misc_feature 1..22: note = chemically synthesized
  source 1..22: mol_type = other DNA
ttacacatgcaaatatgcatac

SEQ ID NO: 44882 - DNA, 22 bp, synthetic construct
  misc_feature 1..22: note = chemically synthesized
  source 1..22: mol_type = other DNA
tacacatgcaaatatgcataca

SEQ ID NO: 44883 - DNA, 22 bp, synthetic construct
  misc_feature 1..22: note = chemically synthesized
  source 1..22: mol_type = other DNA
acacatgcaaatatgcatacac

SEQ ID NO: 44884 - DNA, 22 bp, synthetic construct
  misc_feature 1..22: note = chemically synthesized
  source 1..22: mol_type = other DNA
cacatgcaaatatgcatacaca

SEQ ID NO: 44885 - DNA, 22 bp, synthetic construct
  misc_feature 1..22: note = chemically synthesized
  source 1..22: mol_type = other DNA
acacaccacagtgaggaagaaa

SEQ ID NO: 44886 - DNA, 22 bp, synthetic construct
  misc_feature 1..22: note = chemically synthesized
  source 1..22: mol_type = other DNA
tcacaccattaataaaatacat

SEQ ID NO: 44887 - DNA, 22 bp, synthetic construct
  misc_feature 1..22: note = chemically synthesized
  source 1..22: mol_type = other DNA
acaccattaataaaatacattt

SEQ ID NO: 44888 - DNA, 22 bp, synthetic construct
  misc_feature 1..22: note = chemically synthesized
  source 1..22: mol_type = other DNA
ataaaatacatttacttcagta

SEQ ID NO: 44889 - DNA, 22 bp, synthetic construct
  misc_feature 1..22: note = chemically synthesized
  source 1..22: mol_type = other DNA
acttcagtagcaatatacatct

SEQ ID NO: 44890 - DNA, 22 bp, synthetic construct
  misc_feature 1..22: note = chemically synthesized
  source 1..22: mol_type = other DNA
cttcagtagcaatatacatcta

SEQ ID NO: 44891 - DNA, 22 bp, synthetic construct
  misc_feature 1..22: note = chemically synthesized
  source 1..22: mol_type = other DNA
cagtagcaatatacatctacat

SEQ ID NO: 44892 - DNA, 22 bp, synthetic construct
  misc_feature 1..22: note = chemically synthesized
  source 1..22: mol_type = other DNA
agtagcaatatacatctacatt

SEQ ID NO: 44893 - DNA, 22 bp, synthetic construct
  misc_feature 1..22: note = chemically synthesized
  source 1..22: mol_type = other DNA
cattttgcctataatataaaag

SEQ ID NO: 44894 - DNA, 22 bp, synthetic construct
  misc_feature 1..22: note = chemically synthesized
  source 1..22: mol_type = other DNA
tgcctataatataaaagtattt

SEQ ID NO: 44895 - DNA, 22 bp, synthetic construct
  misc_feature 1..22: note = chemically synthesized
  source 1..22: mol_type = other DNA
gcctataatataaaagtatttt

SEQ ID NO: 44896 - DNA, 22 bp, synthetic construct
  misc_feature 1..22: note = chemically synthesized
  source 1..22: mol_type = other DNA
cctataatataaaagtattttt

SEQ ID NO: 44897 - DNA, 22 bp, synthetic construct
  misc_feature 1..22: note = chemically synthesized
  source 1..22: mol_type = other DNA
taatataaaagtatttttccta

SEQ ID NO: 44898 - DNA, 22 bp, synthetic construct
  misc_feature 1..22: note = chemically synthesized
  source 1..22: mol_type = other DNA
ttcctattaaaagatttgttta

SEQ ID NO: 44899 - DNA, 22 bp, synthetic construct
  misc_feature 1..22: note = chemically synthesized
  source 1..22: mol_type = other DNA
tcctattaaaagatttgtttaa

SEQ ID NO: 44900 - DNA, 22 bp, synthetic construct
  misc_feature 1..22: note = chemically synthesized
  source 1..22: mol_type = other DNA
cctattaaaagatttgtttaat

SEQ ID NO: 44901 - DNA, 22 bp, synthetic construct
  misc_feature 1..22: note = chemically synthesized
  source 1..22: mol_type = other DNA
ctattaaaagatttgtttaatg

SEQ ID NO: 44902 - DNA, 22 bp, synthetic construct
  misc_feature 1..22: note = chemically synthesized
  source 1..22: mol_type = other DNA
ttaaaagatttgtttaatgttt

SEQ ID NO: 44903 - DNA, 22 bp, synthetic construct
  misc_feature 1..22: note = chemically synthesized
  source 1..22: mol_type = other DNA
aaagatttgtttaatgtttctt

SEQ ID NO: 44904 - DNA, 22 bp, synthetic construct
  misc_feature 1..22: note = chemically synthesized
  source 1..22: mol_type = other DNA
gtttaatgtttcttcaccaaca

SEQ ID NO: 44905 - DNA, 22 bp, synthetic construct
  misc_feature 1..22: note = chemically synthesized
  source 1..22: mol_type = other DNA
tttaatgtttcttcaccaacaa

SEQ ID NO: 44906 - DNA, 22 bp, synthetic construct
  misc_feature 1..22: note = chemically synthesized
  source 1..22: mol_type = other DNA
aatgtttcttcaccaacaaata

SEQ ID NO: 44907 - DNA, 22 bp, synthetic construct
  misc_feature 1..22: note = chemically synthesized
  source 1..22: mol_type = other DNA
atgtttcttcaccaacaaataa

SEQ ID NO: 44908 - DNA, 22 bp, synthetic construct
  misc_feature 1..22: note = chemically synthesized
  source 1..22: mol_type = other DNA
cttcaccaacaaataaacccta

SEQ ID NO: 44909 - DNA, 22 bp, synthetic construct
  misc_feature 1..22: note = chemically synthesized
  source 1..22: mol_type = other DNA
ttcaccaacaaataaaccctat

SEQ ID NO: 44910 - DNA, 22 bp, synthetic construct
  misc_feature 1..22: note = chemically synthesized
  source 1..22: mol_type = other DNA
caccaacaaataaaccctatta

SEQ ID NO: 44911 - DNA, 22 bp, synthetic construct
  misc_feature 1..22: note = chemically synthesized
  source 1..22: mol_type = other DNA
accaacaaataaaccctattaa

SEQ ID NO: 44912 - DNA, 22 bp, synthetic construct
  misc_feature 1..22: note = chemically synthesized
  source 1..22: mol_type = other DNA
ttaaatccccattgccatatga

SEQ ID NO: 44913 - DNA, 22 bp, synthetic construct
  misc_feature 1..22: note = chemically synthesized
  source 1..22: mol_type = other DNA
aatccccattgccatatgagcc

SEQ ID NO: 44914 - DNA, 22 bp, synthetic construct
  misc_feature 1..22: note = chemically synthesized
  source 1..22: mol_type = other DNA
ccatatgagccctggaggtgaa

SEQ ID NO: 44915 - DNA, 22 bp, synthetic construct
  misc_feature 1..22: note = chemically synthesized
  source 1..22: mol_type = other DNA
gaggtgaatcagagaaacaaaa

SEQ ID NO: 44916 - DNA, 22 bp, synthetic construct
  misc_feature 1..22: note = chemically synthesized
  source 1..22: mol_type = other DNA
tggaaaaatcatcaggttaaaa

SEQ ID NO: 44917 - DNA, 22 bp, synthetic construct
  misc_feature 1..22: note = chemically synthesized
  source 1..22: mol_type = other DNA
aaaaaagaaaaattgattctgt

SEQ ID NO: 44918 - DNA, 22 bp, synthetic construct
  misc_feature 1..22: note = chemically synthesized
  source 1..22: mol_type = other DNA
attctgttttgggatatttcct

SEQ ID NO: 44919 - DNA, 22 bp, synthetic construct
  misc_feature 1..22: note = chemically synthesized
  source 1..22: mol_type = other DNA
tgttttgggatatttcctagca

SEQ ID NO: 44920 - DNA, 22 bp, synthetic construct
  misc_feature 1..22: note = chemically synthesized
  source 1..22: mol_type = other DNA
ttttgggatatttcctagcaac

SEQ ID NO: 44921 - DNA, 22 bp, synthetic construct
  misc_feature 1..22: note = chemically synthesized
  source 1..22: mol_type = other DNA
tgggatatttcctagcaacatg

SEQ ID NO: 44922 - DNA, 22 bp, synthetic construct
  misc_feature 1..22: note = chemically synthesized
  source 1..22: mol_type = other DNA
gggatatttcctagcaacatga

SEQ ID NO: 44923 - DNA, 22 bp, synthetic construct
  misc_feature 1..22: note = chemically synthesized
  source 1..22: mol_type = other DNA
ggatatttcctagcaacatgag

SEQ ID NO: 44924 - DNA, 22 bp, synthetic construct
  misc_feature 1..22: note = chemically synthesized
  source 1..22: mol_type = other DNA
cctagcaacatgagctggggag

SEQ ID NO: 44925 - DNA, 22 bp, synthetic construct
  misc_feature 1..22: note = chemically synthesized
  source 1..22: mol_type = other DNA
ctagcaacatgagctggggagg

SEQ ID NO: 44926 - DNA, 22 bp, synthetic construct
  misc_feature 1..22: note = chemically synthesized
  source 1..22: mol_type = other DNA
gcaacatgagctggggagggga

SEQ ID NO: 44927 - DNA, 22 bp, synthetic construct
  misc_feature 1..22: note = chemically synthesized
  source 1..22: mol_type = other DNA
gggaggggatctcagcagtgat

SEQ ID NO: 44928 - DNA, 22 bp, synthetic construct
  misc_feature 1..22: note = chemically synthesized
  source 1..22: mol_type = other DNA
agcagtgatgctctatgaagca

SEQ ID NO: 44929 - DNA, 22 bp, synthetic construct
  misc_feature 1..22: note = chemically synthesized
  source 1..22: mol_type = other DNA
tatgaagcataataaaatgaca

SEQ ID NO: 44930 - DNA, 22 bp, synthetic construct
  misc_feature 1..22: note = chemically synthesized
  source 1..22: mol_type = other DNA
tgaagcataataaaatgacaca

SEQ ID NO: 44931 - DNA, 22 bp, synthetic construct
  misc_feature 1..22: note = chemically synthesized
  source 1..22: mol_type = other DNA
caggtaacttagttaaaggggg

SEQ ID NO: 44932 - DNA, 22 bp, synthetic construct
  misc_feature 1..22: note = chemically synthesized
  source 1..22: mol_type = other DNA
agttaaagggggaaataaatgg

SEQ ID NO: 44933 - DNA, 22 bp, synthetic construct
  misc_feature 1..22: note = chemically synthesized
  source 1..22: mol_type = other DNA
gttaaagggggaaataaatgga

SEQ ID NO: 44934 - DNA, 22 bp, synthetic construct
  misc_feature 1..22: note = chemically synthesized
  source 1..22: mol_type = other DNA
aagggggaaataaatggaagtt

SEQ ID NO: 44935 - DNA, 22 bp, synthetic construct
  misc_feature 1..22: note = chemically synthesized
  source 1..22: mol_type = other DNA
cctctttttgaatatcaattgt

SEQ ID NO: 44936 - DNA, 22 bp, synthetic construct
  misc_feature 1..22: note = chemically synthesized
  source 1..22: mol_type = other DNA
ctctttttgaatatcaattgta

SEQ ID NO: 44937 - DNA, 22 bp, synthetic construct
  misc_feature 1..22: note = chemically synthesized
  source 1..22: mol_type = other DNA
tttttgaatatcaattgtagcc

SEQ ID NO: 44938 - DNA, 22 bp, synthetic construct
  misc_feature 1..22: note = chemically synthesized
  source 1..22: mol_type = other DNA
tttgaatatcaattgtagcctg

SEQ ID NO: 44939 - DNA, 22 bp, synthetic construct
  misc_feature 1..22: note = chemically synthesized
  source 1..22: mol_type = other DNA
ttgaatatcaattgtagcctgc

SEQ ID NO: 44940 - DNA, 22 bp, synthetic construct
  misc_feature 1..22: note = chemically synthesized
  source 1..22: mol_type = other DNA
tgaatatcaattgtagcctgct

SEQ ID NO: 44941 - DNA, 22 bp, synthetic construct
  misc_feature 1..22: note = chemically synthesized
  source 1..22: mol_type = other DNA
gaatatcaattgtagcctgctc

SEQ ID NO: 44942 - DNA, 22 bp, synthetic construct
  misc_feature 1..22: note = chemically synthesized
  source 1..22: mol_type = other DNA
aatatcaattgtagcctgctct

SEQ ID NO: 44943 - DNA, 22 bp, synthetic construct
  misc_feature 1..22: note = chemically synthesized
  source 1..22: mol_type = other DNA
tagcctgctctgctacatttca

SEQ ID NO: 44944 - DNA, 22 bp, synthetic construct
  misc_feature 1..22: note = chemically synthesized
  source 1..22: mol_type = other DNA
ctctgctacatttcaaaaacac

SEQ ID NO: 44945 - DNA, 22 bp, synthetic construct
  misc_feature 1..22: note = chemically synthesized
  source 1..22: mol_type = other DNA
tgctacatttcaaaaacactct

SEQ ID NO: 44946 - DNA, 22 bp, synthetic construct
  misc_feature 1..22: note = chemically synthesized
  source 1..22: mol_type = other DNA
ctacatttcaaaaacactcttc

SEQ ID NO: 44947 - DNA, 22 bp, synthetic construct
  misc_feature 1..22: note = chemically synthesized
  source 1..22: mol_type = other DNA
catttcaaaaacactcttcaaa

SEQ ID NO: 44948 - DNA, 22 bp, synthetic construct
  misc_feature 1..22: note = chemically synthesized
  source 1..22: mol_type = other DNA
caaaaacactcttcaaaatgtt

SEQ ID NO: 44949 - DNA, 22 bp, synthetic construct
  misc_feature 1..22: note = chemically synthesized
  source 1..22: mol_type = other DNA
aaaaacactcttcaaaatgttt

SEQ ID NO: 44950 - DNA, 22 bp, synthetic construct
  misc_feature 1..22: note = chemically synthesized
  source 1..22: mol_type = other DNA
ttcaaaatgtttaactgaactc

SEQ ID NO: 44951 - DNA, 22 bp, synthetic construct
  misc_feature 1..22: note = chemically synthesized
  source 1..22: mol_type = other DNA
caaaatgtttaactgaactcac

SEQ ID NO: 44952 - DNA, 22 bp, synthetic construct
  misc_feature 1..22: note = chemically synthesized
  source 1..22: mol_type = other DNA
aaaatgtttaactgaactcact

SEQ ID NO: 44953 - DNA, 22 bp, synthetic construct
  misc_feature 1..22: note = chemically synthesized
  source 1..22: mol_type = other DNA
aactgaactcactgtaggaagc

SEQ ID NO: 44954 - DNA, 22 bp, synthetic construct
  misc_feature 1..22: note = chemically synthesized
  source 1..22: mol_type = other DNA
actgaactcactgtaggaagca

SEQ ID NO: 44955 - DNA, 22 bp, synthetic construct
  misc_feature 1..22: note = chemically synthesized
  source 1..22: mol_type = other DNA
aactcactgtaggaagcacctt

SEQ ID NO: 44956 - DNA, 22 bp, synthetic construct
  misc_feature 1..22: note = chemically synthesized
  source 1..22: mol_type = other DNA
actgtaggaagcaccttattaa

SEQ ID NO: 44957 - DNA, 22 bp, synthetic construct
  misc_feature 1..22: note = chemically synthesized
  source 1..22: mol_type = other DNA
taggaagcaccttattaattta

SEQ ID NO: 44958 - DNA, 22 bp, synthetic construct
  misc_feature 1..22: note = chemically synthesized
  source 1..22: mol_type = other DNA
attaatttattgtgtgttttga

SEQ ID NO: 44959 - DNA, 22 bp, synthetic construct
  misc_feature 1..22: note = chemically synthesized
  source 1..22: mol_type = other DNA
ttaatttattgtgtgttttgaa

SEQ ID NO: 44960 - DNA, 22 bp, synthetic construct
  misc_feature 1..22: note = chemically synthesized
  source 1..22: mol_type = other DNA
atttattgtgtgttttgaagtc

SEQ ID NO: 44961 - DNA, 22 bp, synthetic construct
  misc_feature 1..22: note = chemically synthesized
  source 1..22: mol_type = other DNA
attgtgtgttttgaagtcacac

SEQ ID NO: 44962 - DNA, 22 bp, synthetic construct
  misc_feature 1..22: note = chemically synthesized
  source 1..22: mol_type = other DNA
ttgtgtgttttgaagtcacact

SEQ ID NO: 44963 - DNA, 22 bp, synthetic construct
  misc_feature 1..22: note = chemically synthesized
  source 1..22: mol_type = other DNA
tgtgttttgaagtcacactgtg

SEQ ID NO: 44964 - DNA, 22 bp, synthetic construct
  misc_feature 1..22: note = chemically synthesized
  source 1..22: mol_type = other DNA
tgaagtcacactgtgagctata

SEQ ID NO: 44965 - DNA, 22 bp, synthetic construct
  misc_feature 1..22: note = chemically synthesized
  source 1..22: mol_type = other DNA
gaagtcacactgtgagctatag

SEQ ID NO: 44966 - DNA, 22 bp, synthetic construct
  misc_feature 1..22: note = chemically synthesized
  source 1..22: mol_type = other DNA
aagtcacactgtgagctataga

SEQ ID NO: 44967 - DNA, 22 bp, synthetic construct
  misc_feature 1..22: note = chemically synthesized
  source 1..22: mol_type = other DNA
tgagctatagaatttacccaag

SEQ ID NO: 44968 - DNA, 22 bp, synthetic construct
  misc_feature 1..22: note = chemically synthesized
  source 1..22: mol_type = other DNA
tagaatttacccaagcacaact

SEQ ID NO: 44969 - DNA, 22 bp, synthetic construct
  misc_feature 1..22: note = chemically synthesized
  source 1..22: mol_type = other DNA
acccaagcacaactcttcctgg

SEQ ID NO: 44970 - DNA, 22 bp, synthetic construct
  misc_feature 1..22: note = chemically synthesized
  source 1..22: mol_type = other DNA
cccaagcacaactcttcctgga

SEQ ID NO: 44971 - DNA, 22 bp, synthetic construct
  misc_feature 1..22: note = chemically synthesized
  source 1..22: mol_type = other DNA
ttcctggaaaagagagttcaaa

SEQ ID NO: 44972 - DNA, 22 bp, synthetic construct
  misc_feature 1..22: note = chemically synthesized
  source 1..22: mol_type = other DNA
cctggaaaagagagttcaaatg

SEQ ID NO: 44973 - DNA, 22 bp, synthetic construct
  misc_feature 1..22: note = chemically synthesized
  source 1..22: mol_type = other DNA
ctggaaaagagagttcaaatga

SEQ ID NO: 44974 - DNA, 22 bp, synthetic construct
  misc_feature 1..22: note = chemically synthesized
  source 1..22: mol_type = other DNA
gaaaagagagttcaaatgagaa

SEQ ID NO: 44975 - DNA, 22 bp, synthetic construct
  misc_feature 1..22: note = chemically synthesized
  source 1..22: mol_type = other DNA
aaatgagaaacagtgcggggtg

SEQ ID NO: 44976 - DNA, 22 bp, synthetic construct
  misc_feature 1..22: note = chemically synthesized
  source 1..22: mol_type = other DNA
aaatatctatttctcaatgata

SEQ ID NO: 44977 - DNA, 22 bp, synthetic construct
  misc_feature 1..22: note = chemically synthesized
  source 1..22: mol_type = other DNA
tttctcaatgatattttgatat

SEQ ID NO: 44978 - DNA, 22 bp, synthetic construct
  misc_feature 1..22: note = chemically synthesized
  source 1..22: mol_type = other DNA
ctcaatgatattttgatatatc

SEQ ID NO: 44979 - DNA, 22 bp, synthetic construct
  misc_feature 1..22: note = chemically synthesized
  source 1..22: mol_type = other DNA
tcaatgatattttgatatatct

SEQ ID NO: 44980 - DNA, 22 bp, synthetic construct
  misc_feature 1..22: note = chemically synthesized
  source 1..22: mol_type = other DNA
aatgatattttgatatatctat

SEQ ID NO: 44981 - DNA, 22 bp, synthetic construct
  misc_feature 1..22: note = chemically synthesized
  source 1..22: mol_type = other DNA
tgatatatctatcaagtgcttt

SEQ ID NO: 44982 - DNA, 22 bp, synthetic construct
  misc_feature 1..22: note = chemically synthesized
  source 1..22: mol_type = other DNA
gatatatctatcaagtgctttt

SEQ ID NO: 44983 - DNA, 22 bp, synthetic construct
  misc_feature 1..22: note = chemically synthesized
  source 1..22: mol_type = other DNA
atatatctatcaagtgcttttt

SEQ ID NO: 44984 - DNA, 22 bp, synthetic construct
  misc_feature 1..22: note = chemically synthesized
  source 1..22: mol_type = other DNA
tcaagtgctttttagtggatta

SEQ ID NO: 44985 - DNA, 22 bp, synthetic construct
  misc_feature 1..22: note = chemically synthesized
  source 1..22: mol_type = other DNA
tttagtggattaggttcagaat

SEQ ID NO: 44986 - DNA, 22 bp, synthetic construct
  misc_feature 1..22: note = chemically synthesized
  source 1..22: mol_type = other DNA
ttagtggattaggttcagaatg

SEQ ID NO: 44987 - DNA, 22 bp, synthetic construct
  misc_feature 1..22: note = chemically synthesized
  source 1..22: mol_type = other DNA
tagtggattaggttcagaatgc

SEQ ID NO: 44988 - DNA, 22 bp, synthetic construct
  misc_feature 1..22: note = chemically synthesized
  source 1..22: mol_type = other DNA
agtggattaggttcagaatgca

SEQ ID NO: 44989 - DNA, 22 bp, synthetic construct
  misc_feature 1..22: note = chemically synthesized
  source 1..22: mol_type = other DNA
gtggattaggttcagaatgcat

SEQ ID NO: 44990 - DNA, 22 bp, synthetic construct
  misc_feature 1..22: note = chemically synthesized
  source 1..22: mol_type = other DNA
ggttcagaatgcatcagccaat

SEQ ID NO: 44991 - DNA, 22 bp, synthetic construct
  misc_feature 1..22: note = chemically synthesized
  source 1..22: mol_type = other DNA
agaatgcatcagccaatgcctg

SEQ ID NO: 44992 - DNA, 22 bp, synthetic construct
  misc_feature 1..22: note = chemically synthesized
  source 1..22: mol_type = other DNA
ttcaataatccagttttccagc

SEQ ID NO: 44993 - DNA, 22 bp, synthetic construct
  misc_feature 1..22: note = chemically synthesized
  source 1..22: mol_type = other DNA
aataatccagttttccagcata

SEQ ID NO: 44994 - DNA, 22 bp, synthetic construct
  misc_feature 1..22: note = chemically synthesized
  source 1..22: mol_type = other DNA
tccagcatagagcatattaaat

SEQ ID NO: 44995 - DNA, 22 bp, synthetic construct
  misc_feature 1..22: note = chemically synthesized
  source 1..22: mol_type = other DNA
ccagcatagagcatattaaatt

SEQ ID NO: 44996 - DNA, 22 bp, synthetic construct
  misc_feature 1..22: note = chemically synthesized
  source 1..22: mol_type = other DNA
cagcatagagcatattaaattg

SEQ ID NO: 44997 - DNA, 22 bp, synthetic construct
  misc_feature 1..22: note = chemically synthesized
  source 1..22: mol_type = other DNA
aattgaggaaggacaaagtcac

SEQ ID NO: 44998 - DNA, 22 bp, synthetic construct
  misc_feature 1..22: note = chemically synthesized
  source 1..22: mol_type = other DNA
aggaaggacaaagtcacagagg

SEQ ID NO: 44999 - DNA, 22 bp, synthetic construct
  misc_feature 1..22: note = chemically synthesized
  source 1..22: mol_type = other DNA
tggccaaggactttgcatgaaa

SEQ ID NO: 45000 - DNA, 22 bp, synthetic construct
  misc_feature 1..22: note = chemically synthesized
  source 1..22: mol_type = other DNA
tgcatgaaacagtgagcgtgca

SEQ ID NO: 45001 - DNA, 22 bp, synthetic construct
  misc_feature 1..22: note = chemically synthesized
  source 1..22: mol_type = other DNA
gcatgaaacagtgagcgtgcat

SEQ ID NO: 45002 - DNA, 22 bp, synthetic construct
  misc_feature 1..22: note = chemically synthesized
  source 1..22: mol_type = other DNA
catgaaacagtgagcgtgcatc

SEQ ID NO: 45003 - DNA, 22 bp, synthetic construct
  misc_feature 1..22: note = chemically synthesized
  source 1..22: mol_type = other DNA
ctccttgccctgccctcatggt

SEQ ID NO: 45004 - DNA, 22 bp, synthetic construct
  misc_feature 1..22: note = chemically synthesized
  source 1..22: mol_type = other DNA
cttgccctgccctcatggtctg

SEQ ID NO: 45005 - DNA, 22 bp, synthetic construct
  misc_feature 1..22: note = chemically synthesized
  source 1..22: mol_type = other DNA
gccctgccctcatggtctgtgt

SEQ ID NO: 45006 - DNA, 22 bp, synthetic construct
  misc_feature 1..22: note = chemically synthesized
  source 1..22: mol_type = other DNA
ccctgccctcatggtctgtgta

SEQ ID NO: 45007 - DNA, 22 bp, synthetic construct
  misc_feature 1..22: note = chemically synthesized
  source 1..22: mol_type = other DNA
ccctcatggtctgtgtactctc

SEQ ID NO: 45008 - DNA, 22 bp, synthetic construct
  misc_feature 1..22: note = chemically synthesized
  source 1..22: mol_type = other DNA
atggtctgtgtactctcaggag

SEQ ID NO: 45009 - DNA, 22 bp, synthetic construct
  misc_feature 1..22: note = chemically synthesized
  source 1..22: mol_type = other DNA
tgtactctcaggaggtcaggac

SEQ ID NO: 45010 - DNA, 22 bp, synthetic construct
  misc_feature 1..22: note = chemically synthesized
  source 1..22: mol_type = other DNA
tcaggaggtcaggacaggcctt

SEQ ID NO: 45011 - DNA, 22 bp, synthetic construct
  misc_feature 1..22: note = chemically synthesized
  source 1..22: mol_type = other DNA
aggaggtcaggacaggcctttc

SEQ ID NO: 45012 - DNA, 22 bp, synthetic construct
  misc_feature 1..22: note = chemically synthesized
  source 1..22: mol_type = other DNA
tctgagaatgagaatctgttca

SEQ ID NO: 45013 - DNA, 22 bp, synthetic construct
  misc_feature 1..22: note = chemically synthesized
  source 1..22: mol_type = other DNA
ctgagaatgagaatctgttcat

SEQ ID NO: 45014 - DNA, 22 bp, synthetic construct
  misc_feature 1..22: note = chemically synthesized
  source 1..22: mol_type = other DNA
tgagaatgagaatctgttcatc

SEQ ID NO: 45015 - DNA, 22 bp, synthetic construct
  misc_feature 1..22: note = chemically synthesized
  source 1..22: mol_type = other DNA
agaatgagaatctgttcatctg

SEQ ID NO: 45016 - DNA, 22 bp, synthetic construct
  misc_feature 1..22: note = chemically synthesized
  source 1..22: mol_type = other DNA
ttcatctgcctttctactggat

SEQ ID NO: 45017 - DNA, 22 bp, synthetic construct
  misc_feature 1..22: note = chemically synthesized
  source 1..22: mol_type = other DNA
atctgcctttctactggatact

SEQ ID NO: 45018 - DNA, 22 bp, synthetic construct
  misc_feature 1..22: note = chemically synthesized
  source 1..22: mol_type = other DNA
cctttctactggatacttgtca

SEQ ID NO: 45019 - DNA, 22 bp, synthetic construct
  misc_feature 1..22: note = chemically synthesized
  source 1..22: mol_type = other DNA
tctactggatacttgtcatcgg

SEQ ID NO: 45020 - DNA, 22 bp, synthetic construct
  misc_feature 1..22: note = chemically synthesized
  source 1..22: mol_type = other DNA
ctactggatacttgtcatcggc

SEQ ID NO: 45021 - DNA, 22 bp, synthetic construct
  misc_feature 1..22: note = chemically synthesized
  source 1..22: mol_type = other DNA
tactggatacttgtcatcggca

SEQ ID NO: 45022 - DNA, 22 bp, synthetic construct
  misc_feature 1..22: note = chemically synthesized
  source 1..22: mol_type = other DNA
ctggatacttgtcatcggcata

SEQ ID NO: 45023 - DNA, 22 bp, synthetic construct
  misc_feature 1..22: note = chemically synthesized
  source 1..22: mol_type = other DNA
gatacttgtcatcggcatacaa

SEQ ID NO: 45024 - DNA, 22 bp, synthetic construct
  misc_feature 1..22: note = chemically synthesized
  source 1..22: mol_type = other DNA
gtcatcggcatacaaacacatg

SEQ ID NO: 45025 - DNA, 22 bp, synthetic construct
  misc_feature 1..22: note = chemically synthesized
  source 1..22: mol_type = other DNA
tcatcggcatacaaacacatgt

SEQ ID NO: 45026 - DNA, 22 bp, synthetic construct
  misc_feature 1..22: note = chemically synthesized
  source 1..22: mol_type = other DNA
tctgcagtgtgtcatctttcag

SEQ ID NO: 45027 - DNA, 22 bp, synthetic construct
  misc_feature 1..22: note = chemically synthesized
  source 1..22: mol_type = other DNA
tgcagtgtgtcatctttcagaa

SEQ ID NO: 45028 - DNA, 22 bp, synthetic construct
  misc_feature 1..22: note = chemically synthesized
  source 1..22: mol_type = other DNA
cagtgtgtcatctttcagaacc

SEQ ID NO: 45029 - DNA, 22 bp, synthetic construct
  misc_feature 1..22: note = chemically synthesized
  source 1..22: mol_type = other DNA
tcagaacctcccctgaccctgt

SEQ ID NO: 45030 - DNA, 22 bp, synthetic construct
  misc_feature 1..22: note = chemically synthesized
  source 1..22: mol_type = other DNA
cagaacctcccctgaccctgta

SEQ ID NO: 45031 - DNA, 22 bp, synthetic construct
  misc_feature 1..22: note = chemically synthesized
  source 1..22: mol_type = other DNA
agaacctcccctgaccctgtat

SEQ ID NO: 45032 - DNA, 22 bp, synthetic construct
  misc_feature 1..22: note = chemically synthesized
  source 1..22: mol_type = other DNA
ccctgaccctgtattccctaga

SEQ ID NO: 45033 - DNA, 22 bp, synthetic construct
  misc_feature 1..22: note = chemically synthesized
  source 1..22: mol_type = other DNA
accctgtattccctagaagtct

SEQ ID NO: 45034 - DNA, 22 bp, synthetic construct
  misc_feature 1..22: note = chemically synthesized
  source 1..22: mol_type = other DNA
tattccctagaagtctcgctgc

SEQ ID NO: 45035 - DNA, 22 bp, synthetic construct
  misc_feature 1..22: note = chemically synthesized
  source 1..22: mol_type = other DNA
cctagaagtctcgctgctttca

SEQ ID NO: 45036 - DNA, 22 bp, synthetic construct
  misc_feature 1..22: note = chemically synthesized
  source 1..22: mol_type = other DNA
gaagtctcgctgctttcagagc

SEQ ID NO: 45037 - DNA, 22 bp, synthetic construct
  misc_feature 1..22: note = chemically synthesized
  source 1..22: mol_type = other DNA
gctgctttcagagccaggcttc

SEQ ID NO: 45038 - DNA, 22 bp, synthetic construct
  misc_feature 1..22: note = chemically synthesized
  source 1..22: mol_type = other DNA
ctttcagagccaggcttctctc

SEQ ID NO: 45039 - DNA, 22 bp, synthetic construct
  misc_feature 1..22: note = chemically synthesized
  source 1..22: mol_type = other DNA
tcagagccaggcttctctcctg

SEQ ID NO: 45040 - DNA, 22 bp, synthetic construct
  misc_feature 1..22: note = chemically synthesized
  source 1..22: mol_type = other DNA
cagagccaggcttctctcctgc

SEQ ID NO: 45041 - DNA, 22 bp, synthetic construct
  misc_feature 1..22: note = chemically synthesized
  source 1..22: mol_type = other DNA
agagccaggcttctctcctgct

SEQ ID NO: 45042 - DNA, 22 bp, synthetic construct
  misc_feature 1..22: note = chemically synthesized
  source 1..22: mol_type = other DNA
ctctcctgctgccacccccact

SEQ ID NO: 45043 - DNA, 22 bp, synthetic construct
  misc_feature 1..22: note = chemically synthesized
  source 1..22: mol_type = other DNA
tctcctgctgccacccccactg

SEQ ID NO: 45044 - DNA, 22 bp, synthetic construct
  misc_feature 1..22: note = chemically synthesized
  source 1..22: mol_type = other DNA
tcctgctgccacccccactgct

SEQ ID NO: 45045 - DNA, 22 bp, synthetic construct
  misc_feature 1..22: note = chemically synthesized
  source 1..22: mol_type = other DNA
ctgctgccacccccactgctct

SEQ ID NO: 45046 - DNA, 22 bp, synthetic construct
  misc_feature 1..22: note = chemically synthesized
  source 1..22: mol_type = other DNA
ctgccacccccactgctcttct

SEQ ID NO: 45047 - DNA, 22 bp, synthetic construct
  misc_feature 1..22: note = chemically synthesized
  source 1..22: mol_type = other DNA
ccacccccactgctcttctagt

SEQ ID NO: 45048 - DNA, 22 bp, synthetic construct
  misc_feature 1..22: note = chemically synthesized
  source 1..22: mol_type = other DNA
ctcttctagtcactctttaacc

SEQ ID NO: 45049 - DNA, 22 bp, synthetic construct
  misc_feature 1..22: note = chemically synthesized
  source 1..22: mol_type = other DNA
ttctagtcactctttaacccac

SEQ ID NO: 45050 - DNA, 22 bp, synthetic construct
  misc_feature 1..22: note = chemically synthesized
  source 1..22: mol_type = other DNA
ctagtcactctttaacccactc

SEQ ID NO: 45051 - DNA, 22 bp, synthetic construct
  misc_feature 1..22: note = chemically synthesized
  source 1..22: mol_type = other DNA
tagtcactctttaacccactcc

SEQ ID NO: 45052 - DNA, 22 bp, synthetic construct
  misc_feature 1..22: note = chemically synthesized
  source 1..22: mol_type = other DNA
gtcactctttaacccactccat

SEQ ID NO: 45053 - DNA, 22 bp, synthetic construct
  misc_feature 1..22: note = chemically synthesized
  source 1..22: mol_type = other DNA
tttaacccactccatctgcatg

SEQ ID NO: 45054 - DNA, 22 bp, synthetic construct
  misc_feature 1..22: note = chemically synthesized
  source 1..22: mol_type = other DNA
taacccactccatctgcatgtg

SEQ ID NO: 45055 - DNA, 22 bp, synthetic construct
  misc_feature 1..22: note = chemically synthesized
  source 1..22: mol_type = other DNA
aacccactccatctgcatgtgg

SEQ ID NO: 45056 - DNA, 22 bp, synthetic construct
  misc_feature 1..22: note = chemically synthesized
  source 1..22: mol_type = other DNA
acccactccatctgcatgtggc

SEQ ID NO: 45057 - DNA, 22 bp, synthetic construct
  misc_feature 1..22: note = chemically synthesized
  source 1..22: mol_type = other DNA
catctgcatgtggcccccacca

SEQ ID NO: 45058 - DNA, 22 bp, synthetic construct
  misc_feature 1..22: note = chemically synthesized
  source 1..22: mol_type = other DNA
catgtggcccccaccacacccc

SEQ ID NO: 45059 - DNA, 22 bp, synthetic construct
  misc_feature 1..22: note = chemically synthesized
  source 1..22: mol_type = other DNA
aaagtggtcaaggttgtcctgt

SEQ ID NO: 45060 - DNA, 22 bp, synthetic construct
  misc_feature 1..22: note = chemically synthesized
  source 1..22: mol_type = other DNA
tcctgttgcttaattccatgga

SEQ ID NO: 45061 - DNA, 22 bp, synthetic construct
  misc_feature 1..22: note = chemically synthesized
  source 1..22: mol_type = other DNA
ttgcttaattccatggaagctt

SEQ ID NO: 45062 - DNA, 22 bp, synthetic construct
  misc_feature 1..22: note = chemically synthesized
  source 1..22: mol_type = other DNA
cttaattccatggaagcttggc

SEQ ID NO: 45063 - DNA, 22 bp, synthetic construct
  misc_feature 1..22: note = chemically synthesized
  source 1..22: mol_type = other DNA
aattccatggaagcttggctat

SEQ ID NO: 45064 - DNA, 22 bp, synthetic construct
  misc_feature 1..22: note = chemically synthesized
  source 1..22: mol_type = other DNA
attccatggaagcttggctatc

SEQ ID NO: 45065 - DNA, 22 bp, synthetic construct
  misc_feature 1..22: note = chemically synthesized
  source 1..22: mol_type = other DNA
catggaagcttggctatcttca

SEQ ID NO: 45066 - DNA, 22 bp, synthetic construct
  misc_feature 1..22: note = chemically synthesized
  source 1..22: mol_type = other DNA
ggctatcttcattttattagcc

SEQ ID NO: 45067 - DNA, 22 bp, synthetic construct
  misc_feature 1..22: note = chemically synthesized
  source 1..22: mol_type = other DNA
gctatcttcattttattagcct

SEQ ID NO: 45068 - DNA, 22 bp, synthetic construct
  misc_feature 1..22: note = chemically synthesized
  source 1..22: mol_type = other DNA
tcttcattttattagcctcttt

SEQ ID NO: 45069 - DNA, 22 bp, synthetic construct
  misc_feature 1..22: note = chemically synthesized
  source 1..22: mol_type = other DNA
cattttattagcctcttttggc

SEQ ID NO: 45070 - DNA, 22 bp, synthetic construct
  misc_feature 1..22: note = chemically synthesized
  source 1..22: mol_type = other DNA
attttattagcctcttttggcc

SEQ ID NO: 45071 - DNA, 22 bp, synthetic construct
  misc_feature 1..22: note = chemically synthesized
  source 1..22: mol_type = other DNA
tattagcctcttttggcctctc

SEQ ID NO: 45072 - DNA, 22 bp, synthetic construct
  misc_feature 1..22: note = chemically synthesized
  source 1..22: mol_type = other DNA
attagcctcttttggcctctca

SEQ ID NO: 45073 - DNA, 22 bp, synthetic construct
  misc_feature 1..22: note = chemically synthesized
  source 1..22: mol_type = other DNA
ttagcctcttttggcctctcac

SEQ ID NO: 45074 - DNA, 22 bp, synthetic construct
  misc_feature 1..22: note = chemically synthesized
  source 1..22: mol_type = other DNA
gcctcttttggcctctcaccct

SEQ ID NO: 45075 - DNA, 22 bp, synthetic construct
  misc_feature 1..22: note = chemically synthesized
  source 1..22: mol_type = other DNA
ttttggcctctcaccctgtgaa

SEQ ID NO: 45076 - DNA, 22 bp, synthetic construct
  misc_feature 1..22: note = chemically synthesized
  source 1..22: mol_type = other DNA
ttggcctctcaccctgtgaaaa

SEQ ID NO: 45077 - DNA, 22 bp, synthetic construct
  misc_feature 1..22: note = chemically synthesized
  source 1..22: mol_type = other DNA
tggcctctcaccctgtgaaaat

SEQ ID NO: 45078 - DNA, 22 bp, synthetic construct
  misc_feature 1..22: note = chemically synthesized
  source 1..22: mol_type = other DNA
ggcctctcaccctgtgaaaatc

SEQ ID NO: 45079 - DNA, 22 bp, synthetic construct
  misc_feature 1..22: note = chemically synthesized
  source 1..22: mol_type = other DNA
gcctctcaccctgtgaaaatca

SEQ ID NO: 45080 - DNA, 22 bp, synthetic construct
  misc_feature 1..22: note = chemically synthesized
  source 1..22: mol_type = other DNA
tcaccctgtgaaaatcactaca

SEQ ID NO: 45081 - DNA, 22 bp, synthetic construct
  misc_feature 1..22: note = chemically synthesized
  source 1..22: mol_type = other DNA
accctgtgaaaatcactacatt

SEQ ID NO: 45082 - DNA, 22 bp, synthetic construct
  misc_feature 1..22: note = chemically synthesized
  source 1..22: mol_type = other DNA
tgaaaatcactacattttgtgc

SEQ ID NO: 45083 - DNA, 22 bp, synthetic construct
  misc_feature 1..22: note = chemically synthesized
  source 1..22: mol_type = other DNA
cattttgtgccagagatggagc

SEQ ID NO: 45084 - DNA, 22 bp, synthetic construct
  misc_feature 1..22: note = chemically synthesized
  source 1..22: mol_type = other DNA
tgtgccagagatggagctggca

SEQ ID NO: 45085 - DNA, 22 bp, synthetic construct
  misc_feature 1..22: note = chemically synthesized
  source 1..22: mol_type = other DNA
gtgccagagatggagctggcat

SEQ ID NO: 45086 - DNA, 22 bp, synthetic construct
  misc_feature 1..22: note = chemically synthesized
  source 1..22: mol_type = other DNA
tgccagagatggagctggcatc

SEQ ID NO: 45087 - DNA, 22 bp, synthetic construct
  misc_feature 1..22: note = chemically synthesized
  source 1..22: mol_type = other DNA
gcatctccaggcttggaagagg

SEQ ID NO: 45088 - DNA, 22 bp, synthetic construct
  misc_feature 1..22: note = chemically synthesized
  source 1..22: mol_type = other DNA
caggcttggaagagggctgctg

SEQ ID NO: 45089 - DNA, 22 bp, synthetic construct
  misc_feature 1..22: note = chemically synthesized
  source 1..22: mol_type = other DNA
ggaagagggctgctgaagctca

SEQ ID NO: 45090 - DNA, 22 bp, synthetic construct
  misc_feature 1..22: note = chemically synthesized
  source 1..22: mol_type = other DNA
gaagagggctgctgaagctcag

SEQ ID NO: 45091 - DNA, 22 bp, synthetic construct
  misc_feature 1..22: note = chemically synthesized
  source 1..22: mol_type = other DNA
ctgaagctcagccaggtgtcct

SEQ ID NO: 45092 - DNA, 22 bp, synthetic construct
  misc_feature 1..22: note = chemically synthesized
  source 1..22: mol_type = other DNA
aagctcagccaggtgtcctaag

SEQ ID NO: 45093 - DNA, 22 bp, synthetic construct
  misc_feature 1..22: note = chemically synthesized
  source 1..22: mol_type = other DNA
agccaggtgtcctaaggagcct

SEQ ID NO: 45094 - DNA, 22 bp, synthetic construct
  misc_feature 1..22: note = chemically synthesized
  source 1..22: mol_type = other DNA
aggagcctcaggacaggggatg

SEQ ID NO: 45095 - DNA, 22 bp, synthetic construct
  misc_feature 1..22: note = chemically synthesized
  source 1..22: mol_type = other DNA
aggacaggggatgctcagtagc

SEQ ID NO: 45096 - DNA, 22 bp, synthetic construct
  misc_feature 1..22: note = chemically synthesized
  source 1..22: mol_type = other DNA
agtagccttgcaatgggaacac

SEQ ID NO: 45097 - DNA, 22 bp, synthetic construct
  misc_feature 1..22: note = chemically synthesized
  source 1..22: mol_type = other DNA
gcaatgggaacacagctgagcc

SEQ ID NO: 45098 - DNA, 22 bp, synthetic construct
  misc_feature 1..22: note = chemically synthesized
  source 1..22: mol_type = other DNA
caatgggaacacagctgagccc

SEQ ID NO: 45099 - DNA, 22 bp, synthetic construct
  misc_feature 1..22: note = chemically synthesized
  source 1..22: mol_type = other DNA
agccccacttggccaccctttg

SEQ ID NO: 45100 - DNA, 22 bp, synthetic construct
  misc_feature 1..22: note = chemically synthesized
  source 1..22: mol_type = other DNA
ggccaccctttgccacaaccag

SEQ ID NO: 45101 - DNA, 22 bp, synthetic construct
  misc_feature 1..22: note = chemically synthesized
  source 1..22: mol_type = other DNA
gccaccctttgccacaaccagg

SEQ ID NO: 45102 - DNA, 22 bp, synthetic construct
  misc_feature 1..22: note = chemically synthesized
  source 1..22: mol_type = other DNA
tgccacaaccaggcagaaagca

SEQ ID NO: 45103 - DNA, 22 bp, synthetic construct
  misc_feature 1..22: note = chemically synthesized
  source 1..22: mol_type = other DNA
gccacaaccaggcagaaagcag

SEQ ID NO: 45104 - DNA, 22 bp, synthetic construct
  misc_feature 1..22: note = chemically synthesized
  source 1..22: mol_type = other DNA
ccacaaccaggcagaaagcagc

SEQ ID NO: 45105 - DNA, 22 bp, synthetic construct
  misc_feature 1..22: note = chemically synthesized
  source 1..22: mol_type = other DNA
ttgaacagatttgttgcctcag

SEQ ID NO: 45106 - DNA, 22 bp, synthetic construct
  misc_feature 1..22: note = chemically synthesized
  source 1..22: mol_type = other DNA
tgaacagatttgttgcctcaga

SEQ ID NO: 45107 - DNA, 22 bp, synthetic construct
  misc_feature 1..22: note = chemically synthesized
  source 1..22: mol_type = other DNA
gaacagatttgttgcctcagat

SEQ ID NO: 45108 - DNA, 22 bp, synthetic construct
  misc_feature 1..22: note = chemically synthesized
  source 1..22: mol_type = other DNA
aacagatttgttgcctcagatt

SEQ ID NO: 45109 - DNA, 22 bp, synthetic construct
  misc_feature 1..22: note = chemically synthesized
  source 1..22: mol_type = other DNA
gttgcctcagatttgatctcaa

SEQ ID NO: 45110 - DNA, 22 bp, synthetic construct
  misc_feature 1..22: note = chemically synthesized
  source 1..22: mol_type = other DNA
ttgcctcagatttgatctcaaa

SEQ ID NO: 45111 - DNA, 22 bp, synthetic construct
  misc_feature 1..22: note = chemically synthesized
  source 1..22: mol_type = other DNA
cctcagatttgatctcaaagaa

SEQ ID NO: 45112 - DNA, 22 bp, synthetic construct
  misc_feature 1..22: note = chemically synthesized
  source 1..22: mol_type = other DNA
agatttgatctcaaagaaaaat

SEQ ID NO: 45113 - DNA, 22 bp, synthetic construct
  misc_feature 1..22: note = chemically synthesized
  source 1..22: mol_type = other DNA
gatctcaaagaaaaatcgtggg

SEQ ID NO: 45114 - DNA, 22 bp, synthetic construct
  misc_feature 1..22: note = chemically synthesized
  source 1..22: mol_type = other DNA
atctcaaagaaaaatcgtgggc

SEQ ID NO: 45115 - DNA, 22 bp, synthetic construct
  misc_feature 1..22: note = chemically synthesized
  source 1..22: mol_type = other DNA
aaagaaaaatcgtgggcagtat

SEQ ID NO: 45116 - DNA, 22 bp, synthetic construct
  misc_feature 1..22: note = chemically synthesized
  source 1..22: mol_type = other DNA
gtcccaggttctgcttttttac

SEQ ID NO: 45117 - DNA, 22 bp, synthetic construct
  misc_feature 1..22: note = chemically synthesized
  source 1..22: mol_type = other DNA
tgcttttttacaatttcctctg

SEQ ID NO: 45118 - DNA, 22 bp, synthetic construct
  misc_feature 1..22: note = chemically synthesized
  source 1..22: mol_type = other DNA
cttttttacaatttcctctgaa

SEQ ID NO: 45119 - DNA, 22 bp, synthetic construct
  misc_feature 1..22: note = chemically synthesized
  source 1..22: mol_type = other DNA
ttttacaatttcctctgaaatc

SEQ ID NO: 45120 - DNA, 22 bp, synthetic construct
  misc_feature 1..22: note = chemically synthesized
  source 1..22: mol_type = other DNA
tttacaatttcctctgaaatct

SEQ ID NO: 45121 - DNA, 22 bp, synthetic construct
  misc_feature 1..22: note = chemically synthesized
  source 1..22: mol_type = other DNA
ttacaatttcctctgaaatctg

SEQ ID NO: 45122 - DNA, 22 bp, synthetic construct
  misc_feature 1..22: note = chemically synthesized
  source 1..22: mol_type = other DNA
tacaatttcctctgaaatctgg

SEQ ID NO: 45123 - DNA, 22 bp, synthetic construct
  misc_feature 1..22: note = chemically synthesized
  source 1..22: mol_type = other DNA
acaatttcctctgaaatctgga

SEQ ID NO: 45124 - DNA, 22 bp, synthetic construct
  misc_feature 1..22: note = chemically synthesized
  source 1..22: mol_type = other DNA
caatttcctctgaaatctggat

SEQ ID NO: 45125 - DNA, 22 bp, synthetic construct
  misc_feature 1..22: note = chemically synthesized
  source 1..22: mol_type = other DNA
cctctgaaatctggatgcctat

SEQ ID NO: 45126 - DNA, 22 bp, synthetic construct
  misc_feature 1..22: note = chemically synthesized
  source 1..22: mol_type = other DNA
ctctgaaatctggatgcctatc

SEQ ID NO: 45127 - DNA, 22 bp, synthetic construct
  misc_feature 1..22: note = chemically synthesized
  source 1..22: mol_type = other DNA
tgaaatctggatgcctatcaac

SEQ ID NO: 45128 - DNA, 22 bp, synthetic construct
  misc_feature 1..22: note = chemically synthesized
  source 1..22: mol_type = other DNA
aaatctggatgcctatcaacac

SEQ ID NO: 45129 - DNA, 22 bp, synthetic construct
  misc_feature 1..22: note = chemically synthesized
  source 1..22: mol_type = other DNA
gatgcctatcaacaccttggaa

SEQ ID NO: 45130 - DNA, 22 bp, synthetic construct
  misc_feature 1..22: note = chemically synthesized
  source 1..22: mol_type = other DNA
tcaacaccttggaaaaactgaa

SEQ ID NO: 45131 - DNA, 22 bp, synthetic construct
  misc_feature 1..22: note = chemically synthesized
  source 1..22: mol_type = other DNA
ggaaaaactgaattctccccaa

SEQ ID NO: 45132 - DNA, 22 bp, synthetic construct
  misc_feature 1..22: note = chemically synthesized
  source 1..22: mol_type = other DNA
gaaaaactgaattctccccaac

SEQ ID NO: 45133 - DNA, 22 bp, synthetic construct
  misc_feature 1..22: note = chemically synthesized
  source 1..22: mol_type = other DNA
aattctccccaactaatagtgg

SEQ ID NO: 45134 - DNA, 22 bp, synthetic construct
  misc_feature 1..22: note = chemically synthesized
  source 1..22: mol_type = other DNA
tccccaactaatagtggtgtgt

SEQ ID NO: 45135 - DNA, 22 bp, synthetic construct
  misc_feature 1..22: note = chemically synthesized
  source 1..22: mol_type = other DNA
cccaactaatagtggtgtgtca

SEQ ID NO: 45136 - DNA, 22 bp, synthetic construct
  misc_feature 1..22: note = chemically synthesized
  source 1..22: mol_type = other DNA
atagtggtgtgtcactgtagta

SEQ ID NO: 45137 - DNA, 22 bp, synthetic construct
  misc_feature 1..22: note = chemically synthesized
  source 1..22: mol_type = other DNA
tagtaagcctagtacaaaaatg

SEQ ID NO: 45138 - DNA, 22 bp, synthetic construct
  misc_feature 1..22: note = chemically synthesized
  source 1..22: mol_type = other DNA
gtacaaaaatggccttctttgt

SEQ ID NO: 45139 - DNA, 22 bp, synthetic construct
  misc_feature 1..22: note = chemically synthesized
  source 1..22: mol_type = other DNA
ctttgtggaggagcttcatatc

SEQ ID NO: 45140 - DNA, 22 bp, synthetic construct
  misc_feature 1..22: note = chemically synthesized
  source 1..22: mol_type = other DNA
tttgtggaggagcttcatatcc

SEQ ID NO: 45141 - DNA, 22 bp, synthetic construct
  misc_feature 1..22: note = chemically synthesized
  source 1..22: mol_type = other DNA
tgtggaggagcttcatatcctc

SEQ ID NO: 45142 - DNA, 22 bp, synthetic construct
  misc_feature 1..22: note = chemically synthesized
  source 1..22: mol_type = other DNA
gtggaggagcttcatatcctcc

SEQ ID NO: 45143 - DNA, 22 bp, synthetic construct
  misc_feature 1..22: note = chemically synthesized
  source 1..22: mol_type = other DNA
tggaggagcttcatatcctcca

SEQ ID NO: 45144 - DNA, 22 bp, synthetic construct
  misc_feature 1..22: note = chemically synthesized
  source 1..22: mol_type = other DNA
catatcctccattttttttttg

SEQ ID NO: 45145 - DNA, 22 bp, synthetic construct
  misc_feature 1..22: note = chemically synthesized
  source 1..22: mol_type = other DNA
atatcctccattttttttttgc

SEQ ID NO: 45146 - DNA, 22 bp, synthetic construct
  misc_feature 1..22: note = chemically synthesized
  source 1..22: mol_type = other DNA
cattttttttttgcttaatttt

SEQ ID NO: 45147 - DNA, 22 bp, synthetic construct
  misc_feature 1..22: note = chemically synthesized
  source 1..22: mol_type = other DNA
tttttttgcttaatttttgccc

SEQ ID NO: 45148 - DNA, 22 bp, synthetic construct
  misc_feature 1..22: note = chemically synthesized
  source 1..22: mol_type = other DNA
ttttttgcttaatttttgccca

SEQ ID NO: 45149 - DNA, 22 bp, synthetic construct
  misc_feature 1..22: note = chemically synthesized
  source 1..22: mol_type = other DNA
tttttgcttaatttttgcccaa

SEQ ID NO: 45150 - DNA, 22 bp, synthetic construct
  misc_feature 1..22: note = chemically synthesized
  source 1..22: mol_type = other DNA
ttttgcttaatttttgcccaag

SEQ ID NO: 45151 - DNA, 22 bp, synthetic construct
  misc_feature 1..22: note = chemically synthesized
  source 1..22: mol_type = other DNA
tttgcttaatttttgcccaaga

SEQ ID NO: 45152 - DNA, 22 bp, synthetic construct
  misc_feature 1..22: note = chemically synthesized
  source 1..22: mol_type = other DNA
ttgcttaatttttgcccaagat

SEQ ID NO: 45153 - DNA, 22 bp, synthetic construct
  misc_feature 1..22: note = chemically synthesized
  source 1..22: mol_type = other DNA
tgcttaatttttgcccaagatg

SEQ ID NO: 45154 - DNA, 22 bp, synthetic construct
  misc_feature 1..22: note = chemically synthesized
  source 1..22: mol_type = other DNA
gcttaatttttgcccaagatga

SEQ ID NO: 45155 - DNA, 22 bp, synthetic construct
  misc_feature 1..22: note = chemically synthesized
  source 1..22: mol_type = other DNA
cttaatttttgcccaagatgag

SEQ ID NO: 45156 - DNA, 22 bp, synthetic construct
  misc_feature 1..22: note = chemically synthesized
  source 1..22: mol_type = other DNA
aatttttgcccaagatgagaac

SEQ ID NO: 45157 - DNA, 22 bp, synthetic construct
  misc_feature 1..22: note = chemically synthesized
  source 1..22: mol_type = other DNA
atttttgcccaagatgagaaca

SEQ ID NO: 45158 - DNA, 22 bp, synthetic construct
  misc_feature 1..22: note = chemically synthesized
  source 1..22: mol_type = other DNA
ttgcccaagatgagaacataat

SEQ ID NO: 45159 - DNA, 22 bp, synthetic construct
  misc_feature 1..22: note = chemically synthesized
  source 1..22: mol_type = other DNA
tgcccaagatgagaacataatt

SEQ ID NO: 45160 - DNA, 22 bp, synthetic construct
  misc_feature 1..22: note = chemically synthesized
  source 1..22: mol_type = other DNA
gcccaagatgagaacataattt

SEQ ID NO: 45161 - DNA, 22 bp, synthetic construct
  misc_feature 1..22: note = chemically synthesized
  source 1..22: mol_type = other DNA
cccaagatgagaacataattta

SEQ ID NO: 45162 - DNA, 22 bp, synthetic construct
  misc_feature 1..22: note = chemically synthesized
  source 1..22: mol_type = other DNA
agttcactttttatttattccc

SEQ ID NO: 45163 - DNA, 22 bp, synthetic construct
  misc_feature 1..22: note = chemically synthesized
  source 1..22: mol_type = other DNA
gttcactttttatttattccca

SEQ ID NO: 45164 - DNA, 22 bp, synthetic construct
  misc_feature 1..22: note = chemically synthesized
  source 1..22: mol_type = other DNA
actttttatttattcccaacat

SEQ ID NO: 45165 - DNA, 22 bp, synthetic construct
  misc_feature 1..22: note = chemically synthesized
  source 1..22: mol_type = other DNA
tttatttattcccaacatcatc

SEQ ID NO: 45166 - DNA, 22 bp, synthetic construct
  misc_feature 1..22: note = chemically synthesized
  source 1..22: mol_type = other DNA
ttatttattcccaacatcatcc

SEQ ID NO: 45167 - DNA, 22 bp, synthetic construct
  misc_feature 1..22: note = chemically synthesized
  source 1..22: mol_type = other DNA
tatttattcccaacatcatcca

SEQ ID NO: 45168 - DNA, 22 bp, synthetic construct
  misc_feature 1..22: note = chemically synthesized
  source 1..22: mol_type = other DNA
atttattcccaacatcatccat

SEQ ID NO: 45169 - DNA, 22 bp, synthetic construct
  misc_feature 1..22: note = chemically synthesized
  source 1..22: mol_type = other DNA
tttattcccaacatcatccatg

SEQ ID NO: 45170 - DNA, 22 bp, synthetic construct
  misc_feature 1..22: note = chemically synthesized
  source 1..22: mol_type = other DNA
attcccaacatcatccatgcac

SEQ ID NO: 45171 - DNA, 22 bp, synthetic construct
  misc_feature 1..22: note = chemically synthesized
  source 1..22: mol_type = other DNA
ttcccaacatcatccatgcacc

SEQ ID NO: 45172 - DNA, 22 bp, synthetic construct
  misc_feature 1..22: note = chemically synthesized
  source 1..22: mol_type = other DNA
ccaacatcatccatgcaccaac

SEQ ID NO: 45173 - DNA, 22 bp, synthetic construct
  misc_feature 1..22: note = chemically synthesized
  source 1..22: mol_type = other DNA
ttgtaactaaaggagggaccat

SEQ ID NO: 45174 - DNA, 22 bp, synthetic construct
  misc_feature 1..22: note = chemically synthesized
  source 1..22: mol_type = other DNA
tgtaactaaaggagggaccatt

SEQ ID NO: 45175 - DNA, 22 bp, synthetic construct
  misc_feature 1..22: note = chemically synthesized
  source 1..22: mol_type = other DNA
gtaactaaaggagggaccattc

SEQ ID NO: 45176 - DNA, 22 bp, synthetic construct
  misc_feature 1..22: note = chemically synthesized
  source 1..22: mol_type = other DNA
taactaaaggagggaccattca

SEQ ID NO: 45177 - DNA, 22 bp, synthetic construct
  misc_feature 1..22: note = chemically synthesized
  source 1..22: mol_type = other DNA
aaggagggaccattcagaagat

SEQ ID NO: 45178 - DNA, 22 bp, synthetic construct
  misc_feature 1..22: note = chemically synthesized
  source 1..22: mol_type = other DNA
agaagatgcttatcaactgtca

SEQ ID NO: 45179 - DNA, 22 bp, synthetic construct
  misc_feature 1..22: note = chemically synthesized
  source 1..22: mol_type = other DNA
atcaactgtcaaagtgacagtg

SEQ ID NO: 45180 - DNA, 22 bp, synthetic construct
  misc_feature 1..22: note = chemically synthesized
  source 1..22: mol_type = other DNA
tcaactgtcaaagtgacagtgt

SEQ ID NO: 45181 - DNA, 22 bp, synthetic construct
  misc_feature 1..22: note = chemically synthesized
  source 1..22: mol_type = other DNA
tcaaagtgacagtgttacaacc

SEQ ID NO: 45182 - DNA, 22 bp, synthetic construct
  misc_feature 1..22: note = chemically synthesized
  source 1..22: mol_type = other DNA
caaccaatgcacatattgtaag

SEQ ID NO: 45183 - DNA, 22 bp, synthetic construct
  misc_feature 1..22: note = chemically synthesized
  source 1..22: mol_type = other DNA
taagaaatcaaacaatggcctc

SEQ ID NO: 45184 - DNA, 22 bp, synthetic construct
  misc_feature 1..22: note = chemically synthesized
  source 1..22: mol_type = other DNA
caaggttcatttctacacaggg

SEQ ID NO: 45185 - DNA, 22 bp, synthetic construct
  misc_feature 1..22: note = chemically synthesized
  source 1..22: mol_type = other DNA
atttctacacagggattagcag

SEQ ID NO: 45186 - DNA, 22 bp, synthetic construct
  misc_feature 1..22: note = chemically synthesized
  source 1..22: mol_type = other DNA
ctacacagggattagcagatca

SEQ ID NO: 45187 - DNA, 22 bp, synthetic construct
  misc_feature 1..22: note = chemically synthesized
  source 1..22: mol_type = other DNA
tacacagggattagcagatcaa

SEQ ID NO: 45188 - DNA, 22 bp, synthetic construct
  misc_feature 1..22: note = chemically synthesized
  source 1..22: mol_type = other DNA
cacagggattagcagatcaaca

SEQ ID NO: 45189 - DNA, 22 bp, synthetic construct
  misc_feature 1..22: note = chemically synthesized
  source 1..22: mol_type = other DNA
gcagatcaacatcaatcttggc

SEQ ID NO: 45190 - DNA, 22 bp, synthetic construct
  misc_feature 1..22: note = chemically synthesized
  source 1..22: mol_type = other DNA
ggcaacacagttgccactgatg

SEQ ID NO: 45191 - DNA, 22 bp, synthetic construct
  misc_feature 1..22: note = chemically synthesized
  source 1..22: mol_type = other DNA
gcaacacagttgccactgatgg

SEQ ID NO: 45192 - DNA, 22 bp, synthetic construct
  misc_feature 1..22: note = chemically synthesized
  source 1..22: mol_type = other DNA
ccactgatggtgtcttattttt

SEQ ID NO: 45193 - DNA, 22 bp, synthetic construct
  misc_feature 1..22: note = chemically synthesized
  source 1..22: mol_type = other DNA
atggtgtcttattttttttatc

SEQ ID NO: 45194 - DNA, 22 bp, synthetic construct
  misc_feature 1..22: note = chemically synthesized
  source 1..22: mol_type = other DNA
attttttttatcatgacatggc

SEQ ID NO: 45195 - DNA, 22 bp, synthetic construct
  misc_feature 1..22: note = chemically synthesized
  source 1..22: mol_type = other DNA
ttttttttatcatgacatggca

SEQ ID NO: 45196 - DNA, 22 bp, synthetic construct
  misc_feature 1..22: note = chemically synthesized
  source 1..22: mol_type = other DNA
tttttatcatgacatggcaatc

SEQ ID NO: 45197 - DNA, 22 bp, synthetic construct
  misc_feature 1..22: note = chemically synthesized
  source 1..22: mol_type = other DNA
ttttatcatgacatggcaatca

SEQ ID NO: 45198 - DNA, 22 bp, synthetic construct
  misc_feature 1..22: note = chemically synthesized
  source 1..22: mol_type = other DNA
tttatcatgacatggcaatcaa

SEQ ID NO: 45199 - DNA, 22 bp, synthetic construct
  misc_feature 1..22: note = chemically synthesized
  source 1..22: mol_type = other DNA
ttatcatgacatggcaatcaag

SEQ ID NO: 45200 - DNA, 22 bp, synthetic construct
  misc_feature 1..22: note = chemically synthesized
  source 1..22: mol_type = other DNA
tatcatgacatggcaatcaaga

SEQ ID NO: 45201 - DNA, 22 bp, synthetic construct
  misc_feature 1..22: note = chemically synthesized
  source 1..22: mol_type = other DNA
atcatgacatggcaatcaagag

SEQ ID NO: 45202 - DNA, 22 bp, synthetic construct
  misc_feature 1..22: note = chemically synthesized
  source 1..22: mol_type = other DNA
tcatgacatggcaatcaagagc

SEQ ID NO: 45203 - DNA, 22 bp, synthetic construct
  misc_feature 1..22: note = chemically synthesized
  source 1..22: mol_type = other DNA
attcttatttaagattttatgg

SEQ ID NO: 45204 - DNA, 22 bp, synthetic construct
  misc_feature 1..22: note = chemically synthesized
  source 1..22: mol_type = other DNA
ttcttatttaagattttatggt

SEQ ID NO: 45205 - DNA, 22 bp, synthetic construct
  misc_feature 1..22: note = chemically synthesized
  source 1..22: mol_type = other DNA
ttatttaagattttatggttag

SEQ ID NO: 45206 - DNA, 22 bp, synthetic construct
  misc_feature 1..22: note = chemically synthesized
  source 1..22: mol_type = other DNA
atttaagattttatggttagac

SEQ ID NO: 45207 - DNA, 22 bp, synthetic construct
  misc_feature 1..22: note = chemically synthesized
  source 1..22: mol_type = other DNA
tttaagattttatggttagact

SEQ ID NO: 45208 - DNA, 22 bp, synthetic construct
  misc_feature 1..22: note = chemically synthesized
  source 1..22: mol_type = other DNA
aagattttatggttagactagg

SEQ ID NO: 45209 - DNA, 22 bp, synthetic construct
  misc_feature 1..22: note = chemically synthesized
  source 1..22: mol_type = other DNA
agattttatggttagactaggc

SEQ ID NO: 45210 - DNA, 22 bp, synthetic construct
  misc_feature 1..22: note = chemically synthesized
  source 1..22: mol_type = other DNA
tatggttagactaggcagatag

SEQ ID NO: 45211 - DNA, 22 bp, synthetic construct
  misc_feature 1..22: note = chemically synthesized
  source 1..22: mol_type = other DNA
atggttagactaggcagatagc

SEQ ID NO: 45212 - DNA, 22 bp, synthetic construct
  misc_feature 1..22: note = chemically synthesized
  source 1..22: mol_type = other DNA
tggttagactaggcagatagct

SEQ ID NO: 45213 - DNA, 22 bp, synthetic construct
  misc_feature 1..22: note = chemically synthesized
  source 1..22: mol_type = other DNA
gactaggcagatagctagatat

SEQ ID NO: 45214 - DNA, 22 bp, synthetic construct
  misc_feature 1..22: note = chemically synthesized
  source 1..22: mol_type = other DNA
ggcagatagctagatatgagca

SEQ ID NO: 45215 - DNA, 22 bp, synthetic construct
  misc_feature 1..22: note = chemically synthesized
  source 1..22: mol_type = other DNA
gatatgagcaggaggtggaagc

SEQ ID NO: 45216 - DNA, 22 bp, synthetic construct
  misc_feature 1..22: note = chemically synthesized
  source 1..22: mol_type = other DNA
agagaatggaggtctggagaat

SEQ ID NO: 45217 - DNA, 22 bp, synthetic construct
  misc_feature 1..22: note = chemically synthesized
  source 1..22: mol_type = other DNA
gagaatctgaaaccccagagat

SEQ ID NO: 45218 - DNA, 22 bp, synthetic construct
  misc_feature 1..22: note = chemically synthesized
  source 1..22: mol_type = other DNA
aaaccccagagattacccaagt

SEQ ID NO: 45219 - DNA, 22 bp, synthetic construct
  misc_feature 1..22: note = chemically synthesized
  source 1..22: mol_type = other DNA
cccaagtcctgcatgctagaca

SEQ ID NO: 45220 - DNA, 22 bp, synthetic construct
  misc_feature 1..22: note = chemically synthesized
  source 1..22: mol_type = other DNA
catgctagacatgagtggagga

SEQ ID NO: 45221 - DNA, 22 bp, synthetic construct
  misc_feature 1..22: note = chemically synthesized
  source 1..22: mol_type = other DNA
gacatgagtggaggagggggaa

SEQ ID NO: 45222 - DNA, 22 bp, synthetic construct
  misc_feature 1..22: note = chemically synthesized
  source 1..22: mol_type = other DNA
ggtagaaaagaatgccccttaa

SEQ ID NO: 45223 - DNA, 22 bp, synthetic construct
  misc_feature 1..22: note = chemically synthesized
  source 1..22: mol_type = other DNA
aagatgcccagcagtcgctcac

SEQ ID NO: 45224 - DNA, 22 bp, synthetic construct
  misc_feature 1..22: note = chemically synthesized
  source 1..22: mol_type = other DNA
agatgcccagcagtcgctcact

SEQ ID NO: 45225 - DNA, 22 bp, synthetic construct
  misc_feature 1..22: note = chemically synthesized
  source 1..22: mol_type = other DNA
actgtgcagttaacttttcaga

SEQ ID NO: 45226 - DNA, 22 bp, synthetic construct
  misc_feature 1..22: note = chemically synthesized
  source 1..22: mol_type = other DNA
tgcagttaacttttcagaatgc

SEQ ID NO: 45227 - DNA, 22 bp, synthetic construct
  misc_feature 1..22: note = chemically synthesized
  source 1..22: mol_type = other DNA
acttttcagaatgctgctagat

SEQ ID NO: 45228 - DNA, 22 bp, synthetic construct
  misc_feature 1..22: note = chemically synthesized
  source 1..22: mol_type = other DNA
ttcagaatgctgctagatacat

SEQ ID NO: 45229 - DNA, 22 bp, synthetic construct
  misc_feature 1..22: note = chemically synthesized
  source 1..22: mol_type = other DNA
tcagaatgctgctagatacatg

SEQ ID NO: 45230 - DNA, 22 bp, synthetic construct
  misc_feature 1..22: note = chemically synthesized
  source 1..22: mol_type = other DNA
cagaatgctgctagatacatgc

SEQ ID NO: 45231 - DNA, 22 bp, synthetic construct
  misc_feature 1..22: note = chemically synthesized
  source 1..22: mol_type = other DNA
agaatgctgctagatacatgct

SEQ ID NO: 45232 - DNA, 22 bp, synthetic construct
  misc_feature 1..22: note = chemically synthesized
  source 1..22: mol_type = other DNA
ctagatacatgctgatagggag

SEQ ID NO: 45233 - DNA, 22 bp, synthetic construct
  misc_feature 1..22: note = chemically synthesized
  source 1..22: mol_type = other DNA
gatacatgctgatagggaggga

SEQ ID NO: 45234 - DNA, 22 bp, synthetic construct
  misc_feature 1..22: note = chemically synthesized
  source 1..22: mol_type = other DNA
atagggagggaagagggcaaag

SEQ ID NO: 45235 - DNA, 22 bp, synthetic construct
  misc_feature 1..22: note = chemically synthesized
  source 1..22: mol_type = other DNA
ctaagagatacacggttgcagt

SEQ ID NO: 45236 - DNA, 22 bp, synthetic construct
  misc_feature 1..22: note = chemically synthesized
  source 1..22: mol_type = other DNA
agagatacacggttgcagttag

SEQ ID NO: 45237 - DNA, 22 bp, synthetic construct
  misc_feature 1..22: note = chemically synthesized
  source 1..22: mol_type = other DNA
cagttagtatacatctgagtgc

SEQ ID NO: 45238 - DNA, 22 bp, synthetic construct
  misc_feature 1..22: note = chemically synthesized
  source 1..22: mol_type = other DNA
gtatacatctgagtgctataca

SEQ ID NO: 45239 - DNA, 22 bp, synthetic construct
  misc_feature 1..22: note = chemically synthesized
  source 1..22: mol_type = other DNA
agtgctatacaaccttctttgg

SEQ ID NO: 45240 - DNA, 22 bp, synthetic construct
  misc_feature 1..22: note = chemically synthesized
  source 1..22: mol_type = other DNA
tacaaccttctttgggtggtgg

SEQ ID NO: 45241 - DNA, 22 bp, synthetic construct
  misc_feature 1..22: note = chemically synthesized
  source 1..22: mol_type = other DNA
ctttgggtggtggcaagaagca

SEQ ID NO: 45242 - DNA, 22 bp, synthetic construct
  misc_feature 1..22: note = chemically synthesized
  source 1..22: mol_type = other DNA
tttgggtggtggcaagaagcaa

SEQ ID NO: 45243 - DNA, 22 bp, synthetic construct
  misc_feature 1..22: note = chemically synthesized
  source 1..22: mol_type = other DNA
tgggtggtggcaagaagcaatg

SEQ ID NO: 45244 - DNA, 22 bp, synthetic construct
  misc_feature 1..22: note = chemically synthesized
  source 1..22: mol_type = other DNA
gggtggtggcaagaagcaatgc

SEQ ID NO: 45245 - DNA, 22 bp, synthetic construct
  misc_feature 1..22: note = chemically synthesized
  source 1..22: mol_type = other DNA
ggtggtggcaagaagcaatgca

SEQ ID NO: 45246 - DNA, 22 bp, synthetic construct
  misc_feature 1..22: note = chemically synthesized
  source 1..22: mol_type = other DNA
cgtagaattcatatcaaacacc

SEQ ID NO: 45247 - DNA, 22 bp, synthetic construct
  misc_feature 1..22: note = chemically synthesized
  source 1..22: mol_type = other DNA
atatcaaacacctgtatcacag

SEQ ID NO: 45248 - DNA, 22 bp, synthetic construct
  misc_feature 1..22: note = chemically synthesized
  source 1..22: mol_type = other DNA
tatcacaggtgttaaagaaaca

SEQ ID NO: 45249 - DNA, 22 bp, synthetic construct
  misc_feature 1..22: note = chemically synthesized
  source 1..22: mol_type = other DNA
aagaaacaagaaacattgtact

SEQ ID NO: 45250 - DNA, 22 bp, synthetic construct
  misc_feature 1..22: note = chemically synthesized
  source 1..22: mol_type = other DNA
tacttcttgtattcttaataat

SEQ ID NO: 45251 - DNA, 22 bp, synthetic construct
  misc_feature 1..22: note = chemically synthesized
  source 1..22: mol_type = other DNA
cttgtattcttaataatgattt

SEQ ID NO: 45252 - DNA, 22 bp, synthetic construct
  misc_feature 1..22: note = chemically synthesized
  source 1..22: mol_type = other DNA
ttgtattcttaataatgatttg

SEQ ID NO: 45253 - DNA, 22 bp, synthetic construct
  misc_feature 1..22: note = chemically synthesized
  source 1..22: mol_type = other DNA
gtattcttaataatgatttgca

SEQ ID NO: 45254 - DNA, 22 bp, synthetic construct
  misc_feature 1..22: note = chemically synthesized
  source 1..22: mol_type = other DNA
tattcttaataatgatttgcaa

SEQ ID NO: 45255 - DNA, 22 bp, synthetic construct
  misc_feature 1..22: note = chemically synthesized
  source 1..22: mol_type = other DNA
ttaataatgatttgcaatattg

SEQ ID NO: 45256 - DNA, 22 bp, synthetic construct
  misc_feature 1..22: note = chemically synthesized
  source 1..22: mol_type = other DNA
aataatgatttgcaatattgtc

SEQ ID NO: 45257 - DNA, 22 bp, synthetic construct
  misc_feature 1..22: note = chemically synthesized
  source 1..22: mol_type = other DNA
ataatgatttgcaatattgtct

SEQ ID NO: 45258 - DNA, 22 bp, synthetic construct
  misc_feature 1..22: note = chemically synthesized
  source 1..22: mol_type = other DNA
gcaatattgtctttagtatcac

SEQ ID NO: 45259 - DNA, 22 bp, synthetic construct
  misc_feature 1..22: note = chemically synthesized
  source 1..22: mol_type = other DNA
caatattgtctttagtatcact

SEQ ID NO: 45260 - DNA, 22 bp, synthetic construct
  misc_feature 1..22: note = chemically synthesized
  source 1..22: mol_type = other DNA
tctttagtatcactgcaaacct

SEQ ID NO: 45261 - DNA, 22 bp, synthetic construct
  misc_feature 1..22: note = chemically synthesized
  source 1..22: mol_type = other DNA
tagtatcactgcaaacctctat

SEQ ID NO: 45262 - DNA, 22 bp, synthetic construct
  misc_feature 1..22: note = chemically synthesized
  source 1..22: mol_type = other DNA
agtatcactgcaaacctctata

SEQ ID NO: 45263 - DNA, 22 bp, synthetic construct
  misc_feature 1..22: note = chemically synthesized
  source 1..22: mol_type = other DNA
gtatcactgcaaacctctataa

SEQ ID NO: 45264 - DNA, 22 bp, synthetic construct
  misc_feature 1..22: note = chemically synthesized
  source 1..22: mol_type = other DNA
caaacctctataaatatgattt

SEQ ID NO: 45265 - DNA, 22 bp, synthetic construct
  misc_feature 1..22: note = chemically synthesized
  source 1..22: mol_type = other DNA
tataaatatgatttttaaaaag

SEQ ID NO: 45266 - DNA, 22 bp, synthetic construct
  misc_feature 1..22: note = chemically synthesized
  source 1..22: mol_type = other DNA
taaatatgatttttaaaaagta

SEQ ID NO: 45267 - DNA, 22 bp, synthetic construct
  misc_feature 1..22: note = chemically synthesized
  source 1..22: mol_type = other DNA
ttaaaaagtatttctttaggtt

SEQ ID NO: 45268 - DNA, 22 bp, synthetic construct
  misc_feature 1..22: note = chemically synthesized
  source 1..22: mol_type = other DNA
taaaaagtatttctttaggttg

SEQ ID NO: 45269 - DNA, 22 bp, synthetic construct
  misc_feature 1..22: note = chemically synthesized
  source 1..22: mol_type = other DNA
aaaaagtatttctttaggttgg

SEQ ID NO: 45270 - DNA, 22 bp, synthetic construct
  misc_feature 1..22: note = chemically synthesized
  source 1..22: mol_type = other DNA
aaaagtatttctttaggttgga

SEQ ID NO: 45271 - DNA, 22 bp, synthetic construct
  misc_feature 1..22: note = chemically synthesized
  source 1..22: mol_type = other DNA
ctttaggttggaattacttcta

SEQ ID NO: 45272 - DNA, 22 bp, synthetic construct
  misc_feature 1..22: note = chemically synthesized
  source 1..22: mol_type = other DNA
tttaggttggaattacttctac

SEQ ID NO: 45273 - DNA, 22 bp, synthetic construct
  misc_feature 1..22: note = chemically synthesized
  source 1..22: mol_type = other DNA
taggttggaattacttctacgc

SEQ ID NO: 45274 - DNA, 22 bp, synthetic construct
  misc_feature 1..22: note = chemically synthesized
  source 1..22: mol_type = other DNA
aggttggaattacttctacgca

SEQ ID NO: 45275 - DNA, 22 bp, synthetic construct
  misc_feature 1..22: note = chemically synthesized
  source 1..22: mol_type = other DNA
ggttggaattacttctacgcat

SEQ ID NO: 45276 - DNA, 22 bp, synthetic construct
  misc_feature 1..22: note = chemically synthesized
  source 1..22: mol_type = other DNA
gaattacttctacgcattgact

SEQ ID NO: 45277 - DNA, 22 bp, synthetic construct
  misc_feature 1..22: note = chemically synthesized
  source 1..22: mol_type = other DNA
cttctacgcattgacttatctt

SEQ ID NO: 45278 - DNA, 22 bp, synthetic construct
  misc_feature 1..22: note = chemically synthesized
  source 1..22: mol_type = other DNA
ctacgcattgacttatcttcct

SEQ ID NO: 45279 - DNA, 22 bp, synthetic construct
  misc_feature 1..22: note = chemically synthesized
  source 1..22: mol_type = other DNA
tacgcattgacttatcttcctg

SEQ ID NO: 45280 - DNA, 22 bp, synthetic construct
  misc_feature 1..22: note = chemically synthesized
  source 1..22: mol_type = other DNA
cgcattgacttatcttcctggg

SEQ ID NO: 45281 - DNA, 22 bp, synthetic construct
  misc_feature 1..22: note = chemically synthesized
  source 1..22: mol_type = other DNA
acttatcttcctgggtttcatt

SEQ ID NO: 45282 - DNA, 22 bp, synthetic construct
  misc_feature 1..22: note = chemically synthesized
  source 1..22: mol_type = other DNA
atcttcctgggtttcattagcc

SEQ ID NO: 45283 - DNA, 22 bp, synthetic construct
  misc_feature 1..22: note = chemically synthesized
  source 1..22: mol_type = other DNA
tcttcctgggtttcattagccg

SEQ ID NO: 45284 - DNA, 22 bp, synthetic construct
  misc_feature 1..22: note = chemically synthesized
  source 1..22: mol_type = other DNA
cctgggtttcattagccgtacc

SEQ ID NO: 45285 - DNA, 22 bp, synthetic construct
  misc_feature 1..22: note = chemically synthesized
  source 1..22: mol_type = other DNA
ctgggtttcattagccgtaccc

SEQ ID NO: 45286 - DNA, 22 bp, synthetic construct
  misc_feature 1..22: note = chemically synthesized
  source 1..22: mol_type = other DNA
ggtttcattagccgtacccgtt

SEQ ID NO: 45287 - DNA, 22 bp, synthetic construct
  misc_feature 1..22: note = chemically synthesized
  source 1..22: mol_type = other DNA
cattagccgtacccgttgtact

SEQ ID NO: 45288 - DNA, 22 bp, synthetic construct
  misc_feature 1..22: note = chemically synthesized
  source 1..22: mol_type = other DNA
attagccgtacccgttgtactt

SEQ ID NO: 45289 - DNA, 22 bp, synthetic construct
  misc_feature 1..22: note = chemically synthesized
  source 1..22: mol_type = other DNA
gccgtacccgttgtactttctt

SEQ ID NO: 45290 - DNA, 22 bp, synthetic construct
  misc_feature 1..22: note = chemically synthesized
  source 1..22: mol_type = other DNA
tactttcttccttaccactgtt

SEQ ID NO: 45291 - DNA, 22 bp, synthetic construct
  misc_feature 1..22: note = chemically synthesized
  source 1..22: mol_type = other DNA
tcttccttaccactgtttatct

SEQ ID NO: 45292 - DNA, 22 bp, synthetic construct
  misc_feature 1..22: note = chemically synthesized
  source 1..22: mol_type = other DNA
cttccttaccactgtttatctc

SEQ ID NO: 45293 - DNA, 22 bp, synthetic construct
  misc_feature 1..22: note = chemically synthesized
  source 1..22: mol_type = other DNA
ttccttaccactgtttatctca

SEQ ID NO: 45294 - DNA, 22 bp, synthetic construct
  misc_feature 1..22: note = chemically synthesized
  source 1..22: mol_type = other DNA
ccttaccactgtttatctcaaa

SEQ ID NO: 45295 - DNA, 22 bp, synthetic construct
  misc_feature 1..22: note = chemically synthesized
  source 1..22: mol_type = other DNA
cttaccactgtttatctcaaac

SEQ ID NO: 45296 - DNA, 22 bp, synthetic construct
  misc_feature 1..22: note = chemically synthesized
  source 1..22: mol_type = other DNA
accactgtttatctcaaactct

SEQ ID NO: 45297 - DNA, 22 bp, synthetic construct
  misc_feature 1..22: note = chemically synthesized
  source 1..22: mol_type = other DNA
ccactgtttatctcaaactctt

SEQ ID NO: 45298 - DNA, 22 bp, synthetic construct
  misc_feature 1..22: note = chemically synthesized
  source 1..22: mol_type = other DNA
tttatctcaaactcttgagatt

SEQ ID NO: 45299 - DNA, 22 bp, synthetic construct
  misc_feature 1..22: note = chemically synthesized
  source 1..22: mol_type = other DNA
atctcaaactcttgagattaaa

SEQ ID NO: 45300 - DNA, 22 bp, synthetic construct
  misc_feature 1..22: note = chemically synthesized
  source 1..22: mol_type = other DNA
tctcaaactcttgagattaaag

SEQ ID NO: 45301 - DNA, 22 bp, synthetic construct
  misc_feature 1..22: note = chemically synthesized
  source 1..22: mol_type = other DNA
aaactcttgagattaaagtatg

SEQ ID NO: 45302 - DNA, 22 bp, synthetic construct
  misc_feature 1..22: note = chemically synthesized
  source 1..22: mol_type = other DNA
ttgagattaaagtatgggctca

SEQ ID NO: 45303 - DNA, 22 bp, synthetic construct
  misc_feature 1..22: note = chemically synthesized
  source 1..22: mol_type = other DNA
gagattaaagtatgggctcagg

SEQ ID NO: 45304 - DNA, 22 bp, synthetic construct
  misc_feature 1..22: note = chemically synthesized
  source 1..22: mol_type = other DNA
agattaaagtatgggctcagga

SEQ ID NO: 45305 - DNA, 22 bp, synthetic construct
  misc_feature 1..22: note = chemically synthesized
  source 1..22: mol_type = other DNA
aagtatgggctcaggagggagc

SEQ ID NO: 45306 - DNA, 22 bp, synthetic construct
  misc_feature 1..22: note = chemically synthesized
  source 1..22: mol_type = other DNA
aggagggagcgaggagcttcag

SEQ ID NO: 45307 - DNA, 22 bp, synthetic construct
  misc_feature 1..22: note = chemically synthesized
  source 1..22: mol_type = other DNA
caggactctcacggacctccag

SEQ ID NO: 45308 - DNA, 22 bp, synthetic construct
  misc_feature 1..22: note = chemically synthesized
  source 1..22: mol_type = other DNA
aggactctcacggacctccagc

SEQ ID NO: 45309 - DNA, 22 bp, synthetic construct
  misc_feature 1..22: note = chemically synthesized
  source 1..22: mol_type = other DNA
tcacggacctccagcacagtgt

SEQ ID NO: 45310 - DNA, 22 bp, synthetic construct
  misc_feature 1..22: note = chemically synthesized
  source 1..22: mol_type = other DNA
acggacctccagcacagtgtag

SEQ ID NO: 45311 - DNA, 22 bp, synthetic construct
  misc_feature 1..22: note = chemically synthesized
  source 1..22: mol_type = other DNA
cagcacagtgtagctgccttat

SEQ ID NO: 45312 - DNA, 22 bp, synthetic construct
  misc_feature 1..22: note = chemically synthesized
  source 1..22: mol_type = other DNA
ccttatggaaaagtggccacac

SEQ ID NO: 45313 - DNA, 22 bp, synthetic construct
  misc_feature 1..22: note = chemically synthesized
  source 1..22: mol_type = other DNA
atggaaaagtggccacactgtt

SEQ ID NO: 45314 - DNA, 22 bp, synthetic construct
  misc_feature 1..22: note = chemically synthesized
  source 1..22: mol_type = other DNA
tggaaaagtggccacactgttt

SEQ ID NO: 45315 - DNA, 22 bp, synthetic construct
  misc_feature 1..22: note = chemically synthesized
  source 1..22: mol_type = other DNA
ttttctgcactggtccctgccc

SEQ ID NO: 45316 - DNA, 22 bp, synthetic construct
  misc_feature 1..22: note = chemically synthesized
  source 1..22: mol_type = other DNA
tctgcactggtccctgccccta

SEQ ID NO: 45317 - DNA, 22 bp, synthetic construct
  misc_feature 1..22: note = chemically synthesized
  source 1..22: mol_type = other DNA
ctgcactggtccctgcccctac

SEQ ID NO: 45318 - DNA, 22 bp, synthetic construct
  misc_feature 1..22: note = chemically synthesized
  source 1..22: mol_type = other DNA
tgcactggtccctgcccctact

SEQ ID NO: 45319 - DNA, 22 bp, synthetic construct
  misc_feature 1..22: note = chemically synthesized
  source 1..22: mol_type = other DNA
cactggtccctgcccctactat

SEQ ID NO: 45320 - DNA, 22 bp, synthetic construct
  misc_feature 1..22: note = chemically synthesized
  source 1..22: mol_type = other DNA
gtccctgcccctactattcctc

SEQ ID NO: 45321 - DNA, 22 bp, synthetic construct
  misc_feature 1..22: note = chemically synthesized
  source 1..22: mol_type = other DNA
cccctactattcctcactgggc

SEQ ID NO: 45322 - DNA, 22 bp, synthetic construct
  misc_feature 1..22: note = chemically synthesized
  source 1..22: mol_type = other DNA
ctattcctcactgggcagagca

SEQ ID NO: 45323 - DNA, 22 bp, synthetic construct
  misc_feature 1..22: note = chemically synthesized
  source 1..22: mol_type = other DNA
ttcctcactgggcagagcacag

SEQ ID NO: 45324 - DNA, 22 bp, synthetic construct
  misc_feature 1..22: note = chemically synthesized
  source 1..22: mol_type = other DNA
ctcactgggcagagcacagcca

SEQ ID NO: 45325 - DNA, 22 bp, synthetic construct
  misc_feature 1..22: note = chemically synthesized
  source 1..22: mol_type = other DNA
actgggcagagcacagccaccc

SEQ ID NO: 45326 - DNA, 22 bp, synthetic construct
  misc_feature 1..22: note = chemically synthesized
  source 1..22: mol_type = other DNA
ggcagagcacagccaccctggc

SEQ ID NO: 45327 - DNA, 22 bp, synthetic construct
  misc_feature 1..22: note = chemically synthesized
  source 1..22: mol_type = other DNA
gccctgcctgaacattttagtc

SEQ ID NO: 45328 - DNA, 22 bp, synthetic construct
  misc_feature 1..22: note = chemically synthesized
  source 1..22: mol_type = other DNA
cctgaacattttagtcagtgtt

SEQ ID NO: 45329 - DNA, 22 bp, synthetic construct
  misc_feature 1..22: note = chemically synthesized
  source 1..22: mol_type = other DNA
aacattttagtcagtgttggct

SEQ ID NO: 45330 - DNA, 22 bp, synthetic construct
  misc_feature 1..22: note = chemically synthesized
  source 1..22: mol_type = other DNA
tagtcagtgttggctctgtgct

SEQ ID NO: 45331 - DNA, 22 bp, synthetic construct
  misc_feature 1..22: note = chemically synthesized
  source 1..22: mol_type = other DNA
agtcagtgttggctctgtgctt

SEQ ID NO: 45332 - DNA, 22 bp, synthetic construct
  misc_feature 1..22: note = chemically synthesized
  source 1..22: mol_type = other DNA
gtcagtgttggctctgtgcttc

SEQ ID NO: 45333 - DNA, 22 bp, synthetic construct
  misc_feature 1..22: note = chemically synthesized
  source 1..22: mol_type = other DNA
gctctgtgcttctctggggagg

SEQ ID NO: 45334 - DNA, 22 bp, synthetic construct
  misc_feature 1..22: note = chemically synthesized
  source 1..22: mol_type = other DNA
tgtgcttctctggggaggaaat

SEQ ID NO: 45335 - DNA, 22 bp, synthetic construct
  misc_feature 1..22: note = chemically synthesized
  source 1..22: mol_type = other DNA
tgcttctctggggaggaaatcc

SEQ ID NO: 45336 - DNA, 22 bp, synthetic construct
  misc_feature 1..22: note = chemically synthesized
  source 1..22: mol_type = other DNA
ctctggggaggaaatccaagag

SEQ ID NO: 45337 - DNA, 22 bp, synthetic construct
  misc_feature 1..22: note = chemically synthesized
  source 1..22: mol_type = other DNA
tctggggaggaaatccaagaga

SEQ ID NO: 45338 - DNA, 22 bp, synthetic construct
  misc_feature 1..22: note = chemically synthesized
  source 1..22: mol_type = other DNA
tggggaggaaatccaagagaca

SEQ ID NO: 45339 - DNA, 22 bp, synthetic construct
  misc_feature 1..22: note = chemically synthesized
  source 1..22: mol_type = other DNA
gggaggaaatccaagagacaac

SEQ ID NO: 45340 - DNA, 22 bp, synthetic construct
  misc_feature 1..22: note = chemically synthesized
  source 1..22: mol_type = other DNA
tgccatttcagctgcagcagta

SEQ ID NO: 45341 - DNA, 22 bp, synthetic construct
  misc_feature 1..22: note = chemically synthesized
  source 1..22: mol_type = other DNA
ccatttcagctgcagcagtacc

SEQ ID NO: 45342 - DNA, 22 bp, synthetic construct
  misc_feature 1..22: note = chemically synthesized
  source 1..22: mol_type = other DNA
cagctgcagcagtaccaccgtt

SEQ ID NO: 45343 - DNA, 22 bp, synthetic construct
  misc_feature 1..22: note = chemically synthesized
  source 1..22: mol_type = other DNA
agctgcagcagtaccaccgtta

SEQ ID NO: 45344 - DNA, 22 bp, synthetic construct
  misc_feature 1..22: note = chemically synthesized
  source 1..22: mol_type = other DNA
cagcagtaccaccgttaatgcc

SEQ ID NO: 45345 - DNA, 22 bp, synthetic construct
  misc_feature 1..22: note = chemically synthesized
  source 1..22: mol_type = other DNA
atgcccttgggcttgagaaaga

SEQ ID NO: 45346 - DNA, 22 bp, synthetic construct
  misc_feature 1..22: note = chemically synthesized
  source 1..22: mol_type = other DNA
gggcttgagaaagaagggacct

SEQ ID NO: 45347 - DNA, 22 bp, synthetic construct
  misc_feature 1..22: note = chemically synthesized
  source 1..22: mol_type = other DNA
ggcttgagaaagaagggacctg

SEQ ID NO: 45348 - DNA, 22 bp, synthetic construct
  misc_feature 1..22: note = chemically synthesized
  source 1..22: mol_type = other DNA
gagaaagaagggacctggccac

SEQ ID NO: 45349 - DNA, 22 bp, synthetic construct
  misc_feature 1..22: note = chemically synthesized
  source 1..22: mol_type = other DNA
agaaagaagggacctggccact

SEQ ID NO: 45350 - DNA, 22 bp, synthetic construct
  misc_feature 1..22: note = chemically synthesized
  source 1..22: mol_type = other DNA
gccacttccctgacacctccag

SEQ ID NO: 45351 - DNA, 22 bp, synthetic construct
  misc_feature 1..22: note = chemically synthesized
  source 1..22: mol_type = other DNA
ccctgacacctccagcacacag

SEQ ID NO: 45352 - DNA, 22 bp, synthetic construct
  misc_feature 1..22: note = chemically synthesized
  source 1..22: mol_type = other DNA
cctgacacctccagcacacagc

SEQ ID NO: 45353 - DNA, 22 bp, synthetic construct
  misc_feature 1..22: note = chemically synthesized
  source 1..22: mol_type = other DNA
acacctccagcacacagcaggg

SEQ ID NO: 45354 - DNA, 22 bp, synthetic construct
  misc_feature 1..22: note = chemically synthesized
  source 1..22: mol_type = other DNA
cagcacacagcagggaaagaat

SEQ ID NO: 45355 - DNA, 22 bp, synthetic construct
  misc_feature 1..22: note = chemically synthesized
  source 1..22: mol_type = other DNA
cagtttctctttcttgtgagct

SEQ ID NO: 45356 - DNA, 22 bp, synthetic construct
  misc_feature 1..22: note = chemically synthesized
  source 1..22: mol_type = other DNA
ctctttcttgtgagctttcacc

SEQ ID NO: 45357 - DNA, 22 bp, synthetic construct
  misc_feature 1..22: note = chemically synthesized
  source 1..22: mol_type = other DNA
tctttcttgtgagctttcacct

SEQ ID NO: 45358 - DNA, 22 bp, synthetic construct
  misc_feature 1..22: note = chemically synthesized
  source 1..22: mol_type = other DNA
tttcttgtgagctttcacctgc

SEQ ID NO: 45359 - DNA, 22 bp, synthetic construct
  misc_feature 1..22: note = chemically synthesized
  source 1..22: mol_type = other DNA
tcttgtgagctttcacctgcta

SEQ ID NO: 45360 - DNA, 22 bp, synthetic construct
  misc_feature 1..22: note = chemically synthesized
  source 1..22: mol_type = other DNA
cttgtgagctttcacctgctac

SEQ ID NO: 45361 - DNA, 22 bp, synthetic construct
  misc_feature 1..22: note = chemically synthesized
  source 1..22: mol_type = other DNA
ttgtgagctttcacctgctact

SEQ ID NO: 45362 - DNA, 22 bp, synthetic construct
  misc_feature 1..22: note = chemically synthesized
  source 1..22: mol_type = other DNA
gtgagctttcacctgctactct

SEQ ID NO: 45363 - DNA, 22 bp, synthetic construct
  misc_feature 1..22: note = chemically synthesized
  source 1..22: mol_type = other DNA
tgagctttcacctgctactctt

SEQ ID NO: 45364 - DNA, 22 bp, synthetic construct
  misc_feature 1..22: note = chemically synthesized
  source 1..22: mol_type = other DNA
tcacctgctactcttcaccagg

SEQ ID NO: 45365 - DNA, 22 bp, synthetic construct
  misc_feature 1..22: note = chemically synthesized
  source 1..22: mol_type = other DNA
cacctgctactcttcaccaggc

SEQ ID NO: 45366 - DNA, 22 bp, synthetic construct
  misc_feature 1..22: note = chemically synthesized
  source 1..22: mol_type = other DNA
acctgctactcttcaccaggca

SEQ ID NO: 45367 - DNA, 22 bp, synthetic construct
  misc_feature 1..22: note = chemically synthesized
  source 1..22: mol_type = other DNA
ctactcttcaccaggcaaggct

SEQ ID NO: 45368 - DNA, 22 bp, synthetic construct
  misc_feature 1..22: note = chemically synthesized
  source 1..22: mol_type = other DNA
ctcttcaccaggcaaggctcct

SEQ ID NO: 45369 - DNA, 22 bp, synthetic construct
  misc_feature 1..22: note = chemically synthesized
  source 1..22: mol_type = other DNA
ttcaccaggcaaggctcctggc

SEQ ID NO: 45370 - DNA, 22 bp, synthetic construct
  misc_feature 1..22: note = chemically synthesized
  source 1..22: mol_type = other DNA
caccaggcaaggctcctggctt

SEQ ID NO: 45371 - DNA, 22 bp, synthetic construct
  misc_feature 1..22: note = chemically synthesized
  source 1..22: mol_type = other DNA
accaggcaaggctcctggcttg

SEQ ID NO: 45372 - DNA, 22 bp, synthetic construct
  misc_feature 1..22: note = chemically synthesized
  source 1..22: mol_type = other DNA
ctggcttgggcccacagtgcag

SEQ ID NO: 45373 - DNA, 22 bp, synthetic construct
  misc_feature 1..22: note = chemically synthesized
  source 1..22: mol_type = other DNA
gcttgggcccacagtgcaggca

SEQ ID NO: 45374 - DNA, 22 bp, synthetic construct
  misc_feature 1..22: note = chemically synthesized
  source 1..22: mol_type = other DNA
gggcccacagtgcaggcacctc

SEQ ID NO: 45375 - DNA, 22 bp, synthetic construct
  misc_feature 1..22: note = chemically synthesized
  source 1..22: mol_type = other DNA
ggcccacagtgcaggcacctcg

SEQ ID NO: 45376 - DNA, 22 bp, synthetic construct
  misc_feature 1..22: note = chemically synthesized
  source 1..22: mol_type = other DNA
gaactcagttgaacatttccac

SEQ ID NO: 45377 - DNA, 22 bp, synthetic construct
  misc_feature 1..22: note = chemically synthesized
  source 1..22: mol_type = other DNA
agttgaacatttccactggctg

SEQ ID NO: 45378 - DNA, 22 bp, synthetic construct
  misc_feature 1..22: note = chemically synthesized
  source 1..22: mol_type = other DNA
aacatttccactggctgcactc

SEQ ID NO: 45379 - DNA, 22 bp, synthetic construct
  misc_feature 1..22: note = chemically synthesized
  source 1..22: mol_type = other DNA
ccactggctgcactctgtgttt

SEQ ID NO: 45380 - DNA, 22 bp, synthetic construct
  misc_feature 1..22: note = chemically synthesized
  source 1..22: mol_type = other DNA
cactggctgcactctgtgtttt

SEQ ID NO: 45381 - DNA, 22 bp, synthetic construct
  misc_feature 1..22: note = chemically synthesized
  source 1..22: mol_type = other DNA
gctgcactctgtgtttttgtgg

SEQ ID NO: 45382 - DNA, 22 bp, synthetic construct
  misc_feature 1..22: note = chemically synthesized
  source 1..22: mol_type = other DNA
cactctgtgtttttgtggggtg

SEQ ID NO: 45383 - DNA, 22 bp, synthetic construct
  misc_feature 1..22: note = chemically synthesized
  source 1..22: mol_type = other DNA
tgtgtttttgtggggtgaagct

SEQ ID NO: 45384 - DNA, 22 bp, synthetic construct
  misc_feature 1..22: note = chemically synthesized
  source 1..22: mol_type = other DNA
tgtttttgtggggtgaagctcc

SEQ ID NO: 45385 - DNA, 22 bp, synthetic construct
  misc_feature 1..22: note = chemically synthesized
  source 1..22: mol_type = other DNA
ttgtggggtgaagctcccagag

SEQ ID NO: 45386 - DNA, 22 bp, synthetic construct
  misc_feature 1..22: note = chemically synthesized
  source 1..22: mol_type = other DNA
tgtggggtgaagctcccagagg

SEQ ID NO: 45387 - DNA, 22 bp, synthetic construct
  misc_feature 1..22: note = chemically synthesized
  source 1..22: mol_type = other DNA
gtggggtgaagctcccagaggt

SEQ ID NO: 45388 - DNA, 22 bp, synthetic construct
  misc_feature 1..22: note = chemically synthesized
  source 1..22: mol_type = other DNA
tggggtgaagctcccagaggtg

SEQ ID NO: 45389 - DNA, 22 bp, synthetic construct
  misc_feature 1..22: note = chemically synthesized
  source 1..22: mol_type = other DNA
ccagaggtgactgaaagtcctt

SEQ ID NO: 45390 - DNA, 22 bp, synthetic construct
  misc_feature 1..22: note = chemically synthesized
  source 1..22: mol_type = other DNA
aaagtccttctgccactaacac

SEQ ID NO: 45391 - DNA, 22 bp, synthetic construct
  misc_feature 1..22: note = chemically synthesized
  source 1..22: mol_type = other DNA
ctgccactaacactgcagtcat

SEQ ID NO: 45392 - DNA, 22 bp, synthetic construct
  misc_feature 1..22: note = chemically synthesized
  source 1..22: mol_type = other DNA
tgccactaacactgcagtcata

SEQ ID NO: 45393 - DNA, 22 bp, synthetic construct
  misc_feature 1..22: note = chemically synthesized
  source 1..22: mol_type = other DNA
ccactaacactgcagtcatact

SEQ ID NO: 45394 - DNA, 22 bp, synthetic construct
  misc_feature 1..22: note = chemically synthesized
  source 1..22: mol_type = other DNA
acactgcagtcatactgccctt

SEQ ID NO: 45395 - DNA, 22 bp, synthetic construct
  misc_feature 1..22: note = chemically synthesized
  source 1..22: mol_type = other DNA
cagtcatactgcccttgctgta

SEQ ID NO: 45396 - DNA, 22 bp, synthetic construct
  misc_feature 1..22: note = chemically synthesized
  source 1..22: mol_type = other DNA
cccttgctgtacttggactagg

SEQ ID NO: 45397 - DNA, 22 bp, synthetic construct
  misc_feature 1..22: note = chemically synthesized
  source 1..22: mol_type = other DNA
gctgtacttggactagggaagg

SEQ ID NO: 45398 - DNA, 22 bp, synthetic construct
  misc_feature 1..22: note = chemically synthesized
  source 1..22: mol_type = other DNA
ctgtacttggactagggaagga

SEQ ID NO: 45399 - DNA, 22 bp, synthetic construct
  misc_feature 1..22: note = chemically synthesized
  source 1..22: mol_type = other DNA
tacttggactagggaaggaaaa

SEQ ID NO: 45400 - DNA, 22 bp, synthetic construct
  misc_feature 1..22: note = chemically synthesized
  source 1..22: mol_type = other DNA
ggactagggaaggaaaaaagat

SEQ ID NO: 45401 - DNA, 22 bp, synthetic construct
  misc_feature 1..22: note = chemically synthesized
  source 1..22: mol_type = other DNA
gactagggaaggaaaaaagatc

SEQ ID NO: 45402 - DNA, 22 bp, synthetic construct
  misc_feature 1..22: note = chemically synthesized
  source 1..22: mol_type = other DNA
gggaaggaaaaaagatcctgag

SEQ ID NO: 45403 - DNA, 22 bp, synthetic construct
  misc_feature 1..22: note = chemically synthesized
  source 1..22: mol_type = other DNA
agtgctttactcacaccccagt

SEQ ID NO: 45404 - DNA, 22 bp, synthetic construct
  misc_feature 1..22: note = chemically synthesized
  source 1..22: mol_type = other DNA
tactcacaccccagtgtgcccc

SEQ ID NO: 45405 - DNA, 22 bp, synthetic construct
  misc_feature 1..22: note = chemically synthesized
  source 1..22: mol_type = other DNA
actcacaccccagtgtgcccca

SEQ ID NO: 45406 - DNA, 22 bp, synthetic construct
  misc_feature 1..22: note = chemically synthesized
  source 1..22: mol_type = other DNA
ctcacaccccagtgtgccccag

SEQ ID NO: 45407 - DNA, 22 bp, synthetic construct
  misc_feature 1..22: note = chemically synthesized
  source 1..22: mol_type = other DNA
acaccccagtgtgccccagcca

SEQ ID NO: 45408 - DNA, 22 bp, synthetic construct
  misc_feature 1..22: note = chemically synthesized
  source 1..22: mol_type = other DNA
tggaaaagaggccagtgtgtca

SEQ ID NO: 45409 - DNA, 22 bp, synthetic construct
  misc_feature 1..22: note = chemically synthesized
  source 1..22: mol_type = other DNA
caagcaccctgaggcccctgcc

SEQ ID NO: 45410 - DNA, 22 bp, synthetic construct
  misc_feature 1..22: note = chemically synthesized
  source 1..22: mol_type = other DNA
aggcccctgcccctgctgcccc

SEQ ID NO: 45411 - DNA, 22 bp, synthetic construct
  misc_feature 1..22: note = chemically synthesized
  source 1..22: mol_type = other DNA
cccctgctgcccccaagctgta

SEQ ID NO: 45412 - DNA, 22 bp, synthetic construct
  misc_feature 1..22: note = chemically synthesized
  source 1..22: mol_type = other DNA
ctgcccccaagctgtagagcca

SEQ ID NO: 45413 - DNA, 22 bp, synthetic construct
  misc_feature 1..22: note = chemically synthesized
  source 1..22: mol_type = other DNA
cccccaagctgtagagccagaa

SEQ ID NO: 45414 - DNA, 22 bp, synthetic construct
  misc_feature 1..22: note = chemically synthesized
  source 1..22: mol_type = other DNA
tagagccagaatataaagctgg

SEQ ID NO: 45415 - DNA, 22 bp, synthetic construct
  misc_feature 1..22: note = chemically synthesized
  source 1..22: mol_type = other DNA
gcagaaaaatgtaaaaaggcta

SEQ ID NO: 45416 - DNA, 22 bp, synthetic construct
  misc_feature 1..22: note = chemically synthesized
  source 1..22: mol_type = other DNA
gactggcttagcctcccagcct

SEQ ID NO: 45417 - DNA, 22 bp, synthetic construct
  misc_feature 1..22: note = chemically synthesized
  source 1..22: mol_type = other DNA
gcttagcctcccagcctacatc

SEQ ID NO: 45418 - DNA, 22 bp, synthetic construct
  misc_feature 1..22: note = chemically synthesized
  source 1..22: mol_type = other DNA
agcctcccagcctacatctttc

SEQ ID NO: 45419 - DNA, 22 bp, synthetic construct
  misc_feature 1..22: note = chemically synthesized
  source 1..22: mol_type = other DNA
gcctcccagcctacatctttct

SEQ ID NO: 45420 - DNA, 22 bp, synthetic construct
  misc_feature 1..22: note = chemically synthesized
  source 1..22: mol_type = other DNA
ccagcctacatctttctcctgt

SEQ ID NO: 45421 - DNA, 22 bp, synthetic construct
  misc_feature 1..22: note = chemically synthesized
  source 1..22: mol_type = other DNA
catctttctcctgtgctggatc

SEQ ID NO: 45422 - DNA, 22 bp, synthetic construct
  misc_feature 1..22: note = chemically synthesized
  source 1..22: mol_type = other DNA
tctcctgtgctggatccttcct

SEQ ID NO: 45423 - DNA, 22 bp, synthetic construct
  misc_feature 1..22: note = chemically synthesized
  source 1..22: mol_type = other DNA
ctcctgtgctggatccttcctg

SEQ ID NO: 45424 - DNA, 22 bp, synthetic construct
  misc_feature 1..22: note = chemically synthesized
  source 1..22: mol_type = other DNA
tcctgtgctggatccttcctgc

SEQ ID NO: 45425 - DNA, 22 bp, synthetic construct
  misc_feature 1..22: note = chemically synthesized
  source 1..22: mol_type = other DNA
ctgtgctggatccttcctgctc

SEQ ID NO: 45426 - DNA, 22 bp, synthetic construct
  misc_feature 1..22: note = chemically synthesized
  source 1..22: mol_type = other DNA
tgctggatccttcctgctcttg

SEQ ID NO: 45427 - DNA, 22 bp, synthetic construct
  misc_feature 1..22: note = chemically synthesized
  source 1..22: mol_type = other DNA
gatccttcctgctcttgaacat

SEQ ID NO: 45428 - DNA, 22 bp, synthetic construct
  misc_feature 1..22: note = chemically synthesized
  source 1..22: mol_type = other DNA
cctgctcttgaacatcggactc

SEQ ID NO: 45429 - DNA, 22 bp, synthetic construct
  misc_feature 1..22: note = chemically synthesized
  source 1..22: mol_type = other DNA
ctgctcttgaacatcggactcc

SEQ ID NO: 45430 - DNA, 22 bp, synthetic construct
  misc_feature 1..22: note = chemically synthesized
  source 1..22: mol_type = other DNA
ctcttgaacatcggactccaag

SEQ ID NO: 45431 - DNA, 22 bp, synthetic construct
  misc_feature 1..22: note = chemically synthesized
  source 1..22: mol_type = other DNA
ttgaacatcggactccaagttc

SEQ ID NO: 45432 - DNA, 22 bp, synthetic construct
  misc_feature 1..22: note = chemically synthesized
  source 1..22: mol_type = other DNA
gaacatcggactccaagttctt

SEQ ID NO: 45433 - DNA, 22 bp, synthetic construct
  misc_feature 1..22: note = chemically synthesized
  source 1..22: mol_type = other DNA
aacatcggactccaagttcttc

SEQ ID NO: 45434 - DNA, 22 bp, synthetic construct
  misc_feature 1..22: note = chemically synthesized
  source 1..22: mol_type = other DNA
caagttcttcagctgtgggact

SEQ ID NO: 45435 - DNA, 22 bp, synthetic construct
  misc_feature 1..22: note = chemically synthesized
  source 1..22: mol_type = other DNA
ttcagctgtgggacttggactg

SEQ ID NO: 45436 - DNA, 22 bp, synthetic construct
  misc_feature 1..22: note = chemically synthesized
  source 1..22: mol_type = other DNA
cagctgtgggacttggactgtc

SEQ ID NO: 45437 - DNA, 22 bp, synthetic construct
  misc_feature 1..22: note = chemically synthesized
  source 1..22: mol_type = other DNA
agctgtgggacttggactgtct

SEQ ID NO: 45438 - DNA, 22 bp, synthetic construct
  misc_feature 1..22: note = chemically synthesized
  source 1..22: mol_type = other DNA
tgggacttggactgtcttcctt

SEQ ID NO: 45439 - DNA, 22 bp, synthetic construct
  misc_feature 1..22: note = chemically synthesized
  source 1..22: mol_type = other DNA
ggactgtcttccttgctcctca

SEQ ID NO: 45440 - DNA, 22 bp, synthetic construct
  misc_feature 1..22: note = chemically synthesized
  source 1..22: mol_type = other DNA
gactgtcttccttgctcctcag

SEQ ID NO: 45441 - DNA, 22 bp, synthetic construct
  misc_feature 1..22: note = chemically synthesized
  source 1..22: mol_type = other DNA
tcttccttgctcctcagattgc

SEQ ID NO: 45442 - DNA, 22 bp, synthetic construct
  misc_feature 1..22: note = chemically synthesized
  source 1..22: mol_type = other DNA
ccttgctcctcagattgcaggt

SEQ ID NO: 45443 - DNA, 22 bp, synthetic construct
  misc_feature 1..22: note = chemically synthesized
  source 1..22: mol_type = other DNA
cttgctcctcagattgcaggtg

SEQ ID NO: 45444 - DNA, 22 bp, synthetic construct
  misc_feature 1..22: note = chemically synthesized
  source 1..22: mol_type = other DNA
gctcctcagattgcaggtggcc

SEQ ID NO: 45445 - DNA, 22 bp, synthetic construct
  misc_feature 1..22: note = chemically synthesized
  source 1..22: mol_type = other DNA
ctcctcagattgcaggtggcct

SEQ ID NO: 45446 - DNA, 22 bp, synthetic construct
  misc_feature 1..22: note = chemically synthesized
  source 1..22: mol_type = other DNA
ctcagattgcaggtggcctatt

SEQ ID NO: 45447 - DNA, 22 bp, synthetic construct
  misc_feature 1..22: note = chemically synthesized
  source 1..22: mol_type = other DNA
agattgcaggtggcctattatg

SEQ ID NO: 45448 - DNA, 22 bp, synthetic construct
  misc_feature 1..22: note = chemically synthesized
  source 1..22: mol_type = other DNA
caggtggcctattatgggacct

SEQ ID NO: 45449 - DNA, 22 bp, synthetic construct
  misc_feature 1..22: note = chemically synthesized
  source 1..22: mol_type = other DNA
ttatgggaccttgtaatcttgt

SEQ ID NO: 45450 - DNA, 22 bp, synthetic construct
  misc_feature 1..22: note = chemically synthesized
  source 1..22: mol_type = other DNA
tgggaccttgtaatcttgtgag

SEQ ID NO: 45451 - DNA, 22 bp, synthetic construct
  misc_feature 1..22: note = chemically synthesized
  source 1..22: mol_type = other DNA
gtaatcttgtgagttaatacca

SEQ ID NO: 45452 - DNA, 22 bp, synthetic construct
  misc_feature 1..22: note = chemically synthesized
  source 1..22: mol_type = other DNA
taatcttgtgagttaataccac

SEQ ID NO: 45453 - DNA, 22 bp, synthetic construct
  misc_feature 1..22: note = chemically synthesized
  source 1..22: mol_type = other DNA
gtgagttaataccacttaataa

SEQ ID NO: 45454 - DNA, 22 bp, synthetic construct
  misc_feature 1..22: note = chemically synthesized
  source 1..22: mol_type = other DNA
tgagttaataccacttaataag

SEQ ID NO: 45455 - DNA, 22 bp, synthetic construct
  misc_feature 1..22: note = chemically synthesized
  source 1..22: mol_type = other DNA
ataccacttaataagctcccct

SEQ ID NO: 45456 - DNA, 22 bp, synthetic construct
  misc_feature 1..22: note = chemically synthesized
  source 1..22: mol_type = other DNA
aataagctcccctttgtgtgag

SEQ ID NO: 45457 - DNA, 22 bp, synthetic construct
  misc_feature 1..22: note = chemically synthesized
  source 1..22: mol_type = other DNA
ataagctcccctttgtgtgagt

SEQ ID NO: 45458 - DNA, 22 bp, synthetic construct
  misc_feature 1..22: note = chemically synthesized
  source 1..22: mol_type = other DNA
ccctttgtgtgagtatatctat

SEQ ID NO: 45459 - DNA, 22 bp, synthetic construct
  misc_feature 1..22: note = chemically synthesized
  source 1..22: mol_type = other DNA
tgtgtgagtatatctatatcta

SEQ ID NO: 45460 - DNA, 22 bp, synthetic construct
  misc_feature 1..22: note = chemically synthesized
  source 1..22: mol_type = other DNA
gtgtgagtatatctatatctat

SEQ ID NO: 45461 - DNA, 22 bp, synthetic construct
  misc_feature 1..22: note = chemically synthesized
  source 1..22: mol_type = other DNA
tgtgagtatatctatatctata

SEQ ID NO: 45462 - DNA, 22 bp, synthetic construct
  misc_feature 1..22: note = chemically synthesized
  source 1..22: mol_type = other DNA
tatctatagatagatataggta

SEQ ID NO: 45463 - DNA, 22 bp, synthetic construct
  misc_feature 1..22: note = chemically synthesized
  source 1..22: mol_type = other DNA
tagatagatataggtatactca

SEQ ID NO: 45464 - DNA, 22 bp, synthetic construct
  misc_feature 1..22: note = chemically synthesized
  source 1..22: mol_type = other DNA
actatatatacacatatataca

SEQ ID NO: 45465 - DNA, 22 bp, synthetic construct
  misc_feature 1..22: note = chemically synthesized
  source 1..22: mol_type = other DNA
tatatacacatatatacatata

SEQ ID NO: 45466 - DNA, 22 bp, synthetic construct
  misc_feature 1..22: note = chemically synthesized
  source 1..22: mol_type = other DNA
tctctctctctctctcatatat

SEQ ID NO: 45467 - DNA, 22 bp, synthetic construct
  misc_feature 1..22: note = chemically synthesized
  source 1..22: mol_type = other DNA
tctctctctctctcatatatat

SEQ ID NO: 45468 - DNA, 22 bp, synthetic construct
  misc_feature 1..22: note = chemically synthesized
  source 1..22: mol_type = other DNA
tctctctctctcatatatatat

SEQ ID NO: 45469 - DNA, 22 bp, synthetic construct
  misc_feature 1..22: note = chemically synthesized
  source 1..22: mol_type = other DNA
tctctctctcatatatatatat

SEQ ID NO: 45470 - DNA, 22 bp, synthetic construct
  misc_feature 1..22: note = chemically synthesized
  source 1..22: mol_type = other DNA
tctctctcatatatatatatat

SEQ ID NO: 45471 - DNA, 22 bp, synthetic construct
  misc_feature 1..22: note = chemically synthesized
  source 1..22: mol_type = other DNA
tctctcatatatatatatatat

SEQ ID NO: 45472 - DNA, 22 bp, synthetic construct
  misc_feature 1..22: note = chemically synthesized
  source 1..22: mol_type = other DNA
tctcatatatatatatatataa

SEQ ID NO: 45473 - DNA, 22 bp, synthetic construct
  misc_feature 1..22: note = chemically synthesized
  source 1..22: mol_type = other DNA
tcatatatatatatatataatc

SEQ ID NO: 45474 - DNA, 22 bp, synthetic construct
  misc_feature 1..22: note = chemically synthesized
  source 1..22: mol_type = other DNA
atatatatatatatataatctc

SEQ ID NO: 45475 - DNA, 22 bp, synthetic construct
  misc_feature 1..22: note = chemically synthesized
  source 1..22: mol_type = other DNA
ctattagttctgtccctctaga

SEQ ID NO: 45476 - DNA, 22 bp, synthetic construct
  misc_feature 1..22: note = chemically synthesized
  source 1..22: mol_type = other DNA
ttagttctgtccctctagagaa

SEQ ID NO: 45477 - DNA, 22 bp, synthetic construct
  misc_feature 1..22: note = chemically synthesized
  source 1..22: mol_type = other DNA
gttctgtccctctagagaaccc

SEQ ID NO: 45478 - DNA, 22 bp, synthetic construct
  misc_feature 1..22: note = chemically synthesized
  source 1..22: mol_type = other DNA
tgtccctctagagaaccccgac

SEQ ID NO: 45479 - DNA, 22 bp, synthetic construct
  misc_feature 1..22: note = chemically synthesized
  source 1..22: mol_type = other DNA
tccctctagagaaccccgacta

SEQ ID NO: 45480 - DNA, 22 bp, synthetic construct
  misc_feature 1..22: note = chemically synthesized
  source 1..22: mol_type = other DNA
tagagaaccccgactaatacag

SEQ ID NO: 45481 - DNA, 22 bp, synthetic construct
  misc_feature 1..22: note = chemically synthesized
  source 1..22: mol_type = other DNA
gagaaccccgactaatacagat

SEQ ID NO: 45482 - DNA, 22 bp, synthetic construct
  misc_feature 1..22: note = chemically synthesized
  source 1..22: mol_type = other DNA
atacagattttcataccagaag

SEQ ID NO: 45483 - DNA, 22 bp, synthetic construct
  misc_feature 1..22: note = chemically synthesized
  source 1..22: mol_type = other DNA
tcataccagaagtggttcttga

SEQ ID NO: 45484 - DNA, 22 bp, synthetic construct
  misc_feature 1..22: note = chemically synthesized
  source 1..22: mol_type = other DNA
cataccagaagtggttcttgag

SEQ ID NO: 45485 - DNA, 22 bp, synthetic construct
  misc_feature 1..22: note = chemically synthesized
  source 1..22: mol_type = other DNA
ataccagaagtggttcttgagg

SEQ ID NO: 45486 - DNA, 22 bp, synthetic construct
  misc_feature 1..22: note = chemically synthesized
  source 1..22: mol_type = other DNA
ttgaggaacagaatattaagga

SEQ ID NO: 45487 - DNA, 22 bp, synthetic construct
  misc_feature 1..22: note = chemically synthesized
  source 1..22: mol_type = other DNA
gaggaacagaatattaaggatg

SEQ ID NO: 45488 - DNA, 22 bp, synthetic construct
  misc_feature 1..22: note = chemically synthesized
  source 1..22: mol_type = other DNA
aggaacagaatattaaggatgg

SEQ ID NO: 45489 - DNA, 22 bp, synthetic construct
  misc_feature 1..22: note = chemically synthesized
  source 1..22: mol_type = other DNA
aggatggaattctttcattggt

SEQ ID NO: 45490 - DNA, 22 bp, synthetic construct
  misc_feature 1..22: note = chemically synthesized
  source 1..22: mol_type = other DNA
tttcattggttttgggacttct

SEQ ID NO: 45491 - DNA, 22 bp, synthetic construct
  misc_feature 1..22: note = chemically synthesized
  source 1..22: mol_type = other DNA
tcattggttttgggacttctgg

SEQ ID NO: 45492 - DNA, 22 bp, synthetic construct
  misc_feature 1..22: note = chemically synthesized
  source 1..22: mol_type = other DNA
cattggttttgggacttctggt

SEQ ID NO: 45493 - DNA, 22 bp, synthetic construct
  misc_feature 1..22: note = chemically synthesized
  source 1..22: mol_type = other DNA
attggttttgggacttctggtg

SEQ ID NO: 45494 - DNA, 22 bp, synthetic construct
  misc_feature 1..22: note = chemically synthesized
  source 1..22: mol_type = other DNA
gttttgggacttctggtgttgg

SEQ ID NO: 45495 - DNA, 22 bp, synthetic construct
  misc_feature 1..22: note = chemically synthesized
  source 1..22: mol_type = other DNA
tgggacttctggtgttggctga

SEQ ID NO: 45496 - DNA, 22 bp, synthetic construct
  misc_feature 1..22: note = chemically synthesized
  source 1..22: mol_type = other DNA
gggacttctggtgttggctgat

SEQ ID NO: 45497 - DNA, 22 bp, synthetic construct
  misc_feature 1..22: note = chemically synthesized
  source 1..22: mol_type = other DNA
ggacttctggtgttggctgatt

SEQ ID NO: 45498 - DNA, 22 bp, synthetic construct
  misc_feature 1..22: note = chemically synthesized
  source 1..22: mol_type = other DNA
ctggtgttggctgattaatatg

SEQ ID NO: 45499 - DNA, 22 bp, synthetic construct
  misc_feature 1..22: note = chemically synthesized
  source 1..22: mol_type = other DNA
tggtgttggctgattaatatga

SEQ ID NO: 45500 - DNA, 22 bp, synthetic construct
  misc_feature 1..22: note = chemically synthesized
  source 1..22: mol_type = other DNA
gtgttggctgattaatatgatt

SEQ ID NO: 45501 - DNA, 22 bp, synthetic construct
  misc_feature 1..22: note = chemically synthesized
  source 1..22: mol_type = other DNA
gctgattaatatgattagacca

SEQ ID NO: 45502 - DNA, 22 bp, synthetic construct
  misc_feature 1..22: note = chemically synthesized
  source 1..22: mol_type = other DNA
attaatatgattagaccaaaaa

SEQ ID NO: 45503 - DNA, 22 bp, synthetic construct
  misc_feature 1..22: note = chemically synthesized
  source 1..22: mol_type = other DNA
atatgattagaccaaaaaatgc

SEQ ID NO: 45504 - DNA, 22 bp, synthetic construct
  misc_feature 1..22: note = chemically synthesized
  source 1..22: mol_type = other DNA
gaccaaaaaatgctaaggactc

SEQ ID NO: 45505 - DNA, 22 bp, synthetic construct
  misc_feature 1..22: note = chemically synthesized
  source 1..22: mol_type = other DNA
aggactctacttctaatagtat

SEQ ID NO: 45506 - DNA, 22 bp, synthetic construct
  misc_feature 1..22: note = chemically synthesized
  source 1..22: mol_type = other DNA
tacttctaatagtatggagaac

SEQ ID NO: 45507 - DNA, 22 bp, synthetic construct
  misc_feature 1..22: note = chemically synthesized
  source 1..22: mol_type = other DNA
cttctaatagtatggagaacac

SEQ ID NO: 45508 - DNA, 22 bp, synthetic construct
  misc_feature 1..22: note = chemically synthesized
  source 1..22: mol_type = other DNA
ctaatagtatggagaacactga

SEQ ID NO: 45509 - DNA, 22 bp, synthetic construct
  misc_feature 1..22: note = chemically synthesized
  source 1..22: mol_type = other DNA
taatagtatggagaacactgat

SEQ ID NO: 45510 - DNA, 22 bp, synthetic construct
  misc_feature 1..22: note = chemically synthesized
  source 1..22: mol_type = other DNA
atagtatggagaacactgatag

SEQ ID NO: 45511 - DNA, 22 bp, synthetic construct
  misc_feature 1..22: note = chemically synthesized
  source 1..22: mol_type = other DNA
atagtacttggcctgaattgtt

SEQ ID NO: 45512 - DNA, 22 bp, synthetic construct
  misc_feature 1..22: note = chemically synthesized
  source 1..22: mol_type = other DNA
ggcctgaattgtttagagagtt

SEQ ID NO: 45513 - DNA, 22 bp, synthetic construct
  misc_feature 1..22: note = chemically synthesized
  source 1..22: mol_type = other DNA
gcctgaattgtttagagagtta

SEQ ID NO: 45514 - DNA, 22 bp, synthetic construct
  misc_feature 1..22: note = chemically synthesized
  source 1..22: mol_type = other DNA
aattgtttagagagttatgcaa

SEQ ID NO: 45515 - DNA, 22 bp, synthetic construct
  misc_feature 1..22: note = chemically synthesized
  source 1..22: mol_type = other DNA
tttagagagttatgcaaaataa

SEQ ID NO: 45516 - DNA, 22 bp, synthetic construct
  misc_feature 1..22: note = chemically synthesized
  source 1..22: mol_type = other DNA
agagagttatgcaaaataaatg

SEQ ID NO: 45517 - DNA, 22 bp, synthetic construct
  misc_feature 1..22: note = chemically synthesized
  source 1..22: mol_type = other DNA
gagagttatgcaaaataaatgc

SEQ ID NO: 45518 - DNA, 22 bp, synthetic construct
  misc_feature 1..22: note = chemically synthesized
  source 1..22: mol_type = other DNA
tgcaaaataaatgcatttgaca

SEQ ID NO: 45519 - DNA, 22 bp, synthetic construct
  misc_feature 1..22: note = chemically synthesized
  source 1..22: mol_type = other DNA
gacactactgattcatcactta

SEQ ID NO: 45520 - DNA, 22 bp, synthetic construct
  misc_feature 1..22: note = chemically synthesized
  source 1..22: mol_type = other DNA
acactactgattcatcacttat

SEQ ID NO: 45521 - DNA, 22 bp, synthetic construct
  misc_feature 1..22: note = chemically synthesized
  source 1..22: mol_type = other DNA
ctgattcatcacttatgagagg

SEQ ID NO: 45522 - DNA, 22 bp, synthetic construct
  misc_feature 1..22: note = chemically synthesized
  source 1..22: mol_type = other DNA
attcatcacttatgagaggcaa

SEQ ID NO: 45523 - DNA, 22 bp, synthetic construct
  misc_feature 1..22: note = chemically synthesized
  source 1..22: mol_type = other DNA
atcacttatgagaggcaaggag

SEQ ID NO: 45524 - DNA, 22 bp, synthetic construct
  misc_feature 1..22: note = chemically synthesized
  source 1..22: mol_type = other DNA
atgagaggcaaggagtttagtg

SEQ ID NO: 45525 - DNA, 22 bp, synthetic construct
  misc_feature 1..22: note = chemically synthesized
  source 1..22: mol_type = other DNA
tgagaggcaaggagtttagtga

SEQ ID NO: 45526 - DNA, 22 bp, synthetic construct
  misc_feature 1..22: note = chemically synthesized
  source 1..22: mol_type = other DNA
agtgactctatacataatacct

SEQ ID NO: 45527 - DNA, 22 bp, synthetic construct
  misc_feature 1..22: note = chemically synthesized
  source 1..22: mol_type = other DNA
gtgactctatacataatacctt

SEQ ID NO: 45528 - DNA, 22 bp, synthetic construct
  misc_feature 1..22: note = chemically synthesized
  source 1..22: mol_type = other DNA
tatacataatacctttgactat

SEQ ID NO: 45529 - DNA, 22 bp, synthetic construct
  misc_feature 1..22: note = chemically synthesized
  source 1..22: mol_type = other DNA
tacataatacctttgactatat

SEQ ID NO: 45530 - DNA, 22 bp, synthetic construct
  misc_feature 1..22: note = chemically synthesized
  source 1..22: mol_type = other DNA
tgactatatgtggagaaccaag

SEQ ID NO: 45531 - DNA, 22 bp, synthetic construct
  misc_feature 1..22: note = chemically synthesized
  source 1..22: mol_type = other DNA
gactatatgtggagaaccaagg

SEQ ID NO: 45532 - DNA, 22 bp, synthetic construct
  misc_feature 1..22: note = chemically synthesized
  source 1..22: mol_type = other DNA
actatatgtggagaaccaagga

SEQ ID NO: 45533 - DNA, 22 bp, synthetic construct
  misc_feature 1..22: note = chemically synthesized
  source 1..22: mol_type = other DNA
tatgtggagaaccaaggaacat

SEQ ID NO: 45534 - DNA, 22 bp, synthetic construct
  misc_feature 1..22: note = chemically synthesized
  source 1..22: mol_type = other DNA
gttgattgctcctaagttctct

SEQ ID NO: 45535 - DNA, 22 bp, synthetic construct
  misc_feature 1..22: note = chemically synthesized
  source 1..22: mol_type = other DNA
attgctcctaagttctctggag

SEQ ID NO: 45536 - DNA, 22 bp, synthetic construct
  misc_feature 1..22: note = chemically synthesized
  source 1..22: mol_type = other DNA
ctcctaagttctctggagaaag

SEQ ID NO: 45537 - DNA, 22 bp, synthetic construct
  misc_feature 1..22: note = chemically synthesized
  source 1..22: mol_type = other DNA
ctaagttctctggagaaagaga

SEQ ID NO: 45538 - DNA, 22 bp, synthetic construct
  misc_feature 1..22: note = chemically synthesized
  source 1..22: mol_type = other DNA
agttctctggagaaagagatga

SEQ ID NO: 45539 - DNA, 22 bp, synthetic construct
  misc_feature 1..22: note = chemically synthesized
  source 1..22: mol_type = other DNA
tctggagaaagagatgaaagaa

SEQ ID NO: 45540 - DNA, 22 bp, synthetic construct
  misc_feature 1..22: note = chemically synthesized
  source 1..22: mol_type = other DNA
tggagaaagagatgaaagaaaa

SEQ ID NO: 45541 - DNA, 22 bp, synthetic construct
  misc_feature 1..22: note = chemically synthesized
  source 1..22: mol_type = other DNA
gagaaagagatgaaagaaaatg

SEQ ID NO: 45542 - DNA, 22 bp, synthetic construct
  misc_feature 1..22: note = chemically synthesized
  source 1..22: mol_type = other DNA
aggggatctgtctcccaccttc

SEQ ID NO: 45543 - DNA, 22 bp, synthetic construct
  misc_feature 1..22: note = chemically synthesized
  source 1..22: mol_type = other DNA
tctcccaccttcagaagcagat

SEQ ID NO: 45544 - DNA, 22 bp, synthetic construct
  misc_feature 1..22: note = chemically synthesized
  source 1..22: mol_type = other DNA
ccaccttcagaagcagatactg

SEQ ID NO: 45545 - DNA, 22 bp, synthetic construct
  misc_feature 1..22: note = chemically synthesized
  source 1..22: mol_type = other DNA
cagaagcagatactgagccaca

SEQ ID NO: 45546 - DNA, 22 bp, synthetic construct
  misc_feature 1..22: note = chemically synthesized
  source 1..22: mol_type = other DNA
agaagcagatactgagccacaa

SEQ ID NO: 45547 - DNA, 22 bp, synthetic construct
  misc_feature 1..22: note = chemically synthesized
  source 1..22: mol_type = other DNA
agccacaaatctgctaagattg

SEQ ID NO: 45548 - DNA, 22 bp, synthetic construct
  misc_feature 1..22: note = chemically synthesized
  source 1..22: mol_type = other DNA
ctaagattgccctgaatgagag

SEQ ID NO: 45549 - DNA, 22 bp, synthetic construct
  misc_feature 1..22: note = chemically synthesized
  source 1..22: mol_type = other DNA
agattgccctgaatgagagttt

SEQ ID NO: 45550 - DNA, 22 bp, synthetic construct
  misc_feature 1..22: note = chemically synthesized
  source 1..22: mol_type = other DNA
ccctgaatgagagttttaactc

SEQ ID NO: 45551 - DNA, 22 bp, synthetic construct
  misc_feature 1..22: note = chemically synthesized
  source 1..22: mol_type = other DNA
aatgagagttttaactcctgta

SEQ ID NO: 45552 - DNA, 22 bp, synthetic construct
  misc_feature 1..22: note = chemically synthesized
  source 1..22: mol_type = other DNA
taactcctgtagagaaagagtt

SEQ ID NO: 45553 - DNA, 22 bp, synthetic construct
  misc_feature 1..22: note = chemically synthesized
  source 1..22: mol_type = other DNA
aactcctgtagagaaagagttg

SEQ ID NO: 45554 - DNA, 22 bp, synthetic construct
  misc_feature 1..22: note = chemically synthesized
  source 1..22: mol_type = other DNA
actcctgtagagaaagagttga

SEQ ID NO: 45555 - DNA, 22 bp, synthetic construct
  misc_feature 1..22: note = chemically synthesized
  source 1..22: mol_type = other DNA
ctgtagagaaagagttgaaatt

SEQ ID NO: 45556 - DNA, 22 bp, synthetic construct
  misc_feature 1..22: note = chemically synthesized
  source 1..22: mol_type = other DNA
tagagaaagagttgaaattgtg

SEQ ID NO: 45557 - DNA, 22 bp, synthetic construct
  misc_feature 1..22: note = chemically synthesized
  source 1..22: mol_type = other DNA
aaattgtgaaaaaacagagaca

SEQ ID NO: 45558 - DNA, 22 bp, synthetic construct
  misc_feature 1..22: note = chemically synthesized
  source 1..22: mol_type = other DNA
tgaaaaaacagagacaagctgt

SEQ ID NO: 45559 - DNA, 22 bp, synthetic construct
  misc_feature 1..22: note = chemically synthesized
  source 1..22: mol_type = other DNA
ttatcatgcgagtagctgatct

SEQ ID NO: 45560 - DNA, 22 bp, synthetic construct
  misc_feature 1..22: note = chemically synthesized
  source 1..22: mol_type = other DNA
tcatgcgagtagctgatctgca

SEQ ID NO: 45561 - DNA, 22 bp, synthetic construct
  misc_feature 1..22: note = chemically synthesized
  source 1..22: mol_type = other DNA
atctgcaacaagaggtgcatgc

SEQ ID NO: 45562 - DNA, 22 bp, synthetic construct
  misc_feature 1..22: note = chemically synthesized
  source 1..22: mol_type = other DNA
caacaagaggtgcatgcacagc

SEQ ID NO: 45563 - DNA, 22 bp, synthetic construct
  misc_feature 1..22: note = chemically synthesized
  source 1..22: mol_type = other DNA
gccaggtgtttactgttaaagt

SEQ ID NO: 45564 - DNA, 22 bp, synthetic construct
  misc_feature 1..22: note = chemically synthesized
  source 1..22: mol_type = other DNA
ccaggtgtttactgttaaagtg

SEQ ID NO: 45565 - DNA, 22 bp, synthetic construct
  misc_feature 1..22: note = chemically synthesized
  source 1..22: mol_type = other DNA
actgttaaagtgagggcattga

SEQ ID NO: 45566 - DNA, 22 bp, synthetic construct
  misc_feature 1..22: note = chemically synthesized
  source 1..22: mol_type = other DNA
ctgttaaagtgagggcattgac

SEQ ID NO: 45567 - DNA, 22 bp, synthetic construct
  misc_feature 1..22: note = chemically synthesized
  source 1..22: mol_type = other DNA
ttaaagtgagggcattgactgg

SEQ ID NO: 45568 - DNA, 22 bp, synthetic construct
  misc_feature 1..22: note = chemically synthesized
  source 1..22: mol_type = other DNA
aagtgagggcattgactggaaa

SEQ ID NO: 45569 - DNA, 22 bp, synthetic construct
  misc_feature 1..22: note = chemically synthesized
  source 1..22: mol_type = other DNA
actggaaaaaaatgggaccctg

SEQ ID NO: 45570 - DNA, 22 bp, synthetic construct
  misc_feature 1..22: note = chemically synthesized
  source 1..22: mol_type = other DNA
gaaaaaaatgggaccctggaac

SEQ ID NO: 45571 - DNA, 22 bp, synthetic construct
  misc_feature 1..22: note = chemically synthesized
  source 1..22: mol_type = other DNA
gaacttggagtggggatgtgtg

SEQ ID NO: 45572 - DNA, 22 bp, synthetic construct
  misc_feature 1..22: note = chemically synthesized
  source 1..22: mol_type = other DNA
ggagtggggatgtgtgggagaa

SEQ ID NO: 45573 - DNA, 22 bp, synthetic construct
  misc_feature 1..22: note = chemically synthesized
  source 1..22: mol_type = other DNA
gagtggggatgtgtgggagaac

SEQ ID NO: 45574 - DNA, 22 bp, synthetic construct
  misc_feature 1..22: note = chemically synthesized
  source 1..22: mol_type = other DNA
atgaagctgaggacactgagtt

SEQ ID NO: 45575 - DNA, 22 bp, synthetic construct
  misc_feature 1..22: note = chemically synthesized
  source 1..22: mol_type = other DNA
aggacactgagtttgtgaactc

SEQ ID NO: 45576 - DNA, 22 bp, synthetic construct
  misc_feature 1..22: note = chemically synthesized
  source 1..22: mol_type = other DNA
agtttgtgaactctgatgaaac

SEQ ID NO: 45577 - DNA, 22 bp, synthetic construct
  misc_feature 1..22: note = chemically synthesized
  source 1..22: mol_type = other DNA
gtgaactctgatgaaacttttt

SEQ ID NO: 45578 - DNA, 22 bp, synthetic construct
  misc_feature 1..22: note = chemically synthesized
  source 1..22: mol_type = other DNA
tgaactctgatgaaactttttt

SEQ ID NO: 45579 - DNA, 22 bp, synthetic construct
  misc_feature 1..22: note = chemically synthesized
  source 1..22: mol_type = other DNA
tgatgaaacttttttgccagaa

SEQ ID NO: 45580 - DNA, 22 bp, synthetic construct
  misc_feature 1..22: note = chemically synthesized
  source 1..22: mol_type = other DNA
atgaaacttttttgccagaaga

SEQ ID NO: 45581 - DNA, 22 bp, synthetic construct
  misc_feature 1..22: note = chemically synthesized
  source 1..22: mol_type = other DNA
ttttgccagaagaaacagtttc

SEQ ID NO: 45582 - DNA, 22 bp, synthetic construct
  misc_feature 1..22: note = chemically synthesized
  source 1..22: mol_type = other DNA
tttgccagaagaaacagtttcc

SEQ ID NO: 45583 - DNA, 22 bp, synthetic construct
  misc_feature 1..22: note = chemically synthesized
  source 1..22: mol_type = other DNA
ttgccagaagaaacagtttccc

SEQ ID NO: 45584 - DNA, 22 bp, synthetic construct
  misc_feature 1..22: note = chemically synthesized
  source 1..22: mol_type = other DNA
tgccagaagaaacagtttcccc

SEQ ID NO: 45585 - DNA, 22 bp, synthetic construct
  misc_feature 1..22: note = chemically synthesized
  source 1..22: mol_type = other DNA
gccagaagaaacagtttcccca

SEQ ID NO: 45586 - DNA, 22 bp, synthetic construct
  misc_feature 1..22: note = chemically synthesized
  source 1..22: mol_type = other DNA
ccagaagaaacagtttccccat

SEQ ID NO: 45587 - DNA, 22 bp, synthetic construct
  misc_feature 1..22: note = chemically synthesized
  source 1..22: mol_type = other DNA
ccccatccccagtagtggtaac

SEQ ID NO: 45588 - DNA, 22 bp, synthetic construct
  misc_feature 1..22: note = chemically synthesized
  source 1..22: mol_type = other DNA
cccatccccagtagtggtaaca

SEQ ID NO: 45589 - DNA, 22 bp, synthetic construct
  misc_feature 1..22: note = chemically synthesized
  source 1..22: mol_type = other DNA
cctgacccgtgctgccattagc

SEQ ID NO: 45590 - DNA, 22 bp, synthetic construct
  misc_feature 1..22: note = chemically synthesized
  source 1..22: mol_type = other DNA
acccgtgctgccattagccttt

SEQ ID NO: 45591 - DNA, 22 bp, synthetic construct
  misc_feature 1..22: note = chemically synthesized
  source 1..22: mol_type = other DNA
ccattagcctttccacctttgt

SEQ ID NO: 45592 - DNA, 22 bp, synthetic construct
  misc_feature 1..22: note = chemically synthesized
  source 1..22: mol_type = other DNA
gcctttccacctttgtctgagg

SEQ ID NO: 45593 - DNA, 22 bp, synthetic construct
  misc_feature 1..22: note = chemically synthesized
  source 1..22: mol_type = other DNA
tccacctttgtctgaggatgta

SEQ ID NO: 45594 - DNA, 22 bp, synthetic construct
  misc_feature 1..22: note = chemically synthesized
  source 1..22: mol_type = other DNA
ccacctttgtctgaggatgtaa

SEQ ID NO: 45595 - DNA, 22 bp, synthetic construct
  misc_feature 1..22: note = chemically synthesized
  source 1..22: mol_type = other DNA
cacctttgtctgaggatgtaaa

SEQ ID NO: 45596 - DNA, 22 bp, synthetic construct
  misc_feature 1..22: note = chemically synthesized
  source 1..22: mol_type = other DNA
tgtctgaggatgtaaaccctgc

SEQ ID NO: 45597 - DNA, 22 bp, synthetic construct
  misc_feature 1..22: note = chemically synthesized
  source 1..22: mol_type = other DNA
gtctgaggatgtaaaccctgca

SEQ ID NO: 45598 - DNA, 22 bp, synthetic construct
  misc_feature 1..22: note = chemically synthesized
  source 1..22: mol_type = other DNA
tctgaggatgtaaaccctgcac

SEQ ID NO: 45599 - DNA, 22 bp, synthetic construct
  misc_feature 1..22: note = chemically synthesized
  source 1..22: mol_type = other DNA
aggatgtaaaccctgcactgct

SEQ ID NO: 45600 - DNA, 22 bp, synthetic construct
  misc_feature 1..22: note = chemically synthesized
  source 1..22: mol_type = other DNA
cactgcttgaggcaacagtgat

SEQ ID NO: 45601 - DNA, 22 bp, synthetic construct
  misc_feature 1..22: note = chemically synthesized
  source 1..22: mol_type = other DNA
cttgaggcaacagtgatggcct

SEQ ID NO: 45602 - DNA, 22 bp, synthetic construct
  misc_feature 1..22: note = chemically synthesized
  source 1..22: mol_type = other DNA
gaggcaacagtgatggccttcc

SEQ ID NO: 45603 - DNA, 22 bp, synthetic construct
  misc_feature 1..22: note = chemically synthesized
  source 1..22: mol_type = other DNA
aggcaacagtgatggccttccc

SEQ ID NO: 45604 - DNA, 22 bp, synthetic construct
  misc_feature 1..22: note = chemically synthesized
  source 1..22: mol_type = other DNA
ccctgaggcagctgccaggcaa

SEQ ID NO: 45605 - DNA, 22 bp, synthetic construct
  misc_feature 1..22: note = chemically synthesized
  source 1..22: mol_type = other DNA
cctgaggcagctgccaggcaag

SEQ ID NO: 45606 - DNA, 22 bp, synthetic construct
  misc_feature 1..22: note = chemically synthesized
  source 1..22: mol_type = other DNA
aggcagctgccaggcaagataa

SEQ ID NO: 45607 - DNA, 22 bp, synthetic construct
  misc_feature 1..22: note = chemically synthesized
  source 1..22: mol_type = other DNA
ccaggcaagataatgttgattc

SEQ ID NO: 45608 - DNA, 22 bp, synthetic construct
  misc_feature 1..22: note = chemically synthesized
  source 1..22: mol_type = other DNA
attctcctcaagaggcacccct

SEQ ID NO: 45609 - DNA, 22 bp, synthetic construct
  misc_feature 1..22: note = chemically synthesized
  source 1..22: mol_type = other DNA
tcctcaagaggcacccctaatg

SEQ ID NO: 45610 - DNA, 22 bp, synthetic construct
  misc_feature 1..22: note = chemically synthesized
  source 1..22: mol_type = other DNA
ctcaagaggcacccctaatgcc

SEQ ID NO: 45611 - DNA, 22 bp, synthetic construct
  misc_feature 1..22: note = chemically synthesized
  source 1..22: mol_type = other DNA
aagaggcacccctaatgcccct

SEQ ID NO: 45612 - DNA, 22 bp, synthetic construct
  misc_feature 1..22: note = chemically synthesized
  source 1..22: mol_type = other DNA
atgcccctgaatgcttctagac

SEQ ID NO: 45613 - DNA, 22 bp, synthetic construct
  misc_feature 1..22: note = chemically synthesized
  source 1..22: mol_type = other DNA
aatgcttctagacctataacta

SEQ ID NO: 45614 - DNA, 22 bp, synthetic construct
  misc_feature 1..22: note = chemically synthesized
  source 1..22: mol_type = other DNA
ctagacctataactaggctaaa

SEQ ID NO: 45615 - DNA, 22 bp, synthetic construct
  misc_feature 1..22: note = chemically synthesized
  source 1..22: mol_type = other DNA
tagacctataactaggctaaat

SEQ ID NO: 45616 - DNA, 22 bp, synthetic construct
  misc_feature 1..22: note = chemically synthesized
  source 1..22: mol_type = other DNA
gacctataactaggctaaattc

SEQ ID NO: 45617 - DNA, 22 bp, synthetic construct
  misc_feature 1..22: note = chemically synthesized
  source 1..22: mol_type = other DNA
taactaggctaaattccttgcg

SEQ ID NO: 45618 - DNA, 22 bp, synthetic construct
  misc_feature 1..22: note = chemically synthesized
  source 1..22: mol_type = other DNA
ggctaaattccttgcgggcccc

SEQ ID NO: 45619 - DNA, 22 bp, synthetic construct
  misc_feature 1..22: note = chemically synthesized
  source 1..22: mol_type = other DNA
aattccttgcgggccccagagg

SEQ ID NO: 45620 - DNA, 22 bp, synthetic construct
  misc_feature 1..22: note = chemically synthesized
  source 1..22: mol_type = other DNA
cttgcgggccccagaggtgagg

SEQ ID NO: 45621 - DNA, 22 bp, synthetic construct
  misc_feature 1..22: note = chemically synthesized
  source 1..22: mol_type = other DNA
gcgggccccagaggtgaggttc

SEQ ID NO: 45622 - DNA, 22 bp, synthetic construct
  misc_feature 1..22: note = chemically synthesized
  source 1..22: mol_type = other DNA
cgggccccagaggtgaggttca

SEQ ID NO: 45623 - DNA, 22 bp, synthetic construct
  misc_feature 1..22: note = chemically synthesized
  source 1..22: mol_type = other DNA
agagtgtgacccatgaggaggt

SEQ ID NO: 45624 - DNA, 22 bp, synthetic construct
  misc_feature 1..22: note = chemically synthesized
  source 1..22: mol_type = other DNA
tactctaaaagaactgcttaag

SEQ ID NO: 45625 - DNA, 22 bp, synthetic construct
  misc_feature 1..22: note = chemically synthesized
  source 1..22: mol_type = other DNA
taaaagaactgcttaagctttc

SEQ ID NO: 45626 - DNA, 22 bp, synthetic construct
  misc_feature 1..22: note = chemically synthesized
  source 1..22: mol_type = other DNA
aaagaactgcttaagctttcta

SEQ ID NO: 45627 - DNA, 22 bp, synthetic construct
  misc_feature 1..22: note = chemically synthesized
  source 1..22: mol_type = other DNA
cttaagctttctaatttatatt

SEQ ID NO: 45628 - DNA, 22 bp, synthetic construct
  misc_feature 1..22: note = chemically synthesized
  source 1..22: mol_type = other DNA
aagctttctaatttatattggc

SEQ ID NO: 45629 - DNA, 22 bp, synthetic construct
  misc_feature 1..22: note = chemically synthesized
  source 1..22: mol_type = other DNA
agctttctaatttatattggca

SEQ ID NO: 45630 - DNA, 22 bp, synthetic construct
  misc_feature 1..22: note = chemically synthesized
  source 1..22: mol_type = other DNA
tctaatttatattggcagaaat

SEQ ID NO: 45631 - DNA, 22 bp, synthetic construct
  misc_feature 1..22: note = chemically synthesized
  source 1..22: mol_type = other DNA
ctaatttatattggcagaaatc

SEQ ID NO: 45632 - DNA, 22 bp, synthetic construct
  misc_feature 1..22: note = chemically synthesized
  source 1..22: mol_type = other DNA
taatttatattggcagaaatct

SEQ ID NO: 45633 - DNA, 22 bp, synthetic construct
  misc_feature 1..22: note = chemically synthesized
  source 1..22: mol_type = other DNA
atttatattggcagaaatctgg

SEQ ID NO: 45634 - DNA, 22 bp, synthetic construct
  misc_feature 1..22: note = chemically synthesized
  source 1..22: mol_type = other DNA
atattggcagaaatctggagaa

SEQ ID NO: 45635 - DNA, 22 bp, synthetic construct
  misc_feature 1..22: note = chemically synthesized
  source 1..22: mol_type = other DNA
tattggcagaaatctggagaac

SEQ ID NO: 45636 - DNA, 22 bp, synthetic construct
  misc_feature 1..22: note = chemically synthesized
  source 1..22: mol_type = other DNA
gcagaaatctggagaacaggca

SEQ ID NO: 45637 - DNA, 22 bp, synthetic construct
  misc_feature 1..22: note = chemically synthesized
  source 1..22: mol_type = other DNA
gagaacaggcatgggaatggat

SEQ ID NO: 45638 - DNA, 22 bp, synthetic construct
  misc_feature 1..22: note = chemically synthesized
  source 1..22: mol_type = other DNA
agggtaagggataatggtggaa

SEQ ID NO: 45639 - DNA, 22 bp, synthetic construct
  misc_feature 1..22: note = chemically synthesized
  source 1..22: mol_type = other DNA
gatcaagctgaatttattggtt

SEQ ID NO: 45640 - DNA, 22 bp, synthetic construct
  misc_feature 1..22: note = chemically synthesized
  source 1..22: mol_type = other DNA
aatttattggtttggccctact

SEQ ID NO: 45641 - DNA, 22 bp, synthetic construct
  misc_feature 1..22: note = chemically synthesized
  source 1..22: mol_type = other DNA
attggtttggccctactaagta

SEQ ID NO: 45642 - DNA, 22 bp, synthetic construct
  misc_feature 1..22: note = chemically synthesized
  source 1..22: mol_type = other DNA
ttggtttggccctactaagtag

SEQ ID NO: 45643 - DNA, 22 bp, synthetic construct
  misc_feature 1..22: note = chemically synthesized
  source 1..22: mol_type = other DNA
gtttggccctactaagtaggga

SEQ ID NO: 45644 - DNA, 22 bp, synthetic construct
  misc_feature 1..22: note = chemically synthesized
  source 1..22: mol_type = other DNA
ggccctactaagtagggattct

SEQ ID NO: 45645 - DNA, 22 bp, synthetic construct
  misc_feature 1..22: note = chemically synthesized
  source 1..22: mol_type = other DNA
gccctactaagtagggattctg

SEQ ID NO: 45646 - DNA, 22 bp, synthetic construct
  misc_feature 1..22: note = chemically synthesized
  source 1..22: mol_type = other DNA
ctaagtagggattctgcattta

SEQ ID NO: 45647 - DNA, 22 bp, synthetic construct
  misc_feature 1..22: note = chemically synthesized
  source 1..22: mol_type = other DNA
agtagggattctgcatttaatg

SEQ ID NO: 45648 - DNA, 22 bp, synthetic construct
  misc_feature 1..22: note = chemically synthesized
  source 1..22: mol_type = other DNA
tgcatttaatgttgcagctcgg

SEQ ID NO: 45649 - DNA, 22 bp, synthetic construct
  misc_feature 1..22: note = chemically synthesized
  source 1..22: mol_type = other DNA
catttaatgttgcagctcgggg

SEQ ID NO: 45650 - DNA, 22 bp, synthetic construct
  misc_feature 1..22: note = chemically synthesized
  source 1..22: mol_type = other DNA
aatgttgcagctcggggactta

SEQ ID NO: 45651 - DNA, 22 bp, synthetic construct
  misc_feature 1..22: note = chemically synthesized
  source 1..22: mol_type = other DNA
atgttgcagctcggggacttag

SEQ ID NO: 45652 - DNA, 22 bp, synthetic construct
  misc_feature 1..22: note = chemically synthesized
  source 1..22: mol_type = other DNA
cagctcggggacttagaaaagg

SEQ ID NO: 45653 - DNA, 22 bp, synthetic construct
  misc_feature 1..22: note = chemically synthesized
  source 1..22: mol_type = other DNA
ggggacttagaaaaggttctga

SEQ ID NO: 45654 - DNA, 22 bp, synthetic construct
  misc_feature 1..22: note = chemically synthesized
  source 1..22: mol_type = other DNA
agaaaaggttctgatagggccg

SEQ ID NO: 45655 - DNA, 22 bp, synthetic construct
  misc_feature 1..22: note = chemically synthesized
  source 1..22: mol_type = other DNA
gaaaaggttctgatagggccgg

SEQ ID NO: 45656 - DNA, 22 bp, synthetic construct
  misc_feature 1..22: note = chemically synthesized
  source 1..22: mol_type = other DNA
tgatagggccgggagcagtggc

SEQ ID NO: 45657 - DNA, 22 bp, synthetic construct
  misc_feature 1..22: note = chemically synthesized
  source 1..22: mol_type = other DNA
atagggccgggagcagtggctc

SEQ ID NO: 45658 - DNA, 22 bp, synthetic construct
  misc_feature 1..22: note = chemically synthesized
  source 1..22: mol_type = other DNA
acgcctgtaatcccagcacctt

SEQ ID NO: 45659 - DNA, 22 bp, synthetic construct
  misc_feature 1..22: note = chemically synthesized
  source 1..22: mol_type = other DNA
taatcccagcaccttgggaggc

SEQ ID NO: 45660 - DNA, 22 bp, synthetic construct
  misc_feature 1..22: note = chemically synthesized
  source 1..22: mol_type = other DNA
gggaggcgggggcgggcagatc

SEQ ID NO: 45661 - DNA, 22 bp, synthetic construct
  misc_feature 1..22: note = chemically synthesized
  source 1..22: mol_type = other DNA
ggaggcgggggcgggcagatca

SEQ ID NO: 45662 - DNA, 22 bp, synthetic construct
  misc_feature 1..22: note = chemically synthesized
  source 1..22: mol_type = other DNA
agacaattctggctaaaatggt

SEQ ID NO: 45663 - DNA, 22 bp, synthetic construct
  misc_feature 1..22: note = chemically synthesized
  source 1..22: mol_type = other DNA
tggctaaaatggtgaaacccca

SEQ ID NO: 45664 - DNA, 22 bp, synthetic construct
  misc_feature 1..22: note = chemically synthesized
  source 1..22: mol_type = other DNA
gctaaaatggtgaaaccccatc

SEQ ID NO: 45665 - DNA, 22 bp, synthetic construct
  misc_feature 1..22: note = chemically synthesized
  source 1..22: mol_type = other DNA
aaatggtgaaaccccatctctg

SEQ ID NO: 45666 - DNA, 22 bp, synthetic construct
  misc_feature 1..22: note = chemically synthesized
  source 1..22: mol_type = other DNA
tgctaaaaatacaaaaattagc

SEQ ID NO: 45667 - DNA, 22 bp, synthetic construct
  misc_feature 1..22: note = chemically synthesized
  source 1..22: mol_type = other DNA
ctaaaaatacaaaaattagctg

SEQ ID NO: 45668 - DNA, 22 bp, synthetic construct
  misc_feature 1..22: note = chemically synthesized
  source 1..22: mol_type = other DNA
aaaatacaaaaattagctgggc

SEQ ID NO: 45669 - DNA, 22 bp, synthetic construct
  misc_feature 1..22: note = chemically synthesized
  source 1..22: mol_type = other DNA
gctgggcatggtgatgcgtaac

SEQ ID NO: 45670 - DNA, 22 bp, synthetic construct
  misc_feature 1..22: note = chemically synthesized
  source 1..22: mol_type = other DNA
ggcatggtgatgcgtaactgta

SEQ ID NO: 45671 - DNA, 22 bp, synthetic construct
  misc_feature 1..22: note = chemically synthesized
  source 1..22: mol_type = other DNA
taatctcatctacttgggaggc

SEQ ID NO: 45672 - DNA, 22 bp, synthetic construct
  misc_feature 1..22: note = chemically synthesized
  source 1..22: mol_type = other DNA
atctacttgggaggctgaggca

SEQ ID NO: 45673 - DNA, 22 bp, synthetic construct
  misc_feature 1..22: note = chemically synthesized
  source 1..22: mol_type = other DNA
cttgggaggctgaggcaagaga

SEQ ID NO: 45674 - DNA, 22 bp, synthetic construct
  misc_feature 1..22: note = chemically synthesized
  source 1..22: mol_type = other DNA
gggaggctgaggcaagagaact

SEQ ID NO: 45675 - DNA, 22 bp, synthetic construct
  misc_feature 1..22: note = chemically synthesized
  source 1..22: mol_type = other DNA
ggaggctgaggcaagagaactg

SEQ ID NO: 45676 - DNA, 22 bp, synthetic construct
  misc_feature 1..22: note = chemically synthesized
  source 1..22: mol_type = other DNA
aggcaagagaactgcttgaacc

SEQ ID NO: 45677 - DNA, 22 bp, synthetic construct
  misc_feature 1..22: note = chemically synthesized
  source 1..22: mol_type = other DNA
cttgaacctgtgaggcagagat

SEQ ID NO: 45678 - DNA, 22 bp, synthetic construct
  misc_feature 1..22: note = chemically synthesized
  source 1..22: mol_type = other DNA
gaacctgtgaggcagagattgc

SEQ ID NO: 45679 - DNA, 22 bp, synthetic construct
  misc_feature 1..22: note = chemically synthesized
  source 1..22: mol_type = other DNA
aacctgtgaggcagagattgca

SEQ ID NO: 45680 - DNA, 22 bp, synthetic construct
  misc_feature 1..22: note = chemically synthesized
  source 1..22: mol_type = other DNA
tgaggcagagattgcagtgagc

SEQ ID NO: 45681 - DNA, 22 bp, synthetic construct
  misc_feature 1..22: note = chemically synthesized
  source 1..22: mol_type = other DNA
cagtgagccaagatcgccccac

SEQ ID NO: 45682 - DNA, 22 bp, synthetic construct
  misc_feature 1..22: note = chemically synthesized
  source 1..22: mol_type = other DNA
cattccagcctggtaacagagc

SEQ ID NO: 45683 - DNA, 22 bp, synthetic construct
  misc_feature 1..22: note = chemically synthesized
  source 1..22: mol_type = other DNA
cagcctggtaacagagcaagac

SEQ ID NO: 45684 - DNA, 22 bp, synthetic construct
  misc_feature 1..22: note = chemically synthesized
  source 1..22: mol_type = other DNA
gtaacagagcaagactccattt

SEQ ID NO: 45685 - DNA, 22 bp, synthetic construct
  misc_feature 1..22: note = chemically synthesized
  source 1..22: mol_type = other DNA
catttccaaaaaaaaaaaaaaa

SEQ ID NO: 45686 - DNA, 22 bp, synthetic construct
  misc_feature 1..22: note = chemically synthesized
  source 1..22: mol_type = other DNA
ccaaaaaaaaaaaaaaaaaagt

SEQ ID NO: 45687 - DNA, 22 bp, synthetic construct
  misc_feature 1..22: note = chemically synthesized
  source 1..22: mol_type = other DNA
caaaaaaaaaaaaaaaaaagtt

SEQ ID NO: 45688 - DNA, 22 bp, synthetic construct
  misc_feature 1..22: note = chemically synthesized
  source 1..22: mol_type = other DNA
taatagtttatttgcttggtta

SEQ ID NO: 45689 - DNA, 22 bp, synthetic construct
  misc_feature 1..22: note = chemically synthesized
  source 1..22: mol_type = other DNA
atttgcttggttagctgaaata

SEQ ID NO: 45690 - DNA, 22 bp, synthetic construct
  misc_feature 1..22: note = chemically synthesized
  source 1..22: mol_type = other DNA
tttgcttggttagctgaaatat

SEQ ID NO: 45691 - DNA, 22 bp, synthetic construct
  misc_feature 1..22: note = chemically synthesized
  source 1..22: mol_type = other DNA
gcttggttagctgaaatatgga

SEQ ID NO: 45692 - DNA, 22 bp, synthetic construct
  misc_feature 1..22: note = chemically synthesized
  source 1..22: mol_type = other DNA
cttggttagctgaaatatggat

SEQ ID NO: 45693 - DNA, 22 bp, synthetic construct
  misc_feature 1..22: note = chemically synthesized
  source 1..22: mol_type = other DNA
ggttagctgaaatatggattaa

SEQ ID NO: 45694 - DNA, 22 bp, synthetic construct
  misc_feature 1..22: note = chemically synthesized
  source 1..22: mol_type = other DNA
gttagctgaaatatggattaaa

SEQ ID NO: 45695 - DNA, 22 bp, synthetic construct
  misc_feature 1..22: note = chemically synthesized
  source 1..22: mol_type = other DNA
gctgaaatatggattaaaagat

SEQ ID NO: 45696 - DNA, 22 bp, synthetic construct
  misc_feature 1..22: note = chemically synthesized
  source 1..22: mol_type = other DNA
aaatatggattaaaagatggtc

SEQ ID NO: 45697 - DNA, 22 bp, synthetic construct
  misc_feature 1..22: note = chemically synthesized
  source 1..22: mol_type = other DNA
aaagatggtccaatgttagtga

SEQ ID NO: 45698 - DNA, 22 bp, synthetic construct
  misc_feature 1..22: note = chemically synthesized
  source 1..22: mol_type = other DNA
gtgagctggaaatgccttggtt

SEQ ID NO: 45699 - DNA, 22 bp, synthetic construct
  misc_feature 1..22: note = chemically synthesized
  source 1..22: mol_type = other DNA
gaaatgccttggtttaatgtag

SEQ ID NO: 45700 - DNA, 22 bp, synthetic construct
  misc_feature 1..22: note = chemically synthesized
  source 1..22: mol_type = other DNA
ggtttaatgtagaggaagtgat

SEQ ID NO: 45701 - DNA, 22 bp, synthetic construct
  misc_feature 1..22: note = chemically synthesized
  source 1..22: mol_type = other DNA
gtttaatgtagaggaagtgatc

SEQ ID NO: 45702 - DNA, 22 bp, synthetic construct
  misc_feature 1..22: note = chemically synthesized
  source 1..22: mol_type = other DNA
aatgtagaggaagtgatccaaa

SEQ ID NO: 45703 - DNA, 22 bp, synthetic construct
  misc_feature 1..22: note = chemically synthesized
  source 1..22: mol_type = other DNA
atgtagaggaagtgatccaaag

SEQ ID NO: 45704 - DNA, 22 bp, synthetic construct
  misc_feature 1..22: note = chemically synthesized
  source 1..22: mol_type = other DNA
agggagattaggatggtggagt

SEQ ID NO: 45705 - DNA, 22 bp, synthetic construct
  misc_feature 1..22: note = chemically synthesized
  source 1..22: mol_type = other DNA
gggagattaggatggtggagtg

SEQ ID NO: 45706 - DNA, 22 bp, synthetic construct
  misc_feature 1..22: note = chemically synthesized
  source 1..22: mol_type = other DNA
ggatggtggagtggattagtca

SEQ ID NO: 45707 - DNA, 22 bp, synthetic construct
  misc_feature 1..22: note = chemically synthesized
  source 1..22: mol_type = other DNA
gtcactttagacctactcatcc

SEQ ID NO: 45708 - DNA, 22 bp, synthetic construct
  misc_feature 1..22: note = chemically synthesized
  source 1..22: mol_type = other DNA
tagacctactcatcccagctgg

SEQ ID NO: 45709 - DNA, 22 bp, synthetic construct
  misc_feature 1..22: note = chemically synthesized
  source 1..22: mol_type = other DNA
agacctactcatcccagctggg

SEQ ID NO: 45710 - DNA, 22 bp, synthetic construct
  misc_feature 1..22: note = chemically synthesized
  source 1..22: mol_type = other DNA
gacctactcatcccagctggga

SEQ ID NO: 45711 - DNA, 22 bp, synthetic construct
  misc_feature 1..22: note = chemically synthesized
  source 1..22: mol_type = other DNA
ctcatcccagctgggagggtcc

SEQ ID NO: 45712 - DNA, 22 bp, synthetic construct
  misc_feature 1..22: note = chemically synthesized
  source 1..22: mol_type = other DNA
atcccagctgggagggtccaga

SEQ ID NO: 45713 - DNA, 22 bp, synthetic construct
  misc_feature 1..22: note = chemically synthesized
  source 1..22: mol_type = other DNA
ggagggtccagaagatacaccc

SEQ ID NO: 45714 - DNA, 22 bp, synthetic construct
  misc_feature 1..22: note = chemically synthesized
  source 1..22: mol_type = other DNA
ggccgaagctttgtgaaataga

SEQ ID NO: 45715 - DNA, 22 bp, synthetic construct
  misc_feature 1..22: note = chemically synthesized
  source 1..22: mol_type = other DNA
gccgaagctttgtgaaatagat

SEQ ID NO: 45716 - DNA, 22 bp, synthetic construct
  misc_feature 1..22: note = chemically synthesized
  source 1..22: mol_type = other DNA
tgtgaaatagatttgtgagagc

SEQ ID NO: 45717 - DNA, 22 bp, synthetic construct
  misc_feature 1..22: note = chemically synthesized
  source 1..22: mol_type = other DNA
gtgaaatagatttgtgagagca

SEQ ID NO: 45718 - DNA, 22 bp, synthetic construct
  misc_feature 1..22: note = chemically synthesized
  source 1..22: mol_type = other DNA
tgaaatagatttgtgagagcag

SEQ ID NO: 45719 - DNA, 22 bp, synthetic construct
  misc_feature 1..22: note = chemically synthesized
  source 1..22: mol_type = other DNA
gtgagagcagcacctgtatttt

SEQ ID NO: 45720 - DNA, 22 bp, synthetic construct
  misc_feature 1..22: note = chemically synthesized
  source 1..22: mol_type = other DNA
tgagagcagcacctgtattttt

SEQ ID NO: 45721 - DNA, 22 bp, synthetic construct
  misc_feature 1..22: note = chemically synthesized
  source 1..22: mol_type = other DNA
tatttttgaagagcccgtaatt

SEQ ID NO: 45722 - DNA, 22 bp, synthetic construct
  misc_feature 1..22: note = chemically synthesized
  source 1..22: mol_type = other DNA
ttgaagagcccgtaattgctct

SEQ ID NO: 45723 - DNA, 22 bp, synthetic construct
  misc_feature 1..22: note = chemically synthesized
  source 1..22: mol_type = other DNA
tgaagagcccgtaattgctctt

SEQ ID NO: 45724 - DNA, 22 bp, synthetic construct
  misc_feature 1..22: note = chemically synthesized
  source 1..22: mol_type = other DNA
gaagagcccgtaattgctcttc

SEQ ID NO: 45725 - DNA, 22 bp, synthetic construct
  misc_feature 1..22: note = chemically synthesized
  source 1..22: mol_type = other DNA
aagagcccgtaattgctcttct

SEQ ID NO: 45726 - DNA, 22 bp, synthetic construct
  misc_feature 1..22: note = chemically synthesized
  source 1..22: mol_type = other DNA
ctcttctctgtatgtcagatct

SEQ ID NO: 45727 - DNA, 22 bp, synthetic construct
  misc_feature 1..22: note = chemically synthesized
  source 1..22: mol_type = other DNA
ttctctgtatgtcagatctaac

SEQ ID NO: 45728 - DNA, 22 bp, synthetic construct
  misc_feature 1..22: note = chemically synthesized
  source 1..22: mol_type = other DNA
ctctgtatgtcagatctaacag

SEQ ID NO: 45729 - DNA, 22 bp, synthetic construct
  misc_feature 1..22: note = chemically synthesized
  source 1..22: mol_type = other DNA
tctgtatgtcagatctaacagt

SEQ ID NO: 45730 - DNA, 22 bp, synthetic construct
  misc_feature 1..22: note = chemically synthesized
  source 1..22: mol_type = other DNA
tgtatgtcagatctaacagtag

SEQ ID NO: 45731 - DNA, 22 bp, synthetic construct
  misc_feature 1..22: note = chemically synthesized
  source 1..22: mol_type = other DNA
tatgtcagatctaacagtagga

SEQ ID NO: 45732 - DNA, 22 bp, synthetic construct
  misc_feature 1..22: note = chemically synthesized
  source 1..22: mol_type = other DNA
acagtaggaaccacagtcactc

SEQ ID NO: 45733 - DNA, 22 bp, synthetic construct
  misc_feature 1..22: note = chemically synthesized
  source 1..22: mol_type = other DNA
aactacaaaatttaaatacaat

SEQ ID NO: 45734 - DNA, 22 bp, synthetic construct
  misc_feature 1..22: note = chemically synthesized
  source 1..22: mol_type = other DNA
caaaatttaaatacaatgggaa

SEQ ID NO: 45735 - DNA, 22 bp, synthetic construct
  misc_feature 1..22: note = chemically synthesized
  source 1..22: mol_type = other DNA
aaatacaatgggaataattgga

SEQ ID NO: 45736 - DNA, 22 bp, synthetic construct
  misc_feature 1..22: note = chemically synthesized
  source 1..22: mol_type = other DNA
aatacaatgggaataattggat

SEQ ID NO: 45737 - DNA, 22 bp, synthetic construct
  misc_feature 1..22: note = chemically synthesized
  source 1..22: mol_type = other DNA
gatcctgaggtggcaggggcca

SEQ ID NO: 45738 - DNA, 22 bp, synthetic construct
  misc_feature 1..22: note = chemically synthesized
  source 1..22: mol_type = other DNA
aggtggcaggggccaagtgttg

SEQ ID NO: 45739 - DNA, 22 bp, synthetic construct
  misc_feature 1..22: note = chemically synthesized
  source 1..22: mol_type = other DNA
gcactgaaccatcaaaggcaag

SEQ ID NO: 45740 - DNA, 22 bp, synthetic construct
  misc_feature 1..22: note = chemically synthesized
  source 1..22: mol_type = other DNA
aaccatcaaaggcaaggtgggc

SEQ ID NO: 45741 - DNA, 22 bp, synthetic construct
  misc_feature 1..22: note = chemically synthesized
  source 1..22: mol_type = other DNA
ccataatagacagcagaggcaa

SEQ ID NO: 45742 - DNA, 22 bp, synthetic construct
  misc_feature 1..22: note = chemically synthesized
  source 1..22: mol_type = other DNA
actcatgtagagctctggcatt

SEQ ID NO: 45743 - DNA, 22 bp, synthetic construct
  misc_feature 1..22: note = chemically synthesized
  source 1..22: mol_type = other DNA
atgtagagctctggcattggct

SEQ ID NO: 45744 - DNA, 22 bp, synthetic construct
  misc_feature 1..22: note = chemically synthesized
  source 1..22: mol_type = other DNA
tggcattggctaattaatcatg

SEQ ID NO: 45745 - DNA, 22 bp, synthetic construct
  misc_feature 1..22: note = chemically synthesized
  source 1..22: mol_type = other DNA
gcattggctaattaatcatggt

SEQ ID NO: 45746 - DNA, 22 bp, synthetic construct
  misc_feature 1..22: note = chemically synthesized
  source 1..22: mol_type = other DNA
gctaattaatcatggtgttcct

SEQ ID NO: 45747 - DNA, 22 bp, synthetic construct
  misc_feature 1..22: note = chemically synthesized
  source 1..22: mol_type = other DNA
attaatcatggtgttcctagaa

SEQ ID NO: 45748 - DNA, 22 bp, synthetic construct
  misc_feature 1..22: note = chemically synthesized
  source 1..22: mol_type = other DNA
atcatggtgttcctagaagtga

SEQ ID NO: 45749 - DNA, 22 bp, synthetic construct
  misc_feature 1..22: note = chemically synthesized
  source 1..22: mol_type = other DNA
ctagaagtgaaattgatgggaa

SEQ ID NO: 45750 - DNA, 22 bp, synthetic construct
  misc_feature 1..22: note = chemically synthesized
  source 1..22: mol_type = other DNA
gaagtgaaattgatgggaaacc

SEQ ID NO: 45751 - DNA, 22 bp, synthetic construct
  misc_feature 1..22: note = chemically synthesized
  source 1..22: mol_type = other DNA
atgggaaacctactgtattcct

SEQ ID NO: 45752 - DNA, 22 bp, synthetic construct
  misc_feature 1..22: note = chemically synthesized
  source 1..22: mol_type = other DNA
ctgtattcctacttgatttata

SEQ ID NO: 45753 - DNA, 22 bp, synthetic construct
  misc_feature 1..22: note = chemically synthesized
  source 1..22: mol_type = other DNA
tattcctacttgatttatataa

SEQ ID NO: 45754 - DNA, 22 bp, synthetic construct
  misc_feature 1..22: note = chemically synthesized
  source 1..22: mol_type = other DNA
ctacttgatttatataaacaaa

SEQ ID NO: 45755 - DNA, 22 bp, synthetic construct
  misc_feature 1..22: note = chemically synthesized
  source 1..22: mol_type = other DNA
cttgatttatataaacaaaaaa

SEQ ID NO: 45756 - DNA, 22 bp, synthetic construct
  misc_feature 1..22: note = chemically synthesized
  source 1..22: mol_type = other DNA
gatttatataaacaaaaaactg

SEQ ID NO: 45757 - DNA, 22 bp, synthetic construct
  misc_feature 1..22: note = chemically synthesized
  source 1..22: mol_type = other DNA
atttatataaacaaaaaactgc

SEQ ID NO: 45758 - DNA, 22 bp, synthetic construct
  misc_feature 1..22: note = chemically synthesized
  source 1..22: mol_type = other DNA
atataaacaaaaaactgccagg

SEQ ID NO: 45759 - DNA, 22 bp, synthetic construct
  misc_feature 1..22: note = chemically synthesized
  source 1..22: mol_type = other DNA
tataaacaaaaaactgccaggt

SEQ ID NO: 45760 - DNA, 22 bp, synthetic construct
  misc_feature 1..22: note = chemically synthesized
  source 1..22: mol_type = other DNA
ccaggtagaatggactaaagac

SEQ ID NO: 45761 - DNA, 22 bp, synthetic construct
  misc_feature 1..22: note = chemically synthesized
  source 1..22: mol_type = other DNA
aagactaatctgaattataaaa

SEQ ID NO: 45762 - DNA, 22 bp, synthetic construct
  misc_feature 1..22: note = chemically synthesized
  source 1..22: mol_type = other DNA
atctgaattataaaaacagaga

SEQ ID NO: 45763 - DNA, 22 bp, synthetic construct
  misc_feature 1..22: note = chemically synthesized
  source 1..22: mol_type = other DNA
aattataaaaacagagaatcat

SEQ ID NO: 45764 - DNA, 22 bp, synthetic construct
  misc_feature 1..22: note = chemically synthesized
  source 1..22: mol_type = other DNA
taaaaacagagaatcatgggcc

SEQ ID NO: 45765 - DNA, 22 bp, synthetic construct
  misc_feature 1..22: note = chemically synthesized
  source 1..22: mol_type = other DNA
aatcaatttccagactcgaacc

SEQ ID NO: 45766 - DNA, 22 bp, synthetic construct
  misc_feature 1..22: note = chemically synthesized
  source 1..22: mol_type = other DNA
ccagactcgaacctgttacagt

SEQ ID NO: 45767 - DNA, 22 bp, synthetic construct
  misc_feature 1..22: note = chemically synthesized
  source 1..22: mol_type = other DNA
cagactcgaacctgttacagtt

SEQ ID NO: 45768 - DNA, 22 bp, synthetic construct
  misc_feature 1..22: note = chemically synthesized
  source 1..22: mol_type = other DNA
gaacctgttacagttccagaac

SEQ ID NO: 45769 - DNA, 22 bp, synthetic construct
  misc_feature 1..22: note = chemically synthesized
  source 1..22: mol_type = other DNA
ttacagttccagaacccactga

SEQ ID NO: 45770 - DNA, 22 bp, synthetic construct
  misc_feature 1..22: note = chemically synthesized
  source 1..22: mol_type = other DNA
cagttccagaacccactgaatg

SEQ ID NO: 45771 - DNA, 22 bp, synthetic construct
  misc_feature 1..22: note = chemically synthesized
  source 1..22: mol_type = other DNA
cagaacccactgaatgaagggg

SEQ ID NO: 45772 - DNA, 22 bp, synthetic construct
  misc_feature 1..22: note = chemically synthesized
  source 1..22: mol_type = other DNA
aatgaaggggaggctggatccc

SEQ ID NO: 45773 - DNA, 22 bp, synthetic construct
  misc_feature 1..22: note = chemically synthesized
  source 1..22: mol_type = other DNA
gatccccttgaggaaggacacc

SEQ ID NO: 45774 - DNA, 22 bp, synthetic construct
  misc_feature 1..22: note = chemically synthesized
  source 1..22: mol_type = other DNA
gaggaaggacaccactaggcta

SEQ ID NO: 45775 - DNA, 22 bp, synthetic construct
  misc_feature 1..22: note = chemically synthesized
  source 1..22: mol_type = other DNA
aggaaggacaccactaggctac

SEQ ID NO: 45776 - DNA, 22 bp, synthetic construct
  misc_feature 1..22: note = chemically synthesized
  source 1..22: mol_type = other DNA
ggctactgacaacttatgctgt

SEQ ID NO: 45777 - DNA, 22 bp, synthetic construct
  misc_feature 1..22: note = chemically synthesized
  source 1..22: mol_type = other DNA
ctgacaacttatgctgttactc

SEQ ID NO: 45778 - DNA, 22 bp, synthetic construct
  misc_feature 1..22: note = chemically synthesized
  source 1..22: mol_type = other DNA
acaacttatgctgttactcttt

SEQ ID NO: 45779 - DNA, 22 bp, synthetic construct
  misc_feature 1..22: note = chemically synthesized
  source 1..22: mol_type = other DNA
atgctgttactctttctcccat

SEQ ID NO: 45780 - DNA, 22 bp, synthetic construct
  misc_feature 1..22: note = chemically synthesized
  source 1..22: mol_type = other DNA
tgctgttactctttctcccatc

SEQ ID NO: 45781 - DNA, 22 bp, synthetic construct
  misc_feature 1..22: note = chemically synthesized
  source 1..22: mol_type = other DNA
ttactctttctcccatccttcc

SEQ ID NO: 45782 - DNA, 22 bp, synthetic construct
  misc_feature 1..22: note = chemically synthesized
  source 1..22: mol_type = other DNA
ctctttctcccatccttcccta

SEQ ID NO: 45783 - DNA, 22 bp, synthetic construct
  misc_feature 1..22: note = chemically synthesized
  source 1..22: mol_type = other DNA
tttctcccatccttccctaagg

SEQ ID NO: 45784 - DNA, 22 bp, synthetic construct
  misc_feature 1..22: note = chemically synthesized
  source 1..22: mol_type = other DNA
tctcccatccttccctaaggag

SEQ ID NO: 45785 - DNA, 22 bp, synthetic construct
  misc_feature 1..22: note = chemically synthesized
  source 1..22: mol_type = other DNA
ctcccatccttccctaaggaga

SEQ ID NO: 45786 - DNA, 22 bp, synthetic construct
  misc_feature 1..22: note = chemically synthesized
  source 1..22: mol_type = other DNA
tcccatccttccctaaggagac

SEQ ID NO: 45787 - DNA, 22 bp, synthetic construct
  misc_feature 1..22: note = chemically synthesized
  source 1..22: mol_type = other DNA
ccatccttccctaaggagacct

SEQ ID NO: 45788 - DNA, 22 bp, synthetic construct
  misc_feature 1..22: note = chemically synthesized
  source 1..22: mol_type = other DNA
ccctaaggagacctctggcctt

SEQ ID NO: 45789 - DNA, 22 bp, synthetic construct
  misc_feature 1..22: note = chemically synthesized
  source 1..22: mol_type = other DNA
cctaaggagacctctggccttt

SEQ ID NO: 45790 - DNA, 22 bp, synthetic construct
  misc_feature 1..22: note = chemically synthesized
  source 1..22: mol_type = other DNA
aggagacctctggccttttacc

SEQ ID NO: 45791 - DNA, 22 bp, synthetic construct
  misc_feature 1..22: note = chemically synthesized
  source 1..22: mol_type = other DNA
tggccttttaccagggtaactg

SEQ ID NO: 45792 - DNA, 22 bp, synthetic construct
  misc_feature 1..22: note = chemically synthesized
  source 1..22: mol_type = other DNA
gccttttaccagggtaactgtg

SEQ ID NO: 45793 - DNA, 22 bp, synthetic construct
  misc_feature 1..22: note = chemically synthesized
  source 1..22: mol_type = other DNA
ttaccagggtaactgtgtgtac

SEQ ID NO: 45794 - DNA, 22 bp, synthetic construct
  misc_feature 1..22: note = chemically synthesized
  source 1..22: mol_type = other DNA
taccagggtaactgtgtgtact

SEQ ID NO: 45795 - DNA, 22 bp, synthetic construct
  misc_feature 1..22: note = chemically synthesized
  source 1..22: mol_type = other DNA
accagggtaactgtgtgtactg

SEQ ID NO: 45796 - DNA, 22 bp, synthetic construct
  misc_feature 1..22: note = chemically synthesized
  source 1..22: mol_type = other DNA
ccagggtaactgtgtgtactgg

SEQ ID NO: 45797 - DNA, 22 bp, synthetic construct
  misc_feature 1..22: note = chemically synthesized
  source 1..22: mol_type = other DNA
tgtgtactggagaaagggaagt

SEQ ID NO: 45798 - DNA, 22 bp, synthetic construct
  misc_feature 1..22: note = chemically synthesized
  source 1..22: mol_type = other DNA
gagaaagggaagtaatgagaca

SEQ ID NO: 45799 - DNA, 22 bp, synthetic construct
  misc_feature 1..22: note = chemically synthesized
  source 1..22: mol_type = other DNA
cagaaagtactggacactggct

SEQ ID NO: 45800 - DNA, 22 bp, synthetic construct
  misc_feature 1..22: note = chemically synthesized
  source 1..22: mol_type = other DNA
agaaagtactggacactggctc

SEQ ID NO: 45801 - DNA, 22 bp, synthetic construct
  misc_feature 1..22: note = chemically synthesized
  source 1..22: mol_type = other DNA
gacactggctctgagctgacgt

SEQ ID NO: 45802 - DNA, 22 bp, synthetic construct
  misc_feature 1..22: note = chemically synthesized
  source 1..22: mol_type = other DNA
gctctgagctgacgttgattcc

SEQ ID NO: 45803 - DNA, 22 bp, synthetic construct
  misc_feature 1..22: note = chemically synthesized
  source 1..22: mol_type = other DNA
tgagctgacgttgattccaggg

SEQ ID NO: 45804 - DNA, 22 bp, synthetic construct
  misc_feature 1..22: note = chemically synthesized
  source 1..22: mol_type = other DNA
agctgacgttgattccagggta

SEQ ID NO: 45805 - DNA, 22 bp, synthetic construct
  misc_feature 1..22: note = chemically synthesized
  source 1..22: mol_type = other DNA
acgttgattccagggtacccaa

SEQ ID NO: 45806 - DNA, 22 bp, synthetic construct
  misc_feature 1..22: note = chemically synthesized
  source 1..22: mol_type = other DNA
attccagggtacccaaaacgtt

SEQ ID NO: 45807 - DNA, 22 bp, synthetic construct
  misc_feature 1..22: note = chemically synthesized
  source 1..22: mol_type = other DNA
cagggtacccaaaacgttattg

SEQ ID NO: 45808 - DNA, 22 bp, synthetic construct
  misc_feature 1..22: note = chemically synthesized
  source 1..22: mol_type = other DNA
ttgtggttccccagttaaagta

SEQ ID NO: 45809 - DNA, 22 bp, synthetic construct
  misc_feature 1..22: note = chemically synthesized
  source 1..22: mol_type = other DNA
tggttccccagttaaagtaggg

SEQ ID NO: 45810 - DNA, 22 bp, synthetic construct
  misc_feature 1..22: note = chemically synthesized
  source 1..22: mol_type = other DNA
cccagttaaagtaggggcttat

SEQ ID NO: 45811 - DNA, 22 bp, synthetic construct
  misc_feature 1..22: note = chemically synthesized
  source 1..22: mol_type = other DNA
aagtaggggcttatggaggtta

SEQ ID NO: 45812 - DNA, 22 bp, synthetic construct
  misc_feature 1..22: note = chemically synthesized
  source 1..22: mol_type = other DNA
atggaggttaggtaattaatgg

SEQ ID NO: 45813 - DNA, 22 bp, synthetic construct
  misc_feature 1..22: note = chemically synthesized
  source 1..22: mol_type = other DNA
tggaggttaggtaattaatgga

SEQ ID NO: 45814 - DNA, 22 bp, synthetic construct
  misc_feature 1..22: note = chemically synthesized
  source 1..22: mol_type = other DNA
ggtaattaatggagttttagct

SEQ ID NO: 45815 - DNA, 22 bp, synthetic construct
  misc_feature 1..22: note = chemically synthesized
  source 1..22: mol_type = other DNA
atggagttttagctcatttctg

SEQ ID NO: 45816 - DNA, 22 bp, synthetic construct
  misc_feature 1..22: note = chemically synthesized
  source 1..22: mol_type = other DNA
tagctcatttctgacttacagt

SEQ ID NO: 45817 - DNA, 22 bp, synthetic construct
  misc_feature 1..22: note = chemically synthesized
  source 1..22: mol_type = other DNA
agctcatttctgacttacagtg

SEQ ID NO: 45818 - DNA, 22 bp, synthetic construct
  misc_feature 1..22: note = chemically synthesized
  source 1..22: mol_type = other DNA
gctcatttctgacttacagtgg

SEQ ID NO: 45819 - DNA, 22 bp, synthetic construct
  misc_feature 1..22: note = chemically synthesized
  source 1..22: mol_type = other DNA
atttctgacttacagtggttcc

SEQ ID NO: 45820 - DNA, 22 bp, synthetic construct
  misc_feature 1..22: note = chemically synthesized
  source 1..22: mol_type = other DNA
ctgacttacagtggttccagtg

SEQ ID NO: 45821 - DNA, 22 bp, synthetic construct
  misc_feature 1..22: note = chemically synthesized
  source 1..22: mol_type = other DNA
tgacttacagtggttccagtgg

SEQ ID NO: 45822 - DNA, 22 bp, synthetic construct
  misc_feature 1..22: note = chemically synthesized
  source 1..22: mol_type = other DNA
acttacagtggttccagtgggt

SEQ ID NO: 45823 - DNA, 22 bp, synthetic construct
  misc_feature 1..22: note = chemically synthesized
  source 1..22: mol_type = other DNA
acagtggttccagtgggtccct

SEQ ID NO: 45824 - DNA, 22 bp, synthetic construct
  misc_feature 1..22: note = chemically synthesized
  source 1..22: mol_type = other DNA
cagtggttccagtgggtccctg

SEQ ID NO: 45825 - DNA, 22 bp, synthetic construct
  misc_feature 1..22: note = chemically synthesized
  source 1..22: mol_type = other DNA
cagtgggtccctggacttatcc

SEQ ID NO: 45826 - DNA, 22 bp, synthetic construct
  misc_feature 1..22: note = chemically synthesized
  source 1..22: mol_type = other DNA
gacttatcctctggtcattttc

SEQ ID NO: 45827 - DNA, 22 bp, synthetic construct
  misc_feature 1..22: note = chemically synthesized
  source 1..22: mol_type = other DNA
atcctctggtcattttcccagt

SEQ ID NO: 45828 - DNA, 22 bp, synthetic construct
  misc_feature 1..22: note = chemically synthesized
  source 1..22: mol_type = other DNA
tcctctggtcattttcccagtg

SEQ ID NO: 45829 - DNA, 22 bp, synthetic construct
  misc_feature 1..22: note = chemically synthesized
  source 1..22: mol_type = other DNA
tggtcattttcccagtgccaaa

SEQ ID NO: 45830 - DNA, 22 bp, synthetic construct
  misc_feature 1..22: note = chemically synthesized
  source 1..22: mol_type = other DNA
gtcattttcccagtgccaaaat

SEQ ID NO: 45831 - DNA, 22 bp, synthetic construct
  misc_feature 1..22: note = chemically synthesized
  source 1..22: mol_type = other DNA
tcccagtgccaaaatgcataat

SEQ ID NO: 45832 - DNA, 22 bp, synthetic construct
  misc_feature 1..22: note = chemically synthesized
  source 1..22: mol_type = other DNA
cccagtgccaaaatgcataatt

SEQ ID NO: 45833 - DNA, 22 bp, synthetic construct
  misc_feature 1..22: note = chemically synthesized
  source 1..22: mol_type = other DNA
ccagtgccaaaatgcataattt

SEQ ID NO: 45834 - DNA, 22 bp, synthetic construct
  misc_feature 1..22: note = chemically synthesized
  source 1..22: mol_type = other DNA
gtatagacatacttattagctg

SEQ ID NO: 45835 - DNA, 22 bp, synthetic construct
  misc_feature 1..22: note = chemically synthesized
  source 1..22: mol_type = other DNA
tatagacatacttattagctgg

SEQ ID NO: 45836 - DNA, 22 bp, synthetic construct
  misc_feature 1..22: note = chemically synthesized
  source 1..22: mol_type = other DNA
attagctggcagaaatgccaca

SEQ ID NO: 45837 - DNA, 22 bp, synthetic construct
  misc_feature 1..22: note = chemically synthesized
  source 1..22: mol_type = other DNA
ttagctggcagaaatgccacat

SEQ ID NO: 45838 - DNA, 22 bp, synthetic construct
  misc_feature 1..22: note = chemically synthesized
  source 1..22: mol_type = other DNA
gctggcagaaatgccacattgg

SEQ ID NO: 45839 - DNA, 22 bp, synthetic construct
  misc_feature 1..22: note = chemically synthesized
  source 1..22: mol_type = other DNA
gcagaaatgccacattggctcc

SEQ ID NO: 45840 - DNA, 22 bp, synthetic construct
  misc_feature 1..22: note = chemically synthesized
  source 1..22: mol_type = other DNA
gctccctgactggtaggatgag

SEQ ID NO: 45841 - DNA, 22 bp, synthetic construct
  misc_feature 1..22: note = chemically synthesized
  source 1..22: mol_type = other DNA
cctgactggtaggatgagggct

SEQ ID NO: 45842 - DNA, 22 bp, synthetic construct
  misc_feature 1..22: note = chemically synthesized
  source 1..22: mol_type = other DNA
actggtaggatgagggctatta

SEQ ID NO: 45843 - DNA, 22 bp, synthetic construct
  misc_feature 1..22: note = chemically synthesized
  source 1..22: mol_type = other DNA
gtaggatgagggctattatggt

SEQ ID NO: 45844 - DNA, 22 bp, synthetic construct
  misc_feature 1..22: note = chemically synthesized
  source 1..22: mol_type = other DNA
ttatggtgggaaaggccaaaca

SEQ ID NO: 45845 - DNA, 22 bp, synthetic construct
  misc_feature 1..22: note = chemically synthesized
  source 1..22: mol_type = other DNA
tggtgggaaaggccaaacagaa

SEQ ID NO: 45846 - DNA, 22 bp, synthetic construct
  misc_feature 1..22: note = chemically synthesized
  source 1..22: mol_type = other DNA
gagctgtctctacctagaaaaa

SEQ ID NO: 45847 - DNA, 22 bp, synthetic construct
  misc_feature 1..22: note = chemically synthesized
  source 1..22: mol_type = other DNA
tctctacctagaaaaataaaaa

SEQ ID NO: 45848 - DNA, 22 bp, synthetic construct
  misc_feature 1..22: note = chemically synthesized
  source 1..22: mol_type = other DNA
tacctagaaaaataaaaaaatc

SEQ ID NO: 45849 - DNA, 22 bp, synthetic construct
  misc_feature 1..22: note = chemically synthesized
  source 1..22: mol_type = other DNA
cctagaaaaataaaaaaatcaa

SEQ ID NO: 45850 - DNA, 22 bp, synthetic construct
  misc_feature 1..22: note = chemically synthesized
  source 1..22: mol_type = other DNA
gaaaaataaaaaaatcaaaaac

SEQ ID NO: 45851 - DNA, 22 bp, synthetic construct
  misc_feature 1..22: note = chemically synthesized
  source 1..22: mol_type = other DNA
gagggactgaagtgattagtgt

SEQ ID NO: 45852 - DNA, 22 bp, synthetic construct
  misc_feature 1..22: note = chemically synthesized
  source 1..22: mol_type = other DNA
aagtgattagtgtcaccatcaa

SEQ ID NO: 45853 - DNA, 22 bp, synthetic construct
  misc_feature 1..22: note = chemically synthesized
  source 1..22: mol_type = other DNA
gtgtcaccatcaaggacttgaa

SEQ ID NO: 45854 - DNA, 22 bp, synthetic construct
  misc_feature 1..22: note = chemically synthesized
  source 1..22: mol_type = other DNA
gaaagacgcaggggtggtgatt

SEQ ID NO: 45855 - DNA, 22 bp, synthetic construct
  misc_feature 1..22: note = chemically synthesized
  source 1..22: mol_type = other DNA
aaagacgcaggggtggtgattc

SEQ ID NO: 45856 - DNA, 22 bp, synthetic construct
  misc_feature 1..22: note = chemically synthesized
  source 1..22: mol_type = other DNA
ccaccacatccctgttcaactc

SEQ ID NO: 45857 - DNA, 22 bp, synthetic construct
  misc_feature 1..22: note = chemically synthesized
  source 1..22: mol_type = other DNA
ttcaactctcccatttgacctg

SEQ ID NO: 45858 - DNA, 22 bp, synthetic construct
  misc_feature 1..22: note = chemically synthesized
  source 1..22: mol_type = other DNA
aactctcccatttgacctgtgc

SEQ ID NO: 45859 - DNA, 22 bp, synthetic construct
  misc_feature 1..22: note = chemically synthesized
  source 1..22: mol_type = other DNA
tcccatttgacctgtgcagagg

SEQ ID NO: 45860 - DNA, 22 bp, synthetic construct
  misc_feature 1..22: note = chemically synthesized
  source 1..22: mol_type = other DNA
ccatttgacctgtgcagaggac

SEQ ID NO: 45861 - DNA, 22 bp, synthetic construct
  misc_feature 1..22: note = chemically synthesized
  source 1..22: mol_type = other DNA
gacctgtgcagaggacagatgg

SEQ ID NO: 45862 - DNA, 22 bp, synthetic construct
  misc_feature 1..22: note = chemically synthesized
  source 1..22: mol_type = other DNA
acctgtgcagaggacagatgga

SEQ ID NO: 45863 - DNA, 22 bp, synthetic construct
  misc_feature 1..22: note = chemically synthesized
  source 1..22: mol_type = other DNA
tgcagaggacagatggatcttg

SEQ ID NO: 45864 - DNA, 22 bp, synthetic construct
  misc_feature 1..22: note = chemically synthesized
  source 1..22: mol_type = other DNA
ggaaaatgatggtggattattt

SEQ ID NO: 45865 - DNA, 22 bp, synthetic construct
  misc_feature 1..22: note = chemically synthesized
  source 1..22: mol_type = other DNA
gaaaatgatggtggattatttt

SEQ ID NO: 45866 - DNA, 22 bp, synthetic construct
  misc_feature 1..22: note = chemically synthesized
  source 1..22: mol_type = other DNA
ttttaagcttaaccaagtggtg

SEQ ID NO: 45867 - DNA, 22 bp, synthetic construct
  misc_feature 1..22: note = chemically synthesized
  source 1..22: mol_type = other DNA
taagcttaaccaagtggtgact

SEQ ID NO: 45868 - DNA, 22 bp, synthetic construct
  misc_feature 1..22: note = chemically synthesized
  source 1..22: mol_type = other DNA
aagcttaaccaagtggtgactc

SEQ ID NO: 45869 - DNA, 22 bp, synthetic construct
  misc_feature 1..22: note = chemically synthesized
  source 1..22: mol_type = other DNA
agcttaaccaagtggtgactcc

SEQ ID NO: 45870 - DNA, 22 bp, synthetic construct
  misc_feature 1..22: note = chemically synthesized
  source 1..22: mol_type = other DNA
aaccaagtggtgactccaattg

SEQ ID NO: 45871 - DNA, 22 bp, synthetic construct
  misc_feature 1..22: note = chemically synthesized
  source 1..22: mol_type = other DNA
accaagtggtgactccaattgc

SEQ ID NO: 45872 - DNA, 22 bp, synthetic construct
  misc_feature 1..22: note = chemically synthesized
  source 1..22: mol_type = other DNA
caattgcagctgctctaccagt

SEQ ID NO: 45873 - DNA, 22 bp, synthetic construct
  misc_feature 1..22: note = chemically synthesized
  source 1..22: mol_type = other DNA
cagctgctctaccagttgtggt

SEQ ID NO: 45874 - DNA, 22 bp, synthetic construct
  misc_feature 1..22: note = chemically synthesized
  source 1..22: mol_type = other DNA
ctctaccagttgtggttttgtt

SEQ ID NO: 45875 - DNA, 22 bp, synthetic construct
  misc_feature 1..22: note = chemically synthesized
  source 1..22: mol_type = other DNA
taccagttgtggttttgttgct

SEQ ID NO: 45876 - DNA, 22 bp, synthetic construct
  misc_feature 1..22: note = chemically synthesized
  source 1..22: mol_type = other DNA
ccagttgtggttttgttgcttg

SEQ ID NO: 45877 - DNA, 22 bp, synthetic construct
  misc_feature 1..22: note = chemically synthesized
  source 1..22: mol_type = other DNA
tggttttgttgcttgagcaaat

SEQ ID NO: 45878 - DNA, 22 bp, synthetic construct
  misc_feature 1..22: note = chemically synthesized
  source 1..22: mol_type = other DNA
tgttgcttgagcaaattaacac

SEQ ID NO: 45879 - DNA, 22 bp, synthetic construct
  misc_feature 1..22: note = chemically synthesized
  source 1..22: mol_type = other DNA
gttgcttgagcaaattaacaca

SEQ ID NO: 45880 - DNA, 22 bp, synthetic construct
  misc_feature 1..22: note = chemically synthesized
  source 1..22: mol_type = other DNA
ttgcttgagcaaattaacacat

SEQ ID NO: 45881 - DNA, 22 bp, synthetic construct
  misc_feature 1..22: note = chemically synthesized
  source 1..22: mol_type = other DNA
cttgagcaaattaacacatctc

SEQ ID NO: 45882 - DNA, 22 bp, synthetic construct
  misc_feature 1..22: note = chemically synthesized
  source 1..22: mol_type = other DNA
gagcaaattaacacatctcctg

SEQ ID NO: 45883 - DNA, 22 bp, synthetic construct
  misc_feature 1..22: note = chemically synthesized
  source 1..22: mol_type = other DNA
agcaaattaacacatctcctgg

SEQ ID NO: 45884 - DNA, 22 bp, synthetic construct
  misc_feature 1..22: note = chemically synthesized
  source 1..22: mol_type = other DNA
acacatctcctggtgcctggta

SEQ ID NO: 45885 - DNA, 22 bp, synthetic construct
  misc_feature 1..22: note = chemically synthesized
  source 1..22: mol_type = other DNA
ctggtgcctggtatgcagccat

SEQ ID NO: 45886 - DNA, 22 bp, synthetic construct
  misc_feature 1..22: note = chemically synthesized
  source 1..22: mol_type = other DNA
gtgcctggtatgcagccattgg

SEQ ID NO: 45887 - DNA, 22 bp, synthetic construct
  misc_feature 1..22: note = chemically synthesized
  source 1..22: mol_type = other DNA
gtatgcagccattggcttggca

SEQ ID NO: 45888 - DNA, 22 bp, synthetic construct
  misc_feature 1..22: note = chemically synthesized
  source 1..22: mol_type = other DNA
gcttggcaagtggctttttctc

SEQ ID NO: 45889 - DNA, 22 bp, synthetic construct
  misc_feature 1..22: note = chemically synthesized
  source 1..22: mol_type = other DNA
ggcaagtggctttttctccatt

SEQ ID NO: 45890 - DNA, 22 bp, synthetic construct
  misc_feature 1..22: note = chemically synthesized
  source 1..22: mol_type = other DNA
gcaagtggctttttctccattc

SEQ ID NO: 45891 - DNA, 22 bp, synthetic construct
  misc_feature 1..22: note = chemically synthesized
  source 1..22: mol_type = other DNA
tttctccattcctgtccataag

SEQ ID NO: 45892 - DNA, 22 bp, synthetic construct
  misc_feature 1..22: note = chemically synthesized
  source 1..22: mol_type = other DNA
ttctccattcctgtccataaga

SEQ ID NO: 45893 - DNA, 22 bp, synthetic construct
  misc_feature 1..22: note = chemically synthesized
  source 1..22: mol_type = other DNA
tctccattcctgtccataagac

SEQ ID NO: 45894 - DNA, 22 bp, synthetic construct
  misc_feature 1..22: note = chemically synthesized
  source 1..22: mol_type = other DNA
ctccattcctgtccataagacc

SEQ ID NO: 45895 - DNA, 22 bp, synthetic construct
  misc_feature 1..22: note = chemically synthesized
  source 1..22: mol_type = other DNA
tccattcctgtccataagaccc

SEQ ID NO: 45896 - DNA, 22 bp, synthetic construct
  misc_feature 1..22: note = chemically synthesized
  source 1..22: mol_type = other DNA
cattcctgtccataagacccac

SEQ ID NO: 45897 - DNA, 22 bp, synthetic construct
  misc_feature 1..22: note = chemically synthesized
  source 1..22: mol_type = other DNA
ctgtccataagacccaccagaa

SEQ ID NO: 45898 - DNA, 22 bp, synthetic construct
  misc_feature 1..22: note = chemically synthesized
  source 1..22: mol_type = other DNA
tccataagacccaccagaagca

SEQ ID NO: 45899 - DNA, 22 bp, synthetic construct
  misc_feature 1..22: note = chemically synthesized
  source 1..22: mol_type = other DNA
gccttcagctgacaaggccagc

SEQ ID NO: 45900 - DNA, 22 bp, synthetic construct
  misc_feature 1..22: note = chemically synthesized
  source 1..22: mol_type = other DNA
ccttcagctgacaaggccagca

SEQ ID NO: 45901 - DNA, 22 bp, synthetic construct
  misc_feature 1..22: note = chemically synthesized
  source 1..22: mol_type = other DNA
cagctgacaaggccagcattat

SEQ ID NO: 45902 - DNA, 22 bp, synthetic construct
  misc_feature 1..22: note = chemically synthesized
  source 1..22: mol_type = other DNA
agctgacaaggccagcattata

SEQ ID NO: 45903 - DNA, 22 bp, synthetic construct
  misc_feature 1..22: note = chemically synthesized
  source 1..22: mol_type = other DNA
acaaggccagcattataccttt

SEQ ID NO: 45904 - DNA, 22 bp, synthetic construct
  misc_feature 1..22: note = chemically synthesized
  source 1..22: mol_type = other DNA
tacctttaccaccctacctcag

SEQ ID NO: 45905 - DNA, 22 bp, synthetic construct
  misc_feature 1..22: note = chemically synthesized
  source 1..22: mol_type = other DNA
taccaccctacctcaggggtgt

SEQ ID NO: 45906 - DNA, 22 bp, synthetic construct
  misc_feature 1..22: note = chemically synthesized
  source 1..22: mol_type = other DNA
accaccctacctcaggggtgta

SEQ ID NO: 45907 - DNA, 22 bp, synthetic construct
  misc_feature 1..22: note = chemically synthesized
  source 1..22: mol_type = other DNA
ccaccctacctcaggggtgtat

SEQ ID NO: 45908 - DNA, 22 bp, synthetic construct
  misc_feature 1..22: note = chemically synthesized
  source 1..22: mol_type = other DNA
cctcaggggtgtatcaactctc

SEQ ID NO: 45909 - DNA, 22 bp, synthetic construct
  misc_feature 1..22: note = chemically synthesized
  source 1..22: mol_type = other DNA
aggggtgtatcaactctccagc

SEQ ID NO: 45910 - DNA, 22 bp, synthetic construct
  misc_feature 1..22: note = chemically synthesized
  source 1..22: mol_type = other DNA
tccagctttgtgtcataatctt

SEQ ID NO: 45911 - DNA, 22 bp, synthetic construct
  misc_feature 1..22: note = chemically synthesized
  source 1..22: mol_type = other DNA
cagctttgtgtcataatcttat

SEQ ID NO: 45912 - DNA, 22 bp, synthetic construct
  misc_feature 1..22: note = chemically synthesized
  source 1..22: mol_type = other DNA
tgtgtcataatcttatttggag

SEQ ID NO: 45913 - DNA, 22 bp, synthetic construct
  misc_feature 1..22: note = chemically synthesized
  source 1..22: mol_type = other DNA
gtgtcataatcttatttggaga

SEQ ID NO: 45914 - DNA, 22 bp, synthetic construct
  misc_feature 1..22: note = chemically synthesized
  source 1..22: mol_type = other DNA
tgtcataatcttatttggagag

SEQ ID NO: 45915 - DNA, 22 bp, synthetic construct
  misc_feature 1..22: note = chemically synthesized
  source 1..22: mol_type = other DNA
atttggagagaccttgctcgct

SEQ ID NO: 45916 - DNA, 22 bp, synthetic construct
  misc_feature 1..22: note = chemically synthesized
  source 1..22: mol_type = other DNA
tttggagagaccttgctcgctt

SEQ ID NO: 45917 - DNA, 22 bp, synthetic construct
  misc_feature 1..22: note = chemically synthesized
  source 1..22: mol_type = other DNA
ggagagaccttgctcgcttttc

SEQ ID NO: 45918 - DNA, 22 bp, synthetic construct
  misc_feature 1..22: note = chemically synthesized
  source 1..22: mol_type = other DNA
gagagaccttgctcgcttttca

SEQ ID NO: 45919 - DNA, 22 bp, synthetic construct
  misc_feature 1..22: note = chemically synthesized
  source 1..22: mol_type = other DNA
gctcgcttttcacttccacgag

SEQ ID NO: 45920 - DNA, 22 bp, synthetic construct
  misc_feature 1..22: note = chemically synthesized
  source 1..22: mol_type = other DNA
ctcgcttttcacttccacgaga

SEQ ID NO: 45921 - DNA, 22 bp, synthetic construct
  misc_feature 1..22: note = chemically synthesized
  source 1..22: mol_type = other DNA
gcttttcacttccacgagatat

SEQ ID NO: 45922 - DNA, 22 bp, synthetic construct
  misc_feature 1..22: note = chemically synthesized
  source 1..22: mol_type = other DNA
ttcacttccacgagatataaca

SEQ ID NO: 45923 - DNA, 22 bp, synthetic construct
  misc_feature 1..22: note = chemically synthesized
  source 1..22: mol_type = other DNA
tcacttccacgagatataacac

SEQ ID NO: 45924 - DNA, 22 bp, synthetic construct
  misc_feature 1..22: note = chemically synthesized
  source 1..22: mol_type = other DNA
cacttccacgagatataacact

SEQ ID NO: 45925 - DNA, 22 bp, synthetic construct
  misc_feature 1..22: note = chemically synthesized
  source 1..22: mol_type = other DNA
acttccacgagatataacactg

SEQ ID NO: 45926 - DNA, 22 bp, synthetic construct
  misc_feature 1..22: note = chemically synthesized
  source 1..22: mol_type = other DNA
ccacgagatataacactggtcc

SEQ ID NO: 45927 - DNA, 22 bp, synthetic construct
  misc_feature 1..22: note = chemically synthesized
  source 1..22: mol_type = other DNA
cacgagatataacactggtcca

SEQ ID NO: 45928 - DNA, 22 bp, synthetic construct
  misc_feature 1..22: note = chemically synthesized
  source 1..22: mol_type = other DNA
gtccattacattcatgacatta

SEQ ID NO: 45929 - DNA, 22 bp, synthetic construct
  misc_feature 1..22: note = chemically synthesized
  source 1..22: mol_type = other DNA
cattcatgacattatgatgatt

SEQ ID NO: 45930 - DNA, 22 bp, synthetic construct
  misc_feature 1..22: note = chemically synthesized
  source 1..22: mol_type = other DNA
atgacattatgatgattggata

SEQ ID NO: 45931 - DNA, 22 bp, synthetic construct
  misc_feature 1..22: note = chemically synthesized
  source 1..22: mol_type = other DNA
tgatgattggatacagtgagca

SEQ ID NO: 45932 - DNA, 22 bp, synthetic construct
  misc_feature 1..22: note = chemically synthesized
  source 1..22: mol_type = other DNA
gatacagtgagcaagaagtagc

SEQ ID NO: 45933 - DNA, 22 bp, synthetic construct
  misc_feature 1..22: note = chemically synthesized
  source 1..22: mol_type = other DNA
aacttattggtgagacatttgt

SEQ ID NO: 45934 - DNA, 22 bp, synthetic construct
  misc_feature 1..22: note = chemically synthesized
  source 1..22: mol_type = other DNA
attggtgagacatttgtatgcc

SEQ ID NO: 45935 - DNA, 22 bp, synthetic construct
  misc_feature 1..22: note = chemically synthesized
  source 1..22: mol_type = other DNA
ttggtgagacatttgtatgcca

SEQ ID NO: 45936 - DNA, 22 bp, synthetic construct
  misc_feature 1..22: note = chemically synthesized
  source 1..22: mol_type = other DNA
gtgagacatttgtatgccagag

SEQ ID NO: 45937 - DNA, 22 bp, synthetic construct
  misc_feature 1..22: note = chemically synthesized
  source 1..22: mol_type = other DNA
gtatgccagaggatgggaaata

SEQ ID NO: 45938 - DNA, 22 bp, synthetic construct
  misc_feature 1..22: note = chemically synthesized
  source 1..22: mol_type = other DNA
tatgccagaggatgggaaataa

SEQ ID NO: 45939 - DNA, 22 bp, synthetic construct
  misc_feature 1..22: note = chemically synthesized
  source 1..22: mol_type = other DNA
aaatttagggactttctacctc

SEQ ID NO: 45940 - DNA, 22 bp, synthetic construct
  misc_feature 1..22: note = chemically synthesized
  source 1..22: mol_type = other DNA
agggactttctacctcggtaaa

SEQ ID NO: 45941 - DNA, 22 bp, synthetic construct
  misc_feature 1..22: note = chemically synthesized
  source 1..22: mol_type = other DNA
gggactttctacctcggtaaaa

SEQ ID NO: 45942 - DNA, 22 bp, synthetic construct
  misc_feature 1..22: note = chemically synthesized
  source 1..22: mol_type = other DNA
tctacctcggtaaaatttctag

SEQ ID NO: 45943 - DNA, 22 bp, synthetic construct
  misc_feature 1..22: note = chemically synthesized
  source 1..22: mol_type = other DNA
ctacctcggtaaaatttctagg

SEQ ID NO: 45944 - DNA, 22 bp, synthetic construct
  misc_feature 1..22: note = chemically synthesized
  source 1..22: mol_type = other DNA
tacctcggtaaaatttctaggg

SEQ ID NO: 45945 - DNA, 22 bp, synthetic construct
  misc_feature 1..22: note = chemically synthesized
  source 1..22: mol_type = other DNA
cctcggtaaaatttctagggtt

SEQ ID NO: 45946 - DNA, 22 bp, synthetic construct
  misc_feature 1..22: note = chemically synthesized
  source 1..22: mol_type = other DNA
ggtaaaatttctagggttccag

SEQ ID NO: 45947 - DNA, 22 bp, synthetic construct
  misc_feature 1..22: note = chemically synthesized
  source 1..22: mol_type = other DNA
ctagggttccagtggcatgaga

SEQ ID NO: 45948 - DNA, 22 bp, synthetic construct
  misc_feature 1..22: note = chemically synthesized
  source 1..22: mol_type = other DNA
tagggttccagtggcatgagac

SEQ ID NO: 45949 - DNA, 22 bp, synthetic construct
  misc_feature 1..22: note = chemically synthesized
  source 1..22: mol_type = other DNA
gggttccagtggcatgagacct

SEQ ID NO: 45950 - DNA, 22 bp, synthetic construct
  misc_feature 1..22: note = chemically synthesized
  source 1..22: mol_type = other DNA
cagtggcatgagacctatggag

SEQ ID NO: 45951 - DNA, 22 bp, synthetic construct
  misc_feature 1..22: note = chemically synthesized
  source 1..22: mol_type = other DNA
tggagatattccttctaaggtg

SEQ ID NO: 45952 - DNA, 22 bp, synthetic construct
  misc_feature 1..22: note = chemically synthesized
  source 1..22: mol_type = other DNA
cttctaaggtgaagcataactt

SEQ ID NO: 45953 - DNA, 22 bp, synthetic construct
  misc_feature 1..22: note = chemically synthesized
  source 1..22: mol_type = other DNA
ctaaggtgaagcataacttgct

SEQ ID NO: 45954 - DNA, 22 bp, synthetic construct
  misc_feature 1..22: note = chemically synthesized
  source 1..22: mol_type = other DNA
taaggtgaagcataacttgctg

SEQ ID NO: 45955 - DNA, 22 bp, synthetic construct
  misc_feature 1..22: note = chemically synthesized
  source 1..22: mol_type = other DNA
aggtgaagcataacttgctgcg

SEQ ID NO: 45956 - DNA, 22 bp, synthetic construct
  misc_feature 1..22: note = chemically synthesized
  source 1..22: mol_type = other DNA
gctgcgtttggcccctcttaca

SEQ ID NO: 45957 - DNA, 22 bp, synthetic construct
  misc_feature 1..22: note = chemically synthesized
  source 1..22: mol_type = other DNA
ctgcgtttggcccctcttacaa

SEQ ID NO: 45958 - DNA, 22 bp, synthetic construct
  misc_feature 1..22: note = chemically synthesized
  source 1..22: mol_type = other DNA
cgtttggcccctcttacaacca

SEQ ID NO: 45959 - DNA, 22 bp, synthetic construct
  misc_feature 1..22: note = chemically synthesized
  source 1..22: mol_type = other DNA
ggcccctcttacaaccaagaaa

SEQ ID NO: 45960 - DNA, 22 bp, synthetic construct
  misc_feature 1..22: note = chemically synthesized
  source 1..22: mol_type = other DNA
gcccctcttacaaccaagaaag

SEQ ID NO: 45961 - DNA, 22 bp, synthetic construct
  misc_feature 1..22: note = chemically synthesized
  source 1..22: mol_type = other DNA
ttacaaccaagaaagaggcaca

SEQ ID NO: 45962 - DNA, 22 bp, synthetic construct
  misc_feature 1..22: note = chemically synthesized
  source 1..22: mol_type = other DNA
acaaccaagaaagaggcacaat

SEQ ID NO: 45963 - DNA, 22 bp, synthetic construct
  misc_feature 1..22: note = chemically synthesized
  source 1..22: mol_type = other DNA
caaccaagaaagaggcacaatg

SEQ ID NO: 45964 - DNA, 22 bp, synthetic construct
  misc_feature 1..22: note = chemically synthesized
  source 1..22: mol_type = other DNA
gtgggcctatttggattttgga

SEQ ID NO: 45965 - DNA, 22 bp, synthetic construct
  misc_feature 1..22: note = chemically synthesized
  source 1..22: mol_type = other DNA
tttggattttggaggcaacaca

SEQ ID NO: 45966 - DNA, 22 bp, synthetic construct
  misc_feature 1..22: note = chemically synthesized
  source 1..22: mol_type = other DNA
ggattttggaggcaacacattc

SEQ ID NO: 45967 - DNA, 22 bp, synthetic construct
  misc_feature 1..22: note = chemically synthesized
  source 1..22: mol_type = other DNA
gattttggaggcaacacattcc

SEQ ID NO: 45968 - DNA, 22 bp, synthetic construct
  misc_feature 1..22: note = chemically synthesized
  source 1..22: mol_type = other DNA
tggaggcaacacattcctcgtt

SEQ ID NO: 45969 - DNA, 22 bp, synthetic construct
  misc_feature 1..22: note = chemically synthesized
  source 1..22: mol_type = other DNA
ggaggcaacacattcctcgttt

SEQ ID NO: 45970 - DNA, 22 bp, synthetic construct
  misc_feature 1..22: note = chemically synthesized
  source 1..22: mol_type = other DNA
gaggcaacacattcctcgtttg

SEQ ID NO: 45971 - DNA, 22 bp, synthetic construct
  misc_feature 1..22: note = chemically synthesized
  source 1..22: mol_type = other DNA
ctcgtttgggtgtgttactctg

SEQ ID NO: 45972 - DNA, 22 bp, synthetic construct
  misc_feature 1..22: note = chemically synthesized
  source 1..22: mol_type = other DNA
gtttgggtgtgttactctggcc

SEQ ID NO: 45973 - DNA, 22 bp, synthetic construct
  misc_feature 1..22: note = chemically synthesized
  source 1..22: mol_type = other DNA
gggtgtgttactctggcccatt

SEQ ID NO: 45974 - DNA, 22 bp, synthetic construct
  misc_feature 1..22: note = chemically synthesized
  source 1..22: mol_type = other DNA
ggtgtgttactctggcccattt

SEQ ID NO: 45975 - DNA, 22 bp, synthetic construct
  misc_feature 1..22: note = chemically synthesized
  source 1..22: mol_type = other DNA
ctctggcccatttatcgagtga

SEQ ID NO: 45976 - DNA, 22 bp, synthetic construct
  misc_feature 1..22: note = chemically synthesized
  source 1..22: mol_type = other DNA
tggcccatttatcgagtgacct

SEQ ID NO: 45977 - DNA, 22 bp, synthetic construct
  misc_feature 1..22: note = chemically synthesized
  source 1..22: mol_type = other DNA
gcccatttatcgagtgacctga

SEQ ID NO: 45978 - DNA, 22 bp, synthetic construct
  misc_feature 1..22: note = chemically synthesized
  source 1..22: mol_type = other DNA
atcgagtgacctgaaaggctgc

SEQ ID NO: 45979 - DNA, 22 bp, synthetic construct
  misc_feature 1..22: note = chemically synthesized
  source 1..22: mol_type = other DNA
tcgagtgacctgaaaggctgcc

SEQ ID NO: 45980 - DNA, 22 bp, synthetic construct
  misc_feature 1..22: note = chemically synthesized
  source 1..22: mol_type = other DNA
aaaggctgccagatttaagtgc

SEQ ID NO: 45981 - DNA, 22 bp, synthetic construct
  misc_feature 1..22: note = chemically synthesized
  source 1..22: mol_type = other DNA
ccagatttaagtgcagtctaga

SEQ ID NO: 45982 - DNA, 22 bp, synthetic construct
  misc_feature 1..22: note = chemically synthesized
  source 1..22: mol_type = other DNA
aagtgcagtctagaacaaaaga

SEQ ID NO: 45983 - DNA, 22 bp, synthetic construct
  misc_feature 1..22: note = chemically synthesized
  source 1..22: mol_type = other DNA
agtgcagtctagaacaaaagaa

SEQ ID NO: 45984 - DNA, 22 bp, synthetic construct
  misc_feature 1..22: note = chemically synthesized
  source 1..22: mol_type = other DNA
gaacaaaagaaggctctgaaac

SEQ ID NO: 45985 - DNA, 22 bp, synthetic construct
  misc_feature 1..22: note = chemically synthesized
  source 1..22: mol_type = other DNA
tgaaacaggtccaggctgctgt

SEQ ID NO: 45986 - DNA, 22 bp, synthetic construct
  misc_feature 1..22: note = chemically synthesized
  source 1..22: mol_type = other DNA
aaacaggtccaggctgctgtga

SEQ ID NO: 45987 - DNA, 22 bp, synthetic construct
  misc_feature 1..22: note = chemically synthesized
  source 1..22: mol_type = other DNA
ctgtgaaagctgctctgccatt

SEQ ID NO: 45988 - DNA, 22 bp, synthetic construct
  misc_feature 1..22: note = chemically synthesized
  source 1..22: mol_type = other DNA
tgaaagctgctctgccatttgg

SEQ ID NO: 45989 - DNA, 22 bp, synthetic construct
  misc_feature 1..22: note = chemically synthesized
  source 1..22: mol_type = other DNA
ctctgccatttgggccacatga

SEQ ID NO: 45990 - DNA, 22 bp, synthetic construct
  misc_feature 1..22: note = chemically synthesized
  source 1..22: mol_type = other DNA
tgccatttgggccacatgaccc

SEQ ID NO: 45991 - DNA, 22 bp, synthetic construct
  misc_feature 1..22: note = chemically synthesized
  source 1..22: mol_type = other DNA
ccatttgggccacatgaccccg

SEQ ID NO: 45992 - DNA, 22 bp, synthetic construct
  misc_feature 1..22: note = chemically synthesized
  source 1..22: mol_type = other DNA
gggccacatgaccccgcagatc

SEQ ID NO: 45993 - DNA, 22 bp, synthetic construct
  misc_feature 1..22: note = chemically synthesized
  source 1..22: mol_type = other DNA
ggccacatgaccccgcagatcc

SEQ ID NO: 45994 - DNA, 22 bp, synthetic construct
  misc_feature 1..22: note = chemically synthesized
  source 1..22: mol_type = other DNA
gaggtgtcagtggcagataggg

SEQ ID NO: 45995 - DNA, 22 bp, synthetic construct
  misc_feature 1..22: note = chemically synthesized
  source 1..22: mol_type = other DNA
aggtgtcagtggcagataggga

SEQ ID NO: 45996 - DNA, 22 bp, synthetic construct
  misc_feature 1..22: note = chemically synthesized
  source 1..22: mol_type = other DNA
tttggagcctttggcaggcccc

SEQ ID NO: 45997 - DNA, 22 bp, synthetic construct
  misc_feature 1..22: note = chemically synthesized
  source 1..22: mol_type = other DNA
ggagcctttggcaggcccccat

SEQ ID NO: 45998 - DNA, 22 bp, synthetic construct
  misc_feature 1..22: note = chemically synthesized
  source 1..22: mol_type = other DNA
gagcctttggcaggcccccata

SEQ ID NO: 45999 - DNA, 22 bp, synthetic construct
  misc_feature 1..22: note = chemically synthesized
  source 1..22: mol_type = other DNA
tggcaggcccccataggtgaat

SEQ ID NO: 46000 - DNA, 22 bp, synthetic construct
  misc_feature 1..22: note = chemically synthesized
  source 1..22: mol_type = other DNA
ggcaggcccccataggtgaatc

SEQ ID NO: 46001 - DNA, 22 bp, synthetic construct
  misc_feature 1..22: note = chemically synthesized
  source 1..22: mol_type = other DNA
gcaggcccccataggtgaatca

SEQ ID NO: 46002 - DNA, 22 bp, synthetic construct
  misc_feature 1..22: note = chemically synthesized
  source 1..22: mol_type = other DNA
taggattttggagcaaggccct

SEQ ID NO: 46003 - DNA, 22 bp, synthetic construct
  misc_feature 1..22: note = chemically synthesized
  source 1..22: mol_type = other DNA
ggattttggagcaaggccctgc

SEQ ID NO: 46004 - DNA, 22 bp, synthetic construct
  misc_feature 1..22: note = chemically synthesized
  source 1..22: mol_type = other DNA
tggagcaaggccctgccacttc

SEQ ID NO: 46005 - DNA, 22 bp, synthetic construct
  misc_feature 1..22: note = chemically synthesized
  source 1..22: mol_type = other DNA
ggagcaaggccctgccacttct

SEQ ID NO: 46006 - DNA, 22 bp, synthetic construct
  misc_feature 1..22: note = chemically synthesized
  source 1..22: mol_type = other DNA
gagcaaggccctgccacttctg

SEQ ID NO: 46007 - DNA, 22 bp, synthetic construct
  misc_feature 1..22: note = chemically synthesized
  source 1..22: mol_type = other DNA
ccacttctgcagataactactc

SEQ ID NO: 46008 - DNA, 22 bp, synthetic construct
  misc_feature 1..22: note = chemically synthesized
  source 1..22: mol_type = other DNA
ctgcagataactactctccttt

SEQ ID NO: 46009 - DNA, 22 bp, synthetic construct
  misc_feature 1..22: note = chemically synthesized
  source 1..22: mol_type = other DNA
tgcagataactactctcctttt

SEQ ID NO: 46010 - DNA, 22 bp, synthetic construct
  misc_feature 1..22: note = chemically synthesized
  source 1..22: mol_type = other DNA
cagataactactctccttttga

SEQ ID NO: 46011 - DNA, 22 bp, synthetic construct
  misc_feature 1..22: note = chemically synthesized
  source 1..22: mol_type = other DNA
ctctccttttgagagacagcta

SEQ ID NO: 46012 - DNA, 22 bp, synthetic construct
  misc_feature 1..22: note = chemically synthesized
  source 1..22: mol_type = other DNA
tccttttgagagacagctattg

SEQ ID NO: 46013 - DNA, 22 bp, synthetic construct
  misc_feature 1..22: note = chemically synthesized
  source 1..22: mol_type = other DNA
cttttgagagacagctattggt

SEQ ID NO: 46014 - DNA, 22 bp, synthetic construct
  misc_feature 1..22: note = chemically synthesized
  source 1..22: mol_type = other DNA
ttgagagacagctattggtctg

SEQ ID NO: 46015 - DNA, 22 bp, synthetic construct
  misc_feature 1..22: note = chemically synthesized
  source 1..22: mol_type = other DNA
tgagagacagctattggtctgt

SEQ ID NO: 46016 - DNA, 22 bp, synthetic construct
  misc_feature 1..22: note = chemically synthesized
  source 1..22: mol_type = other DNA
gagagacagctattggtctgtt

SEQ ID NO: 46017 - DNA, 22 bp, synthetic construct
  misc_feature 1..22: note = chemically synthesized
  source 1..22: mol_type = other DNA
agagacagctattggtctgtta

SEQ ID NO: 46018 - DNA, 22 bp, synthetic construct
  misc_feature 1..22: note = chemically synthesized
  source 1..22: mol_type = other DNA
ttggtctgttattgggctttgg

SEQ ID NO: 46019 - DNA, 22 bp, synthetic construct
  misc_feature 1..22: note = chemically synthesized
  source 1..22: mol_type = other DNA
gtctgttattgggctttggtgg

SEQ ID NO: 46020 - DNA, 22 bp, synthetic construct
  misc_feature 1..22: note = chemically synthesized
  source 1..22: mol_type = other DNA
ttattgggctttggtggtaact

SEQ ID NO: 46021 - DNA, 22 bp, synthetic construct
  misc_feature 1..22: note = chemically synthesized
  source 1..22: mol_type = other DNA
ttgggctttggtggtaactgaa

SEQ ID NO: 46022 - DNA, 22 bp, synthetic construct
  misc_feature 1..22: note = chemically synthesized
  source 1..22: mol_type = other DNA
ggctttggtggtaactgaacgt

SEQ ID NO: 46023 - DNA, 22 bp, synthetic construct
  misc_feature 1..22: note = chemically synthesized
  source 1..22: mol_type = other DNA
tggtggtaactgaacgtttgac

SEQ ID NO: 46024 - DNA, 22 bp, synthetic construct
  misc_feature 1..22: note = chemically synthesized
  source 1..22: mol_type = other DNA
ggtggtaactgaacgtttgact

SEQ ID NO: 46025 - DNA, 22 bp, synthetic construct
  misc_feature 1..22: note = chemically synthesized
  source 1..22: mol_type = other DNA
gtggtaactgaacgtttgactg

SEQ ID NO: 46026 - DNA, 22 bp, synthetic construct
  misc_feature 1..22: note = chemically synthesized
  source 1..22: mol_type = other DNA
aacgtttgactgtgggtcataa

SEQ ID NO: 46027 - DNA, 22 bp, synthetic construct
  misc_feature 1..22: note = chemically synthesized
  source 1..22: mol_type = other DNA
gactgtgggtcataaagtcacc

SEQ ID NO: 46028 - DNA, 22 bp, synthetic construct
  misc_feature 1..22: note = chemically synthesized
  source 1..22: mol_type = other DNA
actgtgggtcataaagtcacca

SEQ ID NO: 46029 - DNA, 22 bp, synthetic construct
  misc_feature 1..22: note = chemically synthesized
  source 1..22: mol_type = other DNA
tgggtcataaagtcaccatgct

SEQ ID NO: 46030 - DNA, 22 bp, synthetic construct
  misc_feature 1..22: note = chemically synthesized
  source 1..22: mol_type = other DNA
cctgaacctgcctatcatgaac

SEQ ID NO: 46031 - DNA, 22 bp, synthetic construct
  misc_feature 1..22: note = chemically synthesized
  source 1..22: mol_type = other DNA
aacctgcctatcatgaactggt

SEQ ID NO: 46032 - DNA, 22 bp, synthetic construct
  misc_feature 1..22: note = chemically synthesized
  source 1..22: mol_type = other DNA
cctatcatgaactggttgcttt

SEQ ID NO: 46033 - DNA, 22 bp, synthetic construct
  misc_feature 1..22: note = chemically synthesized
  source 1..22: mol_type = other DNA
tcatgaactggttgctttctga

SEQ ID NO: 46034 - DNA, 22 bp, synthetic construct
  misc_feature 1..22: note = chemically synthesized
  source 1..22: mol_type = other DNA
gttgctttctgacccatctagc

SEQ ID NO: 46035 - DNA, 22 bp, synthetic construct
  misc_feature 1..22: note = chemically synthesized
  source 1..22: mol_type = other DNA
ctttctgacccatctagccatg

SEQ ID NO: 46036 - DNA, 22 bp, synthetic construct
  misc_feature 1..22: note = chemically synthesized
  source 1..22: mol_type = other DNA
tctgacccatctagccatgaag

SEQ ID NO: 46037 - DNA, 22 bp, synthetic construct
  misc_feature 1..22: note = chemically synthesized
  source 1..22: mol_type = other DNA
ctgacccatctagccatgaagt

SEQ ID NO: 46038 - DNA, 22 bp, synthetic construct
  misc_feature 1..22: note = chemically synthesized
  source 1..22: mol_type = other DNA
tgacccatctagccatgaagtg

SEQ ID NO: 46039 - DNA, 22 bp, synthetic construct
  misc_feature 1..22: note = chemically synthesized
  source 1..22: mol_type = other DNA
acccatctagccatgaagtggg

SEQ ID NO: 46040 - DNA, 22 bp, synthetic construct
  misc_feature 1..22: note = chemically synthesized
  source 1..22: mol_type = other DNA
gccatgaagtgggtcagcacag

SEQ ID NO: 46041 - DNA, 22 bp, synthetic construct
  misc_feature 1..22: note = chemically synthesized
  source 1..22: mol_type = other DNA
catcatcaaattgaagtggtgt

SEQ ID NO: 46042 - DNA, 22 bp, synthetic construct
  misc_feature 1..22: note = chemically synthesized
  source 1..22: mol_type = other DNA
atcatcaaattgaagtggtgtg

SEQ ID NO: 46043 - DNA, 22 bp, synthetic construct
  misc_feature 1..22: note = chemically synthesized
  source 1..22: mol_type = other DNA
aagtggtgtgtatgtgatcggg

SEQ ID NO: 46044 - DNA, 22 bp, synthetic construct
  misc_feature 1..22: note = chemically synthesized
  source 1..22: mol_type = other DNA
gagcaggtcctgaaggcacaag

SEQ ID NO: 46045 - DNA, 22 bp, synthetic construct
  misc_feature 1..22: note = chemically synthesized
  source 1..22: mol_type = other DNA
agcaggtcctgaaggcacaagt

SEQ ID NO: 46046 - DNA, 22 bp, synthetic construct
  misc_feature 1..22: note = chemically synthesized
  source 1..22: mol_type = other DNA
aaggcacaagtaagttacataa

SEQ ID NO: 46047 - DNA, 22 bp, synthetic construct
  misc_feature 1..22: note = chemically synthesized
  source 1..22: mol_type = other DNA
cataaggaagtggctcaaatgc

SEQ ID NO: 46048 - DNA, 22 bp, synthetic construct
  misc_feature 1..22: note = chemically synthesized
  source 1..22: mol_type = other DNA
aaatgcccatgttctccactca

SEQ ID NO: 46049 - DNA, 22 bp, synthetic construct
  misc_feature 1..22: note = chemically synthesized
  source 1..22: mol_type = other DNA
tccactcatgccaccctgcctt

SEQ ID NO: 46050 - DNA, 22 bp, synthetic construct
  misc_feature 1..22: note = chemically synthesized
  source 1..22: mol_type = other DNA
cactcatgccaccctgccttcc

SEQ ID NO: 46051 - DNA, 22 bp, synthetic construct
  misc_feature 1..22: note = chemically synthesized
  source 1..22: mol_type = other DNA
atgccaccctgccttccctccc

SEQ ID NO: 46052 - DNA, 22 bp, synthetic construct
  misc_feature 1..22: note = chemically synthesized
  source 1..22: mol_type = other DNA
ccttccctcccccagcctgcac

SEQ ID NO: 46053 - DNA, 22 bp, synthetic construct
  misc_feature 1..22: note = chemically synthesized
  source 1..22: mol_type = other DNA
ccctcccccagcctgcaccaat

SEQ ID NO: 46054 - DNA, 22 bp, synthetic construct
  misc_feature 1..22: note = chemically synthesized
  source 1..22: mol_type = other DNA
cctcccccagcctgcaccaatg

SEQ ID NO: 46055 - DNA, 22 bp, synthetic construct
  misc_feature 1..22: note = chemically synthesized
  source 1..22: mol_type = other DNA
ccccagcctgcaccaatggcct

SEQ ID NO: 46056 - DNA, 22 bp, synthetic construct
  misc_feature 1..22: note = chemically synthesized
  source 1..22: mol_type = other DNA
caccaatggcctcatggggagt

SEQ ID NO: 46057 - DNA, 22 bp, synthetic construct
  misc_feature 1..22: note = chemically synthesized
  source 1..22: mol_type = other DNA
atggggagttccctatgatcag

SEQ ID NO: 46058 - DNA, 22 bp, synthetic construct
  misc_feature 1..22: note = chemically synthesized
  source 1..22: mol_type = other DNA
cctatgatcagttgacagagga

SEQ ID NO: 46059 - DNA, 22 bp, synthetic construct
  misc_feature 1..22: note = chemically synthesized
  source 1..22: mol_type = other DNA
tgatcagttgacagaggaaggg

SEQ ID NO: 46060 - DNA, 22 bp, synthetic construct
  misc_feature 1..22: note = chemically synthesized
  source 1..22: mol_type = other DNA
acagaggaagggaagactaagg

SEQ ID NO: 46061 - DNA, 22 bp, synthetic construct
  misc_feature 1..22: note = chemically synthesized
  source 1..22: mol_type = other DNA
aggactggttcatagatggttc

SEQ ID NO: 46062 - DNA, 22 bp, synthetic construct
  misc_feature 1..22: note = chemically synthesized
  source 1..22: mol_type = other DNA
gttcatagatggttctgcacga

SEQ ID NO: 46063 - DNA, 22 bp, synthetic construct
  misc_feature 1..22: note = chemically synthesized
  source 1..22: mol_type = other DNA
atagatggttctgcacgatatg

SEQ ID NO: 46064 - DNA, 22 bp, synthetic construct
  misc_feature 1..22: note = chemically synthesized
  source 1..22: mol_type = other DNA
tgcacgatatgcaggcaccacc

SEQ ID NO: 46065 - DNA, 22 bp, synthetic construct
  misc_feature 1..22: note = chemically synthesized
  source 1..22: mol_type = other DNA
cacgatatgcaggcaccacccg

SEQ ID NO: 46066 - DNA, 22 bp, synthetic construct
  misc_feature 1..22: note = chemically synthesized
  source 1..22: mol_type = other DNA
cagcactatatccactttctaa

SEQ ID NO: 46067 - DNA, 22 bp, synthetic construct
  misc_feature 1..22: note = chemically synthesized
  source 1..22: mol_type = other DNA
tatccactttctaaatgcatgt

SEQ ID NO: 46068 - DNA, 22 bp, synthetic construct
  misc_feature 1..22: note = chemically synthesized
  source 1..22: mol_type = other DNA
tctaaatgcatgtgtacacttg

SEQ ID NO: 46069 - DNA, 22 bp, synthetic construct
  misc_feature 1..22: note = chemically synthesized
  source 1..22: mol_type = other DNA
ctaaatgcatgtgtacacttgt

SEQ ID NO: 46070 - DNA, 22 bp, synthetic construct
  misc_feature 1..22: note = chemically synthesized
  source 1..22: mol_type = other DNA
taaatgcatgtgtacacttgtg

SEQ ID NO: 46071 - DNA, 22 bp, synthetic construct
  misc_feature 1..22: note = chemically synthesized
  source 1..22: mol_type = other DNA
aatgcatgtgtacacttgtgct

SEQ ID NO: 46072 - DNA, 22 bp, synthetic construct
  misc_feature 1..22: note = chemically synthesized
  source 1..22: mol_type = other DNA
gtgctaagaaaatatctttatt

SEQ ID NO: 46073 - DNA, 22 bp, synthetic construct
  misc_feature 1..22: note = chemically synthesized
  source 1..22: mol_type = other DNA
tgctaagaaaatatctttattt

SEQ ID NO: 46074 - DNA, 22 bp, synthetic construct
  misc_feature 1..22: note = chemically synthesized
  source 1..22: mol_type = other DNA
agaaaatatctttattttattt

SEQ ID NO: 46075 - DNA, 22 bp, synthetic construct
  misc_feature 1..22: note = chemically synthesized
  source 1..22: mol_type = other DNA
tattttatttcctttatttttc

SEQ ID NO: 46076 - DNA, 22 bp, synthetic construct
  misc_feature 1..22: note = chemically synthesized
  source 1..22: mol_type = other DNA
attttatttcctttatttttcc

SEQ ID NO: 46077 - DNA, 22 bp, synthetic construct
  misc_feature 1..22: note = chemically synthesized
  source 1..22: mol_type = other DNA
ttttatttcctttatttttcct

SEQ ID NO: 46078 - DNA, 22 bp, synthetic construct
  misc_feature 1..22: note = chemically synthesized
  source 1..22: mol_type = other DNA
tatttcctttatttttccttta

SEQ ID NO: 46079 - DNA, 22 bp, synthetic construct
  misc_feature 1..22: note = chemically synthesized
  source 1..22: mol_type = other DNA
atttcctttatttttcctttat

SEQ ID NO: 46080 - DNA, 22 bp, synthetic construct
  misc_feature 1..22: note = chemically synthesized
  source 1..22: mol_type = other DNA
tttcctttatttttcctttatc

SEQ ID NO: 46081 - DNA, 22 bp, synthetic construct
  misc_feature 1..22: note = chemically synthesized
  source 1..22: mol_type = other DNA
cctttatttttcctttatcatg

SEQ ID NO: 46082 - DNA, 22 bp, synthetic construct
  misc_feature 1..22: note = chemically synthesized
  source 1..22: mol_type = other DNA
ctttatttttcctttatcatgt

SEQ ID NO: 46083 - DNA, 22 bp, synthetic construct
  misc_feature 1..22: note = chemically synthesized
  source 1..22: mol_type = other DNA
tatttttcctttatcatgtgac

SEQ ID NO: 46084 - DNA, 22 bp, synthetic construct
  misc_feature 1..22: note = chemically synthesized
  source 1..22: mol_type = other DNA
atttttcctttatcatgtgacc

SEQ ID NO: 46085 - DNA, 22 bp, synthetic construct
  misc_feature 1..22: note = chemically synthesized
  source 1..22: mol_type = other DNA
tttttcctttatcatgtgacct

SEQ ID NO: 46086 - DNA, 22 bp, synthetic construct
  misc_feature 1..22: note = chemically synthesized
  source 1..22: mol_type = other DNA
ttcctttatcatgtgaccttag

SEQ ID NO: 46087 - DNA, 22 bp, synthetic construct
  misc_feature 1..22: note = chemically synthesized
  source 1..22: mol_type = other DNA
tcctttatcatgtgaccttaga

SEQ ID NO: 46088 - DNA, 22 bp, synthetic construct
  misc_feature 1..22: note = chemically synthesized
  source 1..22: mol_type = other DNA
cctttatcatgtgaccttagat

SEQ ID NO: 46089 - DNA, 22 bp, synthetic construct
  misc_feature 1..22: note = chemically synthesized
  source 1..22: mol_type = other DNA
ctttatcatgtgaccttagatt

SEQ ID NO: 46090 - DNA, 22 bp, synthetic construct
  misc_feature 1..22: note = chemically synthesized
  source 1..22: mol_type = other DNA
tatcatgtgaccttagatttat

SEQ ID NO: 46091 - DNA, 22 bp, synthetic construct
  misc_feature 1..22: note = chemically synthesized
  source 1..22: mol_type = other DNA
atcatgtgaccttagatttatg

SEQ ID NO: 46092 - DNA, 22 bp, synthetic construct
  misc_feature 1..22: note = chemically synthesized
  source 1..22: mol_type = other DNA
tcatgtgaccttagatttatgg

SEQ ID NO: 46093 - DNA, 22 bp, synthetic construct
  misc_feature 1..22: note = chemically synthesized
  source 1..22: mol_type = other DNA
agatttatggacttcacatcag

SEQ ID NO: 46094 - DNA, 22 bp, synthetic construct
  misc_feature 1..22: note = chemically synthesized
  source 1..22: mol_type = other DNA
gatttatggacttcacatcagc

SEQ ID NO: 46095 - DNA, 22 bp, synthetic construct
  misc_feature 1..22: note = chemically synthesized
  source 1..22: mol_type = other DNA
atggacttcacatcagcattta

SEQ ID NO: 46096 - DNA, 22 bp, synthetic construct
  misc_feature 1..22: note = chemically synthesized
  source 1..22: mol_type = other DNA
tggacttcacatcagcatttaa

SEQ ID NO: 46097 - DNA, 22 bp, synthetic construct
  misc_feature 1..22: note = chemically synthesized
  source 1..22: mol_type = other DNA
cacatcagcatttaagcattta

SEQ ID NO: 46098 - DNA, 22 bp, synthetic construct
  misc_feature 1..22: note = chemically synthesized
  source 1..22: mol_type = other DNA
acatcagcatttaagcatttaa

SEQ ID NO: 46099 - DNA, 22 bp, synthetic construct
  misc_feature 1..22: note = chemically synthesized
  source 1..22: mol_type = other DNA
aagcatttaagtgttgttcata

SEQ ID NO: 46100 - DNA, 22 bp, synthetic construct
  misc_feature 1..22: note = chemically synthesized
  source 1..22: mol_type = other DNA
agcatttaagtgttgttcatat

SEQ ID NO: 46101 - DNA, 22 bp, synthetic construct
  misc_feature 1..22: note = chemically synthesized
  source 1..22: mol_type = other DNA
aagtgttgttcatatcagcatt

SEQ ID NO: 46102 - DNA, 22 bp, synthetic construct
  misc_feature 1..22: note = chemically synthesized
  source 1..22: mol_type = other DNA
agtgttgttcatatcagcattt

SEQ ID NO: 46103 - DNA, 22 bp, synthetic construct
  misc_feature 1..22: note = chemically synthesized
  source 1..22: mol_type = other DNA
ttcatatcagcatttaaatatt

SEQ ID NO: 46104 - DNA, 22 bp, synthetic construct
  misc_feature 1..22: note = chemically synthesized
  source 1..22: mol_type = other DNA
atatcagcatttaaatattgtt

SEQ ID NO: 46105 - DNA, 22 bp, synthetic construct
  misc_feature 1..22: note = chemically synthesized
  source 1..22: mol_type = other DNA
aaatattgttaaccttatgtaa

SEQ ID NO: 46106 - DNA, 22 bp, synthetic construct
  misc_feature 1..22: note = chemically synthesized
  source 1..22: mol_type = other DNA
aatattgttaaccttatgtaat

SEQ ID NO: 46107 - DNA, 22 bp, synthetic construct
  misc_feature 1..22: note = chemically synthesized
  source 1..22: mol_type = other DNA
ttaaccttatgtaataactttt

SEQ ID NO: 46108 - DNA, 22 bp, synthetic construct
  misc_feature 1..22: note = chemically synthesized
  source 1..22: mol_type = other DNA
accttatgtaataacttttggt

SEQ ID NO: 46109 - DNA, 22 bp, synthetic construct
  misc_feature 1..22: note = chemically synthesized
  source 1..22: mol_type = other DNA
atgtaataacttttggtttggg

SEQ ID NO: 46110 - DNA, 22 bp, synthetic construct
  misc_feature 1..22: note = chemically synthesized
  source 1..22: mol_type = other DNA
tgtaataacttttggtttgggg

SEQ ID NO: 46111 - DNA, 22 bp, synthetic construct
  misc_feature 1..22: note = chemically synthesized
  source 1..22: mol_type = other DNA
ttggtttggggattggtgcgtt

SEQ ID NO: 46112 - DNA, 22 bp, synthetic construct
  misc_feature 1..22: note = chemically synthesized
  source 1..22: mol_type = other DNA
tggtttggggattggtgcgttt

SEQ ID NO: 46113 - DNA, 22 bp, synthetic construct
  misc_feature 1..22: note = chemically synthesized
  source 1..22: mol_type = other DNA
ggtttggggattggtgcgtttc

SEQ ID NO: 46114 - DNA, 22 bp, synthetic construct
  misc_feature 1..22: note = chemically synthesized
  source 1..22: mol_type = other DNA
gtttggggattggtgcgtttct

SEQ ID NO: 46115 - DNA, 22 bp, synthetic construct
  misc_feature 1..22: note = chemically synthesized
  source 1..22: mol_type = other DNA
ggggattggtgcgtttctggtt

SEQ ID NO: 46116 - DNA, 22 bp, synthetic construct
  misc_feature 1..22: note = chemically synthesized
  source 1..22: mol_type = other DNA
gggattggtgcgtttctggttg

SEQ ID NO: 46117 - DNA, 22 bp, synthetic construct
  misc_feature 1..22: note = chemically synthesized
  source 1..22: mol_type = other DNA
gtgcgtttctggttgtatgagg

SEQ ID NO: 46118 - DNA, 22 bp, synthetic construct
  misc_feature 1..22: note = chemically synthesized
  source 1..22: mol_type = other DNA
ctggttgtatgaggatagttgt

SEQ ID NO: 46119 - DNA, 22 bp, synthetic construct
  misc_feature 1..22: note = chemically synthesized
  source 1..22: mol_type = other DNA
tggttgtatgaggatagttgta

SEQ ID NO: 46120 - DNA, 22 bp, synthetic construct
  misc_feature 1..22: note = chemically synthesized
  source 1..22: mol_type = other DNA
gttgtatgaggatagttgtatt

SEQ ID NO: 46121 - DNA, 22 bp, synthetic construct
  misc_feature 1..22: note = chemically synthesized
  source 1..22: mol_type = other DNA
tatgaggatagttgtattatat

SEQ ID NO: 46122 - DNA, 22 bp, synthetic construct
  misc_feature 1..22: note = chemically synthesized
  source 1..22: mol_type = other DNA
tattatattaggcataattatg

SEQ ID NO: 46123 - DNA, 22 bp, synthetic construct
  misc_feature 1..22: note = chemically synthesized
  source 1..22: mol_type = other DNA
tattaggcataattatgacctt

SEQ ID NO: 46124 - DNA, 22 bp, synthetic construct
  misc_feature 1..22: note = chemically synthesized
  source 1..22: mol_type = other DNA
ggcataattatgaccttattat

SEQ ID NO: 46125 - DNA, 22 bp, synthetic construct
  misc_feature 1..22: note = chemically synthesized
  source 1..22: mol_type = other DNA
tgaccttattattgtctttatt

SEQ ID NO: 46126 - DNA, 22 bp, synthetic construct
  misc_feature 1..22: note = chemically synthesized
  source 1..22: mol_type = other DNA
attattgtctttatttgaagat

SEQ ID NO: 46127 - DNA, 22 bp, synthetic construct
  misc_feature 1..22: note = chemically synthesized
  source 1..22: mol_type = other DNA
ttattgtctttatttgaagatt

SEQ ID NO: 46128 - DNA, 22 bp, synthetic construct
  misc_feature 1..22: note = chemically synthesized
  source 1..22: mol_type = other DNA
ttgtctttatttgaagattatg

SEQ ID NO: 46129 - DNA, 22 bp, synthetic construct
  misc_feature 1..22: note = chemically synthesized
  source 1..22: mol_type = other DNA
tctttatttgaagattatgtat

SEQ ID NO: 46130 - DNA, 22 bp, synthetic construct
  misc_feature 1..22: note = chemically synthesized
  source 1..22: mol_type = other DNA
tatttgaagattatgtatgatt

SEQ ID NO: 46131 - DNA, 22 bp, synthetic construct
  misc_feature 1..22: note = chemically synthesized
  source 1..22: mol_type = other DNA
atttgaagattatgtatgattt

SEQ ID NO: 46132 - DNA, 22 bp, synthetic construct
  misc_feature 1..22: note = chemically synthesized
  source 1..22: mol_type = other DNA
tttgaagattatgtatgatttc

SEQ ID NO: 46133 - DNA, 22 bp, synthetic construct
  misc_feature 1..22: note = chemically synthesized
  source 1..22: mol_type = other DNA
gaagattatgtatgatttcagg

SEQ ID NO: 46134 - DNA, 22 bp, synthetic construct
  misc_feature 1..22: note = chemically synthesized
  source 1..22: mol_type = other DNA
aagattatgtatgatttcagga

SEQ ID NO: 46135 - DNA, 22 bp, synthetic construct
  misc_feature 1..22: note = chemically synthesized
  source 1..22: mol_type = other DNA
tgtatgatttcaggatgtgtgt

SEQ ID NO: 46136 - DNA, 22 bp, synthetic construct
  misc_feature 1..22: note = chemically synthesized
  source 1..22: mol_type = other DNA
caggatgtgtgtatgggttcaa

SEQ ID NO: 46137 - DNA, 22 bp, synthetic construct
  misc_feature 1..22: note = chemically synthesized
  source 1..22: mol_type = other DNA
aggatgtgtgtatgggttcaag

SEQ ID NO: 46138 - DNA, 22 bp, synthetic construct
  misc_feature 1..22: note = chemically synthesized
  source 1..22: mol_type = other DNA
aagttgacaaggagttggactt

SEQ ID NO: 46139 - DNA, 22 bp, synthetic construct
  misc_feature 1..22: note = chemically synthesized
  source 1..22: mol_type = other DNA
acaaggagttggacttgtgatg

SEQ ID NO: 46140 - DNA, 22 bp, synthetic construct
  misc_feature 1..22: note = chemically synthesized
  source 1..22: mol_type = other DNA
gacttgtgatggttaatactgt

SEQ ID NO: 46141 - DNA, 22 bp, synthetic construct
  misc_feature 1..22: note = chemically synthesized
  source 1..22: mol_type = other DNA
gtgatggttaatactgtcaact

SEQ ID NO: 46142 - DNA, 22 bp, synthetic construct
  misc_feature 1..22: note = chemically synthesized
  source 1..22: mol_type = other DNA
tgatggttaatactgtcaactt

SEQ ID NO: 46143 - DNA, 22 bp, synthetic construct
  misc_feature 1..22: note = chemically synthesized
  source 1..22: mol_type = other DNA
atactgtcaacttgattggatt

SEQ ID NO: 46144 - DNA, 22 bp, synthetic construct
  misc_feature 1..22: note = chemically synthesized
  source 1..22: mol_type = other DNA
tcaacttgattggattgaaaga

SEQ ID NO: 46145 - DNA, 22 bp, synthetic construct
  misc_feature 1..22: note = chemically synthesized
  source 1..22: mol_type = other DNA
gattggattgaaagatgcaaag

SEQ ID NO: 46146 - DNA, 22 bp, synthetic construct
  misc_feature 1..22: note = chemically synthesized
  source 1..22: mol_type = other DNA
attggattgaaagatgcaaagt

SEQ ID NO: 46147 - DNA, 22 bp, synthetic construct
  misc_feature 1..22: note = chemically synthesized
  source 1..22: mol_type = other DNA
gattgaaagatgcaaagtatta

SEQ ID NO: 46148 - DNA, 22 bp, synthetic construct
  misc_feature 1..22: note = chemically synthesized
  source 1..22: mol_type = other DNA
aaagatgcaaagtattaatctc

SEQ ID NO: 46149 - DNA, 22 bp, synthetic construct
  misc_feature 1..22: note = chemically synthesized
  source 1..22: mol_type = other DNA
atctcggttatgtctgtgaggg

SEQ ID NO: 46150 - DNA, 22 bp, synthetic construct
  misc_feature 1..22: note = chemically synthesized
  source 1..22: mol_type = other DNA
ggttatgtctgtgagggtgtgg

SEQ ID NO: 46151 - DNA, 22 bp, synthetic construct
  misc_feature 1..22: note = chemically synthesized
  source 1..22: mol_type = other DNA
tgtctgtgagggtgtggcaaaa

SEQ ID NO: 46152 - DNA, 22 bp, synthetic construct
  misc_feature 1..22: note = chemically synthesized
  source 1..22: mol_type = other DNA
tgagggtgtggcaaaaggagat

SEQ ID NO: 46153 - DNA, 22 bp, synthetic construct
  misc_feature 1..22: note = chemically synthesized
  source 1..22: mol_type = other DNA
acatttgagtcagtgggctggg

SEQ ID NO: 46154 - DNA, 20 bp, synthetic construct
  misc_feature 1..20: note = chemically synthesized
  source 1..20: mol_type = other DNA
taacgaccccggtaggtgag

SEQ ID NO: 46155 - DNA, 20 bp, synthetic construct
  misc_feature 1..20: note = chemically synthesized
  source 1..20: mol_type = other DNA
accccggtaggtgagaggcc

SEQ ID NO: 46156 - DNA, 20 bp, synthetic construct
  misc_feature 1..20: note = chemically synthesized
  source 1..20: mol_type = other DNA
ccccggtaggtgagaggcca

SEQ ID NO: 46157 - DNA, 20 bp, synthetic construct
  misc_feature 1..20: note = chemically synthesized
  source 1..20: mol_type = other DNA
ggtgagaggccaaggtccca

SEQ ID NO: 46158 - DNA, 20 bp, synthetic construct
  misc_feature 1..20: note = chemically synthesized
  source 1..20: mol_type = other DNA
gtgagaggccaaggtcccaa

SEQ ID NO: 46159 - DNA, 20 bp, synthetic construct
  misc_feature 1..20: note = chemically synthesized
  source 1..20: mol_type = other DNA
tgagaggccaaggtcccaaa

SEQ ID NO: 46160 - DNA, 20 bp, synthetic construct
  misc_feature 1..20: note = chemically synthesized
  source 1..20: mol_type = other DNA
gagaggccaaggtcccaaag

SEQ ID NO: 46161 - DNA, 20 bp, synthetic construct
  misc_feature 1..20: note = chemically synthesized
  source 1..20: mol_type = other DNA
gaggccaaggtcccaaaggg

SEQ ID NO: 46162 - DNA, 20 bp, synthetic construct
  misc_feature 1..20: note = chemically synthesized
  source 1..20: mol_type = other DNA
gccaaggtcccaaaggggag

SEQ ID NO: 46163 - DNA, 20 bp, synthetic construct
  misc_feature 1..20: note = chemically synthesized
  source 1..20: mol_type = other DNA
aaggtcccaaaggggagcag

SEQ ID NO: 46164 - DNA, 20 bp, synthetic construct
  misc_feature 1..20: note = chemically synthesized
  source 1..20: mol_type = other DNA
aggtcccaaaggggagcagc

SEQ ID NO: 46165 - DNA, 20 bp, synthetic construct
  misc_feature 1..20: note = chemically synthesized
  source 1..20: mol_type = other DNA
ggtcccaaaggggagcagca

SEQ ID NO: 46166 - DNA, 20 bp, synthetic construct
  misc_feature 1..20: note = chemically synthesized
  source 1..20: mol_type = other DNA
ccaaaggggagcagcaggga

SEQ ID NO: 46167 - DNA, 20 bp, synthetic construct
  misc_feature 1..20: note = chemically synthesized
  source 1..20: mol_type = other DNA
aggggagcagcagggaaagt

SEQ ID NO: 46168 - DNA, 20 bp, synthetic construct
  misc_feature 1..20: note = chemically synthesized
  source 1..20: mol_type = other DNA
gctcccatctattcttgctc

SEQ ID NO: 46169 - DNA, 20 bp, synthetic construct
  misc_feature 1..20: note = chemically synthesized
  source 1..20: mol_type = other DNA
ctcccatctattcttgctcc

SEQ ID NO: 46170 - DNA, 20 bp, synthetic construct
  misc_feature 1..20: note = chemically synthesized
  source 1..20: mol_type = other DNA
tcccatctattcttgctcca

SEQ ID NO: 46171 - DNA, 20 bp, synthetic construct
  misc_feature 1..20: note = chemically synthesized
  source 1..20: mol_type = other DNA
cccatctattcttgctccag

SEQ ID NO: 46172 - DNA, 20 bp, synthetic construct
  misc_feature 1..20: note = chemically synthesized
  source 1..20: mol_type = other DNA
catctattcttgctccaggg

SEQ ID NO: 46173 - DNA, 20 bp, synthetic construct
  misc_feature 1..20: note = chemically synthesized
  source 1..20: mol_type = other DNA
atctattcttgctccagggg

SEQ ID NO: 46174 - DNA, 20 bp, synthetic construct
  misc_feature 1..20: note = chemically synthesized
  source 1..20: mol_type = other DNA
ctccaggggaggcctttgat

SEQ ID NO: 46175 - DNA, 20 bp, synthetic construct
  misc_feature 1..20: note = chemically synthesized
  source 1..20: mol_type = other DNA
tccaggggaggcctttgatg

SEQ ID NO: 46176 - DNA, 20 bp, synthetic construct
  misc_feature 1..20: note = chemically synthesized
  source 1..20: mol_type = other DNA
aggggaggcctttgatgagg

SEQ ID NO: 46177 - DNA, 20 bp, synthetic construct
  misc_feature 1..20: note = chemically synthesized
  source 1..20: mol_type = other DNA
tttgatgaggaagctgccaa

SEQ ID NO: 46178 - DNA, 20 bp, synthetic construct
  misc_feature 1..20: note = chemically synthesized
  source 1..20: mol_type = other DNA
tgcaaatacaattccaatta

SEQ ID NO: 46179 - DNA, 20 bp, synthetic construct
  misc_feature 1..20: note = chemically synthesized
  source 1..20: mol_type = other DNA
gcaaatacaattccaattac

SEQ ID NO: 46180 - DNA, 20 bp, synthetic construct
  misc_feature 1..20: note = chemically synthesized
  source 1..20: mol_type = other DNA
acaattccaattacaggcaa

SEQ ID NO: 46181 - DNA, 20 bp, synthetic construct
  misc_feature 1..20: note = chemically synthesized
  source 1..20: mol_type = other DNA
caattccaattacaggcaac

SEQ ID NO: 46182 - DNA, 20 bp, synthetic construct
  misc_feature 1..20: note = chemically synthesized
  source 1..20: mol_type = other DNA
ttccaattacaggcaacagg

SEQ ID NO: 46183 - DNA, 20 bp, synthetic construct
  misc_feature 1..20: note = chemically synthesized
  source 1..20: mol_type = other DNA
tccaattacaggcaacagga

SEQ ID NO: 46184 - DNA, 20 bp, synthetic construct
  misc_feature 1..20: note = chemically synthesized
  source 1..20: mol_type = other DNA
caattacaggcaacaggaag

SEQ ID NO: 46185 - DNA, 20 bp, synthetic construct
  misc_feature 1..20: note = chemically synthesized
  source 1..20: mol_type = other DNA
accacctctgccacctctgt

SEQ ID NO: 46186 - DNA, 20 bp, synthetic construct
  misc_feature 1..20: note = chemically synthesized
  source 1..20: mol_type = other DNA
cacctctgtcagcaaaccat

SEQ ID NO: 46187 - DNA, 20 bp, synthetic construct
  misc_feature 1..20: note = chemically synthesized
  source 1..20: mol_type = other DNA
gctcctactctgtgctgcga

SEQ ID NO: 46188 - DNA, 20 bp, synthetic construct
  misc_feature 1..20: note = chemically synthesized
  source 1..20: mol_type = other DNA
cctactctgtgctgcgatgg

SEQ ID NO: 46189 - DNA, 20 bp, synthetic construct
  misc_feature 1..20: note = chemically synthesized
  source 1..20: mol_type = other DNA
ctactctgtgctgcgatggc

SEQ ID NO: 46190 - DNA, 20 bp, synthetic construct
  misc_feature 1..20: note = chemically synthesized
  source 1..20: mol_type = other DNA
tgctgcgatggcgggctcga

SEQ ID NO: 46191 - DNA, 20 bp, synthetic construct
  misc_feature 1..20: note = chemically synthesized
  source 1..20: mol_type = other DNA
gctgcgatggcgggctcgat

SEQ ID NO: 46192 - DNA, 20 bp, synthetic construct
  misc_feature 1..20: note = chemically synthesized
  source 1..20: mol_type = other DNA
ctgcgatggcgggctcgatg

SEQ ID NO: 46193 - DNA, 20 bp, synthetic construct
  misc_feature 1..20: note = chemically synthesized
  source 1..20: mol_type = other DNA
ataactctgaccttacctca

SEQ ID NO: 46194 - DNA, 20 bp, synthetic construct
  misc_feature 1..20: note = chemically synthesized
  source 1..20: mol_type = other DNA
aactctgaccttacctcatg

SEQ ID NO: 46195 - DNA, 20 bp, synthetic construct
  misc_feature 1..20: note = chemically synthesized
  source 1..20: mol_type = other DNA
tggagtcactgtcaacccac

SEQ ID NO: 46196 - DNA, 20 bp, synthetic construct
  misc_feature 1..20: note = chemically synthesized
  source 1..20: mol_type = other DNA
gttgcactgtctttgtgcac

SEQ ID NO: 46197 - DNA, 20 bp, synthetic construct
  misc_feature 1..20: note = chemically synthesized
  source 1..20: mol_type = other DNA
gtctttgtgcactggctctc

SEQ ID NO: 46198 - DNA, 20 bp, synthetic construct
  misc_feature 1..20: note = chemically synthesized
  source 1..20: mol_type = other DNA
ctttgtgcactggctctctg

SEQ ID NO: 46199 - DNA, 20 bp, synthetic construct
  misc_feature 1..20: note = chemically synthesized
  source 1..20: mol_type = other DNA
gtgcactggctctctggagt

SEQ ID NO: 46200 - DNA, 20 bp, synthetic construct
  misc_feature 1..20: note = chemically synthesized
  source 1..20: mol_type = other DNA
tgcactggctctctggagtg

SEQ ID NO: 46201 - DNA, 20 bp, synthetic construct
  misc_feature 1..20: note = chemically synthesized
  source 1..20: mol_type = other DNA
gagtgaggtctttgcaaaca

SEQ ID NO: 46202 - DNA, 20 bp, synthetic construct
  misc_feature 1..20: note = chemically synthesized
  source 1..20: mol_type = other DNA
tgaggtctttgcaaacaaag

SEQ ID NO: 46203 - DNA, 20 bp, synthetic construct
  misc_feature 1..20: note = chemically synthesized
  source 1..20: mol_type = other DNA
gtctttgcaaacaaagtgga

SEQ ID NO: 46204 - DNA, 20 bp, synthetic construct
  misc_feature 1..20: note = chemically synthesized
  source 1..20: mol_type = other DNA
ctttgcaaacaaagtggaaa

SEQ ID NO: 46205 - DNA, 20 bp, synthetic construct
  misc_feature 1..20: note = chemically synthesized
  source 1..20: mol_type = other DNA
agtggaaagagcatcaactt

SEQ ID NO: 46206 - DNA, 20 bp, synthetic construct
  misc_feature 1..20: note = chemically synthesized
  source 1..20: mol_type = other DNA
agagcatcaactttggactc

SEQ ID NO: 46207 - DNA, 20 bp, synthetic construct
  misc_feature 1..20: note = chemically synthesized
  source 1..20: mol_type = other DNA
caactttggactccagcacc

SEQ ID NO: 46208 - DNA, 20 bp, synthetic construct
  misc_feature 1..20: note = chemically synthesized
  source 1..20: mol_type = other DNA
tggactccagcacctagatt

SEQ ID NO: 46209 - DNA, 20 bp, synthetic construct
  misc_feature 1..20: note = chemically synthesized
  source 1..20: mol_type = other DNA
gactccagcacctagattca

SEQ ID NO: 46210 - DNA, 20 bp, synthetic construct
  misc_feature 1..20: note = chemically synthesized
  source 1..20: mol_type = other DNA
tccagcacctagattcagag

SEQ ID NO: 46211 - DNA, 20 bp, synthetic construct
  misc_feature 1..20: note = chemically synthesized
  source 1..20: mol_type = other DNA
ccagcacctagattcagagc

SEQ ID NO: 46212 - DNA, 20 bp, synthetic construct
  misc_feature 1..20: note = chemically synthesized
  source 1..20: mol_type = other DNA
tcagagcaggccatttcact

SEQ ID NO: 46213 - DNA, 20 bp, synthetic construct
  misc_feature 1..20: note = chemically synthesized
  source 1..20: mol_type = other DNA
ggaatctgctgtgcatctgc

SEQ ID NO: 46214 - DNA, 20 bp, synthetic construct
  misc_feature 1..20: note = chemically synthesized
  source 1..20: mol_type = other DNA
gaatctgctgtgcatctgca

SEQ ID NO: 46215 - DNA, 20 bp, synthetic construct
  misc_feature 1..20: note = chemically synthesized
  source 1..20: mol_type = other DNA
aatctgctgtgcatctgcaa

SEQ ID NO: 46216 - DNA, 20 bp, synthetic construct
  misc_feature 1..20: note = chemically synthesized
  source 1..20: mol_type = other DNA
tctgctgtgcatctgcaagg

SEQ ID NO: 46217 - DNA, 20 bp, synthetic construct
  misc_feature 1..20: note = chemically synthesized
  source 1..20: mol_type = other DNA
ctgctgtgcatctgcaaggg

SEQ ID NO: 46218 - DNA, 20 bp, synthetic construct
  misc_feature 1..20: note = chemically synthesized
  source 1..20: mol_type = other DNA
aattcgcctttgtttcttcc

SEQ ID NO: 46219 - DNA, 20 bp, synthetic construct
  misc_feature 1..20: note = chemically synthesized
  source 1..20: mol_type = other DNA
ttgtttcttcccagtatcga

SEQ ID NO: 46220 - DNA, 20 bp, synthetic construct
  misc_feature 1..20: note = chemically synthesized
  source 1..20: mol_type = other DNA
cccagtatcgacagcccttc

SEQ ID NO: 46221 - DNA, 20 bp, synthetic construct
  misc_feature 1..20: note = chemically synthesized
  source 1..20: mol_type = other DNA
gtatcgacagcccttccaga

SEQ ID NO: 46222 - DNA, 20 bp, synthetic construct
  misc_feature 1..20: note = chemically synthesized
  source 1..20: mol_type = other DNA
atcgacagcccttccagaaa

SEQ ID NO: 46223 - DNA, 20 bp, synthetic construct
  misc_feature 1..20: note = chemically synthesized
  source 1..20: mol_type = other DNA
acagcccttccagaaagagc

SEQ ID NO: 46224 - DNA, 20 bp, synthetic construct
  misc_feature 1..20: note = chemically synthesized
  source 1..20: mol_type = other DNA
tcatgccacatgtacaatct

SEQ ID NO: 46225 - DNA, 20 bp, synthetic construct
  misc_feature 1..20: note = chemically synthesized
  source 1..20: mol_type = other DNA
catgccacatgtacaatctg

SEQ ID NO: 46226 - DNA, 20 bp, synthetic construct
  misc_feature 1..20: note = chemically synthesized
  source 1..20: mol_type = other DNA
ccacatgtacaatctgaggc

SEQ ID NO: 46227 - DNA, 20 bp, synthetic construct
  misc_feature 1..20: note = chemically synthesized
  source 1..20: mol_type = other DNA
cacatgtacaatctgaggcc

SEQ ID NO: 46228 - DNA, 20 bp, synthetic construct
  misc_feature 1..20: note = chemically synthesized
  source 1..20: mol_type = other DNA
catgtacaatctgaggccag

SEQ ID NO: 46229 - DNA, 20 bp, synthetic construct
  misc_feature 1..20: note = chemically synthesized
  source 1..20: mol_type = other DNA
ccccttttcatcctcctgcc

SEQ ID NO: 46230 - DNA, 20 bp, synthetic construct
  misc_feature 1..20: note = chemically synthesized
  source 1..20: mol_type = other DNA
tcctcctgcctggtacacaa

SEQ ID NO: 46231 - DNA, 20 bp, synthetic construct
  misc_feature 1..20: note = chemically synthesized
  source 1..20: mol_type = other DNA
cctcctgcctggtacacaat

SEQ ID NO: 46232 - DNA, 20 bp, synthetic construct
  misc_feature 1..20: note = chemically synthesized
  source 1..20: mol_type = other DNA
ggtacacaataggtgtttac

SEQ ID NO: 46233 - DNA, 20 bp, synthetic construct
  misc_feature 1..20: note = chemically synthesized
  source 1..20: mol_type = other DNA
gtgtttactggatgcttgtc

SEQ ID NO: 46234 - DNA, 20 bp, synthetic construct
  misc_feature 1..20: note = chemically synthesized
  source 1..20: mol_type = other DNA
tccagttgatttcttgaaca

SEQ ID NO: 46235 - DNA, 20 bp, synthetic construct
  misc_feature 1..20: note = chemically synthesized
  source 1..20: mol_type = other DNA
ttcttgaacatggtgtgtaa

SEQ ID NO: 46236 - DNA, 20 bp, synthetic construct
  misc_feature 1..20: note = chemically synthesized
  source 1..20: mol_type = other DNA
tcttgaacatggtgtgtaaa

SEQ ID NO: 46237 - DNA, 20 bp, synthetic construct
  misc_feature 1..20: note = chemically synthesized
  source 1..20: mol_type = other DNA
tctttgcaaattgaatcttc

SEQ ID NO: 46238 - DNA, 20 bp, synthetic construct
  misc_feature 1..20: note = chemically synthesized
  source 1..20: mol_type = other DNA
tgcaaattgaatcttctgga

SEQ ID NO: 46239 - DNA, 20 bp, synthetic construct
  misc_feature 1..20: note = chemically synthesized
  source 1..20: mol_type = other DNA
attgaatcttctggaaagct

SEQ ID NO: 46240 - DNA, 20 bp, synthetic construct
  misc_feature 1..20: note = chemically synthesized
  source 1..20: mol_type = other DNA
agctgagcttgtgcctacca

SEQ ID NO: 46241 - DNA, 20 bp, synthetic construct
  misc_feature 1..20: note = chemically synthesized
  source 1..20: mol_type = other DNA
acttaaaacctgaatctttg

SEQ ID NO: 46242 - DNA, 20 bp, synthetic construct
  misc_feature 1..20: note = chemically synthesized
  source 1..20: mol_type = other DNA
taaatcccttgaaatgcatg

SEQ ID NO: 46243 - DNA, 20 bp, synthetic construct
  misc_feature 1..20: note = chemically synthesized
  source 1..20: mol_type = other DNA
aaatcccttgaaatgcatgt

SEQ ID NO: 46244 - DNA, 20 bp, synthetic construct
  misc_feature 1..20: note = chemically synthesized
  source 1..20: mol_type = other DNA
cccttgaaatgcatgtaggc

SEQ ID NO: 46245 - DNA, 20 bp, synthetic construct
  misc_feature 1..20: note = chemically synthesized
  source 1..20: mol_type = other DNA
gcatgtaggctggacatcaa

SEQ ID NO: 46246 - DNA, 20 bp, synthetic construct
  misc_feature 1..20: note = chemically synthesized
  source 1..20: mol_type = other DNA
gtaggctggacatcaaaagc

SEQ ID NO: 46247 - DNA, 20 bp, synthetic construct
  misc_feature 1..20: note = chemically synthesized
  source 1..20: mol_type = other DNA
caaaagcaagcaatctcttc

SEQ ID NO: 46248 - DNA, 20 bp, synthetic construct
  misc_feature 1..20: note = chemically synthesized
  source 1..20: mol_type = other DNA
aaaagcaagcaatctcttca

SEQ ID NO: 46249 - DNA, 20 bp, synthetic construct
  misc_feature 1..20: note = chemically synthesized
  source 1..20: mol_type = other DNA
aagcaagcaatctcttcaag

SEQ ID NO: 46250 - DNA, 20 bp, synthetic construct
  misc_feature 1..20: note = chemically synthesized
  source 1..20: mol_type = other DNA
caagcaatctcttcaaggag

SEQ ID NO: 46251 - DNA, 20 bp, synthetic construct
  misc_feature 1..20: note = chemically synthesized
  source 1..20: mol_type = other DNA
caatctcttcaaggagcagc

SEQ ID NO: 46252 - DNA, 20 bp, synthetic construct
  misc_feature 1..20: note = chemically synthesized
  source 1..20: mol_type = other DNA
ctcttcaaggagcagctagt

SEQ ID NO: 46253 - DNA, 20 bp, synthetic construct
  misc_feature 1..20: note = chemically synthesized
  source 1..20: mol_type = other DNA
tcaaggagcagctagttggt

SEQ ID NO: 46254 - DNA, 20 bp, synthetic construct
  misc_feature 1..20: note = chemically synthesized
  source 1..20: mol_type = other DNA
caaggagcagctagttggta

SEQ ID NO: 46255 - DNA, 20 bp, synthetic construct
  misc_feature 1..20: note = chemically synthesized
  source 1..20: mol_type = other DNA
gagcagctagttggtaaggt

SEQ ID NO: 46256 - DNA, 20 bp, synthetic construct
  misc_feature 1..20: note = chemically synthesized
  source 1..20: mol_type = other DNA
tagttggtaaggtcagtgtg

SEQ ID NO: 46257 - DNA, 20 bp, synthetic construct
  misc_feature 1..20: note = chemically synthesized
  source 1..20: mol_type = other DNA
agttggtaaggtcagtgtgc

SEQ ID NO: 46258 - DNA, 20 bp, synthetic construct
  misc_feature 1..20: note = chemically synthesized
  source 1..20: mol_type = other DNA
gttggtaaggtcagtgtgca

SEQ ID NO: 46259 - DNA, 20 bp, synthetic construct
  misc_feature 1..20: note = chemically synthesized
  source 1..20: mol_type = other DNA
gtcagtgtgcagggtgcata

SEQ ID NO: 46260 - DNA, 20 bp, synthetic construct
  misc_feature 1..20: note = chemically synthesized
  source 1..20: mol_type = other DNA
tcagtgtgcagggtgcataa

SEQ ID NO: 46261 - DNA, 20 bp, synthetic construct
  misc_feature 1..20: note = chemically synthesized
  source 1..20: mol_type = other DNA
cagtgtgcagggtgcataaa

SEQ ID NO: 46262 - DNA, 20 bp, synthetic construct
  misc_feature 1..20: note = chemically synthesized
  source 1..20: mol_type = other DNA
tgtgcagggtgcataaaggg

SEQ ID NO: 46263 - DNA, 20 bp, synthetic construct
  misc_feature 1..20: note = chemically synthesized
  source 1..20: mol_type = other DNA
tgcagggtgcataaagggca

SEQ ID NO: 46264 - DNA, 20 bp, synthetic construct
  misc_feature 1..20: note = chemically synthesized
  source 1..20: mol_type = other DNA
gcagggtgcataaagggcag

SEQ ID NO: 46265 - DNA, 20 bp, synthetic construct
  misc_feature 1..20: note = chemically synthesized
  source 1..20: mol_type = other DNA
ggtgcataaagggcagaggc

SEQ ID NO: 46266 - DNA, 20 bp, synthetic construct
  misc_feature 1..20: note = chemically synthesized
  source 1..20: mol_type = other DNA
tgcataaagggcagaggccg

SEQ ID NO: 46267 - DNA, 20 bp, synthetic construct
  misc_feature 1..20: note = chemically synthesized
  source 1..20: mol_type = other DNA
gcataaagggcagaggccgg

SEQ ID NO: 46268 - DNA, 20 bp, synthetic construct
  misc_feature 1..20: note = chemically synthesized
  source 1..20: mol_type = other DNA
cataaagggcagaggccgga

SEQ ID NO: 46269 - DNA, 20 bp, synthetic construct
  misc_feature 1..20: note = chemically synthesized
  source 1..20: mol_type = other DNA
ataaagggcagaggccggag

SEQ ID NO: 46270 - DNA, 20 bp, synthetic construct
  misc_feature 1..20: note = chemically synthesized
  source 1..20: mol_type = other DNA
taaagggcagaggccggagg

SEQ ID NO: 46271 - DNA, 20 bp, synthetic construct
  misc_feature 1..20: note = chemically synthesized
  source 1..20: mol_type = other DNA
ggcagaggccggagggggtc

SEQ ID NO: 46272 - DNA, 20 bp, synthetic construct
  misc_feature 1..20: note = chemically synthesized
  source 1..20: mol_type = other DNA
gcagaggccggagggggtcc

SEQ ID NO: 46273 - DNA, 20 bp, synthetic construct
  misc_feature 1..20: note = chemically synthesized
  source 1..20: mol_type = other DNA
ggccggagggggtccaggct

SEQ ID NO: 46274 - DNA, 20 bp, synthetic construct
  misc_feature 1..20: note = chemically synthesized
  source 1..20: mol_type = other DNA
gagggggtccaggctaagtt

SEQ ID NO: 46275 - DNA, 20 bp, synthetic construct
  misc_feature 1..20: note = chemically synthesized
  source 1..20: mol_type = other DNA
ggggtccaggctaagtttag

SEQ ID NO: 46276 - DNA, 20 bp, synthetic construct
  misc_feature 1..20: note = chemically synthesized
  source 1..20: mol_type = other DNA
gggtccaggctaagtttaga

SEQ ID NO: 46277 - DNA, 20 bp, synthetic construct
  misc_feature 1..20: note = chemically synthesized
  source 1..20: mol_type = other DNA
ggctaagtttagaaggctgc

SEQ ID NO: 46278 - DNA, 20 bp, synthetic construct
  misc_feature 1..20: note = chemically synthesized
  source 1..20: mol_type = other DNA
gctaagtttagaaggctgcc

SEQ ID NO: 46279 - DNA, 20 bp, synthetic construct
  misc_feature 1..20: note = chemically synthesized
  source 1..20: mol_type = other DNA
gtttagaaggctgccaggtt

SEQ ID NO: 46280 - DNA, 20 bp, synthetic construct
  misc_feature 1..20: note = chemically synthesized
  source 1..20: mol_type = other DNA
tttagaaggctgccaggtta

SEQ ID NO: 46281 - DNA, 20 bp, synthetic construct
  misc_feature 1..20: note = chemically synthesized
  source 1..20: mol_type = other DNA
gaaggctgccaggttaaggc

SEQ ID NO: 46282 - DNA, 20 bp, synthetic construct
  misc_feature 1..20: note = chemically synthesized
  source 1..20: mol_type = other DNA
ggctgccaggttaaggccag

SEQ ID NO: 46283 - DNA, 20 bp, synthetic construct
  misc_feature 1..20: note = chemically synthesized
  source 1..20: mol_type = other DNA
gccaggttaaggccagtgga

SEQ ID NO: 46284 - DNA, 20 bp, synthetic construct
  misc_feature 1..20: note = chemically synthesized
  source 1..20: mol_type = other DNA
taaggccagtggaaagaatt

SEQ ID NO: 46285 - DNA, 20 bp, synthetic construct
  misc_feature 1..20: note = chemically synthesized
  source 1..20: mol_type = other DNA
ggccagtggaaagaattcgg

SEQ ID NO: 46286 - DNA, 20 bp, synthetic construct
  misc_feature 1..20: note = chemically synthesized
  source 1..20: mol_type = other DNA
gccagtggaaagaattcggt

SEQ ID NO: 46287 - DNA, 20 bp, synthetic construct
  misc_feature 1..20: note = chemically synthesized
  source 1..20: mol_type = other DNA
agtggaaagaattcggtggg

SEQ ID NO: 46288 - DNA, 20 bp, synthetic construct
  misc_feature 1..20: note = chemically synthesized
  source 1..20: mol_type = other DNA
gaaagaattcggtgggcagc

SEQ ID NO: 46289 - DNA, 20 bp, synthetic construct
  misc_feature 1..20: note = chemically synthesized
  source 1..20: mol_type = other DNA
aaagaattcggtgggcagcg

SEQ ID NO: 46290 - DNA, 20 bp, synthetic construct
  misc_feature 1..20: note = chemically synthesized
  source 1..20: mol_type = other DNA
agaattcggtgggcagcgag

SEQ ID NO: 46291 - DNA, 20 bp, synthetic construct
  misc_feature 1..20: note = chemically synthesized
  source 1..20: mol_type = other DNA
ggtgggcagcgaggagtcca

SEQ ID NO: 46292 - DNA, 20 bp, synthetic construct
  misc_feature 1..20: note = chemically synthesized
  source 1..20: mol_type = other DNA
gggcagcgaggagtccacag

SEQ ID NO: 46293 - DNA, 20 bp, synthetic construct
  misc_feature 1..20: note = chemically synthesized
  source 1..20: mol_type = other DNA
ggcagcgaggagtccacagt

SEQ ID NO: 46294 - DNA, 20 bp, synthetic construct
  misc_feature 1..20: note = chemically synthesized
  source 1..20: mol_type = other DNA
agtccacagtaggattgatt

SEQ ID NO: 46295 - DNA, 20 bp, synthetic construct
  misc_feature 1..20: note = chemically synthesized
  source 1..20: mol_type = other DNA
ccacagtaggattgattcag

SEQ ID NO: 46296 - DNA, 20 bp, synthetic construct
  misc_feature 1..20: note = chemically synthesized
  source 1..20: mol_type = other DNA
gattgattcagaagtctcac

SEQ ID NO: 46297 - DNA, 20 bp, synthetic construct
  misc_feature 1..20: note = chemically synthesized
  source 1..20: mol_type = other DNA
gattcagaagtctcactggt

SEQ ID NO: 46298 - DNA, 20 bp, synthetic construct
  misc_feature 1..20: note = chemically synthesized
  source 1..20: mol_type = other DNA
tcagaagtctcactggtcag

SEQ ID NO: 46299 - DNA, 20 bp, synthetic construct
  misc_feature 1..20: note = chemically synthesized
  source 1..20: mol_type = other DNA
cagaagtctcactggtcagc

SEQ ID NO: 46300 - DNA, 20 bp, synthetic construct
  misc_feature 1..20: note = chemically synthesized
  source 1..20: mol_type = other DNA
gaagtctcactggtcagcag

SEQ ID NO: 46301 - DNA, 20 bp, synthetic construct
  misc_feature 1..20: note = chemically synthesized
  source 1..20: mol_type = other DNA
ctcactggtcagcaggagac

SEQ ID NO: 46302 - DNA, 20 bp, synthetic construct
  misc_feature 1..20: note = chemically synthesized
  source 1..20: mol_type = other DNA
tcactggtcagcaggagaca

SEQ ID NO: 46303 - DNA, 20 bp, synthetic construct
  misc_feature 1..20: note = chemically synthesized
  source 1..20: mol_type = other DNA
ctggtcagcaggagacaagg

SEQ ID NO: 46304 - DNA, 20 bp, synthetic construct
  misc_feature 1..20: note = chemically synthesized
  source 1..20: mol_type = other DNA
agcaggagacaaggtggacc

SEQ ID NO: 46305 - DNA, 20 bp, synthetic construct
  misc_feature 1..20: note = chemically synthesized
  source 1..20: mol_type = other DNA
gcaggagacaaggtggaccc

SEQ ID NO: 46306 - DNA, 20 bp, synthetic construct
  misc_feature 1..20: note = chemically synthesized
  source 1..20: mol_type = other DNA
tggacccaggaaacactgaa

SEQ ID NO: 46307 - DNA, 20 bp, synthetic construct
  misc_feature 1..20: note = chemically synthesized
  source 1..20: mol_type = other DNA
ggacccaggaaacactgaaa

SEQ ID NO: 46308 - DNA, 20 bp, synthetic construct
  misc_feature 1..20: note = chemically synthesized
  source 1..20: mol_type = other DNA
cccaggaaacactgaaaagg

SEQ ID NO: 46309 - DNA, 20 bp, synthetic construct
  misc_feature 1..20: note = chemically synthesized
  source 1..20: mol_type = other DNA
ccaggaaacactgaaaaggt

SEQ ID NO: 46310 - DNA, 20 bp, synthetic construct
  misc_feature 1..20: note = chemically synthesized
  source 1..20: mol_type = other DNA
aaacactgaaaaggtgggcc

SEQ ID NO: 46311 - DNA, 20 bp, synthetic construct
  misc_feature 1..20: note = chemically synthesized
  source 1..20: mol_type = other DNA
cactgaaaaggtgggcccgg

SEQ ID NO: 46312 - DNA, 20 bp, synthetic construct
  misc_feature 1..20: note = chemically synthesized
  source 1..20: mol_type = other DNA
aaggtgggcccggcagaact

SEQ ID NO: 46313 - DNA, 20 bp, synthetic construct
  misc_feature 1..20: note = chemically synthesized
  source 1..20: mol_type = other DNA
ggtgggcccggcagaacttg

SEQ ID NO: 46314 - DNA, 20 bp, synthetic construct
  misc_feature 1..20: note = chemically synthesized
  source 1..20: mol_type = other DNA
gcccggcagaacttggagtc

SEQ ID NO: 46315 - DNA, 20 bp, synthetic construct
  misc_feature 1..20: note = chemically synthesized
  source 1..20: mol_type = other DNA
ttggagtctggcatcccacg

SEQ ID NO: 46316 - DNA, 20 bp, synthetic construct
  misc_feature 1..20: note = chemically synthesized
  source 1..20: mol_type = other DNA
tggagtctggcatcccacgc

SEQ ID NO: 46317 - DNA, 20 bp, synthetic construct
  misc_feature 1..20: note = chemically synthesized
  source 1..20: mol_type = other DNA
ggagtctggcatcccacgca

SEQ ID NO: 46318 - DNA, 20 bp, synthetic construct
  misc_feature 1..20: note = chemically synthesized
  source 1..20: mol_type = other DNA
tctggcatcccacgcagggt

SEQ ID NO: 46319 - DNA, 20 bp, synthetic construct
  misc_feature 1..20: note = chemically synthesized
  source 1..20: mol_type = other DNA
tggcatcccacgcagggtga

SEQ ID NO: 46320 - DNA, 20 bp, synthetic construct
  misc_feature 1..20: note = chemically synthesized
  source 1..20: mol_type = other DNA
ggcatcccacgcagggtgag

SEQ ID NO: 46321 - DNA, 20 bp, synthetic construct
  misc_feature 1..20: note = chemically synthesized
  source 1..20: mol_type = other DNA
atcccacgcagggtgagagg

SEQ ID NO: 46322 - DNA, 20 bp, synthetic construct
  misc_feature 1..20: note = chemically synthesized
  source 1..20: mol_type = other DNA
tcccacgcagggtgagaggc

SEQ ID NO: 46323 - DNA, 20 bp, synthetic construct
  misc_feature 1..20: note = chemically synthesized
  source 1..20: mol_type = other DNA
ccacgcagggtgagaggcgg

SEQ ID NO: 46324 - DNA, 20 bp, synthetic construct
  misc_feature 1..20: note = chemically synthesized
  source 1..20: mol_type = other DNA
acgcagggtgagaggcggga

SEQ ID NO: 46325 - DNA, 20 bp, synthetic construct
  misc_feature 1..20: note = chemically synthesized
  source 1..20: mol_type = other DNA
cgcagggtgagaggcgggag

SEQ ID NO: 46326 - DNA, 20 bp, synthetic construct
  misc_feature 1..20: note = chemically synthesized
  source 1..20: mol_type = other DNA
cagggtgagaggcgggagag

SEQ ID NO: 46327 - DNA, 20 bp, synthetic construct
  misc_feature 1..20: note = chemically synthesized
  source 1..20: mol_type = other DNA
agggtgagaggcgggagagg

SEQ ID NO: 46328 - DNA, 20 bp, synthetic construct
  misc_feature 1..20: note = chemically synthesized
  source 1..20: mol_type = other DNA
ggtgagaggcgggagaggag

SEQ ID NO: 46329 - DNA, 20 bp, synthetic construct
  misc_feature 1..20: note = chemically synthesized
  source 1..20: mol_type = other DNA
ggcgggagaggaggagcccc

SEQ ID NO: 46330 - DNA, 20 bp, synthetic construct
  misc_feature 1..20: note = chemically synthesized
  source 1..20: mol_type = other DNA
gcgggagaggaggagcccct

SEQ ID NO: 46331 - DNA, 20 bp, synthetic construct
  misc_feature 1..20: note = chemically synthesized
  source 1..20: mol_type = other DNA
cgggagaggaggagccccta

SEQ ID NO: 46332 - DNA, 20 bp, synthetic construct
  misc_feature 1..20: note = chemically synthesized
  source 1..20: mol_type = other DNA
aggaggagcccctagggcgc

SEQ ID NO: 46333 - DNA, 20 bp, synthetic construct
  misc_feature 1..20: note = chemically synthesized
  source 1..20: mol_type = other DNA
tagggcgccggcctgccttc

SEQ ID NO: 46334 - DNA, 20 bp, synthetic construct
  misc_feature 1..20: note = chemically synthesized
  source 1..20: mol_type = other DNA
cgccggcctgccttccagcc

SEQ ID NO: 46335 - DNA, 20 bp, synthetic construct
  misc_feature 1..20: note = chemically synthesized
  source 1..20: mol_type = other DNA
ggcctgccttccagcccagt

SEQ ID NO: 46336 - DNA, 20 bp, synthetic construct
  misc_feature 1..20: note = chemically synthesized
  source 1..20: mol_type = other DNA
gcctgccttccagcccagtt

SEQ ID NO: 46337 - DNA, 20 bp, synthetic construct
  misc_feature 1..20: note = chemically synthesized
  source 1..20: mol_type = other DNA
cttccagcccagttaggatt

SEQ ID NO: 46338 - DNA, 20 bp, synthetic construct
  misc_feature 1..20: note = chemically synthesized
  source 1..20: mol_type = other DNA
ttccagcccagttaggattt

SEQ ID NO: 46339 - DNA, 20 bp, synthetic construct
  misc_feature 1..20: note = chemically synthesized
  source 1..20: mol_type = other DNA
ccagcccagttaggatttgg

SEQ ID NO: 46340 - DNA, 20 bp, synthetic construct
  misc_feature 1..20: note = chemically synthesized
  source 1..20: mol_type = other DNA
gcgcgtaatctgacgctgtt

SEQ ID NO: 46341 - DNA, 20 bp, synthetic construct
  misc_feature 1..20: note = chemically synthesized
  source 1..20: mol_type = other DNA
cgcgtaatctgacgctgttt

SEQ ID NO: 46342 - DNA, 20 bp, synthetic construct
  misc_feature 1..20: note = chemically synthesized
  source 1..20: mol_type = other DNA
gcgtaatctgacgctgtttg

SEQ ID NO: 46343 - DNA, 20 bp, synthetic construct
  misc_feature 1..20: note = chemically synthesized
  source 1..20: mol_type = other DNA
gtaatctgacgctgtttggg

SEQ ID NO: 46344 - DNA, 20 bp, synthetic construct
  misc_feature 1..20: note = chemically synthesized
  source 1..20: mol_type = other DNA
taatctgacgctgtttgggg

SEQ ID NO: 46345 - DNA, 20 bp, synthetic construct
  misc_feature 1..20: note = chemically synthesized
  source 1..20: mol_type = other DNA
aatctgacgctgtttgggga

SEQ ID NO: 46346 - DNA, 20 bp, synthetic construct
  misc_feature 1..20: note = chemically synthesized
  source 1..20: mol_type = other DNA
tgacgctgtttggggagggc

SEQ ID NO: 46347 - DNA, 20 bp, synthetic construct
  misc_feature 1..20: note = chemically synthesized
  source 1..20: mol_type = other DNA
gacgctgtttggggagggcg

SEQ ID NO: 46348 - DNA, 20 bp, synthetic construct
  misc_feature 1..20: note = chemically synthesized
  source 1..20: mol_type = other DNA
gaggccgaaacctgatcctc

SEQ ID NO: 46349 - DNA, 20 bp, synthetic construct
  misc_feature 1..20: note = chemically synthesized
  source 1..20: mol_type = other DNA
cgaaacctgatcctccagtc

SEQ ID NO: 46350 - DNA, 20 bp, synthetic construct
  misc_feature 1..20: note = chemically synthesized
  source 1..20: mol_type = other DNA
gaaacctgatcctccagtcc

SEQ ID NO: 46351 - DNA, 20 bp, synthetic construct
  misc_feature 1..20: note = chemically synthesized
  source 1..20: mol_type = other DNA
aaacctgatcctccagtccg

SEQ ID NO: 46352 - DNA, 20 bp, synthetic construct
  misc_feature 1..20: note = chemically synthesized
  source 1..20: mol_type = other DNA
aacctgatcctccagtccgg

SEQ ID NO: 46353 - DNA, 20 bp, synthetic construct
  misc_feature 1..20: note = chemically synthesized
  source 1..20: mol_type = other DNA
gggttccgttaatgtttaat

SEQ ID NO: 46354 - DNA, 20 bp, synthetic construct
  misc_feature 1..20: note = chemically synthesized
  source 1..20: mol_type = other DNA
tccgttaatgtttaatcaga

SEQ ID NO: 46355 - DNA, 20 bp, synthetic construct
  misc_feature 1..20: note = chemically synthesized
  source 1..20: mol_type = other DNA
ccgttaatgtttaatcagat

SEQ ID NO: 46356 - DNA, 20 bp, synthetic construct
  misc_feature 1..20: note = chemically synthesized
  source 1..20: mol_type = other DNA
aatcagataggatcgtccga

SEQ ID NO: 46357 - DNA, 20 bp, synthetic construct
  misc_feature 1..20: note = chemically synthesized
  source 1..20: mol_type = other DNA
atcagataggatcgtccgat

SEQ ID NO: 46358 - DNA, 20 bp, synthetic construct
  misc_feature 1..20: note = chemically synthesized
  source 1..20: mol_type = other DNA
tcagataggatcgtccgatg

SEQ ID NO: 46359 - DNA, 20 bp, synthetic construct
  misc_feature 1..20: note = chemically synthesized
  source 1..20: mol_type = other DNA
aggatcgtccgatggggctc

SEQ ID NO: 46360 - DNA, 20 bp, synthetic construct
  misc_feature 1..20: note = chemically synthesized
  source 1..20: mol_type = other DNA
atcgtccgatggggctctgg

SEQ ID NO: 46361 - DNA, 20 bp, synthetic construct
  misc_feature 1..20: note = chemically synthesized
  source 1..20: mol_type = other DNA
gtggcgtgatctgcgcgccc

SEQ ID NO: 46362 - DNA, 20 bp, synthetic construct
  misc_feature 1..20: note = chemically synthesized
  source 1..20: mol_type = other DNA
tggcgtgatctgcgcgcccc

SEQ ID NO: 46363 - DNA, 20 bp, synthetic construct
  misc_feature 1..20: note = chemically synthesized
  source 1..20: mol_type = other DNA
atctgcgcgccccaggcgtc

SEQ ID NO: 46364 - DNA, 20 bp, synthetic construct
  misc_feature 1..20: note = chemically synthesized
  source 1..20: mol_type = other DNA
ggcgtcaagcacccacaccc

SEQ ID NO: 46365 - DNA, 20 bp, synthetic construct
  misc_feature 1..20: note = chemically synthesized
  source 1..20: mol_type = other DNA
gtcaagcacccacaccctag

SEQ ID NO: 46366 - DNA, 20 bp, synthetic construct
  misc_feature 1..20: note = chemically synthesized
  source 1..20: mol_type = other DNA
tcaagcacccacaccctaga

SEQ ID NO: 46367 - DNA, 20 bp, synthetic construct
  misc_feature 1..20: note = chemically synthesized
  source 1..20: mol_type = other DNA
cacaccctagaaggtttccg

SEQ ID NO: 46368 - DNA, 20 bp, synthetic construct
  misc_feature 1..20: note = chemically synthesized
  source 1..20: mol_type = other DNA
aaggtttccgcagcgacgtc

SEQ ID NO: 46369 - DNA, 20 bp, synthetic construct
  misc_feature 1..20: note = chemically synthesized
  source 1..20: mol_type = other DNA
aggtttccgcagcgacgtcg

SEQ ID NO: 46370 - DNA, 20 bp, synthetic construct
  misc_feature 1..20: note = chemically synthesized
  source 1..20: mol_type = other DNA
cagcgacgtcgaggcgctca

SEQ ID NO: 46371 - DNA, 20 bp, synthetic construct
  misc_feature 1..20: note = chemically synthesized
  source 1..20: mol_type = other DNA
cgtcgaggcgctcatggttg

SEQ ID NO: 46372 - DNA, 20 bp, synthetic construct
  misc_feature 1..20: note = chemically synthesized
  source 1..20: mol_type = other DNA
gtcgaggcgctcatggttgc

SEQ ID NO: 46373 - DNA, 20 bp, synthetic construct
  misc_feature 1..20: note = chemically synthesized
  source 1..20: mol_type = other DNA
gaggcgctcatggttgcagg

SEQ ID NO: 46374 - DNA, 20 bp, synthetic construct
  misc_feature 1..20: note = chemically synthesized
  source 1..20: mol_type = other DNA
aggcgctcatggttgcaggc

SEQ ID NO: 46375 - DNA, 20 bp, synthetic construct
  misc_feature 1..20: note = chemically synthesized
  source 1..20: mol_type = other DNA
tgcaggcgggcgccgccgtt

SEQ ID NO: 46376 - DNA, 20 bp, synthetic construct
  misc_feature 1..20: note = chemically synthesized
  source 1..20: mol_type = other DNA
gcgggcgccgccgttcagtt

SEQ ID NO: 46377 - DNA, 20 bp, synthetic construct
  misc_feature 1..20: note = chemically synthesized
  source 1..20: mol_type = other DNA
cgggcgccgccgttcagttc

SEQ ID NO: 46378 - DNA, 20 bp, synthetic construct
  misc_feature 1..20: note = chemically synthesized
  source 1..20: mol_type = other DNA
gggcgccgccgttcagttca

SEQ ID NO: 46379 - DNA, 20 bp, synthetic construct
  misc_feature 1..20: note = chemically synthesized
  source 1..20: mol_type = other DNA
cgccgttcagttcagggtct

SEQ ID NO: 46380 - DNA, 20 bp, synthetic construct
  misc_feature 1..20: note = chemically synthesized
  source 1..20: mol_type = other DNA
ttcagttcagggtctgagcc

SEQ ID NO: 46381 - DNA, 20 bp, synthetic construct
  misc_feature 1..20: note = chemically synthesized
  source 1..20: mol_type = other DNA
cagttcagggtctgagcctg

SEQ ID NO: 46382 - DNA, 20 bp, synthetic construct
  misc_feature 1..20: note = chemically synthesized
  source 1..20: mol_type = other DNA
agttcagggtctgagcctgg

SEQ ID NO: 46383 - DNA, 20 bp, synthetic construct
  misc_feature 1..20: note = chemically synthesized
  source 1..20: mol_type = other DNA
ttcagggtctgagcctggag

SEQ ID NO: 46384 - DNA, 20 bp, synthetic construct
  misc_feature 1..20: note = chemically synthesized
  source 1..20: mol_type = other DNA
gggtctgagcctggaggagt

SEQ ID NO: 46385 - DNA, 20 bp, synthetic construct
  misc_feature 1..20: note = chemically synthesized
  source 1..20: mol_type = other DNA
ctgagcctggaggagtgagc

SEQ ID NO: 46386 - DNA, 20 bp, synthetic construct
  misc_feature 1..20: note = chemically synthesized
  source 1..20: mol_type = other DNA
tgagcctggaggagtgagcc

SEQ ID NO: 46387 - DNA, 20 bp, synthetic construct
  misc_feature 1..20: note = chemically synthesized
  source 1..20: mol_type = other DNA
gcctggaggagtgagccagg

SEQ ID NO: 46388 - DNA, 20 bp, synthetic construct
  misc_feature 1..20: note = chemically synthesized
  source 1..20: mol_type = other DNA
ggaggagtgagccaggcagt

SEQ ID NO: 46389 - DNA, 20 bp, synthetic construct
  misc_feature 1..20: note = chemically synthesized
  source 1..20: mol_type = other DNA
agtgagccaggcagtgagac

SEQ ID NO: 46390 - DNA, 20 bp, synthetic construct
  misc_feature 1..20: note = chemically synthesized
  source 1..20: mol_type = other DNA
gccaggcagtgagactggct

SEQ ID NO: 46391 - DNA, 20 bp, synthetic construct
  misc_feature 1..20: note = chemically synthesized
  source 1..20: mol_type = other DNA
ccaggcagtgagactggctc

SEQ ID NO: 46392 - DNA, 20 bp, synthetic construct
  misc_feature 1..20: note = chemically synthesized
  source 1..20: mol_type = other DNA
ggcagtgagactggctcggg

SEQ ID NO: 46393 - DNA, 20 bp, synthetic construct
  misc_feature 1..20: note = chemically synthesized
  source 1..20: mol_type = other DNA
gcagtgagactggctcgggc

SEQ ID NO: 46394 - DNA, 20 bp, synthetic construct
  misc_feature 1..20: note = chemically synthesized
  source 1..20: mol_type = other DNA
tgagactggctcgggcgggc

SEQ ID NO: 46395 - DNA, 20 bp, synthetic construct
  misc_feature 1..20: note = chemically synthesized
  source 1..20: mol_type = other DNA
gagactggctcgggcgggcc

SEQ ID NO: 46396 - DNA, 20 bp, synthetic construct
  misc_feature 1..20: note = chemically synthesized
  source 1..20: mol_type = other DNA
cgggccgggacgcgtcgttg

SEQ ID NO: 46397 - DNA, 20 bp, synthetic construct
  misc_feature 1..20: note = chemically synthesized
  source 1..20: mol_type = other DNA
gccgggacgcgtcgttgcag

SEQ ID NO: 46398 - DNA, 20 bp, synthetic construct
  misc_feature 1..20: note = chemically synthesized
  source 1..20: mol_type = other DNA
gggacgcgtcgttgcagcag

SEQ ID NO: 46399 - DNA, 20 bp, synthetic construct
  misc_feature 1..20: note = chemically synthesized
  source 1..20: mol_type = other DNA
gtcgttgcagcagcggctcc

SEQ ID NO: 46400 - DNA, 20 bp, synthetic construct
  misc_feature 1..20: note = chemically synthesized
  source 1..20: mol_type = other DNA
cagcagcggctcccagctcc

SEQ ID NO: 46401 - DNA, 20 bp, synthetic construct
  misc_feature 1..20: note = chemically synthesized
  source 1..20: mol_type = other DNA
agcggctcccagctcccagc

SEQ ID NO: 46402 - DNA, 20 bp, synthetic construct
  misc_feature 1..20: note = chemically synthesized
  source 1..20: mol_type = other DNA
gcggctcccagctcccagcc

SEQ ID NO: 46403 - DNA, 20 bp, synthetic construct
  misc_feature 1..20: note = chemically synthesized
  source 1..20: mol_type = other DNA
cgcgccctgctcctgaactt

SEQ ID NO: 46404 - DNA, 20 bp, synthetic construct
  misc_feature 1..20: note = chemically synthesized
  source 1..20: mol_type = other DNA
cctgaacttcagctcctgca

SEQ ID NO: 46405 - DNA, 20 bp, synthetic construct
  misc_feature 1..20: note = chemically synthesized
  source 1..20: mol_type = other DNA
tgcacagtcctccccaccgc

SEQ ID NO: 46406 - DNA, 20 bp, synthetic construct
  misc_feature 1..20: note = chemically synthesized
  source 1..20: mol_type = other DNA
gcacagtcctccccaccgca

SEQ ID NO: 46407 - DNA, 20 bp, synthetic construct
  misc_feature 1..20: note = chemically synthesized
  source 1..20: mol_type = other DNA
tcctccccaccgcaaggctc

SEQ ID NO: 46408 - DNA, 20 bp, synthetic construct
  misc_feature 1..20: note = chemically synthesized
  source 1..20: mol_type = other DNA
cctccccaccgcaaggctca

SEQ ID NO: 46409 - DNA, 20 bp, synthetic construct
  misc_feature 1..20: note = chemically synthesized
  source 1..20: mol_type = other DNA
cgcaaggctcaaggcgccgc

SEQ ID NO: 46410 - DNA, 20 bp, synthetic construct
  misc_feature 1..20: note = chemically synthesized
  source 1..20: mol_type = other DNA
ggctcaaggcgccgccggcg

SEQ ID NO: 46411 - DNA, 20 bp, synthetic construct
  misc_feature 1..20: note = chemically synthesized
  source 1..20: mol_type = other DNA
ccgccggcgtggaccgcgca

SEQ ID NO: 46412 - DNA, 20 bp, synthetic construct
  misc_feature 1..20: note = chemically synthesized
  source 1..20: mol_type = other DNA
cgtggaccgcgcacggcctc

SEQ ID NO: 46413 - DNA, 20 bp, synthetic construct
  misc_feature 1..20: note = chemically synthesized
  source 1..20: mol_type = other DNA
gtggaccgcgcacggcctct

SEQ ID NO: 46414 - DNA, 20 bp, synthetic construct
  misc_feature 1..20: note = chemically synthesized
  source 1..20: mol_type = other DNA
cggcctctaggtctcctcgc

SEQ ID NO: 46415 - DNA, 20 bp, synthetic construct
  misc_feature 1..20: note = chemically synthesized
  source 1..20: mol_type = other DNA
ggcctctaggtctcctcgcc

SEQ ID NO: 46416 - DNA, 20 bp, synthetic construct
  misc_feature 1..20: note = chemically synthesized
  source 1..20: mol_type = other DNA
tctaggtctcctcgccagga

SEQ ID NO: 46417 - DNA, 20 bp, synthetic construct
  misc_feature 1..20: note = chemically synthesized
  source 1..20: mol_type = other DNA
caggacagcaacctctcccc

SEQ ID NO: 46418 - DNA, 20 bp, synthetic construct
  misc_feature 1..20: note = chemically synthesized
  source 1..20: mol_type = other DNA
aacctctcccctggccctca

SEQ ID NO: 46419 - DNA, 20 bp, synthetic construct
  misc_feature 1..20: note = chemically synthesized
  source 1..20: mol_type = other DNA
acctctcccctggccctcat

SEQ ID NO: 46420 - DNA, 20 bp, synthetic construct
  misc_feature 1..20: note = chemically synthesized
  source 1..20: mol_type = other DNA
ctggccctcatgggcaccgt

SEQ ID NO: 46421 - DNA, 20 bp, synthetic construct
  misc_feature 1..20: note = chemically synthesized
  source 1..20: mol_type = other DNA
ctcatgggcaccgtcagctc

SEQ ID NO: 46422 - DNA, 20 bp, synthetic construct
  misc_feature 1..20: note = chemically synthesized
  source 1..20: mol_type = other DNA
tcatgggcaccgtcagctcc

SEQ ID NO: 46423 - DNA, 20 bp, synthetic construct
  misc_feature 1..20: note = chemically synthesized
  source 1..20: mol_type = other DNA
tgggcaccgtcagctccagg

SEQ ID NO: 46424 - DNA, 20 bp, synthetic construct
  misc_feature 1..20: note = chemically synthesized
  source 1..20: mol_type = other DNA
ccgtcagctccaggcggtcc

SEQ ID NO: 46425 - DNA, 20 bp, synthetic construct
  misc_feature 1..20: note = chemically synthesized
  source 1..20: mol_type = other DNA
tcagctccaggcggtcctgg

SEQ ID NO: 46426 - DNA, 20 bp, synthetic construct
  misc_feature 1..20: note = chemically synthesized
  source 1..20: mol_type = other DNA
gctgctgctgctgctgctcc

SEQ ID NO: 46427 - DNA, 20 bp, synthetic construct
  misc_feature 1..20: note = chemically synthesized
  source 1..20: mol_type = other DNA
ctgctgctgctgctgctcct

SEQ ID NO: 46428 - DNA, 20 bp, synthetic construct
  misc_feature 1..20: note = chemically synthesized
  source 1..20: mol_type = other DNA
gctgctgctcctgggtcccg

SEQ ID NO: 46429 - DNA, 20 bp, synthetic construct
  misc_feature 1..20: note = chemically synthesized
  source 1..20: mol_type = other DNA
ctgctgctcctgggtcccgc

SEQ ID NO: 46430 - DNA, 20 bp, synthetic construct
  misc_feature 1..20: note = chemically synthesized
  source 1..20: mol_type = other DNA
gtcccgcgggcgcccgtgcg

SEQ ID NO: 46431 - DNA, 20 bp, synthetic construct
  misc_feature 1..20: note = chemically synthesized
  source 1..20: mol_type = other DNA
tcccgcgggcgcccgtgcgc

SEQ ID NO: 46432 - DNA, 20 bp, synthetic construct
  misc_feature 1..20: note = chemically synthesized
  source 1..20: mol_type = other DNA
ccgcgggcgcccgtgcgcag

SEQ ID NO: 46433 - DNA, 20 bp, synthetic construct
  misc_feature 1..20: note = chemically synthesized
  source 1..20: mol_type = other DNA
cgcgggcgcccgtgcgcagg

SEQ ID NO: 46434 - DNA, 20 bp, synthetic construct
  misc_feature 1..20: note = chemically synthesized
  source 1..20: mol_type = other DNA
gcgcccgtgcgcaggaggac

SEQ ID NO: 46435 - DNA, 20 bp, synthetic construct
  misc_feature 1..20: note = chemically synthesized
  source 1..20: mol_type = other DNA
cgcccgtgcgcaggaggacg

SEQ ID NO: 46436 - DNA, 20 bp, synthetic construct
  misc_feature 1..20: note = chemically synthesized
  source 1..20: mol_type = other DNA
cgtgcgcaggaggacgagga

SEQ ID NO: 46437 - DNA, 20 bp, synthetic construct
  misc_feature 1..20: note = chemically synthesized
  source 1..20: mol_type = other DNA
aggacgaggacggcgactac

SEQ ID NO: 46438 - DNA, 20 bp, synthetic construct
  misc_feature 1..20: note = chemically synthesized
  source 1..20: mol_type = other DNA
ggacgaggacggcgactacg

SEQ ID NO: 46439 - DNA, 20 bp, synthetic construct
  misc_feature 1..20: note = chemically synthesized
  source 1..20: mol_type = other DNA
acgaggacggcgactacgag

SEQ ID NO: 46440 - DNA, 20 bp, synthetic construct
  misc_feature 1..20: note = chemically synthesized
  source 1..20: mol_type = other DNA
ggacggcgactacgaggagc

SEQ ID NO: 46441 - DNA, 20 bp, synthetic construct
  misc_feature 1..20: note = chemically synthesized
  source 1..20: mol_type = other DNA
cgactacgaggagctggtgc

SEQ ID NO: 46442 - DNA, 20 bp, synthetic construct
  misc_feature 1..20: note = chemically synthesized
  source 1..20: mol_type = other DNA
tggtgctagccttgcgttcc

SEQ ID NO: 46443 - DNA, 20 bp, synthetic construct
  misc_feature 1..20: note = chemically synthesized
  source 1..20: mol_type = other DNA
ggtgctagccttgcgttccg

SEQ ID NO: 46444 - DNA, 20 bp, synthetic construct
  misc_feature 1..20: note = chemically synthesized
  source 1..20: mol_type = other DNA
tgctagccttgcgttccgag

SEQ ID NO: 46445 - DNA, 20 bp, synthetic construct
  misc_feature 1..20: note = chemically synthesized
  source 1..20: mol_type = other DNA
gctagccttgcgttccgagg

SEQ ID NO: 46446 - DNA, 20 bp, synthetic construct
  misc_feature 1..20: note = chemically synthesized
  source 1..20: mol_type = other DNA
gccttgcgttccgaggagga

SEQ ID NO: 46447 - DNA, 20 bp, synthetic construct
  misc_feature 1..20: note = chemically synthesized
  source 1..20: mol_type = other DNA
gcgttccgaggaggacggcc

SEQ ID NO: 46448 - DNA, 20 bp, synthetic construct
  misc_feature 1..20: note = chemically synthesized
  source 1..20: mol_type = other DNA
cgaggaggacggcctggccg

SEQ ID NO: 46449 - DNA, 20 bp, synthetic construct
  misc_feature 1..20: note = chemically synthesized
  source 1..20: mol_type = other DNA
acggcctggccgaagcaccc

SEQ ID NO: 46450 - DNA, 20 bp, synthetic construct
  misc_feature 1..20: note = chemically synthesized
  source 1..20: mol_type = other DNA
ctggccgaagcacccgagca

SEQ ID NO: 46451 - DNA, 20 bp, synthetic construct
  misc_feature 1..20: note = chemically synthesized
  source 1..20: mol_type = other DNA
agcacccgagcacggaacca

SEQ ID NO: 46452 - DNA, 20 bp, synthetic construct
  misc_feature 1..20: note = chemically synthesized
  source 1..20: mol_type = other DNA
ccaccttccaccgctgcgcc

SEQ ID NO: 46453 - DNA, 20 bp, synthetic construct
  misc_feature 1..20: note = chemically synthesized
  source 1..20: mol_type = other DNA
caccttccaccgctgcgcca

SEQ ID NO: 46454 - DNA, 20 bp, synthetic construct
  misc_feature 1..20: note = chemically synthesized
  source 1..20: mol_type = other DNA
tccaccgctgcgccaaggtg

SEQ ID NO: 46455 - DNA, 20 bp, synthetic construct
  misc_feature 1..20: note = chemically synthesized
  source 1..20: mol_type = other DNA
ccaccgctgcgccaaggtgc

SEQ ID NO: 46456 - DNA, 20 bp, synthetic construct
  misc_feature 1..20: note = chemically synthesized
  source 1..20: mol_type = other DNA
gctgcgccaaggtgcgggtg

SEQ ID NO: 46457 - DNA, 20 bp, synthetic construct
  misc_feature 1..20: note = chemically synthesized
  source 1..20: mol_type = other DNA
ctgcgccaaggtgcgggtgt

SEQ ID NO: 46458 - DNA, 20 bp, synthetic construct
  misc_feature 1..20: note = chemically synthesized
  source 1..20: mol_type = other DNA
tgcgccaaggtgcgggtgta

SEQ ID NO: 46459 - DNA, 20 bp, synthetic construct
  misc_feature 1..20: note = chemically synthesized
  source 1..20: mol_type = other DNA
ccaaggtgcgggtgtaggga

SEQ ID NO: 46460 - DNA, 20 bp, synthetic construct
  misc_feature 1..20: note = chemically synthesized
  source 1..20: mol_type = other DNA
caaggtgcgggtgtagggat

SEQ ID NO: 46461 - DNA, 20 bp, synthetic construct
  misc_feature 1..20: note = chemically synthesized
  source 1..20: mol_type = other DNA
aggtgcgggtgtagggatgg

SEQ ID NO: 46462 - DNA, 20 bp, synthetic construct
  misc_feature 1..20: note = chemically synthesized
  source 1..20: mol_type = other DNA
ggtgcgggtgtagggatggg

SEQ ID NO: 46463 - DNA, 20 bp, synthetic construct
  misc_feature 1..20: note = chemically synthesized
  source 1..20: mol_type = other DNA
cgggtgtagggatgggaggc

SEQ ID NO: 46464 - DNA, 20 bp, synthetic construct
  misc_feature 1..20: note = chemically synthesized
  source 1..20: mol_type = other DNA
gggtgtagggatgggaggcc

SEQ ID NO: 46465 - DNA, 20 bp, synthetic construct
  misc_feature 1..20: note = chemically synthesized
  source 1..20: mol_type = other DNA
ggtgtagggatgggaggccg

SEQ ID NO: 46466 - DNA, 20 bp, synthetic construct
  misc_feature 1..20: note = chemically synthesized
  source 1..20: mol_type = other DNA
gggaggccggggcgaacccg

SEQ ID NO: 46467 - DNA, 20 bp, synthetic construct
  misc_feature 1..20: note = chemically synthesized
  source 1..20: mol_type = other DNA
ggccggggcgaacccgcagc

SEQ ID NO: 46468 - DNA, 20 bp, synthetic construct
  misc_feature 1..20: note = chemically synthesized
  source 1..20: mol_type = other DNA
gccggggcgaacccgcagcc

SEQ ID NO: 46469 - DNA, 20 bp, synthetic construct
  misc_feature 1..20: note = chemically synthesized
  source 1..20: mol_type = other DNA
gggcgaacccgcagccggga

SEQ ID NO: 46470 - DNA, 20 bp, synthetic construct
  misc_feature 1..20: note = chemically synthesized
  source 1..20: mol_type = other DNA
aacccgcagccgggacggtg

SEQ ID NO: 46471 - DNA, 20 bp, synthetic construct
  misc_feature 1..20: note = chemically synthesized
  source 1..20: mol_type = other DNA
ggtgcggtgctgtttcctct

SEQ ID NO: 46472 - DNA, 20 bp, synthetic construct
  misc_feature 1..20: note = chemically synthesized
  source 1..20: mol_type = other DNA
gtgcggtgctgtttcctctc

SEQ ID NO: 46473 - DNA, 20 bp, synthetic construct
  misc_feature 1..20: note = chemically synthesized
  source 1..20: mol_type = other DNA
tgctgtttcctctcgggcct

SEQ ID NO: 46474 - DNA, 20 bp, synthetic construct
  misc_feature 1..20: note = chemically synthesized
  source 1..20: mol_type = other DNA
gcctcagtttccccccatgt

SEQ ID NO: 46475 - DNA, 20 bp, synthetic construct
  misc_feature 1..20: note = chemically synthesized
  source 1..20: mol_type = other DNA
ctcagtttccccccatgtaa

SEQ ID NO: 46476 - DNA, 20 bp, synthetic construct
  misc_feature 1..20: note = chemically synthesized
  source 1..20: mol_type = other DNA
cagtttccccccatgtaaga

SEQ ID NO: 46477 - DNA, 20 bp, synthetic construct
  misc_feature 1..20: note = chemically synthesized
  source 1..20: mol_type = other DNA
agtttccccccatgtaagag

SEQ ID NO: 46478 - DNA, 20 bp, synthetic construct
  misc_feature 1..20: note = chemically synthesized
  source 1..20: mol_type = other DNA
ttccccccatgtaagagagg

SEQ ID NO: 46479 - DNA, 20 bp, synthetic construct
  misc_feature 1..20: note = chemically synthesized
  source 1..20: mol_type = other DNA
cccccatgtaagagaggaag

SEQ ID NO: 46480 - DNA, 20 bp, synthetic construct
  misc_feature 1..20: note = chemically synthesized
  source 1..20: mol_type = other DNA
cccatgtaagagaggaagtg

SEQ ID NO: 46481 - DNA, 20 bp, synthetic construct
  misc_feature 1..20: note = chemically synthesized
  source 1..20: mol_type = other DNA
gtaagagaggaagtggagtg

SEQ ID NO: 46482 - DNA, 20 bp, synthetic construct
  misc_feature 1..20: note = chemically synthesized
  source 1..20: mol_type = other DNA
taagagaggaagtggagtgc

SEQ ID NO: 46483 - DNA, 20 bp, synthetic construct
  misc_feature 1..20: note = chemically synthesized
  source 1..20: mol_type = other DNA
gaagtggagtgcaggtcgcc

SEQ ID NO: 46484 - DNA, 20 bp, synthetic construct
  misc_feature 1..20: note = chemically synthesized
  source 1..20: mol_type = other DNA
aagtggagtgcaggtcgccg

SEQ ID NO: 46485 - DNA, 20 bp, synthetic construct
  misc_feature 1..20: note = chemically synthesized
  source 1..20: mol_type = other DNA
agtggagtgcaggtcgccga

SEQ ID NO: 46486 - DNA, 20 bp, synthetic construct
  misc_feature 1..20: note = chemically synthesized
  source 1..20: mol_type = other DNA
gtcgccgagggctcttcgct

SEQ ID NO: 46487 - DNA, 20 bp, synthetic construct
  misc_feature 1..20: note = chemically synthesized
  source 1..20: mol_type = other DNA
ctcttcgcttggcacgatct

SEQ ID NO: 46488 - DNA, 20 bp, synthetic construct
  misc_feature 1..20: note = chemically synthesized
  source 1..20: mol_type = other DNA
tcttcgcttggcacgatctt

SEQ ID NO: 46489 - DNA, 20 bp, synthetic construct
  misc_feature 1..20: note = chemically synthesized
  source 1..20: mol_type = other DNA
cttcgcttggcacgatcttg

SEQ ID NO: 46490 - DNA, 20 bp, synthetic construct
  misc_feature 1..20: note = chemically synthesized
  source 1..20: mol_type = other DNA
tggcacgatcttggggactg

SEQ ID NO: 46491 - DNA, 20 bp, synthetic construct
  misc_feature 1..20: note = chemically synthesized
  source 1..20: mol_type = other DNA
ggcacgatcttggggactgc

SEQ ID NO: 46492 - DNA, 20 bp, synthetic construct
  misc_feature 1..20: note = chemically synthesized
  source 1..20: mol_type = other DNA
cgatcttggggactgcaggc

SEQ ID NO: 46493 - DNA, 20 bp, synthetic construct
  misc_feature 1..20: note = chemically synthesized
  source 1..20: mol_type = other DNA
gatcttggggactgcaggca

SEQ ID NO: 46494 - DNA, 20 bp, synthetic construct
  misc_feature 1..20: note = chemically synthesized
  source 1..20: mol_type = other DNA
cttggggactgcaggcaagg

SEQ ID NO: 46495 - DNA, 20 bp, synthetic construct
  misc_feature 1..20: note = chemically synthesized
  source 1..20: mol_type = other DNA
ggggactgcaggcaaggcgg

SEQ ID NO: 46496 - DNA, 20 bp, synthetic construct
  misc_feature 1..20: note = chemically synthesized
  source 1..20: mol_type = other DNA
gggactgcaggcaaggcggc

SEQ ID NO: 46497 - DNA, 20 bp, synthetic construct
  misc_feature 1..20: note = chemically synthesized
  source 1..20: mol_type = other DNA
ggactgcaggcaaggcggcg

SEQ ID NO: 46498 - DNA, 20 bp, synthetic construct
  misc_feature 1..20: note = chemically synthesized
  source 1..20: mol_type = other DNA
gactgcaggcaaggcggcgg

SEQ ID NO: 46499 - DNA, 20 bp, synthetic construct
  misc_feature 1..20: note = chemically synthesized
  source 1..20: mol_type = other DNA
ctgcaggcaaggcggcgggg

SEQ ID NO: 46500 - DNA, 20 bp, synthetic construct
  misc_feature 1..20: note = chemically synthesized
  source 1..20: mol_type = other DNA
tgcaggcaaggcggcggggg

SEQ ID NO: 46501 - DNA, 20 bp, synthetic construct
  misc_feature 1..20: note = chemically synthesized
  source 1..20: mol_type = other DNA
ggcaaggcggcgggggagga

SEQ ID NO: 46502 - DNA, 20 bp, synthetic construct
  misc_feature 1..20: note = chemically synthesized
  source 1..20: mol_type = other DNA
gcaaggcggcgggggaggac

SEQ ID NO: 46503 - DNA, 20 bp, synthetic construct
  misc_feature 1..20: note = chemically synthesized
  source 1..20: mol_type = other DNA
aggcggcgggggaggacggg

SEQ ID NO: 46504 - DNA, 20 bp, synthetic construct
  misc_feature 1..20: note = chemically synthesized
  source 1..20: mol_type = other DNA
cggcgggggaggacgggtag

SEQ ID NO: 46505 - DNA, 20 bp, synthetic construct
  misc_feature 1..20: note = chemically synthesized
  source 1..20: mol_type = other DNA
ggcgggggaggacgggtagt

SEQ ID NO: 46506 - DNA, 20 bp, synthetic construct
  misc_feature 1..20: note = chemically synthesized
  source 1..20: mol_type = other DNA
gcgggggaggacgggtagtg

SEQ ID NO: 46507 - DNA, 20 bp, synthetic construct
  misc_feature 1..20: note = chemically synthesized
  source 1..20: mol_type = other DNA
gggggaggacgggtagtggg

SEQ ID NO: 46508 - DNA, 20 bp, synthetic construct
  misc_feature 1..20: note = chemically synthesized
  source 1..20: mol_type = other DNA
aggacgggtagtggggagca

SEQ ID NO: 46509 - DNA, 20 bp, synthetic construct
  misc_feature 1..20: note = chemically synthesized
  source 1..20: mol_type = other DNA
acgggtagtggggagcacgg

SEQ ID NO: 46510 - DNA, 20 bp, synthetic construct
  misc_feature 1..20: note = chemically synthesized
  source 1..20: mol_type = other DNA
gggtagtggggagcacggtg

SEQ ID NO: 46511 - DNA, 20 bp, synthetic construct
  misc_feature 1..20: note = chemically synthesized
  source 1..20: mol_type = other DNA
gtagtggggagcacggtgga

SEQ ID NO: 46512 - DNA, 20 bp, synthetic construct
  misc_feature 1..20: note = chemically synthesized
  source 1..20: mol_type = other DNA
gtggggagcacggtggagag

SEQ ID NO: 46513 - DNA, 20 bp, synthetic construct
  misc_feature 1..20: note = chemically synthesized
  source 1..20: mol_type = other DNA
tggggagcacggtggagagc

SEQ ID NO: 46514 - DNA, 20 bp, synthetic construct
  misc_feature 1..20: note = chemically synthesized
  source 1..20: mol_type = other DNA
ggggagcacggtggagagcg

SEQ ID NO: 46515 - DNA, 20 bp, synthetic construct
  misc_feature 1..20: note = chemically synthesized
  source 1..20: mol_type = other DNA
agcacggtggagagcgggga

SEQ ID NO: 46516 - DNA, 20 bp, synthetic construct
  misc_feature 1..20: note = chemically synthesized
  source 1..20: mol_type = other DNA
cggtggagagcggggacggc

SEQ ID NO: 46517 - DNA, 20 bp, synthetic construct
  misc_feature 1..20: note = chemically synthesized
  source 1..20: mol_type = other DNA
agcggggacggccggctctt

SEQ ID NO: 46518 - DNA, 20 bp, synthetic construct
  misc_feature 1..20: note = chemically synthesized
  source 1..20: mol_type = other DNA
gcggggacggccggctcttt

SEQ ID NO: 46519 - DNA, 20 bp, synthetic construct
  misc_feature 1..20: note = chemically synthesized
  source 1..20: mol_type = other DNA
cggggacggccggctctttg

SEQ ID NO: 46520 - DNA, 20 bp, synthetic construct
  misc_feature 1..20: note = chemically synthesized
  source 1..20: mol_type = other DNA
ccggctctttggggacttgc

SEQ ID NO: 46521 - DNA, 20 bp, synthetic construct
  misc_feature 1..20: note = chemically synthesized
  source 1..20: mol_type = other DNA
cggctctttggggacttgct

SEQ ID NO: 46522 - DNA, 20 bp, synthetic construct
  misc_feature 1..20: note = chemically synthesized
  source 1..20: mol_type = other DNA
ggctctttggggacttgctg

SEQ ID NO: 46523 - DNA, 20 bp, synthetic construct
  misc_feature 1..20: note = chemically synthesized
  source 1..20: mol_type = other DNA
tggggacttgctggggcgtg

SEQ ID NO: 46524 - DNA, 20 bp, synthetic construct
  misc_feature 1..20: note = chemically synthesized
  source 1..20: mol_type = other DNA
gggcgtgcggctgcgctatt

SEQ ID NO: 46525 - DNA, 20 bp, synthetic construct
  misc_feature 1..20: note = chemically synthesized
  source 1..20: mol_type = other DNA
cgtgcggctgcgctattcag

SEQ ID NO: 46526 - DNA, 20 bp, synthetic construct
  misc_feature 1..20: note = chemically synthesized
  source 1..20: mol_type = other DNA
gtgcggctgcgctattcagt

SEQ ID NO: 46527 - DNA, 20 bp, synthetic construct
  misc_feature 1..20: note = chemically synthesized
  source 1..20: mol_type = other DNA
cggctgcgctattcagtggg

SEQ ID NO: 46528 - DNA, 20 bp, synthetic construct
  misc_feature 1..20: note = chemically synthesized
  source 1..20: mol_type = other DNA
ggctgcgctattcagtggga

SEQ ID NO: 46529 - DNA, 20 bp, synthetic construct
  misc_feature 1..20: note = chemically synthesized
  source 1..20: mol_type = other DNA
ctattcagtgggaaggttcg

SEQ ID NO: 46530 - DNA, 20 bp, synthetic construct
  misc_feature 1..20: note = chemically synthesized
  source 1..20: mol_type = other DNA
tattcagtgggaaggttcgc

SEQ ID NO: 46531 - DNA, 20 bp, synthetic construct
  misc_feature 1..20: note = chemically synthesized
  source 1..20: mol_type = other DNA
attcagtgggaaggttcgcg

SEQ ID NO: 46532 - DNA, 20 bp, synthetic construct
  misc_feature 1..20: note = chemically synthesized
  source 1..20: mol_type = other DNA
agtgggaaggttcgcggggt

SEQ ID NO: 46533 - DNA, 20 bp, synthetic construct
  misc_feature 1..20: note = chemically synthesized
  source 1..20: mol_type = other DNA
gtgggaaggttcgcggggtt

SEQ ID NO: 46534 - DNA, 20 bp, synthetic construct
  misc_feature 1..20: note = chemically synthesized
  source 1..20: mol_type = other DNA
gggaaggttcgcggggttgg

SEQ ID NO: 46535 - DNA, 20 bp, synthetic construct
  misc_feature 1..20: note = chemically synthesized
  source 1..20: mol_type = other DNA
gttcgcggggttgggagacc

SEQ ID NO: 46536 - DNA, 20 bp, synthetic construct
  misc_feature 1..20: note = chemically synthesized
  source 1..20: mol_type = other DNA
tcgcggggttgggagacccg

SEQ ID NO: 46537 - DNA, 20 bp, synthetic construct
  misc_feature 1..20: note = chemically synthesized
  source 1..20: mol_type = other DNA
cgcggggttgggagacccgg

SEQ ID NO: 46538 - DNA, 20 bp, synthetic construct
  misc_feature 1..20: note = chemically synthesized
  source 1..20: mol_type = other DNA
ggttgggagacccggaggcc

SEQ ID NO: 46539 - DNA, 20 bp, synthetic construct
  misc_feature 1..20: note = chemically synthesized
  source 1..20: mol_type = other DNA
gttgggagacccggaggccg

SEQ ID NO: 46540 - DNA, 20 bp, synthetic construct
  misc_feature 1..20: note = chemically synthesized
  source 1..20: mol_type = other DNA
gggagacccggaggccgagg

SEQ ID NO: 46541 - DNA, 20 bp, synthetic construct
  misc_feature 1..20: note = chemically synthesized
  source 1..20: mol_type = other DNA
ggagacccggaggccgagga

SEQ ID NO: 46542 - DNA, 20 bp, synthetic construct
  misc_feature 1..20: note = chemically synthesized
  source 1..20: mol_type = other DNA
gagacccggaggccgaggaa

SEQ ID NO: 46543 - DNA, 20 bp, synthetic construct
  misc_feature 1..20: note = chemically synthesized
  source 1..20: mol_type = other DNA
cccggaggccgaggaagggc

SEQ ID NO: 46544 - DNA, 20 bp, synthetic construct
  misc_feature 1..20: note = chemically synthesized
  source 1..20: mol_type = other DNA
ggaggccgaggaagggcgag

SEQ ID NO: 46545 - DNA, 20 bp, synthetic construct
  misc_feature 1..20: note = chemically synthesized
  source 1..20: mol_type = other DNA
aggccgaggaagggcgagca

SEQ ID NO: 46546 - DNA, 20 bp, synthetic construct
  misc_feature 1..20: note = chemically synthesized
  source 1..20: mol_type = other DNA
aagggcgagcagagcactgc

SEQ ID NO: 46547 - DNA, 20 bp, synthetic construct
  misc_feature 1..20: note = chemically synthesized
  source 1..20: mol_type = other DNA
agggcgagcagagcactgcc

SEQ ID NO: 46548 - DNA, 20 bp, synthetic construct
  misc_feature 1..20: note = chemically synthesized
  source 1..20: mol_type = other DNA
cactgccaggatatcctgcc

SEQ ID NO: 46549 - DNA, 20 bp, synthetic construct
  misc_feature 1..20: note = chemically synthesized
  source 1..20: mol_type = other DNA
gatatcctgcccagatttcc

SEQ ID NO: 46550 - DNA, 20 bp, synthetic construct
  misc_feature 1..20: note = chemically synthesized
  source 1..20: mol_type = other DNA
tcccagtttctgcctcgccg

SEQ ID NO: 46551 - DNA, 20 bp, synthetic construct
  misc_feature 1..20: note = chemically synthesized
  source 1..20: mol_type = other DNA
gtttctgcctcgccgcggca

SEQ ID NO: 46552 - DNA, 20 bp, synthetic construct
  misc_feature 1..20: note = chemically synthesized
  source 1..20: mol_type = other DNA
tttctgcctcgccgcggcac

SEQ ID NO: 46553 - DNA, 20 bp, synthetic construct
  misc_feature 1..20: note = chemically synthesized
  source 1..20: mol_type = other DNA
ctgcctcgccgcggcacagg

SEQ ID NO: 46554 - DNA, 20 bp, synthetic construct
  misc_feature 1..20: note = chemically synthesized
  source 1..20: mol_type = other DNA
tgcctcgccgcggcacaggt

SEQ ID NO: 46555 - DNA, 20 bp, synthetic construct
  misc_feature 1..20: note = chemically synthesized
  source 1..20: mol_type = other DNA
cgccgcggcacaggtgggtg

SEQ ID NO: 46556 - DNA, 20 bp, synthetic construct
  misc_feature 1..20: note = chemically synthesized
  source 1..20: mol_type = other DNA
gccgcggcacaggtgggtga

SEQ ID NO: 46557 - DNA, 20 bp, synthetic construct
  misc_feature 1..20: note = chemically synthesized
  source 1..20: mol_type = other DNA
cgcggcacaggtgggtgaag

SEQ ID NO: 46558 - DNA, 20 bp, synthetic construct
  misc_feature 1..20: note = chemically synthesized
  source 1..20: mol_type = other DNA
tgggtgaaggagtgaatgcc

SEQ ID NO: 46559 - DNA, 20 bp, synthetic construct
  misc_feature 1..20: note = chemically synthesized
  source 1..20: mol_type = other DNA
agtgaatgcctggaacgtac

SEQ ID NO: 46560 - DNA, 20 bp, synthetic construct
  misc_feature 1..20: note = chemically synthesized
  source 1..20: mol_type = other DNA
gtgaatgcctggaacgtact

SEQ ID NO: 46561 - DNA, 20 bp, synthetic construct
  misc_feature 1..20: note = chemically synthesized
  source 1..20: mol_type = other DNA
gaacgtactgggaactgcac

SEQ ID NO: 46562 - DNA, 20 bp, synthetic construct
  misc_feature 1..20: note = chemically synthesized
  source 1..20: mol_type = other DNA
aacgtactgggaactgcacc

SEQ ID NO: 46563 - DNA, 20 bp, synthetic construct
  misc_feature 1..20: note = chemically synthesized
  source 1..20: mol_type = other DNA
actgggaactgcaccaggca

SEQ ID NO: 46564 - DNA, 20 bp, synthetic construct
  misc_feature 1..20: note = chemically synthesized
  source 1..20: mol_type = other DNA
tgggaactgcaccaggcaca

SEQ ID NO: 46565 - DNA, 20 bp, synthetic construct
  misc_feature 1..20: note = chemically synthesized
  source 1..20: mol_type = other DNA
aactgcaccaggcacagaga

SEQ ID NO: 46566 - DNA, 20 bp, synthetic construct
  misc_feature 1..20: note = chemically synthesized
  source 1..20: mol_type = other DNA
tgcaccaggcacagagaaag

SEQ ID NO: 46567 - DNA, 20 bp, synthetic construct
  misc_feature 1..20: note = chemically synthesized
  source 1..20: mol_type = other DNA
gcaccaggcacagagaaagc

SEQ ID NO: 46568 - DNA, 20 bp, synthetic construct
  misc_feature 1..20: note = chemically synthesized
  source 1..20: mol_type = other DNA
agaaagcgggcttgccatta

SEQ ID NO: 46569 - DNA, 20 bp, synthetic construct
  misc_feature 1..20: note = chemically synthesized
  source 1..20: mol_type = other DNA
aagcgggcttgccattatag

SEQ ID NO: 46570 - DNA, 20 bp, synthetic construct
  misc_feature 1..20: note = chemically synthesized
  source 1..20: mol_type = other DNA
agcgggcttgccattatagt

SEQ ID NO: 46571 - DNA, 20 bp, synthetic construct
  misc_feature 1..20: note = chemically synthesized
  source 1..20: mol_type = other DNA
cattatagtgggttccgatt

SEQ ID NO: 46572 - DNA, 20 bp, synthetic construct
  misc_feature 1..20: note = chemically synthesized
  source 1..20: mol_type = other DNA
tagtgggttccgatttggtt

SEQ ID NO: 46573 - DNA, 20 bp, synthetic construct
  misc_feature 1..20: note = chemically synthesized
  source 1..20: mol_type = other DNA
ccgatttggtttggaaaaca

SEQ ID NO: 46574 - DNA, 20 bp, synthetic construct
  misc_feature 1..20: note = chemically synthesized
  source 1..20: mol_type = other DNA
cgatttggtttggaaaacat

SEQ ID NO: 46575 - DNA, 20 bp, synthetic construct
  misc_feature 1..20: note = chemically synthesized
  source 1..20: mol_type = other DNA
tttggtttggaaaacatggg

SEQ ID NO: 46576 - DNA, 20 bp, synthetic construct
  misc_feature 1..20: note = chemically synthesized
  source 1..20: mol_type = other DNA
ggtttggaaaacatgggcag

SEQ ID NO: 46577 - DNA, 20 bp, synthetic construct
  misc_feature 1..20: note = chemically synthesized
  source 1..20: mol_type = other DNA
tttggaaaacatgggcagcg

SEQ ID NO: 46578 - DNA, 20 bp, synthetic construct
  misc_feature 1..20: note = chemically synthesized
  source 1..20: mol_type = other DNA
ttggaaaacatgggcagcgg

SEQ ID NO: 46579 - DNA, 20 bp, synthetic construct
  misc_feature 1..20: note = chemically synthesized
  source 1..20: mol_type = other DNA
tggaaaacatgggcagcgga

SEQ ID NO: 46580 - DNA, 20 bp, synthetic construct
  misc_feature 1..20: note = chemically synthesized
  source 1..20: mol_type = other DNA
aaaacatgggcagcggaggg

SEQ ID NO: 46581 - DNA, 20 bp, synthetic construct
  misc_feature 1..20: note = chemically synthesized
  source 1..20: mol_type = other DNA
aacatgggcagcggagggtg

SEQ ID NO: 46582 - DNA, 20 bp, synthetic construct
  misc_feature 1..20: note = chemically synthesized
  source 1..20: mol_type = other DNA
acatgggcagcggagggtgg

SEQ ID NO: 46583 - DNA, 20 bp, synthetic construct
  misc_feature 1..20: note = chemically synthesized
  source 1..20: mol_type = other DNA
catgggcagcggagggtgga

SEQ ID NO: 46584 - DNA, 20 bp, synthetic construct
  misc_feature 1..20: note = chemically synthesized
  source 1..20: mol_type = other DNA
gcagcggagggtggagggcc

SEQ ID NO: 46585 - DNA, 20 bp, synthetic construct
  misc_feature 1..20: note = chemically synthesized
  source 1..20: mol_type = other DNA
agcggagggtggagggcctg

SEQ ID NO: 46586 - DNA, 20 bp, synthetic construct
  misc_feature 1..20: note = chemically synthesized
  source 1..20: mol_type = other DNA
cggagggtggagggcctgga

SEQ ID NO: 46587 - DNA, 20 bp, synthetic construct
  misc_feature 1..20: note = chemically synthesized
  source 1..20: mol_type = other DNA
agggtggagggcctggagag

SEQ ID NO: 46588 - DNA, 20 bp, synthetic construct
  misc_feature 1..20: note = chemically synthesized
  source 1..20: mol_type = other DNA
gggtggagggcctggagaga

SEQ ID NO: 46589 - DNA, 20 bp, synthetic construct
  misc_feature 1..20: note = chemically synthesized
  source 1..20: mol_type = other DNA
ctggagagaaggccctaccc

SEQ ID NO: 46590 - DNA, 20 bp, synthetic construct
  misc_feature 1..20: note = chemically synthesized
  source 1..20: mol_type = other DNA
agagaaggccctacccgaga

SEQ ID NO: 46591 - DNA, 20 bp, synthetic construct
  misc_feature 1..20: note = chemically synthesized
  source 1..20: mol_type = other DNA
gagaaggccctacccgagac

SEQ ID NO: 46592 - DNA, 20 bp, synthetic construct
  misc_feature 1..20: note = chemically synthesized
  source 1..20: mol_type = other DNA
agaaggccctacccgagaca

SEQ ID NO: 46593 - DNA, 20 bp, synthetic construct
  misc_feature 1..20: note = chemically synthesized
  source 1..20: mol_type = other DNA
gaaggccctacccgagacag

SEQ ID NO: 46594 - DNA, 20 bp, synthetic construct
  misc_feature 1..20: note = chemically synthesized
  source 1..20: mol_type = other DNA
ggccctacccgagacagggg

SEQ ID NO: 46595 - DNA, 20 bp, synthetic construct
  misc_feature 1..20: note = chemically synthesized
  source 1..20: mol_type = other DNA
gccctacccgagacaggggc

SEQ ID NO: 46596 - DNA, 20 bp, synthetic construct
  misc_feature 1..20: note = chemically synthesized
  source 1..20: mol_type = other DNA
ccctacccgagacaggggcg

SEQ ID NO: 46597 - DNA, 20 bp, synthetic construct
  misc_feature 1..20: note = chemically synthesized
  source 1..20: mol_type = other DNA
tacccgagacaggggcgggg

SEQ ID NO: 46598 - DNA, 20 bp, synthetic construct
  misc_feature 1..20: note = chemically synthesized
  source 1..20: mol_type = other DNA
acccgagacaggggcggggt

SEQ ID NO: 46599 - DNA, 20 bp, synthetic construct
  misc_feature 1..20: note = chemically synthesized
  source 1..20: mol_type = other DNA
cgagacaggggcggggtggg

SEQ ID NO: 46600 - DNA, 20 bp, synthetic construct
  misc_feature 1..20: note = chemically synthesized
  source 1..20: mol_type = other DNA
gagacaggggcggggtggga

SEQ ID NO: 46601 - DNA, 20 bp, synthetic construct
  misc_feature 1..20: note = chemically synthesized
  source 1..20: mol_type = other DNA
caggggcggggtgggaagga

SEQ ID NO: 46602 - DNA, 20 bp, synthetic construct
  misc_feature 1..20: note = chemically synthesized
  source 1..20: mol_type = other DNA
gggcggggtgggaaggacgg

SEQ ID NO: 46603 - DNA, 20 bp, synthetic construct
  misc_feature 1..20: note = chemically synthesized
  source 1..20: mol_type = other DNA
gtgggaaggacggcagatgc

SEQ ID NO: 46604 - DNA, 20 bp, synthetic construct
  misc_feature 1..20: note = chemically synthesized
  source 1..20: mol_type = other DNA
tgggaaggacggcagatgct

SEQ ID NO: 46605 - DNA, 20 bp, synthetic construct
  misc_feature 1..20: note = chemically synthesized
  source 1..20: mol_type = other DNA
ggaaggacggcagatgctgg

SEQ ID NO: 46606 - DNA, 20 bp, synthetic construct
  misc_feature 1..20: note = chemically synthesized
  source 1..20: mol_type = other DNA
acggcagatgctgggagcac

SEQ ID NO: 46607 - DNA, 20 bp, synthetic construct
  misc_feature 1..20: note = chemically synthesized
  source 1..20: mol_type = other DNA
cggcagatgctgggagcacg

SEQ ID NO: 46608 - DNA, 20 bp, synthetic construct
  misc_feature 1..20: note = chemically synthesized
  source 1..20: mol_type = other DNA
gaggcaatttctttatgaca

SEQ ID NO: 46609 - DNA, 20 bp, synthetic construct
  misc_feature 1..20: note = chemically synthesized
  source 1..20: mol_type = other DNA
atgacacagaactcatgctc

SEQ ID NO: 46610 - DNA, 20 bp, synthetic construct
  misc_feature 1..20: note = chemically synthesized
  source 1..20: mol_type = other DNA
ctctagtattccatctgttt

SEQ ID NO: 46611 - DNA, 20 bp, synthetic construct
  misc_feature 1..20: note = chemically synthesized
  source 1..20: mol_type = other DNA
tattccatctgtttcagccg

SEQ ID NO: 46612 - DNA, 20 bp, synthetic construct
  misc_feature 1..20: note = chemically synthesized
  source 1..20: mol_type = other DNA
catctgtttcagccgaagaa

SEQ ID NO: 46613 - DNA, 20 bp, synthetic construct
  misc_feature 1..20: note = chemically synthesized
  source 1..20: mol_type = other DNA
tttcagccgaagaaaagaac

SEQ ID NO: 46614 - DNA, 20 bp, synthetic construct
  misc_feature 1..20: note = chemically synthesized
  source 1..20: mol_type = other DNA
ccgaagaaaagaaccagctg

SEQ ID NO: 46615 - DNA, 20 bp, synthetic construct
  misc_feature 1..20: note = chemically synthesized
  source 1..20: mol_type = other DNA
cgaagaaaagaaccagctga

SEQ ID NO: 46616 - DNA, 20 bp, synthetic construct
  misc_feature 1..20: note = chemically synthesized
  source 1..20: mol_type = other DNA
gaagaaaagaaccagctgaa

SEQ ID NO: 46617 - DNA, 20 bp, synthetic construct
  misc_feature 1..20: note = chemically synthesized
  source 1..20: mol_type = other DNA
aagaaaagaaccagctgaag

SEQ ID NO: 46618 - DNA, 20 bp, synthetic construct
  misc_feature 1..20: note = chemically synthesized
  source 1..20: mol_type = other DNA
aaaagaaccagctgaagggg

SEQ ID NO: 46619 - DNA, 20 bp, synthetic construct
  misc_feature 1..20: note = chemically synthesized
  source 1..20: mol_type = other DNA
aaagaaccagctgaaggggc

SEQ ID NO: 46620 - DNA, 20 bp, synthetic construct
  misc_feature 1..20: note = chemically synthesized
  source 1..20: mol_type = other DNA
aagaaccagctgaaggggca

SEQ ID NO: 46621 - DNA, 20 bp, synthetic construct
  misc_feature 1..20: note = chemically synthesized
  source 1..20: mol_type = other DNA
agaaccagctgaaggggcag

SEQ ID NO: 46622 - DNA, 20 bp, synthetic construct
  misc_feature 1..20: note = chemically synthesized
  source 1..20: mol_type = other DNA
aaccagctgaaggggcaggg

SEQ ID NO: 46623 - DNA, 20 bp, synthetic construct
  misc_feature 1..20: note = chemically synthesized
  source 1..20: mol_type = other DNA
cagctgaaggggcaggggag

SEQ ID NO: 46624 - DNA, 20 bp, synthetic construct
  misc_feature 1..20: note = chemically synthesized
  source 1..20: mol_type = other DNA
agctgaaggggcaggggaga

SEQ ID NO: 46625 - DNA, 20 bp, synthetic construct
  misc_feature 1..20: note = chemically synthesized
  source 1..20: mol_type = other DNA
gctgaaggggcaggggagaa

SEQ ID NO: 46626 - DNA, 20 bp, synthetic construct
  misc_feature 1..20: note = chemically synthesized
  source 1..20: mol_type = other DNA
ctgaaggggcaggggagaag

SEQ ID NO: 46627 - DNA, 20 bp, synthetic construct
  misc_feature 1..20: note = chemically synthesized
  source 1..20: mol_type = other DNA
aaggggcaggggagaagggg

SEQ ID NO: 46628 - DNA, 20 bp, synthetic construct
  misc_feature 1..20: note = chemically synthesized
  source 1..20: mol_type = other DNA
ggggcaggggagaaggggcg

SEQ ID NO: 46629 - DNA, 20 bp, synthetic construct
  misc_feature 1..20: note = chemically synthesized
  source 1..20: mol_type = other DNA
gggcaggggagaaggggcgg

SEQ ID NO: 46630 - DNA, 20 bp, synthetic construct
  misc_feature 1..20: note = chemically synthesized
  source 1..20: mol_type = other DNA
gaaggggcggaggtattctc

SEQ ID NO: 46631 - DNA, 20 bp, synthetic construct
  misc_feature 1..20: note = chemically synthesized
  source 1..20: mol_type = other DNA
aaggggcggaggtattctcg

SEQ ID NO: 46632 - DNA, 20 bp, synthetic construct
  misc_feature 1..20: note = chemically synthesized
  source 1..20: mol_type = other DNA
gaggtattctcgaggcccat

SEQ ID NO: 46633 - DNA, 20 bp, synthetic construct
  misc_feature 1..20: note = chemically synthesized
  source 1..20: mol_type = other DNA
cgaggcccattggcgtcctt

SEQ ID NO: 46634 - DNA, 20 bp, synthetic construct
  misc_feature 1..20: note = chemically synthesized
  source 1..20: mol_type = other DNA
gaggcccattggcgtccttt

SEQ ID NO: 46635 - DNA, 20 bp, synthetic construct
  misc_feature 1..20: note = chemically synthesized
  source 1..20: mol_type = other DNA
cattggcgtcctttaggact

SEQ ID NO: 46636 - DNA, 20 bp, synthetic construct
  misc_feature 1..20: note = chemically synthesized
  source 1..20: mol_type = other DNA
attggcgtcctttaggactc

SEQ ID NO: 46637 - DNA, 20 bp, synthetic construct
  misc_feature 1..20: note = chemically synthesized
  source 1..20: mol_type = other DNA
ggcgtcctttaggactcagg

SEQ ID NO: 46638 - DNA, 20 bp, synthetic construct
  misc_feature 1..20: note = chemically synthesized
  source 1..20: mol_type = other DNA
gcgtcctttaggactcaggc

SEQ ID NO: 46639 - DNA, 20 bp, synthetic construct
  misc_feature 1..20: note = chemically synthesized
  source 1..20: mol_type = other DNA
cgtcctttaggactcaggca

SEQ ID NO: 46640 - DNA, 20 bp, synthetic construct
  misc_feature 1..20: note = chemically synthesized
  source 1..20: mol_type = other DNA
cctttaggactcaggcaggg

SEQ ID NO: 46641 - DNA, 20 bp, synthetic construct
  misc_feature 1..20: note = chemically synthesized
  source 1..20: mol_type = other DNA
ctttaggactcaggcaggga

SEQ ID NO: 46642 - DNA, 20 bp, synthetic construct
  misc_feature 1..20: note = chemically synthesized
  source 1..20: mol_type = other DNA
tttaggactcaggcagggaa

SEQ ID NO: 46643 - DNA, 20 bp, synthetic construct
  misc_feature 1..20: note = chemically synthesized
  source 1..20: mol_type = other DNA
ctcaggcagggaagggccct

SEQ ID NO: 46644 - DNA, 20 bp, synthetic construct
  misc_feature 1..20: note = chemically synthesized
  source 1..20: mol_type = other DNA
gggaagggcccttggtgctc

SEQ ID NO: 46645 - DNA, 20 bp, synthetic construct
  misc_feature 1..20: note = chemically synthesized
  source 1..20: mol_type = other DNA
gaagggcccttggtgctctg

SEQ ID NO: 46646 - DNA, 20 bp, synthetic construct
  misc_feature 1..20: note = chemically synthesized
  source 1..20: mol_type = other DNA
ggcccttggtgctctggagc

SEQ ID NO: 46647 - DNA, 20 bp, synthetic construct
  misc_feature 1..20: note = chemically synthesized
  source 1..20: mol_type = other DNA
cccttggtgctctggagccg

SEQ ID NO: 46648 - DNA, 20 bp, synthetic construct
  misc_feature 1..20: note = chemically synthesized
  source 1..20: mol_type = other DNA
ccttggtgctctggagccgg

SEQ ID NO: 46649 - DNA, 20 bp, synthetic construct
  misc_feature 1..20: note = chemically synthesized
  source 1..20: mol_type = other DNA
tggtgctctggagccggagg

SEQ ID NO: 46650 - DNA, 20 bp, synthetic construct
  misc_feature 1..20: note = chemically synthesized
  source 1..20: mol_type = other DNA
ggagccggaggtggtgcgcc

SEQ ID NO: 46651 - DNA, 20 bp, synthetic construct
  misc_feature 1..20: note = chemically synthesized
  source 1..20: mol_type = other DNA
ggaggtggtgcgcctggtac

SEQ ID NO: 46652 - DNA, 20 bp, synthetic construct
  misc_feature 1..20: note = chemically synthesized
  source 1..20: mol_type = other DNA
gaggtggtgcgcctggtact

SEQ ID NO: 46653 - DNA, 20 bp, synthetic construct
  misc_feature 1..20: note = chemically synthesized
  source 1..20: mol_type = other DNA
tgcgcctggtactgggaccc

SEQ ID NO: 46654 - DNA, 20 bp, synthetic construct
  misc_feature 1..20: note = chemically synthesized
  source 1..20: mol_type = other DNA
cgcctggtactgggaccccg

SEQ ID NO: 46655 - DNA, 20 bp, synthetic construct
  misc_feature 1..20: note = chemically synthesized
  source 1..20: mol_type = other DNA
ggtactgggaccccggagct

SEQ ID NO: 46656 - DNA, 20 bp, synthetic construct
  misc_feature 1..20: note = chemically synthesized
  source 1..20: mol_type = other DNA
tgggaccccggagctgagcc

SEQ ID NO: 46657 - DNA, 20 bp, synthetic construct
  misc_feature 1..20: note = chemically synthesized
  source 1..20: mol_type = other DNA
cggagctgagcccggcgcct

SEQ ID NO: 46658 - DNA, 20 bp, synthetic construct
  misc_feature 1..20: note = chemically synthesized
  source 1..20: mol_type = other DNA
gcccggcgcctcagcccacc

SEQ ID NO: 46659 - DNA, 20 bp, synthetic construct
  misc_feature 1..20: note = chemically synthesized
  source 1..20: mol_type = other DNA
ggctgtctgccgaccgtgtg

SEQ ID NO: 46660 - DNA, 20 bp, synthetic construct
  misc_feature 1..20: note = chemically synthesized
  source 1..20: mol_type = other DNA
gctgtctgccgaccgtgtgc

SEQ ID NO: 46661 - DNA, 20 bp, synthetic construct
  misc_feature 1..20: note = chemically synthesized
  source 1..20: mol_type = other DNA
ctgtctgccgaccgtgtgcg

SEQ ID NO: 46662 - DNA, 20 bp, synthetic construct
  misc_feature 1..20: note = chemically synthesized
  source 1..20: mol_type = other DNA
ctgccgaccgtgtgcggggc

SEQ ID NO: 46663 - DNA, 20 bp, synthetic construct
  misc_feature 1..20: note = chemically synthesized
  source 1..20: mol_type = other DNA
agtttgctcaacaactctgc

SEQ ID NO: 46664 - DNA, 20 bp, synthetic construct
  misc_feature 1..20: note = chemically synthesized
  source 1..20: mol_type = other DNA
tcaacaactctgccagcttc

SEQ ID NO: 46665 - DNA, 20 bp, synthetic construct
  misc_feature 1..20: note = chemically synthesized
  source 1..20: mol_type = other DNA
ctctgccagcttctggccct

SEQ ID NO: 46666 - DNA, 20 bp, synthetic construct
  misc_feature 1..20: note = chemically synthesized
  source 1..20: mol_type = other DNA
tctgccagcttctggccctc

SEQ ID NO: 46667 - DNA, 20 bp, synthetic construct
  misc_feature 1..20: note = chemically synthesized
  source 1..20: mol_type = other DNA
agcttctggccctcaggctg

SEQ ID NO: 46668 - DNA, 20 bp, synthetic construct
  misc_feature 1..20: note = chemically synthesized
  source 1..20: mol_type = other DNA
gcttctggccctcaggctgt

SEQ ID NO: 46669 - DNA, 20 bp, synthetic construct
  misc_feature 1..20: note = chemically synthesized
  source 1..20: mol_type = other DNA
tctggccctcaggctgtggg

SEQ ID NO: 46670 - DNA, 20 bp, synthetic construct
  misc_feature 1..20: note = chemically synthesized
  source 1..20: mol_type = other DNA
ggctgtgggaagcttcttcc

SEQ ID NO: 46671 - DNA, 20 bp, synthetic construct
  misc_feature 1..20: note = chemically synthesized
  source 1..20: mol_type = other DNA
gctgtgggaagcttcttccc

SEQ ID NO: 46672 - DNA, 20 bp, synthetic construct
  misc_feature 1..20: note = chemically synthesized
  source 1..20: mol_type = other DNA
ctgtgggaagcttcttcccg

SEQ ID NO: 46673 - DNA, 20 bp, synthetic construct
  misc_feature 1..20: note = chemically synthesized
  source 1..20: mol_type = other DNA
gggaagcttcttcccggggc

SEQ ID NO: 46674 - DNA, 20 bp, synthetic construct
  misc_feature 1..20: note = chemically synthesized
  source 1..20: mol_type = other DNA
tcttcccggggcgagaccac

SEQ ID NO: 46675 - DNA, 20 bp, synthetic construct
  misc_feature 1..20: note = chemically synthesized
  source 1..20: mol_type = other DNA
cgagaccactagctttttct

SEQ ID NO: 46676 - DNA, 20 bp, synthetic construct
  misc_feature 1..20: note = chemically synthesized
  source 1..20: mol_type = other DNA
tagctttttctaagtattac

SEQ ID NO: 46677 - DNA, 20 bp, synthetic construct
  misc_feature 1..20: note = chemically synthesized
  source 1..20: mol_type = other DNA
ttttctaagtattaccagcc

SEQ ID NO: 46678 - DNA, 20 bp, synthetic construct
  misc_feature 1..20: note = chemically synthesized
  source 1..20: mol_type = other DNA
tttctaagtattaccagccc

SEQ ID NO: 46679 - DNA, 20 bp, synthetic construct
  misc_feature 1..20: note = chemically synthesized
  source 1..20: mol_type = other DNA
agtattaccagcccaggact

SEQ ID NO: 46680 - DNA, 20 bp, synthetic construct
  misc_feature 1..20: note = chemically synthesized
  source 1..20: mol_type = other DNA
taccagcccaggacttggct

SEQ ID NO: 46681 - DNA, 20 bp, synthetic construct
  misc_feature 1..20: note = chemically synthesized
  source 1..20: mol_type = other DNA
accagcccaggacttggctg

SEQ ID NO: 46682 - DNA, 20 bp, synthetic construct
  misc_feature 1..20: note = chemically synthesized
  source 1..20: mol_type = other DNA
ggctgaggttctgtgtcccc

SEQ ID NO: 46683 - DNA, 20 bp, synthetic construct
  misc_feature 1..20: note = chemically synthesized
  source 1..20: mol_type = other DNA
aggttctgtgtcccccagct

SEQ ID NO: 46684 - DNA, 20 bp, synthetic construct
  misc_feature 1..20: note = chemically synthesized
  source 1..20: mol_type = other DNA
gttctgtgtcccccagcttg

SEQ ID NO: 46685 - DNA, 20 bp, synthetic construct
  misc_feature 1..20: note = chemically synthesized
  source 1..20: mol_type = other DNA
tgtgtcccccagcttggagt

SEQ ID NO: 46686 - DNA, 20 bp, synthetic construct
  misc_feature 1..20: note = chemically synthesized
  source 1..20: mol_type = other DNA
ccccagcttggagtcagatg

SEQ ID NO: 46687 - DNA, 20 bp, synthetic construct
  misc_feature 1..20: note = chemically synthesized
  source 1..20: mol_type = other DNA
cccagcttggagtcagatgt

SEQ ID NO: 46688 - DNA, 20 bp, synthetic construct
  misc_feature 1..20: note = chemically synthesized
  source 1..20: mol_type = other DNA
ccagcttggagtcagatgtg

SEQ ID NO: 46689 - DNA, 20 bp, synthetic construct
  misc_feature 1..20: note = chemically synthesized
  source 1..20: mol_type = other DNA
tcagatgtggggttgaatct

SEQ ID NO: 46690 - DNA, 20 bp, synthetic construct
  misc_feature 1..20: note = chemically synthesized
  source 1..20: mol_type = other DNA
gaatcttggcttcctctcac

SEQ ID NO: 46691 - DNA, 20 bp, synthetic construct
  misc_feature 1..20: note = chemically synthesized
  source 1..20: mol_type = other DNA
tggcttcctctcactagctg

SEQ ID NO: 46692 - DNA, 20 bp, synthetic construct
  misc_feature 1..20: note = chemically synthesized
  source 1..20: mol_type = other DNA
cactagctgtggtgcttgac

SEQ ID NO: 46693 - DNA, 20 bp, synthetic construct
  misc_feature 1..20: note = chemically synthesized
  source 1..20: mol_type = other DNA
ttgacaagtcacttatcctt

SEQ ID NO: 46694 - DNA, 20 bp, synthetic construct
  misc_feature 1..20: note = chemically synthesized
  source 1..20: mol_type = other DNA
ctccattgcctaatctttaa

SEQ ID NO: 46695 - DNA, 20 bp, synthetic construct
  misc_feature 1..20: note = chemically synthesized
  source 1..20: mol_type = other DNA
tccattgcctaatctttaaa

SEQ ID NO: 46696 - DNA, 20 bp, synthetic construct
  misc_feature 1..20: note = chemically synthesized
  source 1..20: mol_type = other DNA
ccattgcctaatctttaaaa

SEQ ID NO: 46697 - DNA, 20 bp, synthetic construct
  misc_feature 1..20: note = chemically synthesized
  source 1..20: mol_type = other DNA
attgcctaatctttaaaagg

SEQ ID NO: 46698 - DNA, 20 bp, synthetic construct
  misc_feature 1..20: note = chemically synthesized
  source 1..20: mol_type = other DNA
ttgcctaatctttaaaaggg

SEQ ID NO: 46699 - DNA, 20 bp, synthetic construct
  misc_feature 1..20: note = chemically synthesized
  source 1..20: mol_type = other DNA
ggaggtgacaatcgtcccta

SEQ ID NO: 46700 - DNA, 20 bp, synthetic construct
  misc_feature 1..20: note = chemically synthesized
  source 1..20: mol_type = other DNA
tgacaatcgtccctacggct

SEQ ID NO: 46701 - DNA, 20 bp, synthetic construct
  misc_feature 1..20: note = chemically synthesized
  source 1..20: mol_type = other DNA
caatcgtccctacggctcag

SEQ ID NO: 46702 - DNA, 20 bp, synthetic construct
  misc_feature 1..20: note = chemically synthesized
  source 1..20: mol_type = other DNA
tcgtccctacggctcagtgg

SEQ ID NO: 46703 - DNA, 20 bp, synthetic construct
  misc_feature 1..20: note = chemically synthesized
  source 1..20: mol_type = other DNA
tccctacggctcagtggcag

SEQ ID NO: 46704 - DNA, 20 bp, synthetic construct
  misc_feature 1..20: note = chemically synthesized
  source 1..20: mol_type = other DNA
tacggctcagtggcagcaga

SEQ ID NO: 46705 - DNA, 20 bp, synthetic construct
  misc_feature 1..20: note = chemically synthesized
  source 1..20: mol_type = other DNA
acggctcagtggcagcagat

SEQ ID NO: 46706 - DNA, 20 bp, synthetic construct
  misc_feature 1..20: note = chemically synthesized
  source 1..20: mol_type = other DNA
cggctcagtggcagcagatg

SEQ ID NO: 46707 - DNA, 20 bp, synthetic construct
  misc_feature 1..20: note = chemically synthesized
  source 1..20: mol_type = other DNA
gctcagtggcagcagatggg

SEQ ID NO: 46708 - DNA, 20 bp, synthetic construct
  misc_feature 1..20: note = chemically synthesized
  source 1..20: mol_type = other DNA
tggcagcagatggggagatg

SEQ ID NO: 46709 - DNA, 20 bp, synthetic construct
  misc_feature 1..20: note = chemically synthesized
  source 1..20: mol_type = other DNA
ggcagcagatggggagatga

SEQ ID NO: 46710 - DNA, 20 bp, synthetic construct
  misc_feature 1..20: note = chemically synthesized
  source 1..20: mol_type = other DNA
gcagcagatggggagatgaa

SEQ ID NO: 46711 - DNA, 20 bp, synthetic construct
  misc_feature 1..20: note = chemically synthesized
  source 1..20: mol_type = other DNA
cagatggggagatgaaggga

SEQ ID NO: 46712 - DNA, 20 bp, synthetic construct
  misc_feature 1..20: note = chemically synthesized
  source 1..20: mol_type = other DNA
gggaaagttctgttgaccat

SEQ ID NO: 46713 - DNA, 20 bp, synthetic construct
  misc_feature 1..20: note = chemically synthesized
  source 1..20: mol_type = other DNA
catgagtgaacttacaatgc

SEQ ID NO: 46714 - DNA, 20 bp, synthetic construct
  misc_feature 1..20: note = chemically synthesized
  source 1..20: mol_type = other DNA
tgaacttacaatgcaagccc

SEQ ID NO: 46715 - DNA, 20 bp, synthetic construct
  misc_feature 1..20: note = chemically synthesized
  source 1..20: mol_type = other DNA
gaacttacaatgcaagcccc

SEQ ID NO: 46716 - DNA, 20 bp, synthetic construct
  misc_feature 1..20: note = chemically synthesized
  source 1..20: mol_type = other DNA
aacttacaatgcaagccccg

SEQ ID NO: 46717 - DNA, 20 bp, synthetic construct
  misc_feature 1..20: note = chemically synthesized
  source 1..20: mol_type = other DNA
acttacaatgcaagccccgg

SEQ ID NO: 46718 - DNA, 20 bp, synthetic construct
  misc_feature 1..20: note = chemically synthesized
  source 1..20: mol_type = other DNA
cttacaatgcaagccccggg

SEQ ID NO: 46719 - DNA, 20 bp, synthetic construct
  misc_feature 1..20: note = chemically synthesized
  source 1..20: mol_type = other DNA
agccccggggggatcacttg

SEQ ID NO: 46720 - DNA, 20 bp, synthetic construct
  misc_feature 1..20: note = chemically synthesized
  source 1..20: mol_type = other DNA
tgcagttttgtccctgtctg

SEQ ID NO: 46721 - DNA, 20 bp, synthetic construct
  misc_feature 1..20: note = chemically synthesized
  source 1..20: mol_type = other DNA
ctgtctgcagtgtgacctgt

SEQ ID NO: 46722 - DNA, 20 bp, synthetic construct
  misc_feature 1..20: note = chemically synthesized
  source 1..20: mol_type = other DNA
attgtctttgctccaaacca

SEQ ID NO: 46723 - DNA, 20 bp, synthetic construct
  misc_feature 1..20: note = chemically synthesized
  source 1..20: mol_type = other DNA
ttgctccaaaccacagctcc

SEQ ID NO: 46724 - DNA, 20 bp, synthetic construct
  misc_feature 1..20: note = chemically synthesized
  source 1..20: mol_type = other DNA
tgctccaaaccacagctcct

SEQ ID NO: 46725 - DNA, 20 bp, synthetic construct
  misc_feature 1..20: note = chemically synthesized
  source 1..20: mol_type = other DNA
gctccaaaccacagctcctg

SEQ ID NO: 46726 - DNA, 20 bp, synthetic construct
  misc_feature 1..20: note = chemically synthesized
  source 1..20: mol_type = other DNA
ccaaaccacagctcctgggg

SEQ ID NO: 46727 - DNA, 20 bp, synthetic construct
  misc_feature 1..20: note = chemically synthesized
  source 1..20: mol_type = other DNA
aaaccacagctcctggggca

SEQ ID NO: 46728 - DNA, 20 bp, synthetic construct
  misc_feature 1..20: note = chemically synthesized
  source 1..20: mol_type = other DNA
aaccacagctcctggggcag

SEQ ID NO: 46729 - DNA, 20 bp, synthetic construct
  misc_feature 1..20: note = chemically synthesized
  source 1..20: mol_type = other DNA
accacagctcctggggcaga

SEQ ID NO: 46730 - DNA, 20 bp, synthetic construct
  misc_feature 1..20: note = chemically synthesized
  source 1..20: mol_type = other DNA
ccacagctcctggggcagag

SEQ ID NO: 46731 - DNA, 20 bp, synthetic construct
  misc_feature 1..20: note = chemically synthesized
  source 1..20: mol_type = other DNA
ggggaaaattctgccactca

SEQ ID NO: 46732 - DNA, 20 bp, synthetic construct
  misc_feature 1..20: note = chemically synthesized
  source 1..20: mol_type = other DNA
gcctgcccacgcttctgtct

SEQ ID NO: 46733 - DNA, 20 bp, synthetic construct
  misc_feature 1..20: note = chemically synthesized
  source 1..20: mol_type = other DNA
acgcttctgtctgagtgtgc

SEQ ID NO: 46734 - DNA, 20 bp, synthetic construct
  misc_feature 1..20: note = chemically synthesized
  source 1..20: mol_type = other DNA
cgcttctgtctgagtgtgct

SEQ ID NO: 46735 - DNA, 20 bp, synthetic construct
  misc_feature 1..20: note = chemically synthesized
  source 1..20: mol_type = other DNA
ttctgtctgagtgtgctggg

SEQ ID NO: 46736 - DNA, 20 bp, synthetic construct
  misc_feature 1..20: note = chemically synthesized
  source 1..20: mol_type = other DNA
tgtctgagtgtgctgggtgg

SEQ ID NO: 46737 - DNA, 20 bp, synthetic construct
  misc_feature 1..20: note = chemically synthesized
  source 1..20: mol_type = other DNA
gtctgagtgtgctgggtggc

SEQ ID NO: 46738 - DNA, 20 bp, synthetic construct
  misc_feature 1..20: note = chemically synthesized
  source 1..20: mol_type = other DNA
gagtgtgctgggtggcagga

SEQ ID NO: 46739 - DNA, 20 bp, synthetic construct
  misc_feature 1..20: note = chemically synthesized
  source 1..20: mol_type = other DNA
gtgctgggtggcaggatggc

SEQ ID NO: 46740 - DNA, 20 bp, synthetic construct
  misc_feature 1..20: note = chemically synthesized
  source 1..20: mol_type = other DNA
caggatggcaagtccttact

SEQ ID NO: 46741 - DNA, 20 bp, synthetic construct
  misc_feature 1..20: note = chemically synthesized
  source 1..20: mol_type = other DNA
tggcaagtccttactcagct

SEQ ID NO: 46742 - DNA, 20 bp, synthetic construct
  misc_feature 1..20: note = chemically synthesized
  source 1..20: mol_type = other DNA
agtccttactcagctcagta

SEQ ID NO: 46743 - DNA, 20 bp, synthetic construct
  misc_feature 1..20: note = chemically synthesized
  source 1..20: mol_type = other DNA
agccctcttccttgttccct

SEQ ID NO: 46744 - DNA, 20 bp, synthetic construct
  misc_feature 1..20: note = chemically synthesized
  source 1..20: mol_type = other DNA
cctgagcctttgactttctc

SEQ ID NO: 46745 - DNA, 20 bp, synthetic construct
  misc_feature 1..20: note = chemically synthesized
  source 1..20: mol_type = other DNA
ctgagcctttgactttctcg

SEQ ID NO: 46746 - DNA, 20 bp, synthetic construct
  misc_feature 1..20: note = chemically synthesized
  source 1..20: mol_type = other DNA
tgagcctttgactttctcga

SEQ ID NO: 46747 - DNA, 20 bp, synthetic construct
  misc_feature 1..20: note = chemically synthesized
  source 1..20: mol_type = other DNA
gactttctcgagggatgttg

SEQ ID NO: 46748 - DNA, 20 bp, synthetic construct
  misc_feature 1..20: note = chemically synthesized
  source 1..20: mol_type = other DNA
actttctcgagggatgttgt

SEQ ID NO: 46749 - DNA, 20 bp, synthetic construct
  misc_feature 1..20: note = chemically synthesized
  source 1..20: mol_type = other DNA
ctttctcgagggatgttgtg

SEQ ID NO: 46750 - DNA, 20 bp, synthetic construct
  misc_feature 1..20: note = chemically synthesized
  source 1..20: mol_type = other DNA
cgagggatgttgtggggttg

SEQ ID NO: 46751 - DNA, 20 bp, synthetic construct
  misc_feature 1..20: note = chemically synthesized
  source 1..20: mol_type = other DNA
ggatgttgtggggttgtggc

SEQ ID NO: 46752 - DNA, 20 bp, synthetic construct
  misc_feature 1..20: note = chemically synthesized
  source 1..20: mol_type = other DNA
gatgttgtggggttgtggcc

SEQ ID NO: 46753 - DNA, 20 bp, synthetic construct
  misc_feature 1..20: note = chemically synthesized
  source 1..20: mol_type = other DNA
tgtggggttgtggccaggat

SEQ ID NO: 46754 - DNA, 20 bp, synthetic construct
  misc_feature 1..20: note = chemically synthesized
  source 1..20: mol_type = other DNA
gggttgtggccaggataaga

SEQ ID NO: 46755 - DNA, 20 bp, synthetic construct
  misc_feature 1..20: note = chemically synthesized
  source 1..20: mol_type = other DNA
ggttgtggccaggataagaa

SEQ ID NO: 46756 - DNA, 20 bp, synthetic construct
  misc_feature 1..20: note = chemically synthesized
  source 1..20: mol_type = other DNA
gttgtggccaggataagaaa

SEQ ID NO: 46757 - DNA, 20 bp, synthetic construct
  misc_feature 1..20: note = chemically synthesized
  source 1..20: mol_type = other DNA
aggataagaaagggcatttc

SEQ ID NO: 46758 - DNA, 20 bp, synthetic construct
  misc_feature 1..20: note = chemically synthesized
  source 1..20: mol_type = other DNA
ctgctccaaaacaactgttc

SEQ ID NO: 46759 - DNA, 20 bp, synthetic construct
  misc_feature 1..20: note = chemically synthesized
  source 1..20: mol_type = other DNA
caaaacaactgttctggaaa

SEQ ID NO: 46760 - DNA, 20 bp, synthetic construct
  misc_feature 1..20: note = chemically synthesized
  source 1..20: mol_type = other DNA
acaactgttctggaaatagt

SEQ ID NO: 46761 - DNA, 20 bp, synthetic construct
  misc_feature 1..20: note = chemically synthesized
  source 1..20: mol_type = other DNA
aatagtgagtaccccatcct

SEQ ID NO: 46762 - DNA, 20 bp, synthetic construct
  misc_feature 1..20: note = chemically synthesized
  source 1..20: mol_type = other DNA
tagtgagtaccccatcctga

SEQ ID NO: 46763 - DNA, 20 bp, synthetic construct
  misc_feature 1..20: note = chemically synthesized
  source 1..20: mol_type = other DNA
agtgagtaccccatcctgag

SEQ ID NO: 46764 - DNA, 20 bp, synthetic construct
  misc_feature 1..20: note = chemically synthesized
  source 1..20: mol_type = other DNA
agtaccccatcctgagaggt

SEQ ID NO: 46765 - DNA, 20 bp, synthetic construct
  misc_feature 1..20: note = chemically synthesized
  source 1..20: mol_type = other DNA
ccccatcctgagaggtgagt

SEQ ID NO: 46766 - DNA, 20 bp, synthetic construct
  misc_feature 1..20: note = chemically synthesized
  source 1..20: mol_type = other DNA
catcctgagaggtgagtaag

SEQ ID NO: 46767 - DNA, 20 bp, synthetic construct
  misc_feature 1..20: note = chemically synthesized
  source 1..20: mol_type = other DNA
tcctgagaggtgagtaagca

SEQ ID NO: 46768 - DNA, 20 bp, synthetic construct
  misc_feature 1..20: note = chemically synthesized
  source 1..20: mol_type = other DNA
cctgagaggtgagtaagcag

SEQ ID NO: 46769 - DNA, 20 bp, synthetic construct
  misc_feature 1..20: note = chemically synthesized
  source 1..20: mol_type = other DNA
gctgtatgaccacctgaacc

SEQ ID NO: 46770 - DNA, 20 bp, synthetic construct
  misc_feature 1..20: note = chemically synthesized
  source 1..20: mol_type = other DNA
accacctgaaccaagccctt

SEQ ID NO: 46771 - DNA, 20 bp, synthetic construct
  misc_feature 1..20: note = chemically synthesized
  source 1..20: mol_type = other DNA
ccacctgaaccaagcccttg

SEQ ID NO: 46772 - DNA, 20 bp, synthetic construct
  misc_feature 1..20: note = chemically synthesized
  source 1..20: mol_type = other DNA
ccttgaggatgtttcttctc

SEQ ID NO: 46773 - DNA, 20 bp, synthetic construct
  misc_feature 1..20: note = chemically synthesized
  source 1..20: mol_type = other DNA
tgaggatgtttcttctctgg

SEQ ID NO: 46774 - DNA, 20 bp, synthetic construct
  misc_feature 1..20: note = chemically synthesized
  source 1..20: mol_type = other DNA
ggatgtttcttctctggtgg

SEQ ID NO: 46775 - DNA, 20 bp, synthetic construct
  misc_feature 1..20: note = chemically synthesized
  source 1..20: mol_type = other DNA
tttcttctctggtggaagtt

SEQ ID NO: 46776 - DNA, 20 bp, synthetic construct
  misc_feature 1..20: note = chemically synthesized
  source 1..20: mol_type = other DNA
tctctggtggaagtttggaa

SEQ ID NO: 46777 - DNA, 20 bp, synthetic construct
  misc_feature 1..20: note = chemically synthesized
  source 1..20: mol_type = other DNA
ctctggtggaagtttggaac

SEQ ID NO: 46778 - DNA, 20 bp, synthetic construct
  misc_feature 1..20: note = chemically synthesized
  source 1..20: mol_type = other DNA
ctggtggaagtttggaacag

SEQ ID NO: 46779 - DNA, 20 bp, synthetic construct
  misc_feature 1..20: note = chemically synthesized
  source 1..20: mol_type = other DNA
tttggaacaggagcctcctc

SEQ ID NO: 46780 - DNA, 20 bp, synthetic construct
  misc_feature 1..20: note = chemically synthesized
  source 1..20: mol_type = other DNA
tcatttattcattcattcaa

SEQ ID NO: 46781 - DNA, 20 bp, synthetic construct
  misc_feature 1..20: note = chemically synthesized
  source 1..20: mol_type = other DNA
ttcattcaatggttattttg

SEQ ID NO: 46782 - DNA, 20 bp, synthetic construct
  misc_feature 1..20: note = chemically synthesized
  source 1..20: mol_type = other DNA
tcattcaatggttattttgt

SEQ ID NO: 46783 - DNA, 20 bp, synthetic construct
  misc_feature 1..20: note = chemically synthesized
  source 1..20: mol_type = other DNA
tattttgtgggaatcgaatt

SEQ ID NO: 46784 - DNA, 20 bp, synthetic construct
  misc_feature 1..20: note = chemically synthesized
  source 1..20: mol_type = other DNA
tttagaatgaaaatattttt

SEQ ID NO: 46785 - DNA, 20 bp, synthetic construct
  misc_feature 1..20: note = chemically synthesized
  source 1..20: mol_type = other DNA
gaatgaaaatattttttggc

SEQ ID NO: 46786 - DNA, 20 bp, synthetic construct
  misc_feature 1..20: note = chemically synthesized
  source 1..20: mol_type = other DNA
tgaaaatattttttggcaag

SEQ ID NO: 46787 - DNA, 20 bp, synthetic construct
  misc_feature 1..20: note = chemically synthesized
  source 1..20: mol_type = other DNA
ggcaagcagaaaataatttt

SEQ ID NO: 46788 - DNA, 20 bp, synthetic construct
  misc_feature 1..20: note = chemically synthesized
  source 1..20: mol_type = other DNA
ttagaccaatccttttcttt

SEQ ID NO: 46789 - DNA, 20 bp, synthetic construct
  misc_feature 1..20: note = chemically synthesized
  source 1..20: mol_type = other DNA
aatccttttcttttagtcat

SEQ ID NO: 46790 - DNA, 20 bp, synthetic construct
  misc_feature 1..20: note = chemically synthesized
  source 1..20: mol_type = other DNA
tcttttagtcatgagaaact

SEQ ID NO: 46791 - DNA, 20 bp, synthetic construct
  misc_feature 1..20: note = chemically synthesized
  source 1..20: mol_type = other DNA
cttttagtcatgagaaactg

SEQ ID NO: 46792 - DNA, 20 bp, synthetic construct
  misc_feature 1..20: note = chemically synthesized
  source 1..20: mol_type = other DNA
agtcatgagaaactgaggcc

SEQ ID NO: 46793 - DNA, 20 bp, synthetic construct
  misc_feature 1..20: note = chemically synthesized
  source 1..20: mol_type = other DNA
tcatgagaaactgaggccca

SEQ ID NO: 46794 - DNA, 20 bp, synthetic construct
  misc_feature 1..20: note = chemically synthesized
  source 1..20: mol_type = other DNA
atgagaaactgaggcccaga

SEQ ID NO: 46795 - DNA, 20 bp, synthetic construct
  misc_feature 1..20: note = chemically synthesized
  source 1..20: mol_type = other DNA
gagaaactgaggcccagaga

SEQ ID NO: 46796 - DNA, 20 bp, synthetic construct
  misc_feature 1..20: note = chemically synthesized
  source 1..20: mol_type = other DNA
agaaactgaggcccagagag

SEQ ID NO: 46797 - DNA, 20 bp, synthetic construct
  misc_feature 1..20: note = chemically synthesized
  source 1..20: mol_type = other DNA
aaactgaggcccagagagag

SEQ ID NO: 46798 - DNA, 20 bp, synthetic construct
  misc_feature 1..20: note = chemically synthesized
  source 1..20: mol_type = other DNA
aactgaggcccagagagagg

SEQ ID NO: 46799 - DNA, 20 bp, synthetic construct
  misc_feature 1..20: note = chemically synthesized
  source 1..20: mol_type = other DNA
ccagagagaggaggtcaccc

SEQ ID NO: 46800 - DNA, 20 bp, synthetic construct
  misc_feature 1..20: note = chemically synthesized
  source 1..20: mol_type = other DNA
cagagagaggaggtcacccc

SEQ ID NO: 46801 - DNA, 20 bp, synthetic construct
  misc_feature 1..20: note = chemically synthesized
  source 1..20: mol_type = other DNA
ggaggtcaccccaggtgcat

SEQ ID NO: 46802 - DNA, 20 bp, synthetic construct
  misc_feature 1..20: note = chemically synthesized
  source 1..20: mol_type = other DNA
caccccaggtgcattagaac

SEQ ID NO: 46803 - DNA, 20 bp, synthetic construct
  misc_feature 1..20: note = chemically synthesized
  source 1..20: mol_type = other DNA
accccaggtgcattagaact

SEQ ID NO: 46804 - DNA, 20 bp, synthetic construct
  misc_feature 1..20: note = chemically synthesized
  source 1..20: mol_type = other DNA
gtgcattagaactgggtttc

SEQ ID NO: 46805 - DNA, 20 bp, synthetic construct
  misc_feature 1..20: note = chemically synthesized
  source 1..20: mol_type = other DNA
agaactgacactccactgca

SEQ ID NO: 46806 - DNA, 20 bp, synthetic construct
  misc_feature 1..20: note = chemically synthesized
  source 1..20: mol_type = other DNA
aactgacactccactgcaca

SEQ ID NO: 46807 - DNA, 20 bp, synthetic construct
  misc_feature 1..20: note = chemically synthesized
  source 1..20: mol_type = other DNA
caattcattcaatttttatt

SEQ ID NO: 46808 - DNA, 20 bp, synthetic construct
  misc_feature 1..20: note = chemically synthesized
  source 1..20: mol_type = other DNA
ttcattcaatttttatttag

SEQ ID NO: 46809 - DNA, 20 bp, synthetic construct
  misc_feature 1..20: note = chemically synthesized
  source 1..20: mol_type = other DNA
attcaatttttatttagcgg

SEQ ID NO: 46810 - DNA, 20 bp, synthetic construct
  misc_feature 1..20: note = chemically synthesized
  source 1..20: mol_type = other DNA
ttcaatttttatttagcgga

SEQ ID NO: 46811 - DNA, 20 bp, synthetic construct
  misc_feature 1..20: note = chemically synthesized
  source 1..20: mol_type = other DNA
tatttagcggaaggcatttt

SEQ ID NO: 46812 - DNA, 20 bp, synthetic construct
  misc_feature 1..20: note = chemically synthesized
  source 1..20: mol_type = other DNA
tagcggaaggcattttcaga

SEQ ID NO: 46813 - DNA, 20 bp, synthetic construct
  misc_feature 1..20: note = chemically synthesized
  source 1..20: mol_type = other DNA
agcggaaggcattttcagat

SEQ ID NO: 46814 - DNA, 20 bp, synthetic construct
  misc_feature 1..20: note = chemically synthesized
  source 1..20: mol_type = other DNA
cattttcagatgggtctttg

SEQ ID NO: 46815 - DNA, 20 bp, synthetic construct
  misc_feature 1..20: note = chemically synthesized
  source 1..20: mol_type = other DNA
cagatgggtctttgaagcat

SEQ ID NO: 46816 - DNA, 20 bp, synthetic construct
  misc_feature 1..20: note = chemically synthesized
  source 1..20: mol_type = other DNA
atgggtctttgaagcattag

SEQ ID NO: 46817 - DNA, 20 bp, synthetic construct
  misc_feature 1..20: note = chemically synthesized
  source 1..20: mol_type = other DNA
tgggtctttgaagcattagt

SEQ ID NO: 46818 - DNA, 20 bp, synthetic construct
  misc_feature 1..20: note = chemically synthesized
  source 1..20: mol_type = other DNA
ggtctttgaagcattagtag

SEQ ID NO: 46819 - DNA, 20 bp, synthetic construct
  misc_feature 1..20: note = chemically synthesized
  source 1..20: mol_type = other DNA
ttgaagcattagtaggagtt

SEQ ID NO: 46820 - DNA, 20 bp, synthetic construct
  misc_feature 1..20: note = chemically synthesized
  source 1..20: mol_type = other DNA
tagtaggagttcagcgatga

SEQ ID NO: 46821 - DNA, 20 bp, synthetic construct
  misc_feature 1..20: note = chemically synthesized
  source 1..20: mol_type = other DNA
ttcagcgatgatggtgtcat

SEQ ID NO: 46822 - DNA, 20 bp, synthetic construct
  misc_feature 1..20: note = chemically synthesized
  source 1..20: mol_type = other DNA
gtgtcatgagaattttattc

SEQ ID NO: 46823 - DNA, 20 bp, synthetic construct
  misc_feature 1..20: note = chemically synthesized
  source 1..20: mol_type = other DNA
tgtcatgagaattttattct

SEQ ID NO: 46824 - DNA, 20 bp, synthetic construct
  misc_feature 1..20: note = chemically synthesized
  source 1..20: mol_type = other DNA
tgagaattttattctaggat

SEQ ID NO: 46825 - DNA, 20 bp, synthetic construct
  misc_feature 1..20: note = chemically synthesized
  source 1..20: mol_type = other DNA
gagaattttattctaggatt

SEQ ID NO: 46826 - DNA, 20 bp, synthetic construct
  misc_feature 1..20: note = chemically synthesized
  source 1..20: mol_type = other DNA
gaattttattctaggattag

SEQ ID NO: 46827 - DNA, 20 bp, synthetic construct
  misc_feature 1..20: note = chemically synthesized
  source 1..20: mol_type = other DNA
aattttattctaggattagg

SEQ ID NO: 46828 - DNA, 20 bp, synthetic construct
  misc_feature 1..20: note = chemically synthesized
  source 1..20: mol_type = other DNA
attaggaggtaccatgaaca

SEQ ID NO: 46829 - DNA, 20 bp, synthetic construct
  misc_feature 1..20: note = chemically synthesized
  source 1..20: mol_type = other DNA
aggtaccatgaacaaagata

SEQ ID NO: 46830 - DNA, 20 bp, synthetic construct
  misc_feature 1..20: note = chemically synthesized
  source 1..20: mol_type = other DNA
gtaccatgaacaaagataca

SEQ ID NO: 46831 - DNA, 20 bp, synthetic construct
  misc_feature 1..20: note = chemically synthesized
  source 1..20: mol_type = other DNA
catgaacaaagatacagagc

SEQ ID NO: 46832 - DNA, 20 bp, synthetic construct
  misc_feature 1..20: note = chemically synthesized
  source 1..20: mol_type = other DNA
atgaacaaagatacagagct

SEQ ID NO: 46833 - DNA, 20 bp, synthetic construct
  misc_feature 1..20: note = chemically synthesized
  source 1..20: mol_type = other DNA
agatacagagctgggaaaac

SEQ ID NO: 46834 - DNA, 20 bp, synthetic construct
  misc_feature 1..20: note = chemically synthesized
  source 1..20: mol_type = other DNA
atacagagctgggaaaacca

SEQ ID NO: 46835 - DNA, 20 bp, synthetic construct
  misc_feature 1..20: note = chemically synthesized
  source 1..20: mol_type = other DNA
tacagagctgggaaaaccag

SEQ ID NO: 46836 - DNA, 20 bp, synthetic construct
  misc_feature 1..20: note = chemically synthesized
  source 1..20: mol_type = other DNA
agagctgggaaaaccagagg

SEQ ID NO: 46837 - DNA, 20 bp, synthetic construct
  misc_feature 1..20: note = chemically synthesized
  source 1..20: mol_type = other DNA
gctgggaaaaccagaggtgg

SEQ ID NO: 46838 - DNA, 20 bp, synthetic construct
  misc_feature 1..20: note = chemically synthesized
  source 1..20: mol_type = other DNA
gaaaaccagaggtggaagat

SEQ ID NO: 46839 - DNA, 20 bp, synthetic construct
  misc_feature 1..20: note = chemically synthesized
  source 1..20: mol_type = other DNA
aaaaccagaggtggaagata

SEQ ID NO: 46840 - DNA, 20 bp, synthetic construct
  misc_feature 1..20: note = chemically synthesized
  source 1..20: mol_type = other DNA
aaccagaggtggaagataag

SEQ ID NO: 46841 - DNA, 20 bp, synthetic construct
  misc_feature 1..20: note = chemically synthesized
  source 1..20: mol_type = other DNA
agataaggagcacatgtcca

SEQ ID NO: 46842 - DNA, 20 bp, synthetic construct
  misc_feature 1..20: note = chemically synthesized
  source 1..20: mol_type = other DNA
gttctttttctttttttttt

SEQ ID NO: 46843 - DNA, 20 bp, synthetic construct
  misc_feature 1..20: note = chemically synthesized
  source 1..20: mol_type = other DNA
tttttcttttttttttgaga

SEQ ID NO: 46844 - DNA, 20 bp, synthetic construct
  misc_feature 1..20: note = chemically synthesized
  source 1..20: mol_type = other DNA
tttcttttttttttgagatg

SEQ ID NO: 46845 - DNA, 20 bp, synthetic construct
  misc_feature 1..20: note = chemically synthesized
  source 1..20: mol_type = other DNA
ggagtttcgctcttgttgcc

SEQ ID NO: 46846 - DNA, 20 bp, synthetic construct
  misc_feature 1..20: note = chemically synthesized
  source 1..20: mol_type = other DNA
gagtttcgctcttgttgccc

SEQ ID NO: 46847 - DNA, 20 bp, synthetic construct
  misc_feature 1..20: note = chemically synthesized
  source 1..20: mol_type = other DNA
ttcgctcttgttgcccaggc

SEQ ID NO: 46848 - DNA, 20 bp, synthetic construct
  misc_feature 1..20: note = chemically synthesized
  source 1..20: mol_type = other DNA
cgctcttgttgcccaggctg

SEQ ID NO: 46849 - DNA, 20 bp, synthetic construct
  misc_feature 1..20: note = chemically synthesized
  source 1..20: mol_type = other DNA
ttgcccaggctggagtgcaa

SEQ ID NO: 46850 - DNA, 20 bp, synthetic construct
  misc_feature 1..20: note = chemically synthesized
  source 1..20: mol_type = other DNA
caggctggagtgcaatggtg

SEQ ID NO: 46851 - DNA, 20 bp, synthetic construct
  misc_feature 1..20: note = chemically synthesized
  source 1..20: mol_type = other DNA
ggagtgcaatggtgcagtct

SEQ ID NO: 46852 - DNA, 20 bp, synthetic construct
  misc_feature 1..20: note = chemically synthesized
  source 1..20: mol_type = other DNA
tcactgcaacatctgtctcc

SEQ ID NO: 46853 - DNA, 20 bp, synthetic construct
  misc_feature 1..20: note = chemically synthesized
  source 1..20: mol_type = other DNA
cactgcaacatctgtctccc

SEQ ID NO: 46854 - DNA, 20 bp, synthetic construct
  misc_feature 1..20: note = chemically synthesized
  source 1..20: mol_type = other DNA
aacatctgtctcccgggttc

SEQ ID NO: 46855 - DNA, 20 bp, synthetic construct
  misc_feature 1..20: note = chemically synthesized
  source 1..20: mol_type = other DNA
atctgtctcccgggttcaag

SEQ ID NO: 46856 - DNA, 20 bp, synthetic construct
  misc_feature 1..20: note = chemically synthesized
  source 1..20: mol_type = other DNA
ttcaagtggttctcctgcct

SEQ ID NO: 46857 - DNA, 20 bp, synthetic construct
  misc_feature 1..20: note = chemically synthesized
  source 1..20: mol_type = other DNA
ttctcctgcctcagcctccc

SEQ ID NO: 46858 - DNA, 20 bp, synthetic construct
  misc_feature 1..20: note = chemically synthesized
  source 1..20: mol_type = other DNA
tcctgcctcagcctcccaag

SEQ ID NO: 46859 - DNA, 20 bp, synthetic construct
  misc_feature 1..20: note = chemically synthesized
  source 1..20: mol_type = other DNA
gcctcagcctcccaagaagc

SEQ ID NO: 46860 - DNA, 20 bp, synthetic construct
  misc_feature 1..20: note = chemically synthesized
  source 1..20: mol_type = other DNA
cctcagcctcccaagaagct

SEQ ID NO: 46861 - DNA, 20 bp, synthetic construct
  misc_feature 1..20: note = chemically synthesized
  source 1..20: mol_type = other DNA
ctcccaagaagctgggatta

SEQ ID NO: 46862 - DNA, 20 bp, synthetic construct
  misc_feature 1..20: note = chemically synthesized
  source 1..20: mol_type = other DNA
tcccaagaagctgggattac

SEQ ID NO: 46863 - DNA, 20 bp, synthetic construct
  misc_feature 1..20: note = chemically synthesized
  source 1..20: mol_type = other DNA
caggtacctgccaccacgcc

SEQ ID NO: 46864 - DNA, 20 bp, synthetic construct
  misc_feature 1..20: note = chemically synthesized
  source 1..20: mol_type = other DNA
ccggctaatttttgtatttt

SEQ ID NO: 46865 - DNA, 20 bp, synthetic construct
  misc_feature 1..20: note = chemically synthesized
  source 1..20: mol_type = other DNA
gctaatttttgtatttttag

SEQ ID NO: 46866 - DNA, 20 bp, synthetic construct
  misc_feature 1..20: note = chemically synthesized
  source 1..20: mol_type = other DNA
taatttttgtatttttagta

SEQ ID NO: 46867 - DNA, 20 bp, synthetic construct
  misc_feature 1..20: note = chemically synthesized
  source 1..20: mol_type = other DNA
tttttgtatttttagtagag

SEQ ID NO: 46868 - DNA, 20 bp, synthetic construct
  misc_feature 1..20: note = chemically synthesized
  source 1..20: mol_type = other DNA
ttttgtatttttagtagaga

SEQ ID NO: 46869 - DNA, 20 bp, synthetic construct
  misc_feature 1..20: note = chemically synthesized
  source 1..20: mol_type = other DNA
tttgtatttttagtagagaa

SEQ ID NO: 46870 - DNA, 20 bp, synthetic construct
  misc_feature 1..20: note = chemically synthesized
  source 1..20: mol_type = other DNA
ttgtatttttagtagagaag

SEQ ID NO: 46871 - DNA, 20 bp, synthetic construct
  misc_feature 1..20: note = chemically synthesized
  source 1..20: mol_type = other DNA
gagaaggggtttcaccacgt

SEQ ID NO: 46872 - DNA, 20 bp, synthetic construct
  misc_feature 1..20: note = chemically synthesized
  source 1..20: mol_type = other DNA
aggggtttcaccacgttggc

SEQ ID NO: 46873 - DNA, 20 bp, synthetic construct
  misc_feature 1..20: note = chemically synthesized
  source 1..20: mol_type = other DNA
ggggtttcaccacgttggcc

SEQ ID NO: 46874 - DNA, 20 bp, synthetic construct
  misc_feature 1..20: note = chemically synthesized
  source 1..20: mol_type = other DNA
tttcaccacgttggccaggc

SEQ ID NO: 46875 - DNA, 20 bp, synthetic construct
  misc_feature 1..20: note = chemically synthesized
  source 1..20: mol_type = other DNA
tcgcaaactcctgacctcct

SEQ ID NO: 46876 - DNA, 20 bp, synthetic construct
  misc_feature 1..20: note = chemically synthesized
  source 1..20: mol_type = other DNA
caaactcctgacctcctcag

SEQ ID NO: 46877 - DNA, 20 bp, synthetic construct
  misc_feature 1..20: note = chemically synthesized
  source 1..20: mol_type = other DNA
ctgacctcctcagtggatcc

SEQ ID NO: 46878 - DNA, 20 bp, synthetic construct
  misc_feature 1..20: note = chemically synthesized
  source 1..20: mol_type = other DNA
tgacctcctcagtggatccg

SEQ ID NO: 46879 - DNA, 20 bp, synthetic construct
  misc_feature 1..20: note = chemically synthesized
  source 1..20: mol_type = other DNA
acctcctcagtggatccgag

SEQ ID NO: 46880 - DNA, 20 bp, synthetic construct
  misc_feature 1..20: note = chemically synthesized
  source 1..20: mol_type = other DNA
cctcctcagtggatccgagg

SEQ ID NO: 46881 - DNA, 20 bp, synthetic construct
  misc_feature 1..20: note = chemically synthesized
  source 1..20: mol_type = other DNA
aggaggtgatcctcccgcct

SEQ ID NO: 46882 - DNA, 20 bp, synthetic construct
  misc_feature 1..20: note = chemically synthesized
  source 1..20: mol_type = other DNA
cctcccgcctcagcctccca

SEQ ID NO: 46883 - DNA, 20 bp, synthetic construct
  misc_feature 1..20: note = chemically synthesized
  source 1..20: mol_type = other DNA
ctcccaaagtgctcgaatta

SEQ ID NO: 46884 - DNA, 20 bp, synthetic construct
  misc_feature 1..20: note = chemically synthesized
  source 1..20: mol_type = other DNA
tcccaaagtgctcgaattac

SEQ ID NO: 46885 - DNA, 20 bp, synthetic construct
  misc_feature 1..20: note = chemically synthesized
  source 1..20: mol_type = other DNA
agtgctcgaattacaggtgt

SEQ ID NO: 46886 - DNA, 20 bp, synthetic construct
  misc_feature 1..20: note = chemically synthesized
  source 1..20: mol_type = other DNA
caggtgtgagccaccacgcc

SEQ ID NO: 46887 - DNA, 20 bp, synthetic construct
  misc_feature 1..20: note = chemically synthesized
  source 1..20: mol_type = other DNA
gccaccacgcctggcctcca

SEQ ID NO: 46888 - DNA, 20 bp, synthetic construct
  misc_feature 1..20: note = chemically synthesized
  source 1..20: mol_type = other DNA
taaaatgttacgaaaaccaa

SEQ ID NO: 46889 - DNA, 20 bp, synthetic construct
  misc_feature 1..20: note = chemically synthesized
  source 1..20: mol_type = other DNA
tttttttgtgatttatttga

SEQ ID NO: 46890 - DNA, 20 bp, synthetic construct
  misc_feature 1..20: note = chemically synthesized
  source 1..20: mol_type = other DNA
ttttgtgatttatttgatgg

SEQ ID NO: 46891 - DNA, 20 bp, synthetic construct
  misc_feature 1..20: note = chemically synthesized
  source 1..20: mol_type = other DNA
cacctgacgtgaactgacat

SEQ ID NO: 46892 - DNA, 20 bp, synthetic construct
  misc_feature 1..20: note = chemically synthesized
  source 1..20: mol_type = other DNA
acatgagattatttttaatt

SEQ ID NO: 46893 - DNA, 20 bp, synthetic construct
  misc_feature 1..20: note = chemically synthesized
  source 1..20: mol_type = other DNA
tattcatatattttgctgca

SEQ ID NO: 46894 - DNA, 20 bp, synthetic construct
  misc_feature 1..20: note = chemically synthesized
  source 1..20: mol_type = other DNA
atattttgctgcatagatta

SEQ ID NO: 46895 - DNA, 20 bp, synthetic construct
  misc_feature 1..20: note = chemically synthesized
  source 1..20: mol_type = other DNA
gctgcatagattacagtatg

SEQ ID NO: 46896 - DNA, 20 bp, synthetic construct
  misc_feature 1..20: note = chemically synthesized
  source 1..20: mol_type = other DNA
tagattacagtatgcagctc

SEQ ID NO: 46897 - DNA, 20 bp, synthetic construct
  misc_feature 1..20: note = chemically synthesized
  source 1..20: mol_type = other DNA
atgcagctccagattcttcc

SEQ ID NO: 46898 - DNA, 20 bp, synthetic construct
  misc_feature 1..20: note = chemically synthesized
  source 1..20: mol_type = other DNA
cagctccagattcttccaag

SEQ ID NO: 46899 - DNA, 20 bp, synthetic construct
  misc_feature 1..20: note = chemically synthesized
  source 1..20: mol_type = other DNA
tgcctttctaaaatccaaac

SEQ ID NO: 46900 - DNA, 20 bp, synthetic construct
  misc_feature 1..20: note = chemically synthesized
  source 1..20: mol_type = other DNA
ctaaaatccaaacaagttct

SEQ ID NO: 46901 - DNA, 20 bp, synthetic construct
  misc_feature 1..20: note = chemically synthesized
  source 1..20: mol_type = other DNA
taaaatccaaacaagttctg

SEQ ID NO: 46902 - DNA, 20 bp, synthetic construct
  misc_feature 1..20: note = chemically synthesized
  source 1..20: mol_type = other DNA
tctgaggttcaaaaccgttt

SEQ ID NO: 46903 - DNA, 20 bp, synthetic construct
  misc_feature 1..20: note = chemically synthesized
  source 1..20: mol_type = other DNA
ttcaaaaccgttttggccct

SEQ ID NO: 46904 - DNA, 20 bp, synthetic construct
  misc_feature 1..20: note = chemically synthesized
  source 1..20: mol_type = other DNA
tcaaaaccgttttggcccta

SEQ ID NO: 46905 - DNA, 20 bp, synthetic construct
  misc_feature 1..20: note = chemically synthesized
  source 1..20: mol_type = other DNA
ccgttttggccctaaggctt

SEQ ID NO: 46906 - DNA, 20 bp, synthetic construct
  misc_feature 1..20: note = chemically synthesized
  source 1..20: mol_type = other DNA
cgttttggccctaaggcttt

SEQ ID NO: 46907 - DNA, 20 bp, synthetic construct
  misc_feature 1..20: note = chemically synthesized
  source 1..20: mol_type = other DNA
tggccctaaggctttgggta

SEQ ID NO: 46908 - DNA, 20 bp, synthetic construct
  misc_feature 1..20: note = chemically synthesized
  source 1..20: mol_type = other DNA
ggccctaaggctttgggtaa

SEQ ID NO: 46909 - DNA, 20 bp, synthetic construct
  misc_feature 1..20: note = chemically synthesized
  source 1..20: mol_type = other DNA
gccctaaggctttgggtaaa

SEQ ID NO: 46910 - DNA, 20 bp, synthetic construct
  misc_feature 1..20: note = chemically synthesized
  source 1..20: mol_type = other DNA
ccctaaggctttgggtaaag

SEQ ID NO: 46911 - DNA, 20 bp, synthetic construct
  misc_feature 1..20: note = chemically synthesized
  source 1..20: mol_type = other DNA
cctaaggctttgggtaaagg

SEQ ID NO: 46912 - DNA, 20 bp, synthetic construct
  misc_feature 1..20: note = chemically synthesized
  source 1..20: mol_type = other DNA
aaggctttgggtaaaggggg

SEQ ID NO: 46913 - DNA, 20 bp, synthetic construct
  misc_feature 1..20: note = chemically synthesized
  source 1..20: mol_type = other DNA
ggactctgttctactctgac

SEQ ID NO: 46914 - DNA, 20 bp, synthetic construct
  misc_feature 1..20: note = chemically synthesized
  source 1..20: mol_type = other DNA
actctgttctactctgactg

SEQ ID NO: 46915 - DNA, 20 bp, synthetic construct
  misc_feature 1..20: note = chemically synthesized
  source 1..20: mol_type = other DNA
ttctactctgactggagtcc

SEQ ID NO: 46916 - DNA, 20 bp, synthetic construct
  misc_feature 1..20: note = chemically synthesized
  source 1..20: mol_type = other DNA
gagtccaagatgcatatata

SEQ ID NO: 46917 - DNA, 20 bp, synthetic construct
  misc_feature 1..20: note = chemically synthesized
  source 1..20: mol_type = other DNA
gtccaagatgcatatataca

SEQ ID NO: 46918 - DNA, 20 bp, synthetic construct
  misc_feature 1..20: note = chemically synthesized
  source 1..20: mol_type = other DNA
gatgcatatatacagagata

SEQ ID NO: 46919 - DNA, 20 bp, synthetic construct
  misc_feature 1..20: note = chemically synthesized
  source 1..20: mol_type = other DNA
atgcatatatacagagatat

SEQ ID NO: 46920 - DNA, 20 bp, synthetic construct
  misc_feature 1..20: note = chemically synthesized
  source 1..20: mol_type = other DNA
atatacagagatatgggtga

SEQ ID NO: 46921 - DNA, 20 bp, synthetic construct
  misc_feature 1..20: note = chemically synthesized
  source 1..20: mol_type = other DNA
tatacagagatatgggtgat

SEQ ID NO: 46922 - DNA, 20 bp, synthetic construct
  misc_feature 1..20: note = chemically synthesized
  source 1..20: mol_type = other DNA
atacagagatatgggtgatg

SEQ ID NO: 46923 - DNA, 20 bp, synthetic construct
  misc_feature 1..20: note = chemically synthesized
  source 1..20: mol_type = other DNA
gatatgggtgatggggctgc

SEQ ID NO: 46924 - DNA, 20 bp, synthetic construct
  misc_feature 1..20: note = chemically synthesized
  source 1..20: mol_type = other DNA
atatgggtgatggggctgca

SEQ ID NO: 46925 - DNA, 20 bp, synthetic construct
  misc_feature 1..20: note = chemically synthesized
  source 1..20: mol_type = other DNA
tgggtgatggggctgcaagg

SEQ ID NO: 46926 - DNA, 20 bp, synthetic construct
  misc_feature 1..20: note = chemically synthesized
  source 1..20: mol_type = other DNA
gggtgatggggctgcaaggt

SEQ ID NO: 46927 - DNA, 20 bp, synthetic construct
  misc_feature 1..20: note = chemically synthesized
  source 1..20: mol_type = other DNA
atggggctgcaaggtaggtt

SEQ ID NO: 46928 - DNA, 20 bp, synthetic construct
  misc_feature 1..20: note = chemically synthesized
  source 1..20: mol_type = other DNA
tggggctgcaaggtaggttg

SEQ ID NO: 46929 - DNA, 20 bp, synthetic construct
  misc_feature 1..20: note = chemically synthesized
  source 1..20: mol_type = other DNA
ggctgcaaggtaggttgagg

SEQ ID NO: 46930 - DNA, 20 bp, synthetic construct
  misc_feature 1..20: note = chemically synthesized
  source 1..20: mol_type = other DNA
gctgcaaggtaggttgaggt

SEQ ID NO: 46931 - DNA, 20 bp, synthetic construct
  misc_feature 1..20: note = chemically synthesized
  source 1..20: mol_type = other DNA
ctgcaaggtaggttgaggta

SEQ ID NO: 46932 - DNA, 20 bp, synthetic construct
  misc_feature 1..20: note = chemically synthesized
  source 1..20: mol_type = other DNA
tgcaaggtaggttgaggtag

SEQ ID NO: 46933 - DNA, 20 bp, synthetic construct
  misc_feature 1..20: note = chemically synthesized
  source 1..20: mol_type = other DNA
ggtaggttgaggtaggggcc

SEQ ID NO: 46934 - DNA, 20 bp, synthetic construct
  misc_feature 1..20: note = chemically synthesized
  source 1..20: mol_type = other DNA
gtaggttgaggtaggggcca

SEQ ID NO: 46935 - DNA, 20 bp, synthetic construct
  misc_feature 1..20: note = chemically synthesized
  source 1..20: mol_type = other DNA
aggttgaggtaggggccaag

SEQ ID NO: 46936 - DNA, 20 bp, synthetic construct
  misc_feature 1..20: note = chemically synthesized
  source 1..20: mol_type = other DNA
ggttgaggtaggggccaagg

SEQ ID NO: 46937 - DNA, 20 bp, synthetic construct
  misc_feature 1..20: note = chemically synthesized
  source 1..20: mol_type = other DNA
ttgaggtaggggccaaggag

SEQ ID NO: 46938 - DNA, 20 bp, synthetic construct
  misc_feature 1..20: note = chemically synthesized
  source 1..20: mol_type = other DNA
gtaggggccaaggaggagca

SEQ ID NO: 46939 - DNA, 20 bp, synthetic construct
  misc_feature 1..20: note = chemically synthesized
  source 1..20: mol_type = other DNA
aggggccaaggaggagcatg

SEQ ID NO: 46940 - DNA, 20 bp, synthetic construct
  misc_feature 1..20: note = chemically synthesized
  source 1..20: mol_type = other DNA
ccaaggaggagcatggagtt

SEQ ID NO: 46941 - DNA, 20 bp, synthetic construct
  misc_feature 1..20: note = chemically synthesized
  source 1..20: mol_type = other DNA
ggagtttggacttgattcat

SEQ ID NO: 46942 - DNA, 20 bp, synthetic construct
  misc_feature 1..20: note = chemically synthesized
  source 1..20: mol_type = other DNA
gagtttggacttgattcatg

SEQ ID NO: 46943 - DNA, 20 bp, synthetic construct
  misc_feature 1..20: note = chemically synthesized
  source 1..20: mol_type = other DNA
ggacttgattcatgaggctg

SEQ ID NO: 46944 - DNA, 20 bp, synthetic construct
  misc_feature 1..20: note = chemically synthesized
  source 1..20: mol_type = other DNA
gacttgattcatgaggctgt

SEQ ID NO: 46945 - DNA, 20 bp, synthetic construct
  misc_feature 1..20: note = chemically synthesized
  source 1..20: mol_type = other DNA
acttgattcatgaggctgtg

SEQ ID NO: 46946 - DNA, 20 bp, synthetic construct
  misc_feature 1..20: note = chemically synthesized
  source 1..20: mol_type = other DNA
ttgattcatgaggctgtggg

SEQ ID NO: 46947 - DNA, 20 bp, synthetic construct
  misc_feature 1..20: note = chemically synthesized
  source 1..20: mol_type = other DNA
ttcatgaggctgtggggagc

SEQ ID NO: 46948 - DNA, 20 bp, synthetic construct
  misc_feature 1..20: note = chemically synthesized
  source 1..20: mol_type = other DNA
gaggctgtggggagccagtg

SEQ ID NO: 46949 - DNA, 20 bp, synthetic construct
  misc_feature 1..20: note = chemically synthesized
  source 1..20: mol_type = other DNA
aggctgtggggagccagtga

SEQ ID NO: 46950 - DNA, 20 bp, synthetic construct
  misc_feature 1..20: note = chemically synthesized
  source 1..20: mol_type = other DNA
gggagccagtgaaggttctt

SEQ ID NO: 46951 - DNA, 20 bp, synthetic construct
  misc_feature 1..20: note = chemically synthesized
  source 1..20: mol_type = other DNA
agccagtgaaggttcttaag

SEQ ID NO: 46952 - DNA, 20 bp, synthetic construct
  misc_feature 1..20: note = chemically synthesized
  source 1..20: mol_type = other DNA
gccagtgaaggttcttaagc

SEQ ID NO: 46953 - DNA, 20 bp, synthetic construct
  misc_feature 1..20: note = chemically synthesized
  source 1..20: mol_type = other DNA
ttaagcaggtatgtctgcct

SEQ ID NO: 46954 - DNA, 20 bp, synthetic construct
  misc_feature 1..20: note = chemically synthesized
  source 1..20: mol_type = other DNA
aagcaggtatgtctgcctga

SEQ ID NO: 46955 - DNA, 20 bp, synthetic construct
  misc_feature 1..20: note = chemically synthesized
  source 1..20: mol_type = other DNA
caggtatgtctgcctgagag

SEQ ID NO: 46956 - DNA, 20 bp, synthetic construct
  misc_feature 1..20: note = chemically synthesized
  source 1..20: mol_type = other DNA
tatgtctgcctgagagcagt

SEQ ID NO: 46957 - DNA, 20 bp, synthetic construct
  misc_feature 1..20: note = chemically synthesized
  source 1..20: mol_type = other DNA
tgtctgcctgagagcagttg

SEQ ID NO: 46958 - DNA, 20 bp, synthetic construct
  misc_feature 1..20: note = chemically synthesized
  source 1..20: mol_type = other DNA
ctgcctgagagcagttggag

SEQ ID NO: 46959 - DNA, 20 bp, synthetic construct
  misc_feature 1..20: note = chemically synthesized
  source 1..20: mol_type = other DNA
tgagagcagttggagcagac

SEQ ID NO: 46960 - DNA, 20 bp, synthetic construct
  misc_feature 1..20: note = chemically synthesized
  source 1..20: mol_type = other DNA
agagcagttggagcagacaa

SEQ ID NO: 46961 - DNA, 20 bp, synthetic construct
  misc_feature 1..20: note = chemically synthesized
  source 1..20: mol_type = other DNA
aaaaaccaaacaaatcacca

SEQ ID NO: 46962 - DNA, 20 bp, synthetic construct
  misc_feature 1..20: note = chemically synthesized
  source 1..20: mol_type = other DNA
accaaacaaatcaccataga

SEQ ID NO: 46963 - DNA, 20 bp, synthetic construct
  misc_feature 1..20: note = chemically synthesized
  source 1..20: mol_type = other DNA
aaacaaatcaccatagatag

SEQ ID NO: 46964 - DNA, 20 bp, synthetic construct
  misc_feature 1..20: note = chemically synthesized
  source 1..20: mol_type = other DNA
tgtcccctccaaatctcatg

SEQ ID NO: 46965 - DNA, 20 bp, synthetic construct
  misc_feature 1..20: note = chemically synthesized
  source 1..20: mol_type = other DNA
ccaaatctcatgtggaaatt

SEQ ID NO: 46966 - DNA, 20 bp, synthetic construct
  misc_feature 1..20: note = chemically synthesized
  source 1..20: mol_type = other DNA
tcatgtggaaatttggtcct

SEQ ID NO: 46967 - DNA, 20 bp, synthetic construct
  misc_feature 1..20: note = chemically synthesized
  source 1..20: mol_type = other DNA
ggaaatttggtcctcagtgt

SEQ ID NO: 46968 - DNA, 20 bp, synthetic construct
  misc_feature 1..20: note = chemically synthesized
  source 1..20: mol_type = other DNA
aatttggtcctcagtgttgg

SEQ ID NO: 46969 - DNA, 20 bp, synthetic construct
  misc_feature 1..20: note = chemically synthesized
  source 1..20: mol_type = other DNA
ttggtcctcagtgttggaag

SEQ ID NO: 46970 - DNA, 20 bp, synthetic construct
  misc_feature 1..20: note = chemically synthesized
  source 1..20: mol_type = other DNA
tggtcctcagtgttggaagt

SEQ ID NO: 46971 - DNA, 20 bp, synthetic construct
  misc_feature 1..20: note = chemically synthesized
  source 1..20: mol_type = other DNA
ggtcctcagtgttggaagtg

SEQ ID NO: 46972 - DNA, 20 bp, synthetic construct
  misc_feature 1..20: note = chemically synthesized
  source 1..20: mol_type = other DNA
gtgttggaagtggggcctaa

SEQ ID NO: 46973 - DNA, 20 bp, synthetic construct
  misc_feature 1..20: note = chemically synthesized
  source 1..20: mol_type = other DNA
tgttggaagtggggcctaat

SEQ ID NO: 46974 - DNA, 20 bp, synthetic construct
  misc_feature 1..20: note = chemically synthesized
  source 1..20: mol_type = other DNA
ttggaagtggggcctaatgg

SEQ ID NO: 46975 - DNA, 20 bp, synthetic construct
  misc_feature 1..20: note = chemically synthesized
  source 1..20: mol_type = other DNA
tggaagtggggcctaatggg

SEQ ID NO: 46976 - DNA, 20 bp, synthetic construct
  misc_feature 1..20: note = chemically synthesized
  source 1..20: mol_type = other DNA
ggggcctaatgggaggtgtt

SEQ ID NO: 46977 - DNA, 20 bp, synthetic construct
  misc_feature 1..20: note = chemically synthesized
  source 1..20: mol_type = other DNA
gggcctaatgggaggtgttt

SEQ ID NO: 46978 - DNA, 20 bp, synthetic construct
  misc_feature 1..20: note = chemically synthesized
  source 1..20: mol_type = other DNA
aatgggaggtgtttgggtca

SEQ ID NO: 46979 - DNA, 20 bp, synthetic construct
  misc_feature 1..20: note = chemically synthesized
  source 1..20: mol_type = other DNA
atgggaggtgtttgggtcat

SEQ ID NO: 46980 - DNA, 20 bp, synthetic construct
  misc_feature 1..20: note = chemically synthesized
  source 1..20: mol_type = other DNA
tgggaggtgtttgggtcatg

SEQ ID NO: 46981 - DNA, 20 bp, synthetic construct
  misc_feature 1..20: note = chemically synthesized
  source 1..20: mol_type = other DNA
gggaggtgtttgggtcatgg

SEQ ID NO: 46982 - DNA, 20 bp, synthetic construct
  misc_feature 1..20: note = chemically synthesized
  source 1..20: mol_type = other DNA
gaggtgtttgggtcatgggg

SEQ ID NO: 46983 - DNA, 20 bp, synthetic construct
  misc_feature 1..20: note = chemically synthesized
  source 1..20: mol_type = other DNA
aggtgtttgggtcatggggg

SEQ ID NO: 46984 - DNA, 20 bp, synthetic construct
  misc_feature 1..20: note = chemically synthesized
  source 1..20: mol_type = other DNA
tgggggaggaacccctgtga

SEQ ID NO: 46985 - DNA, 20 bp, synthetic construct
  misc_feature 1..20: note = chemically synthesized
  source 1..20: mol_type = other DNA
gggggaggaacccctgtgaa

SEQ ID NO: 46986 - DNA, 20 bp, synthetic construct
  misc_feature 1..20: note = chemically synthesized
  source 1..20: mol_type = other DNA
aggaacccctgtgaaaggct

SEQ ID NO: 46987 - DNA, 20 bp, synthetic construct
  misc_feature 1..20: note = chemically synthesized
  source 1..20: mol_type = other DNA
ggtgccgtccttgtgataat

SEQ ID NO: 46988 - DNA, 20 bp, synthetic construct
  misc_feature 1..20: note = chemically synthesized
  source 1..20: mol_type = other DNA
ccgtccttgtgataatgagt

SEQ ID NO: 46989 - DNA, 20 bp, synthetic construct
  misc_feature 1..20: note = chemically synthesized
  source 1..20: mol_type = other DNA
tcccgctatgatttcccttg

SEQ ID NO: 46990 - DNA, 20 bp, synthetic construct
  misc_feature 1..20: note = chemically synthesized
  source 1..20: mol_type = other DNA
cccgctatgatttcccttga

SEQ ID NO: 46991 - DNA, 20 bp, synthetic construct
  misc_feature 1..20: note = chemically synthesized
  source 1..20: mol_type = other DNA
cttgaaggctgattattaaa

SEQ ID NO: 46992 - DNA, 20 bp, synthetic construct
  misc_feature 1..20: note = chemically synthesized
  source 1..20: mol_type = other DNA
tgaaggctgattattaaaaa

SEQ ID NO: 46993 - DNA, 20 bp, synthetic construct
  misc_feature 1..20: note = chemically synthesized
  source 1..20: mol_type = other DNA
gctgattattaaaaagagct

SEQ ID NO: 46994 - DNA, 20 bp, synthetic construct
  misc_feature 1..20: note = chemically synthesized
  source 1..20: mol_type = other DNA
gtgattgatctctgcacatg

SEQ ID NO: 46995 - DNA, 20 bp, synthetic construct
  misc_feature 1..20: note = chemically synthesized
  source 1..20: mol_type = other DNA
tgattgatctctgcacatgt

SEQ ID NO: 46996 - DNA, 20 bp, synthetic construct
  misc_feature 1..20: note = chemically synthesized
  source 1..20: mol_type = other DNA
tccccttcaccttctgccat

SEQ ID NO: 46997 - DNA, 20 bp, synthetic construct
  misc_feature 1..20: note = chemically synthesized
  source 1..20: mol_type = other DNA
tcaccttctgccatcagtga

SEQ ID NO: 46998 - DNA, 20 bp, synthetic construct
  misc_feature 1..20: note = chemically synthesized
  source 1..20: mol_type = other DNA
ccttctgccatcagtgaaag

SEQ ID NO: 46999 - DNA, 20 bp, synthetic construct
  misc_feature 1..20: note = chemically synthesized
  source 1..20: mol_type = other DNA
gccatcagtgaaagcagctt

SEQ ID NO: 47000 - DNA, 20 bp, synthetic construct
  misc_feature 1..20: note = chemically synthesized
  source 1..20: mol_type = other DNA
ccatcagtgaaagcagctta

SEQ ID NO: 47001 - DNA, 20 bp, synthetic construct
  misc_feature 1..20: note = chemically synthesized
  source 1..20: mol_type = other DNA
aagcagcttaaggccctcac

SEQ ID NO: 47002 - DNA, 20 bp, synthetic construct
  misc_feature 1..20: note = chemically synthesized
  source 1..20: mol_type = other DNA
cagcttaaggccctcaccag

SEQ ID NO: 47003 - DNA, 20 bp, synthetic construct
  misc_feature 1..20: note = chemically synthesized
  source 1..20: mol_type = other DNA
cttaaggccctcaccagaag

SEQ ID NO: 47004 - DNA, 20 bp, synthetic construct
  misc_feature 1..20: note = chemically synthesized
  source 1..20: mol_type = other DNA
ccctcaccagaagcagatgc

SEQ ID NO: 47005 - DNA, 20 bp, synthetic construct
  misc_feature 1..20: note = chemically synthesized
  source 1..20: mol_type = other DNA
gatgctggtgccatgcttcc

SEQ ID NO: 47006 - DNA, 20 bp, synthetic construct
  misc_feature 1..20: note = chemically synthesized
  source 1..20: mol_type = other DNA
tgctggtgccatgcttcctg

SEQ ID NO: 47007 - DNA, 20 bp, synthetic construct
  misc_feature 1..20: note = chemically synthesized
  source 1..20: mol_type = other DNA
ctggtgccatgcttcctgga

SEQ ID NO: 47008 - DNA, 20 bp, synthetic construct
  misc_feature 1..20: note = chemically synthesized
  source 1..20: mol_type = other DNA
catgcttcctggagagcttg

SEQ ID NO: 47009 - DNA, 20 bp, synthetic construct
  misc_feature 1..20: note = chemically synthesized
  source 1..20: mol_type = other DNA
tggagagcttgcagaatcat

SEQ ID NO: 47010 - DNA, 20 bp, synthetic construct
  misc_feature 1..20: note = chemically synthesized
  source 1..20: mol_type = other DNA
ccttgtaaattactcacctt

SEQ ID NO: 47011 - DNA, 20 bp, synthetic construct
  misc_feature 1..20: note = chemically synthesized
  source 1..20: mol_type = other DNA
cttgtaaattactcaccttc

SEQ ID NO: 47012 - DNA, 20 bp, synthetic construct
  misc_feature 1..20: note = chemically synthesized
  source 1..20: mol_type = other DNA
ccttcaggtattcctttata

SEQ ID NO: 47013 - DNA, 20 bp, synthetic construct
  misc_feature 1..20: note = chemically synthesized
  source 1..20: mol_type = other DNA
tcctttatatagcaacacaa

SEQ ID NO: 47014 - DNA, 20 bp, synthetic construct
  misc_feature 1..20: note = chemically synthesized
  source 1..20: mol_type = other DNA
cctttatatagcaacacaaa

SEQ ID NO: 47015 - DNA, 20 bp, synthetic construct
  misc_feature 1..20: note = chemically synthesized
  source 1..20: mol_type = other DNA
tatagcaacacaaaaggact

SEQ ID NO: 47016 - DNA, 20 bp, synthetic construct
  misc_feature 1..20: note = chemically synthesized
  source 1..20: mol_type = other DNA
gcaacacaaaaggactaaga

SEQ ID NO: 47017 - DNA, 20 bp, synthetic construct
  misc_feature 1..20: note = chemically synthesized
  source 1..20: mol_type = other DNA
acacaaaaggactaagacag

SEQ ID NO: 47018 - DNA, 20 bp, synthetic construct
  misc_feature 1..20: note = chemically synthesized
  source 1..20: mol_type = other DNA
cttgacttttctctctcttt

SEQ ID NO: 47019 - DNA, 20 bp, synthetic construct
  misc_feature 1..20: note = chemically synthesized
  source 1..20: mol_type = other DNA
gacttttctctctctttaag

SEQ ID NO: 47020 - DNA, 20 bp, synthetic construct
  misc_feature 1..20: note = chemically synthesized
  source 1..20: mol_type = other DNA
aagtgttgcctttgctcact

SEQ ID NO: 47021 - DNA, 20 bp, synthetic construct
  misc_feature 1..20: note = chemically synthesized
  source 1..20: mol_type = other DNA
atcccttctgcctgcatttg

SEQ ID NO: 47022 - DNA, 20 bp, synthetic construct
  misc_feature 1..20: note = chemically synthesized
  source 1..20: mol_type = other DNA
cccttctgcctgcatttgta

SEQ ID NO: 47023 - DNA, 20 bp, synthetic construct
  misc_feature 1..20: note = chemically synthesized
  source 1..20: mol_type = other DNA
gcctgcatttgtagagcatc

SEQ ID NO: 47024 - DNA, 20 bp, synthetic construct
  misc_feature 1..20: note = chemically synthesized
  source 1..20: mol_type = other DNA
gcatttgtagagcatctgga

SEQ ID NO: 47025 - DNA, 20 bp, synthetic construct
  misc_feature 1..20: note = chemically synthesized
  source 1..20: mol_type = other DNA
catttgtagagcatctggat

SEQ ID NO: 47026 - DNA, 20 bp, synthetic construct
  misc_feature 1..20: note = chemically synthesized
  source 1..20: mol_type = other DNA
tttgtagagcatctggatgg

SEQ ID NO: 47027 - DNA, 20 bp, synthetic construct
  misc_feature 1..20: note = chemically synthesized
  source 1..20: mol_type = other DNA
accgtcactcttgactttcc

SEQ ID NO: 47028 - DNA, 20 bp, synthetic construct
  misc_feature 1..20: note = chemically synthesized
  source 1..20: mol_type = other DNA
gtcactcttgactttcccag

SEQ ID NO: 47029 - DNA, 20 bp, synthetic construct
  misc_feature 1..20: note = chemically synthesized
  source 1..20: mol_type = other DNA
tcactcttgactttcccagc

SEQ ID NO: 47030 - DNA, 20 bp, synthetic construct
  misc_feature 1..20: note = chemically synthesized
  source 1..20: mol_type = other DNA
ttcccagcaggcctatgtca

SEQ ID NO: 47031 - DNA, 20 bp, synthetic construct
  misc_feature 1..20: note = chemically synthesized
  source 1..20: mol_type = other DNA
tcccagcaggcctatgtcat

SEQ ID NO: 47032 - DNA, 20 bp, synthetic construct
  misc_feature 1..20: note = chemically synthesized
  source 1..20: mol_type = other DNA
ggcctatgtcataggtactg

SEQ ID NO: 47033 - DNA, 20 bp, synthetic construct
  misc_feature 1..20: note = chemically synthesized
  source 1..20: mol_type = other DNA
gtactgtggtctctacaata

SEQ ID NO: 47034 - DNA, 20 bp, synthetic construct
  misc_feature 1..20: note = chemically synthesized
  source 1..20: mol_type = other DNA
ctgtggtctctacaatacag

SEQ ID NO: 47035 - DNA, 20 bp, synthetic construct
  misc_feature 1..20: note = chemically synthesized
  source 1..20: mol_type = other DNA
gtggtctctacaatacagca

SEQ ID NO: 47036 - DNA, 20 bp, synthetic construct
  misc_feature 1..20: note = chemically synthesized
  source 1..20: mol_type = other DNA
tggtctctacaatacagcag

SEQ ID NO: 47037 - DNA, 20 bp, synthetic construct
  misc_feature 1..20: note = chemically synthesized
  source 1..20: mol_type = other DNA
acaatacagcagaggtatct

SEQ ID NO: 47038 - DNA, 20 bp, synthetic construct
  misc_feature 1..20: note = chemically synthesized
  source 1..20: mol_type = other DNA
caatacagcagaggtatctg

SEQ ID NO: 47039 - DNA, 20 bp, synthetic construct
  misc_feature 1..20: note = chemically synthesized
  source 1..20: mol_type = other DNA
gcagaggtatctgaggctcc

SEQ ID NO: 47040 - DNA, 20 bp, synthetic construct
  misc_feature 1..20: note = chemically synthesized
  source 1..20: mol_type = other DNA
agaggtatctgaggctccga

SEQ ID NO: 47041 - DNA, 20 bp, synthetic construct
  misc_feature 1..20: note = chemically synthesized
  source 1..20: mol_type = other DNA
gaggtatctgaggctccgag

SEQ ID NO: 47042 - DNA, 20 bp, synthetic construct
  misc_feature 1..20: note = chemically synthesized
  source 1..20: mol_type = other DNA
atctgaggctccgagaggtt

SEQ ID NO: 47043 - DNA, 20 bp, synthetic construct
  misc_feature 1..20: note = chemically synthesized
  source 1..20: mol_type = other DNA
gaggttgagtgacttgctca

SEQ ID NO: 47044 - DNA, 20 bp, synthetic construct
  misc_feature 1..20: note = chemically synthesized
  source 1..20: mol_type = other DNA
cttgctcatggctgcacaac

SEQ ID NO: 47045 - DNA, 20 bp, synthetic construct
  misc_feature 1..20: note = chemically synthesized
  source 1..20: mol_type = other DNA
gctgcacaaccagtaaatat

SEQ ID NO: 47046 - DNA, 20 bp, synthetic construct
  misc_feature 1..20: note = chemically synthesized
  source 1..20: mol_type = other DNA
tgcacaaccagtaaatattg

SEQ ID NO: 47047 - DNA, 20 bp, synthetic construct
  misc_feature 1..20: note = chemically synthesized
  source 1..20: mol_type = other DNA
caaccagtaaatattggagc

SEQ ID NO: 47048 - DNA, 20 bp, synthetic construct
  misc_feature 1..20: note = chemically synthesized
  source 1..20: mol_type = other DNA
taaatattggagctggaatt

SEQ ID NO: 47049 - DNA, 20 bp, synthetic construct
  misc_feature 1..20: note = chemically synthesized
  source 1..20: mol_type = other DNA
aaatattggagctggaattc

SEQ ID NO: 47050 - DNA, 20 bp, synthetic construct
  misc_feature 1..20: note = chemically synthesized
  source 1..20: mol_type = other DNA
ggagctggaattcaggtcca

SEQ ID NO: 47051 - DNA, 20 bp, synthetic construct
  misc_feature 1..20: note = chemically synthesized
  source 1..20: mol_type = other DNA
aattcaggtccacggtttcc

SEQ ID NO: 47052 - DNA, 20 bp, synthetic construct
  misc_feature 1..20: note = chemically synthesized
  source 1..20: mol_type = other DNA
tccacggtttcctggctcca

SEQ ID NO: 47053 - DNA, 20 bp, synthetic construct
  misc_feature 1..20: note = chemically synthesized
  source 1..20: mol_type = other DNA
ttccctcaatttattctgac

SEQ ID NO: 47054 - DNA, 20 bp, synthetic construct
  misc_feature 1..20: note = chemically synthesized
  source 1..20: mol_type = other DNA
tccctcaatttattctgact

SEQ ID NO: 47055 - DNA, 20 bp, synthetic construct
  misc_feature 1..20: note = chemically synthesized
  source 1..20: mol_type = other DNA
ccctcaatttattctgactg

SEQ ID NO: 47056 - DNA, 20 bp, synthetic construct
  misc_feature 1..20: note = chemically synthesized
  source 1..20: mol_type = other DNA
aatttattctgactggggca

SEQ ID NO: 47057 - DNA, 20 bp, synthetic construct
  misc_feature 1..20: note = chemically synthesized
  source 1..20: mol_type = other DNA
atttattctgactggggcat

SEQ ID NO: 47058 - DNA, 20 bp, synthetic construct
  misc_feature 1..20: note = chemically synthesized
  source 1..20: mol_type = other DNA
tttattctgactggggcatg

SEQ ID NO: 47059 - DNA, 20 bp, synthetic construct
  misc_feature 1..20: note = chemically synthesized
  source 1..20: mol_type = other DNA
ttattctgactggggcatgg

SEQ ID NO: 47060 - DNA, 20 bp, synthetic construct
  misc_feature 1..20: note = chemically synthesized
  source 1..20: mol_type = other DNA
attctgactggggcatgggg

SEQ ID NO: 47061 - DNA, 20 bp, synthetic construct
  misc_feature 1..20: note = chemically synthesized
  source 1..20: mol_type = other DNA
ttctgactggggcatggggg

SEQ ID NO: 47062 - DNA, 20 bp, synthetic construct
  misc_feature 1..20: note = chemically synthesized
  source 1..20: mol_type = other DNA
tctgactggggcatggggga

SEQ ID NO: 47063 - DNA, 20 bp, synthetic construct
  misc_feature 1..20: note = chemically synthesized
  source 1..20: mol_type = other DNA
ctgactggggcatgggggag

SEQ ID NO: 47064 - DNA, 20 bp, synthetic construct
  misc_feature 1..20: note = chemically synthesized
  source 1..20: mol_type = other DNA
tgactggggcatgggggagg

SEQ ID NO: 47065 - DNA, 20 bp, synthetic construct
  misc_feature 1..20: note = chemically synthesized
  source 1..20: mol_type = other DNA
ctggggcatgggggaggggg

SEQ ID NO: 47066 - DNA, 20 bp, synthetic construct
  misc_feature 1..20: note = chemically synthesized
  source 1..20: mol_type = other DNA
atgggggagggggtggcctt

SEQ ID NO: 47067 - DNA, 20 bp, synthetic construct
  misc_feature 1..20: note = chemically synthesized
  source 1..20: mol_type = other DNA
tgggggagggggtggccttt

SEQ ID NO: 47068 - DNA, 20 bp, synthetic construct
  misc_feature 1..20: note = chemically synthesized
  source 1..20: mol_type = other DNA
gggagggggtggcctttggg

SEQ ID NO: 47069 - DNA, 20 bp, synthetic construct
  misc_feature 1..20: note = chemically synthesized
  source 1..20: mol_type = other DNA
ggagggggtggcctttgggc

SEQ ID NO: 47070 - DNA, 20 bp, synthetic construct
  misc_feature 1..20: note = chemically synthesized
  source 1..20: mol_type = other DNA
gagggggtggcctttgggca

SEQ ID NO: 47071 - DNA, 20 bp, synthetic construct
  misc_feature 1..20: note = chemically synthesized
  source 1..20: mol_type = other DNA
tggcctttgggcagggccac

SEQ ID NO: 47072 - DNA, 20 bp, synthetic construct
  misc_feature 1..20: note = chemically synthesized
  source 1..20: mol_type = other DNA
ggcctttgggcagggccacc

SEQ ID NO: 47073 - DNA, 20 bp, synthetic construct
  misc_feature 1..20: note = chemically synthesized
  source 1..20: mol_type = other DNA
cctttgggcagggccaccag

SEQ ID NO: 47074 - DNA, 20 bp, synthetic construct
  misc_feature 1..20: note = chemically synthesized
  source 1..20: mol_type = other DNA
gcagggccaccaggagcgac

SEQ ID NO: 47075 - DNA, 20 bp, synthetic construct
  misc_feature 1..20: note = chemically synthesized
  source 1..20: mol_type = other DNA
cagggccaccaggagcgacc

SEQ ID NO: 47076 - DNA, 20 bp, synthetic construct
  misc_feature 1..20: note = chemically synthesized
  source 1..20: mol_type = other DNA
accaggagcgaccaggcccg

SEQ ID NO: 47077 - DNA, 20 bp, synthetic construct
  misc_feature 1..20: note = chemically synthesized
  source 1..20: mol_type = other DNA
caggagcgaccaggcccgta

SEQ ID NO: 47078 - DNA, 20 bp, synthetic construct
  misc_feature 1..20: note = chemically synthesized
  source 1..20: mol_type = other DNA
ggagcgaccaggcccgtaga

SEQ ID NO: 47079 - DNA, 20 bp, synthetic construct
  misc_feature 1..20: note = chemically synthesized
  source 1..20: mol_type = other DNA
cgaccaggcccgtagagagc

SEQ ID NO: 47080 - DNA, 20 bp, synthetic construct
  misc_feature 1..20: note = chemically synthesized
  source 1..20: mol_type = other DNA
gaccaggcccgtagagagct

SEQ ID NO: 47081 - DNA, 20 bp, synthetic construct
  misc_feature 1..20: note = chemically synthesized
  source 1..20: mol_type = other DNA
ggcccgtagagagctgggtg

SEQ ID NO: 47082 - DNA, 20 bp, synthetic construct
  misc_feature 1..20: note = chemically synthesized
  source 1..20: mol_type = other DNA
gcccgtagagagctgggtgc

SEQ ID NO: 47083 - DNA, 20 bp, synthetic construct
  misc_feature 1..20: note = chemically synthesized
  source 1..20: mol_type = other DNA
tagagagctgggtgcaggta

SEQ ID NO: 47084 - DNA, 20 bp, synthetic construct
  misc_feature 1..20: note = chemically synthesized
  source 1..20: mol_type = other DNA
gagagctgggtgcaggtaca

SEQ ID NO: 47085 - DNA, 20 bp, synthetic construct
  misc_feature 1..20: note = chemically synthesized
  source 1..20: mol_type = other DNA
agagctgggtgcaggtacag

SEQ ID NO: 47086 - DNA, 20 bp, synthetic construct
  misc_feature 1..20: note = chemically synthesized
  source 1..20: mol_type = other DNA
acagaggaaaacctgttgtc

SEQ ID NO: 47087 - DNA, 20 bp, synthetic construct
  misc_feature 1..20: note = chemically synthesized
  source 1..20: mol_type = other DNA
ggaaaacctgttgtcgagtg

SEQ ID NO: 47088 - DNA, 20 bp, synthetic construct
  misc_feature 1..20: note = chemically synthesized
  source 1..20: mol_type = other DNA
ctgttgtcgagtgtggcccg

SEQ ID NO: 47089 - DNA, 20 bp, synthetic construct
  misc_feature 1..20: note = chemically synthesized
  source 1..20: mol_type = other DNA
agttcccatttttgcctgaa

SEQ ID NO: 47090 - DNA, 20 bp, synthetic construct
  misc_feature 1..20: note = chemically synthesized
  source 1..20: mol_type = other DNA
tgcctgaatggcacatttga

SEQ ID NO: 47091 - DNA, 20 bp, synthetic construct
  misc_feature 1..20: note = chemically synthesized
  source 1..20: mol_type = other DNA
tataaccatgtgaataataa

SEQ ID NO: 47092 - DNA, 20 bp, synthetic construct
  misc_feature 1..20: note = chemically synthesized
  source 1..20: mol_type = other DNA
accatgtgaataataatagt

SEQ ID NO: 47093 - DNA, 20 bp, synthetic construct
  misc_feature 1..20: note = chemically synthesized
  source 1..20: mol_type = other DNA
taataatagttggcctatat

SEQ ID NO: 47094 - DNA, 20 bp, synthetic construct
  misc_feature 1..20: note = chemically synthesized
  source 1..20: mol_type = other DNA
gagttctttaatttgctttt

SEQ ID NO: 47095 - DNA, 20 bp, synthetic construct
  misc_feature 1..20: note = chemically synthesized
  source 1..20: mol_type = other DNA
tttgctttttggtccgcatt

SEQ ID NO: 47096 - DNA, 20 bp, synthetic construct
  misc_feature 1..20: note = chemically synthesized
  source 1..20: mol_type = other DNA
tctcttttgttgtaatttgt

SEQ ID NO: 47097 - DNA, 20 bp, synthetic construct
  misc_feature 1..20: note = chemically synthesized
  source 1..20: mol_type = other DNA
cttttgttgtaatttgtaag

SEQ ID NO: 47098 - DNA, 20 bp, synthetic construct
  misc_feature 1..20: note = chemically synthesized
  source 1..20: mol_type = other DNA
ttttgttgtaatttgtaagt

SEQ ID NO: 47099 - DNA, 20 bp, synthetic construct
  misc_feature 1..20: note = chemically synthesized
  source 1..20: mol_type = other DNA
tttgttgtaatttgtaagta

SEQ ID NO: 47100 - DNA, 20 bp, synthetic construct
  misc_feature 1..20: note = chemically synthesized
  source 1..20: mol_type = other DNA
ttgttgtaatttgtaagtag

SEQ ID NO: 47101 - DNA, 20 bp, synthetic construct
  misc_feature 1..20: note = chemically synthesized
  source 1..20: mol_type = other DNA
tgtaatttgtaagtaggggt

SEQ ID NO: 47102 - DNA, 20 bp, synthetic construct
  misc_feature 1..20: note = chemically synthesized
  source 1..20: mol_type = other DNA
ttgtaagtaggggtgagata

SEQ ID NO: 47103 - DNA, 20 bp, synthetic construct
  misc_feature 1..20: note = chemically synthesized
  source 1..20: mol_type = other DNA
ggggtgagataaagtacacc

SEQ ID NO: 47104 - DNA, 20 bp, synthetic construct
  misc_feature 1..20: note = chemically synthesized
  source 1..20: mol_type = other DNA
gggtgagataaagtacacct

SEQ ID NO: 47105 - DNA, 20 bp, synthetic construct
  misc_feature 1..20: note = chemically synthesized
  source 1..20: mol_type = other DNA
ggtgagataaagtacaccta

SEQ ID NO: 47106 - DNA, 20 bp, synthetic construct
  misc_feature 1..20: note = chemically synthesized
  source 1..20: mol_type = other DNA
aaagtacacctagggtttgc

SEQ ID NO: 47107 - DNA, 20 bp, synthetic construct
  misc_feature 1..20: note = chemically synthesized
  source 1..20: mol_type = other DNA
aagtacacctagggtttgct

SEQ ID NO: 47108 - DNA, 20 bp, synthetic construct
  misc_feature 1..20: note = chemically synthesized
  source 1..20: mol_type = other DNA
tcatcatgttcctccttgca

SEQ ID NO: 47109 - DNA, 20 bp, synthetic construct
  misc_feature 1..20: note = chemically synthesized
  source 1..20: mol_type = other DNA
catcatgttcctccttgcat

SEQ ID NO: 47110 - DNA, 20 bp, synthetic construct
  misc_feature 1..20: note = chemically synthesized
  source 1..20: mol_type = other DNA
atcatgttcctccttgcatg

SEQ ID NO: 47111 - DNA, 20 bp, synthetic construct
  misc_feature 1..20: note = chemically synthesized
  source 1..20: mol_type = other DNA
tgttcctccttgcatggggc

SEQ ID NO: 47112 - DNA, 20 bp, synthetic construct
  misc_feature 1..20: note = chemically synthesized
  source 1..20: mol_type = other DNA
gttcctccttgcatggggcc

SEQ ID NO: 47113 - DNA, 20 bp, synthetic construct
  misc_feature 1..20: note = chemically synthesized
  source 1..20: mol_type = other DNA
ttgcatggggccaggatccg

SEQ ID NO: 47114 - DNA, 20 bp, synthetic construct
  misc_feature 1..20: note = chemically synthesized
  source 1..20: mol_type = other DNA
gcatggggccaggatccgtg

SEQ ID NO: 47115 - DNA, 20 bp, synthetic construct
  misc_feature 1..20: note = chemically synthesized
  source 1..20: mol_type = other DNA
catggggccaggatccgtgg

SEQ ID NO: 47116 - DNA, 20 bp, synthetic construct
  misc_feature 1..20: note = chemically synthesized
  source 1..20: mol_type = other DNA
caggatccgtggaggttgcc

SEQ ID NO: 47117 - DNA, 20 bp, synthetic construct
  misc_feature 1..20: note = chemically synthesized
  source 1..20: mol_type = other DNA
gaggttgcctggcacctacg

SEQ ID NO: 47118 - DNA, 20 bp, synthetic construct
  misc_feature 1..20: note = chemically synthesized
  source 1..20: mol_type = other DNA
gttgcctggcacctacgtgg

SEQ ID NO: 47119 - DNA, 20 bp, synthetic construct
  misc_feature 1..20: note = chemically synthesized
  source 1..20: mol_type = other DNA
gcacctacgtggtggtgctg

SEQ ID NO: 47120 - DNA, 20 bp, synthetic construct
  misc_feature 1..20: note = chemically synthesized
  source 1..20: mol_type = other DNA
cacctacgtggtggtgctga

SEQ ID NO: 47121 - DNA, 20 bp, synthetic construct
  misc_feature 1..20: note = chemically synthesized
  source 1..20: mol_type = other DNA
cctacgtggtggtgctgaag

SEQ ID NO: 47122 - DNA, 20 bp, synthetic construct
  misc_feature 1..20: note = chemically synthesized
  source 1..20: mol_type = other DNA
ctacgtggtggtgctgaagg

SEQ ID NO: 47123 - DNA, 20 bp, synthetic construct
  misc_feature 1..20: note = chemically synthesized
  source 1..20: mol_type = other DNA
acgtggtggtgctgaaggag

SEQ ID NO: 47124 - DNA, 20 bp, synthetic construct
  misc_feature 1..20: note = chemically synthesized
  source 1..20: mol_type = other DNA
aggaggagacccacctctcg

SEQ ID NO: 47125 - DNA, 20 bp, synthetic construct
  misc_feature 1..20: note = chemically synthesized
  source 1..20: mol_type = other DNA
ggagacccacctctcgcagt

SEQ ID NO: 47126 - DNA, 20 bp, synthetic construct
  misc_feature 1..20: note = chemically synthesized
  source 1..20: mol_type = other DNA
agacccacctctcgcagtca

SEQ ID NO: 47127 - DNA, 20 bp, synthetic construct
  misc_feature 1..20: note = chemically synthesized
  source 1..20: mol_type = other DNA
agcgcactgcccgccgcctg

SEQ ID NO: 47128 - DNA, 20 bp, synthetic construct
  misc_feature 1..20: note = chemically synthesized
  source 1..20: mol_type = other DNA
gcgcactgcccgccgcctgc

SEQ ID NO: 47129 - DNA, 20 bp, synthetic construct
  misc_feature 1..20: note = chemically synthesized
  source 1..20: mol_type = other DNA
ctgcccgccgcctgcaggcc

SEQ ID NO: 47130 - DNA, 20 bp, synthetic construct
  misc_feature 1..20: note = chemically synthesized
  source 1..20: mol_type = other DNA
tgcccgccgcctgcaggccc

SEQ ID NO: 47131 - DNA, 20 bp, synthetic construct
  misc_feature 1..20: note = chemically synthesized
  source 1..20: mol_type = other DNA
tgcaggcccaggctgcccgc

SEQ ID NO: 47132 - DNA, 20 bp, synthetic construct
  misc_feature 1..20: note = chemically synthesized
  source 1..20: mol_type = other DNA
gcaggcccaggctgcccgcc

SEQ ID NO: 47133 - DNA, 20 bp, synthetic construct
  misc_feature 1..20: note = chemically synthesized
  source 1..20: mol_type = other DNA
caggcccaggctgcccgccg

SEQ ID NO: 47134 - DNA, 20 bp, synthetic construct
  misc_feature 1..20: note = chemically synthesized
  source 1..20: mol_type = other DNA
cccgccggggatacctcacc

SEQ ID NO: 47135 - DNA, 20 bp, synthetic construct
  misc_feature 1..20: note = chemically synthesized
  source 1..20: mol_type = other DNA
aagatcctgcatgtcttcca

SEQ ID NO: 47136 - DNA, 20 bp, synthetic construct
  misc_feature 1..20: note = chemically synthesized
  source 1..20: mol_type = other DNA
gtcttccatggccttcttcc

SEQ ID NO: 47137 - DNA, 20 bp, synthetic construct
  misc_feature 1..20: note = chemically synthesized
  source 1..20: mol_type = other DNA
tggccttcttcctggcttcc

SEQ ID NO: 47138 - DNA, 20 bp, synthetic construct
  misc_feature 1..20: note = chemically synthesized
  source 1..20: mol_type = other DNA
ttcttcctggcttcctggtg

SEQ ID NO: 47139 - DNA, 20 bp, synthetic construct
  misc_feature 1..20: note = chemically synthesized
  source 1..20: mol_type = other DNA
cctggcttcctggtgaagat

SEQ ID NO: 47140 - DNA, 20 bp, synthetic construct
  misc_feature 1..20: note = chemically synthesized
  source 1..20: mol_type = other DNA
ggcttcctggtgaagatgag

SEQ ID NO: 47141 - DNA, 20 bp, synthetic construct
  misc_feature 1..20: note = chemically synthesized
  source 1..20: mol_type = other DNA
gaagatgagtggcgacctgc

SEQ ID NO: 47142 - DNA, 20 bp, synthetic construct
  misc_feature 1..20: note = chemically synthesized
  source 1..20: mol_type = other DNA
agatgagtggcgacctgctg

SEQ ID NO: 47143 - DNA, 20 bp, synthetic construct
  misc_feature 1..20: note = chemically synthesized
  source 1..20: mol_type = other DNA
gagtggcgacctgctggagc

SEQ ID NO: 47144 - DNA, 20 bp, synthetic construct
  misc_feature 1..20: note = chemically synthesized
  source 1..20: mol_type = other DNA
ggcgacctgctggagctggt

SEQ ID NO: 47145 - DNA, 20 bp, synthetic construct
  misc_feature 1..20: note = chemically synthesized
  source 1..20: mol_type = other DNA
agctggtgagccaccctttt

SEQ ID NO: 47146 - DNA, 20 bp, synthetic construct
  misc_feature 1..20: note = chemically synthesized
  source 1..20: mol_type = other DNA
gctggtgagccacccttttt

SEQ ID NO: 47147 - DNA, 20 bp, synthetic construct
  misc_feature 1..20: note = chemically synthesized
  source 1..20: mol_type = other DNA
tgagccaccctttttgggaa

SEQ ID NO: 47148 - DNA, 20 bp, synthetic construct
  misc_feature 1..20: note = chemically synthesized
  source 1..20: mol_type = other DNA
ttgggaatggcacttcctga

SEQ ID NO: 47149 - DNA, 20 bp, synthetic construct
  misc_feature 1..20: note = chemically synthesized
  source 1..20: mol_type = other DNA
tgggaatggcacttcctgat

SEQ ID NO: 47150 - DNA, 20 bp, synthetic construct
  misc_feature 1..20: note = chemically synthesized
  source 1..20: mol_type = other DNA
gggaatggcacttcctgata

SEQ ID NO: 47151 - DNA, 20 bp, synthetic construct
  misc_feature 1..20: note = chemically synthesized
  source 1..20: mol_type = other DNA
atggcacttcctgatagggc

SEQ ID NO: 47152 - DNA, 20 bp, synthetic construct
  misc_feature 1..20: note = chemically synthesized
  source 1..20: mol_type = other DNA
tggcacttcctgatagggct

SEQ ID NO: 47153 - DNA, 20 bp, synthetic construct
  misc_feature 1..20: note = chemically synthesized
  source 1..20: mol_type = other DNA
ctgggccactgcatatacac

SEQ ID NO: 47154 - DNA, 20 bp, synthetic construct
  misc_feature 1..20: note = chemically synthesized
  source 1..20: mol_type = other DNA
tgggccactgcatatacact

SEQ ID NO: 47155 - DNA, 20 bp, synthetic construct
  misc_feature 1..20: note = chemically synthesized
  source 1..20: mol_type = other DNA
gggccactgcatatacactg

SEQ ID NO: 47156 - DNA, 20 bp, synthetic construct
  misc_feature 1..20: note = chemically synthesized
  source 1..20: mol_type = other DNA
tatacactggggactgtgct

SEQ ID NO: 47157 - DNA, 20 bp, synthetic construct
  misc_feature 1..20: note = chemically synthesized
  source 1..20: mol_type = other DNA
acactggggactgtgcttag

SEQ ID NO: 47158 - DNA, 20 bp, synthetic construct
  misc_feature 1..20: note = chemically synthesized
  source 1..20: mol_type = other DNA
cactggggactgtgcttagt

SEQ ID NO: 47159 - DNA, 20 bp, synthetic construct
  misc_feature 1..20: note = chemically synthesized
  source 1..20: mol_type = other DNA
gtaggcccattgctgaaaat

SEQ ID NO: 47160 - DNA, 20 bp, synthetic construct
  misc_feature 1..20: note = chemically synthesized
  source 1..20: mol_type = other DNA
ggcccattgctgaaaatcag

SEQ ID NO: 47161 - DNA, 20 bp, synthetic construct
  misc_feature 1..20: note = chemically synthesized
  source 1..20: mol_type = other DNA
gcccattgctgaaaatcaga

SEQ ID NO: 47162 - DNA, 20 bp, synthetic construct
  misc_feature 1..20: note = chemically synthesized
  source 1..20: mol_type = other DNA
cccattgctgaaaatcagaa

SEQ ID NO: 47163 - DNA, 20 bp, synthetic construct
  misc_feature 1..20: note = chemically synthesized
  source 1..20: mol_type = other DNA
ccattgctgaaaatcagaag

SEQ ID NO: 47164 - DNA, 20 bp, synthetic construct
  misc_feature 1..20: note = chemically synthesized
  source 1..20: mol_type = other DNA
tgctgaaaatcagaagggga

SEQ ID NO: 47165 - DNA, 20 bp, synthetic construct
  misc_feature 1..20: note = chemically synthesized
  source 1..20: mol_type = other DNA
gaaaatcagaaggggacagc

SEQ ID NO: 47166 - DNA, 20 bp, synthetic construct
  misc_feature 1..20: note = chemically synthesized
  source 1..20: mol_type = other DNA
ggggacagcaagtatgtatt

SEQ ID NO: 47167 - DNA, 20 bp, synthetic construct
  misc_feature 1..20: note = chemically synthesized
  source 1..20: mol_type = other DNA
agtatgtattgagcacttat

SEQ ID NO: 47168 - DNA, 20 bp, synthetic construct
  misc_feature 1..20: note = chemically synthesized
  source 1..20: mol_type = other DNA
gtatgtattgagcacttatc

SEQ ID NO: 47169 - DNA, 20 bp, synthetic construct
  misc_feature 1..20: note = chemically synthesized
  source 1..20: mol_type = other DNA
ttgagcacttatcgggtacc

SEQ ID NO: 47170 - DNA, 20 bp, synthetic construct
  misc_feature 1..20: note = chemically synthesized
  source 1..20: mol_type = other DNA
cacttatcgggtaccaagca

SEQ ID NO: 47171 - DNA, 20 bp, synthetic construct
  misc_feature 1..20: note = chemically synthesized
  source 1..20: mol_type = other DNA
gtaccaagcacagtaactac

SEQ ID NO: 47172 - DNA, 20 bp, synthetic construct
  misc_feature 1..20: note = chemically synthesized
  source 1..20: mol_type = other DNA
gtaactactggctttctgta

SEQ ID NO: 47173 - DNA, 20 bp, synthetic construct
  misc_feature 1..20: note = chemically synthesized
  source 1..20: mol_type = other DNA
ttctgtatagaattcccttt

SEQ ID NO: 47174 - DNA, 20 bp, synthetic construct
  misc_feature 1..20: note = chemically synthesized
  source 1..20: mol_type = other DNA
tatagaattccctttaagcc

SEQ ID NO: 47175 - DNA, 20 bp, synthetic construct
  misc_feature 1..20: note = chemically synthesized
  source 1..20: mol_type = other DNA
ctttaagcctggccatgccc

SEQ ID NO: 47176 - DNA, 20 bp, synthetic construct
  misc_feature 1..20: note = chemically synthesized
  source 1..20: mol_type = other DNA
taagcctggccatgccccag

SEQ ID NO: 47177 - DNA, 20 bp, synthetic construct
  misc_feature 1..20: note = chemically synthesized
  source 1..20: mol_type = other DNA
gtacgtctatcttcatttga

SEQ ID NO: 47178 - DNA, 20 bp, synthetic construct
  misc_feature 1..20: note = chemically synthesized
  source 1..20: mol_type = other DNA
tctatcttcatttgaaagac

SEQ ID NO: 47179 - DNA, 20 bp, synthetic construct
  misc_feature 1..20: note = chemically synthesized
  source 1..20: mol_type = other DNA
ctatcttcatttgaaagacg

SEQ ID NO: 47180 - DNA, 20 bp, synthetic construct
  misc_feature 1..20: note = chemically synthesized
  source 1..20: mol_type = other DNA
atcttcatttgaaagacgag

SEQ ID NO: 47181 - DNA, 20 bp, synthetic construct
  misc_feature 1..20: note = chemically synthesized
  source 1..20: mol_type = other DNA
tttgaaagacgaggagactg

SEQ ID NO: 47182 - DNA, 20 bp, synthetic construct
  misc_feature 1..20: note = chemically synthesized
  source 1..20: mol_type = other DNA
aagacgaggagactgaagtt

SEQ ID NO: 47183 - DNA, 20 bp, synthetic construct
  misc_feature 1..20: note = chemically synthesized
  source 1..20: mol_type = other DNA
gacgaggagactgaagttca

SEQ ID NO: 47184 - DNA, 20 bp, synthetic construct
  misc_feature 1..20: note = chemically synthesized
  source 1..20: mol_type = other DNA
acgaggagactgaagttcag

SEQ ID NO: 47185 - DNA, 20 bp, synthetic construct
  misc_feature 1..20: note = chemically synthesized
  source 1..20: mol_type = other DNA
cgaggagactgaagttcaga

SEQ ID NO: 47186 - DNA, 20 bp, synthetic construct
  misc_feature 1..20: note = chemically synthesized
  source 1..20: mol_type = other DNA
gaggagactgaagttcagag

SEQ ID NO: 47187 - DNA, 20 bp, synthetic construct
  misc_feature 1..20: note = chemically synthesized
  source 1..20: mol_type = other DNA
gaagttcagaggggaccaca

SEQ ID NO: 47188 - DNA, 20 bp, synthetic construct
  misc_feature 1..20: note = chemically synthesized
  source 1..20: mol_type = other DNA
ttcagaggggaccacacaga

SEQ ID NO: 47189 - DNA, 20 bp, synthetic construct
  misc_feature 1..20: note = chemically synthesized
  source 1..20: mol_type = other DNA
gaggggaccacacagacagc

SEQ ID NO: 47190 - DNA, 20 bp, synthetic construct
  misc_feature 1..20: note = chemically synthesized
  source 1..20: mol_type = other DNA
aggggaccacacagacagct

SEQ ID NO: 47191 - DNA, 20 bp, synthetic construct
  misc_feature 1..20: note = chemically synthesized
  source 1..20: mol_type = other DNA
ggggaccacacagacagcta

SEQ ID NO: 47192 - DNA, 20 bp, synthetic construct
  misc_feature 1..20: note = chemically synthesized
  source 1..20: mol_type = other DNA
gggaccacacagacagctag

SEQ ID NO: 47193 - DNA, 20 bp, synthetic construct
  misc_feature 1..20: note = chemically synthesized
  source 1..20: mol_type = other DNA
accacacagacagctagggg

SEQ ID NO: 47194 - DNA, 20 bp, synthetic construct
  misc_feature 1..20: note = chemically synthesized
  source 1..20: mol_type = other DNA
cacacagacagctaggggta

SEQ ID NO: 47195 - DNA, 20 bp, synthetic construct
  misc_feature 1..20: note = chemically synthesized
  source 1..20: mol_type = other DNA
agacagctaggggtagagcc

SEQ ID NO: 47196 - DNA, 20 bp, synthetic construct
  misc_feature 1..20: note = chemically synthesized
  source 1..20: mol_type = other DNA
agagcctggatcaaacccat

SEQ ID NO: 47197 - DNA, 20 bp, synthetic construct
  misc_feature 1..20: note = chemically synthesized
  source 1..20: mol_type = other DNA
aaacccattggtctgcctgc

SEQ ID NO: 47198 - DNA, 20 bp, synthetic construct
  misc_feature 1..20: note = chemically synthesized
  source 1..20: mol_type = other DNA
gccaatgcatctgctgccta

SEQ ID NO: 47199 - DNA, 20 bp, synthetic construct
  misc_feature 1..20: note = chemically synthesized
  source 1..20: mol_type = other DNA
ctgctgcctacggaaacctg

SEQ ID NO: 47200 - DNA, 20 bp, synthetic construct
  misc_feature 1..20: note = chemically synthesized
  source 1..20: mol_type = other DNA
tgctgcctacggaaacctgt

SEQ ID NO: 47201 - DNA, 20 bp, synthetic construct
  misc_feature 1..20: note = chemically synthesized
  source 1..20: mol_type = other DNA
gctgcctacggaaacctgta

SEQ ID NO: 47202 - DNA, 20 bp, synthetic construct
  misc_feature 1..20: note = chemically synthesized
  source 1..20: mol_type = other DNA
ctacggaaacctgtagggac

SEQ ID NO: 47203 - DNA, 20 bp, synthetic construct
  misc_feature 1..20: note = chemically synthesized
  source 1..20: mol_type = other DNA
tacggaaacctgtagggaca

SEQ ID NO: 47204 - DNA, 20 bp, synthetic construct
  misc_feature 1..20: note = chemically synthesized
  source 1..20: mol_type = other DNA
aacctgtagggacaaggccc

SEQ ID NO: 47205 - DNA, 20 bp, synthetic construct
  misc_feature 1..20: note = chemically synthesized
  source 1..20: mol_type = other DNA
acctgtagggacaaggccct

SEQ ID NO: 47206 - DNA, 20 bp, synthetic construct
  misc_feature 1..20: note = chemically synthesized
  source 1..20: mol_type = other DNA
ggacaaggccctgggatgtt

SEQ ID NO: 47207 - DNA, 20 bp, synthetic construct
  misc_feature 1..20: note = chemically synthesized
  source 1..20: mol_type = other DNA
caaggccctgggatgttcag

SEQ ID NO: 47208 - DNA, 20 bp, synthetic construct
  misc_feature 1..20: note = chemically synthesized
  source 1..20: mol_type = other DNA
aggccctgggatgttcagtg

SEQ ID NO: 47209 - DNA, 20 bp, synthetic construct
  misc_feature 1..20: note = chemically synthesized
  source 1..20: mol_type = other DNA
tgggatgttcagtggagcct

SEQ ID NO: 47210 - DNA, 20 bp, synthetic construct
  misc_feature 1..20: note = chemically synthesized
  source 1..20: mol_type = other DNA
gcctgagtcattttataaaa

SEQ ID NO: 47211 - DNA, 20 bp, synthetic construct
  misc_feature 1..20: note = chemically synthesized
  source 1..20: mol_type = other DNA
tttataaaaaagcatgactc

SEQ ID NO: 47212 - DNA, 20 bp, synthetic construct
  misc_feature 1..20: note = chemically synthesized
  source 1..20: mol_type = other DNA
ttataaaaaagcatgactct

SEQ ID NO: 47213 - DNA, 20 bp, synthetic construct
  misc_feature 1..20: note = chemically synthesized
  source 1..20: mol_type = other DNA
tataaaaaagcatgactcta

SEQ ID NO: 47214 - DNA, 20 bp, synthetic construct
  misc_feature 1..20: note = chemically synthesized
  source 1..20: mol_type = other DNA
tagggtccaaaattcctttg

SEQ ID NO: 47215 - DNA, 20 bp, synthetic construct
  misc_feature 1..20: note = chemically synthesized
  source 1..20: mol_type = other DNA
cctttgaagctgttgctatc

SEQ ID NO: 47216 - DNA, 20 bp, synthetic construct
  misc_feature 1..20: note = chemically synthesized
  source 1..20: mol_type = other DNA
tttgaagctgttgctatcca

SEQ ID NO: 47217 - DNA, 20 bp, synthetic construct
  misc_feature 1..20: note = chemically synthesized
  source 1..20: mol_type = other DNA
agctgttgctatccagagtg

SEQ ID NO: 47218 - DNA, 20 bp, synthetic construct
  misc_feature 1..20: note = chemically synthesized
  source 1..20: mol_type = other DNA
ccagagtgaagtcccttctt

SEQ ID NO: 47219 - DNA, 20 bp, synthetic construct
  misc_feature 1..20: note = chemically synthesized
  source 1..20: mol_type = other DNA
cagagtgaagtcccttcttt

SEQ ID NO: 47220 - DNA, 20 bp, synthetic construct
  misc_feature 1..20: note = chemically synthesized
  source 1..20: mol_type = other DNA
gtgaagtcccttctttagga

SEQ ID NO: 47221 - DNA, 20 bp, synthetic construct
  misc_feature 1..20: note = chemically synthesized
  source 1..20: mol_type = other DNA
tgaagtcccttctttaggac

SEQ ID NO: 47222 - DNA, 20 bp, synthetic construct
  misc_feature 1..20: note = chemically synthesized
  source 1..20: mol_type = other DNA
gaagtcccttctttaggaca

SEQ ID NO: 47223 - DNA, 20 bp, synthetic construct
  misc_feature 1..20: note = chemically synthesized
  source 1..20: mol_type = other DNA
gtcccttctttaggacaggg

SEQ ID NO: 47224 - DNA, 20 bp, synthetic construct
  misc_feature 1..20: note = chemically synthesized
  source 1..20: mol_type = other DNA
agggtggccctcctccctcc

SEQ ID NO: 47225 - DNA, 20 bp, synthetic construct
  misc_feature 1..20: note = chemically synthesized
  source 1..20: mol_type = other DNA
cctcctggatgtcacatctt

SEQ ID NO: 47226 - DNA, 20 bp, synthetic construct
  misc_feature 1..20: note = chemically synthesized
  source 1..20: mol_type = other DNA
cctggatgtcacatcttcgg

SEQ ID NO: 47227 - DNA, 20 bp, synthetic construct
  misc_feature 1..20: note = chemically synthesized
  source 1..20: mol_type = other DNA
tggatgtcacatcttcggtg

SEQ ID NO: 47228 - DNA, 20 bp, synthetic construct
  misc_feature 1..20: note = chemically synthesized
  source 1..20: mol_type = other DNA
ggatgtcacatcttcggtgg

SEQ ID NO: 47229 - DNA, 20 bp, synthetic construct
  misc_feature 1..20: note = chemically synthesized
  source 1..20: mol_type = other DNA
gatgtcacatcttcggtgga

SEQ ID NO: 47230 - DNA, 20 bp, synthetic construct
  misc_feature 1..20: note = chemically synthesized
  source 1..20: mol_type = other DNA
atgtcacatcttcggtggag

SEQ ID NO: 47231 - DNA, 20 bp, synthetic construct
  misc_feature 1..20: note = chemically synthesized
  source 1..20: mol_type = other DNA
tcacatcttcggtggagggg

SEQ ID NO: 47232 - DNA, 20 bp, synthetic construct
  misc_feature 1..20: note = chemically synthesized
  source 1..20: mol_type = other DNA
atcttcggtggaggggcaga

SEQ ID NO: 47233 - DNA, 20 bp, synthetic construct
  misc_feature 1..20: note = chemically synthesized
  source 1..20: mol_type = other DNA
tcttcggtggaggggcagaa

SEQ ID NO: 47234 - DNA, 20 bp, synthetic construct
  misc_feature 1..20: note = chemically synthesized
  source 1..20: mol_type = other DNA
cttcggtggaggggcagaaa

SEQ ID NO: 47235 - DNA, 20 bp, synthetic construct
  misc_feature 1..20: note = chemically synthesized
  source 1..20: mol_type = other DNA
ttcggtggaggggcagaaag

SEQ ID NO: 47236 - DNA, 20 bp, synthetic construct
  misc_feature 1..20: note = chemically synthesized
  source 1..20: mol_type = other DNA
tggaggggcagaaaggggac

SEQ ID NO: 47237 - DNA, 20 bp, synthetic construct
  misc_feature 1..20: note = chemically synthesized
  source 1..20: mol_type = other DNA
ggaggggcagaaaggggact

SEQ ID NO: 47238 - DNA, 20 bp, synthetic construct
  misc_feature 1..20: note = chemically synthesized
  source 1..20: mol_type = other DNA
actgggtattctcctcaccc

SEQ ID NO: 47239 - DNA, 20 bp, synthetic construct
  misc_feature 1..20: note = chemically synthesized
  source 1..20: mol_type = other DNA
tattctcctcaccctggccc

SEQ ID NO: 47240 - DNA, 20 bp, synthetic construct
  misc_feature 1..20: note = chemically synthesized
  source 1..20: mol_type = other DNA
tgtgcttctgcaccaccttc

SEQ ID NO: 47241 - DNA, 20 bp, synthetic construct
  misc_feature 1..20: note = chemically synthesized
  source 1..20: mol_type = other DNA
acaaataaaaacgttttttt

SEQ ID NO: 47242 - DNA, 20 bp, synthetic construct
  misc_feature 1..20: note = chemically synthesized
  source 1..20: mol_type = other DNA
aaacgtttttttaagatttg

SEQ ID NO: 47243 - DNA, 20 bp, synthetic construct
  misc_feature 1..20: note = chemically synthesized
  source 1..20: mol_type = other DNA
ttttttaagatttgaagcac

SEQ ID NO: 47244 - DNA, 20 bp, synthetic construct
  misc_feature 1..20: note = chemically synthesized
  source 1..20: mol_type = other DNA
tttttaagatttgaagcact

SEQ ID NO: 47245 - DNA, 20 bp, synthetic construct
  misc_feature 1..20: note = chemically synthesized
  source 1..20: mol_type = other DNA
ttttaagatttgaagcacta

SEQ ID NO: 47246 - DNA, 20 bp, synthetic construct
  misc_feature 1..20: note = chemically synthesized
  source 1..20: mol_type = other DNA
aagatttgaagcactagggc

SEQ ID NO: 47247 - DNA, 20 bp, synthetic construct
  misc_feature 1..20: note = chemically synthesized
  source 1..20: mol_type = other DNA
agatttgaagcactagggcc

SEQ ID NO: 47248 - DNA, 20 bp, synthetic construct
  misc_feature 1..20: note = chemically synthesized
  source 1..20: mol_type = other DNA
gatttgaagcactagggcca

SEQ ID NO: 47249 - DNA, 20 bp, synthetic construct
  misc_feature 1..20: note = chemically synthesized
  source 1..20: mol_type = other DNA
tgaagcactagggccagggt

SEQ ID NO: 47250 - DNA, 20 bp, synthetic construct
  misc_feature 1..20: note = chemically synthesized
  source 1..20: mol_type = other DNA
gaagcactagggccagggtg

SEQ ID NO: 47251 - DNA, 20 bp, synthetic construct
  misc_feature 1..20: note = chemically synthesized
  source 1..20: mol_type = other DNA
agcactagggccagggtgag

SEQ ID NO: 47252 - DNA, 20 bp, synthetic construct
  misc_feature 1..20: note = chemically synthesized
  source 1..20: mol_type = other DNA
gccagggtgaggagaatacc

SEQ ID NO: 47253 - DNA, 20 bp, synthetic construct
  misc_feature 1..20: note = chemically synthesized
  source 1..20: mol_type = other DNA
ccctttctgcccctccaccg

SEQ ID NO: 47254 - DNA, 20 bp, synthetic construct
  misc_feature 1..20: note = chemically synthesized
  source 1..20: mol_type = other DNA
tccaccgaagatgtgacatc

SEQ ID NO: 47255 - DNA, 20 bp, synthetic construct
  misc_feature 1..20: note = chemically synthesized
  source 1..20: mol_type = other DNA
ccaccgaagatgtgacatcc

SEQ ID NO: 47256 - DNA, 20 bp, synthetic construct
  misc_feature 1..20: note = chemically synthesized
  source 1..20: mol_type = other DNA
accgaagatgtgacatccag

SEQ ID NO: 47257 - DNA, 20 bp, synthetic construct
  misc_feature 1..20: note = chemically synthesized
  source 1..20: mol_type = other DNA
ccgaagatgtgacatccagg

SEQ ID NO: 47258 - DNA, 20 bp, synthetic construct
  misc_feature 1..20: note = chemically synthesized
  source 1..20: mol_type = other DNA
cgaagatgtgacatccagga

SEQ ID NO: 47259 - DNA, 20 bp, synthetic construct
  misc_feature 1..20: note = chemically synthesized
  source 1..20: mol_type = other DNA
aagatgtgacatccaggagg

SEQ ID NO: 47260 - DNA, 20 bp, synthetic construct
  misc_feature 1..20: note = chemically synthesized
  source 1..20: mol_type = other DNA
agatgtgacatccaggaggg

SEQ ID NO: 47261 - DNA, 20 bp, synthetic construct
  misc_feature 1..20: note = chemically synthesized
  source 1..20: mol_type = other DNA
atgtgacatccaggagggag

SEQ ID NO: 47262 - DNA, 20 bp, synthetic construct
  misc_feature 1..20: note = chemically synthesized
  source 1..20: mol_type = other DNA
tgtgacatccaggagggagg

SEQ ID NO: 47263 - DNA, 20 bp, synthetic construct
  misc_feature 1..20: note = chemically synthesized
  source 1..20: mol_type = other DNA
gtgacatccaggagggagga

SEQ ID NO: 47264 - DNA, 20 bp, synthetic construct
  misc_feature 1..20: note = chemically synthesized
  source 1..20: mol_type = other DNA
aggagggccaccctgtccta

SEQ ID NO: 47265 - DNA, 20 bp, synthetic construct
  misc_feature 1..20: note = chemically synthesized
  source 1..20: mol_type = other DNA
agggccaccctgtcctaaag

SEQ ID NO: 47266 - DNA, 20 bp, synthetic construct
  misc_feature 1..20: note = chemically synthesized
  source 1..20: mol_type = other DNA
gggccaccctgtcctaaaga

SEQ ID NO: 47267 - DNA, 20 bp, synthetic construct
  misc_feature 1..20: note = chemically synthesized
  source 1..20: mol_type = other DNA
ggccaccctgtcctaaagaa

SEQ ID NO: 47268 - DNA, 20 bp, synthetic construct
  misc_feature 1..20: note = chemically synthesized
  source 1..20: mol_type = other DNA
ctaaagaagggacttcactc

SEQ ID NO: 47269 - DNA, 20 bp, synthetic construct
  misc_feature 1..20: note = chemically synthesized
  source 1..20: mol_type = other DNA
agaagggacttcactctgga

SEQ ID NO: 47270 - DNA, 20 bp, synthetic construct
  misc_feature 1..20: note = chemically synthesized
  source 1..20: mol_type = other DNA
gacttcactctggatagcaa

SEQ ID NO: 47271 - DNA, 20 bp, synthetic construct
  misc_feature 1..20: note = chemically synthesized
  source 1..20: mol_type = other DNA
tctggatagcaacagcttca

SEQ ID NO: 47272 - DNA, 20 bp, synthetic construct
  misc_feature 1..20: note = chemically synthesized
  source 1..20: mol_type = other DNA
ctggatagcaacagcttcaa

SEQ ID NO: 47273 - DNA, 20 bp, synthetic construct
  misc_feature 1..20: note = chemically synthesized
  source 1..20: mol_type = other DNA
caacagcttcaaaggaattt

SEQ ID NO: 47274 - DNA, 20 bp, synthetic construct
  misc_feature 1..20: note = chemically synthesized
  source 1..20: mol_type = other DNA
ttcaaaggaattttggaccc

SEQ ID NO: 47275 - DNA, 20 bp, synthetic construct
  misc_feature 1..20: note = chemically synthesized
  source 1..20: mol_type = other DNA
caaaggaattttggacccta

SEQ ID NO: 47276 - DNA, 20 bp, synthetic construct
  misc_feature 1..20: note = chemically synthesized
  source 1..20: mol_type = other DNA
tgcttttttataaaatgact

SEQ ID NO: 47277 - DNA, 20 bp, synthetic construct
  misc_feature 1..20: note = chemically synthesized
  source 1..20: mol_type = other DNA
gcttttttataaaatgactc

SEQ ID NO: 47278 - DNA, 20 bp, synthetic construct
  misc_feature 1..20: note = chemically synthesized
  source 1..20: mol_type = other DNA
tcaggctccactgaacatcc

SEQ ID NO: 47279 - DNA, 20 bp, synthetic construct
  misc_feature 1..20: note = chemically synthesized
  source 1..20: mol_type = other DNA
caggctccactgaacatccc

SEQ ID NO: 47280 - DNA, 20 bp, synthetic construct
  misc_feature 1..20: note = chemically synthesized
  source 1..20: mol_type = other DNA
aggctccactgaacatccca

SEQ ID NO: 47281 - DNA, 20 bp, synthetic construct
  misc_feature 1..20: note = chemically synthesized
  source 1..20: mol_type = other DNA
atcccagggccttgtcccta

SEQ ID NO: 47282 - DNA, 20 bp, synthetic construct
  misc_feature 1..20: note = chemically synthesized
  source 1..20: mol_type = other DNA
tcccagggccttgtccctac

SEQ ID NO: 47283 - DNA, 20 bp, synthetic construct
  misc_feature 1..20: note = chemically synthesized
  source 1..20: mol_type = other DNA
cttgtccctacaggtttccg

SEQ ID NO: 47284 - DNA, 20 bp, synthetic construct
  misc_feature 1..20: note = chemically synthesized
  source 1..20: mol_type = other DNA
ttgtccctacaggtttccgt

SEQ ID NO: 47285 - DNA, 20 bp, synthetic construct
  misc_feature 1..20: note = chemically synthesized
  source 1..20: mol_type = other DNA
tccctacaggtttccgtagg

SEQ ID NO: 47286 - DNA, 20 bp, synthetic construct
  misc_feature 1..20: note = chemically synthesized
  source 1..20: mol_type = other DNA
ctacaggtttccgtaggcag

SEQ ID NO: 47287 - DNA, 20 bp, synthetic construct
  misc_feature 1..20: note = chemically synthesized
  source 1..20: mol_type = other DNA
tccgtaggcagcagatgcat

SEQ ID NO: 47288 - DNA, 20 bp, synthetic construct
  misc_feature 1..20: note = chemically synthesized
  source 1..20: mol_type = other DNA
ggcagcagatgcattggcac

SEQ ID NO: 47289 - DNA, 20 bp, synthetic construct
  misc_feature 1..20: note = chemically synthesized
  source 1..20: mol_type = other DNA
cagatgcattggcacaagaa

SEQ ID NO: 47290 - DNA, 20 bp, synthetic construct
  misc_feature 1..20: note = chemically synthesized
  source 1..20: mol_type = other DNA
tgcattggcacaagaatggc

SEQ ID NO: 47291 - DNA, 20 bp, synthetic construct
  misc_feature 1..20: note = chemically synthesized
  source 1..20: mol_type = other DNA
attggcacaagaatggctgg

SEQ ID NO: 47292 - DNA, 20 bp, synthetic construct
  misc_feature 1..20: note = chemically synthesized
  source 1..20: mol_type = other DNA
ttggcacaagaatggctggc

SEQ ID NO: 47293 - DNA, 20 bp, synthetic construct
  misc_feature 1..20: note = chemically synthesized
  source 1..20: mol_type = other DNA
gcacaagaatggctggcagg

SEQ ID NO: 47294 - DNA, 20 bp, synthetic construct
  misc_feature 1..20: note = chemically synthesized
  source 1..20: mol_type = other DNA
atggctggcaggcagaccaa

SEQ ID NO: 47295 - DNA, 20 bp, synthetic construct
  misc_feature 1..20: note = chemically synthesized
  source 1..20: mol_type = other DNA
tggctggcaggcagaccaat

SEQ ID NO: 47296 - DNA, 20 bp, synthetic construct
  misc_feature 1..20: note = chemically synthesized
  source 1..20: mol_type = other DNA
gcagaccaatgggtttgatc

SEQ ID NO: 47297 - DNA, 20 bp, synthetic construct
  misc_feature 1..20: note = chemically synthesized
  source 1..20: mol_type = other DNA
cagaccaatgggtttgatcc

SEQ ID NO: 47298 - DNA, 20 bp, synthetic construct
  misc_feature 1..20: note = chemically synthesized
  source 1..20: mol_type = other DNA
tttgatccaggctctacccc

SEQ ID NO: 47299 - DNA, 20 bp, synthetic construct
  misc_feature 1..20: note = chemically synthesized
  source 1..20: mol_type = other DNA
tctacccctagctgtctgtg

SEQ ID NO: 47300 - DNA, 20 bp, synthetic construct
  misc_feature 1..20: note = chemically synthesized
  source 1..20: mol_type = other DNA
gtgtggtcccctctgaactt

SEQ ID NO: 47301 - DNA, 20 bp, synthetic construct
  misc_feature 1..20: note = chemically synthesized
  source 1..20: mol_type = other DNA
gtctcctcgtctttcaaatg

SEQ ID NO: 47302 - DNA, 20 bp, synthetic construct
  misc_feature 1..20: note = chemically synthesized
  source 1..20: mol_type = other DNA
cctcgtctttcaaatgaaga

SEQ ID NO: 47303 - DNA, 20 bp, synthetic construct
  misc_feature 1..20: note = chemically synthesized
  source 1..20: mol_type = other DNA
aatgaagatagacgtaccac

SEQ ID NO: 47304 - DNA, 20 bp, synthetic construct
  misc_feature 1..20: note = chemically synthesized
  source 1..20: mol_type = other DNA
atgaagatagacgtaccact

SEQ ID NO: 47305 - DNA, 20 bp, synthetic construct
  misc_feature 1..20: note = chemically synthesized
  source 1..20: mol_type = other DNA
tgaagatagacgtaccactg

SEQ ID NO: 47306 - DNA, 20 bp, synthetic construct
  misc_feature 1..20: note = chemically synthesized
  source 1..20: mol_type = other DNA
atagacgtaccactggggca

SEQ ID NO: 47307 - DNA, 20 bp, synthetic construct
  misc_feature 1..20: note = chemically synthesized
  source 1..20: mol_type = other DNA
acgtaccactggggcatggc

SEQ ID NO: 47308 - DNA, 20 bp, synthetic construct
  misc_feature 1..20: note = chemically synthesized
  source 1..20: mol_type = other DNA
cgtaccactggggcatggcc

SEQ ID NO: 47309 - DNA, 20 bp, synthetic construct
  misc_feature 1..20: note = chemically synthesized
  source 1..20: mol_type = other DNA
ctggggcatggccaggctta

SEQ ID NO: 47310 - DNA, 20 bp, synthetic construct
  misc_feature 1..20: note = chemically synthesized
  source 1..20: mol_type = other DNA
tggggcatggccaggcttaa

SEQ ID NO: 47311 - DNA, 20 bp, synthetic construct
  misc_feature 1..20: note = chemically synthesized
  source 1..20: mol_type = other DNA
ggggcatggccaggcttaaa

SEQ ID NO: 47312 - DNA, 20 bp, synthetic construct
  misc_feature 1..20: note = chemically synthesized
  source 1..20: mol_type = other DNA
ggcttaaagggaattctata

SEQ ID NO: 47313 - DNA, 20 bp, synthetic construct
  misc_feature 1..20: note = chemically synthesized
  source 1..20: mol_type = other DNA
taaagggaattctatacaga

SEQ ID NO: 47314 - DNA, 20 bp, synthetic construct
  misc_feature 1..20: note = chemically synthesized
  source 1..20: mol_type = other DNA
gggaattctatacagaaagc

SEQ ID NO: 47315 - DNA, 20 bp, synthetic construct
  misc_feature 1..20: note = chemically synthesized
  source 1..20: mol_type = other DNA
aattctatacagaaagccag

SEQ ID NO: 47316 - DNA, 20 bp, synthetic construct
  misc_feature 1..20: note = chemically synthesized
  source 1..20: mol_type = other DNA
aagccagtagttactgtgct

SEQ ID NO: 47317 - DNA, 20 bp, synthetic construct
  misc_feature 1..20: note = chemically synthesized
  source 1..20: mol_type = other DNA
tactgtgcttggtacccgat

SEQ ID NO: 47318 - DNA, 20 bp, synthetic construct
  misc_feature 1..20: note = chemically synthesized
  source 1..20: mol_type = other DNA
tgctgtccccttctgatttt

SEQ ID NO: 47319 - DNA, 20 bp, synthetic construct
  misc_feature 1..20: note = chemically synthesized
  source 1..20: mol_type = other DNA
ccccttctgattttcagcaa

SEQ ID NO: 47320 - DNA, 20 bp, synthetic construct
  misc_feature 1..20: note = chemically synthesized
  source 1..20: mol_type = other DNA
cccttctgattttcagcaat

SEQ ID NO: 47321 - DNA, 20 bp, synthetic construct
  misc_feature 1..20: note = chemically synthesized
  source 1..20: mol_type = other DNA
ttttcagcaatgggcctact

SEQ ID NO: 47322 - DNA, 20 bp, synthetic construct
  misc_feature 1..20: note = chemically synthesized
  source 1..20: mol_type = other DNA
agcaatgggcctactaagca

SEQ ID NO: 47323 - DNA, 20 bp, synthetic construct
  misc_feature 1..20: note = chemically synthesized
  source 1..20: mol_type = other DNA
ggcctactaagcacagtccc

SEQ ID NO: 47324 - DNA, 20 bp, synthetic construct
  misc_feature 1..20: note = chemically synthesized
  source 1..20: mol_type = other DNA
cacagtccccagtgtatatg

SEQ ID NO: 47325 - DNA, 20 bp, synthetic construct
  misc_feature 1..20: note = chemically synthesized
  source 1..20: mol_type = other DNA
agtccccagtgtatatgcag

SEQ ID NO: 47326 - DNA, 20 bp, synthetic construct
  misc_feature 1..20: note = chemically synthesized
  source 1..20: mol_type = other DNA
ccagtgtatatgcagtggcc

SEQ ID NO: 47327 - DNA, 20 bp, synthetic construct
  misc_feature 1..20: note = chemically synthesized
  source 1..20: mol_type = other DNA
atgcagtggcccagccctat

SEQ ID NO: 47328 - DNA, 20 bp, synthetic construct
  misc_feature 1..20: note = chemically synthesized
  source 1..20: mol_type = other DNA
tgcagtggcccagccctatc

SEQ ID NO: 47329 - DNA, 20 bp, synthetic construct
  misc_feature 1..20: note = chemically synthesized
  source 1..20: mol_type = other DNA
agtggcccagccctatcagg

SEQ ID NO: 47330 - DNA, 20 bp, synthetic construct
  misc_feature 1..20: note = chemically synthesized
  source 1..20: mol_type = other DNA
caggaagtgccattcccaaa

SEQ ID NO: 47331 - DNA, 20 bp, synthetic construct
  misc_feature 1..20: note = chemically synthesized
  source 1..20: mol_type = other DNA
aggaagtgccattcccaaaa

SEQ ID NO: 47332 - DNA, 20 bp, synthetic construct
  misc_feature 1..20: note = chemically synthesized
  source 1..20: mol_type = other DNA
ggaagtgccattcccaaaaa

SEQ ID NO: 47333 - DNA, 20 bp, synthetic construct
  misc_feature 1..20: note = chemically synthesized
  source 1..20: mol_type = other DNA
agtgccattcccaaaaaggg

SEQ ID NO: 47334 - DNA, 20 bp, synthetic construct
  misc_feature 1..20: note = chemically synthesized
  source 1..20: mol_type = other DNA
tcccaaaaagggtggctcac

SEQ ID NO: 47335 - DNA, 20 bp, synthetic construct
  misc_feature 1..20: note = chemically synthesized
  source 1..20: mol_type = other DNA
aaagggtggctcaccagctc

SEQ ID NO: 47336 - DNA, 20 bp, synthetic construct
  misc_feature 1..20: note = chemically synthesized
  source 1..20: mol_type = other DNA
gggtggctcaccagctccag

SEQ ID NO: 47337 - DNA, 20 bp, synthetic construct
  misc_feature 1..20: note = chemically synthesized
  source 1..20: mol_type = other DNA
ggtggctcaccagctccagc

SEQ ID NO: 47338 - DNA, 20 bp, synthetic construct
  misc_feature 1..20: note = chemically synthesized
  source 1..20: mol_type = other DNA
aggtcgccactcatcttcac

SEQ ID NO: 47339 - DNA, 20 bp, synthetic construct
  misc_feature 1..20: note = chemically synthesized
  source 1..20: mol_type = other DNA
ggtcgccactcatcttcacc

SEQ ID NO: 47340 - DNA, 20 bp, synthetic construct
  misc_feature 1..20: note = chemically synthesized
  source 1..20: mol_type = other DNA
cgccactcatcttcaccagg

SEQ ID NO: 47341 - DNA, 20 bp, synthetic construct
  misc_feature 1..20: note = chemically synthesized
  source 1..20: mol_type = other DNA
actcatcttcaccaggaagc

SEQ ID NO: 47342 - DNA, 20 bp, synthetic construct
  misc_feature 1..20: note = chemically synthesized
  source 1..20: mol_type = other DNA
ctcatcttcaccaggaagcc

SEQ ID NO: 47343 - DNA, 20 bp, synthetic construct
  misc_feature 1..20: note = chemically synthesized
  source 1..20: mol_type = other DNA
atcttcaccaggaagccagg

SEQ ID NO: 47344 - DNA, 20 bp, synthetic construct
  misc_feature 1..20: note = chemically synthesized
  source 1..20: mol_type = other DNA
ttcaccaggaagccaggaag

SEQ ID NO: 47345 - DNA, 20 bp, synthetic construct
  misc_feature 1..20: note = chemically synthesized
  source 1..20: mol_type = other DNA
tcaccaggaagccaggaaga

SEQ ID NO: 47346 - DNA, 20 bp, synthetic construct
  misc_feature 1..20: note = chemically synthesized
  source 1..20: mol_type = other DNA
ggaagccaggaagaaggcca

SEQ ID NO: 47347 - DNA, 20 bp, synthetic construct
  misc_feature 1..20: note = chemically synthesized
  source 1..20: mol_type = other DNA
agccaggaagaaggccatgg

SEQ ID NO: 47348 - DNA, 20 bp, synthetic construct
  misc_feature 1..20: note = chemically synthesized
  source 1..20: mol_type = other DNA
agaaggccatggaagacatg

SEQ ID NO: 47349 - DNA, 20 bp, synthetic construct
  misc_feature 1..20: note = chemically synthesized
  source 1..20: mol_type = other DNA
gaaggccatggaagacatgc

SEQ ID NO: 47350 - DNA, 20 bp, synthetic construct
  misc_feature 1..20: note = chemically synthesized
  source 1..20: mol_type = other DNA
atggaagacatgcaggatct

SEQ ID NO: 47351 - DNA, 20 bp, synthetic construct
  misc_feature 1..20: note = chemically synthesized
  source 1..20: mol_type = other DNA
aagacatgcaggatcttggt

SEQ ID NO: 47352 - DNA, 20 bp, synthetic construct
  misc_feature 1..20: note = chemically synthesized
  source 1..20: mol_type = other DNA
agacatgcaggatcttggtg

SEQ ID NO: 47353 - DNA, 20 bp, synthetic construct
  misc_feature 1..20: note = chemically synthesized
  source 1..20: mol_type = other DNA
ggatcttggtgaggtatccc

SEQ ID NO: 47354 - DNA, 20 bp, synthetic construct
  misc_feature 1..20: note = chemically synthesized
  source 1..20: mol_type = other DNA
tcttggtgaggtatccccgg

SEQ ID NO: 47355 - DNA, 20 bp, synthetic construct
  misc_feature 1..20: note = chemically synthesized
  source 1..20: mol_type = other DNA
cttggtgaggtatccccggc

SEQ ID NO: 47356 - DNA, 20 bp, synthetic construct
  misc_feature 1..20: note = chemically synthesized
  source 1..20: mol_type = other DNA
ggtgaggtatccccggcggg

SEQ ID NO: 47357 - DNA, 20 bp, synthetic construct
  misc_feature 1..20: note = chemically synthesized
  source 1..20: mol_type = other DNA
ggtatccccggcgggcagcc

SEQ ID NO: 47358 - DNA, 20 bp, synthetic construct
  misc_feature 1..20: note = chemically synthesized
  source 1..20: mol_type = other DNA
gtatccccggcgggcagcct

SEQ ID NO: 47359 - DNA, 20 bp, synthetic construct
  misc_feature 1..20: note = chemically synthesized
  source 1..20: mol_type = other DNA
cggcgggcagcctgggcctg

SEQ ID NO: 47360 - DNA, 20 bp, synthetic construct
  misc_feature 1..20: note = chemically synthesized
  source 1..20: mol_type = other DNA
ggcgggcagcctgggcctgc

SEQ ID NO: 47361 - DNA, 20 bp, synthetic construct
  misc_feature 1..20: note = chemically synthesized
  source 1..20: mol_type = other DNA
gggcagcctgggcctgcagg

SEQ ID NO: 47362 - DNA, 20 bp, synthetic construct
  misc_feature 1..20: note = chemically synthesized
  source 1..20: mol_type = other DNA
cagcctgggcctgcaggcgg

SEQ ID NO: 47363 - DNA, 20 bp, synthetic construct
  misc_feature 1..20: note = chemically synthesized
  source 1..20: mol_type = other DNA
agcctgggcctgcaggcggc

SEQ ID NO: 47364 - DNA, 20 bp, synthetic construct
  misc_feature 1..20: note = chemically synthesized
  source 1..20: mol_type = other DNA
ctgggcctgcaggcggcggg

SEQ ID NO: 47365 - DNA, 20 bp, synthetic construct
  misc_feature 1..20: note = chemically synthesized
  source 1..20: mol_type = other DNA
gggcagtgcgctctgactgc

SEQ ID NO: 47366 - DNA, 20 bp, synthetic construct
  misc_feature 1..20: note = chemically synthesized
  source 1..20: mol_type = other DNA
gcagtgcgctctgactgcga

SEQ ID NO: 47367 - DNA, 20 bp, synthetic construct
  misc_feature 1..20: note = chemically synthesized
  source 1..20: mol_type = other DNA
cagtgcgctctgactgcgag

SEQ ID NO: 47368 - DNA, 20 bp, synthetic construct
  misc_feature 1..20: note = chemically synthesized
  source 1..20: mol_type = other DNA
tgcgctctgactgcgagagg

SEQ ID NO: 47369 - DNA, 20 bp, synthetic construct
  misc_feature 1..20: note = chemically synthesized
  source 1..20: mol_type = other DNA
gcgctctgactgcgagaggt

SEQ ID NO: 47370 - DNA, 20 bp, synthetic construct
  misc_feature 1..20: note = chemically synthesized
  source 1..20: mol_type = other DNA
gagaggtgggtctcctcctt

SEQ ID NO: 47371 - DNA, 20 bp, synthetic construct
  misc_feature 1..20: note = chemically synthesized
  source 1..20: mol_type = other DNA
cctccttcagcaccaccacg

SEQ ID NO: 47372 - DNA, 20 bp, synthetic construct
  misc_feature 1..20: note = chemically synthesized
  source 1..20: mol_type = other DNA
ctccttcagcaccaccacgt

SEQ ID NO: 47373 - DNA, 20 bp, synthetic construct
  misc_feature 1..20: note = chemically synthesized
  source 1..20: mol_type = other DNA
cagcaccaccacgtaggtgc

SEQ ID NO: 47374 - DNA, 20 bp, synthetic construct
  misc_feature 1..20: note = chemically synthesized
  source 1..20: mol_type = other DNA
agcaccaccacgtaggtgcc

SEQ ID NO: 47375 - DNA, 20 bp, synthetic construct
  misc_feature 1..20: note = chemically synthesized
  source 1..20: mol_type = other DNA
taggtgccaggcaacctcca

SEQ ID NO: 47376 - DNA, 20 bp, synthetic construct
  misc_feature 1..20: note = chemically synthesized
  source 1..20: mol_type = other DNA
caggcaacctccacggatcc

SEQ ID NO: 47377 - DNA, 20 bp, synthetic construct
  misc_feature 1..20: note = chemically synthesized
  source 1..20: mol_type = other DNA
cacggatcctggccccatgc

SEQ ID NO: 47378 - DNA, 20 bp, synthetic construct
  misc_feature 1..20: note = chemically synthesized
  source 1..20: mol_type = other DNA
acggatcctggccccatgca

SEQ ID NO: 47379 - DNA, 20 bp, synthetic construct
  misc_feature 1..20: note = chemically synthesized
  source 1..20: mol_type = other DNA
ggatcctggccccatgcaag

SEQ ID NO: 47380 - DNA, 20 bp, synthetic construct
  misc_feature 1..20: note = chemically synthesized
  source 1..20: mol_type = other DNA
gatcctggccccatgcaagg

SEQ ID NO: 47381 - DNA, 20 bp, synthetic construct
  misc_feature 1..20: note = chemically synthesized
  source 1..20: mol_type = other DNA
caaggaggaacatgatgaca

SEQ ID NO: 47382 - DNA, 20 bp, synthetic construct
  misc_feature 1..20: note = chemically synthesized
  source 1..20: mol_type = other DNA
ggaggaacatgatgacatgg

SEQ ID NO: 47383 - DNA, 20 bp, synthetic construct
  misc_feature 1..20: note = chemically synthesized
  source 1..20: mol_type = other DNA
atgatgacatggaagaaacc

SEQ ID NO: 47384 - DNA, 20 bp, synthetic construct
  misc_feature 1..20: note = chemically synthesized
  source 1..20: mol_type = other DNA
ggaagaaacccagcaaaccc

SEQ ID NO: 47385 - DNA, 20 bp, synthetic construct
  misc_feature 1..20: note = chemically synthesized
  source 1..20: mol_type = other DNA
gaagaaacccagcaaaccct

SEQ ID NO: 47386 - DNA, 20 bp, synthetic construct
  misc_feature 1..20: note = chemically synthesized
  source 1..20: mol_type = other DNA
ctacttacaaattacaacaa

SEQ ID NO: 47387 - DNA, 20 bp, synthetic construct
  misc_feature 1..20: note = chemically synthesized
  source 1..20: mol_type = other DNA
acttacaaattacaacaaaa

SEQ ID NO: 47388 - DNA, 20 bp, synthetic construct
  misc_feature 1..20: note = chemically synthesized
  source 1..20: mol_type = other DNA
ttacaacaaaagagacacaa

SEQ ID NO: 47389 - DNA, 20 bp, synthetic construct
  misc_feature 1..20: note = chemically synthesized
  source 1..20: mol_type = other DNA
acaacaaaagagacacaaca

SEQ ID NO: 47390 - DNA, 20 bp, synthetic construct
  misc_feature 1..20: note = chemically synthesized
  source 1..20: mol_type = other DNA
aaaagagacacaacagagta

SEQ ID NO: 47391 - DNA, 20 bp, synthetic construct
  misc_feature 1..20: note = chemically synthesized
  source 1..20: mol_type = other DNA
agagacacaacagagtatag

SEQ ID NO: 47392 - DNA, 20 bp, synthetic construct
  misc_feature 1..20: note = chemically synthesized
  source 1..20: mol_type = other DNA
acagagtatagtagatgata

SEQ ID NO: 47393 - DNA, 20 bp, synthetic construct
  misc_feature 1..20: note = chemically synthesized
  source 1..20: mol_type = other DNA
gagtatagtagatgataaag

SEQ ID NO: 47394 - DNA, 20 bp, synthetic construct
  misc_feature 1..20: note = chemically synthesized
  source 1..20: mol_type = other DNA
gataaagaagttaccaaatg

SEQ ID NO: 47395 - DNA, 20 bp, synthetic construct
  misc_feature 1..20: note = chemically synthesized
  source 1..20: mol_type = other DNA
gttaccaaatgcggaccaaa

SEQ ID NO: 47396 - DNA, 20 bp, synthetic construct
  misc_feature 1..20: note = chemically synthesized
  source 1..20: mol_type = other DNA
gcggaccaaaaagcaaatta

SEQ ID NO: 47397 - DNA, 20 bp, synthetic construct
  misc_feature 1..20: note = chemically synthesized
  source 1..20: mol_type = other DNA
agcaaattaaagaactcata

SEQ ID NO: 47398 - DNA, 20 bp, synthetic construct
  misc_feature 1..20: note = chemically synthesized
  source 1..20: mol_type = other DNA
gcaaattaaagaactcatat

SEQ ID NO: 47399 - DNA, 20 bp, synthetic construct
  misc_feature 1..20: note = chemically synthesized
  source 1..20: mol_type = other DNA
gccaactattattattcaca

SEQ ID NO: 47400 - DNA, 20 bp, synthetic construct
  misc_feature 1..20: note = chemically synthesized
  source 1..20: mol_type = other DNA
acactttcaaatgtgccatt

SEQ ID NO: 47401 - DNA, 20 bp, synthetic construct
  misc_feature 1..20: note = chemically synthesized
  source 1..20: mol_type = other DNA
cactttcaaatgtgccattc

SEQ ID NO: 47402 - DNA, 20 bp, synthetic construct
  misc_feature 1..20: note = chemically synthesized
  source 1..20: mol_type = other DNA
atgtgccattcaggcaaaaa

SEQ ID NO: 47403 - DNA, 20 bp, synthetic construct
  misc_feature 1..20: note = chemically synthesized
  source 1..20: mol_type = other DNA
tgtgccattcaggcaaaaat

SEQ ID NO: 47404 - DNA, 20 bp, synthetic construct
  misc_feature 1..20: note = chemically synthesized
  source 1..20: mol_type = other DNA
tcaggcaaaaatgggaacta

SEQ ID NO: 47405 - DNA, 20 bp, synthetic construct
  misc_feature 1..20: note = chemically synthesized
  source 1..20: mol_type = other DNA
caggcaaaaatgggaactac

SEQ ID NO: 47406 - DNA, 20 bp, synthetic construct
  misc_feature 1..20: note = chemically synthesized
  source 1..20: mol_type = other DNA
ctacgggccacactcgacaa

SEQ ID NO: 47407 - DNA, 20 bp, synthetic construct
  misc_feature 1..20: note = chemically synthesized
  source 1..20: mol_type = other DNA
tacgggccacactcgacaac

SEQ ID NO: 47408 - DNA, 20 bp, synthetic construct
  misc_feature 1..20: note = chemically synthesized
  source 1..20: mol_type = other DNA
ttttcctctgtacctgcacc

SEQ ID NO: 47409 - DNA, 20 bp, synthetic construct
  misc_feature 1..20: note = chemically synthesized
  source 1..20: mol_type = other DNA
tacctgcacccagctctcta

SEQ ID NO: 47410 - DNA, 20 bp, synthetic construct
  misc_feature 1..20: note = chemically synthesized
  source 1..20: mol_type = other DNA
acctgcacccagctctctac

SEQ ID NO: 47411 - DNA, 20 bp, synthetic construct
  misc_feature 1..20: note = chemically synthesized
  source 1..20: mol_type = other DNA
cacccagctctctacgggcc

SEQ ID NO: 47412 - DNA, 20 bp, synthetic construct
  misc_feature 1..20: note = chemically synthesized
  source 1..20: mol_type = other DNA
tctacgggcctggtcgctcc

SEQ ID NO: 47413 - DNA, 20 bp, synthetic construct
  misc_feature 1..20: note = chemically synthesized
  source 1..20: mol_type = other DNA
acgggcctggtcgctcctgg

SEQ ID NO: 47414 - DNA, 20 bp, synthetic construct
  misc_feature 1..20: note = chemically synthesized
  source 1..20: mol_type = other DNA
gctcctggtggccctgccca

SEQ ID NO: 47415 - DNA, 20 bp, synthetic construct
  misc_feature 1..20: note = chemically synthesized
  source 1..20: mol_type = other DNA
ctcctggtggccctgcccaa

SEQ ID NO: 47416 - DNA, 20 bp, synthetic construct
  misc_feature 1..20: note = chemically synthesized
  source 1..20: mol_type = other DNA
ccaccccctcccccatgccc

SEQ ID NO: 47417 - DNA, 20 bp, synthetic construct
  misc_feature 1..20: note = chemically synthesized
  source 1..20: mol_type = other DNA
cccctcccccatgccccagt

SEQ ID NO: 47418 - DNA, 20 bp, synthetic construct
  misc_feature 1..20: note = chemically synthesized
  source 1..20: mol_type = other DNA
tgccccagtcagaataaatt

SEQ ID NO: 47419 - DNA, 20 bp, synthetic construct
  misc_feature 1..20: note = chemically synthesized
  source 1..20: mol_type = other DNA
gccccagtcagaataaattg

SEQ ID NO: 47420 - DNA, 20 bp, synthetic construct
  misc_feature 1..20: note = chemically synthesized
  source 1..20: mol_type = other DNA
ccccagtcagaataaattga

SEQ ID NO: 47421 - DNA, 20 bp, synthetic construct
  misc_feature 1..20: note = chemically synthesized
  source 1..20: mol_type = other DNA
taaattgagggaaaaaatca

SEQ ID NO: 47422 - DNA, 20 bp, synthetic construct
  misc_feature 1..20: note = chemically synthesized
  source 1..20: mol_type = other DNA
aaattgagggaaaaaatcat

SEQ ID NO: 47423 - DNA, 20 bp, synthetic construct
  misc_feature 1..20: note = chemically synthesized
  source 1..20: mol_type = other DNA
agggaaaaaatcatgggctt

SEQ ID NO: 47424 - DNA, 20 bp, synthetic construct
  misc_feature 1..20: note = chemically synthesized
  source 1..20: mol_type = other DNA
ggaaaaaatcatgggctttg

SEQ ID NO: 47425 - DNA, 20 bp, synthetic construct
  misc_feature 1..20: note = chemically synthesized
  source 1..20: mol_type = other DNA
aaaatcatgggctttggagc

SEQ ID NO: 47426 - DNA, 20 bp, synthetic construct
  misc_feature 1..20: note = chemically synthesized
  source 1..20: mol_type = other DNA
aaatcatgggctttggagcc

SEQ ID NO: 47427 - DNA, 20 bp, synthetic construct
  misc_feature 1..20: note = chemically synthesized
  source 1..20: mol_type = other DNA
gctttggagccaggaaaccg

SEQ ID NO: 47428 - DNA, 20 bp, synthetic construct
  misc_feature 1..20: note = chemically synthesized
  source 1..20: mol_type = other DNA
gaaaccgtggacctgaattc

SEQ ID NO: 47429 - DNA, 20 bp, synthetic construct
  misc_feature 1..20: note = chemically synthesized
  source 1..20: mol_type = other DNA
attccagctccaatatttac

SEQ ID NO: 47430 - DNA, 20 bp, synthetic construct
  misc_feature 1..20: note = chemically synthesized
  source 1..20: mol_type = other DNA
tccaatatttactggttgtg

SEQ ID NO: 47431 - DNA, 20 bp, synthetic construct
  misc_feature 1..20: note = chemically synthesized
  source 1..20: mol_type = other DNA
tttactggttgtgcagccat

SEQ ID NO: 47432 - DNA, 20 bp, synthetic construct
  misc_feature 1..20: note = chemically synthesized
  source 1..20: mol_type = other DNA
ctggttgtgcagccatgagc

SEQ ID NO: 47433 - DNA, 20 bp, synthetic construct
  misc_feature 1..20: note = chemically synthesized
  source 1..20: mol_type = other DNA
gagcaagtcactcaacctct

SEQ ID NO: 47434 - DNA, 20 bp, synthetic construct
  misc_feature 1..20: note = chemically synthesized
  source 1..20: mol_type = other DNA
gcaagtcactcaacctctcg

SEQ ID NO: 47435 - DNA, 20 bp, synthetic construct
  misc_feature 1..20: note = chemically synthesized
  source 1..20: mol_type = other DNA
cactcaacctctcggagcct

SEQ ID NO: 47436 - DNA, 20 bp, synthetic construct
  misc_feature 1..20: note = chemically synthesized
  source 1..20: mol_type = other DNA
cagatacctctgctgtattg

SEQ ID NO: 47437 - DNA, 20 bp, synthetic construct
  misc_feature 1..20: note = chemically synthesized
  source 1..20: mol_type = other DNA
gatacctctgctgtattgta

SEQ ID NO: 47438 - DNA, 20 bp, synthetic construct
  misc_feature 1..20: note = chemically synthesized
  source 1..20: mol_type = other DNA
ctgctgtattgtagagacca

SEQ ID NO: 47439 - DNA, 20 bp, synthetic construct
  misc_feature 1..20: note = chemically synthesized
  source 1..20: mol_type = other DNA
agaccacagtacctatgaca

SEQ ID NO: 47440 - DNA, 20 bp, synthetic construct
  misc_feature 1..20: note = chemically synthesized
  source 1..20: mol_type = other DNA
gaccacagtacctatgacat

SEQ ID NO: 47441 - DNA, 20 bp, synthetic construct
  misc_feature 1..20: note = chemically synthesized
  source 1..20: mol_type = other DNA
tacctatgacataggcctgc

SEQ ID NO: 47442 - DNA, 20 bp, synthetic construct
  misc_feature 1..20: note = chemically synthesized
  source 1..20: mol_type = other DNA
acctatgacataggcctgct

SEQ ID NO: 47443 - DNA, 20 bp, synthetic construct
  misc_feature 1..20: note = chemically synthesized
  source 1..20: mol_type = other DNA
atgacataggcctgctggga

SEQ ID NO: 47444 - DNA, 20 bp, synthetic construct
  misc_feature 1..20: note = chemically synthesized
  source 1..20: mol_type = other DNA
ataggcctgctgggaaagtc

SEQ ID NO: 47445 - DNA, 20 bp, synthetic construct
  misc_feature 1..20: note = chemically synthesized
  source 1..20: mol_type = other DNA
aggcctgctgggaaagtcaa

SEQ ID NO: 47446 - DNA, 20 bp, synthetic construct
  misc_feature 1..20: note = chemically synthesized
  source 1..20: mol_type = other DNA
gctgggaaagtcaagagtga

SEQ ID NO: 47447 - DNA, 20 bp, synthetic construct
  misc_feature 1..20: note = chemically synthesized
  source 1..20: mol_type = other DNA
ggttatataaatctcccatc

SEQ ID NO: 47448 - DNA, 20 bp, synthetic construct
  misc_feature 1..20: note = chemically synthesized
  source 1..20: mol_type = other DNA
atccagatgctctacaaatg

SEQ ID NO: 47449 - DNA, 20 bp, synthetic construct
  misc_feature 1..20: note = chemically synthesized
  source 1..20: mol_type = other DNA
tccagatgctctacaaatgc

SEQ ID NO: 47450 - DNA, 20 bp, synthetic construct
  misc_feature 1..20: note = chemically synthesized
  source 1..20: mol_type = other DNA
agatgctctacaaatgcagg

SEQ ID NO: 47451 - DNA, 20 bp, synthetic construct
  misc_feature 1..20: note = chemically synthesized
  source 1..20: mol_type = other DNA
tgctctacaaatgcaggcag

SEQ ID NO: 47452 - DNA, 20 bp, synthetic construct
  misc_feature 1..20: note = chemically synthesized
  source 1..20: mol_type = other DNA
gctctacaaatgcaggcaga

SEQ ID NO: 47453 - DNA, 20 bp, synthetic construct
  misc_feature 1..20: note = chemically synthesized
  source 1..20: mol_type = other DNA
ctctacaaatgcaggcagaa

SEQ ID NO: 47454 - DNA, 20 bp, synthetic construct
  misc_feature 1..20: note = chemically synthesized
  source 1..20: mol_type = other DNA
tgcaggcagaagggatgact

SEQ ID NO: 47455 - DNA, 20 bp, synthetic construct
  misc_feature 1..20: note = chemically synthesized
  source 1..20: mol_type = other DNA
ggcagaagggatgactaagt

SEQ ID NO: 47456 - DNA, 20 bp, synthetic construct
  misc_feature 1..20: note = chemically synthesized
  source 1..20: mol_type = other DNA
aagggatgactaagtgagca

SEQ ID NO: 47457 - DNA, 20 bp, synthetic construct
  misc_feature 1..20: note = chemically synthesized
  source 1..20: mol_type = other DNA
agggatgactaagtgagcaa

SEQ ID NO: 47458 - DNA, 20 bp, synthetic construct
  misc_feature 1..20: note = chemically synthesized
  source 1..20: mol_type = other DNA
agcaaaggcaacacttctta

SEQ ID NO: 47459 - DNA, 20 bp, synthetic construct
  misc_feature 1..20: note = chemically synthesized
  source 1..20: mol_type = other DNA
caaaggcaacacttcttaaa

SEQ ID NO: 47460 - DNA, 20 bp, synthetic construct
  misc_feature 1..20: note = chemically synthesized
  source 1..20: mol_type = other DNA
aaggcaacacttcttaaaga

SEQ ID NO: 47461 - DNA, 20 bp, synthetic construct
  misc_feature 1..20: note = chemically synthesized
  source 1..20: mol_type = other DNA
ggcaacacttcttaaagaga

SEQ ID NO: 47462 - DNA, 20 bp, synthetic construct
  misc_feature 1..20: note = chemically synthesized
  source 1..20: mol_type = other DNA
cacttcttaaagagagagaa

SEQ ID NO: 47463 - DNA, 20 bp, synthetic construct
  misc_feature 1..20: note = chemically synthesized
  source 1..20: mol_type = other DNA
cttaaagagagagaaaagtc

SEQ ID NO: 47464 - DNA, 20 bp, synthetic construct
  misc_feature 1..20: note = chemically synthesized
  source 1..20: mol_type = other DNA
ttaaagagagagaaaagtca

SEQ ID NO: 47465 - DNA, 20 bp, synthetic construct
  misc_feature 1..20: note = chemically synthesized
  source 1..20: mol_type = other DNA
aaaagtcaaggccactgtct

SEQ ID NO: 47466 - DNA, 20 bp, synthetic construct
  misc_feature 1..20: note = chemically synthesized
  source 1..20: mol_type = other DNA
tccttttgtgttgctatata

SEQ ID NO: 47467 - DNA, 20 bp, synthetic construct
  misc_feature 1..20: note = chemically synthesized
  source 1..20: mol_type = other DNA
ccttttgtgttgctatataa

SEQ ID NO: 47468 - DNA, 20 bp, synthetic construct
  misc_feature 1..20: note = chemically synthesized
  source 1..20: mol_type = other DNA
gctatataaaggaatacctg

SEQ ID NO: 47469 - DNA, 20 bp, synthetic construct
  misc_feature 1..20: note = chemically synthesized
  source 1..20: mol_type = other DNA
ctatataaaggaatacctga

SEQ ID NO: 47470 - DNA, 20 bp, synthetic construct
  misc_feature 1..20: note = chemically synthesized
  source 1..20: mol_type = other DNA
ataaaggaatacctgaaggt

SEQ ID NO: 47471 - DNA, 20 bp, synthetic construct
  misc_feature 1..20: note = chemically synthesized
  source 1..20: mol_type = other DNA
cctgaaggtgagtaatttac

SEQ ID NO: 47472 - DNA, 20 bp, synthetic construct
  misc_feature 1..20: note = chemically synthesized
  source 1..20: mol_type = other DNA
ctgaaggtgagtaatttaca

SEQ ID NO: 47473 - DNA, 20 bp, synthetic construct
  misc_feature 1..20: note = chemically synthesized
  source 1..20: mol_type = other DNA
ggtgagtaatttacaaggaa

SEQ ID NO: 47474 - DNA, 20 bp, synthetic construct
  misc_feature 1..20: note = chemically synthesized
  source 1..20: mol_type = other DNA
gtgagtaatttacaaggaaa

SEQ ID NO: 47475 - DNA, 20 bp, synthetic construct
  misc_feature 1..20: note = chemically synthesized
  source 1..20: mol_type = other DNA
tgagtaatttacaaggaaaa

SEQ ID NO: 47476 - DNA, 20 bp, synthetic construct
  misc_feature 1..20: note = chemically synthesized
  source 1..20: mol_type = other DNA
acaaggaaaagggatttatt

SEQ ID NO: 47477 - DNA, 20 bp, synthetic construct
  misc_feature 1..20: note = chemically synthesized
  source 1..20: mol_type = other DNA
tattcagctcatgattctgc

SEQ ID NO: 47478 - DNA, 20 bp, synthetic construct
  misc_feature 1..20: note = chemically synthesized
  source 1..20: mol_type = other DNA
tcatgattctgcaagctctc

SEQ ID NO: 47479 - DNA, 20 bp, synthetic construct
  misc_feature 1..20: note = chemically synthesized
  source 1..20: mol_type = other DNA
catgattctgcaagctctcc

SEQ ID NO: 47480 - DNA, 20 bp, synthetic construct
  misc_feature 1..20: note = chemically synthesized
  source 1..20: mol_type = other DNA
gattctgcaagctctccagg

SEQ ID NO: 47481 - DNA, 20 bp, synthetic construct
  misc_feature 1..20: note = chemically synthesized
  source 1..20: mol_type = other DNA
tgcaagctctccaggaagca

SEQ ID NO: 47482 - DNA, 20 bp, synthetic construct
  misc_feature 1..20: note = chemically synthesized
  source 1..20: mol_type = other DNA
ctctccaggaagcatggcac

SEQ ID NO: 47483 - DNA, 20 bp, synthetic construct
  misc_feature 1..20: note = chemically synthesized
  source 1..20: mol_type = other DNA
atggcaccagcatctgcttc

SEQ ID NO: 47484 - DNA, 20 bp, synthetic construct
  misc_feature 1..20: note = chemically synthesized
  source 1..20: mol_type = other DNA
caccagcatctgcttctggt

SEQ ID NO: 47485 - DNA, 20 bp, synthetic construct
  misc_feature 1..20: note = chemically synthesized
  source 1..20: mol_type = other DNA
accagcatctgcttctggtg

SEQ ID NO: 47486 - DNA, 20 bp, synthetic construct
  misc_feature 1..20: note = chemically synthesized
  source 1..20: mol_type = other DNA
ccagcatctgcttctggtga

SEQ ID NO: 47487 - DNA, 20 bp, synthetic construct
  misc_feature 1..20: note = chemically synthesized
  source 1..20: mol_type = other DNA
ctgcttctggtgagggcctt

SEQ ID NO: 47488 - DNA, 20 bp, synthetic construct
  misc_feature 1..20: note = chemically synthesized
  source 1..20: mol_type = other DNA
ccttaagctgctttcactga

SEQ ID NO: 47489 - DNA, 20 bp, synthetic construct
  misc_feature 1..20: note = chemically synthesized
  source 1..20: mol_type = other DNA
taagctgctttcactgatgg

SEQ ID NO: 47490 - DNA, 20 bp, synthetic construct
  misc_feature 1..20: note = chemically synthesized
  source 1..20: mol_type = other DNA
gctgctttcactgatggcag

SEQ ID NO: 47491 - DNA, 20 bp, synthetic construct
  misc_feature 1..20: note = chemically synthesized
  source 1..20: mol_type = other DNA
ctgctttcactgatggcaga

SEQ ID NO: 47492 - DNA, 20 bp, synthetic construct
  misc_feature 1..20: note = chemically synthesized
  source 1..20: mol_type = other DNA
ttcactgatggcagaaggtg

SEQ ID NO: 47493 - DNA, 20 bp, synthetic construct
  misc_feature 1..20: note = chemically synthesized
  source 1..20: mol_type = other DNA
tcactgatggcagaaggtga

SEQ ID NO: 47494 - DNA, 20 bp, synthetic construct
  misc_feature 1..20: note = chemically synthesized
  source 1..20: mol_type = other DNA
cactgatggcagaaggtgaa

SEQ ID NO: 47495 - DNA, 20 bp, synthetic construct
  misc_feature 1..20: note = chemically synthesized
  source 1..20: mol_type = other DNA
actgatggcagaaggtgaag

SEQ ID NO: 47496 - DNA, 20 bp, synthetic construct
  misc_feature 1..20: note = chemically synthesized
  source 1..20: mol_type = other DNA
tgatggcagaaggtgaaggg

SEQ ID NO: 47497 - DNA, 20 bp, synthetic construct
  misc_feature 1..20: note = chemically synthesized
  source 1..20: mol_type = other DNA
tgaaggggagcctacatgtg

SEQ ID NO: 47498 - DNA, 20 bp, synthetic construct
  misc_feature 1..20: note = chemically synthesized
  source 1..20: mol_type = other DNA
aaggggagcctacatgtgca

SEQ ID NO: 47499 - DNA, 20 bp, synthetic construct
  misc_feature 1..20: note = chemically synthesized
  source 1..20: mol_type = other DNA
atgtgcagagatcaatcaca

SEQ ID NO: 47500 - DNA, 20 bp, synthetic construct
  misc_feature 1..20: note = chemically synthesized
  source 1..20: mol_type = other DNA
gcagagatcaatcacatggc

SEQ ID NO: 47501 - DNA, 20 bp, synthetic construct
  misc_feature 1..20: note = chemically synthesized
  source 1..20: mol_type = other DNA
agagatcaatcacatggcaa

SEQ ID NO: 47502 - DNA, 20 bp, synthetic construct
  misc_feature 1..20: note = chemically synthesized
  source 1..20: mol_type = other DNA
gatcaatcacatggcaagag

SEQ ID NO: 47503 - DNA, 20 bp, synthetic construct
  misc_feature 1..20: note = chemically synthesized
  source 1..20: mol_type = other DNA
caatcacatggcaagagaag

SEQ ID NO: 47504 - DNA, 20 bp, synthetic construct
  misc_feature 1..20: note = chemically synthesized
  source 1..20: mol_type = other DNA
cacatggcaagagaagaagc

SEQ ID NO: 47505 - DNA, 20 bp, synthetic construct
  misc_feature 1..20: note = chemically synthesized
  source 1..20: mol_type = other DNA
catggcaagagaagaagcaa

SEQ ID NO: 47506 - DNA, 20 bp, synthetic construct
  misc_feature 1..20: note = chemically synthesized
  source 1..20: mol_type = other DNA
tggcaagagaagaagcaaga

SEQ ID NO: 47507 - DNA, 20 bp, synthetic construct
  misc_feature 1..20: note = chemically synthesized
  source 1..20: mol_type = other DNA
caagagaagaagcaagagag

SEQ ID NO: 47508 - DNA, 20 bp, synthetic construct
  misc_feature 1..20: note = chemically synthesized
  source 1..20: mol_type = other DNA
agagaagaagcaagagagaa

SEQ ID NO: 47509 - DNA, 20 bp, synthetic construct
  misc_feature 1..20: note = chemically synthesized
  source 1..20: mol_type = other DNA
agaagaagcaagagagaaga

SEQ ID NO: 47510 - DNA, 20 bp, synthetic construct
  misc_feature 1..20: note = chemically synthesized
  source 1..20: mol_type = other DNA
gaagaagcaagagagaagag

SEQ ID NO: 47511 - DNA, 20 bp, synthetic construct
  misc_feature 1..20: note = chemically synthesized
  source 1..20: mol_type = other DNA
aagaagcaagagagaagaga

SEQ ID NO: 47512 - DNA, 20 bp, synthetic construct
  misc_feature 1..20: note = chemically synthesized
  source 1..20: mol_type = other DNA
gaagcaagagagaagagagg

SEQ ID NO: 47513 - DNA, 20 bp, synthetic construct
  misc_feature 1..20: note = chemically synthesized
  source 1..20: mol_type = other DNA
aagcaagagagaagagaggg

SEQ ID NO: 47514 - DNA, 20 bp, synthetic construct
  misc_feature 1..20: note = chemically synthesized
  source 1..20: mol_type = other DNA
agagaagagagggaggtgcc

SEQ ID NO: 47515 - DNA, 20 bp, synthetic construct
  misc_feature 1..20: note = chemically synthesized
  source 1..20: mol_type = other DNA
gccaagctctttttaataat

SEQ ID NO: 47516 - DNA, 20 bp, synthetic construct
  misc_feature 1..20: note = chemically synthesized
  source 1..20: mol_type = other DNA
ctttttaataatcagccttc

SEQ ID NO: 47517 - DNA, 20 bp, synthetic construct
  misc_feature 1..20: note = chemically synthesized
  source 1..20: mol_type = other DNA
tttttaataatcagccttca

SEQ ID NO: 47518 - DNA, 20 bp, synthetic construct
  misc_feature 1..20: note = chemically synthesized
  source 1..20: mol_type = other DNA
ttttaataatcagccttcaa

SEQ ID NO: 47519 - DNA, 20 bp, synthetic construct
  misc_feature 1..20: note = chemically synthesized
  source 1..20: mol_type = other DNA
tcagccttcaagggaaatca

SEQ ID NO: 47520 - DNA, 20 bp, synthetic construct
  misc_feature 1..20: note = chemically synthesized
  source 1..20: mol_type = other DNA
gccttcaagggaaatcatag

SEQ ID NO: 47521 - DNA, 20 bp, synthetic construct
  misc_feature 1..20: note = chemically synthesized
  source 1..20: mol_type = other DNA
ccttcaagggaaatcatagc

SEQ ID NO: 47522 - DNA, 20 bp, synthetic construct
  misc_feature 1..20: note = chemically synthesized
  source 1..20: mol_type = other DNA
ttcaagggaaatcatagcgg

SEQ ID NO: 47523 - DNA, 20 bp, synthetic construct
  misc_feature 1..20: note = chemically synthesized
  source 1..20: mol_type = other DNA
gagaacttactcattatcac

SEQ ID NO: 47524 - DNA, 20 bp, synthetic construct
  misc_feature 1..20: note = chemically synthesized
  source 1..20: mol_type = other DNA
agaacttactcattatcaca

SEQ ID NO: 47525 - DNA, 20 bp, synthetic construct
  misc_feature 1..20: note = chemically synthesized
  source 1..20: mol_type = other DNA
cttactcattatcacaagga

SEQ ID NO: 47526 - DNA, 20 bp, synthetic construct
  misc_feature 1..20: note = chemically synthesized
  source 1..20: mol_type = other DNA
attatcacaaggacggcacc

SEQ ID NO: 47527 - DNA, 20 bp, synthetic construct
  misc_feature 1..20: note = chemically synthesized
  source 1..20: mol_type = other DNA
ggacggcaccaagcctttca

SEQ ID NO: 47528 - DNA, 20 bp, synthetic construct
  misc_feature 1..20: note = chemically synthesized
  source 1..20: mol_type = other DNA
gacggcaccaagcctttcac

SEQ ID NO: 47529 - DNA, 20 bp, synthetic construct
  misc_feature 1..20: note = chemically synthesized
  source 1..20: mol_type = other DNA
acggcaccaagcctttcaca

SEQ ID NO: 47530 - DNA, 20 bp, synthetic construct
  misc_feature 1..20: note = chemically synthesized
  source 1..20: mol_type = other DNA
cggcaccaagcctttcacag

SEQ ID NO: 47531 - DNA, 20 bp, synthetic construct
  misc_feature 1..20: note = chemically synthesized
  source 1..20: mol_type = other DNA
atgacccaaacacctcccat

SEQ ID NO: 47532 - DNA, 20 bp, synthetic construct
  misc_feature 1..20: note = chemically synthesized
  source 1..20: mol_type = other DNA
tgacccaaacacctcccatt

SEQ ID NO: 47533 - DNA, 20 bp, synthetic construct
  misc_feature 1..20: note = chemically synthesized
  source 1..20: mol_type = other DNA
taggccccacttccaacact

SEQ ID NO: 47534 - DNA, 20 bp, synthetic construct
  misc_feature 1..20: note = chemically synthesized
  source 1..20: mol_type = other DNA
aggccccacttccaacactg

SEQ ID NO: 47535 - DNA, 20 bp, synthetic construct
  misc_feature 1..20: note = chemically synthesized
  source 1..20: mol_type = other DNA
tgaggaccaaatttccacat

SEQ ID NO: 47536 - DNA, 20 bp, synthetic construct
  misc_feature 1..20: note = chemically synthesized
  source 1..20: mol_type = other DNA
ccaaatttccacatgagatt

SEQ ID NO: 47537 - DNA, 20 bp, synthetic construct
  misc_feature 1..20: note = chemically synthesized
  source 1..20: mol_type = other DNA
aaatttccacatgagatttg

SEQ ID NO: 47538 - DNA, 20 bp, synthetic construct
  misc_feature 1..20: note = chemically synthesized
  source 1..20: mol_type = other DNA
aatttccacatgagatttgg

SEQ ID NO: 47539 - DNA, 20 bp, synthetic construct
  misc_feature 1..20: note = chemically synthesized
  source 1..20: mol_type = other DNA
atttccacatgagatttgga

SEQ ID NO: 47540 - DNA, 20 bp, synthetic construct
  misc_feature 1..20: note = chemically synthesized
  source 1..20: mol_type = other DNA
tttccacatgagatttggag

SEQ ID NO: 47541 - DNA, 20 bp, synthetic construct
  misc_feature 1..20: note = chemically synthesized
  source 1..20: mol_type = other DNA
tggaggggacaaacaaatta

SEQ ID NO: 47542 - DNA, 20 bp, synthetic construct
  misc_feature 1..20: note = chemically synthesized
  source 1..20: mol_type = other DNA
aggggacaaacaaattatag

SEQ ID NO: 47543 - DNA, 20 bp, synthetic construct
  misc_feature 1..20: note = chemically synthesized
  source 1..20: mol_type = other DNA
attatagcagccactatcta

SEQ ID NO: 47544 - DNA, 20 bp, synthetic construct
  misc_feature 1..20: note = chemically synthesized
  source 1..20: mol_type = other DNA
actatctatggtgatttgtt

SEQ ID NO: 47545 - DNA, 20 bp, synthetic construct
  misc_feature 1..20: note = chemically synthesized
  source 1..20: mol_type = other DNA
atggtgatttgtttggtttt

SEQ ID NO: 47546 - DNA, 20 bp, synthetic construct
  misc_feature 1..20: note = chemically synthesized
  source 1..20: mol_type = other DNA
ttgtctgctccaactgctct

SEQ ID NO: 47547 - DNA, 20 bp, synthetic construct
  misc_feature 1..20: note = chemically synthesized
  source 1..20: mol_type = other DNA
tgtctgctccaactgctctc

SEQ ID NO: 47548 - DNA, 20 bp, synthetic construct
  misc_feature 1..20: note = chemically synthesized
  source 1..20: mol_type = other DNA
ctgctccaactgctctcagg

SEQ ID NO: 47549 - DNA, 20 bp, synthetic construct
  misc_feature 1..20: note = chemically synthesized
  source 1..20: mol_type = other DNA
tcaggcagacatacctgctt

SEQ ID NO: 47550 - DNA, 20 bp, synthetic construct
  misc_feature 1..20: note = chemically synthesized
  source 1..20: mol_type = other DNA
acctgcttaagaaccttcac

SEQ ID NO: 47551 - DNA, 20 bp, synthetic construct
  misc_feature 1..20: note = chemically synthesized
  source 1..20: mol_type = other DNA
gaaccttcactggctcccca

SEQ ID NO: 47552 - DNA, 20 bp, synthetic construct
  misc_feature 1..20: note = chemically synthesized
  source 1..20: mol_type = other DNA
tccccacagcctcatgaatc

SEQ ID NO: 47553 - DNA, 20 bp, synthetic construct
  misc_feature 1..20: note = chemically synthesized
  source 1..20: mol_type = other DNA
ccaaactccatgctcctcct

SEQ ID NO: 47554 - DNA, 20 bp, synthetic construct
  misc_feature 1..20: note = chemically synthesized
  source 1..20: mol_type = other DNA
ccctacctcaacctaccttg

SEQ ID NO: 47555 - DNA, 20 bp, synthetic construct
  misc_feature 1..20: note = chemically synthesized
  source 1..20: mol_type = other DNA
atctctgtatatatgcatct

SEQ ID NO: 47556 - DNA, 20 bp, synthetic construct
  misc_feature 1..20: note = chemically synthesized
  source 1..20: mol_type = other DNA
tatatatgcatcttggactc

SEQ ID NO: 47557 - DNA, 20 bp, synthetic construct
  misc_feature 1..20: note = chemically synthesized
  source 1..20: mol_type = other DNA
tatgcatcttggactccagt

SEQ ID NO: 47558 - DNA, 20 bp, synthetic construct
  misc_feature 1..20: note = chemically synthesized
  source 1..20: mol_type = other DNA
tgcatcttggactccagtca

SEQ ID NO: 47559 - DNA, 20 bp, synthetic construct
  misc_feature 1..20: note = chemically synthesized
  source 1..20: mol_type = other DNA
atcttggactccagtcagag

SEQ ID NO: 47560 - DNA, 20 bp, synthetic construct
  misc_feature 1..20: note = chemically synthesized
  source 1..20: mol_type = other DNA
ggactccagtcagagtagaa

SEQ ID NO: 47561 - DNA, 20 bp, synthetic construct
  misc_feature 1..20: note = chemically synthesized
  source 1..20: mol_type = other DNA
actccagtcagagtagaaca

SEQ ID NO: 47562 - DNA, 20 bp, synthetic construct
  misc_feature 1..20: note = chemically synthesized
  source 1..20: mol_type = other DNA
gagtccaccccctttaccca

SEQ ID NO: 47563 - DNA, 20 bp, synthetic construct
  misc_feature 1..20: note = chemically synthesized
  source 1..20: mol_type = other DNA
accccctttacccaaagcct

SEQ ID NO: 47564 - DNA, 20 bp, synthetic construct
  misc_feature 1..20: note = chemically synthesized
  source 1..20: mol_type = other DNA
ccccctttacccaaagcctt

SEQ ID NO: 47565 - DNA, 20 bp, synthetic construct
  misc_feature 1..20: note = chemically synthesized
  source 1..20: mol_type = other DNA
cccctttacccaaagcctta

SEQ ID NO: 47566 - DNA, 20 bp, synthetic construct
  misc_feature 1..20: note = chemically synthesized
  source 1..20: mol_type = other DNA
ccaaagccttagggccaaaa

SEQ ID NO: 47567 - DNA, 20 bp, synthetic construct
  misc_feature 1..20: note = chemically synthesized
  source 1..20: mol_type = other DNA
gccaaaacggttttgaacct

SEQ ID NO: 47568 - DNA, 20 bp, synthetic construct
  misc_feature 1..20: note = chemically synthesized
  source 1..20: mol_type = other DNA
tttgaacctcagaacttgtt

SEQ ID NO: 47569 - DNA, 20 bp, synthetic construct
  misc_feature 1..20: note = chemically synthesized
  source 1..20: mol_type = other DNA
ctcagaacttgtttggattt

SEQ ID NO: 47570 - DNA, 20 bp, synthetic construct
  misc_feature 1..20: note = chemically synthesized
  source 1..20: mol_type = other DNA
gaacttgtttggattttaga

SEQ ID NO: 47571 - DNA, 20 bp, synthetic construct
  misc_feature 1..20: note = chemically synthesized
  source 1..20: mol_type = other DNA
aacttgtttggattttagaa

SEQ ID NO: 47572 - DNA, 20 bp, synthetic construct
  misc_feature 1..20: note = chemically synthesized
  source 1..20: mol_type = other DNA
ttgtttggattttagaaagg

SEQ ID NO: 47573 - DNA, 20 bp, synthetic construct
  misc_feature 1..20: note = chemically synthesized
  source 1..20: mol_type = other DNA
ggattttagaaaggcagtaa

SEQ ID NO: 47574 - DNA, 20 bp, synthetic construct
  misc_feature 1..20: note = chemically synthesized
  source 1..20: mol_type = other DNA
gattttagaaaggcagtaat

SEQ ID NO: 47575 - DNA, 20 bp, synthetic construct
  misc_feature 1..20: note = chemically synthesized
  source 1..20: mol_type = other DNA
gaaaggcagtaatgggcaat

SEQ ID NO: 47576 - DNA, 20 bp, synthetic construct
  misc_feature 1..20: note = chemically synthesized
  source 1..20: mol_type = other DNA
aaggcagtaatgggcaatca

SEQ ID NO: 47577 - DNA, 20 bp, synthetic construct
  misc_feature 1..20: note = chemically synthesized
  source 1..20: mol_type = other DNA
atgggcaatcagagtctgct

SEQ ID NO: 47578 - DNA, 20 bp, synthetic construct
  misc_feature 1..20: note = chemically synthesized
  source 1..20: mol_type = other DNA
ggcaatcagagtctgcttgg

SEQ ID NO: 47579 - DNA, 20 bp, synthetic construct
  misc_feature 1..20: note = chemically synthesized
  source 1..20: mol_type = other DNA
agagtctgcttggaagaatc

SEQ ID NO: 47580 - DNA, 20 bp, synthetic construct
  misc_feature 1..20: note = chemically synthesized
  source 1..20: mol_type = other DNA
agtctgcttggaagaatctg

SEQ ID NO: 47581 - DNA, 20 bp, synthetic construct
  misc_feature 1..20: note = chemically synthesized
  source 1..20: mol_type = other DNA
gctgcatactgtaatctatg

SEQ ID NO: 47582 - DNA, 20 bp, synthetic construct
  misc_feature 1..20: note = chemically synthesized
  source 1..20: mol_type = other DNA
aattaaaaataatctcatgt

SEQ ID NO: 47583 - DNA, 20 bp, synthetic construct
  misc_feature 1..20: note = chemically synthesized
  source 1..20: mol_type = other DNA
aatctcatgtcagttcacgt

SEQ ID NO: 47584 - DNA, 20 bp, synthetic construct
  misc_feature 1..20: note = chemically synthesized
  source 1..20: mol_type = other DNA
atctcatgtcagttcacgtc

SEQ ID NO: 47585 - DNA, 20 bp, synthetic construct
  misc_feature 1..20: note = chemically synthesized
  source 1..20: mol_type = other DNA
taaatcacaaaaaaaacttt

SEQ ID NO: 47586 - DNA, 20 bp, synthetic construct
  misc_feature 1..20: note = chemically synthesized
  source 1..20: mol_type = other DNA
tttcgtaacattttacattt

SEQ ID NO: 47587 - DNA, 20 bp, synthetic construct
  misc_feature 1..20: note = chemically synthesized
  source 1..20: mol_type = other DNA
gtaacattttacatttcaga

SEQ ID NO: 47588 - DNA, 20 bp, synthetic construct
  misc_feature 1..20: note = chemically synthesized
  source 1..20: mol_type = other DNA
acattttacatttcagacgg

SEQ ID NO: 47589 - DNA, 20 bp, synthetic construct
  misc_feature 1..20: note = chemically synthesized
  source 1..20: mol_type = other DNA
tacatttcagacggtggata

SEQ ID NO: 47590 - DNA, 20 bp, synthetic construct
  misc_feature 1..20: note = chemically synthesized
  source 1..20: mol_type = other DNA
agacggtggataaagaactg

SEQ ID NO: 47591 - DNA, 20 bp, synthetic construct
  misc_feature 1..20: note = chemically synthesized
  source 1..20: mol_type = other DNA
acggtggataaagaactgtg

SEQ ID NO: 47592 - DNA, 20 bp, synthetic construct
  misc_feature 1..20: note = chemically synthesized
  source 1..20: mol_type = other DNA
cggtggataaagaactgtgg

SEQ ID NO: 47593 - DNA, 20 bp, synthetic construct
  misc_feature 1..20: note = chemically synthesized
  source 1..20: mol_type = other DNA
ggataaagaactgtggaggc

SEQ ID NO: 47594 - DNA, 20 bp, synthetic construct
  misc_feature 1..20: note = chemically synthesized
  source 1..20: mol_type = other DNA
gataaagaactgtggaggcc

SEQ ID NO: 47595 - DNA, 20 bp, synthetic construct
  misc_feature 1..20: note = chemically synthesized
  source 1..20: mol_type = other DNA
agaactgtggaggccaggcg

SEQ ID NO: 47596 - DNA, 20 bp, synthetic construct
  misc_feature 1..20: note = chemically synthesized
  source 1..20: mol_type = other DNA
actgtggaggccaggcgtgg

SEQ ID NO: 47597 - DNA, 20 bp, synthetic construct
  misc_feature 1..20: note = chemically synthesized
  source 1..20: mol_type = other DNA
gtggctcacacctgtaattc

SEQ ID NO: 47598 - DNA, 20 bp, synthetic construct
  misc_feature 1..20: note = chemically synthesized
  source 1..20: mol_type = other DNA
cacctgtaattcgagcactt

SEQ ID NO: 47599 - DNA, 20 bp, synthetic construct
  misc_feature 1..20: note = chemically synthesized
  source 1..20: mol_type = other DNA
acctgtaattcgagcacttt

SEQ ID NO: 47600 - DNA, 20 bp, synthetic construct
  misc_feature 1..20: note = chemically synthesized
  source 1..20: mol_type = other DNA
ctgtaattcgagcactttgg

SEQ ID NO: 47601 - DNA, 20 bp, synthetic construct
  misc_feature 1..20: note = chemically synthesized
  source 1..20: mol_type = other DNA
tgtaattcgagcactttggg

SEQ ID NO: 47602 - DNA, 20 bp, synthetic construct
  misc_feature 1..20: note = chemically synthesized
  source 1..20: mol_type = other DNA
ttcgagcactttgggaggct

SEQ ID NO: 47603 - DNA, 20 bp, synthetic construct
  misc_feature 1..20: note = chemically synthesized
  source 1..20: mol_type = other DNA
tcgagcactttgggaggctg

SEQ ID NO: 47604 - DNA, 20 bp, synthetic construct
  misc_feature 1..20: note = chemically synthesized
  source 1..20: mol_type = other DNA
agcactttgggaggctgagg

SEQ ID NO: 47605 - DNA, 20 bp, synthetic construct
  misc_feature 1..20: note = chemically synthesized
  source 1..20: mol_type = other DNA
gcactttgggaggctgaggc

SEQ ID NO: 47606 - DNA, 20 bp, synthetic construct
  misc_feature 1..20: note = chemically synthesized
  source 1..20: mol_type = other DNA
actttgggaggctgaggcgg

SEQ ID NO: 47607 - DNA, 20 bp, synthetic construct
  misc_feature 1..20: note = chemically synthesized
  source 1..20: mol_type = other DNA
ctttgggaggctgaggcggg

SEQ ID NO: 47608 - DNA, 20 bp, synthetic construct
  misc_feature 1..20: note = chemically synthesized
  source 1..20: mol_type = other DNA
aggcgggaggatcacctcct

SEQ ID NO: 47609 - DNA, 20 bp, synthetic construct
  misc_feature 1..20: note = chemically synthesized
  source 1..20: mol_type = other DNA
atcacctcctcggatccact

SEQ ID NO: 47610 - DNA, 20 bp, synthetic construct
  misc_feature 1..20: note = chemically synthesized
  source 1..20: mol_type = other DNA
tcacctcctcggatccactg

SEQ ID NO: 47611 - DNA, 20 bp, synthetic construct
  misc_feature 1..20: note = chemically synthesized
  source 1..20: mol_type = other DNA
acctcctcggatccactgag

SEQ ID NO: 47612 - DNA, 20 bp, synthetic construct
  misc_feature 1..20: note = chemically synthesized
  source 1..20: mol_type = other DNA
cctcctcggatccactgagg

SEQ ID NO: 47613 - DNA, 20 bp, synthetic construct
  misc_feature 1..20: note = chemically synthesized
  source 1..20: mol_type = other DNA
ctcggatccactgaggaggt

SEQ ID NO: 47614 - DNA, 20 bp, synthetic construct
  misc_feature 1..20: note = chemically synthesized
  source 1..20: mol_type = other DNA
tcggatccactgaggaggtc

SEQ ID NO: 47615 - DNA, 20 bp, synthetic construct
  misc_feature 1..20: note = chemically synthesized
  source 1..20: mol_type = other DNA
ggatccactgaggaggtcag

SEQ ID NO: 47616 - DNA, 20 bp, synthetic construct
  misc_feature 1..20: note = chemically synthesized
  source 1..20: mol_type = other DNA
ggaggtcaggagtttgcgac

SEQ ID NO: 47617 - DNA, 20 bp, synthetic construct
  misc_feature 1..20: note = chemically synthesized
  source 1..20: mol_type = other DNA
tcaggagtttgcgactagcc

SEQ ID NO: 47618 - DNA, 20 bp, synthetic construct
  misc_feature 1..20: note = chemically synthesized
  source 1..20: mol_type = other DNA
tgcgactagcctggccaacg

SEQ ID NO: 47619 - DNA, 20 bp, synthetic construct
  misc_feature 1..20: note = chemically synthesized
  source 1..20: mol_type = other DNA
tctactaaaaatacaaaaat

SEQ ID NO: 47620 - DNA, 20 bp, synthetic construct
  misc_feature 1..20: note = chemically synthesized
  source 1..20: mol_type = other DNA
ctaaaaatacaaaaattagc

SEQ ID NO: 47621 - DNA, 20 bp, synthetic construct
  misc_feature 1..20: note = chemically synthesized
  source 1..20: mol_type = other DNA
taaaaatacaaaaattagcc

SEQ ID NO: 47622 - DNA, 20 bp, synthetic construct
  misc_feature 1..20: note = chemically synthesized
  source 1..20: mol_type = other DNA
atacaaaaattagccgggcg

SEQ ID NO: 47623 - DNA, 20 bp, synthetic construct
  misc_feature 1..20: note = chemically synthesized
  source 1..20: mol_type = other DNA
caaaaattagccgggcgtgg

SEQ ID NO: 47624 - DNA, 20 bp, synthetic construct
  misc_feature 1..20: note = chemically synthesized
  source 1..20: mol_type = other DNA
aaattagccgggcgtggtgg

SEQ ID NO: 47625 - DNA, 20 bp, synthetic construct
  misc_feature 1..20: note = chemically synthesized
  source 1..20: mol_type = other DNA
aattagccgggcgtggtggc

SEQ ID NO: 47626 - DNA, 20 bp, synthetic construct
  misc_feature 1..20: note = chemically synthesized
  source 1..20: mol_type = other DNA
gtggcaggtacctgtaatcc

SEQ ID NO: 47627 - DNA, 20 bp, synthetic construct
  misc_feature 1..20: note = chemically synthesized
  source 1..20: mol_type = other DNA
tacctgtaatcccagcttct

SEQ ID NO: 47628 - DNA, 20 bp, synthetic construct
  misc_feature 1..20: note = chemically synthesized
  source 1..20: mol_type = other DNA
acctgtaatcccagcttctt

SEQ ID NO: 47629 - DNA, 20 bp, synthetic construct
  misc_feature 1..20: note = chemically synthesized
  source 1..20: mol_type = other DNA
ctgtaatcccagcttcttgg

SEQ ID NO: 47630 - DNA, 20 bp, synthetic construct
  misc_feature 1..20: note = chemically synthesized
  source 1..20: mol_type = other DNA
tgtaatcccagcttcttggg

SEQ ID NO: 47631 - DNA, 20 bp, synthetic construct
  misc_feature 1..20: note = chemically synthesized
  source 1..20: mol_type = other DNA
tcccagcttcttgggaggct

SEQ ID NO: 47632 - DNA, 20 bp, synthetic construct
  misc_feature 1..20: note = chemically synthesized
  source 1..20: mol_type = other DNA
cccagcttcttgggaggctg

SEQ ID NO: 47633 - DNA, 20 bp, synthetic construct
  misc_feature 1..20: note = chemically synthesized
  source 1..20: mol_type = other DNA
agcttcttgggaggctgagg

SEQ ID NO: 47634 - DNA, 20 bp, synthetic construct
  misc_feature 1..20: note = chemically synthesized
  source 1..20: mol_type = other DNA
gcttcttgggaggctgaggc

SEQ ID NO: 47635 - DNA, 20 bp, synthetic construct
  misc_feature 1..20: note = chemically synthesized
  source 1..20: mol_type = other DNA
ttcttgggaggctgaggcag

SEQ ID NO: 47636 - DNA, 20 bp, synthetic construct
  misc_feature 1..20: note = chemically synthesized
  source 1..20: mol_type = other DNA
gcaggagaaccacttgaacc

SEQ ID NO: 47637 - DNA, 20 bp, synthetic construct
  misc_feature 1..20: note = chemically synthesized
  source 1..20: mol_type = other DNA
caggagaaccacttgaaccc

SEQ ID NO: 47638 - DNA, 20 bp, synthetic construct
  misc_feature 1..20: note = chemically synthesized
  source 1..20: mol_type = other DNA
ggagaaccacttgaacccgg

SEQ ID NO: 47639 - DNA, 20 bp, synthetic construct
  misc_feature 1..20: note = chemically synthesized
  source 1..20: mol_type = other DNA
aaccacttgaacccgggaga

SEQ ID NO: 47640 - DNA, 20 bp, synthetic construct
  misc_feature 1..20: note = chemically synthesized
  source 1..20: mol_type = other DNA
aacccgggagacagatgttg

SEQ ID NO: 47641 - DNA, 20 bp, synthetic construct
  misc_feature 1..20: note = chemically synthesized
  source 1..20: mol_type = other DNA
cgggagacagatgttgcagt

SEQ ID NO: 47642 - DNA, 20 bp, synthetic construct
  misc_feature 1..20: note = chemically synthesized
  source 1..20: mol_type = other DNA
gacagatgttgcagtgagct

SEQ ID NO: 47643 - DNA, 20 bp, synthetic construct
  misc_feature 1..20: note = chemically synthesized
  source 1..20: mol_type = other DNA
gagactgcaccattgcactc

SEQ ID NO: 47644 - DNA, 20 bp, synthetic construct
  misc_feature 1..20: note = chemically synthesized
  source 1..20: mol_type = other DNA
tgcaccattgcactccagcc

SEQ ID NO: 47645 - DNA, 20 bp, synthetic construct
  misc_feature 1..20: note = chemically synthesized
  source 1..20: mol_type = other DNA
gcaccattgcactccagcct

SEQ ID NO: 47646 - DNA, 20 bp, synthetic construct
  misc_feature 1..20: note = chemically synthesized
  source 1..20: mol_type = other DNA
tgcactccagcctgggcaac

SEQ ID NO: 47647 - DNA, 20 bp, synthetic construct
  misc_feature 1..20: note = chemically synthesized
  source 1..20: mol_type = other DNA
cactccagcctgggcaacaa

SEQ ID NO: 47648 - DNA, 20 bp, synthetic construct
  misc_feature 1..20: note = chemically synthesized
  source 1..20: mol_type = other DNA
aaactccatctcaaaaaaaa

SEQ ID NO: 47649 - DNA, 20 bp, synthetic construct
  misc_feature 1..20: note = chemically synthesized
  source 1..20: mol_type = other DNA
catctcaaaaaaaaaagaaa

SEQ ID NO: 47650 - DNA, 20 bp, synthetic construct
  misc_feature 1..20: note = chemically synthesized
  source 1..20: mol_type = other DNA
aaaaaaaagaaaaagaactg

SEQ ID NO: 47651 - DNA, 20 bp, synthetic construct
  misc_feature 1..20: note = chemically synthesized
  source 1..20: mol_type = other DNA
tgctccttatcttccacctc

SEQ ID NO: 47652 - DNA, 20 bp, synthetic construct
  misc_feature 1..20: note = chemically synthesized
  source 1..20: mol_type = other DNA
tcttccacctctggttttcc

SEQ ID NO: 47653 - DNA, 20 bp, synthetic construct
  misc_feature 1..20: note = chemically synthesized
  source 1..20: mol_type = other DNA
cagctctgtatctttgttca

SEQ ID NO: 47654 - DNA, 20 bp, synthetic construct
  misc_feature 1..20: note = chemically synthesized
  source 1..20: mol_type = other DNA
ttcatggtacctcctaatcc

SEQ ID NO: 47655 - DNA, 20 bp, synthetic construct
  misc_feature 1..20: note = chemically synthesized
  source 1..20: mol_type = other DNA
gaactcctactaatgcttca

SEQ ID NO: 47656 - DNA, 20 bp, synthetic construct
  misc_feature 1..20: note = chemically synthesized
  source 1..20: mol_type = other DNA
taaataaaaattgaatgaat

SEQ ID NO: 47657 - DNA, 20 bp, synthetic construct
  misc_feature 1..20: note = chemically synthesized
  source 1..20: mol_type = other DNA
aaataaaaattgaatgaatt

SEQ ID NO: 47658 - DNA, 20 bp, synthetic construct
  misc_feature 1..20: note = chemically synthesized
  source 1..20: mol_type = other DNA
ataaaaattgaatgaattgg

SEQ ID NO: 47659 - DNA, 20 bp, synthetic construct
  misc_feature 1..20: note = chemically synthesized
  source 1..20: mol_type = other DNA
aaaaattgaatgaattggga

SEQ ID NO: 47660 - DNA, 20 bp, synthetic construct
  misc_feature 1..20: note = chemically synthesized
  source 1..20: mol_type = other DNA
aattgggagagtactctgtg

SEQ ID NO: 47661 - DNA, 20 bp, synthetic construct
  misc_feature 1..20: note = chemically synthesized
  source 1..20: mol_type = other DNA
tgggagagtactctgtgcag

SEQ ID NO: 47662 - DNA, 20 bp, synthetic construct
  misc_feature 1..20: note = chemically synthesized
  source 1..20: mol_type = other DNA
ggagagtactctgtgcagtg

SEQ ID NO: 47663 - DNA, 20 bp, synthetic construct
  misc_feature 1..20: note = chemically synthesized
  source 1..20: mol_type = other DNA
tactctgtgcagtggagtgt

SEQ ID NO: 47664 - DNA, 20 bp, synthetic construct
  misc_feature 1..20: note = chemically synthesized
  source 1..20: mol_type = other DNA
gtgcagtggagtgtcagttc

SEQ ID NO: 47665 - DNA, 20 bp, synthetic construct
  misc_feature 1..20: note = chemically synthesized
  source 1..20: mol_type = other DNA
gagtgtcagttctggaaacc

SEQ ID NO: 47666 - DNA, 20 bp, synthetic construct
  misc_feature 1..20: note = chemically synthesized
  source 1..20: mol_type = other DNA
aaacccagttctaatgcacc

SEQ ID NO: 47667 - DNA, 20 bp, synthetic construct
  misc_feature 1..20: note = chemically synthesized
  source 1..20: mol_type = other DNA
aacccagttctaatgcacct

SEQ ID NO: 47668 - DNA, 20 bp, synthetic construct
  misc_feature 1..20: note = chemically synthesized
  source 1..20: mol_type = other DNA
acccagttctaatgcacctg

SEQ ID NO: 47669 - DNA, 20 bp, synthetic construct
  misc_feature 1..20: note = chemically synthesized
  source 1..20: mol_type = other DNA
ctggggtgacctcctctctc

SEQ ID NO: 47670 - DNA, 20 bp, synthetic construct
  misc_feature 1..20: note = chemically synthesized
  source 1..20: mol_type = other DNA
tggggtgacctcctctctct

SEQ ID NO: 47671 - DNA, 20 bp, synthetic construct
  misc_feature 1..20: note = chemically synthesized
  source 1..20: mol_type = other DNA
gacctcctctctctgggcct

SEQ ID NO: 47672 - DNA, 20 bp, synthetic construct
  misc_feature 1..20: note = chemically synthesized
  source 1..20: mol_type = other DNA
cctcagtttctcatgactaa

SEQ ID NO: 47673 - DNA, 20 bp, synthetic construct
  misc_feature 1..20: note = chemically synthesized
  source 1..20: mol_type = other DNA
gtttctcatgactaaaagaa

SEQ ID NO: 47674 - DNA, 20 bp, synthetic construct
  misc_feature 1..20: note = chemically synthesized
  source 1..20: mol_type = other DNA
tttctcatgactaaaagaaa

SEQ ID NO: 47675 - DNA, 20 bp, synthetic construct
  misc_feature 1..20: note = chemically synthesized
  source 1..20: mol_type = other DNA
catgactaaaagaaaaggat

SEQ ID NO: 47676 - DNA, 20 bp, synthetic construct
  misc_feature 1..20: note = chemically synthesized
  source 1..20: mol_type = other DNA
atgaatgaataaatgaactt

SEQ ID NO: 47677 - DNA, 20 bp, synthetic construct
  misc_feature 1..20: note = chemically synthesized
  source 1..20: mol_type = other DNA
tgaatgaataaatgaacttg

SEQ ID NO: 47678 - DNA, 20 bp, synthetic construct
  misc_feature 1..20: note = chemically synthesized
  source 1..20: mol_type = other DNA
aatgaataaatgaacttgag

SEQ ID NO: 47679 - DNA, 20 bp, synthetic construct
  misc_feature 1..20: note = chemically synthesized
  source 1..20: mol_type = other DNA
atgaataaatgaacttgagg

SEQ ID NO: 47680 - DNA, 20 bp, synthetic construct
  misc_feature 1..20: note = chemically synthesized
  source 1..20: mol_type = other DNA
ctcctgttccaaacttccac

SEQ ID NO: 47681 - DNA, 20 bp, synthetic construct
  misc_feature 1..20: note = chemically synthesized
  source 1..20: mol_type = other DNA
cctgttccaaacttccacca

SEQ ID NO: 47682 - DNA, 20 bp, synthetic construct
  misc_feature 1..20: note = chemically synthesized
  source 1..20: mol_type = other DNA
gttccaaacttccaccagag

SEQ ID NO: 47683 - DNA, 20 bp, synthetic construct
  misc_feature 1..20: note = chemically synthesized
  source 1..20: mol_type = other DNA
accagagaagaaacatcctc

SEQ ID NO: 47684 - DNA, 20 bp, synthetic construct
  misc_feature 1..20: note = chemically synthesized
  source 1..20: mol_type = other DNA
ccagagaagaaacatcctca

SEQ ID NO: 47685 - DNA, 20 bp, synthetic construct
  misc_feature 1..20: note = chemically synthesized
  source 1..20: mol_type = other DNA
cagagaagaaacatcctcaa

SEQ ID NO: 47686 - DNA, 20 bp, synthetic construct
  misc_feature 1..20: note = chemically synthesized
  source 1..20: mol_type = other DNA
aagaaacatcctcaagggct

SEQ ID NO: 47687 - DNA, 20 bp, synthetic construct
  misc_feature 1..20: note = chemically synthesized
  source 1..20: mol_type = other DNA
acatcctcaagggcttggtt

SEQ ID NO: 47688 - DNA, 20 bp, synthetic construct
  misc_feature 1..20: note = chemically synthesized
  source 1..20: mol_type = other DNA
catcctcaagggcttggttc

SEQ ID NO: 47689 - DNA, 20 bp, synthetic construct
  misc_feature 1..20: note = chemically synthesized
  source 1..20: mol_type = other DNA
cctcaagggcttggttcagg

SEQ ID NO: 47690 - DNA, 20 bp, synthetic construct
  misc_feature 1..20: note = chemically synthesized
  source 1..20: mol_type = other DNA
gcttggttcaggtggtcata

SEQ ID NO: 47691 - DNA, 20 bp, synthetic construct
  misc_feature 1..20: note = chemically synthesized
  source 1..20: mol_type = other DNA
gcctctgcttactcacctct

SEQ ID NO: 47692 - DNA, 20 bp, synthetic construct
  misc_feature 1..20: note = chemically synthesized
  source 1..20: mol_type = other DNA
cctctgcttactcacctctc

SEQ ID NO: 47693 - DNA, 20 bp, synthetic construct
  misc_feature 1..20: note = chemically synthesized
  source 1..20: mol_type = other DNA
tgcttactcacctctcagga

SEQ ID NO: 47694 - DNA, 20 bp, synthetic construct
  misc_feature 1..20: note = chemically synthesized
  source 1..20: mol_type = other DNA
gcttactcacctctcaggat

SEQ ID NO: 47695 - DNA, 20 bp, synthetic construct
  misc_feature 1..20: note = chemically synthesized
  source 1..20: mol_type = other DNA
cttactcacctctcaggatg

SEQ ID NO: 47696 - DNA, 20 bp, synthetic construct
  misc_feature 1..20: note = chemically synthesized
  source 1..20: mol_type = other DNA
gatggggtactcactatttc

SEQ ID NO: 47697 - DNA, 20 bp, synthetic construct
  misc_feature 1..20: note = chemically synthesized
  source 1..20: mol_type = other DNA
ggtactcactatttccagaa

SEQ ID NO: 47698 - DNA, 20 bp, synthetic construct
  misc_feature 1..20: note = chemically synthesized
  source 1..20: mol_type = other DNA
tatttccagaacagttgttt

SEQ ID NO: 47699 - DNA, 20 bp, synthetic construct
  misc_feature 1..20: note = chemically synthesized
  source 1..20: mol_type = other DNA
tttccagaacagttgttttg

SEQ ID NO: 47700 - DNA, 20 bp, synthetic construct
  misc_feature 1..20: note = chemically synthesized
  source 1..20: mol_type = other DNA
ccagaacagttgttttggag

SEQ ID NO: 47701 - DNA, 20 bp, synthetic construct
  misc_feature 1..20: note = chemically synthesized
  source 1..20: mol_type = other DNA
gaacagttgttttggagcag

SEQ ID NO: 47702 - DNA, 20 bp, synthetic construct
  misc_feature 1..20: note = chemically synthesized
  source 1..20: mol_type = other DNA
tgaaatgccctttcttatcc

SEQ ID NO: 47703 - DNA, 20 bp, synthetic construct
  misc_feature 1..20: note = chemically synthesized
  source 1..20: mol_type = other DNA
acaaccccacaacatccctc

SEQ ID NO: 47704 - DNA, 20 bp, synthetic construct
  misc_feature 1..20: note = chemically synthesized
  source 1..20: mol_type = other DNA
ccccacaacatccctcgaga

SEQ ID NO: 47705 - DNA, 20 bp, synthetic construct
  misc_feature 1..20: note = chemically synthesized
  source 1..20: mol_type = other DNA
aacatccctcgagaaagtca

SEQ ID NO: 47706 - DNA, 20 bp, synthetic construct
  misc_feature 1..20: note = chemically synthesized
  source 1..20: mol_type = other DNA
acatccctcgagaaagtcaa

SEQ ID NO: 47707 - DNA, 20 bp, synthetic construct
  misc_feature 1..20: note = chemically synthesized
  source 1..20: mol_type = other DNA
cctcgagaaagtcaaaggct

SEQ ID NO: 47708 - DNA, 20 bp, synthetic construct
  misc_feature 1..20: note = chemically synthesized
  source 1..20: mol_type = other DNA
ctcgagaaagtcaaaggctc

SEQ ID NO: 47709 - DNA, 20 bp, synthetic construct
  misc_feature 1..20: note = chemically synthesized
  source 1..20: mol_type = other DNA
tcgagaaagtcaaaggctca

SEQ ID NO: 47710 - DNA, 20 bp, synthetic construct
  misc_feature 1..20: note = chemically synthesized
  source 1..20: mol_type = other DNA
aagtcaaaggctcagggaac

SEQ ID NO: 47711 - DNA, 20 bp, synthetic construct
  misc_feature 1..20: note = chemically synthesized
  source 1..20: mol_type = other DNA
agtcaaaggctcagggaaca

SEQ ID NO: 47712 - DNA, 20 bp, synthetic construct
  misc_feature 1..20: note = chemically synthesized
  source 1..20: mol_type = other DNA
caaaggctcagggaacaagg

SEQ ID NO: 47713 - DNA, 20 bp, synthetic construct
  misc_feature 1..20: note = chemically synthesized
  source 1..20: mol_type = other DNA
aaggctcagggaacaaggaa

SEQ ID NO: 47714 - DNA, 20 bp, synthetic construct
  misc_feature 1..20: note = chemically synthesized
  source 1..20: mol_type = other DNA
aggctcagggaacaaggaag

SEQ ID NO: 47715 - DNA, 20 bp, synthetic construct
  misc_feature 1..20: note = chemically synthesized
  source 1..20: mol_type = other DNA
ggctcagggaacaaggaaga

SEQ ID NO: 47716 - DNA, 20 bp, synthetic construct
  misc_feature 1..20: note = chemically synthesized
  source 1..20: mol_type = other DNA
acaaggaagagggctatact

SEQ ID NO: 47717 - DNA, 20 bp, synthetic construct
  misc_feature 1..20: note = chemically synthesized
  source 1..20: mol_type = other DNA
gaagagggctatactgagct

SEQ ID NO: 47718 - DNA, 20 bp, synthetic construct
  misc_feature 1..20: note = chemically synthesized
  source 1..20: mol_type = other DNA
agggctatactgagctgagt

SEQ ID NO: 47719 - DNA, 20 bp, synthetic construct
  misc_feature 1..20: note = chemically synthesized
  source 1..20: mol_type = other DNA
gggctatactgagctgagta

SEQ ID NO: 47720 - DNA, 20 bp, synthetic construct
  misc_feature 1..20: note = chemically synthesized
  source 1..20: mol_type = other DNA
ggacttgccatcctgccacc

SEQ ID NO: 47721 - DNA, 20 bp, synthetic construct
  misc_feature 1..20: note = chemically synthesized
  source 1..20: mol_type = other DNA
atcctgccacccagcacact

SEQ ID NO: 47722 - DNA, 20 bp, synthetic construct
  misc_feature 1..20: note = chemically synthesized
  source 1..20: mol_type = other DNA
tgccacccagcacactcaga

SEQ ID NO: 47723 - DNA, 20 bp, synthetic construct
  misc_feature 1..20: note = chemically synthesized
  source 1..20: mol_type = other DNA
cacccagcacactcagacag

SEQ ID NO: 47724 - DNA, 20 bp, synthetic construct
  misc_feature 1..20: note = chemically synthesized
  source 1..20: mol_type = other DNA
agcacactcagacagaagcg

SEQ ID NO: 47725 - DNA, 20 bp, synthetic construct
  misc_feature 1..20: note = chemically synthesized
  source 1..20: mol_type = other DNA
gcacactcagacagaagcgt

SEQ ID NO: 47726 - DNA, 20 bp, synthetic construct
  misc_feature 1..20: note = chemically synthesized
  source 1..20: mol_type = other DNA
cactcagacagaagcgtggg

SEQ ID NO: 47727 - DNA, 20 bp, synthetic construct
  misc_feature 1..20: note = chemically synthesized
  source 1..20: mol_type = other DNA
actcagacagaagcgtgggc

SEQ ID NO: 47728 - DNA, 20 bp, synthetic construct
  misc_feature 1..20: note = chemically synthesized
  source 1..20: mol_type = other DNA
cagacagaagcgtgggcagg

SEQ ID NO: 47729 - DNA, 20 bp, synthetic construct
  misc_feature 1..20: note = chemically synthesized
  source 1..20: mol_type = other DNA
aagcgtgggcaggcagctgt

SEQ ID NO: 47730 - DNA, 20 bp, synthetic construct
  misc_feature 1..20: note = chemically synthesized
  source 1..20: mol_type = other DNA
cgtgggcaggcagctgtgag

SEQ ID NO: 47731 - DNA, 20 bp, synthetic construct
  misc_feature 1..20: note = chemically synthesized
  source 1..20: mol_type = other DNA
gggcaggcagctgtgagtgg

SEQ ID NO: 47732 - DNA, 20 bp, synthetic construct
  misc_feature 1..20: note = chemically synthesized
  source 1..20: mol_type = other DNA
cagaattttcccctctgccc

SEQ ID NO: 47733 - DNA, 20 bp, synthetic construct
  misc_feature 1..20: note = chemically synthesized
  source 1..20: mol_type = other DNA
agaattttcccctctgcccc

SEQ ID NO: 47734 - DNA, 20 bp, synthetic construct
  misc_feature 1..20: note = chemically synthesized
  source 1..20: mol_type = other DNA
aattttcccctctgccccag

SEQ ID NO: 47735 - DNA, 20 bp, synthetic construct
  misc_feature 1..20: note = chemically synthesized
  source 1..20: mol_type = other DNA
cccctctgccccaggagctg

SEQ ID NO: 47736 - DNA, 20 bp, synthetic construct
  misc_feature 1..20: note = chemically synthesized
  source 1..20: mol_type = other DNA
ctgccccaggagctgtggtt

SEQ ID NO: 47737 - DNA, 20 bp, synthetic construct
  misc_feature 1..20: note = chemically synthesized
  source 1..20: mol_type = other DNA
gccccaggagctgtggtttg

SEQ ID NO: 47738 - DNA, 20 bp, synthetic construct
  misc_feature 1..20: note = chemically synthesized
  source 1..20: mol_type = other DNA
aggagctgtggtttggagca

SEQ ID NO: 47739 - DNA, 20 bp, synthetic construct
  misc_feature 1..20: note = chemically synthesized
  source 1..20: mol_type = other DNA
agcaaagacaatgtcaccaa

SEQ ID NO: 47740 - DNA, 20 bp, synthetic construct
  misc_feature 1..20: note = chemically synthesized
  source 1..20: mol_type = other DNA
gcaaagacaatgtcaccaac

SEQ ID NO: 47741 - DNA, 20 bp, synthetic construct
  misc_feature 1..20: note = chemically synthesized
  source 1..20: mol_type = other DNA
gtcaccaacaggtcacactg

SEQ ID NO: 47742 - DNA, 20 bp, synthetic construct
  misc_feature 1..20: note = chemically synthesized
  source 1..20: mol_type = other DNA
ccaacaggtcacactgcaga

SEQ ID NO: 47743 - DNA, 20 bp, synthetic construct
  misc_feature 1..20: note = chemically synthesized
  source 1..20: mol_type = other DNA
caacaggtcacactgcagac

SEQ ID NO: 47744 - DNA, 20 bp, synthetic construct
  misc_feature 1..20: note = chemically synthesized
  source 1..20: mol_type = other DNA
aacaggtcacactgcagaca

SEQ ID NO: 47745 - DNA, 20 bp, synthetic construct
  misc_feature 1..20: note = chemically synthesized
  source 1..20: mol_type = other DNA
gcagacagggacaaaactgc

SEQ ID NO: 47746 - DNA, 20 bp, synthetic construct
  misc_feature 1..20: note = chemically synthesized
  source 1..20: mol_type = other DNA
aaaactgcaagtgatccccc

SEQ ID NO: 47747 - DNA, 20 bp, synthetic construct
  misc_feature 1..20: note = chemically synthesized
  source 1..20: mol_type = other DNA
aaactgcaagtgatcccccc

SEQ ID NO: 47748 - DNA, 20 bp, synthetic construct
  misc_feature 1..20: note = chemically synthesized
  source 1..20: mol_type = other DNA
aactgcaagtgatccccccg

SEQ ID NO: 47749 - DNA, 20 bp, synthetic construct
  misc_feature 1..20: note = chemically synthesized
  source 1..20: mol_type = other DNA
ccccccggggcttgcattgt

SEQ ID NO: 47750 - DNA, 20 bp, synthetic construct
  misc_feature 1..20: note = chemically synthesized
  source 1..20: mol_type = other DNA
ttgcattgtaagttcactca

SEQ ID NO: 47751 - DNA, 20 bp, synthetic construct
  misc_feature 1..20: note = chemically synthesized
  source 1..20: mol_type = other DNA
gtaagttcactcatggtcaa

SEQ ID NO: 47752 - DNA, 20 bp, synthetic construct
  misc_feature 1..20: note = chemically synthesized
  source 1..20: mol_type = other DNA
tctccccatctgctgccact

SEQ ID NO: 47753 - DNA, 20 bp, synthetic construct
  misc_feature 1..20: note = chemically synthesized
  source 1..20: mol_type = other DNA
catctgctgccactgagccg

SEQ ID NO: 47754 - DNA, 20 bp, synthetic construct
  misc_feature 1..20: note = chemically synthesized
  source 1..20: mol_type = other DNA
atctgctgccactgagccgt

SEQ ID NO: 47755 - DNA, 20 bp, synthetic construct
  misc_feature 1..20: note = chemically synthesized
  source 1..20: mol_type = other DNA
tctgctgccactgagccgta

SEQ ID NO: 47756 - DNA, 20 bp, synthetic construct
  misc_feature 1..20: note = chemically synthesized
  source 1..20: mol_type = other DNA
cgattgtcacctccctttta

SEQ ID NO: 47757 - DNA, 20 bp, synthetic construct
  misc_feature 1..20: note = chemically synthesized
  source 1..20: mol_type = other DNA
gtcacctcccttttaaagat

SEQ ID NO: 47758 - DNA, 20 bp, synthetic construct
  misc_feature 1..20: note = chemically synthesized
  source 1..20: mol_type = other DNA
tcacctcccttttaaagatt

SEQ ID NO: 47759 - DNA, 20 bp, synthetic construct
  misc_feature 1..20: note = chemically synthesized
  source 1..20: mol_type = other DNA
cccttttaaagattaggcaa

SEQ ID NO: 47760 - DNA, 20 bp, synthetic construct
  misc_feature 1..20: note = chemically synthesized
  source 1..20: mol_type = other DNA
cttttaaagattaggcaatg

SEQ ID NO: 47761 - DNA, 20 bp, synthetic construct
  misc_feature 1..20: note = chemically synthesized
  source 1..20: mol_type = other DNA
ttttaaagattaggcaatgg

SEQ ID NO: 47762 - DNA, 20 bp, synthetic construct
  misc_feature 1..20: note = chemically synthesized
  source 1..20: mol_type = other DNA
agattaggcaatggaggctc

SEQ ID NO: 47763 - DNA, 20 bp, synthetic construct
  misc_feature 1..20: note = chemically synthesized
  source 1..20: mol_type = other DNA
gattaggcaatggaggctca

SEQ ID NO: 47764 - DNA, 20 bp, synthetic construct
  misc_feature 1..20: note = chemically synthesized
  source 1..20: mol_type = other DNA
ggcaatggaggctcaaggat

SEQ ID NO: 47765 - DNA, 20 bp, synthetic construct
  misc_feature 1..20: note = chemically synthesized
  source 1..20: mol_type = other DNA
tcaaggataagtgacttgtc

SEQ ID NO: 47766 - DNA, 20 bp, synthetic construct
  misc_feature 1..20: note = chemically synthesized
  source 1..20: mol_type = other DNA
aagtgacttgtcaagcacca

SEQ ID NO: 47767 - DNA, 20 bp, synthetic construct
  misc_feature 1..20: note = chemically synthesized
  source 1..20: mol_type = other DNA
gacttgtcaagcaccacagc

SEQ ID NO: 47768 - DNA, 20 bp, synthetic construct
  misc_feature 1..20: note = chemically synthesized
  source 1..20: mol_type = other DNA
tgtcaagcaccacagctagt

SEQ ID NO: 47769 - DNA, 20 bp, synthetic construct
  misc_feature 1..20: note = chemically synthesized
  source 1..20: mol_type = other DNA
tcaagcaccacagctagtga

SEQ ID NO: 47770 - DNA, 20 bp, synthetic construct
  misc_feature 1..20: note = chemically synthesized
  source 1..20: mol_type = other DNA
caagcaccacagctagtgag

SEQ ID NO: 47771 - DNA, 20 bp, synthetic construct
  misc_feature 1..20: note = chemically synthesized
  source 1..20: mol_type = other DNA
gcaccacagctagtgagagg

SEQ ID NO: 47772 - DNA, 20 bp, synthetic construct
  misc_feature 1..20: note = chemically synthesized
  source 1..20: mol_type = other DNA
acagctagtgagaggaagcc

SEQ ID NO: 47773 - DNA, 20 bp, synthetic construct
  misc_feature 1..20: note = chemically synthesized
  source 1..20: mol_type = other DNA
tcaaccccacatctgactcc

SEQ ID NO: 47774 - DNA, 20 bp, synthetic construct
  misc_feature 1..20: note = chemically synthesized
  source 1..20: mol_type = other DNA
ccccacatctgactccaagc

SEQ ID NO: 47775 - DNA, 20 bp, synthetic construct
  misc_feature 1..20: note = chemically synthesized
  source 1..20: mol_type = other DNA
cccacatctgactccaagct

SEQ ID NO: 47776 - DNA, 20 bp, synthetic construct
  misc_feature 1..20: note = chemically synthesized
  source 1..20: mol_type = other DNA
ccacatctgactccaagctg

SEQ ID NO: 47777 - DNA, 20 bp, synthetic construct
  misc_feature 1..20: note = chemically synthesized
  source 1..20: mol_type = other DNA
cacatctgactccaagctgg

SEQ ID NO: 47778 - DNA, 20 bp, synthetic construct
  misc_feature 1..20: note = chemically synthesized
  source 1..20: mol_type = other DNA
tgactccaagctgggggaca

SEQ ID NO: 47779 - DNA, 20 bp, synthetic construct
  misc_feature 1..20: note = chemically synthesized
  source 1..20: mol_type = other DNA
agctgggggacacagaacct

SEQ ID NO: 47780 - DNA, 20 bp, synthetic construct
  misc_feature 1..20: note = chemically synthesized
  source 1..20: mol_type = other DNA
ggggacacagaacctcagcc

SEQ ID NO: 47781 - DNA, 20 bp, synthetic construct
  misc_feature 1..20: note = chemically synthesized
  source 1..20: mol_type = other DNA
acagaacctcagccaagtcc

SEQ ID NO: 47782 - DNA, 20 bp, synthetic construct
  misc_feature 1..20: note = chemically synthesized
  source 1..20: mol_type = other DNA
cagaacctcagccaagtcct

SEQ ID NO: 47783 - DNA, 20 bp, synthetic construct
  misc_feature 1..20: note = chemically synthesized
  source 1..20: mol_type = other DNA
acctcagccaagtcctgggc

SEQ ID NO: 47784 - DNA, 20 bp, synthetic construct
  misc_feature 1..20: note = chemically synthesized
  source 1..20: mol_type = other DNA
agtcctgggctggtaatact

SEQ ID NO: 47785 - DNA, 20 bp, synthetic construct
  misc_feature 1..20: note = chemically synthesized
  source 1..20: mol_type = other DNA
gggctggtaatacttagaaa

SEQ ID NO: 47786 - DNA, 20 bp, synthetic construct
  misc_feature 1..20: note = chemically synthesized
  source 1..20: mol_type = other DNA
tggtaatacttagaaaaagc

SEQ ID NO: 47787 - DNA, 20 bp, synthetic construct
  misc_feature 1..20: note = chemically synthesized
  source 1..20: mol_type = other DNA
taatacttagaaaaagctag

SEQ ID NO: 47788 - DNA, 20 bp, synthetic construct
  misc_feature 1..20: note = chemically synthesized
  source 1..20: mol_type = other DNA
aaaagctagtggtctcgccc

SEQ ID NO: 47789 - DNA, 20 bp, synthetic construct
  misc_feature 1..20: note = chemically synthesized
  source 1..20: mol_type = other DNA
aaagctagtggtctcgcccc

SEQ ID NO: 47790 - DNA, 20 bp, synthetic construct
  misc_feature 1..20: note = chemically synthesized
  source 1..20: mol_type = other DNA
gctagtggtctcgccccggg

SEQ ID NO: 47791 - DNA, 20 bp, synthetic construct
  misc_feature 1..20: note = chemically synthesized
  source 1..20: mol_type = other DNA
agtggtctcgccccgggaag

SEQ ID NO: 47792 - DNA, 20 bp, synthetic construct
  misc_feature 1..20: note = chemically synthesized
  source 1..20: mol_type = other DNA
ccccgggaagaagcttccca

SEQ ID NO: 47793 - DNA, 20 bp, synthetic construct
  misc_feature 1..20: note = chemically synthesized
  source 1..20: mol_type = other DNA
gaagaagcttcccacagcct

SEQ ID NO: 47794 - DNA, 20 bp, synthetic construct
  misc_feature 1..20: note = chemically synthesized
  source 1..20: mol_type = other DNA
aagaagcttcccacagcctg

SEQ ID NO: 47795 - DNA, 20 bp, synthetic construct
  misc_feature 1..20: note = chemically synthesized
  source 1..20: mol_type = other DNA
agaagcttcccacagcctga

SEQ ID NO: 47796 - DNA, 20 bp, synthetic construct
  misc_feature 1..20: note = chemically synthesized
  source 1..20: mol_type = other DNA
gcttcccacagcctgagggc

SEQ ID NO: 47797 - DNA, 20 bp, synthetic construct
  misc_feature 1..20: note = chemically synthesized
  source 1..20: mol_type = other DNA
tcccacagcctgagggccag

SEQ ID NO: 47798 - DNA, 20 bp, synthetic construct
  misc_feature 1..20: note = chemically synthesized
  source 1..20: mol_type = other DNA
acagcctgagggccagaagc

SEQ ID NO: 47799 - DNA, 20 bp, synthetic construct
  misc_feature 1..20: note = chemically synthesized
  source 1..20: mol_type = other DNA
gcctgagggccagaagctgg

SEQ ID NO: 47800 - DNA, 20 bp, synthetic construct
  misc_feature 1..20: note = chemically synthesized
  source 1..20: mol_type = other DNA
ctgagggccagaagctggca

SEQ ID NO: 47801 - DNA, 20 bp, synthetic construct
  misc_feature 1..20: note = chemically synthesized
  source 1..20: mol_type = other DNA
cagaagctggcagagttgtt

SEQ ID NO: 47802 - DNA, 20 bp, synthetic construct
  misc_feature 1..20: note = chemically synthesized
  source 1..20: mol_type = other DNA
gagcaaactcgccccgcaca

SEQ ID NO: 47803 - DNA, 20 bp, synthetic construct
  misc_feature 1..20: note = chemically synthesized
  source 1..20: mol_type = other DNA
aaactcgccccgcacacggt

SEQ ID NO: 47804 - DNA, 20 bp, synthetic construct
  misc_feature 1..20: note = chemically synthesized
  source 1..20: mol_type = other DNA
ctcgccccgcacacggtcgg

SEQ ID NO: 47805 - DNA, 20 bp, synthetic construct
  misc_feature 1..20: note = chemically synthesized
  source 1..20: mol_type = other DNA
ccccgcacacggtcggcaga

SEQ ID NO: 47806 - DNA, 20 bp, synthetic construct
  misc_feature 1..20: note = chemically synthesized
  source 1..20: mol_type = other DNA
gcacacggtcggcagacagc

SEQ ID NO: 47807 - DNA, 20 bp, synthetic construct
  misc_feature 1..20: note = chemically synthesized
  source 1..20: mol_type = other DNA
cacacggtcggcagacagcc

SEQ ID NO: 47808 - DNA, 20 bp, synthetic construct
  misc_feature 1..20: note = chemically synthesized
  source 1..20: mol_type = other DNA
acggtcggcagacagccagg

SEQ ID NO: 47809 - DNA, 20 bp, synthetic construct
  misc_feature 1..20: note = chemically synthesized
  source 1..20: mol_type = other DNA
cggtcggcagacagccaggt

SEQ ID NO: 47810 - DNA, 20 bp, synthetic construct
  misc_feature 1..20: note = chemically synthesized
  source 1..20: mol_type = other DNA
ggcagacagccaggtgggct

SEQ ID NO: 47811 - DNA, 20 bp, synthetic construct
  misc_feature 1..20: note = chemically synthesized
  source 1..20: mol_type = other DNA
gcagacagccaggtgggctg

SEQ ID NO: 47812 - DNA, 20 bp, synthetic construct
  misc_feature 1..20: note = chemically synthesized
  source 1..20: mol_type = other DNA
agccaggtgggctgaggcgc

SEQ ID NO: 47813 - DNA, 20 bp, synthetic construct
  misc_feature 1..20: note = chemically synthesized
  source 1..20: mol_type = other DNA
gccaggtgggctgaggcgcc

SEQ ID NO: 47814 - DNA, 20 bp, synthetic construct
  misc_feature 1..20: note = chemically synthesized
  source 1..20: mol_type = other DNA
gtgggctgaggcgccgggct

SEQ ID NO: 47815 - DNA, 20 bp, synthetic construct
  misc_feature 1..20: note = chemically synthesized
  source 1..20: mol_type = other DNA
tgaggcgccgggctcagctc

SEQ ID NO: 47816 - DNA, 20 bp, synthetic construct
  misc_feature 1..20: note = chemically synthesized
  source 1..20: mol_type = other DNA
gaggcgccgggctcagctcc

SEQ ID NO: 47817 - DNA, 20 bp, synthetic construct
  misc_feature 1..20: note = chemically synthesized
  source 1..20: mol_type = other DNA
aggcgccgggctcagctccg

SEQ ID NO: 47818 - DNA, 20 bp, synthetic construct
  misc_feature 1..20: note = chemically synthesized
  source 1..20: mol_type = other DNA
cgggctcagctccggggtcc

SEQ ID NO: 47819 - DNA, 20 bp, synthetic construct
  misc_feature 1..20: note = chemically synthesized
  source 1..20: mol_type = other DNA
cagctccggggtcccagtac

SEQ ID NO: 47820 - DNA, 20 bp, synthetic construct
  misc_feature 1..20: note = chemically synthesized
  source 1..20: mol_type = other DNA
agctccggggtcccagtacc

SEQ ID NO: 47821 - DNA, 20 bp, synthetic construct
  misc_feature 1..20: note = chemically synthesized
  source 1..20: mol_type = other DNA
agtaccaggcgcaccacctc

SEQ ID NO: 47822 - DNA, 20 bp, synthetic construct
  misc_feature 1..20: note = chemically synthesized
  source 1..20: mol_type = other DNA
aggcgcaccacctccggctc

SEQ ID NO: 47823 - DNA, 20 bp, synthetic construct
  misc_feature 1..20: note = chemically synthesized
  source 1..20: mol_type = other DNA
gcgcaccacctccggctcca

SEQ ID NO: 47824 - DNA, 20 bp, synthetic construct
  misc_feature 1..20: note = chemically synthesized
  source 1..20: mol_type = other DNA
acctccggctccagagcacc

SEQ ID NO: 47825 - DNA, 20 bp, synthetic construct
  misc_feature 1..20: note = chemically synthesized
  source 1..20: mol_type = other DNA
cctccggctccagagcacca

SEQ ID NO: 47826 - DNA, 20 bp, synthetic construct
  misc_feature 1..20: note = chemically synthesized
  source 1..20: mol_type = other DNA
ctccggctccagagcaccaa

SEQ ID NO: 47827 - DNA, 20 bp, synthetic construct
  misc_feature 1..20: note = chemically synthesized
  source 1..20: mol_type = other DNA
ccaagggcccttccctgcct

SEQ ID NO: 47828 - DNA, 20 bp, synthetic construct
  misc_feature 1..20: note = chemically synthesized
  source 1..20: mol_type = other DNA
ccttccctgcctgagtccta

SEQ ID NO: 47829 - DNA, 20 bp, synthetic construct
  misc_feature 1..20: note = chemically synthesized
  source 1..20: mol_type = other DNA
cttccctgcctgagtcctaa

SEQ ID NO: 47830 - DNA, 20 bp, synthetic construct
  misc_feature 1..20: note = chemically synthesized
  source 1..20: mol_type = other DNA
tgagtcctaaaggacgccaa

SEQ ID NO: 47831 - DNA, 20 bp, synthetic construct
  misc_feature 1..20: note = chemically synthesized
  source 1..20: mol_type = other DNA
gagtcctaaaggacgccaat

SEQ ID NO: 47832 - DNA, 20 bp, synthetic construct
  misc_feature 1..20: note = chemically synthesized
  source 1..20: mol_type = other DNA
aaaggacgccaatgggcctc

SEQ ID NO: 47833 - DNA, 20 bp, synthetic construct
  misc_feature 1..20: note = chemically synthesized
  source 1..20: mol_type = other DNA
ccccttctcccctgcccctt

SEQ ID NO: 47834 - DNA, 20 bp, synthetic construct
  misc_feature 1..20: note = chemically synthesized
  source 1..20: mol_type = other DNA
ttctcccctgccccttcagc

SEQ ID NO: 47835 - DNA, 20 bp, synthetic construct
  misc_feature 1..20: note = chemically synthesized
  source 1..20: mol_type = other DNA
cttcagctggttcttttctt

SEQ ID NO: 47836 - DNA, 20 bp, synthetic construct
  misc_feature 1..20: note = chemically synthesized
  source 1..20: mol_type = other DNA
gttcttttcttcggctgaaa

SEQ ID NO: 47837 - DNA, 20 bp, synthetic construct
  misc_feature 1..20: note = chemically synthesized
  source 1..20: mol_type = other DNA
ttttcttcggctgaaacaga

SEQ ID NO: 47838 - DNA, 20 bp, synthetic construct
  misc_feature 1..20: note = chemically synthesized
  source 1..20: mol_type = other DNA
ggctgaaacagatggaatac

SEQ ID NO: 47839 - DNA, 20 bp, synthetic construct
  misc_feature 1..20: note = chemically synthesized
  source 1..20: mol_type = other DNA
ctgaaacagatggaatacta

SEQ ID NO: 47840 - DNA, 20 bp, synthetic construct
  misc_feature 1..20: note = chemically synthesized
  source 1..20: mol_type = other DNA
cagatggaatactagagcat

SEQ ID NO: 47841 - DNA, 20 bp, synthetic construct
  misc_feature 1..20: note = chemically synthesized
  source 1..20: mol_type = other DNA
agcatgagttctgtgtcata

SEQ ID NO: 47842 - DNA, 20 bp, synthetic construct
  misc_feature 1..20: note = chemically synthesized
  source 1..20: mol_type = other DNA
aagaaattgcctcgtgctcc

SEQ ID NO: 47843 - DNA, 20 bp, synthetic construct
  misc_feature 1..20: note = chemically synthesized
  source 1..20: mol_type = other DNA
ttcccaccccgcccctgtct

SEQ ID NO: 47844 - DNA, 20 bp, synthetic construct
  misc_feature 1..20: note = chemically synthesized
  source 1..20: mol_type = other DNA
tcccaccccgcccctgtctc

SEQ ID NO: 47845 - DNA, 20 bp, synthetic construct
  misc_feature 1..20: note = chemically synthesized
  source 1..20: mol_type = other DNA
caccccgcccctgtctcggg

SEQ ID NO: 47846 - DNA, 20 bp, synthetic construct
  misc_feature 1..20: note = chemically synthesized
  source 1..20: mol_type = other DNA
accccgcccctgtctcgggt

SEQ ID NO: 47847 - DNA, 20 bp, synthetic construct
  misc_feature 1..20: note = chemically synthesized
  source 1..20: mol_type = other DNA
ccccgcccctgtctcgggta

SEQ ID NO: 47848 - DNA, 20 bp, synthetic construct
  misc_feature 1..20: note = chemically synthesized
  source 1..20: mol_type = other DNA
ctcgggtagggccttctctc

SEQ ID NO: 47849 - DNA, 20 bp, synthetic construct
  misc_feature 1..20: note = chemically synthesized
  source 1..20: mol_type = other DNA
tcgggtagggccttctctcc

SEQ ID NO: 47850 - DNA, 20 bp, synthetic construct
  misc_feature 1..20: note = chemically synthesized
  source 1..20: mol_type = other DNA
ccatgttttccaaaccaaat

SEQ ID NO: 47851 - DNA, 20 bp, synthetic construct
  misc_feature 1..20: note = chemically synthesized
  source 1..20: mol_type = other DNA
caaatcggaacccactataa

SEQ ID NO: 47852 - DNA, 20 bp, synthetic construct
  misc_feature 1..20: note = chemically synthesized
  source 1..20: mol_type = other DNA
tcggaacccactataatggc

SEQ ID NO: 47853 - DNA, 20 bp, synthetic construct
  misc_feature 1..20: note = chemically synthesized
  source 1..20: mol_type = other DNA
aagcccgctttctctgtgcc

SEQ ID NO: 47854 - DNA, 20 bp, synthetic construct
  misc_feature 1..20: note = chemically synthesized
  source 1..20: mol_type = other DNA
cgctttctctgtgcctggtg

SEQ ID NO: 47855 - DNA, 20 bp, synthetic construct
  misc_feature 1..20: note = chemically synthesized
  source 1..20: mol_type = other DNA
tctgtgcctggtgcagttcc

SEQ ID NO: 47856 - DNA, 20 bp, synthetic construct
  misc_feature 1..20: note = chemically synthesized
  source 1..20: mol_type = other DNA
gtgcagttcccagtacgttc

SEQ ID NO: 47857 - DNA, 20 bp, synthetic construct
  misc_feature 1..20: note = chemically synthesized
  source 1..20: mol_type = other DNA
tgcagttcccagtacgttcc

SEQ ID NO: 47858 - DNA, 20 bp, synthetic construct
  misc_feature 1..20: note = chemically synthesized
  source 1..20: mol_type = other DNA
tccttcacccacctgtgccg

SEQ ID NO: 47859 - DNA, 20 bp, synthetic construct
  misc_feature 1..20: note = chemically synthesized
  source 1..20: mol_type = other DNA
tcacccacctgtgccgcggc

SEQ ID NO: 47860 - DNA, 20 bp, synthetic construct
  misc_feature 1..20: note = chemically synthesized
  source 1..20: mol_type = other DNA
cacccacctgtgccgcggcg

SEQ ID NO: 47861 - DNA, 20 bp, synthetic construct
  misc_feature 1..20: note = chemically synthesized
  source 1..20: mol_type = other DNA
ccacctgtgccgcggcgagg

SEQ ID NO: 47862 - DNA, 20 bp, synthetic construct
  misc_feature 1..20: note = chemically synthesized
  source 1..20: mol_type = other DNA
tgccgcggcgaggcagaaac

SEQ ID NO: 47863 - DNA, 20 bp, synthetic construct
  misc_feature 1..20: note = chemically synthesized
  source 1..20: mol_type = other DNA
gccgcggcgaggcagaaact

SEQ ID NO: 47864 - DNA, 20 bp, synthetic construct
  misc_feature 1..20: note = chemically synthesized
  source 1..20: mol_type = other DNA
gaggcagaaactgggaaatc

SEQ ID NO: 47865 - DNA, 20 bp, synthetic construct
  misc_feature 1..20: note = chemically synthesized
  source 1..20: mol_type = other DNA
aggcagaaactgggaaatct

SEQ ID NO: 47866 - DNA, 20 bp, synthetic construct
  misc_feature 1..20: note = chemically synthesized
  source 1..20: mol_type = other DNA
cagaaactgggaaatctggg

SEQ ID NO: 47867 - DNA, 20 bp, synthetic construct
  misc_feature 1..20: note = chemically synthesized
  source 1..20: mol_type = other DNA
agaaactgggaaatctgggc

SEQ ID NO: 47868 - DNA, 20 bp, synthetic construct
  misc_feature 1..20: note = chemically synthesized
  source 1..20: mol_type = other DNA
gaaatctgggcaggatatcc

SEQ ID NO: 47869 - DNA, 20 bp, synthetic construct
  misc_feature 1..20: note = chemically synthesized
  source 1..20: mol_type = other DNA
atctgggcaggatatcctgg

SEQ ID NO: 47870 - DNA, 20 bp, synthetic construct
  misc_feature 1..20: note = chemically synthesized
  source 1..20: mol_type = other DNA
gtgctctgctcgcccttcct

SEQ ID NO: 47871 - DNA, 20 bp, synthetic construct
  misc_feature 1..20: note = chemically synthesized
  source 1..20: mol_type = other DNA
gctcgcccttcctcggcctc

SEQ ID NO: 47872 - DNA, 20 bp, synthetic construct
  misc_feature 1..20: note = chemically synthesized
  source 1..20: mol_type = other DNA
ctcgcccttcctcggcctcc

SEQ ID NO: 47873 - DNA, 20 bp, synthetic construct
  misc_feature 1..20: note = chemically synthesized
  source 1..20: mol_type = other DNA
ccgcgaaccttcccactgaa

SEQ ID NO: 47874 - DNA, 20 bp, synthetic construct
  misc_feature 1..20: note = chemically synthesized
  source 1..20: mol_type = other DNA
aaccttcccactgaatagcg

SEQ ID NO: 47875 - DNA, 20 bp, synthetic construct
  misc_feature 1..20: note = chemically synthesized
  source 1..20: mol_type = other DNA
aatagcgcagccgcacgccc

SEQ ID NO: 47876 - DNA, 20 bp, synthetic construct
  misc_feature 1..20: note = chemically synthesized
  source 1..20: mol_type = other DNA
gcgcagccgcacgccccagc

SEQ ID NO: 47877 - DNA, 20 bp, synthetic construct
  misc_feature 1..20: note = chemically synthesized
  source 1..20: mol_type = other DNA
cacgccccagcaagtcccca

SEQ ID NO: 47878 - DNA, 20 bp, synthetic construct
  misc_feature 1..20: note = chemically synthesized
  source 1..20: mol_type = other DNA
cgccccagcaagtccccaaa

SEQ ID NO: 47879 - DNA, 20 bp, synthetic construct
  misc_feature 1..20: note = chemically synthesized
  source 1..20: mol_type = other DNA
ccagcaagtccccaaagagc

SEQ ID NO: 47880 - DNA, 20 bp, synthetic construct
  misc_feature 1..20: note = chemically synthesized
  source 1..20: mol_type = other DNA
ctcccccgccgccttgcctg

SEQ ID NO: 47881 - DNA, 20 bp, synthetic construct
  misc_feature 1..20: note = chemically synthesized
  source 1..20: mol_type = other DNA
ccgccttgcctgcagtcccc

SEQ ID NO: 47882 - DNA, 20 bp, synthetic construct
  misc_feature 1..20: note = chemically synthesized
  source 1..20: mol_type = other DNA
gcagtccccaagatcgtgcc

SEQ ID NO: 47883 - DNA, 20 bp, synthetic construct
  misc_feature 1..20: note = chemically synthesized
  source 1..20: mol_type = other DNA
ccccaagatcgtgccaagcg

SEQ ID NO: 47884 - DNA, 20 bp, synthetic construct
  misc_feature 1..20: note = chemically synthesized
  source 1..20: mol_type = other DNA
ccaagatcgtgccaagcgaa

SEQ ID NO: 47885 - DNA, 20 bp, synthetic construct
  misc_feature 1..20: note = chemically synthesized
  source 1..20: mol_type = other DNA
cgtgccaagcgaagagccct

SEQ ID NO: 47886 - DNA, 20 bp, synthetic construct
  misc_feature 1..20: note = chemically synthesized
  source 1..20: mol_type = other DNA
actccacttcctctcttaca

SEQ ID NO: 47887 - DNA, 20 bp, synthetic construct
  misc_feature 1..20: note = chemically synthesized
  source 1..20: mol_type = other DNA
ctccacttcctctcttacat

SEQ ID NO: 47888 - DNA, 20 bp, synthetic construct
  misc_feature 1..20: note = chemically synthesized
  source 1..20: mol_type = other DNA
tccacttcctctcttacatg

SEQ ID NO: 47889 - DNA, 20 bp, synthetic construct
  misc_feature 1..20: note = chemically synthesized
  source 1..20: mol_type = other DNA
ccacttcctctcttacatgg

SEQ ID NO: 47890 - DNA, 20 bp, synthetic construct
  misc_feature 1..20: note = chemically synthesized
  source 1..20: mol_type = other DNA
cacttcctctcttacatggg

SEQ ID NO: 47891 - DNA, 20 bp, synthetic construct
  misc_feature 1..20: note = chemically synthesized
  source 1..20: mol_type = other DNA
ctcttacatggggggaaact

SEQ ID NO: 47892 - DNA, 20 bp, synthetic construct
  misc_feature 1..20: note = chemically synthesized
  source 1..20: mol_type = other DNA
tcttacatggggggaaactg

SEQ ID NO: 47893 - DNA, 20 bp, synthetic construct
  misc_feature 1..20: note = chemically synthesized
  source 1..20: mol_type = other DNA
atggggggaaactgaggccc

SEQ ID NO: 47894 - DNA, 20 bp, synthetic construct
  misc_feature 1..20: note = chemically synthesized
  source 1..20: mol_type = other DNA
ggggggaaactgaggcccga

SEQ ID NO: 47895 - DNA, 20 bp, synthetic construct
  misc_feature 1..20: note = chemically synthesized
  source 1..20: mol_type = other DNA
gggggaaactgaggcccgag

SEQ ID NO: 47896 - DNA, 20 bp, synthetic construct
  misc_feature 1..20: note = chemically synthesized
  source 1..20: mol_type = other DNA
aactgaggcccgagaggaaa

SEQ ID NO: 47897 - DNA, 20 bp, synthetic construct
  misc_feature 1..20: note = chemically synthesized
  source 1..20: mol_type = other DNA
gaaacagcaccgcaccgtcc

SEQ ID NO: 47898 - DNA, 20 bp, synthetic construct
  misc_feature 1..20: note = chemically synthesized
  source 1..20: mol_type = other DNA
gcaccgcaccgtcccggctg

SEQ ID NO: 47899 - DNA, 20 bp, synthetic construct
  misc_feature 1..20: note = chemically synthesized
  source 1..20: mol_type = other DNA
caccgcaccgtcccggctgc

SEQ ID NO: 47900 - DNA, 20 bp, synthetic construct
  misc_feature 1..20: note = chemically synthesized
  source 1..20: mol_type = other DNA
tcccggctgcgggttcgccc

SEQ ID NO: 47901 - DNA, 20 bp, synthetic construct
  misc_feature 1..20: note = chemically synthesized
  source 1..20: mol_type = other DNA
ccatccctacacccgcacct

SEQ ID NO: 47902 - DNA, 20 bp, synthetic construct
  misc_feature 1..20: note = chemically synthesized
  source 1..20: mol_type = other DNA
cctacacccgcaccttggcg

SEQ ID NO: 47903 - DNA, 20 bp, synthetic construct
  misc_feature 1..20: note = chemically synthesized
  source 1..20: mol_type = other DNA
acacccgcaccttggcgcag

SEQ ID NO: 47904 - DNA, 20 bp, synthetic construct
  misc_feature 1..20: note = chemically synthesized
  source 1..20: mol_type = other DNA
cccgcaccttggcgcagcgg

SEQ ID NO: 47905 - DNA, 20 bp, synthetic construct
  misc_feature 1..20: note = chemically synthesized
  source 1..20: mol_type = other DNA
gcaccttggcgcagcggtgg

SEQ ID NO: 47906 - DNA, 20 bp, synthetic construct
  misc_feature 1..20: note = chemically synthesized
  source 1..20: mol_type = other DNA
caccttggcgcagcggtgga

SEQ ID NO: 47907 - DNA, 20 bp, synthetic construct
  misc_feature 1..20: note = chemically synthesized
  source 1..20: mol_type = other DNA
cttggcgcagcggtggaagg

SEQ ID NO: 47908 - DNA, 20 bp, synthetic construct
  misc_feature 1..20: note = chemically synthesized
  source 1..20: mol_type = other DNA
gcagcggtggaaggtggctg

SEQ ID NO: 47909 - DNA, 20 bp, synthetic construct
  misc_feature 1..20: note = chemically synthesized
  source 1..20: mol_type = other DNA
ggtggctgtggttccgtgct

SEQ ID NO: 47910 - DNA, 20 bp, synthetic construct
  misc_feature 1..20: note = chemically synthesized
  source 1..20: mol_type = other DNA
gtggctgtggttccgtgctc

SEQ ID NO: 47911 - DNA, 20 bp, synthetic construct
  misc_feature 1..20: note = chemically synthesized
  source 1..20: mol_type = other DNA
ggttccgtgctcgggtgctt

SEQ ID NO: 47912 - DNA, 20 bp, synthetic construct
  misc_feature 1..20: note = chemically synthesized
  source 1..20: mol_type = other DNA
ccgtgctcgggtgcttcggc

SEQ ID NO: 47913 - DNA, 20 bp, synthetic construct
  misc_feature 1..20: note = chemically synthesized
  source 1..20: mol_type = other DNA
cgtgctcgggtgcttcggcc

SEQ ID NO: 47914 - DNA, 20 bp, synthetic construct
  misc_feature 1..20: note = chemically synthesized
  source 1..20: mol_type = other DNA
ttcggccaggccgtcctcct

SEQ ID NO: 47915 - DNA, 20 bp, synthetic construct
  misc_feature 1..20: note = chemically synthesized
  source 1..20: mol_type = other DNA
ggccgtcctcctcggaacgc

SEQ ID NO: 47916 - DNA, 20 bp, synthetic construct
  misc_feature 1..20: note = chemically synthesized
  source 1..20: mol_type = other DNA
gccgtcctcctcggaacgca

SEQ ID NO: 47917 - DNA, 20 bp, synthetic construct
  misc_feature 1..20: note = chemically synthesized
  source 1..20: mol_type = other DNA
tcctcctcggaacgcaaggc

SEQ ID NO: 47918 - DNA, 20 bp, synthetic construct
  misc_feature 1..20: note = chemically synthesized
  source 1..20: mol_type = other DNA
tcggaacgcaaggctagcac

SEQ ID NO: 47919 - DNA, 20 bp, synthetic construct
  misc_feature 1..20: note = chemically synthesized
  source 1..20: mol_type = other DNA
aggctagcaccagctcctcg

SEQ ID NO: 47920 - DNA, 20 bp, synthetic construct
  misc_feature 1..20: note = chemically synthesized
  source 1..20: mol_type = other DNA
cgtcctcgtcctcctgcgca

SEQ ID NO: 47921 - DNA, 20 bp, synthetic construct
  misc_feature 1..20: note = chemically synthesized
  source 1..20: mol_type = other DNA
gtcctcgtcctcctgcgcac

SEQ ID NO: 47922 - DNA, 20 bp, synthetic construct
  misc_feature 1..20: note = chemically synthesized
  source 1..20: mol_type = other DNA
ctcctgcgcacgggcgcccg

SEQ ID NO: 47923 - DNA, 20 bp, synthetic construct
  misc_feature 1..20: note = chemically synthesized
  source 1..20: mol_type = other DNA
tcctgcgcacgggcgcccgc

SEQ ID NO: 47924 - DNA, 20 bp, synthetic construct
  misc_feature 1..20: note = chemically synthesized
  source 1..20: mol_type = other DNA
gcacgggcgcccgcgggacc

SEQ ID NO: 47925 - DNA, 20 bp, synthetic construct
  misc_feature 1..20: note = chemically synthesized
  source 1..20: mol_type = other DNA
cacgggcgcccgcgggaccc

SEQ ID NO: 47926 - DNA, 20 bp, synthetic construct
  misc_feature 1..20: note = chemically synthesized
  source 1..20: mol_type = other DNA
cgggcgcccgcgggacccag

SEQ ID NO: 47927 - DNA, 20 bp, synthetic construct
  misc_feature 1..20: note = chemically synthesized
  source 1..20: mol_type = other DNA
gcgcccgcgggacccaggag

SEQ ID NO: 47928 - DNA, 20 bp, synthetic construct
  misc_feature 1..20: note = chemically synthesized
  source 1..20: mol_type = other DNA
cccgcgggacccaggagcag

SEQ ID NO: 47929 - DNA, 20 bp, synthetic construct
  misc_feature 1..20: note = chemically synthesized
  source 1..20: mol_type = other DNA
gcgggacccaggagcagcag

SEQ ID NO: 47930 - DNA, 20 bp, synthetic construct
  misc_feature 1..20: note = chemically synthesized
  source 1..20: mol_type = other DNA
ggacccaggagcagcagcag

SEQ ID NO: 47931 - DNA, 20 bp, synthetic construct
  misc_feature 1..20: note = chemically synthesized
  source 1..20: mol_type = other DNA
cccaggagcagcagcagcag

SEQ ID NO: 47932 - DNA, 20 bp, synthetic construct
  misc_feature 1..20: note = chemically synthesized
  source 1..20: mol_type = other DNA
aggagcagcagcagcagcag

SEQ ID NO: 47933 - DNA, 20 bp, synthetic construct
  misc_feature 1..20: note = chemically synthesized
  source 1..20: mol_type = other DNA
agcagcagcagcagcagcag

SEQ ID NO: 47934 - DNA, 20 bp, synthetic construct
  misc_feature 1..20: note = chemically synthesized
  source 1..20: mol_type = other DNA
agcagcagcagcagcagcag

SEQ ID NO: 47935 - DNA, 20 bp, synthetic construct
  misc_feature 1..20: note = chemically synthesized
  source 1..20: mol_type = other DNA
agcagcagcagcagcagtgg

SEQ ID NO: 47936 - DNA, 20 bp, synthetic construct
  misc_feature 1..20: note = chemically synthesized
  source 1..20: mol_type = other DNA
agcagcagcagcagtggcag

SEQ ID NO: 47937 - DNA, 20 bp, synthetic construct
  misc_feature 1..20: note = chemically synthesized
  source 1..20: mol_type = other DNA
gcagcagtggcagcggccac

SEQ ID NO: 47938 - DNA, 20 bp, synthetic construct
  misc_feature 1..20: note = chemically synthesized
  source 1..20: mol_type = other DNA
cagcagtggcagcggccacc

SEQ ID NO: 47939 - DNA, 20 bp, synthetic construct
  misc_feature 1..20: note = chemically synthesized
  source 1..20: mol_type = other DNA
cagcggccaccaggaccgcc

SEQ ID NO: 47940 - DNA, 20 bp, synthetic construct
  misc_feature 1..20: note = chemically synthesized
  source 1..20: mol_type = other DNA
gcggccaccaggaccgcctg

SEQ ID NO: 47941 - DNA, 20 bp, synthetic construct
  misc_feature 1..20: note = chemically synthesized
  source 1..20: mol_type = other DNA
ccaggaccgcctggagctga

SEQ ID NO: 47942 - DNA, 20 bp, synthetic construct
  misc_feature 1..20: note = chemically synthesized
  source 1..20: mol_type = other DNA
ctggagctgacggtgcccat

SEQ ID NO: 47943 - DNA, 20 bp, synthetic construct
  misc_feature 1..20: note = chemically synthesized
  source 1..20: mol_type = other DNA
tggagctgacggtgcccatg

SEQ ID NO: 47944 - DNA, 20 bp, synthetic construct
  misc_feature 1..20: note = chemically synthesized
  source 1..20: mol_type = other DNA
ggagctgacggtgcccatga

SEQ ID NO: 47945 - DNA, 20 bp, synthetic construct
  misc_feature 1..20: note = chemically synthesized
  source 1..20: mol_type = other DNA
ctgacggtgcccatgagggc

SEQ ID NO: 47946 - DNA, 20 bp, synthetic construct
  misc_feature 1..20: note = chemically synthesized
  source 1..20: mol_type = other DNA
tgacggtgcccatgagggcc

SEQ ID NO: 47947 - DNA, 20 bp, synthetic construct
  misc_feature 1..20: note = chemically synthesized
  source 1..20: mol_type = other DNA
gacggtgcccatgagggcca

SEQ ID NO: 47948 - DNA, 20 bp, synthetic construct
  misc_feature 1..20: note = chemically synthesized
  source 1..20: mol_type = other DNA
acggtgcccatgagggccag

SEQ ID NO: 47949 - DNA, 20 bp, synthetic construct
  misc_feature 1..20: note = chemically synthesized
  source 1..20: mol_type = other DNA
ggtgcccatgagggccaggg

SEQ ID NO: 47950 - DNA, 20 bp, synthetic construct
  misc_feature 1..20: note = chemically synthesized
  source 1..20: mol_type = other DNA
tgcccatgagggccagggga

SEQ ID NO: 47951 - DNA, 20 bp, synthetic construct
  misc_feature 1..20: note = chemically synthesized
  source 1..20: mol_type = other DNA
gcccatgagggccaggggag

SEQ ID NO: 47952 - DNA, 20 bp, synthetic construct
  misc_feature 1..20: note = chemically synthesized
  source 1..20: mol_type = other DNA
caggggagaggttgctgtcc

SEQ ID NO: 47953 - DNA, 20 bp, synthetic construct
  misc_feature 1..20: note = chemically synthesized
  source 1..20: mol_type = other DNA
ggagaggttgctgtcctggc

SEQ ID NO: 47954 - DNA, 20 bp, synthetic construct
  misc_feature 1..20: note = chemically synthesized
  source 1..20: mol_type = other DNA
gagaggttgctgtcctggcg

SEQ ID NO: 47955 - DNA, 20 bp, synthetic construct
  misc_feature 1..20: note = chemically synthesized
  source 1..20: mol_type = other DNA
gaggttgctgtcctggcgag

SEQ ID NO: 47956 - DNA, 20 bp, synthetic construct
  misc_feature 1..20: note = chemically synthesized
  source 1..20: mol_type = other DNA
gctgtcctggcgaggagacc

SEQ ID NO: 47957 - DNA, 20 bp, synthetic construct
  misc_feature 1..20: note = chemically synthesized
  source 1..20: mol_type = other DNA
tgtcctggcgaggagaccta

SEQ ID NO: 47958 - DNA, 20 bp, synthetic construct
  misc_feature 1..20: note = chemically synthesized
  source 1..20: mol_type = other DNA
gtcctggcgaggagacctag

SEQ ID NO: 47959 - DNA, 20 bp, synthetic construct
  misc_feature 1..20: note = chemically synthesized
  source 1..20: mol_type = other DNA
ggagacctagaggccgtgcg

SEQ ID NO: 47960 - DNA, 20 bp, synthetic construct
  misc_feature 1..20: note = chemically synthesized
  source 1..20: mol_type = other DNA
aggccgtgcgcggtccacgc

SEQ ID NO: 47961 - DNA, 20 bp, synthetic construct
  misc_feature 1..20: note = chemically synthesized
  source 1..20: mol_type = other DNA
ccgtgcgcggtccacgccgg

SEQ ID NO: 47962 - DNA, 20 bp, synthetic construct
  misc_feature 1..20: note = chemically synthesized
  source 1..20: mol_type = other DNA
gtccacgccggcggcgcctt

SEQ ID NO: 47963 - DNA, 20 bp, synthetic construct
  misc_feature 1..20: note = chemically synthesized
  source 1..20: mol_type = other DNA
cggcggcgccttgagccttg

SEQ ID NO: 47964 - DNA, 20 bp, synthetic construct
  misc_feature 1..20: note = chemically synthesized
  source 1..20: mol_type = other DNA
cggcgccttgagccttgcgg

SEQ ID NO: 47965 - DNA, 20 bp, synthetic construct
  misc_feature 1..20: note = chemically synthesized
  source 1..20: mol_type = other DNA
ggcgccttgagccttgcggt

SEQ ID NO: 47966 - DNA, 20 bp, synthetic construct
  misc_feature 1..20: note = chemically synthesized
  source 1..20: mol_type = other DNA
gcgccttgagccttgcggtg

SEQ ID NO: 47967 - DNA, 20 bp, synthetic construct
  misc_feature 1..20: note = chemically synthesized
  source 1..20: mol_type = other DNA
gccttgagccttgcggtggg

SEQ ID NO: 47968 - DNA, 20 bp, synthetic construct
  misc_feature 1..20: note = chemically synthesized
  source 1..20: mol_type = other DNA
ccttgagccttgcggtgggg

SEQ ID NO: 47969 - DNA, 20 bp, synthetic construct
  misc_feature 1..20: note = chemically synthesized
  source 1..20: mol_type = other DNA
ttgcggtggggaggactgtg

SEQ ID NO: 47970 - DNA, 20 bp, synthetic construct
  misc_feature 1..20: note = chemically synthesized
  source 1..20: mol_type = other DNA
tgcggtggggaggactgtgc

SEQ ID NO: 47971 - DNA, 20 bp, synthetic construct
  misc_feature 1..20: note = chemically synthesized
  source 1..20: mol_type = other DNA
cggtggggaggactgtgcag

SEQ ID NO: 47972 - DNA, 20 bp, synthetic construct
  misc_feature 1..20: note = chemically synthesized
  source 1..20: mol_type = other DNA
ggaggactgtgcaggagctg

SEQ ID NO: 47973 - DNA, 20 bp, synthetic construct
  misc_feature 1..20: note = chemically synthesized
  source 1..20: mol_type = other DNA
actgtgcaggagctgaagtt

SEQ ID NO: 47974 - DNA, 20 bp, synthetic construct
  misc_feature 1..20: note = chemically synthesized
  source 1..20: mol_type = other DNA
ctgtgcaggagctgaagttc

SEQ ID NO: 47975 - DNA, 20 bp, synthetic construct
  misc_feature 1..20: note = chemically synthesized
  source 1..20: mol_type = other DNA
gtgcaggagctgaagttcag

SEQ ID NO: 47976 - DNA, 20 bp, synthetic construct
  misc_feature 1..20: note = chemically synthesized
  source 1..20: mol_type = other DNA
caggagctgaagttcaggag

SEQ ID NO: 47977 - DNA, 20 bp, synthetic construct
  misc_feature 1..20: note = chemically synthesized
  source 1..20: mol_type = other DNA
aggagctgaagttcaggagc

SEQ ID NO: 47978 - DNA, 20 bp, synthetic construct
  misc_feature 1..20: note = chemically synthesized
  source 1..20: mol_type = other DNA
ggagctgaagttcaggagca

SEQ ID NO: 47979 - DNA, 20 bp, synthetic construct
  misc_feature 1..20: note = chemically synthesized
  source 1..20: mol_type = other DNA
gttcaggagcagggcgcgtg

SEQ ID NO: 47980 - DNA, 20 bp, synthetic construct
  misc_feature 1..20: note = chemically synthesized
  source 1..20: mol_type = other DNA
ttcaggagcagggcgcgtga

SEQ ID NO: 47981 - DNA, 20 bp, synthetic construct
  misc_feature 1..20: note = chemically synthesized
  source 1..20: mol_type = other DNA
tcaggagcagggcgcgtgaa

SEQ ID NO: 47982 - DNA, 20 bp, synthetic construct
  misc_feature 1..20: note = chemically synthesized
  source 1..20: mol_type = other DNA
caggagcagggcgcgtgaag

SEQ ID NO: 47983 - DNA, 20 bp, synthetic construct
  misc_feature 1..20: note = chemically synthesized
  source 1..20: mol_type = other DNA
agggcgcgtgaaggggcgcg

SEQ ID NO: 47984 - DNA, 20 bp, synthetic construct
  misc_feature 1..20: note = chemically synthesized
  source 1..20: mol_type = other DNA
tgaaggggcgcgcggaatcc

SEQ ID NO: 47985 - DNA, 20 bp, synthetic construct
  misc_feature 1..20: note = chemically synthesized
  source 1..20: mol_type = other DNA
ggggcgcgcggaatcctggc

SEQ ID NO: 47986 - DNA, 20 bp, synthetic construct
  misc_feature 1..20: note = chemically synthesized
  source 1..20: mol_type = other DNA
gggcgcgcggaatcctggct

SEQ ID NO: 47987 - DNA, 20 bp, synthetic construct
  misc_feature 1..20: note = chemically synthesized
  source 1..20: mol_type = other DNA
gcgcgcggaatcctggctgg

SEQ ID NO: 47988 - DNA, 20 bp, synthetic construct
  misc_feature 1..20: note = chemically synthesized
  source 1..20: mol_type = other DNA
gcggaatcctggctgggagc

SEQ ID NO: 47989 - DNA, 20 bp, synthetic construct
  misc_feature 1..20: note = chemically synthesized
  source 1..20: mol_type = other DNA
cggaatcctggctgggagct

SEQ ID NO: 47990 - DNA, 20 bp, synthetic construct
  misc_feature 1..20: note = chemically synthesized
  source 1..20: mol_type = other DNA
gaatcctggctgggagctgg

SEQ ID NO: 47991 - DNA, 20 bp, synthetic construct
  misc_feature 1..20: note = chemically synthesized
  source 1..20: mol_type = other DNA
gctgctgcaacgacgcgtcc

SEQ ID NO: 47992 - DNA, 20 bp, synthetic construct
  misc_feature 1..20: note = chemically synthesized
  source 1..20: mol_type = other DNA
cgacgcgtcccggcccgccc

SEQ ID NO: 47993 - DNA, 20 bp, synthetic construct
  misc_feature 1..20: note = chemically synthesized
  source 1..20: mol_type = other DNA
gcgtcccggcccgcccgagc

SEQ ID NO: 47994 - DNA, 20 bp, synthetic construct
  misc_feature 1..20: note = chemically synthesized
  source 1..20: mol_type = other DNA
cccgagccagtctcactgcc

SEQ ID NO: 47995 - DNA, 20 bp, synthetic construct
  misc_feature 1..20: note = chemically synthesized
  source 1..20: mol_type = other DNA
cactgcctggctcactcctc

SEQ ID NO: 47996 - DNA, 20 bp, synthetic construct
  misc_feature 1..20: note = chemically synthesized
  source 1..20: mol_type = other DNA
actgcctggctcactcctcc

SEQ ID NO: 47997 - DNA, 20 bp, synthetic construct
  misc_feature 1..20: note = chemically synthesized
  source 1..20: mol_type = other DNA
ctggctcactcctccaggct

SEQ ID NO: 47998 - DNA, 20 bp, synthetic construct
  misc_feature 1..20: note = chemically synthesized
  source 1..20: mol_type = other DNA
ggctcagaccctgaactgaa

SEQ ID NO: 47999 - DNA, 20 bp, synthetic construct
  misc_feature 1..20: note = chemically synthesized
  source 1..20: mol_type = other DNA
tcagaccctgaactgaacgg

SEQ ID NO: 48000 - DNA, 20 bp, synthetic construct
  misc_feature 1..20: note = chemically synthesized
  source 1..20: mol_type = other DNA
cggcgcccgcctgcaaccat

SEQ ID NO: 48001 - DNA, 20 bp, synthetic construct
  misc_feature 1..20: note = chemically synthesized
  source 1..20: mol_type = other DNA
tgagcgcctcgacgtcgctg

SEQ ID NO: 48002 - DNA, 20 bp, synthetic construct
  misc_feature 1..20: note = chemically synthesized
  source 1..20: mol_type = other DNA
acgtcgctgcggaaaccttc

SEQ ID NO: 48003 - DNA, 20 bp, synthetic construct
  misc_feature 1..20: note = chemically synthesized
  source 1..20: mol_type = other DNA
cgtcgctgcggaaaccttct

SEQ ID NO: 48004 - DNA, 20 bp, synthetic construct
  misc_feature 1..20: note = chemically synthesized
  source 1..20: mol_type = other DNA
gtcgctgcggaaaccttcta

SEQ ID NO: 48005 - DNA, 20 bp, synthetic construct
  misc_feature 1..20: note = chemically synthesized
  source 1..20: mol_type = other DNA
tgcggaaaccttctagggtg

SEQ ID NO: 48006 - DNA, 20 bp, synthetic construct
  misc_feature 1..20: note = chemically synthesized
  source 1..20: mol_type = other DNA
gcggaaaccttctagggtgt

SEQ ID NO: 48007 - DNA, 20 bp, synthetic construct
  misc_feature 1..20: note = chemically synthesized
  source 1..20: mol_type = other DNA
gggtgtgggtgcttgacgcc

SEQ ID NO: 48008 - DNA, 20 bp, synthetic construct
  misc_feature 1..20: note = chemically synthesized
  source 1..20: mol_type = other DNA
ggtgtgggtgcttgacgcct

SEQ ID NO: 48009 - DNA, 20 bp, synthetic construct
  misc_feature 1..20: note = chemically synthesized
  source 1..20: mol_type = other DNA
gtgtgggtgcttgacgcctg

SEQ ID NO: 48010 - DNA, 20 bp, synthetic construct
  misc_feature 1..20: note = chemically synthesized
  source 1..20: mol_type = other DNA
tgcttgacgcctggggcgcg

SEQ ID NO: 48011 - DNA, 20 bp, synthetic construct
  misc_feature 1..20: note = chemically synthesized
  source 1..20: mol_type = other DNA
gggcgcgcagatcacgccac

SEQ ID NO: 48012 - DNA, 20 bp, synthetic construct
  misc_feature 1..20: note = chemically synthesized
  source 1..20: mol_type = other DNA
gcgcgcagatcacgccacca

SEQ ID NO: 48013 - DNA, 20 bp, synthetic construct
  misc_feature 1..20: note = chemically synthesized
  source 1..20: mol_type = other DNA
tcacgccaccagagccccat

SEQ ID NO: 48014 - DNA, 20 bp, synthetic construct
  misc_feature 1..20: note = chemically synthesized
  source 1..20: mol_type = other DNA
cctatctgattaaacattaa

SEQ ID NO: 48015 - DNA, 20 bp, synthetic construct
  misc_feature 1..20: note = chemically synthesized
  source 1..20: mol_type = other DNA
ttaaacattaacggaacccc

SEQ ID NO: 48016 - DNA, 20 bp, synthetic construct
  misc_feature 1..20: note = chemically synthesized
  source 1..20: mol_type = other DNA
cattaacggaacccccggac

SEQ ID NO: 48017 - DNA, 20 bp, synthetic construct
  misc_feature 1..20: note = chemically synthesized
  source 1..20: mol_type = other DNA
ttaacggaacccccggactg

SEQ ID NO: 48018 - DNA, 20 bp, synthetic construct
  misc_feature 1..20: note = chemically synthesized
  source 1..20: mol_type = other DNA
taacggaacccccggactgg

SEQ ID NO: 48019 - DNA, 20 bp, synthetic construct
  misc_feature 1..20: note = chemically synthesized
  source 1..20: mol_type = other DNA
gaacccccggactggaggat

SEQ ID NO: 48020 - DNA, 20 bp, synthetic construct
  misc_feature 1..20: note = chemically synthesized
  source 1..20: mol_type = other DNA
aacccccggactggaggatc

SEQ ID NO: 48021 - DNA, 20 bp, synthetic construct
  misc_feature 1..20: note = chemically synthesized
  source 1..20: mol_type = other DNA
cggactggaggatcaggttt

SEQ ID NO: 48022 - DNA, 20 bp, synthetic construct
  misc_feature 1..20: note = chemically synthesized
  source 1..20: mol_type = other DNA
tcggcctcgccctccccaaa

SEQ ID NO: 48023 - DNA, 20 bp, synthetic construct
  misc_feature 1..20: note = chemically synthesized
  source 1..20: mol_type = other DNA
tcgccctccccaaacagcgt

SEQ ID NO: 48024 - DNA, 20 bp, synthetic construct
  misc_feature 1..20: note = chemically synthesized
  source 1..20: mol_type = other DNA
aaacagcgtcagattacgcg

SEQ ID NO: 48025 - DNA, 20 bp, synthetic construct
  misc_feature 1..20: note = chemically synthesized
  source 1..20: mol_type = other DNA
acagcgtcagattacgcgca

SEQ ID NO: 48026 - DNA, 20 bp, synthetic construct
  misc_feature 1..20: note = chemically synthesized
  source 1..20: mol_type = other DNA
cagcgtcagattacgcgcag

SEQ ID NO: 48027 - DNA, 20 bp, synthetic construct
  misc_feature 1..20: note = chemically synthesized
  source 1..20: mol_type = other DNA
agcgtcagattacgcgcaga

SEQ ID NO: 48028 - DNA, 20 bp, synthetic construct
  misc_feature 1..20: note = chemically synthesized
  source 1..20: mol_type = other DNA
gtcagattacgcgcagaggg

SEQ ID NO: 48029 - DNA, 20 bp, synthetic construct
  misc_feature 1..20: note = chemically synthesized
  source 1..20: mol_type = other DNA
aaaaactcccaaatcctaac

SEQ ID NO: 48030 - DNA, 20 bp, synthetic construct
  misc_feature 1..20: note = chemically synthesized
  source 1..20: mol_type = other DNA
aaaactcccaaatcctaact

SEQ ID NO: 48031 - DNA, 20 bp, synthetic construct
  misc_feature 1..20: note = chemically synthesized
  source 1..20: mol_type = other DNA
ctcccaaatcctaactgggc

SEQ ID NO: 48032 - DNA, 20 bp, synthetic construct
  misc_feature 1..20: note = chemically synthesized
  source 1..20: mol_type = other DNA
ccaaatcctaactgggctgg

SEQ ID NO: 48033 - DNA, 20 bp, synthetic construct
  misc_feature 1..20: note = chemically synthesized
  source 1..20: mol_type = other DNA
caaatcctaactgggctgga

SEQ ID NO: 48034 - DNA, 20 bp, synthetic construct
  misc_feature 1..20: note = chemically synthesized
  source 1..20: mol_type = other DNA
atcctaactgggctggaagg

SEQ ID NO: 48035 - DNA, 20 bp, synthetic construct
  misc_feature 1..20: note = chemically synthesized
  source 1..20: mol_type = other DNA
tcctaactgggctggaaggc

SEQ ID NO: 48036 - DNA, 20 bp, synthetic construct
  misc_feature 1..20: note = chemically synthesized
  source 1..20: mol_type = other DNA
aactgggctggaaggcaggc

SEQ ID NO: 48037 - DNA, 20 bp, synthetic construct
  misc_feature 1..20: note = chemically synthesized
  source 1..20: mol_type = other DNA
tggaaggcaggccggcgccc

SEQ ID NO: 48038 - DNA, 20 bp, synthetic construct
  misc_feature 1..20: note = chemically synthesized
  source 1..20: mol_type = other DNA
ggaaggcaggccggcgccct

SEQ ID NO: 48039 - DNA, 20 bp, synthetic construct
  misc_feature 1..20: note = chemically synthesized
  source 1..20: mol_type = other DNA
gaaggcaggccggcgcccta

SEQ ID NO: 48040 - DNA, 20 bp, synthetic construct
  misc_feature 1..20: note = chemically synthesized
  source 1..20: mol_type = other DNA
aaggcaggccggcgccctag

SEQ ID NO: 48041 - DNA, 20 bp, synthetic construct
  misc_feature 1..20: note = chemically synthesized
  source 1..20: mol_type = other DNA
ctcccgcctctcaccctgcg

SEQ ID NO: 48042 - DNA, 20 bp, synthetic construct
  misc_feature 1..20: note = chemically synthesized
  source 1..20: mol_type = other DNA
tcccgcctctcaccctgcgt

SEQ ID NO: 48043 - DNA, 20 bp, synthetic construct
  misc_feature 1..20: note = chemically synthesized
  source 1..20: mol_type = other DNA
tctcaccctgcgtgggatgc

SEQ ID NO: 48044 - DNA, 20 bp, synthetic construct
  misc_feature 1..20: note = chemically synthesized
  source 1..20: mol_type = other DNA
tgcgtgggatgccagactcc

SEQ ID NO: 48045 - DNA, 20 bp, synthetic construct
  misc_feature 1..20: note = chemically synthesized
  source 1..20: mol_type = other DNA
tgccagactccaagttctgc

SEQ ID NO: 48046 - DNA, 20 bp, synthetic construct
  misc_feature 1..20: note = chemically synthesized
  source 1..20: mol_type = other DNA
gccagactccaagttctgcc

SEQ ID NO: 48047 - DNA, 20 bp, synthetic construct
  misc_feature 1..20: note = chemically synthesized
  source 1..20: mol_type = other DNA
ttctgccgggcccacctttt

SEQ ID NO: 48048 - DNA, 20 bp, synthetic construct
  misc_feature 1..20: note = chemically synthesized
  source 1..20: mol_type = other DNA
cccaccttttcagtgtttcc

SEQ ID NO: 48049 - DNA, 20 bp, synthetic construct
  misc_feature 1..20: note = chemically synthesized
  source 1..20: mol_type = other DNA
ccaccttttcagtgtttcct

SEQ ID NO: 48050 - DNA, 20 bp, synthetic construct
  misc_feature 1..20: note = chemically synthesized
  source 1..20: mol_type = other DNA
ccaccttgtctcctgctgac

SEQ ID NO: 48051 - DNA, 20 bp, synthetic construct
  misc_feature 1..20: note = chemically synthesized
  source 1..20: mol_type = other DNA
cttgtctcctgctgaccagt

SEQ ID NO: 48052 - DNA, 20 bp, synthetic construct
  misc_feature 1..20: note = chemically synthesized
  source 1..20: mol_type = other DNA
cttctgaatcaatcctactg

SEQ ID NO: 48053 - DNA, 20 bp, synthetic construct
  misc_feature 1..20: note = chemically synthesized
  source 1..20: mol_type = other DNA
gcccaccgaattctttccac

SEQ ID NO: 48054 - DNA, 20 bp, synthetic construct
  misc_feature 1..20: note = chemically synthesized
  source 1..20: mol_type = other DNA
tctttccactggccttaacc

SEQ ID NO: 48055 - DNA, 20 bp, synthetic construct
  misc_feature 1..20: note = chemically synthesized
  source 1..20: mol_type = other DNA
ttccactggccttaacctgg

SEQ ID NO: 48056 - DNA, 20 bp, synthetic construct
  misc_feature 1..20: note = chemically synthesized
  source 1..20: mol_type = other DNA
acctggcagccttctaaact

SEQ ID NO: 48057 - DNA, 20 bp, synthetic construct
  misc_feature 1..20: note = chemically synthesized
  source 1..20: mol_type = other DNA
gcagccttctaaacttagcc

SEQ ID NO: 48058 - DNA, 20 bp, synthetic construct
  misc_feature 1..20: note = chemically synthesized
  source 1..20: mol_type = other DNA
aacttagcctggaccccctc

SEQ ID NO: 48059 - DNA, 20 bp, synthetic construct
  misc_feature 1..20: note = chemically synthesized
  source 1..20: mol_type = other DNA
tgcacactgaccttaccaac

SEQ ID NO: 48060 - DNA, 20 bp, synthetic construct
  misc_feature 1..20: note = chemically synthesized
  source 1..20: mol_type = other DNA
taccaactagctgctccttg

SEQ ID NO: 48061 - DNA, 20 bp, synthetic construct
  misc_feature 1..20: note = chemically synthesized
  source 1..20: mol_type = other DNA
ccaactagctgctccttgaa

SEQ ID NO: 48062 - DNA, 20 bp, synthetic construct
  misc_feature 1..20: note = chemically synthesized
  source 1..20: mol_type = other DNA
gattgcttgcttttgatgtc

SEQ ID NO: 48063 - DNA, 20 bp, synthetic construct
  misc_feature 1..20: note = chemically synthesized
  source 1..20: mol_type = other DNA
gtccagcctacatgcatttc

SEQ ID NO: 48064 - DNA, 20 bp, synthetic construct
  misc_feature 1..20: note = chemically synthesized
  source 1..20: mol_type = other DNA
tccagcctacatgcatttca

SEQ ID NO: 48065 - DNA, 20 bp, synthetic construct
  misc_feature 1..20: note = chemically synthesized
  source 1..20: mol_type = other DNA
ccagcctacatgcatttcaa

SEQ ID NO: 48066 - DNA, 20 bp, synthetic construct
  misc_feature 1..20: note = chemically synthesized
  source 1..20: mol_type = other DNA
ttcaagggatttatactaca

SEQ ID NO: 48067 - DNA, 20 bp, synthetic construct
  misc_feature 1..20: note = chemically synthesized
  source 1..20: mol_type = other DNA
ggatttatactacaaagatt

SEQ ID NO: 48068 - DNA, 20 bp, synthetic construct
  misc_feature 1..20: note = chemically synthesized
  source 1..20: mol_type = other DNA
gatttatactacaaagattc

SEQ ID NO: 48069 - DNA, 20 bp, synthetic construct
  misc_feature 1..20: note = chemically synthesized
  source 1..20: mol_type = other DNA
actacaaagattcaggtttt

SEQ ID NO: 48070 - DNA, 20 bp, synthetic construct
  misc_feature 1..20: note = chemically synthesized
  source 1..20: mol_type = other DNA
attcaggttttaagtttgca

SEQ ID NO: 48071 - DNA, 20 bp, synthetic construct
  misc_feature 1..20: note = chemically synthesized
  source 1..20: mol_type = other DNA
aagtttgcaaagacgtcata

SEQ ID NO: 48072 - DNA, 20 bp, synthetic construct
  misc_feature 1..20: note = chemically synthesized
  source 1..20: mol_type = other DNA
agtttgcaaagacgtcatat

SEQ ID NO: 48073 - DNA, 20 bp, synthetic construct
  misc_feature 1..20: note = chemically synthesized
  source 1..20: mol_type = other DNA
agacgtcatataggtacatt

SEQ ID NO: 48074 - DNA, 20 bp, synthetic construct
  misc_feature 1..20: note = chemically synthesized
  source 1..20: mol_type = other DNA
taggtacattcagaattcta

SEQ ID NO: 48075 - DNA, 20 bp, synthetic construct
  misc_feature 1..20: note = chemically synthesized
  source 1..20: mol_type = other DNA
gtacattcagaattctatgg

SEQ ID NO: 48076 - DNA, 20 bp, synthetic construct
  misc_feature 1..20: note = chemically synthesized
  source 1..20: mol_type = other DNA
tacattcagaattctatggt

SEQ ID NO: 48077 - DNA, 20 bp, synthetic construct
  misc_feature 1..20: note = chemically synthesized
  source 1..20: mol_type = other DNA
cagaattctatggtaggcac

SEQ ID NO: 48078 - DNA, 20 bp, synthetic construct
  misc_feature 1..20: note = chemically synthesized
  source 1..20: mol_type = other DNA
ttctatggtaggcacaagct

SEQ ID NO: 48079 - DNA, 20 bp, synthetic construct
  misc_feature 1..20: note = chemically synthesized
  source 1..20: mol_type = other DNA
taggcacaagctcagctttc

SEQ ID NO: 48080 - DNA, 20 bp, synthetic construct
  misc_feature 1..20: note = chemically synthesized
  source 1..20: mol_type = other DNA
gcacaagctcagctttccag

SEQ ID NO: 48081 - DNA, 20 bp, synthetic construct
  misc_feature 1..20: note = chemically synthesized
  source 1..20: mol_type = other DNA
tccagaagattcaatttgca

SEQ ID NO: 48082 - DNA, 20 bp, synthetic construct
  misc_feature 1..20: note = chemically synthesized
  source 1..20: mol_type = other DNA
tccttttacacaccatgttc

SEQ ID NO: 48083 - DNA, 20 bp, synthetic construct
  misc_feature 1..20: note = chemically synthesized
  source 1..20: mol_type = other DNA
accatgttcaagaaatcaac

SEQ ID NO: 48084 - DNA, 20 bp, synthetic construct
  misc_feature 1..20: note = chemically synthesized
  source 1..20: mol_type = other DNA
gttcaagaaatcaactggac

SEQ ID NO: 48085 - DNA, 20 bp, synthetic construct
  misc_feature 1..20: note = chemically synthesized
  source 1..20: mol_type = other DNA
aaatcaactggacaagcatc

SEQ ID NO: 48086 - DNA, 20 bp, synthetic construct
  misc_feature 1..20: note = chemically synthesized
  source 1..20: mol_type = other DNA
agtaaacacctattgtgtac

SEQ ID NO: 48087 - DNA, 20 bp, synthetic construct
  misc_feature 1..20: note = chemically synthesized
  source 1..20: mol_type = other DNA
gtaaacacctattgtgtacc

SEQ ID NO: 48088 - DNA, 20 bp, synthetic construct
  misc_feature 1..20: note = chemically synthesized
  source 1..20: mol_type = other DNA
aacacctattgtgtaccagg

SEQ ID NO: 48089 - DNA, 20 bp, synthetic construct
  misc_feature 1..20: note = chemically synthesized
  source 1..20: mol_type = other DNA
acacctattgtgtaccaggc

SEQ ID NO: 48090 - DNA, 20 bp, synthetic construct
  misc_feature 1..20: note = chemically synthesized
  source 1..20: mol_type = other DNA
acctattgtgtaccaggcag

SEQ ID NO: 48091 - DNA, 20 bp, synthetic construct
  misc_feature 1..20: note = chemically synthesized
  source 1..20: mol_type = other DNA
cctattgtgtaccaggcagg

SEQ ID NO: 48092 - DNA, 20 bp, synthetic construct
  misc_feature 1..20: note = chemically synthesized
  source 1..20: mol_type = other DNA
gtaccaggcaggaggatgaa

SEQ ID NO: 48093 - DNA, 20 bp, synthetic construct
  misc_feature 1..20: note = chemically synthesized
  source 1..20: mol_type = other DNA
taccaggcaggaggatgaaa

SEQ ID NO: 48094 - DNA, 20 bp, synthetic construct
  misc_feature 1..20: note = chemically synthesized
  source 1..20: mol_type = other DNA
accaggcaggaggatgaaaa

SEQ ID NO: 48095 - DNA, 20 bp, synthetic construct
  misc_feature 1..20: note = chemically synthesized
  source 1..20: mol_type = other DNA
ccaggcaggaggatgaaaag

SEQ ID NO: 48096 - DNA, 20 bp, synthetic construct
  misc_feature 1..20: note = chemically synthesized
  source 1..20: mol_type = other DNA
gcaggaggatgaaaagggga

SEQ ID NO: 48097 - DNA, 20 bp, synthetic construct
  misc_feature 1..20: note = chemically synthesized
  source 1..20: mol_type = other DNA
aggaggatgaaaaggggaaa

SEQ ID NO: 48098 - DNA, 20 bp, synthetic construct
  misc_feature 1..20: note = chemically synthesized
  source 1..20: mol_type = other DNA
gaggatgaaaaggggaaaga

SEQ ID NO: 48099 - DNA, 20 bp, synthetic construct
  misc_feature 1..20: note = chemically synthesized
  source 1..20: mol_type = other DNA
aaaaggggaaagagagctcc

SEQ ID NO: 48100 - DNA, 20 bp, synthetic construct
  misc_feature 1..20: note = chemically synthesized
  source 1..20: mol_type = other DNA
ggaaagagagctcctggcct

SEQ ID NO: 48101 - DNA, 20 bp, synthetic construct
  misc_feature 1..20: note = chemically synthesized
  source 1..20: mol_type = other DNA
ctggcctcagattgtacatg

SEQ ID NO: 48102 - DNA, 20 bp, synthetic construct
  misc_feature 1..20: note = chemically synthesized
  source 1..20: mol_type = other DNA
ttgtacatgtggcatgacat

SEQ ID NO: 48103 - DNA, 20 bp, synthetic construct
  misc_feature 1..20: note = chemically synthesized
  source 1..20: mol_type = other DNA
tgtacatgtggcatgacatg

SEQ ID NO: 48104 - DNA, 20 bp, synthetic construct
  misc_feature 1..20: note = chemically synthesized
  source 1..20: mol_type = other DNA
gacatgaggcttgctctttc

SEQ ID NO: 48105 - DNA, 20 bp, synthetic construct
  misc_feature 1..20: note = chemically synthesized
  source 1..20: mol_type = other DNA
atgaggcttgctctttctgg

SEQ ID NO: 48106 - DNA, 20 bp, synthetic construct
  misc_feature 1..20: note = chemically synthesized
  source 1..20: mol_type = other DNA
tgaggcttgctctttctgga

SEQ ID NO: 48107 - DNA, 20 bp, synthetic construct
  misc_feature 1..20: note = chemically synthesized
  source 1..20: mol_type = other DNA
gaggcttgctctttctggaa

SEQ ID NO: 48108 - DNA, 20 bp, synthetic construct
  misc_feature 1..20: note = chemically synthesized
  source 1..20: mol_type = other DNA
tctggaagggctgtcgatac

SEQ ID NO: 48109 - DNA, 20 bp, synthetic construct
  misc_feature 1..20: note = chemically synthesized
  source 1..20: mol_type = other DNA
ctggaagggctgtcgatact

SEQ ID NO: 48110 - DNA, 20 bp, synthetic construct
  misc_feature 1..20: note = chemically synthesized
  source 1..20: mol_type = other DNA
gaagggctgtcgatactggg

SEQ ID NO: 48111 - DNA, 20 bp, synthetic construct
  misc_feature 1..20: note = chemically synthesized
  source 1..20: mol_type = other DNA
gtcgatactgggaagaaaca

SEQ ID NO: 48112 - DNA, 20 bp, synthetic construct
  misc_feature 1..20: note = chemically synthesized
  source 1..20: mol_type = other DNA
tcgatactgggaagaaacaa

SEQ ID NO: 48113 - DNA, 20 bp, synthetic construct
  misc_feature 1..20: note = chemically synthesized
  source 1..20: mol_type = other DNA
gaatttatgatcctcccttg

SEQ ID NO: 48114 - DNA, 20 bp, synthetic construct
  misc_feature 1..20: note = chemically synthesized
  source 1..20: mol_type = other DNA
gatcctcccttgcagatgca

SEQ ID NO: 48115 - DNA, 20 bp, synthetic construct
  misc_feature 1..20: note = chemically synthesized
  source 1..20: mol_type = other DNA
cctcccttgcagatgcacag

SEQ ID NO: 48116 - DNA, 20 bp, synthetic construct
  misc_feature 1..20: note = chemically synthesized
  source 1..20: mol_type = other DNA
gcagatgcacagcagattcc

SEQ ID NO: 48117 - DNA, 20 bp, synthetic construct
  misc_feature 1..20: note = chemically synthesized
  source 1..20: mol_type = other DNA
acagcagattccgagtgaaa

SEQ ID NO: 48118 - DNA, 20 bp, synthetic construct
  misc_feature 1..20: note = chemically synthesized
  source 1..20: mol_type = other DNA
gaaatggcctgctctgaatc

SEQ ID NO: 48119 - DNA, 20 bp, synthetic construct
  misc_feature 1..20: note = chemically synthesized
  source 1..20: mol_type = other DNA
aaatggcctgctctgaatct

SEQ ID NO: 48120 - DNA, 20 bp, synthetic construct
  misc_feature 1..20: note = chemically synthesized
  source 1..20: mol_type = other DNA
cctgctctgaatctaggtgc

SEQ ID NO: 48121 - DNA, 20 bp, synthetic construct
  misc_feature 1..20: note = chemically synthesized
  source 1..20: mol_type = other DNA
tgctctgaatctaggtgctg

SEQ ID NO: 48122 - DNA, 20 bp, synthetic construct
  misc_feature 1..20: note = chemically synthesized
  source 1..20: mol_type = other DNA
aatctaggtgctggagtcca

SEQ ID NO: 48123 - DNA, 20 bp, synthetic construct
  misc_feature 1..20: note = chemically synthesized
  source 1..20: mol_type = other DNA
ctctttccactttgtttgca

SEQ ID NO: 48124 - DNA, 20 bp, synthetic construct
  misc_feature 1..20: note = chemically synthesized
  source 1..20: mol_type = other DNA
tgtttgcaaagacctcactc

SEQ ID NO: 48125 - DNA, 20 bp, synthetic construct
  misc_feature 1..20: note = chemically synthesized
  source 1..20: mol_type = other DNA
tttgcaaagacctcactcca

SEQ ID NO: 48126 - DNA, 20 bp, synthetic construct
  misc_feature 1..20: note = chemically synthesized
  source 1..20: mol_type = other DNA
tgcaaagacctcactccaga

SEQ ID NO: 48127 - DNA, 20 bp, synthetic construct
  misc_feature 1..20: note = chemically synthesized
  source 1..20: mol_type = other DNA
aagacctcactccagagagc

SEQ ID NO: 48128 - DNA, 20 bp, synthetic construct
  misc_feature 1..20: note = chemically synthesized
  source 1..20: mol_type = other DNA
ctccagagagccagtgcaca

SEQ ID NO: 48129 - DNA, 20 bp, synthetic construct
  misc_feature 1..20: note = chemically synthesized
  source 1..20: mol_type = other DNA
agagagccagtgcacaaaga

SEQ ID NO: 48130 - DNA, 20 bp, synthetic construct
  misc_feature 1..20: note = chemically synthesized
  source 1..20: mol_type = other DNA
gtgcacaaagacagtgcaac

SEQ ID NO: 48131 - DNA, 20 bp, synthetic construct
  misc_feature 1..20: note = chemically synthesized
  source 1..20: mol_type = other DNA
cacaaagacagtgcaaccag

SEQ ID NO: 48132 - DNA, 20 bp, synthetic construct
  misc_feature 1..20: note = chemically synthesized
  source 1..20: mol_type = other DNA
acaaagacagtgcaaccagt

SEQ ID NO: 48133 - DNA, 20 bp, synthetic construct
  misc_feature 1..20: note = chemically synthesized
  source 1..20: mol_type = other DNA
cagtgcaaccagtgggttga

SEQ ID NO: 48134 - DNA, 20 bp, synthetic construct
  misc_feature 1..20: note = chemically synthesized
  source 1..20: mol_type = other DNA
tgggttgacagtgactccat

SEQ ID NO: 48135 - DNA, 20 bp, synthetic construct
  misc_feature 1..20: note = chemically synthesized
  source 1..20: mol_type = other DNA
gggttgacagtgactccatg

SEQ ID NO: 48136 - DNA, 20 bp, synthetic construct
  misc_feature 1..20: note = chemically synthesized
  source 1..20: mol_type = other DNA
tgacagtgactccatgaggt

SEQ ID NO: 48137 - DNA, 20 bp, synthetic construct
  misc_feature 1..20: note = chemically synthesized
  source 1..20: mol_type = other DNA
gacagtgactccatgaggta

SEQ ID NO: 48138 - DNA, 20 bp, synthetic construct
  misc_feature 1..20: note = chemically synthesized
  source 1..20: mol_type = other DNA
gtgactccatgaggtaaggt

SEQ ID NO: 48139 - DNA, 20 bp, synthetic construct
  misc_feature 1..20: note = chemically synthesized
  source 1..20: mol_type = other DNA
gactccatgaggtaaggtca

SEQ ID NO: 48140 - DNA, 20 bp, synthetic construct
  misc_feature 1..20: note = chemically synthesized
  source 1..20: mol_type = other DNA
aggtcagagttatccccatc

SEQ ID NO: 48141 - DNA, 20 bp, synthetic construct
  misc_feature 1..20: note = chemically synthesized
  source 1..20: mol_type = other DNA
ccccatcgagcccgccatcg

SEQ ID NO: 48142 - DNA, 20 bp, synthetic construct
  misc_feature 1..20: note = chemically synthesized
  source 1..20: mol_type = other DNA
tcgagcccgccatcgcagca

SEQ ID NO: 48143 - DNA, 20 bp, synthetic construct
  misc_feature 1..20: note = chemically synthesized
  source 1..20: mol_type = other DNA
gagcccgccatcgcagcaca

SEQ ID NO: 48144 - DNA, 20 bp, synthetic construct
  misc_feature 1..20: note = chemically synthesized
  source 1..20: mol_type = other DNA
cccgccatcgcagcacagag

SEQ ID NO: 48145 - DNA, 20 bp, synthetic construct
  misc_feature 1..20: note = chemically synthesized
  source 1..20: mol_type = other DNA
ccgccatcgcagcacagagt

SEQ ID NO: 48146 - DNA, 20 bp, synthetic construct
  misc_feature 1..20: note = chemically synthesized
  source 1..20: mol_type = other DNA
gccatcgcagcacagagtag

SEQ ID NO: 48147 - DNA, 20 bp, synthetic construct
  misc_feature 1..20: note = chemically synthesized
  source 1..20: mol_type = other DNA
cagcacagagtaggagctca

SEQ ID NO: 48148 - DNA, 20 bp, synthetic construct
  misc_feature 1..20: note = chemically synthesized
  source 1..20: mol_type = other DNA
aggagctcatggtttgctga

SEQ ID NO: 48149 - DNA, 20 bp, synthetic construct
  misc_feature 1..20: note = chemically synthesized
  source 1..20: mol_type = other DNA
gagctcatggtttgctgaca

SEQ ID NO: 48150 - DNA, 20 bp, synthetic construct
  misc_feature 1..20: note = chemically synthesized
  source 1..20: mol_type = other DNA
agctcatggtttgctgacag

SEQ ID NO: 48151 - DNA, 20 bp, synthetic construct
  misc_feature 1..20: note = chemically synthesized
  source 1..20: mol_type = other DNA
tcatggtttgctgacagagg

SEQ ID NO: 48152 - DNA, 20 bp, synthetic construct
  misc_feature 1..20: note = chemically synthesized
  source 1..20: mol_type = other DNA
tggtttgctgacagaggtgg

SEQ ID NO: 48153 - DNA, 20 bp, synthetic construct
  misc_feature 1..20: note = chemically synthesized
  source 1..20: mol_type = other DNA
gtttgctgacagaggtggca

SEQ ID NO: 48154 - DNA, 20 bp, synthetic construct
  misc_feature 1..20: note = chemically synthesized
  source 1..20: mol_type = other DNA
tttgctgacagaggtggcag

SEQ ID NO: 48155 - DNA, 20 bp, synthetic construct
  misc_feature 1..20: note = chemically synthesized
  source 1..20: mol_type = other DNA
gctgacagaggtggcagagg

SEQ ID NO: 48156 - DNA, 20 bp, synthetic construct
  misc_feature 1..20: note = chemically synthesized
  source 1..20: mol_type = other DNA
tccttcctgttgcctgtaat

SEQ ID NO: 48157 - DNA, 20 bp, synthetic construct
  misc_feature 1..20: note = chemically synthesized
  source 1..20: mol_type = other DNA
ttgtatttgcaatgtgcttt

SEQ ID NO: 48158 - DNA, 20 bp, synthetic construct
  misc_feature 1..20: note = chemically synthesized
  source 1..20: mol_type = other DNA
tatttgcaatgtgcttttgg

SEQ ID NO: 48159 - DNA, 20 bp, synthetic construct
  misc_feature 1..20: note = chemically synthesized
  source 1..20: mol_type = other DNA
ttttggcagcttcctcatca

SEQ ID NO: 48160 - DNA, 20 bp, synthetic construct
  misc_feature 1..20: note = chemically synthesized
  source 1..20: mol_type = other DNA
tttggcagcttcctcatcaa

SEQ ID NO: 48161 - DNA, 20 bp, synthetic construct
  misc_feature 1..20: note = chemically synthesized
  source 1..20: mol_type = other DNA
tcctcatcaaaggcctcccc

SEQ ID NO: 48162 - DNA, 20 bp, synthetic construct
  misc_feature 1..20: note = chemically synthesized
  source 1..20: mol_type = other DNA
ctcatcaaaggcctcccctg

SEQ ID NO: 48163 - DNA, 20 bp, synthetic construct
  misc_feature 1..20: note = chemically synthesized
  source 1..20: mol_type = other DNA
tcaaaggcctcccctggagc

SEQ ID NO: 48164 - DNA, 20 bp, synthetic construct
  misc_feature 1..20: note = chemically synthesized
  source 1..20: mol_type = other DNA
ggcctcccctggagcaagaa

SEQ ID NO: 48165 - DNA, 20 bp, synthetic construct
  misc_feature 1..20: note = chemically synthesized
  source 1..20: mol_type = other DNA
tcccctggagcaagaataga

SEQ ID NO: 48166 - DNA, 20 bp, synthetic construct
  misc_feature 1..20: note = chemically synthesized
  source 1..20: mol_type = other DNA
cccctggagcaagaatagat

SEQ ID NO: 48167 - DNA, 20 bp, synthetic construct
  misc_feature 1..20: note = chemically synthesized
  source 1..20: mol_type = other DNA
cctggagcaagaatagatgg

SEQ ID NO: 48168 - DNA, 20 bp, synthetic construct
  misc_feature 1..20: note = chemically synthesized
  source 1..20: mol_type = other DNA
ctttccctgctgctcccctt

SEQ ID NO: 48169 - DNA, 20 bp, synthetic construct
  misc_feature 1..20: note = chemically synthesized
  source 1..20: mol_type = other DNA
tttccctgctgctccccttt

SEQ ID NO: 48170 - DNA, 20 bp, synthetic construct
  misc_feature 1..20: note = chemically synthesized
  source 1..20: mol_type = other DNA
gctgctcccctttgggacct

SEQ ID NO: 48171 - DNA, 20 bp, synthetic construct
  misc_feature 1..20: note = chemically synthesized
  source 1..20: mol_type = other DNA
gaccttggcctctcacctac

SEQ ID NO: 48172 - DNA, 20 bp, synthetic construct
  misc_feature 1..20: note = chemically synthesized
  source 1..20: mol_type = other DNA
accttggcctctcacctacc

SEQ ID NO: 48173 - DNA, 20 bp, synthetic construct
  misc_feature 1..20: note = chemically synthesized
  source 1..20: mol_type = other DNA
ccttggcctctcacctaccg

SEQ ID NO: 48174 - DNA, 20 bp, synthetic construct
  misc_feature 1..20: note = chemically synthesized
  source 1..20: mol_type = other DNA
gctgcgatggcgggctcgat

SEQ ID NO: 48175 - DNA, 20 bp, synthetic construct
  misc_feature 1..20: note = chemically synthesized
  source 1..20: mol_type = other DNA
ataactctgaccttacctca

SEQ ID NO: 48176 - DNA, 20 bp, synthetic construct
  misc_feature 1..20: note = chemically synthesized
  source 1..20: mol_type = other DNA
gtctttgtgcactggctctc

SEQ ID NO: 48177 - DNA, 20 bp, synthetic construct
  misc_feature 1..20: note = chemically synthesized
  source 1..20: mol_type = other DNA
tcagagcaggccatttcact

SEQ ID NO: 48178 - DNA, 20 bp, synthetic construct
  misc_feature 1..20: note = chemically synthesized
  source 1..20: mol_type = other DNA
tctgctgtgcatctgcaagg

SEQ ID NO: 48179 - DNA, 20 bp, synthetic construct
  misc_feature 1..20: note = chemically synthesized
  source 1..20: mol_type = other DNA
tggtacacaataggtgttta

SEQ ID NO: 48180 - DNA, 20 bp, synthetic construct
  misc_feature 1..20: note = chemically synthesized
  source 1..20: mol_type = other DNA
tcttgaacatggtgtgtaaa

SEQ ID NO: 48181 - DNA, 20 bp, synthetic construct
  misc_feature 1..20: note = chemically synthesized
  source 1..20: mol_type = other DNA
gtaaaaggaatctttgcaaa

SEQ ID NO: 48182 - DNA, 20 bp, synthetic construct
  misc_feature 1..20: note = chemically synthesized
  source 1..20: mol_type = other DNA
agctgagcttgtgcctacca

SEQ ID NO: 48183 - DNA, 20 bp, synthetic construct
  misc_feature 1..20: note = chemically synthesized
  source 1..20: mol_type = other DNA
cttgtgcctaccatagaatt

SEQ ID NO: 48184 - DNA, 20 bp, synthetic construct
  misc_feature 1..20: note = chemically synthesized
  source 1..20: mol_type = other DNA
cgtctttgcaaacttaaaac

SEQ ID NO: 48185 - DNA, 20 bp, synthetic construct
  misc_feature 1..20: note = chemically synthesized
  source 1..20: mol_type = other DNA
tagttggtaaggtcagtgtg

SEQ ID NO: 48186 - DNA, 20 bp, synthetic construct
  misc_feature 1..20: note = chemically synthesized
  source 1..20: mol_type = other DNA
cataaagggcagaggccgga

SEQ ID NO: 48187 - DNA, 20 bp, synthetic construct
  misc_feature 1..20: note = chemically synthesized
  source 1..20: mol_type = other DNA
gccaggttaaggccagtgga

SEQ ID NO: 48188 - DNA, 20 bp, synthetic construct
  misc_feature 1..20: note = chemically synthesized
  source 1..20: mol_type = other DNA
aaagaattcggtgggcagcg

SEQ ID NO: 48189 - DNA, 20 bp, synthetic construct
  misc_feature 1..20: note = chemically synthesized
  source 1..20: mol_type = other DNA
gggcagcgaggagtccacag

SEQ ID NO: 48190 - DNA, 20 bp, synthetic construct
  misc_feature 1..20: note = chemically synthesized
  source 1..20: mol_type = other DNA
aaggtgggcccggcagaact

SEQ ID NO: 48191 - DNA, 20 bp, synthetic construct
  misc_feature 1..20: note = chemically synthesized
  source 1..20: mol_type = other DNA
ttggagtctggcatcccacg

SEQ ID NO: 48192 - DNA, 20 bp, synthetic construct
  misc_feature 1..20: note = chemically synthesized
  source 1..20: mol_type = other DNA
ggcctgccttccagcccagt

SEQ ID NO: 48193 - DNA, 20 bp, synthetic construct
  misc_feature 1..20: note = chemically synthesized
  source 1..20: mol_type = other DNA
ttccagcccagttaggattt

SEQ ID NO: 48194 - DNA, 20 bp, synthetic construct
  misc_feature 1..20: note = chemically synthesized
  source 1..20: mol_type = other DNA
gaaacctgatcctccagtcc

SEQ ID NO: 48195 - DNA, 20 bp, synthetic construct
  misc_feature 1..20: note = chemically synthesized
  source 1..20: mol_type = other DNA
tccgttaatgtttaatcaga

SEQ ID NO: 48196 - DNA, 20 bp, synthetic construct
  misc_feature 1..20: note = chemically synthesized
  source 1..20: mol_type = other DNA
gcgggcgccgccgttcagtt

SEQ ID NO: 48197 - DNA, 20 bp, synthetic construct
  misc_feature 1..20: note = chemically synthesized
  source 1..20: mol_type = other DNA
agttcagggtctgagcctgg

SEQ ID NO: 48198 - DNA, 20 bp, synthetic construct
  misc_feature 1..20: note = chemically synthesized
  source 1..20: mol_type = other DNA
agcggctcccagctcccagc

SEQ ID NO: 48199 - DNA, 20 bp, synthetic construct
  misc_feature 1..20: note = chemically synthesized
  source 1..20: mol_type = other DNA
tgctgctgctgctgctgctc

SEQ ID NO: 48200 - DNA, 20 bp, synthetic construct
  misc_feature 1..20: note = chemically synthesized
  source 1..20: mol_type = other DNA
ttccaccgctgcgccaaggt

SEQ ID NO: 48201 - DNA, 20 bp, synthetic construct
  misc_feature 1..20: note = chemically synthesized
  source 1..20: mol_type = other DNA
ctgcgccaaggtgcgggtgt

SEQ ID NO: 48202 - DNA, 20 bp, synthetic construct
  misc_feature 1..20: note = chemically synthesized
  source 1..20: mol_type = other DNA
cccccatgtaagagaggaag

SEQ ID NO: 48203 - DNA, 20 bp, synthetic construct
  misc_feature 1..20: note = chemically synthesized
  source 1..20: mol_type = other DNA
aggcaaggcggcgggggagg

SEQ ID NO: 48204 - DNA, 20 bp, synthetic construct
  misc_feature 1..20: note = chemically synthesized
  source 1..20: mol_type = other DNA
ctattcagtgggaaggttcg

SEQ ID NO: 48205 - DNA, 20 bp, synthetic construct
  misc_feature 1..20: note = chemically synthesized
  source 1..20: mol_type = other DNA
aagggcgagcagagcactgc

SEQ ID NO: 48206 - DNA, 20 bp, synthetic construct
  misc_feature 1..20: note = chemically synthesized
  source 1..20: mol_type = other DNA
tctgcctcgccgcggcacag

SEQ ID NO: 48207 - DNA, 20 bp, synthetic construct
  misc_feature 1..20: note = chemically synthesized
  source 1..20: mol_type = other DNA
gccgcggcacaggtgggtga

SEQ ID NO: 48208 - DNA, 20 bp, synthetic construct
  misc_feature 1..20: note = chemically synthesized
  source 1..20: mol_type = other DNA
cggcacaggtgggtgaagga

SEQ ID NO: 48209 - DNA, 20 bp, synthetic construct
  misc_feature 1..20: note = chemically synthesized
  source 1..20: mol_type = other DNA
aaagcgggcttgccattata

SEQ ID NO: 48210 - DNA, 20 bp, synthetic construct
  misc_feature 1..20: note = chemically synthesized
  source 1..20: mol_type = other DNA
tttggaaaacatgggcagcg

SEQ ID NO: 48211 - DNA, 20 bp, synthetic construct
  misc_feature 1..20: note = chemically synthesized
  source 1..20: mol_type = other DNA
ggccctacccgagacagggg

SEQ ID NO: 48212 - DNA, 20 bp, synthetic construct
  misc_feature 1..20: note = chemically synthesized
  source 1..20: mol_type = other DNA
gtctgccgaccgtgtgcggg

SEQ ID NO: 48213 - DNA, 20 bp, synthetic construct
  misc_feature 1..20: note = chemically synthesized
  source 1..20: mol_type = other DNA
aggttctgtgtcccccagct

SEQ ID NO: 48214 - DNA, 20 bp, synthetic construct
  misc_feature 1..20: note = chemically synthesized
  source 1..20: mol_type = other DNA
ccccagcttggagtcagatg

SEQ ID NO: 48215 - DNA, 20 bp, synthetic construct
  misc_feature 1..20: note = chemically synthesized
  source 1..20: mol_type = other DNA
gcttggagtcagatgtgggg

SEQ ID NO: 48216 - DNA, 20 bp, synthetic construct
  misc_feature 1..20: note = chemically synthesized
  source 1..20: mol_type = other DNA
aagggaaagttctgttgacc

SEQ ID NO: 48217 - DNA, 20 bp, synthetic construct
  misc_feature 1..20: note = chemically synthesized
  source 1..20: mol_type = other DNA
acttacaatgcaagccccgg

SEQ ID NO: 48218 - DNA, 20 bp, synthetic construct
  misc_feature 1..20: note = chemically synthesized
  source 1..20: mol_type = other DNA
ctgcctgcccacgcttctgt

SEQ ID NO: 48219 - DNA, 20 bp, synthetic construct
  misc_feature 1..20: note = chemically synthesized
  source 1..20: mol_type = other DNA
cacgcttctgtctgagtgtg

SEQ ID NO: 48220 - DNA, 20 bp, synthetic construct
  misc_feature 1..20: note = chemically synthesized
  source 1..20: mol_type = other DNA
tgtctgagtgtgctgggtgg

SEQ ID NO: 48221 - DNA, 20 bp, synthetic construct
  misc_feature 1..20: note = chemically synthesized
  source 1..20: mol_type = other DNA
ctgagcctttgactttctcg

SEQ ID NO: 48222 - DNA, 20 bp, synthetic construct
  misc_feature 1..20: note = chemically synthesized
  source 1..20: mol_type = other DNA
gactttctcgagggatgttg

SEQ ID NO: 48223 - DNA, 20 bp, synthetic construct
  misc_feature 1..20: note = chemically synthesized
  source 1..20: mol_type = other DNA
ggatgttgtggggttgtggc

SEQ ID NO: 48224 - DNA, 20 bp, synthetic construct
  misc_feature 1..20: note = chemically synthesized
  source 1..20: mol_type = other DNA
aaacaactgttctggaaata

SEQ ID NO: 48225 - DNA, 20 bp, synthetic construct
  misc_feature 1..20: note = chemically synthesized
  source 1..20: mol_type = other DNA
tgagtaccccatcctgagag

SEQ ID NO: 48226 - DNA, 20 bp, synthetic construct
  misc_feature 1..20: note = chemically synthesized
  source 1..20: mol_type = other DNA
accacctgaaccaagccctt

SEQ ID NO: 48227 - DNA, 20 bp, synthetic construct
  misc_feature 1..20: note = chemically synthesized
  source 1..20: mol_type = other DNA
tcattcaatggttattttgt

SEQ ID NO: 48228 - DNA, 20 bp, synthetic construct
  misc_feature 1..20: note = chemically synthesized
  source 1..20: mol_type = other DNA
caatggttattttgtgggaa

SEQ ID NO: 48229 - DNA, 20 bp, synthetic construct
  misc_feature 1..20: note = chemically synthesized
  source 1..20: mol_type = other DNA
tattttgtgggaatcgaatt

SEQ ID NO: 48230 - DNA, 20 bp, synthetic construct
  misc_feature 1..20: note = chemically synthesized
  source 1..20: mol_type = other DNA
tcaccccaggtgcattagaa

SEQ ID NO: 48231 - DNA, 20 bp, synthetic construct
  misc_feature 1..20: note = chemically synthesized
  source 1..20: mol_type = other DNA
agaactgacactccactgca

SEQ ID NO: 48232 - DNA, 20 bp, synthetic construct
  misc_feature 1..20: note = chemically synthesized
  source 1..20: mol_type = other DNA
ttagcggaaggcattttcag

SEQ ID NO: 48233 - DNA, 20 bp, synthetic construct
  misc_feature 1..20: note = chemically synthesized
  source 1..20: mol_type = other DNA
tgggtctttgaagcattagt

SEQ ID NO: 48234 - DNA, 20 bp, synthetic construct
  misc_feature 1..20: note = chemically synthesized
  source 1..20: mol_type = other DNA
ttcagcgatgatggtgtcat

SEQ ID NO: 48235 - DNA, 20 bp, synthetic construct
  misc_feature 1..20: note = chemically synthesized
  source 1..20: mol_type = other DNA
gtgtcatgagaattttattc

SEQ ID NO: 48236 - DNA, 20 bp, synthetic construct
  misc_feature 1..20: note = chemically synthesized
  source 1..20: mol_type = other DNA
tttttcttttttttttgaga

SEQ ID NO: 48237 - DNA, 20 bp, synthetic construct
  misc_feature 1..20: note = chemically synthesized
  source 1..20: mol_type = other DNA
ttcgctcttgttgcccaggc

SEQ ID NO: 48238 - DNA, 20 bp, synthetic construct
  misc_feature 1..20: note = chemically synthesized
  source 1..20: mol_type = other DNA
ctcactgcaacatctgtctc

SEQ ID NO: 48239 - DNA, 20 bp, synthetic construct
  misc_feature 1..20: note = chemically synthesized
  source 1..20: mol_type = other DNA
gcctcagcctcccaagaagc

SEQ ID NO: 48240 - DNA, 20 bp, synthetic construct
  misc_feature 1..20: note = chemically synthesized
  source 1..20: mol_type = other DNA
ttttgtatttttagtagaga

SEQ ID NO: 48241 - DNA, 20 bp, synthetic construct
  misc_feature 1..20: note = chemically synthesized
  source 1..20: mol_type = other DNA
gcaaactcctgacctcctca

SEQ ID NO: 48242 - DNA, 20 bp, synthetic construct
  misc_feature 1..20: note = chemically synthesized
  source 1..20: mol_type = other DNA
gcctcagcctcccaaagtgc

SEQ ID NO: 48243 - DNA, 20 bp, synthetic construct
  misc_feature 1..20: note = chemically synthesized
  source 1..20: mol_type = other DNA
attatttttaatttagttgt

SEQ ID NO: 48244 - DNA, 20 bp, synthetic construct
  misc_feature 1..20: note = chemically synthesized
  source 1..20: mol_type = other DNA
accgttttggccctaaggct

SEQ ID NO: 48245 - DNA, 20 bp, synthetic construct
  misc_feature 1..20: note = chemically synthesized
  source 1..20: mol_type = other DNA
gccctaaggctttgggtaaa

SEQ ID NO: 48246 - DNA, 20 bp, synthetic construct
  misc_feature 1..20: note = chemically synthesized
  source 1..20: mol_type = other DNA
ggactctgttctactctgac

SEQ ID NO: 48247 - DNA, 20 bp, synthetic construct
  misc_feature 1..20: note = chemically synthesized
  source 1..20: mol_type = other DNA
agatgcatatatacagagat

SEQ ID NO: 48248 - DNA, 20 bp, synthetic construct
  misc_feature 1..20: note = chemically synthesized
  source 1..20: mol_type = other DNA
gtaggggccaaggaggagca

SEQ ID NO: 48249 - DNA, 20 bp, synthetic construct
  misc_feature 1..20: note = chemically synthesized
  source 1..20: mol_type = other DNA
tggggcctaatgggaggtgt

SEQ ID NO: 48250 - DNA, 20 bp, synthetic construct
  misc_feature 1..20: note = chemically synthesized
  source 1..20: mol_type = other DNA
ttggtgccgtccttgtgata

SEQ ID NO: 48251 - DNA, 20 bp, synthetic construct
  misc_feature 1..20: note = chemically synthesized
  source 1..20: mol_type = other DNA
catgcttcctggagagcttg

SEQ ID NO: 48252 - DNA, 20 bp, synthetic construct
  misc_feature 1..20: note = chemically synthesized
  source 1..20: mol_type = other DNA
agagcttgcagaatcatgag

SEQ ID NO: 48253 - DNA, 20 bp, synthetic construct
  misc_feature 1..20: note = chemically synthesized
  source 1..20: mol_type = other DNA
tgcctgcatttgtagagcat

SEQ ID NO: 48254 - DNA, 20 bp, synthetic construct
  misc_feature 1..20: note = chemically synthesized
  source 1..20: mol_type = other DNA
gtatctgaggctccgagagg

SEQ ID NO: 48255 - DNA, 20 bp, synthetic construct
  misc_feature 1..20: note = chemically synthesized
  source 1..20: mol_type = other DNA
caaccagtaaatattggagc

SEQ ID NO: 48256 - DNA, 20 bp, synthetic construct
  misc_feature 1..20: note = chemically synthesized
  source 1..20: mol_type = other DNA
tctgactggggcatggggga

SEQ ID NO: 48257 - DNA, 20 bp, synthetic construct
  misc_feature 1..20: note = chemically synthesized
  source 1..20: mol_type = other DNA
gcgaccaggcccgtagagag

SEQ ID NO: 48258 - DNA, 20 bp, synthetic construct
  misc_feature 1..20: note = chemically synthesized
  source 1..20: mol_type = other DNA
gtacagaggaaaacctgttg

SEQ ID NO: 48259 - DNA, 20 bp, synthetic construct
  misc_feature 1..20: note = chemically synthesized
  source 1..20: mol_type = other DNA
cccgtagttcccatttttgc

SEQ ID NO: 48260 - DNA, 20 bp, synthetic construct
  misc_feature 1..20: note = chemically synthesized
  source 1..20: mol_type = other DNA
tgaaagtgttatataaccat

SEQ ID NO: 48261 - DNA, 20 bp, synthetic construct
  misc_feature 1..20: note = chemically synthesized
  source 1..20: mol_type = other DNA
aataataatagttggcctat

SEQ ID NO: 48262 - DNA, 20 bp, synthetic construct
  misc_feature 1..20: note = chemically synthesized
  source 1..20: mol_type = other DNA
ttttgttgtaatttgtaagt

SEQ ID NO: 48263 - DNA, 20 bp, synthetic construct
  misc_feature 1..20: note = chemically synthesized
  source 1..20: mol_type = other DNA
ggggtgagataaagtacacc

SEQ ID NO: 48264 - DNA, 20 bp, synthetic construct
  misc_feature 1..20: note = chemically synthesized
  source 1..20: mol_type = other DNA
taaagtacacctagggtttg

SEQ ID NO: 48265 - DNA, 20 bp, synthetic construct
  misc_feature 1..20: note = chemically synthesized
  source 1..20: mol_type = other DNA
tgttcctccttgcatggggc

SEQ ID NO: 48266 - DNA, 20 bp, synthetic construct
  misc_feature 1..20: note = chemically synthesized
  source 1..20: mol_type = other DNA
gcaggcccaggctgcccgcc

SEQ ID NO: 48267 - DNA, 20 bp, synthetic construct
  misc_feature 1..20: note = chemically synthesized
  source 1..20: mol_type = other DNA
ttcctggcttcctggtgaag

SEQ ID NO: 48268 - DNA, 20 bp, synthetic construct
  misc_feature 1..20: note = chemically synthesized
  source 1..20: mol_type = other DNA
gctggtgagccacccttttt

SEQ ID NO: 48269 - DNA, 20 bp, synthetic construct
  misc_feature 1..20: note = chemically synthesized
  source 1..20: mol_type = other DNA
aagtatgtattgagcactta

SEQ ID NO: 48270 - DNA, 20 bp, synthetic construct
  misc_feature 1..20: note = chemically synthesized
  source 1..20: mol_type = other DNA
gtaactactggctttctgta

SEQ ID NO: 48271 - DNA, 20 bp, synthetic construct
  misc_feature 1..20: note = chemically synthesized
  source 1..20: mol_type = other DNA
aggggaccacacagacagct

SEQ ID NO: 48272 - DNA, 20 bp, synthetic construct
  misc_feature 1..20: note = chemically synthesized
  source 1..20: mol_type = other DNA
cagacagctaggggtagagc

SEQ ID NO: 48273 - DNA, 20 bp, synthetic construct
  misc_feature 1..20: note = chemically synthesized
  source 1..20: mol_type = other DNA
aacctgtagggacaaggccc

SEQ ID NO: 48274 - DNA, 20 bp, synthetic construct
  misc_feature 1..20: note = chemically synthesized
  source 1..20: mol_type = other DNA
cctgggatgttcagtggagc

SEQ ID NO: 48275 - DNA, 20 bp, synthetic construct
  misc_feature 1..20: note = chemically synthesized
  source 1..20: mol_type = other DNA
tttataaaaaagcatgactc

SEQ ID NO: 48276 - DNA, 20 bp, synthetic construct
  misc_feature 1..20: note = chemically synthesized
  source 1..20: mol_type = other DNA
cctttgaagctgttgctatc

SEQ ID NO: 48277 - DNA, 20 bp, synthetic construct
  misc_feature 1..20: note = chemically synthesized
  source 1..20: mol_type = other DNA
gtgaagtcccttctttagga

SEQ ID NO: 48278 - DNA, 20 bp, synthetic construct
  misc_feature 1..20: note = chemically synthesized
  source 1..20: mol_type = other DNA
cagggtggccctcctccctc

SEQ ID NO: 48279 - DNA, 20 bp, synthetic construct
  misc_feature 1..20: note = chemically synthesized
  source 1..20: mol_type = other DNA
gtggaggggcagaaagggga

SEQ ID NO: 48280 - DNA, 20 bp, synthetic construct
  misc_feature 1..20: note = chemically synthesized
  source 1..20: mol_type = other DNA
aagatttgaagcactagggc

SEQ ID NO: 48281 - DNA, 20 bp, synthetic construct
  misc_feature 1..20: note = chemically synthesized
  source 1..20: mol_type = other DNA
agcactagggccagggtgag

SEQ ID NO: 48282 - DNA, 20 bp, synthetic construct
  misc_feature 1..20: note = chemically synthesized
  source 1..20: mol_type = other DNA
cctaaagaagggacttcact

SEQ ID NO: 48283 - DNA, 20 bp, synthetic construct
  misc_feature 1..20: note = chemically synthesized
  source 1..20: mol_type = other DNA
ctggatagcaacagcttcaa

SEQ ID NO: 48284 - DNA, 20 bp, synthetic construct
  misc_feature 1..20: note = chemically synthesized
  source 1..20: mol_type = other DNA
ttcaaaggaattttggaccc

SEQ ID NO: 48285 - DNA, 20 bp, synthetic construct
  misc_feature 1..20: note = chemically synthesized
  source 1..20: mol_type = other DNA
ggcagcagatgcattggcac

SEQ ID NO: 48286 - DNA, 20 bp, synthetic construct
  misc_feature 1..20: note = chemically synthesized
  source 1..20: mol_type = other DNA
aatggctggcaggcagacca

SEQ ID NO: 48287 - DNA, 20 bp, synthetic construct
  misc_feature 1..20: note = chemically synthesized
  source 1..20: mol_type = other DNA
ggggcatggccaggcttaaa

SEQ ID NO: 48288 - DNA, 20 bp, synthetic construct
  misc_feature 1..20: note = chemically synthesized
  source 1..20: mol_type = other DNA
caggaagtgccattcccaaa

SEQ ID NO: 48289 - DNA, 20 bp, synthetic construct
  misc_feature 1..20: note = chemically synthesized
  source 1..20: mol_type = other DNA
agaaggccatggaagacatg

SEQ ID NO: 48290 - DNA, 20 bp, synthetic construct
  misc_feature 1..20: note = chemically synthesized
  source 1..20: mol_type = other DNA
gtgcgctctgactgcgagag

SEQ ID NO: 48291 - DNA, 20 bp, synthetic construct
  misc_feature 1..20: note = chemically synthesized
  source 1..20: mol_type = other DNA
gtaggtgccaggcaacctcc

SEQ ID NO: 48292 - DNA, 20 bp, synthetic construct
  misc_feature 1..20: note = chemically synthesized
  source 1..20: mol_type = other DNA
ttacaacaaaagagacacaa

SEQ ID NO: 48293 - DNA, 20 bp, synthetic construct
  misc_feature 1..20: note = chemically synthesized
  source 1..20: mol_type = other DNA
cccctcccccatgccccagt

SEQ ID NO: 48294 - DNA, 20 bp, synthetic construct
  misc_feature 1..20: note = chemically synthesized
  source 1..20: mol_type = other DNA
ggagccaggaaaccgtggac

SEQ ID NO: 48295 - DNA, 20 bp, synthetic construct
  misc_feature 1..20: note = chemically synthesized
  source 1..20: mol_type = other DNA
ataggcctgctgggaaagtc

SEQ ID NO: 48296 - DNA, 20 bp, synthetic construct
  misc_feature 1..20: note = chemically synthesized
  source 1..20: mol_type = other DNA
gctctacaaatgcaggcaga

SEQ ID NO: 48297 - DNA, 20 bp, synthetic construct
  misc_feature 1..20: note = chemically synthesized
  source 1..20: mol_type = other DNA
ccttttgtgttgctatataa

SEQ ID NO: 48298 - DNA, 20 bp, synthetic construct
  misc_feature 1..20: note = chemically synthesized
  source 1..20: mol_type = other DNA
atataaaggaatacctgaag

SEQ ID NO: 48299 - DNA, 20 bp, synthetic construct
  misc_feature 1..20: note = chemically synthesized
  source 1..20: mol_type = other DNA
gtgagtaatttacaaggaaa

SEQ ID NO: 48300 - DNA, 20 bp, synthetic construct
  misc_feature 1..20: note = chemically synthesized
  source 1..20: mol_type = other DNA
gacggcaccaagcctttcac

SEQ ID NO: 48301 - DNA, 20 bp, synthetic construct
  misc_feature 1..20: note = chemically synthesized
  source 1..20: mol_type = other DNA
cactggctccccacagcctc

SEQ ID NO: 48302 - DNA, 20 bp, synthetic construct
  misc_feature 1..20: note = chemically synthesized
  source 1..20: mol_type = other DNA
tatgcatcttggactccagt

SEQ ID NO: 48303 - DNA, 20 bp, synthetic construct
  misc_feature 1..20: note = chemically synthesized
  source 1..20: mol_type = other DNA
ggactccagtcagagtagaa

SEQ ID NO: 48304 - DNA, 20 bp, synthetic construct
  misc_feature 1..20: note = chemically synthesized
  source 1..20: mol_type = other DNA
ttttgaacctcagaacttgt

SEQ ID NO: 48305 - DNA, 20 bp, synthetic construct
  misc_feature 1..20: note = chemically synthesized
  source 1..20: mol_type = other DNA
gaaaggcagtaatgggcaat

SEQ ID NO: 48306 - DNA, 20 bp, synthetic construct
  misc_feature 1..20: note = chemically synthesized
  source 1..20: mol_type = other DNA
ggcaatcagagtctgcttgg

SEQ ID NO: 48307 - DNA, 20 bp, synthetic construct
  misc_feature 1..20: note = chemically synthesized
  source 1..20: mol_type = other DNA
taatctatgcagcaaaatat

SEQ ID NO: 48308 - DNA, 20 bp, synthetic construct
  misc_feature 1..20: note = chemically synthesized
  source 1..20: mol_type = other DNA
aacattttacatttcagacg

SEQ ID NO: 48309 - DNA, 20 bp, synthetic construct
  misc_feature 1..20: note = chemically synthesized
  source 1..20: mol_type = other DNA
actttgggaggctgaggcgg

SEQ ID NO: 48310 - DNA, 20 bp, synthetic construct
  misc_feature 1..20: note = chemically synthesized
  source 1..20: mol_type = other DNA
gaggcgggaggatcacctcc

SEQ ID NO: 48311 - DNA, 20 bp, synthetic construct
  misc_feature 1..20: note = chemically synthesized
  source 1..20: mol_type = other DNA
tcggatccactgaggaggtc

SEQ ID NO: 48312 - DNA, 20 bp, synthetic construct
  misc_feature 1..20: note = chemically synthesized
  source 1..20: mol_type = other DNA
ttcatggtacctcctaatcc

SEQ ID NO: 48313 - DNA, 20 bp, synthetic construct
  misc_feature 1..20: note = chemically synthesized
  source 1..20: mol_type = other DNA
tgccttccgctaaataaaaa

SEQ ID NO: 48314 - DNA, 20 bp, synthetic construct
  misc_feature 1..20: note = chemically synthesized
  source 1..20: mol_type = other DNA
ttccgctaaataaaaattga

SEQ ID NO: 48315 - DNA, 20 bp, synthetic construct
  misc_feature 1..20: note = chemically synthesized
  source 1..20: mol_type = other DNA
ataaaaattgaatgaattgg

SEQ ID NO: 48316 - DNA, 20 bp, synthetic construct
  misc_feature 1..20: note = chemically synthesized
  source 1..20: mol_type = other DNA
tgggagagtactctgtgcag

SEQ ID NO: 48317 - DNA, 20 bp, synthetic construct
  misc_feature 1..20: note = chemically synthesized
  source 1..20: mol_type = other DNA
aaacccagttctaatgcacc

SEQ ID NO: 48318 - DNA, 20 bp, synthetic construct
  misc_feature 1..20: note = chemically synthesized
  source 1..20: mol_type = other DNA
gtttctcatgactaaaagaa

SEQ ID NO: 48319 - DNA, 20 bp, synthetic construct
  misc_feature 1..20: note = chemically synthesized
  source 1..20: mol_type = other DNA
cgattcccacaaaataacca

SEQ ID NO: 48320 - DNA, 20 bp, synthetic construct
  misc_feature 1..20: note = chemically synthesized
  source 1..20: mol_type = other DNA
tcccacaaaataaccattga

SEQ ID NO: 48321 - DNA, 20 bp, synthetic construct
  misc_feature 1..20: note = chemically synthesized
  source 1..20: mol_type = other DNA
acaaaataaccattgaatga

SEQ ID NO: 48322 - DNA, 20 bp, synthetic construct
  misc_feature 1..20: note = chemically synthesized
  source 1..20: mol_type = other DNA
gcctctgcttactcacctct

SEQ ID NO: 48323 - DNA, 20 bp, synthetic construct
  misc_feature 1..20: note = chemically synthesized
  source 1..20: mol_type = other DNA
tgcttactcacctctcagga

SEQ ID NO: 48324 - DNA, 20 bp, synthetic construct
  misc_feature 1..20: note = chemically synthesized
  source 1..20: mol_type = other DNA
aggaagagggctatactgag

SEQ ID NO: 48325 - DNA, 20 bp, synthetic construct
  misc_feature 1..20: note = chemically synthesized
  source 1..20: mol_type = other DNA
agaagcgtgggcaggcagct

SEQ ID NO: 48326 - DNA, 20 bp, synthetic construct
  misc_feature 1..20: note = chemically synthesized
  source 1..20: mol_type = other DNA
gggcaggcagctgtgagtgg

SEQ ID NO: 48327 - DNA, 20 bp, synthetic construct
  misc_feature 1..20: note = chemically synthesized
  source 1..20: mol_type = other DNA
agattaggcaatggaggctc

SEQ ID NO: 48328 - DNA, 20 bp, synthetic construct
  misc_feature 1..20: note = chemically synthesized
  source 1..20: mol_type = other DNA
gcctgagggccagaagctgg

SEQ ID NO: 48329 - DNA, 20 bp, synthetic construct
  misc_feature 1..20: note = chemically synthesized
  source 1..20: mol_type = other DNA
tgaggcgccgggctcagctc

SEQ ID NO: 48330 - DNA, 20 bp, synthetic construct
  misc_feature 1..20: note = chemically synthesized
  source 1..20: mol_type = other DNA
caccaagggcccttccctgc

SEQ ID NO: 48331 - DNA, 20 bp, synthetic construct
  misc_feature 1..20: note = chemically synthesized
  source 1..20: mol_type = other DNA
aaaggacgccaatgggcctc

SEQ ID NO: 48332 - DNA, 20 bp, synthetic construct
  misc_feature 1..20: note = chemically synthesized
  source 1..20: mol_type = other DNA
ttttcttcggctgaaacaga

SEQ ID NO: 48333 - DNA, 20 bp, synthetic construct
  misc_feature 1..20: note = chemically synthesized
  source 1..20: mol_type = other DNA
aacagatggaatactagagc

SEQ ID NO: 48334 - DNA, 20 bp, synthetic construct
  misc_feature 1..20: note = chemically synthesized
  source 1..20: mol_type = other DNA
cttcccaccccgcccctgtc

SEQ ID NO: 48335 - DNA, 20 bp, synthetic construct
  misc_feature 1..20: note = chemically synthesized
  source 1..20: mol_type = other DNA
cagaaactgggaaatctggg

SEQ ID NO: 48336 - DNA, 20 bp, synthetic construct
  misc_feature 1..20: note = chemically synthesized
  source 1..20: mol_type = other DNA
tgctcgcccttcctcggcct

SEQ ID NO: 48337 - DNA, 20 bp, synthetic construct
  misc_feature 1..20: note = chemically synthesized
  source 1..20: mol_type = other DNA
caaccccgcgaaccttccca

SEQ ID NO: 48338 - DNA, 20 bp, synthetic construct
  misc_feature 1..20: note = chemically synthesized
  source 1..20: mol_type = other DNA
agcaccgcaccgtcccggct

SEQ ID NO: 48339 - DNA, 20 bp, synthetic construct
  misc_feature 1..20: note = chemically synthesized
  source 1..20: mol_type = other DNA
aggtggctgtggttccgtgc

SEQ ID NO: 48340 - DNA, 20 bp, synthetic construct
  misc_feature 1..20: note = chemically synthesized
  source 1..20: mol_type = other DNA
agggcgcgtgaaggggcgcg

SEQ ID NO: 48341 - DNA, 20 bp, synthetic construct
  misc_feature 1..20: note = chemically synthesized
  source 1..20: mol_type = other DNA
acgtcgctgcggaaaccttc

SEQ ID NO: 48342 - DNA, 20 bp, synthetic construct
  misc_feature 1..20: note = chemically synthesized
  source 1..20: mol_type = other DNA
ctgcggaaaccttctagggt

SEQ ID NO: 48343 - DNA, 20 bp, synthetic construct
  misc_feature 1..20: note = chemically synthesized
  source 1..20: mol_type = other DNA
ttaacggaacccccggactg

SEQ ID NO: 48344 - DNA, 20 bp, synthetic construct
  misc_feature 1..20: note = chemically synthesized
  source 1..20: mol_type = other DNA
ctcccgcctctcaccctgcg

SEQ ID NO: 48345 - DNA, 20 bp, synthetic construct
  misc_feature 1..20: note = chemically synthesized
  source 1..20: mol_type = other DNA
gcccaccttttcagtgtttc

SEQ ID NO: 48346 - DNA, 20 bp, synthetic construct
  misc_feature 1..20: note = chemically synthesized
  source 1..20: mol_type = other DNA
cctgctgaccagtgagactt

SEQ ID NO: 48347 - DNA, 20 bp, synthetic construct
  misc_feature 1..20: note = chemically synthesized
  source 1..20: mol_type = other DNA
tgtggactcctcgctgccca

SEQ ID NO: 48348 - DNA, 20 bp, synthetic construct
  misc_feature 1..20: note = chemically synthesized
  source 1..20: mol_type = other DNA
tccagcctacatgcatttca

SEQ ID NO: 48349 - DNA, 20 bp, synthetic construct
  misc_feature 1..20: note = chemically synthesized
  source 1..20: mol_type = other DNA
agacgtcatataggtacatt

SEQ ID NO: 48350 - DNA, 20 bp, synthetic construct
  misc_feature 1..20: note = chemically synthesized
  source 1..20: mol_type = other DNA
acctattgtgtaccaggcag

SEQ ID NO: 48351 - DNA, 20 bp, synthetic construct
  misc_feature 1..20: note = chemically synthesized
  source 1..20: mol_type = other DNA
gatactgggaagaaacaaag

SEQ ID NO: 48352 - DNA, 20 bp, synthetic construct
  misc_feature 1..20: note = chemically synthesized
  source 1..20: mol_type = other DNA
ttgcagatgcacagcagatt

SEQ ID NO: 48353 - DNA, 20 bp, synthetic construct
  misc_feature 1..20: note = chemically synthesized
  source 1..20: mol_type = other DNA
tccgagtgaaatggcctgct

SEQ ID NO: 48354 - DNA, 20 bp, synthetic construct
  misc_feature 1..20: note = chemically synthesized
  source 1..20: mol_type = other DNA
cctgctctgaatctaggtgc

SEQ ID NO: 48355 - DNA, 20 bp, synthetic construct
  misc_feature 1..20: note = chemically synthesized
  source 1..20: mol_type = other DNA
gcacaaagacagtgcaacca

SEQ ID NO: 48356 - DNA, 20 bp, synthetic construct
  misc_feature 1..20: note = chemically synthesized
  source 1..20: mol_type = other DNA
gtgactccatgaggtaaggt

SEQ ID NO: 48357 - DNA, 20 bp, synthetic construct
  misc_feature 1..20: note = chemically synthesized
  source 1..20: mol_type = other DNA
tcgagcccgccatcgcagca

SEQ ID NO: 48358 - DNA, 20 bp, synthetic construct
  misc_feature 1..20: note = chemically synthesized
  source 1..20: mol_type = other DNA
tccttcctgttgcctgtaat

SEQ ID NO: 48359 - DNA, 20 bp, synthetic construct
  misc_feature 1..20: note = chemically synthesized
  source 1..20: mol_type = other DNA
tcaaaggcctcccctggagc

SEQ ID NO: 48360 - DNA, 20 bp, synthetic construct
  misc_feature 1..20: note = chemically synthesized
  source 1..20: mol_type = other DNA
gaccttggcctctcacctac

SEQ ID NO: 48361 - DNA, 20 bp, synthetic construct
  misc_feature 1..20: note = chemically synthesized
  source 1..20: mol_type = other DNA
tcccagtatcgacagccctt

SEQ ID NO: 48362 - DNA, 20 bp, synthetic construct
  misc_feature 1..20: note = chemically synthesized
  source 1..20: mol_type = other DNA
aagctgagcttgtgcctacc

SEQ ID NO: 48363 - DNA, 20 bp, synthetic construct
  misc_feature 1..20: note = chemically synthesized
  source 1..20: mol_type = other DNA
tgccaggttaaggccagtgg

SEQ ID NO: 48364 - DNA, 20 bp, synthetic construct
  misc_feature 1..20: note = chemically synthesized
  source 1..20: mol_type = other DNA
ctgggaactgcaccaggcac

SEQ ID NO: 48365 - DNA, 20 bp, synthetic construct
  misc_feature 1..20: note = chemically synthesized
  source 1..20: mol_type = other DNA
gtattccatctgtttcagcc

SEQ ID NO: 48366 - DNA, 20 bp, synthetic construct
  misc_feature 1..20: note = chemically synthesized
  source 1..20: mol_type = other DNA
ttgtggggttgtggccagga

SEQ ID NO: 48367 - DNA, 20 bp, synthetic construct
  misc_feature 1..20: note = chemically synthesized
  source 1..20: mol_type = other DNA
ttattttgtgggaatcgaat

SEQ ID NO: 48368 - DNA, 20 bp, synthetic construct
  misc_feature 1..20: note = chemically synthesized
  source 1..20: mol_type = other DNA
atgaaaatattttttggcaa

SEQ ID NO: 48369 - DNA, 20 bp, synthetic construct
  misc_feature 1..20: note = chemically synthesized
  source 1..20: mol_type = other DNA
caatccttttcttttagtca

SEQ ID NO: 48370 - DNA, 20 bp, synthetic construct
  misc_feature 1..20: note = chemically synthesized
  source 1..20: mol_type = other DNA
gttcagcgatgatggtgtca

SEQ ID NO: 48371 - DNA, 20 bp, synthetic construct
  misc_feature 1..20: note = chemically synthesized
  source 1..20: mol_type = other DNA
ccatgcttcctggagagctt

SEQ ID NO: 48372 - DNA, 20 bp, synthetic construct
  misc_feature 1..20: note = chemically synthesized
  source 1..20: mol_type = other DNA
agtaactactggctttctgt

SEQ ID NO: 48373 - DNA, 20 bp, synthetic construct
  misc_feature 1..20: note = chemically synthesized
  source 1..20: mol_type = other DNA
gtcacatcttcggtggaggg

SEQ ID NO: 48374 - DNA, 20 bp, synthetic construct
  misc_feature 1..20: note = chemically synthesized
  source 1..20: mol_type = other DNA
aagcactagggccagggtga

SEQ ID NO: 48375 - DNA, 20 bp, synthetic construct
  misc_feature 1..20: note = chemically synthesized
  source 1..20: mol_type = other DNA
aggcagcagatgcattggca

SEQ ID NO: 48376 - DNA, 20 bp, synthetic construct
  misc_feature 1..20: note = chemically synthesized
  source 1..20: mol_type = other DNA
aggcttaaagggaattctat

SEQ ID NO: 48377 - DNA, 20 bp, synthetic construct
  misc_feature 1..20: note = chemically synthesized
  source 1..20: mol_type = other DNA
aggaggaacatgatgacatg

SEQ ID NO: 48378 - DNA, 20 bp, synthetic construct
  misc_feature 1..20: note = chemically synthesized
  source 1..20: mol_type = other DNA
ccccctcccccatgccccag

SEQ ID NO: 48379 - DNA, 20 bp, synthetic construct
  misc_feature 1..20: note = chemically synthesized
  source 1..20: mol_type = other DNA
aggcaacacttcttaaagag

SEQ ID NO: 48380 - DNA, 20 bp, synthetic construct
  misc_feature 1..20: note = chemically synthesized
  source 1..20: mol_type = other DNA
cctcagaacttgtttggatt

SEQ ID NO: 48381 - DNA, 20 bp, synthetic construct
  misc_feature 1..20: note = chemically synthesized
  source 1..20: mol_type = other DNA
gggcaatcagagtctgcttg

SEQ ID NO: 48382 - DNA, 20 bp, synthetic construct
  misc_feature 1..20: note = chemically synthesized
  source 1..20: mol_type = other DNA
gaaactccatctcaaaaaaa

SEQ ID NO: 48383 - DNA, 20 bp, synthetic construct
  misc_feature 1..20: note = chemically synthesized
  source 1..20: mol_type = other DNA
gttcatggtacctcctaatc

SEQ ID NO: 48384 - DNA, 20 bp, synthetic construct
  misc_feature 1..20: note = chemically synthesized
  source 1..20: mol_type = other DNA
gcctcagtttctcatgacta

SEQ ID NO: 48385 - DNA, 20 bp, synthetic construct
  misc_feature 1..20: note = chemically synthesized
  source 1..20: mol_type = other DNA
tgttccaaacttccaccaga

SEQ ID NO: 48386 - DNA, 20 bp, synthetic construct
  misc_feature 1..20: note = chemically synthesized
  source 1..20: mol_type = other DNA
cacaaccccacaacatccct

SEQ ID NO: 48387 - DNA, 20 bp, synthetic construct
  misc_feature 1..20: note = chemically synthesized
  source 1..20: mol_type = other DNA
tgggcaggcagctgtgagtg

SEQ ID NO: 48388 - DNA, 20 bp, synthetic construct
  misc_feature 1..20: note = chemically synthesized
  source 1..20: mol_type = other DNA
aagtcctgggctggtaatac

SEQ ID NO: 48389 - DNA, 20 bp, synthetic construct
  misc_feature 1..20: note = chemically synthesized
  source 1..20: mol_type = other DNA
taaaggacgccaatgggcct

SEQ ID NO: 48390 - DNA, 20 bp, synthetic construct
  misc_feature 1..20: note = chemically synthesized
  source 1..20: mol_type = other DNA
gagcatgagttctgtgtcat

SEQ ID NO: 48391 - DNA, 20 bp, synthetic construct
  misc_feature 1..20: note = chemically synthesized
  source 1..20: mol_type = other DNA
cccacctgtgccgcggcgag

SEQ ID NO: 48392 - DNA, 20 bp, synthetic construct
  misc_feature 1..20: note = chemically synthesized
  source 1..20: mol_type = other DNA
cgtcagattacgcgcagagg

SEQ ID NO: 48393 - DNA, 20 bp, synthetic construct
  misc_feature 1..20: note = chemically synthesized
  source 1..20: mol_type = other DNA
aagacgtcatataggtacat

SEQ ID NO: 48394 - DNA, 20 bp, synthetic construct
  misc_feature 1..20: note = chemically synthesized
  source 1..20: mol_type = other DNA
ttccttttacacaccatgtt

SEQ ID NO: 48395 - DNA, 20 bp, synthetic construct
  misc_feature 1..20: note = chemically synthesized
  source 1..20: mol_type = other DNA
ggaagggctgtcgatactgg

SEQ ID NO: 48396 - DNA, 20 bp, synthetic construct
  misc_feature 1..20: note = chemically synthesized
  source 1..20: mol_type = other DNA
atcaaaggcctcccctggag

SEQ ID NO: 48397 - DNA, 20 bp, synthetic construct
  misc_feature 1..20: note = chemically synthesized
  source 1..20: mol_type = other DNA
atatgacgtctttgcaaact

SEQ ID NO: 48398 - DNA, 20 bp, synthetic construct
  misc_feature 1..20: note = chemically synthesized
  source 1..20: mol_type = other DNA
gtgggttccgatttggtttg

SEQ ID NO: 48399 - DNA, 20 bp, synthetic construct
  misc_feature 1..20: note = chemically synthesized
  source 1..20: mol_type = other DNA
atttcaagttaccactgctc

SEQ ID NO: 48400 - DNA, 20 bp, synthetic construct
  misc_feature 1..20: note = chemically synthesized
  source 1..20: mol_type = other DNA
gaacaaagatacagagctgg

SEQ ID NO: 48401 - DNA, 20 bp, synthetic construct
  misc_feature 1..20: note = chemically synthesized
  source 1..20: mol_type = other DNA
tctgaaatgtaaaatgttac

SEQ ID NO: 48402 - DNA, 20 bp, synthetic construct
  misc_feature 1..20: note = chemically synthesized
  source 1..20: mol_type = other DNA
tccaaacaagttctgaggtt

SEQ ID NO: 48403 - DNA, 20 bp, synthetic construct
  misc_feature 1..20: note = chemically synthesized
  source 1..20: mol_type = other DNA
agttggagcagacaagagct

SEQ ID NO: 48404 - DNA, 20 bp, synthetic construct
  misc_feature 1..20: note = chemically synthesized
  source 1..20: mol_type = other DNA
agctgggtgcaggtacagag

SEQ ID NO: 48405 - DNA, 20 bp, synthetic construct
  misc_feature 1..20: note = chemically synthesized
  source 1..20: mol_type = other DNA
cctagtgcttcaaatcttaa

SEQ ID NO: 48406 - DNA, 20 bp, synthetic construct
  misc_feature 1..20: note = chemically synthesized
  source 1..20: mol_type = other DNA
ggtggtgcagaagcacaaat

SEQ ID NO: 48407 - DNA, 20 bp, synthetic construct
  misc_feature 1..20: note = chemically synthesized
  source 1..20: mol_type = other DNA
tttacccaaagccttagggc

SEQ ID NO: 48408 - DNA, 20 bp, synthetic construct
  misc_feature 1..20: note = chemically synthesized
  source 1..20: mol_type = other DNA
accatcaaataaatcacaaa

SEQ ID NO: 48409 - DNA, 20 bp, synthetic construct
  misc_feature 1..20: note = chemically synthesized
  source 1..20: mol_type = other DNA
ggtcacactgcagacaggga

SEQ ID NO: 48410 - DNA, 20 bp, synthetic construct
  misc_feature 1..20: note = chemically synthesized
  source 1..20: mol_type = other DNA
gattacgcgcagagggaaga

SEQ ID NO: 48411 - DNA, 20 bp, synthetic construct
  misc_feature 1..20: note = chemically synthesized
  source 1..20: mol_type = other DNA
atcaactttggactccagca

SEQ ID NO: 48412 - DNA, 20 bp, synthetic construct
  misc_feature 1..20: note = chemically synthesized
  source 1..20: mol_type = other DNA
agggaggatcataaattcgc

SEQ ID NO: 48413 - DNA, 20 bp, synthetic construct
  misc_feature 1..20: note = chemically synthesized
  source 1..20: mol_type = other DNA
cctcctgcctggtacacaat

SEQ ID NO: 48414 - DNA, 20 bp, synthetic construct
  misc_feature 1..20: note = chemically synthesized
  source 1..20: mol_type = other DNA
gtacacaataggtgtttact

SEQ ID NO: 48415 - DNA, 20 bp, synthetic construct
  misc_feature 1..20: note = chemically synthesized
  source 1..20: mol_type = other DNA
tgtttactggatgcttgtcc

SEQ ID NO: 48416 - DNA, 20 bp, synthetic construct
  misc_feature 1..20: note = chemically synthesized
  source 1..20: mol_type = other DNA
aaattgaatcttctggaaag

SEQ ID NO: 48417 - DNA, 20 bp, synthetic construct
  misc_feature 1..20: note = chemically synthesized
  source 1..20: mol_type = other DNA
gaggccggagggggtccagg

SEQ ID NO: 48418 - DNA, 20 bp, synthetic construct
  misc_feature 1..20: note = chemically synthesized
  source 1..20: mol_type = other DNA
tgggcagcgaggagtccaca

SEQ ID NO: 48419 - DNA, 20 bp, synthetic construct
  misc_feature 1..20: note = chemically synthesized
  source 1..20: mol_type = other DNA
cagcgaggagtccacagtag

SEQ ID NO: 48420 - DNA, 20 bp, synthetic construct
  misc_feature 1..20: note = chemically synthesized
  source 1..20: mol_type = other DNA
cggcctgccttccagcccag

SEQ ID NO: 48421 - DNA, 20 bp, synthetic construct
  misc_feature 1..20: note = chemically synthesized
  source 1..20: mol_type = other DNA
ttccagcccagttaggattt

SEQ ID NO: 48422 - DNA, 20 bp, synthetic construct
  misc_feature 1..20: note = chemically synthesized
  source 1..20: mol_type = other DNA
tccctctgcgcgtaatctga

SEQ ID NO: 48423 - DNA, 20 bp, synthetic construct
  misc_feature 1..20: note = chemically synthesized
  source 1..20: mol_type = other DNA
ctccagtccgggggttccgt

SEQ ID NO: 48424 - DNA, 20 bp, synthetic construct
  misc_feature 1..20: note = chemically synthesized
  source 1..20: mol_type = other DNA
cgtcaagcacccacacccta

SEQ ID NO: 48425 - DNA, 20 bp, synthetic construct
  misc_feature 1..20: note = chemically synthesized
  source 1..20: mol_type = other DNA
cagcggctcccagctcccag

SEQ ID NO: 48426 - DNA, 20 bp, synthetic construct
  misc_feature 1..20: note = chemically synthesized
  source 1..20: mol_type = other DNA
ccgcagccgggacggtgcgg

SEQ ID NO: 48427 - DNA, 20 bp, synthetic construct
  misc_feature 1..20: note = chemically synthesized
  source 1..20: mol_type = other DNA
ggtgctgtttcctctcgggc

SEQ ID NO: 48428 - DNA, 20 bp, synthetic construct
  misc_feature 1..20: note = chemically synthesized
  source 1..20: mol_type = other DNA
agtgcaggtcgccgagggct

SEQ ID NO: 48429 - DNA, 20 bp, synthetic construct
  misc_feature 1..20: note = chemically synthesized
  source 1..20: mol_type = other DNA
agcactgccaggatatcctg

SEQ ID NO: 48430 - DNA, 20 bp, synthetic construct
  misc_feature 1..20: note = chemically synthesized
  source 1..20: mol_type = other DNA
aggatatcctgcccagattt

SEQ ID NO: 48431 - DNA, 20 bp, synthetic construct
  misc_feature 1..20: note = chemically synthesized
  source 1..20: mol_type = other DNA
ctgcaccaggcacagagaaa

SEQ ID NO: 48432 - DNA, 20 bp, synthetic construct
  misc_feature 1..20: note = chemically synthesized
  source 1..20: mol_type = other DNA
gggcttgccattatagtggg

SEQ ID NO: 48433 - DNA, 20 bp, synthetic construct
  misc_feature 1..20: note = chemically synthesized
  source 1..20: mol_type = other DNA
gccattatagtgggttccga

SEQ ID NO: 48434 - DNA, 20 bp, synthetic construct
  misc_feature 1..20: note = chemically synthesized
  source 1..20: mol_type = other DNA
aactcatgctctagtattcc

SEQ ID NO: 48435 - DNA, 20 bp, synthetic construct
  misc_feature 1..20: note = chemically synthesized
  source 1..20: mol_type = other DNA
gtctgccgaccgtgtgcggg

SEQ ID NO: 48436 - DNA, 20 bp, synthetic construct
  misc_feature 1..20: note = chemically synthesized
  source 1..20: mol_type = other DNA
cgagtttgctcaacaactct

SEQ ID NO: 48437 - DNA, 20 bp, synthetic construct
  misc_feature 1..20: note = chemically synthesized
  source 1..20: mol_type = other DNA
cttctggccctcaggctgtg

SEQ ID NO: 48438 - DNA, 20 bp, synthetic construct
  misc_feature 1..20: note = chemically synthesized
  source 1..20: mol_type = other DNA
cttcttcccggggcgagacc

SEQ ID NO: 48439 - DNA, 20 bp, synthetic construct
  misc_feature 1..20: note = chemically synthesized
  source 1..20: mol_type = other DNA
ttggctgaggttctgtgtcc

SEQ ID NO: 48440 - DNA, 20 bp, synthetic construct
  misc_feature 1..20: note = chemically synthesized
  source 1..20: mol_type = other DNA
agtcagatgtggggttgaat

SEQ ID NO: 48441 - DNA, 20 bp, synthetic construct
  misc_feature 1..20: note = chemically synthesized
  source 1..20: mol_type = other DNA
tggcttcctctcactagctg

SEQ ID NO: 48442 - DNA, 20 bp, synthetic construct
  misc_feature 1..20: note = chemically synthesized
  source 1..20: mol_type = other DNA
caagccccggggggatcact

SEQ ID NO: 48443 - DNA, 20 bp, synthetic construct
  misc_feature 1..20: note = chemically synthesized
  source 1..20: mol_type = other DNA
tgccactcacagctgcctgc

SEQ ID NO: 48444 - DNA, 20 bp, synthetic construct
  misc_feature 1..20: note = chemically synthesized
  source 1..20: mol_type = other DNA
cacctgaaccaagcccttga

SEQ ID NO: 48445 - DNA, 20 bp, synthetic construct
  misc_feature 1..20: note = chemically synthesized
  source 1..20: mol_type = other DNA
gaggatgtttcttctctggt

SEQ ID NO: 48446 - DNA, 20 bp, synthetic construct
  misc_feature 1..20: note = chemically synthesized
  source 1..20: mol_type = other DNA
tcaccccaggtgcattagaa

SEQ ID NO: 48447 - DNA, 20 bp, synthetic construct
  misc_feature 1..20: note = chemically synthesized
  source 1..20: mol_type = other DNA
ggtgtcatgagaattttatt

SEQ ID NO: 48448 - DNA, 20 bp, synthetic construct
  misc_feature 1..20: note = chemically synthesized
  source 1..20: mol_type = other DNA
tttttcttttttttttgaga

SEQ ID NO: 48449 - DNA, 20 bp, synthetic construct
  misc_feature 1..20: note = chemically synthesized
  source 1..20: mol_type = other DNA
tgcctcagcctcccaagaag

SEQ ID NO: 48450 - DNA, 20 bp, synthetic construct
  misc_feature 1..20: note = chemically synthesized
  source 1..20: mol_type = other DNA
ttttgtatttttagtagaga

SEQ ID NO: 48451 - DNA, 20 bp, synthetic construct
  misc_feature 1..20: note = chemically synthesized
  source 1..20: mol_type = other DNA
tgtaaaatgttacgaaaacc

SEQ ID NO: 48452 - DNA, 20 bp, synthetic construct
  misc_feature 1..20: note = chemically synthesized
  source 1..20: mol_type = other DNA
acgaaaaccaaaagtttttt

SEQ ID NO: 48453 - DNA, 20 bp, synthetic construct
  misc_feature 1..20: note = chemically synthesized
  source 1..20: mol_type = other DNA
agcacctgacgtgaactgac

SEQ ID NO: 48454 - DNA, 20 bp, synthetic construct
  misc_feature 1..20: note = chemically synthesized
  source 1..20: mol_type = other DNA
catattcatatattttgctg

SEQ ID NO: 48455 - DNA, 20 bp, synthetic construct
  misc_feature 1..20: note = chemically synthesized
  source 1..20: mol_type = other DNA
catagattacagtatgcagc

SEQ ID NO: 48456 - DNA, 20 bp, synthetic construct
  misc_feature 1..20: note = chemically synthesized
  source 1..20: mol_type = other DNA
tccagattcttccaagcaga

SEQ ID NO: 48457 - DNA, 20 bp, synthetic construct
  misc_feature 1..20: note = chemically synthesized
  source 1..20: mol_type = other DNA
aaacaagttctgaggttcaa

SEQ ID NO: 48458 - DNA, 20 bp, synthetic construct
  misc_feature 1..20: note = chemically synthesized
  source 1..20: mol_type = other DNA
gttcaaaaccgttttggccc

SEQ ID NO: 48459 - DNA, 20 bp, synthetic construct
  misc_feature 1..20: note = chemically synthesized
  source 1..20: mol_type = other DNA
gtaggggccaaggaggagca

SEQ ID NO: 48460 - DNA, 20 bp, synthetic construct
  misc_feature 1..20: note = chemically synthesized
  source 1..20: mol_type = other DNA
aggaggagcatggagtttgg

SEQ ID NO: 48461 - DNA, 20 bp, synthetic construct
  misc_feature 1..20: note = chemically synthesized
  source 1..20: mol_type = other DNA
catagatagtggctgctata

SEQ ID NO: 48462 - DNA, 20 bp, synthetic construct
  misc_feature 1..20: note = chemically synthesized
  source 1..20: mol_type = other DNA
tggaagtggggcctaatggg

SEQ ID NO: 48463 - DNA, 20 bp, synthetic construct
  misc_feature 1..20: note = chemically synthesized
  source 1..20: mol_type = other DNA
atgggggaggaacccctgtg

SEQ ID NO: 48464 - DNA, 20 bp, synthetic construct
  misc_feature 1..20: note = chemically synthesized
  source 1..20: mol_type = other DNA
ataatgagtaagttctcccg

SEQ ID NO: 48465 - DNA, 20 bp, synthetic construct
  misc_feature 1..20: note = chemically synthesized
  source 1..20: mol_type = other DNA
ccgctatgatttcccttgaa

SEQ ID NO: 48466 - DNA, 20 bp, synthetic construct
  misc_feature 1..20: note = chemically synthesized
  source 1..20: mol_type = other DNA
cttgaaggctgattattaaa

SEQ ID NO: 48467 - DNA, 20 bp, synthetic construct
  misc_feature 1..20: note = chemically synthesized
  source 1..20: mol_type = other DNA
tggcacctccctctcttctc

SEQ ID NO: 48468 - DNA, 20 bp, synthetic construct
  misc_feature 1..20: note = chemically synthesized
  source 1..20: mol_type = other DNA
ctcttgcttcttctcttgcc

SEQ ID NO: 48469 - DNA, 20 bp, synthetic construct
  misc_feature 1..20: note = chemically synthesized
  source 1..20: mol_type = other DNA
caccttctgccatcagtgaa

SEQ ID NO: 48470 - DNA, 20 bp, synthetic construct
  misc_feature 1..20: note = chemically synthesized
  source 1..20: mol_type = other DNA
accagaagcagatgctggtg

SEQ ID NO: 48471 - DNA, 20 bp, synthetic construct
  misc_feature 1..20: note = chemically synthesized
  source 1..20: mol_type = other DNA
tgctggtgccatgcttcctg

SEQ ID NO: 48472 - DNA, 20 bp, synthetic construct
  misc_feature 1..20: note = chemically synthesized
  source 1..20: mol_type = other DNA
catttgtagagcatctggat

SEQ ID NO: 48473 - DNA, 20 bp, synthetic construct
  misc_feature 1..20: note = chemically synthesized
  source 1..20: mol_type = other DNA
ttggagctggaattcaggtc

SEQ ID NO: 48474 - DNA, 20 bp, synthetic construct
  misc_feature 1..20: note = chemically synthesized
  source 1..20: mol_type = other DNA
cggtttcctggctccaaagc

SEQ ID NO: 48475 - DNA, 20 bp, synthetic construct
  misc_feature 1..20: note = chemically synthesized
  source 1..20: mol_type = other DNA
tggcctatatgagttcttta

SEQ ID NO: 48476 - DNA, 20 bp, synthetic construct
  misc_feature 1..20: note = chemically synthesized
  source 1..20: mol_type = other DNA
ggggtgagataaagtacacc

SEQ ID NO: 48477 - DNA, 20 bp, synthetic construct
  misc_feature 1..20: note = chemically synthesized
  source 1..20: mol_type = other DNA
taaagtacacctagggtttg

SEQ ID NO: 48478 - DNA, 20 bp, synthetic construct
  misc_feature 1..20: note = chemically synthesized
  source 1..20: mol_type = other DNA
atgtcttccatggccttctt

SEQ ID NO: 48479 - DNA, 20 bp, synthetic construct
  misc_feature 1..20: note = chemically synthesized
  source 1..20: mol_type = other DNA
cactgcatatacactgggga

SEQ ID NO: 48480 - DNA, 20 bp, synthetic construct
  misc_feature 1..20: note = chemically synthesized
  source 1..20: mol_type = other DNA
gggtaccaagcacagtaact

SEQ ID NO: 48481 - DNA, 20 bp, synthetic construct
  misc_feature 1..20: note = chemically synthesized
  source 1..20: mol_type = other DNA
tattctcctcaccctggccc

SEQ ID NO: 48482 - DNA, 20 bp, synthetic construct
  misc_feature 1..20: note = chemically synthesized
  source 1..20: mol_type = other DNA
tagtgcttcaaatcttaaaa

SEQ ID NO: 48483 - DNA, 20 bp, synthetic construct
  misc_feature 1..20: note = chemically synthesized
  source 1..20: mol_type = other DNA
tcttaaaaaaacgtttttat

SEQ ID NO: 48484 - DNA, 20 bp, synthetic construct
  misc_feature 1..20: note = chemically synthesized
  source 1..20: mol_type = other DNA
tggtgcagaagcacaaataa

SEQ ID NO: 48485 - DNA, 20 bp, synthetic construct
  misc_feature 1..20: note = chemically synthesized
  source 1..20: mol_type = other DNA
gcacaaataaaaacgttttt

SEQ ID NO: 48486 - DNA, 20 bp, synthetic construct
  misc_feature 1..20: note = chemically synthesized
  source 1..20: mol_type = other DNA
gggacttcactctggatagc

SEQ ID NO: 48487 - DNA, 20 bp, synthetic construct
  misc_feature 1..20: note = chemically synthesized
  source 1..20: mol_type = other DNA
aggaattttggaccctagag

SEQ ID NO: 48488 - DNA, 20 bp, synthetic construct
  misc_feature 1..20: note = chemically synthesized
  source 1..20: mol_type = other DNA
catcccagggccttgtccct

SEQ ID NO: 48489 - DNA, 20 bp, synthetic construct
  misc_feature 1..20: note = chemically synthesized
  source 1..20: mol_type = other DNA
aatggctggcaggcagacca

SEQ ID NO: 48490 - DNA, 20 bp, synthetic construct
  misc_feature 1..20: note = chemically synthesized
  source 1..20: mol_type = other DNA
gacgtaccactggggcatgg

SEQ ID NO: 48491 - DNA, 20 bp, synthetic construct
  misc_feature 1..20: note = chemically synthesized
  source 1..20: mol_type = other DNA
atacagaaagccagtagtta

SEQ ID NO: 48492 - DNA, 20 bp, synthetic construct
  misc_feature 1..20: note = chemically synthesized
  source 1..20: mol_type = other DNA
aatacatacttgctgtcccc

SEQ ID NO: 48493 - DNA, 20 bp, synthetic construct
  misc_feature 1..20: note = chemically synthesized
  source 1..20: mol_type = other DNA
actacgggccacactcgaca

SEQ ID NO: 48494 - DNA, 20 bp, synthetic construct
  misc_feature 1..20: note = chemically synthesized
  source 1..20: mol_type = other DNA
ataaattgagggaaaaaatc

SEQ ID NO: 48495 - DNA, 20 bp, synthetic construct
  misc_feature 1..20: note = chemically synthesized
  source 1..20: mol_type = other DNA
ggtgagtaatttacaaggaa

SEQ ID NO: 48496 - DNA, 20 bp, synthetic construct
  misc_feature 1..20: note = chemically synthesized
  source 1..20: mol_type = other DNA
ggaaaagggatttattcagc

SEQ ID NO: 48497 - DNA, 20 bp, synthetic construct
  misc_feature 1..20: note = chemically synthesized
  source 1..20: mol_type = other DNA
ccaggaagcatggcaccagc

SEQ ID NO: 48498 - DNA, 20 bp, synthetic construct
  misc_feature 1..20: note = chemically synthesized
  source 1..20: mol_type = other DNA
tgcttctggtgagggcctta

SEQ ID NO: 48499 - DNA, 20 bp, synthetic construct
  misc_feature 1..20: note = chemically synthesized
  source 1..20: mol_type = other DNA
actgaggaccaaatttccac

SEQ ID NO: 48500 - DNA, 20 bp, synthetic construct
  misc_feature 1..20: note = chemically synthesized
  source 1..20: mol_type = other DNA
attatagcagccactatcta

SEQ ID NO: 48501 - DNA, 20 bp, synthetic construct
  misc_feature 1..20: note = chemically synthesized
  source 1..20: mol_type = other DNA
agcagccactatctatggtg

SEQ ID NO: 48502 - DNA, 20 bp, synthetic construct
  misc_feature 1..20: note = chemically synthesized
  source 1..20: mol_type = other DNA
ccactatctatggtgatttg

SEQ ID NO: 48503 - DNA, 20 bp, synthetic construct
  misc_feature 1..20: note = chemically synthesized
  source 1..20: mol_type = other DNA
aactgctctcaggcagacat

SEQ ID NO: 48504 - DNA, 20 bp, synthetic construct
  misc_feature 1..20: note = chemically synthesized
  source 1..20: mol_type = other DNA
acccaaagccttagggccaa

SEQ ID NO: 48505 - DNA, 20 bp, synthetic construct
  misc_feature 1..20: note = chemically synthesized
  source 1..20: mol_type = other DNA
aaacggttttgaacctcaga

SEQ ID NO: 48506 - DNA, 20 bp, synthetic construct
  misc_feature 1..20: note = chemically synthesized
  source 1..20: mol_type = other DNA
gttttgaacctcagaacttg

SEQ ID NO: 48507 - DNA, 20 bp, synthetic construct
  misc_feature 1..20: note = chemically synthesized
  source 1..20: mol_type = other DNA
ggcagtaatgggcaatcaga

SEQ ID NO: 48508 - DNA, 20 bp, synthetic construct
  misc_feature 1..20: note = chemically synthesized
  source 1..20: mol_type = other DNA
aataaatcacaaaaaaaact

SEQ ID NO: 48509 - DNA, 20 bp, synthetic construct
  misc_feature 1..20: note = chemically synthesized
  source 1..20: mol_type = other DNA
tcggatccactgaggaggtc

SEQ ID NO: 48510 - DNA, 20 bp, synthetic construct
  misc_feature 1..20: note = chemically synthesized
  source 1..20: mol_type = other DNA
tggtggcaggtacctgtaat

SEQ ID NO: 48511 - DNA, 20 bp, synthetic construct
  misc_feature 1..20: note = chemically synthesized
  source 1..20: mol_type = other DNA
tgtgctccttatcttccacc

SEQ ID NO: 48512 - DNA, 20 bp, synthetic construct
  misc_feature 1..20: note = chemically synthesized
  source 1..20: mol_type = other DNA
catcatcgctgaactcctac

SEQ ID NO: 48513 - DNA, 20 bp, synthetic construct
  misc_feature 1..20: note = chemically synthesized
  source 1..20: mol_type = other DNA
gtgacctcctctctctgggc

SEQ ID NO: 48514 - DNA, 20 bp, synthetic construct
  misc_feature 1..20: note = chemically synthesized
  source 1..20: mol_type = other DNA
agtttctcatgactaaaaga

SEQ ID NO: 48515 - DNA, 20 bp, synthetic construct
  misc_feature 1..20: note = chemically synthesized
  source 1..20: mol_type = other DNA
ggattggtctaaaaattatt

SEQ ID NO: 48516 - DNA, 20 bp, synthetic construct
  misc_feature 1..20: note = chemically synthesized
  source 1..20: mol_type = other DNA
aaaaaatattttcattctaa

SEQ ID NO: 48517 - DNA, 20 bp, synthetic construct
  misc_feature 1..20: note = chemically synthesized
  source 1..20: mol_type = other DNA
accagagaagaaacatcctc

SEQ ID NO: 48518 - DNA, 20 bp, synthetic construct
  misc_feature 1..20: note = chemically synthesized
  source 1..20: mol_type = other DNA
ggttcaggtggtcatacagc

SEQ ID NO: 48519 - DNA, 20 bp, synthetic construct
  misc_feature 1..20: note = chemically synthesized
  source 1..20: mol_type = other DNA
gtactcactatttccagaac

SEQ ID NO: 48520 - DNA, 20 bp, synthetic construct
  misc_feature 1..20: note = chemically synthesized
  source 1..20: mol_type = other DNA
ttcccctctgccccaggagc

SEQ ID NO: 48521 - DNA, 20 bp, synthetic construct
  misc_feature 1..20: note = chemically synthesized
  source 1..20: mol_type = other DNA
aaaactgcaagtgatccccc

SEQ ID NO: 48522 - DNA, 20 bp, synthetic construct
  misc_feature 1..20: note = chemically synthesized
  source 1..20: mol_type = other DNA
ctgctgccactgagccgtag

SEQ ID NO: 48523 - DNA, 20 bp, synthetic construct
  misc_feature 1..20: note = chemically synthesized
  source 1..20: mol_type = other DNA
gacgattgtcacctcccttt

SEQ ID NO: 48524 - DNA, 20 bp, synthetic construct
  misc_feature 1..20: note = chemically synthesized
  source 1..20: mol_type = other DNA
ccacagctagtgagaggaag

SEQ ID NO: 48525 - DNA, 20 bp, synthetic construct
  misc_feature 1..20: note = chemically synthesized
  source 1..20: mol_type = other DNA
ctagtggtctcgccccggga

SEQ ID NO: 48526 - DNA, 20 bp, synthetic construct
  misc_feature 1..20: note = chemically synthesized
  source 1..20: mol_type = other DNA
ggccctccaccctccgctgc

SEQ ID NO: 48527 - DNA, 20 bp, synthetic construct
  misc_feature 1..20: note = chemically synthesized
  source 1..20: mol_type = other DNA
ggaacccactataatggcaa

SEQ ID NO: 48528 - DNA, 20 bp, synthetic construct
  misc_feature 1..20: note = chemically synthesized
  source 1..20: mol_type = other DNA
gtggctgtggttccgtgctc

SEQ ID NO: 48529 - DNA, 20 bp, synthetic construct
  misc_feature 1..20: note = chemically synthesized
  source 1..20: mol_type = other DNA
gcggaaaccttctagggtgt

SEQ ID NO: 48530 - DNA, 20 bp, synthetic construct
  misc_feature 1..20: note = chemically synthesized
  source 1..20: mol_type = other DNA
gagccccatcggacgatcct

SEQ ID NO: 48531 - DNA, 20 bp, synthetic construct
  misc_feature 1..20: note = chemically synthesized
  source 1..20: mol_type = other DNA
ggaacccccggactggagga

SEQ ID NO: 48532 - DNA, 20 bp, synthetic construct
  misc_feature 1..20: note = chemically synthesized
  source 1..20: mol_type = other DNA
cctcgccctccccaaacagc

SEQ ID NO: 48533 - DNA, 20 bp, synthetic construct
  misc_feature 1..20: note = chemically synthesized
  source 1..20: mol_type = other DNA
ttctgccgggcccacctttt

SEQ ID NO: 48534 - DNA, 20 bp, synthetic construct
  misc_feature 1..20: note = chemically synthesized
  source 1..20: mol_type = other DNA
taccaactagctgctccttg

SEQ ID NO: 48535 - DNA, 20 bp, synthetic construct
  misc_feature 1..20: note = chemically synthesized
  source 1..20: mol_type = other DNA
aactagctgctccttgaaga

SEQ ID NO: 48536 - DNA, 20 bp, synthetic construct
  misc_feature 1..20: note = chemically synthesized
  source 1..20: mol_type = other DNA
agctgctccttgaagagatt

SEQ ID NO: 48537 - DNA, 20 bp, synthetic construct
  misc_feature 1..20: note = chemically synthesized
  source 1..20: mol_type = other DNA
gtccagcctacatgcatttc

SEQ ID NO: 48538 - DNA, 20 bp, synthetic construct
  misc_feature 1..20: note = chemically synthesized
  source 1..20: mol_type = other DNA
atttcaagggatttatacta

SEQ ID NO: 48539 - DNA, 20 bp, synthetic construct
  misc_feature 1..20: note = chemically synthesized
  source 1..20: mol_type = other DNA
gggatttatactacaaagat

SEQ ID NO: 48540 - DNA, 20 bp, synthetic construct
  misc_feature 1..20: note = chemically synthesized
  source 1..20: mol_type = other DNA
atactacaaagattcaggtt

SEQ ID NO: 48541 - DNA, 20 bp, synthetic construct
  misc_feature 1..20: note = chemically synthesized
  source 1..20: mol_type = other DNA
aattctatggtaggcacaag

SEQ ID NO: 48542 - DNA, 20 bp, synthetic construct
  misc_feature 1..20: note = chemically synthesized
  source 1..20: mol_type = other DNA
aggcacaagctcagctttcc

SEQ ID NO: 48543 - DNA, 20 bp, synthetic construct
  misc_feature 1..20: note = chemically synthesized
  source 1..20: mol_type = other DNA
tttccagaagattcaatttg

SEQ ID NO: 48544 - DNA, 20 bp, synthetic construct
  misc_feature 1..20: note = chemically synthesized
  source 1..20: mol_type = other DNA
ggggaaagagagctcctggc

SEQ ID NO: 48545 - DNA, 20 bp, synthetic construct
  misc_feature 1..20: note = chemically synthesized
  source 1..20: mol_type = other DNA
attgtacatgtggcatgaca

SEQ ID NO: 48546 - DNA, 20 bp, synthetic construct
  misc_feature 1..20: note = chemically synthesized
  source 1..20: mol_type = other DNA
atcctcccttgcagatgcac

SEQ ID NO: 48547 - DNA, 20 bp, synthetic construct
  misc_feature 1..20: note = chemically synthesized
  source 1..20: mol_type = other DNA
caaagttgatgctctttcca

SEQ ID NO: 48548 - DNA, 20 bp, synthetic construct
  misc_feature 1..20: note = chemically synthesized
  source 1..20: mol_type = other DNA
cgcagcacagagtaggagct

SEQ ID NO: 48549 - DNA, 20 bp, synthetic construct
  misc_feature 1..20: note = chemically synthesized
  source 1..20: mol_type = other DNA
taattggaattgtatttgca

SEQ ID NO: 48550 - DNA, 20 bp, synthetic construct
  misc_feature 1..20: note = chemically synthesized
  source 1..20: mol_type = other DNA
tgtatttgcaatgtgctttt

SEQ ID NO: 48551 - DNA, 22 bp, synthetic construct
  misc_feature 1..22: note = chemically synthesized
  source 1..22: mol_type = other DNA
gctcccatctattcttgctcca

SEQ ID NO: 48552 - DNA, 22 bp, synthetic construct
  misc_feature 1..22: note = chemically synthesized
  source 1..22: mol_type = other DNA
ccatctattcttgctccagggg

SEQ ID NO: 48553 - DNA, 22 bp, synthetic construct
  misc_feature 1..22: note = chemically synthesized
  source 1..22: mol_type = other DNA
ttcttgctccaggggaggcctt

SEQ ID NO: 48554 - DNA, 22 bp, synthetic construct
  misc_feature 1..22: note = chemically synthesized
  source 1..22: mol_type = other DNA
ttgctccaggggaggcctttga

SEQ ID NO: 48555 - DNA, 22 bp, synthetic construct
  misc_feature 1..22: note = chemically synthesized
  source 1..22: mol_type = other DNA
gctccaggggaggcctttgatg

SEQ ID NO: 48556 - DNA, 22 bp, synthetic construct
  misc_feature 1..22: note = chemically synthesized
  source 1..22: mol_type = other DNA
ctccaggggaggcctttgatga

SEQ ID NO: 48557 - DNA, 22 bp, synthetic construct
  misc_feature 1..22: note = chemically synthesized
  source 1..22: mol_type = other DNA
caggggaggcctttgatgagga

SEQ ID NO: 48558 - DNA, 22 bp, synthetic construct
  misc_feature 1..22: note = chemically synthesized
  source 1..22: mol_type = other DNA
tgatgaggaagctgccaaaagc

SEQ ID NO: 48559 - DNA, 22 bp, synthetic construct
  misc_feature 1..22: note = chemically synthesized
  source 1..22: mol_type = other DNA
gatgaggaagctgccaaaagca

SEQ ID NO: 48560 - DNA, 22 bp, synthetic construct
  misc_feature 1..22: note = chemically synthesized
  source 1..22: mol_type = other DNA
atgaggaagctgccaaaagcac

SEQ ID NO: 48561 - DNA, 22 bp, synthetic construct
  misc_feature 1..22: note = chemically synthesized
  source 1..22: mol_type = other DNA
ccaaaagcacattgcaaataca

SEQ ID NO: 48562 - DNA, 22 bp, synthetic construct
  misc_feature 1..22: note = chemically synthesized
  source 1..22: mol_type = other DNA
caaatacaattccaattacagg

SEQ ID NO: 48563 - DNA, 22 bp, synthetic construct
  misc_feature 1..22: note = chemically synthesized
  source 1..22: mol_type = other DNA
caattacaggcaacaggaagga

SEQ ID NO: 48564 - DNA, 22 bp, synthetic construct
  misc_feature 1..22: note = chemically synthesized
  source 1..22: mol_type = other DNA
caggcaacaggaaggagaacca

SEQ ID NO: 48565 - DNA, 22 bp, synthetic construct
  misc_feature 1..22: note = chemically synthesized
  source 1..22: mol_type = other DNA
tgccacctctgtcagcaaacca

SEQ ID NO: 48566 - DNA, 22 bp, synthetic construct
  misc_feature 1..22: note = chemically synthesized
  source 1..22: mol_type = other DNA
ccacctctgtcagcaaaccatg

SEQ ID NO: 48567 - DNA, 22 bp, synthetic construct
  misc_feature 1..22: note = chemically synthesized
  source 1..22: mol_type = other DNA
tgtcagcaaaccatgagctcct

SEQ ID NO: 48568 - DNA, 22 bp, synthetic construct
  misc_feature 1..22: note = chemically synthesized
  source 1..22: mol_type = other DNA
tcagcaaaccatgagctcctac

SEQ ID NO: 48569 - DNA, 22 bp, synthetic construct
  misc_feature 1..22: note = chemically synthesized
  source 1..22: mol_type = other DNA
ctactctgtgctgcgatggcgg

SEQ ID NO: 48570 - DNA, 22 bp, synthetic construct
  misc_feature 1..22: note = chemically synthesized
  source 1..22: mol_type = other DNA
ctctgtgctgcgatggcgggct

SEQ ID NO: 48571 - DNA, 22 bp, synthetic construct
  misc_feature 1..22: note = chemically synthesized
  source 1..22: mol_type = other DNA
tgtgctgcgatggcgggctcga

SEQ ID NO: 48572 - DNA, 22 bp, synthetic construct
  misc_feature 1..22: note = chemically synthesized
  source 1..22: mol_type = other DNA
tgctgcgatggcgggctcgatg

SEQ ID NO: 48573 - DNA, 22 bp, synthetic construct
  misc_feature 1..22: note = chemically synthesized
  source 1..22: mol_type = other DNA
cgatggcgggctcgatggggat

SEQ ID NO: 48574 - DNA, 22 bp, synthetic construct
  misc_feature 1..22: note = chemically synthesized
  source 1..22: mol_type = other DNA
gatggggataactctgacctta

SEQ ID NO: 48575 - DNA, 22 bp, synthetic construct
  misc_feature 1..22: note = chemically synthesized
  source 1..22: mol_type = other DNA
tgaccttacctcatggagtcac

SEQ ID NO: 48576 - DNA, 22 bp, synthetic construct
  misc_feature 1..22: note = chemically synthesized
  source 1..22: mol_type = other DNA
accttacctcatggagtcactg

SEQ ID NO: 48577 - DNA, 22 bp, synthetic construct
  misc_feature 1..22: note = chemically synthesized
  source 1..22: mol_type = other DNA
acctcatggagtcactgtcaac

SEQ ID NO: 48578 - DNA, 22 bp, synthetic construct
  misc_feature 1..22: note = chemically synthesized
  source 1..22: mol_type = other DNA
cctcatggagtcactgtcaacc

SEQ ID NO: 48579 - DNA, 22 bp, synthetic construct
  misc_feature 1..22: note = chemically synthesized
  source 1..22: mol_type = other DNA
atggagtcactgtcaacccact

SEQ ID NO: 48580 - DNA, 22 bp, synthetic construct
  misc_feature 1..22: note = chemically synthesized
  source 1..22: mol_type = other DNA
tcaacccactggttgcactgtc

SEQ ID NO: 48581 - DNA, 22 bp, synthetic construct
  misc_feature 1..22: note = chemically synthesized
  source 1..22: mol_type = other DNA
gttgcactgtctttgtgcactg

SEQ ID NO: 48582 - DNA, 22 bp, synthetic construct
  misc_feature 1..22: note = chemically synthesized
  source 1..22: mol_type = other DNA
cactgtctttgtgcactggctc

SEQ ID NO: 48583 - DNA, 22 bp, synthetic construct
  misc_feature 1..22: note = chemically synthesized
  source 1..22: mol_type = other DNA
tctttgtgcactggctctctgg

SEQ ID NO: 48584 - DNA, 22 bp, synthetic construct
  misc_feature 1..22: note = chemically synthesized
  source 1..22: mol_type = other DNA
tgtgcactggctctctggagtg

SEQ ID NO: 48585 - DNA, 22 bp, synthetic construct
  misc_feature 1..22: note = chemically synthesized
  source 1..22: mol_type = other DNA
gtgcactggctctctggagtga

SEQ ID NO: 48586 - DNA, 22 bp, synthetic construct
  misc_feature 1..22: note = chemically synthesized
  source 1..22: mol_type = other DNA
tgcactggctctctggagtgag

SEQ ID NO: 48587 - DNA, 22 bp, synthetic construct
  misc_feature 1..22: note = chemically synthesized
  source 1..22: mol_type = other DNA
gctctctggagtgaggtctttg

SEQ ID NO: 48588 - DNA, 22 bp, synthetic construct
  misc_feature 1..22: note = chemically synthesized
  source 1..22: mol_type = other DNA
tctggagtgaggtctttgcaaa

SEQ ID NO: 48589 - DNA, 22 bp, synthetic construct
  misc_feature 1..22: note = chemically synthesized
  source 1..22: mol_type = other DNA
tggagtgaggtctttgcaaaca

SEQ ID NO: 48590 - DNA, 22 bp, synthetic construct
  misc_feature 1..22: note = chemically synthesized
  source 1..22: mol_type = other DNA
gagtgaggtctttgcaaacaaa

SEQ ID NO: 48591 - DNA, 22 bp, synthetic construct
  misc_feature 1..22: note = chemically synthesized
  source 1..22: mol_type = other DNA
tgcaaacaaagtggaaagagca

SEQ ID NO: 48592 - DNA, 22 bp, synthetic construct
  misc_feature 1..22: note = chemically synthesized
  source 1..22: mol_type = other DNA
gcaaacaaagtggaaagagcat

SEQ ID NO: 48593 - DNA, 22 bp, synthetic construct
  misc_feature 1..22: note = chemically synthesized
  source 1..22: mol_type = other DNA
caaacaaagtggaaagagcatc

SEQ ID NO: 48594 - DNA, 22 bp, synthetic construct
  misc_feature 1..22: note = chemically synthesized
  source 1..22: mol_type = other DNA
tggactccagcacctagattca

SEQ ID NO: 48595 - DNA, 22 bp, synthetic construct
  misc_feature 1..22: note = chemically synthesized
  source 1..22: mol_type = other DNA
ggactccagcacctagattcag

SEQ ID NO: 48596 - DNA, 22 bp, synthetic construct
  misc_feature 1..22: note = chemically synthesized
  source 1..22: mol_type = other DNA
gactccagcacctagattcaga

SEQ ID NO: 48597 - DNA, 22 bp, synthetic construct
  misc_feature 1..22: note = chemically synthesized
  source 1..22: mol_type = other DNA
cagcacctagattcagagcagg

SEQ ID NO: 48598 - DNA, 22 bp, synthetic construct
  misc_feature 1..22: note = chemically synthesized
  source 1..22: mol_type = other DNA
gattcagagcaggccatttcac

SEQ ID NO: 48599 - DNA, 22 bp, synthetic construct
  misc_feature 1..22: note = chemically synthesized
  source 1..22: mol_type = other DNA
agagcaggccatttcactcgga

SEQ ID NO: 48600 - DNA, 22 bp, synthetic construct
  misc_feature 1..22: note = chemically synthesized
  source 1..22: mol_type = other DNA
cactcggaatctgctgtgcatc

SEQ ID NO: 48601 - DNA, 22 bp, synthetic construct
  misc_feature 1..22: note = chemically synthesized
  source 1..22: mol_type = other DNA
actcggaatctgctgtgcatct

SEQ ID NO: 48602 - DNA, 22 bp, synthetic construct
  misc_feature 1..22: note = chemically synthesized
  source 1..22: mol_type = other DNA
ggaatctgctgtgcatctgcaa

SEQ ID NO: 48603 - DNA, 22 bp, synthetic construct
  misc_feature 1..22: note = chemically synthesized
  source 1..22: mol_type = other DNA
ctgtgcatctgcaagggaggat

SEQ ID NO: 48604 - DNA, 22 bp, synthetic construct
  misc_feature 1..22: note = chemically synthesized
  source 1..22: mol_type = other DNA
tgcatctgcaagggaggatcat

SEQ ID NO: 48605 - DNA, 22 bp, synthetic construct
  misc_feature 1..22: note = chemically synthesized
  source 1..22: mol_type = other DNA
caagggaggatcataaattcgc

SEQ ID NO: 48606 - DNA, 22 bp, synthetic construct
  misc_feature 1..22: note = chemically synthesized
  source 1..22: mol_type = other DNA
gcctttgtttcttcccagtatc

SEQ ID NO: 48607 - DNA, 22 bp, synthetic construct
  misc_feature 1..22: note = chemically synthesized
  source 1..22: mol_type = other DNA
tgtttcttcccagtatcgacag

SEQ ID NO: 48608 - DNA, 22 bp, synthetic construct
  misc_feature 1..22: note = chemically synthesized
  source 1..22: mol_type = other DNA
gtttcttcccagtatcgacagc

SEQ ID NO: 48609 - DNA, 22 bp, synthetic construct
  misc_feature 1..22: note = chemically synthesized
  source 1..22: mol_type = other DNA
tttcttcccagtatcgacagcc

SEQ ID NO: 48610 - DNA, 22 bp, synthetic construct
  misc_feature 1..22: note = chemically synthesized
  source 1..22: mol_type = other DNA
cttcccagtatcgacagccctt

SEQ ID NO: 48611 - DNA, 22 bp, synthetic construct
  misc_feature 1..22: note = chemically synthesized
  source 1..22: mol_type = other DNA
ttcccagtatcgacagcccttc

SEQ ID NO: 48612 - DNA, 22 bp, synthetic construct
  misc_feature 1..22: note = chemically synthesized
  source 1..22: mol_type = other DNA
cccagtatcgacagcccttcca

SEQ ID NO: 48613 - DNA, 22 bp, synthetic construct
  misc_feature 1..22: note = chemically synthesized
  source 1..22: mol_type = other DNA
ccagtatcgacagcccttccag

SEQ ID NO: 48614 - DNA, 22 bp, synthetic construct
  misc_feature 1..22: note = chemically synthesized
  source 1..22: mol_type = other DNA
ccagaaagagcaagcctcatgt

SEQ ID NO: 48615 - DNA, 22 bp, synthetic construct
  misc_feature 1..22: note = chemically synthesized
  source 1..22: mol_type = other DNA
cagaaagagcaagcctcatgtc

SEQ ID NO: 48616 - DNA, 22 bp, synthetic construct
  misc_feature 1..22: note = chemically synthesized
  source 1..22: mol_type = other DNA
atgtcatgccacatgtacaatc

SEQ ID NO: 48617 - DNA, 22 bp, synthetic construct
  misc_feature 1..22: note = chemically synthesized
  source 1..22: mol_type = other DNA
aggccaggagctctctttcccc

SEQ ID NO: 48618 - DNA, 22 bp, synthetic construct
  misc_feature 1..22: note = chemically synthesized
  source 1..22: mol_type = other DNA
tctttccccttttcatcctcct

SEQ ID NO: 48619 - DNA, 22 bp, synthetic construct
  misc_feature 1..22: note = chemically synthesized
  source 1..22: mol_type = other DNA
tttccccttttcatcctcctgc

SEQ ID NO: 48620 - DNA, 22 bp, synthetic construct
  misc_feature 1..22: note = chemically synthesized
  source 1..22: mol_type = other DNA
tccccttttcatcctcctgcct

SEQ ID NO: 48621 - DNA, 22 bp, synthetic construct
  misc_feature 1..22: note = chemically synthesized
  source 1..22: mol_type = other DNA
ccccttttcatcctcctgcctg

SEQ ID NO: 48622 - DNA, 22 bp, synthetic construct
  misc_feature 1..22: note = chemically synthesized
  source 1..22: mol_type = other DNA
cccttttcatcctcctgcctgg

SEQ ID NO: 48623 - DNA, 22 bp, synthetic construct
  misc_feature 1..22: note = chemically synthesized
  source 1..22: mol_type = other DNA
ttcatcctcctgcctggtacac

SEQ ID NO: 48624 - DNA, 22 bp, synthetic construct
  misc_feature 1..22: note = chemically synthesized
  source 1..22: mol_type = other DNA
tcatcctcctgcctggtacaca

SEQ ID NO: 48625 - DNA, 22 bp, synthetic construct
  misc_feature 1..22: note = chemically synthesized
  source 1..22: mol_type = other DNA
catcctcctgcctggtacacaa

SEQ ID NO: 48626 - DNA, 22 bp, synthetic construct
  misc_feature 1..22: note = chemically synthesized
  source 1..22: mol_type = other DNA
atcctcctgcctggtacacaat

SEQ ID NO: 48627 - DNA, 22 bp, synthetic construct
  misc_feature 1..22: note = chemically synthesized
  source 1..22: mol_type = other DNA
ctgcctggtacacaataggtgt

SEQ ID NO: 48628 - DNA, 22 bp, synthetic construct
  misc_feature 1..22: note = chemically synthesized
  source 1..22: mol_type = other DNA
cctggtacacaataggtgttta

SEQ ID NO: 48629 - DNA, 22 bp, synthetic construct
  misc_feature 1..22: note = chemically synthesized
  source 1..22: mol_type = other DNA
gtacacaataggtgtttactgg

SEQ ID NO: 48630 - DNA, 22 bp, synthetic construct
  misc_feature 1..22: note = chemically synthesized
  source 1..22: mol_type = other DNA
actggatgcttgtccagttgat

SEQ ID NO: 48631 - DNA, 22 bp, synthetic construct
  misc_feature 1..22: note = chemically synthesized
  source 1..22: mol_type = other DNA
ctggatgcttgtccagttgatt

SEQ ID NO: 48632 - DNA, 22 bp, synthetic construct
  misc_feature 1..22: note = chemically synthesized
  source 1..22: mol_type = other DNA
gatgcttgtccagttgatttct

SEQ ID NO: 48633 - DNA, 22 bp, synthetic construct
  misc_feature 1..22: note = chemically synthesized
  source 1..22: mol_type = other DNA
gtccagttgatttcttgaacat

SEQ ID NO: 48634 - DNA, 22 bp, synthetic construct
  misc_feature 1..22: note = chemically synthesized
  source 1..22: mol_type = other DNA
tccagttgatttcttgaacatg

SEQ ID NO: 48635 - DNA, 22 bp, synthetic construct
  misc_feature 1..22: note = chemically synthesized
  source 1..22: mol_type = other DNA
atttcttgaacatggtgtgtaa

SEQ ID NO: 48636 - DNA, 22 bp, synthetic construct
  misc_feature 1..22: note = chemically synthesized
  source 1..22: mol_type = other DNA
cttgaacatggtgtgtaaaagg

SEQ ID NO: 48637 - DNA, 22 bp, synthetic construct
  misc_feature 1..22: note = chemically synthesized
  source 1..22: mol_type = other DNA
ttgaacatggtgtgtaaaagga

SEQ ID NO: 48638 - DNA, 22 bp, synthetic construct
  misc_feature 1..22: note = chemically synthesized
  source 1..22: mol_type = other DNA
gaacatggtgtgtaaaaggaat

SEQ ID NO: 48639 - DNA, 22 bp, synthetic construct
  misc_feature 1..22: note = chemically synthesized
  source 1..22: mol_type = other DNA
aacatggtgtgtaaaaggaatc

SEQ ID NO: 48640 - DNA, 22 bp, synthetic construct
  misc_feature 1..22: note = chemically synthesized
  source 1..22: mol_type = other DNA
tgcaaattgaatcttctggaaa

SEQ ID NO: 48641 - DNA, 22 bp, synthetic construct
  misc_feature 1..22: note = chemically synthesized
  source 1..22: mol_type = other DNA
gcaaattgaatcttctggaaag

SEQ ID NO: 48642 - DNA, 22 bp, synthetic construct
  misc_feature 1..22: note = chemically synthesized
  source 1..22: mol_type = other DNA
caaattgaatcttctggaaagc

SEQ ID NO: 48643 - DNA, 22 bp, synthetic construct
  misc_feature 1..22: note = chemically synthesized
  source 1..22: mol_type = other DNA
aatcttctggaaagctgagctt

SEQ ID NO: 48644 - DNA, 22 bp, synthetic construct
  misc_feature 1..22: note = chemically synthesized
  source 1..22: mol_type = other DNA
ctggaaagctgagcttgtgcct

SEQ ID NO: 48645 - DNA, 22 bp, synthetic construct
  misc_feature 1..22: note = chemically synthesized
  source 1..22: mol_type = other DNA
tggaaagctgagcttgtgccta

SEQ ID NO: 48646 - DNA, 22 bp, synthetic construct
  misc_feature 1..22: note = chemically synthesized
  source 1..22: mol_type = other DNA
gaaagctgagcttgtgcctacc

SEQ ID NO: 48647 - DNA, 22 bp, synthetic construct
  misc_feature 1..22: note = chemically synthesized
  source 1..22: mol_type = other DNA
agcttgtgcctaccatagaatt

SEQ ID NO: 48648 - DNA, 22 bp, synthetic construct
  misc_feature 1..22: note = chemically synthesized
  source 1..22: mol_type = other DNA
gtgcctaccatagaattctgaa

SEQ ID NO: 48649 - DNA, 22 bp, synthetic construct
  misc_feature 1..22: note = chemically synthesized
  source 1..22: mol_type = other DNA
tgcctaccatagaattctgaat

SEQ ID NO: 48650 - DNA, 22 bp, synthetic construct
  misc_feature 1..22: note = chemically synthesized
  source 1..22: mol_type = other DNA
ccatagaattctgaatgtacct

SEQ ID NO: 48651 - DNA, 22 bp, synthetic construct
  misc_feature 1..22: note = chemically synthesized
  source 1..22: mol_type = other DNA
tgaatgtacctatatgacgtct

SEQ ID NO: 48652 - DNA, 22 bp, synthetic construct
  misc_feature 1..22: note = chemically synthesized
  source 1..22: mol_type = other DNA
aatgtacctatatgacgtcttt

SEQ ID NO: 48653 - DNA, 22 bp, synthetic construct
  misc_feature 1..22: note = chemically synthesized
  source 1..22: mol_type = other DNA
tatgacgtctttgcaaacttaa

SEQ ID NO: 48654 - DNA, 22 bp, synthetic construct
  misc_feature 1..22: note = chemically synthesized
  source 1..22: mol_type = other DNA
tgcaaacttaaaacctgaatct

SEQ ID NO: 48655 - DNA, 22 bp, synthetic construct
  misc_feature 1..22: note = chemically synthesized
  source 1..22: mol_type = other DNA
gcaaacttaaaacctgaatctt

SEQ ID NO: 48656 - DNA, 22 bp, synthetic construct
  misc_feature 1..22: note = chemically synthesized
  source 1..22: mol_type = other DNA
caaacttaaaacctgaatcttt

SEQ ID NO: 48657 - DNA, 22 bp, synthetic construct
  misc_feature 1..22: note = chemically synthesized
  source 1..22: mol_type = other DNA
aaaacctgaatctttgtagtat

SEQ ID NO: 48658 - DNA, 22 bp, synthetic construct
  misc_feature 1..22: note = chemically synthesized
  source 1..22: mol_type = other DNA
aaacctgaatctttgtagtata

SEQ ID NO: 48659 - DNA, 22 bp, synthetic construct
  misc_feature 1..22: note = chemically synthesized
  source 1..22: mol_type = other DNA
aatctttgtagtataaatccct

SEQ ID NO: 48660 - DNA, 22 bp, synthetic construct
  misc_feature 1..22: note = chemically synthesized
  source 1..22: mol_type = other DNA
tgtagtataaatcccttgaaat

SEQ ID NO: 48661 - DNA, 22 bp, synthetic construct
  misc_feature 1..22: note = chemically synthesized
  source 1..22: mol_type = other DNA
gtagtataaatcccttgaaatg

SEQ ID NO: 48662 - DNA, 22 bp, synthetic construct
  misc_feature 1..22: note = chemically synthesized
  source 1..22: mol_type = other DNA
tagtataaatcccttgaaatgc

SEQ ID NO: 48663 - DNA, 22 bp, synthetic construct
  misc_feature 1..22: note = chemically synthesized
  source 1..22: mol_type = other DNA
gaaatgcatgtaggctggacat

SEQ ID NO: 48664 - DNA, 22 bp, synthetic construct
  misc_feature 1..22: note = chemically synthesized
  source 1..22: mol_type = other DNA
aaatgcatgtaggctggacatc

SEQ ID NO: 48665 - DNA, 22 bp, synthetic construct
  misc_feature 1..22: note = chemically synthesized
  source 1..22: mol_type = other DNA
gacatcaaaagcaagcaatctc

SEQ ID NO: 48666 - DNA, 22 bp, synthetic construct
  misc_feature 1..22: note = chemically synthesized
  source 1..22: mol_type = other DNA
ttcaaggagcagctagttggta

SEQ ID NO: 48667 - DNA, 22 bp, synthetic construct
  misc_feature 1..22: note = chemically synthesized
  source 1..22: mol_type = other DNA
caaggagcagctagttggtaag

SEQ ID NO: 48668 - DNA, 22 bp, synthetic construct
  misc_feature 1..22: note = chemically synthesized
  source 1..22: mol_type = other DNA
aaggagcagctagttggtaagg

SEQ ID NO: 48669 - DNA, 22 bp, synthetic construct
  misc_feature 1..22: note = chemically synthesized
  source 1..22: mol_type = other DNA
gttggtaaggtcagtgtgcagg

SEQ ID NO: 48670 - DNA, 22 bp, synthetic construct
  misc_feature 1..22: note = chemically synthesized
  source 1..22: mol_type = other DNA
gtaaggtcagtgtgcagggtgc

SEQ ID NO: 48671 - DNA, 22 bp, synthetic construct
  misc_feature 1..22: note = chemically synthesized
  source 1..22: mol_type = other DNA
agtttagaaggctgccaggtta

SEQ ID NO: 48672 - DNA, 22 bp, synthetic construct
  misc_feature 1..22: note = chemically synthesized
  source 1..22: mol_type = other DNA
agaaggctgccaggttaaggcc

SEQ ID NO: 48673 - DNA, 22 bp, synthetic construct
  misc_feature 1..22: note = chemically synthesized
  source 1..22: mol_type = other DNA
gaaggctgccaggttaaggcca

SEQ ID NO: 48674 - DNA, 22 bp, synthetic construct
  misc_feature 1..22: note = chemically synthesized
  source 1..22: mol_type = other DNA
ccaggttaaggccagtggaaag

SEQ ID NO: 48675 - DNA, 22 bp, synthetic construct
  misc_feature 1..22: note = chemically synthesized
  source 1..22: mol_type = other DNA
aggccagtggaaagaattcggt

SEQ ID NO: 48676 - DNA, 22 bp, synthetic construct
  misc_feature 1..22: note = chemically synthesized
  source 1..22: mol_type = other DNA
ggtgggcagcgaggagtccaca

SEQ ID NO: 48677 - DNA, 22 bp, synthetic construct
  misc_feature 1..22: note = chemically synthesized
  source 1..22: mol_type = other DNA
attcagaagtctcactggtcag

SEQ ID NO: 48678 - DNA, 22 bp, synthetic construct
  misc_feature 1..22: note = chemically synthesized
  source 1..22: mol_type = other DNA
agaagtctcactggtcagcagg

SEQ ID NO: 48679 - DNA, 22 bp, synthetic construct
  misc_feature 1..22: note = chemically synthesized
  source 1..22: mol_type = other DNA
actggtcagcaggagacaaggt

SEQ ID NO: 48680 - DNA, 22 bp, synthetic construct
  misc_feature 1..22: note = chemically synthesized
  source 1..22: mol_type = other DNA
gtcagcaggagacaaggtggac

SEQ ID NO: 48681 - DNA, 22 bp, synthetic construct
  misc_feature 1..22: note = chemically synthesized
  source 1..22: mol_type = other DNA
aaaaggtgggcccggcagaact

SEQ ID NO: 48682 - DNA, 22 bp, synthetic construct
  misc_feature 1..22: note = chemically synthesized
  source 1..22: mol_type = other DNA
ggagtctggcatcccacgcagg

SEQ ID NO: 48683 - DNA, 22 bp, synthetic construct
  misc_feature 1..22: note = chemically synthesized
  source 1..22: mol_type = other DNA
gagtctggcatcccacgcaggg

SEQ ID NO: 48684 - DNA, 22 bp, synthetic construct
  misc_feature 1..22: note = chemically synthesized
  source 1..22: mol_type = other DNA
gcatcccacgcagggtgagagg

SEQ ID NO: 48685 - DNA, 22 bp, synthetic construct
  misc_feature 1..22: note = chemically synthesized
  source 1..22: mol_type = other DNA
gggcgccggcctgccttccagc

SEQ ID NO: 48686 - DNA, 22 bp, synthetic construct
  misc_feature 1..22: note = chemically synthesized
  source 1..22: mol_type = other DNA
ccttccagcccagttaggattt

SEQ ID NO: 48687 - DNA, 22 bp, synthetic construct
  misc_feature 1..22: note = chemically synthesized
  source 1..22: mol_type = other DNA
ccagcccagttaggatttggga

SEQ ID NO: 48688 - DNA, 22 bp, synthetic construct
  misc_feature 1..22: note = chemically synthesized
  source 1..22: mol_type = other DNA
cagcccagttaggatttgggag

SEQ ID NO: 48689 - DNA, 22 bp, synthetic construct
  misc_feature 1..22: note = chemically synthesized
  source 1..22: mol_type = other DNA
ggatttgggagttttttcttcc

SEQ ID NO: 48690 - DNA, 22 bp, synthetic construct
  misc_feature 1..22: note = chemically synthesized
  source 1..22: mol_type = other DNA
gggagttttttcttccctctgc

SEQ ID NO: 48691 - DNA, 22 bp, synthetic construct
  misc_feature 1..22: note = chemically synthesized
  source 1..22: mol_type = other DNA
ggagttttttcttccctctgcg

SEQ ID NO: 48692 - DNA, 22 bp, synthetic construct
  misc_feature 1..22: note = chemically synthesized
  source 1..22: mol_type = other DNA
tttcttccctctgcgcgtaatc

SEQ ID NO: 48693 - DNA, 22 bp, synthetic construct
  misc_feature 1..22: note = chemically synthesized
  source 1..22: mol_type = other DNA
ttcttccctctgcgcgtaatct

SEQ ID NO: 48694 - DNA, 22 bp, synthetic construct
  misc_feature 1..22: note = chemically synthesized
  source 1..22: mol_type = other DNA
tcttccctctgcgcgtaatctg

SEQ ID NO: 48695 - DNA, 22 bp, synthetic construct
  misc_feature 1..22: note = chemically synthesized
  source 1..22: mol_type = other DNA
cttccctctgcgcgtaatctga

SEQ ID NO: 48696 - DNA, 22 bp, synthetic construct
  misc_feature 1..22: note = chemically synthesized
  source 1..22: mol_type = other DNA
ttccctctgcgcgtaatctgac

SEQ ID NO: 48697 - DNA, 22 bp, synthetic construct
  misc_feature 1..22: note = chemically synthesized
  source 1..22: mol_type = other DNA
ccctctgcgcgtaatctgacgc

SEQ ID NO: 48698 - DNA, 22 bp, synthetic construct
  misc_feature 1..22: note = chemically synthesized
  source 1..22: mol_type = other DNA
cctctgcgcgtaatctgacgct

SEQ ID NO: 48699 - DNA, 22 bp, synthetic construct
  misc_feature 1..22: note = chemically synthesized
  source 1..22: mol_type = other DNA
tgcgcgtaatctgacgctgttt

SEQ ID NO: 48700 - DNA, 22 bp, synthetic construct
  misc_feature 1..22: note = chemically synthesized
  source 1..22: mol_type = other DNA
cgcgtaatctgacgctgtttgg

SEQ ID NO: 48701 - DNA, 22 bp, synthetic construct
  misc_feature 1..22: note = chemically synthesized
  source 1..22: mol_type = other DNA
acgctgtttggggagggcgagg

SEQ ID NO: 48702 - DNA, 22 bp, synthetic construct
  misc_feature 1..22: note = chemically synthesized
  source 1..22: mol_type = other DNA
tttggggagggcgaggccgaaa

SEQ ID NO: 48703 - DNA, 22 bp, synthetic construct
  misc_feature 1..22: note = chemically synthesized
  source 1..22: mol_type = other DNA
ggggagggcgaggccgaaacct

SEQ ID NO: 48704 - DNA, 22 bp, synthetic construct
  misc_feature 1..22: note = chemically synthesized
  source 1..22: mol_type = other DNA
gggagggcgaggccgaaacctg

SEQ ID NO: 48705 - DNA, 22 bp, synthetic construct
  misc_feature 1..22: note = chemically synthesized
  source 1..22: mol_type = other DNA
atcctccagtccgggggttccg

SEQ ID NO: 48706 - DNA, 22 bp, synthetic construct
  misc_feature 1..22: note = chemically synthesized
  source 1..22: mol_type = other DNA
cagtccgggggttccgttaatg

SEQ ID NO: 48707 - DNA, 22 bp, synthetic construct
  misc_feature 1..22: note = chemically synthesized
  source 1..22: mol_type = other DNA
cgttaatgtttaatcagatagg

SEQ ID NO: 48708 - DNA, 22 bp, synthetic construct
  misc_feature 1..22: note = chemically synthesized
  source 1..22: mol_type = other DNA
atgtttaatcagataggatcgt

SEQ ID NO: 48709 - DNA, 22 bp, synthetic construct
  misc_feature 1..22: note = chemically synthesized
  source 1..22: mol_type = other DNA
aatcagataggatcgtccgatg

SEQ ID NO: 48710 - DNA, 22 bp, synthetic construct
  misc_feature 1..22: note = chemically synthesized
  source 1..22: mol_type = other DNA
atcagataggatcgtccgatgg

SEQ ID NO: 48711 - DNA, 22 bp, synthetic construct
  misc_feature 1..22: note = chemically synthesized
  source 1..22: mol_type = other DNA
tggtggcgtgatctgcgcgccc

SEQ ID NO: 48712 - DNA, 22 bp, synthetic construct
  misc_feature 1..22: note = chemically synthesized
  source 1..22: mol_type = other DNA
gtggcgtgatctgcgcgcccca

SEQ ID NO: 48713 - DNA, 22 bp, synthetic construct
  misc_feature 1..22: note = chemically synthesized
  source 1..22: mol_type = other DNA
cgcgccccaggcgtcaagcacc

SEQ ID NO: 48714 - DNA, 22 bp, synthetic construct
  misc_feature 1..22: note = chemically synthesized
  source 1..22: mol_type = other DNA
gaaggtttccgcagcgacgtcg

SEQ ID NO: 48715 - DNA, 22 bp, synthetic construct
  misc_feature 1..22: note = chemically synthesized
  source 1..22: mol_type = other DNA
ccgcagcgacgtcgaggcgctc

SEQ ID NO: 48716 - DNA, 22 bp, synthetic construct
  misc_feature 1..22: note = chemically synthesized
  source 1..22: mol_type = other DNA
cgcagcgacgtcgaggcgctca

SEQ ID NO: 48717 - DNA, 22 bp, synthetic construct
  misc_feature 1..22: note = chemically synthesized
  source 1..22: mol_type = other DNA
atggttgcaggcgggcgccgcc

SEQ ID NO: 48718 - DNA, 22 bp, synthetic construct
  misc_feature 1..22: note = chemically synthesized
  source 1..22: mol_type = other DNA
caggcgggcgccgccgttcagt

SEQ ID NO: 48719 - DNA, 22 bp, synthetic construct
  misc_feature 1..22: note = chemically synthesized
  source 1..22: mol_type = other DNA
agttcagggtctgagcctggag

SEQ ID NO: 48720 - DNA, 22 bp, synthetic construct
  misc_feature 1..22: note = chemically synthesized
  source 1..22: mol_type = other DNA
agggtctgagcctggaggagtg

SEQ ID NO: 48721 - DNA, 22 bp, synthetic construct
  misc_feature 1..22: note = chemically synthesized
  source 1..22: mol_type = other DNA
agcctggaggagtgagccaggc

SEQ ID NO: 48722 - DNA, 22 bp, synthetic construct
  misc_feature 1..22: note = chemically synthesized
  source 1..22: mol_type = other DNA
gaggagtgagccaggcagtgag

SEQ ID NO: 48723 - DNA, 22 bp, synthetic construct
  misc_feature 1..22: note = chemically synthesized
  source 1..22: mol_type = other DNA
gctcgggcgggccgggacgcgt

SEQ ID NO: 48724 - DNA, 22 bp, synthetic construct
  misc_feature 1..22: note = chemically synthesized
  source 1..22: mol_type = other DNA
gggcgggccgggacgcgtcgtt

SEQ ID NO: 48725 - DNA, 22 bp, synthetic construct
  misc_feature 1..22: note = chemically synthesized
  source 1..22: mol_type = other DNA
cagcagcggctcccagctccca

SEQ ID NO: 48726 - DNA, 22 bp, synthetic construct
  misc_feature 1..22: note = chemically synthesized
  source 1..22: mol_type = other DNA
ccagctcccagccaggattccg

SEQ ID NO: 48727 - DNA, 22 bp, synthetic construct
  misc_feature 1..22: note = chemically synthesized
  source 1..22: mol_type = other DNA
ccagccaggattccgcgcgccc

SEQ ID NO: 48728 - DNA, 22 bp, synthetic construct
  misc_feature 1..22: note = chemically synthesized
  source 1..22: mol_type = other DNA
cgcgcgccccttcacgcgccct

SEQ ID NO: 48729 - DNA, 22 bp, synthetic construct
  misc_feature 1..22: note = chemically synthesized
  source 1..22: mol_type = other DNA
cacgcgccctgctcctgaactt

SEQ ID NO: 48730 - DNA, 22 bp, synthetic construct
  misc_feature 1..22: note = chemically synthesized
  source 1..22: mol_type = other DNA
acgcgccctgctcctgaacttc

SEQ ID NO: 48731 - DNA, 22 bp, synthetic construct
  misc_feature 1..22: note = chemically synthesized
  source 1..22: mol_type = other DNA
ctcctgaacttcagctcctgca

SEQ ID NO: 48732 - DNA, 22 bp, synthetic construct
  misc_feature 1..22: note = chemically synthesized
  source 1..22: mol_type = other DNA
ctgaacttcagctcctgcacag

SEQ ID NO: 48733 - DNA, 22 bp, synthetic construct
  misc_feature 1..22: note = chemically synthesized
  source 1..22: mol_type = other DNA
aacttcagctcctgcacagtcc

SEQ ID NO: 48734 - DNA, 22 bp, synthetic construct
  misc_feature 1..22: note = chemically synthesized
  source 1..22: mol_type = other DNA
cagctcctgcacagtcctcccc

SEQ ID NO: 48735 - DNA, 22 bp, synthetic construct
  misc_feature 1..22: note = chemically synthesized
  source 1..22: mol_type = other DNA
agctcctgcacagtcctcccca

SEQ ID NO: 48736 - DNA, 22 bp, synthetic construct
  misc_feature 1..22: note = chemically synthesized
  source 1..22: mol_type = other DNA
ctgcacagtcctccccaccgca

SEQ ID NO: 48737 - DNA, 22 bp, synthetic construct
  misc_feature 1..22: note = chemically synthesized
  source 1..22: mol_type = other DNA
cacagtcctccccaccgcaagg

SEQ ID NO: 48738 - DNA, 22 bp, synthetic construct
  misc_feature 1..22: note = chemically synthesized
  source 1..22: mol_type = other DNA
cccaccgcaaggctcaaggcgc

SEQ ID NO: 48739 - DNA, 22 bp, synthetic construct
  misc_feature 1..22: note = chemically synthesized
  source 1..22: mol_type = other DNA
aaggcgccgccggcgtggaccg

SEQ ID NO: 48740 - DNA, 22 bp, synthetic construct
  misc_feature 1..22: note = chemically synthesized
  source 1..22: mol_type = other DNA
taggtctcctcgccaggacagc

SEQ ID NO: 48741 - DNA, 22 bp, synthetic construct
  misc_feature 1..22: note = chemically synthesized
  source 1..22: mol_type = other DNA
ggtctcctcgccaggacagcaa

SEQ ID NO: 48742 - DNA, 22 bp, synthetic construct
  misc_feature 1..22: note = chemically synthesized
  source 1..22: mol_type = other DNA
ctcgccaggacagcaacctctc

SEQ ID NO: 48743 - DNA, 22 bp, synthetic construct
  misc_feature 1..22: note = chemically synthesized
  source 1..22: mol_type = other DNA
gccaggacagcaacctctcccc

SEQ ID NO: 48744 - DNA, 22 bp, synthetic construct
  misc_feature 1..22: note = chemically synthesized
  source 1..22: mol_type = other DNA
tcccctggccctcatgggcacc

SEQ ID NO: 48745 - DNA, 22 bp, synthetic construct
  misc_feature 1..22: note = chemically synthesized
  source 1..22: mol_type = other DNA
ccctggccctcatgggcaccgt

SEQ ID NO: 48746 - DNA, 22 bp, synthetic construct
  misc_feature 1..22: note = chemically synthesized
  source 1..22: mol_type = other DNA
gccctcatgggcaccgtcagct

SEQ ID NO: 48747 - DNA, 22 bp, synthetic construct
  misc_feature 1..22: note = chemically synthesized
  source 1..22: mol_type = other DNA
atgggcaccgtcagctccaggc

SEQ ID NO: 48748 - DNA, 22 bp, synthetic construct
  misc_feature 1..22: note = chemically synthesized
  source 1..22: mol_type = other DNA
caggcggtcctggtggccgctg

SEQ ID NO: 48749 - DNA, 22 bp, synthetic construct
  misc_feature 1..22: note = chemically synthesized
  source 1..22: mol_type = other DNA
gtggccgctgccactgctgctg

SEQ ID NO: 48750 - DNA, 22 bp, synthetic construct
  misc_feature 1..22: note = chemically synthesized
  source 1..22: mol_type = other DNA
ccactgctgctgctgctgctgc

SEQ ID NO: 48751 - DNA, 22 bp, synthetic construct
  misc_feature 1..22: note = chemically synthesized
  source 1..22: mol_type = other DNA
ctgctgctgctgctgctgctcc

SEQ ID NO: 48752 - DNA, 22 bp, synthetic construct
  misc_feature 1..22: note = chemically synthesized
  source 1..22: mol_type = other DNA
ctgctgctgctgctgctcctgg

SEQ ID NO: 48753 - DNA, 22 bp, synthetic construct
  misc_feature 1..22: note = chemically synthesized
  source 1..22: mol_type = other DNA
ctgctgctgctgctcctgggtc

SEQ ID NO: 48754 - DNA, 22 bp, synthetic construct
  misc_feature 1..22: note = chemically synthesized
  source 1..22: mol_type = other DNA
ctgctgctgctcctgggtcccg

SEQ ID NO: 48755 - DNA, 22 bp, synthetic construct
  misc_feature 1..22: note = chemically synthesized
  source 1..22: mol_type = other DNA
ctgctgctcctgggtcccgcgg

SEQ ID NO: 48756 - DNA, 22 bp, synthetic construct
  misc_feature 1..22: note = chemically synthesized
  source 1..22: mol_type = other DNA
ctgctcctgggtcccgcgggcg

SEQ ID NO: 48757 - DNA, 22 bp, synthetic construct
  misc_feature 1..22: note = chemically synthesized
  source 1..22: mol_type = other DNA
ctcctgggtcccgcgggcgccc

SEQ ID NO: 48758 - DNA, 22 bp, synthetic construct
  misc_feature 1..22: note = chemically synthesized
  source 1..22: mol_type = other DNA
ctgggtcccgcgggcgcccgtg

SEQ ID NO: 48759 - DNA, 22 bp, synthetic construct
  misc_feature 1..22: note = chemically synthesized
  source 1..22: mol_type = other DNA
ggtcccgcgggcgcccgtgcgc

SEQ ID NO: 48760 - DNA, 22 bp, synthetic construct
  misc_feature 1..22: note = chemically synthesized
  source 1..22: mol_type = other DNA
cgaggagctggtgctagccttg

SEQ ID NO: 48761 - DNA, 22 bp, synthetic construct
  misc_feature 1..22: note = chemically synthesized
  source 1..22: mol_type = other DNA
gtgctagccttgcgttccgagg

SEQ ID NO: 48762 - DNA, 22 bp, synthetic construct
  misc_feature 1..22: note = chemically synthesized
  source 1..22: mol_type = other DNA
gccttgcgttccgaggaggacg

SEQ ID NO: 48763 - DNA, 22 bp, synthetic construct
  misc_feature 1..22: note = chemically synthesized
  source 1..22: mol_type = other DNA
gcgttccgaggaggacggcctg

SEQ ID NO: 48764 - DNA, 22 bp, synthetic construct
  misc_feature 1..22: note = chemically synthesized
  source 1..22: mol_type = other DNA
cgttccgaggaggacggcctgg

SEQ ID NO: 48765 - DNA, 22 bp, synthetic construct
  misc_feature 1..22: note = chemically synthesized
  source 1..22: mol_type = other DNA
cgaggaggacggcctggccgaa

SEQ ID NO: 48766 - DNA, 22 bp, synthetic construct
  misc_feature 1..22: note = chemically synthesized
  source 1..22: mol_type = other DNA
gccgaagcacccgagcacggaa

SEQ ID NO: 48767 - DNA, 22 bp, synthetic construct
  misc_feature 1..22: note = chemically synthesized
  source 1..22: mol_type = other DNA
ccaccgctgcgccaaggtgcgg

SEQ ID NO: 48768 - DNA, 22 bp, synthetic construct
  misc_feature 1..22: note = chemically synthesized
  source 1..22: mol_type = other DNA
caccgctgcgccaaggtgcggg

SEQ ID NO: 48769 - DNA, 22 bp, synthetic construct
  misc_feature 1..22: note = chemically synthesized
  source 1..22: mol_type = other DNA
cgccaaggtgcgggtgtaggga

SEQ ID NO: 48770 - DNA, 22 bp, synthetic construct
  misc_feature 1..22: note = chemically synthesized
  source 1..22: mol_type = other DNA
tttcctctcgggcctcagtttc

SEQ ID NO: 48771 - DNA, 22 bp, synthetic construct
  misc_feature 1..22: note = chemically synthesized
  source 1..22: mol_type = other DNA
cctctcgggcctcagtttcccc

SEQ ID NO: 48772 - DNA, 22 bp, synthetic construct
  misc_feature 1..22: note = chemically synthesized
  source 1..22: mol_type = other DNA
ctctcgggcctcagtttccccc

SEQ ID NO: 48773 - DNA, 22 bp, synthetic construct
  misc_feature 1..22: note = chemically synthesized
  source 1..22: mol_type = other DNA
tcgggcctcagtttccccccat

SEQ ID NO: 48774 - DNA, 22 bp, synthetic construct
  misc_feature 1..22: note = chemically synthesized
  source 1..22: mol_type = other DNA
gggcctcagtttccccccatgt

SEQ ID NO: 48775 - DNA, 22 bp, synthetic construct
  misc_feature 1..22: note = chemically synthesized
  source 1..22: mol_type = other DNA
agtttccccccatgtaagagag

SEQ ID NO: 48776 - DNA, 22 bp, synthetic construct
  misc_feature 1..22: note = chemically synthesized
  source 1..22: mol_type = other DNA
ccccccatgtaagagaggaagt

SEQ ID NO: 48777 - DNA, 22 bp, synthetic construct
  misc_feature 1..22: note = chemically synthesized
  source 1..22: mol_type = other DNA
cccccatgtaagagaggaagtg

SEQ ID NO: 48778 - DNA, 22 bp, synthetic construct
  misc_feature 1..22: note = chemically synthesized
  source 1..22: mol_type = other DNA
ttcgcttggcacgatcttgggg

SEQ ID NO: 48779 - DNA, 22 bp, synthetic construct
  misc_feature 1..22: note = chemically synthesized
  source 1..22: mol_type = other DNA
cgcttggcacgatcttggggac

SEQ ID NO: 48780 - DNA, 22 bp, synthetic construct
  misc_feature 1..22: note = chemically synthesized
  source 1..22: mol_type = other DNA
gcttggcacgatcttggggact

SEQ ID NO: 48781 - DNA, 22 bp, synthetic construct
  misc_feature 1..22: note = chemically synthesized
  source 1..22: mol_type = other DNA
ggcacgatcttggggactgcag

SEQ ID NO: 48782 - DNA, 22 bp, synthetic construct
  misc_feature 1..22: note = chemically synthesized
  source 1..22: mol_type = other DNA
gcacgatcttggggactgcagg

SEQ ID NO: 48783 - DNA, 22 bp, synthetic construct
  misc_feature 1..22: note = chemically synthesized
  source 1..22: mol_type = other DNA
ggggactgcaggcaaggcggcg

SEQ ID NO: 48784 - DNA, 22 bp, synthetic construct
  misc_feature 1..22: note = chemically synthesized
  source 1..22: mol_type = other DNA
gggactgcaggcaaggcggcgg

SEQ ID NO: 48785 - DNA, 22 bp, synthetic construct
  misc_feature 1..22: note = chemically synthesized
  source 1..22: mol_type = other DNA
caggcaaggcggcgggggagga

SEQ ID NO: 48786 - DNA, 22 bp, synthetic construct
  misc_feature 1..22: note = chemically synthesized
  source 1..22: mol_type = other DNA
tttggggacttgctggggcgtg

SEQ ID NO: 48787 - DNA, 22 bp, synthetic construct
  misc_feature 1..22: note = chemically synthesized
  source 1..22: mol_type = other DNA
tggggacttgctggggcgtgcg

SEQ ID NO: 48788 - DNA, 22 bp, synthetic construct
  misc_feature 1..22: note = chemically synthesized
  source 1..22: mol_type = other DNA
ggggacttgctggggcgtgcgg

SEQ ID NO: 48789 - DNA, 22 bp, synthetic construct
  misc_feature 1..22: note = chemically synthesized
  source 1..22: mol_type = other DNA
gggacttgctggggcgtgcggc

SEQ ID NO: 48790 - DNA, 22 bp, synthetic construct
  misc_feature 1..22: note = chemically synthesized
  source 1..22: mol_type = other DNA
gctggggcgtgcggctgcgcta

SEQ ID NO: 48791 - DNA, 22 bp, synthetic construct
  misc_feature 1..22: note = chemically synthesized
  source 1..22: mol_type = other DNA
ctggggcgtgcggctgcgctat

SEQ ID NO: 48792 - DNA, 22 bp, synthetic construct
  misc_feature 1..22: note = chemically synthesized
  source 1..22: mol_type = other DNA
gggcgtgcggctgcgctattca

SEQ ID NO: 48793 - DNA, 22 bp, synthetic construct
  misc_feature 1..22: note = chemically synthesized
  source 1..22: mol_type = other DNA
cgctattcagtgggaaggttcg

SEQ ID NO: 48794 - DNA, 22 bp, synthetic construct
  misc_feature 1..22: note = chemically synthesized
  source 1..22: mol_type = other DNA
ttcagtgggaaggttcgcgggg

SEQ ID NO: 48795 - DNA, 22 bp, synthetic construct
  misc_feature 1..22: note = chemically synthesized
  source 1..22: mol_type = other DNA
agtgggaaggttcgcggggttg

SEQ ID NO: 48796 - DNA, 22 bp, synthetic construct
  misc_feature 1..22: note = chemically synthesized
  source 1..22: mol_type = other DNA
gcggggttgggagacccggagg

SEQ ID NO: 48797 - DNA, 22 bp, synthetic construct
  misc_feature 1..22: note = chemically synthesized
  source 1..22: mol_type = other DNA
ggagacccggaggccgaggaag

SEQ ID NO: 48798 - DNA, 22 bp, synthetic construct
  misc_feature 1..22: note = chemically synthesized
  source 1..22: mol_type = other DNA
ccaggatatcctgcccagattt

SEQ ID NO: 48799 - DNA, 22 bp, synthetic construct
  misc_feature 1..22: note = chemically synthesized
  source 1..22: mol_type = other DNA
cccagatttcccagtttctgcc

SEQ ID NO: 48800 - DNA, 22 bp, synthetic construct
  misc_feature 1..22: note = chemically synthesized
  source 1..22: mol_type = other DNA
cccagtttctgcctcgccgcgg

SEQ ID NO: 48801 - DNA, 22 bp, synthetic construct
  misc_feature 1..22: note = chemically synthesized
  source 1..22: mol_type = other DNA
ccagtttctgcctcgccgcggc

SEQ ID NO: 48802 - DNA, 22 bp, synthetic construct
  misc_feature 1..22: note = chemically synthesized
  source 1..22: mol_type = other DNA
ctgcctcgccgcggcacaggtg

SEQ ID NO: 48803 - DNA, 22 bp, synthetic construct
  misc_feature 1..22: note = chemically synthesized
  source 1..22: mol_type = other DNA
tgcctcgccgcggcacaggtgg

SEQ ID NO: 48804 - DNA, 22 bp, synthetic construct
  misc_feature 1..22: note = chemically synthesized
  source 1..22: mol_type = other DNA
cctcgccgcggcacaggtgggt

SEQ ID NO: 48805 - DNA, 22 bp, synthetic construct
  misc_feature 1..22: note = chemically synthesized
  source 1..22: mol_type = other DNA
gccgcggcacaggtgggtgaag

SEQ ID NO: 48806 - DNA, 22 bp, synthetic construct
  misc_feature 1..22: note = chemically synthesized
  source 1..22: mol_type = other DNA
gaacgtactgggaactgcacca

SEQ ID NO: 48807 - DNA, 22 bp, synthetic construct
  misc_feature 1..22: note = chemically synthesized
  source 1..22: mol_type = other DNA
ggaactgcaccaggcacagaga

SEQ ID NO: 48808 - DNA, 22 bp, synthetic construct
  misc_feature 1..22: note = chemically synthesized
  source 1..22: mol_type = other DNA
caccaggcacagagaaagcggg

SEQ ID NO: 48809 - DNA, 22 bp, synthetic construct
  misc_feature 1..22: note = chemically synthesized
  source 1..22: mol_type = other DNA
gccattatagtgggttccgatt

SEQ ID NO: 48810 - DNA, 22 bp, synthetic construct
  misc_feature 1..22: note = chemically synthesized
  source 1..22: mol_type = other DNA
ccattatagtgggttccgattt

SEQ ID NO: 48811 - DNA, 22 bp, synthetic construct
  misc_feature 1..22: note = chemically synthesized
  source 1..22: mol_type = other DNA
tagtgggttccgatttggtttg

SEQ ID NO: 48812 - DNA, 22 bp, synthetic construct
  misc_feature 1..22: note = chemically synthesized
  source 1..22: mol_type = other DNA
cgatttggtttggaaaacatgg

SEQ ID NO: 48813 - DNA, 22 bp, synthetic construct
  misc_feature 1..22: note = chemically synthesized
  source 1..22: mol_type = other DNA
ggtttggaaaacatgggcagcg

SEQ ID NO: 48814 - DNA, 22 bp, synthetic construct
  misc_feature 1..22: note = chemically synthesized
  source 1..22: mol_type = other DNA
gtttggaaaacatgggcagcgg

SEQ ID NO: 48815 - DNA, 22 bp, synthetic construct
  misc_feature 1..22: note = chemically synthesized
  source 1..22: mol_type = other DNA
ggaaaacatgggcagcggaggg

SEQ ID NO: 48816 - DNA, 22 bp, synthetic construct
  misc_feature 1..22: note = chemically synthesized
  source 1..22: mol_type = other DNA
gaaaacatgggcagcggagggt

SEQ ID NO: 48817 - DNA, 22 bp, synthetic construct
  misc_feature 1..22: note = chemically synthesized
  source 1..22: mol_type = other DNA
gagagaaggccctacccgagac

SEQ ID NO: 48818 - DNA, 22 bp, synthetic construct
  misc_feature 1..22: note = chemically synthesized
  source 1..22: mol_type = other DNA
cccgagacaggggcggggtggg

SEQ ID NO: 48819 - DNA, 22 bp, synthetic construct
  misc_feature 1..22: note = chemically synthesized
  source 1..22: mol_type = other DNA
ggagcacgaggcaatttcttta

SEQ ID NO: 48820 - DNA, 22 bp, synthetic construct
  misc_feature 1..22: note = chemically synthesized
  source 1..22: mol_type = other DNA
ctttatgacacagaactcatgc

SEQ ID NO: 48821 - DNA, 22 bp, synthetic construct
  misc_feature 1..22: note = chemically synthesized
  source 1..22: mol_type = other DNA
tttatgacacagaactcatgct

SEQ ID NO: 48822 - DNA, 22 bp, synthetic construct
  misc_feature 1..22: note = chemically synthesized
  source 1..22: mol_type = other DNA
tatgacacagaactcatgctct

SEQ ID NO: 48823 - DNA, 22 bp, synthetic construct
  misc_feature 1..22: note = chemically synthesized
  source 1..22: mol_type = other DNA
atgacacagaactcatgctcta

SEQ ID NO: 48824 - DNA, 22 bp, synthetic construct
  misc_feature 1..22: note = chemically synthesized
  source 1..22: mol_type = other DNA
tgacacagaactcatgctctag

SEQ ID NO: 48825 - DNA, 22 bp, synthetic construct
  misc_feature 1..22: note = chemically synthesized
  source 1..22: mol_type = other DNA
atgctctagtattccatctgtt

SEQ ID NO: 48826 - DNA, 22 bp, synthetic construct
  misc_feature 1..22: note = chemically synthesized
  source 1..22: mol_type = other DNA
tagtattccatctgtttcagcc

SEQ ID NO: 48827 - DNA, 22 bp, synthetic construct
  misc_feature 1..22: note = chemically synthesized
  source 1..22: mol_type = other DNA
gtattccatctgtttcagccga

SEQ ID NO: 48828 - DNA, 22 bp, synthetic construct
  misc_feature 1..22: note = chemically synthesized
  source 1..22: mol_type = other DNA
catctgtttcagccgaagaaaa

SEQ ID NO: 48829 - DNA, 22 bp, synthetic construct
  misc_feature 1..22: note = chemically synthesized
  source 1..22: mol_type = other DNA
tttcagccgaagaaaagaacca

SEQ ID NO: 48830 - DNA, 22 bp, synthetic construct
  misc_feature 1..22: note = chemically synthesized
  source 1..22: mol_type = other DNA
cagccgaagaaaagaaccagct

SEQ ID NO: 48831 - DNA, 22 bp, synthetic construct
  misc_feature 1..22: note = chemically synthesized
  source 1..22: mol_type = other DNA
agccgaagaaaagaaccagctg

SEQ ID NO: 48832 - DNA, 22 bp, synthetic construct
  misc_feature 1..22: note = chemically synthesized
  source 1..22: mol_type = other DNA
aaggggcaggggagaaggggcg

SEQ ID NO: 48833 - DNA, 22 bp, synthetic construct
  misc_feature 1..22: note = chemically synthesized
  source 1..22: mol_type = other DNA
tcgaggcccattggcgtccttt

SEQ ID NO: 48834 - DNA, 22 bp, synthetic construct
  misc_feature 1..22: note = chemically synthesized
  source 1..22: mol_type = other DNA
gaggcccattggcgtcctttag

SEQ ID NO: 48835 - DNA, 22 bp, synthetic construct
  misc_feature 1..22: note = chemically synthesized
  source 1..22: mol_type = other DNA
gcgtcctttaggactcaggcag

SEQ ID NO: 48836 - DNA, 22 bp, synthetic construct
  misc_feature 1..22: note = chemically synthesized
  source 1..22: mol_type = other DNA
taggactcaggcagggaagggc

SEQ ID NO: 48837 - DNA, 22 bp, synthetic construct
  misc_feature 1..22: note = chemically synthesized
  source 1..22: mol_type = other DNA
aggactcaggcagggaagggcc

SEQ ID NO: 48838 - DNA, 22 bp, synthetic construct
  misc_feature 1..22: note = chemically synthesized
  source 1..22: mol_type = other DNA
ggactcaggcagggaagggccc

SEQ ID NO: 48839 - DNA, 22 bp, synthetic construct
  misc_feature 1..22: note = chemically synthesized
  source 1..22: mol_type = other DNA
aggcagggaagggcccttggtg

SEQ ID NO: 48840 - DNA, 22 bp, synthetic construct
  misc_feature 1..22: note = chemically synthesized
  source 1..22: mol_type = other DNA
ggtgctctggagccggaggtgg

SEQ ID NO: 48841 - DNA, 22 bp, synthetic construct
  misc_feature 1..22: note = chemically synthesized
  source 1..22: mol_type = other DNA
gtgctctggagccggaggtggt

SEQ ID NO: 48842 - DNA, 22 bp, synthetic construct
  misc_feature 1..22: note = chemically synthesized
  source 1..22: mol_type = other DNA
tggagccggaggtggtgcgcct

SEQ ID NO: 48843 - DNA, 22 bp, synthetic construct
  misc_feature 1..22: note = chemically synthesized
  source 1..22: mol_type = other DNA
gagccggaggtggtgcgcctgg

SEQ ID NO: 48844 - DNA, 22 bp, synthetic construct
  misc_feature 1..22: note = chemically synthesized
  source 1..22: mol_type = other DNA
gtactgggaccccggagctgag

SEQ ID NO: 48845 - DNA, 22 bp, synthetic construct
  misc_feature 1..22: note = chemically synthesized
  source 1..22: mol_type = other DNA
ggaccccggagctgagcccggc

SEQ ID NO: 48846 - DNA, 22 bp, synthetic construct
  misc_feature 1..22: note = chemically synthesized
  source 1..22: mol_type = other DNA
agcccggcgcctcagcccacct

SEQ ID NO: 48847 - DNA, 22 bp, synthetic construct
  misc_feature 1..22: note = chemically synthesized
  source 1..22: mol_type = other DNA
agcccacctggctgtctgccga

SEQ ID NO: 48848 - DNA, 22 bp, synthetic construct
  misc_feature 1..22: note = chemically synthesized
  source 1..22: mol_type = other DNA
gctgtctgccgaccgtgtgcgg

SEQ ID NO: 48849 - DNA, 22 bp, synthetic construct
  misc_feature 1..22: note = chemically synthesized
  source 1..22: mol_type = other DNA
tctgccgaccgtgtgcggggcg

SEQ ID NO: 48850 - DNA, 22 bp, synthetic construct
  misc_feature 1..22: note = chemically synthesized
  source 1..22: mol_type = other DNA
ccgaccgtgtgcggggcgagtt

SEQ ID NO: 48851 - DNA, 22 bp, synthetic construct
  misc_feature 1..22: note = chemically synthesized
  source 1..22: mol_type = other DNA
gctcaacaactctgccagcttc

SEQ ID NO: 48852 - DNA, 22 bp, synthetic construct
  misc_feature 1..22: note = chemically synthesized
  source 1..22: mol_type = other DNA
ctcaacaactctgccagcttct

SEQ ID NO: 48853 - DNA, 22 bp, synthetic construct
  misc_feature 1..22: note = chemically synthesized
  source 1..22: mol_type = other DNA
aacaactctgccagcttctggc

SEQ ID NO: 48854 - DNA, 22 bp, synthetic construct
  misc_feature 1..22: note = chemically synthesized
  source 1..22: mol_type = other DNA
tgccagcttctggccctcaggc

SEQ ID NO: 48855 - DNA, 22 bp, synthetic construct
  misc_feature 1..22: note = chemically synthesized
  source 1..22: mol_type = other DNA
ccagcttctggccctcaggctg

SEQ ID NO: 48856 - DNA, 22 bp, synthetic construct
  misc_feature 1..22: note = chemically synthesized
  source 1..22: mol_type = other DNA
ctggccctcaggctgtgggaag

SEQ ID NO: 48857 - DNA, 22 bp, synthetic construct
  misc_feature 1..22: note = chemically synthesized
  source 1..22: mol_type = other DNA
tggccctcaggctgtgggaagc

SEQ ID NO: 48858 - DNA, 22 bp, synthetic construct
  misc_feature 1..22: note = chemically synthesized
  source 1..22: mol_type = other DNA
gccctcaggctgtgggaagctt

SEQ ID NO: 48859 - DNA, 22 bp, synthetic construct
  misc_feature 1..22: note = chemically synthesized
  source 1..22: mol_type = other DNA
aggctgtgggaagcttcttccc

SEQ ID NO: 48860 - DNA, 22 bp, synthetic construct
  misc_feature 1..22: note = chemically synthesized
  source 1..22: mol_type = other DNA
tgggaagcttcttcccggggcg

SEQ ID NO: 48861 - DNA, 22 bp, synthetic construct
  misc_feature 1..22: note = chemically synthesized
  source 1..22: mol_type = other DNA
cttcccggggcgagaccactag

SEQ ID NO: 48862 - DNA, 22 bp, synthetic construct
  misc_feature 1..22: note = chemically synthesized
  source 1..22: mol_type = other DNA
ttcccggggcgagaccactagc

SEQ ID NO: 48863 - DNA, 22 bp, synthetic construct
  misc_feature 1..22: note = chemically synthesized
  source 1..22: mol_type = other DNA
cccggggcgagaccactagctt

SEQ ID NO: 48864 - DNA, 22 bp, synthetic construct
  misc_feature 1..22: note = chemically synthesized
  source 1..22: mol_type = other DNA
ccggggcgagaccactagcttt

SEQ ID NO: 48865 - DNA, 22 bp, synthetic construct
  misc_feature 1..22: note = chemically synthesized
  source 1..22: mol_type = other DNA
gctttttctaagtattaccagc

SEQ ID NO: 48866 - DNA, 22 bp, synthetic construct
  misc_feature 1..22: note = chemically synthesized
  source 1..22: mol_type = other DNA
tttctaagtattaccagcccag

SEQ ID NO: 48867 - DNA, 22 bp, synthetic construct
  misc_feature 1..22: note = chemically synthesized
  source 1..22: mol_type = other DNA
ttctaagtattaccagcccagg

SEQ ID NO: 48868 - DNA, 22 bp, synthetic construct
  misc_feature 1..22: note = chemically synthesized
  source 1..22: mol_type = other DNA
tctaagtattaccagcccagga

SEQ ID NO: 48869 - DNA, 22 bp, synthetic construct
  misc_feature 1..22: note = chemically synthesized
  source 1..22: mol_type = other DNA
ctaagtattaccagcccaggac

SEQ ID NO: 48870 - DNA, 22 bp, synthetic construct
  misc_feature 1..22: note = chemically synthesized
  source 1..22: mol_type = other DNA
taagtattaccagcccaggact

SEQ ID NO: 48871 - DNA, 22 bp, synthetic construct
  misc_feature 1..22: note = chemically synthesized
  source 1..22: mol_type = other DNA
agtattaccagcccaggacttg

SEQ ID NO: 48872 - DNA, 22 bp, synthetic construct
  misc_feature 1..22: note = chemically synthesized
  source 1..22: mol_type = other DNA
ccagcccaggacttggctgagg

SEQ ID NO: 48873 - DNA, 22 bp, synthetic construct
  misc_feature 1..22: note = chemically synthesized
  source 1..22: mol_type = other DNA
ggctgaggttctgtgtccccca

SEQ ID NO: 48874 - DNA, 22 bp, synthetic construct
  misc_feature 1..22: note = chemically synthesized
  source 1..22: mol_type = other DNA
gctgaggttctgtgtcccccag

SEQ ID NO: 48875 - DNA, 22 bp, synthetic construct
  misc_feature 1..22: note = chemically synthesized
  source 1..22: mol_type = other DNA
aggttctgtgtcccccagcttg

SEQ ID NO: 48876 - DNA, 22 bp, synthetic construct
  misc_feature 1..22: note = chemically synthesized
  source 1..22: mol_type = other DNA
tgtgtcccccagcttggagtca

SEQ ID NO: 48877 - DNA, 22 bp, synthetic construct
  misc_feature 1..22: note = chemically synthesized
  source 1..22: mol_type = other DNA
tgtcccccagcttggagtcaga

SEQ ID NO: 48878 - DNA, 22 bp, synthetic construct
  misc_feature 1..22: note = chemically synthesized
  source 1..22: mol_type = other DNA
ggagtcagatgtggggttgaat

SEQ ID NO: 48879 - DNA, 22 bp, synthetic construct
  misc_feature 1..22: note = chemically synthesized
  source 1..22: mol_type = other DNA
gagtcagatgtggggttgaatc

SEQ ID NO: 48880 - DNA, 22 bp, synthetic construct
  misc_feature 1..22: note = chemically synthesized
  source 1..22: mol_type = other DNA
aatcttggcttcctctcactag

SEQ ID NO: 48881 - DNA, 22 bp, synthetic construct
  misc_feature 1..22: note = chemically synthesized
  source 1..22: mol_type = other DNA
ggcttcctctcactagctgtgg

SEQ ID NO: 48882 - DNA, 22 bp, synthetic construct
  misc_feature 1..22: note = chemically synthesized
  source 1..22: mol_type = other DNA
gcttcctctcactagctgtggt

SEQ ID NO: 48883 - DNA, 22 bp, synthetic construct
  misc_feature 1..22: note = chemically synthesized
  source 1..22: mol_type = other DNA
cctctcactagctgtggtgctt

SEQ ID NO: 48884 - DNA, 22 bp, synthetic construct
  misc_feature 1..22: note = chemically synthesized
  source 1..22: mol_type = other DNA
ctctcactagctgtggtgcttg

SEQ ID NO: 48885 - DNA, 22 bp, synthetic construct
  misc_feature 1..22: note = chemically synthesized
  source 1..22: mol_type = other DNA
tcactagctgtggtgcttgaca

SEQ ID NO: 48886 - DNA, 22 bp, synthetic construct
  misc_feature 1..22: note = chemically synthesized
  source 1..22: mol_type = other DNA
actagctgtggtgcttgacaag

SEQ ID NO: 48887 - DNA, 22 bp, synthetic construct
  misc_feature 1..22: note = chemically synthesized
  source 1..22: mol_type = other DNA
gctgtggtgcttgacaagtcac

SEQ ID NO: 48888 - DNA, 22 bp, synthetic construct
  misc_feature 1..22: note = chemically synthesized
  source 1..22: mol_type = other DNA
tggtgcttgacaagtcacttat

SEQ ID NO: 48889 - DNA, 22 bp, synthetic construct
  misc_feature 1..22: note = chemically synthesized
  source 1..22: mol_type = other DNA
gacaagtcacttatccttgagc

SEQ ID NO: 48890 - DNA, 22 bp, synthetic construct
  misc_feature 1..22: note = chemically synthesized
  source 1..22: mol_type = other DNA
acaagtcacttatccttgagcc

SEQ ID NO: 48891 - DNA, 22 bp, synthetic construct
  misc_feature 1..22: note = chemically synthesized
  source 1..22: mol_type = other DNA
atccttgagcctccattgccta

SEQ ID NO: 48892 - DNA, 22 bp, synthetic construct
  misc_feature 1..22: note = chemically synthesized
  source 1..22: mol_type = other DNA
tccttgagcctccattgcctaa

SEQ ID NO: 48893 - DNA, 22 bp, synthetic construct
  misc_feature 1..22: note = chemically synthesized
  source 1..22: mol_type = other DNA
gagcctccattgcctaatcttt

SEQ ID NO: 48894 - DNA, 22 bp, synthetic construct
  misc_feature 1..22: note = chemically synthesized
  source 1..22: mol_type = other DNA
agcctccattgcctaatcttta

SEQ ID NO: 48895 - DNA, 22 bp, synthetic construct
  misc_feature 1..22: note = chemically synthesized
  source 1..22: mol_type = other DNA
cattgcctaatctttaaaaggg

SEQ ID NO: 48896 - DNA, 22 bp, synthetic construct
  misc_feature 1..22: note = chemically synthesized
  source 1..22: mol_type = other DNA
cctaatctttaaaagggaggtg

SEQ ID NO: 48897 - DNA, 22 bp, synthetic construct
  misc_feature 1..22: note = chemically synthesized
  source 1..22: mol_type = other DNA
atctttaaaagggaggtgacaa

SEQ ID NO: 48898 - DNA, 22 bp, synthetic construct
  misc_feature 1..22: note = chemically synthesized
  source 1..22: mol_type = other DNA
taaaagggaggtgacaatcgtc

SEQ ID NO: 48899 - DNA, 22 bp, synthetic construct
  misc_feature 1..22: note = chemically synthesized
  source 1..22: mol_type = other DNA
aaaagggaggtgacaatcgtcc

SEQ ID NO: 48900 - DNA, 22 bp, synthetic construct
  misc_feature 1..22: note = chemically synthesized
  source 1..22: mol_type = other DNA
aaagggaggtgacaatcgtccc

SEQ ID NO: 48901 - DNA, 22 bp, synthetic construct
  misc_feature 1..22: note = chemically synthesized
  source 1..22: mol_type = other DNA
cggctcagtggcagcagatggg

SEQ ID NO: 48902 - DNA, 22 bp, synthetic construct
  misc_feature 1..22: note = chemically synthesized
  source 1..22: mol_type = other DNA
agtggcagcagatggggagatg

SEQ ID NO: 48903 - DNA, 22 bp, synthetic construct
  misc_feature 1..22: note = chemically synthesized
  source 1..22: mol_type = other DNA
tgttgaccatgagtgaacttac

SEQ ID NO: 48904 - DNA, 22 bp, synthetic construct
  misc_feature 1..22: note = chemically synthesized
  source 1..22: mol_type = other DNA
ttgaccatgagtgaacttacaa

SEQ ID NO: 48905 - DNA, 22 bp, synthetic construct
  misc_feature 1..22: note = chemically synthesized
  source 1..22: mol_type = other DNA
accatgagtgaacttacaatgc

SEQ ID NO: 48906 - DNA, 22 bp, synthetic construct
  misc_feature 1..22: note = chemically synthesized
  source 1..22: mol_type = other DNA
acaatgcaagccccggggggat

SEQ ID NO: 48907 - DNA, 22 bp, synthetic construct
  misc_feature 1..22: note = chemically synthesized
  source 1..22: mol_type = other DNA
caatgcaagccccggggggatc

SEQ ID NO: 48908 - DNA, 22 bp, synthetic construct
  misc_feature 1..22: note = chemically synthesized
  source 1..22: mol_type = other DNA
gcagttttgtccctgtctgcag

SEQ ID NO: 48909 - DNA, 22 bp, synthetic construct
  misc_feature 1..22: note = chemically synthesized
  source 1..22: mol_type = other DNA
cagttttgtccctgtctgcagt

SEQ ID NO: 48910 - DNA, 22 bp, synthetic construct
  misc_feature 1..22: note = chemically synthesized
  source 1..22: mol_type = other DNA
tgtccctgtctgcagtgtgacc

SEQ ID NO: 48911 - DNA, 22 bp, synthetic construct
  misc_feature 1..22: note = chemically synthesized
  source 1..22: mol_type = other DNA
gtccctgtctgcagtgtgacct

SEQ ID NO: 48912 - DNA, 22 bp, synthetic construct
  misc_feature 1..22: note = chemically synthesized
  source 1..22: mol_type = other DNA
tccctgtctgcagtgtgacctg

SEQ ID NO: 48913 - DNA, 22 bp, synthetic construct
  misc_feature 1..22: note = chemically synthesized
  source 1..22: mol_type = other DNA
tctgcagtgtgacctgttggtg

SEQ ID NO: 48914 - DNA, 22 bp, synthetic construct
  misc_feature 1..22: note = chemically synthesized
  source 1..22: mol_type = other DNA
cagtgtgacctgttggtgacat

SEQ ID NO: 48915 - DNA, 22 bp, synthetic construct
  misc_feature 1..22: note = chemically synthesized
  source 1..22: mol_type = other DNA
ttggtgacattgtctttgctcc

SEQ ID NO: 48916 - DNA, 22 bp, synthetic construct
  misc_feature 1..22: note = chemically synthesized
  source 1..22: mol_type = other DNA
gtgacattgtctttgctccaaa

SEQ ID NO: 48917 - DNA, 22 bp, synthetic construct
  misc_feature 1..22: note = chemically synthesized
  source 1..22: mol_type = other DNA
tctttgctccaaaccacagctc

SEQ ID NO: 48918 - DNA, 22 bp, synthetic construct
  misc_feature 1..22: note = chemically synthesized
  source 1..22: mol_type = other DNA
tgctccaaaccacagctcctgg

SEQ ID NO: 48919 - DNA, 22 bp, synthetic construct
  misc_feature 1..22: note = chemically synthesized
  source 1..22: mol_type = other DNA
gctccaaaccacagctcctggg

SEQ ID NO: 48920 - DNA, 22 bp, synthetic construct
  misc_feature 1..22: note = chemically synthesized
  source 1..22: mol_type = other DNA
ctccaaaccacagctcctgggg

SEQ ID NO: 48921 - DNA, 22 bp, synthetic construct
  misc_feature 1..22: note = chemically synthesized
  source 1..22: mol_type = other DNA
caaaccacagctcctggggcag

SEQ ID NO: 48922 - DNA, 22 bp, synthetic construct
  misc_feature 1..22: note = chemically synthesized
  source 1..22: mol_type = other DNA
ctggggcagaggggaaaattct

SEQ ID NO: 48923 - DNA, 22 bp, synthetic construct
  misc_feature 1..22: note = chemically synthesized
  source 1..22: mol_type = other DNA
gggcagaggggaaaattctgcc

SEQ ID NO: 48924 - DNA, 22 bp, synthetic construct
  misc_feature 1..22: note = chemically synthesized
  source 1..22: mol_type = other DNA
tgccactcacagctgcctgccc

SEQ ID NO: 48925 - DNA, 22 bp, synthetic construct
  misc_feature 1..22: note = chemically synthesized
  source 1..22: mol_type = other DNA
ccactcacagctgcctgcccac

SEQ ID NO: 48926 - DNA, 22 bp, synthetic construct
  misc_feature 1..22: note = chemically synthesized
  source 1..22: mol_type = other DNA
acagctgcctgcccacgcttct

SEQ ID NO: 48927 - DNA, 22 bp, synthetic construct
  misc_feature 1..22: note = chemically synthesized
  source 1..22: mol_type = other DNA
cctgcccacgcttctgtctgag

SEQ ID NO: 48928 - DNA, 22 bp, synthetic construct
  misc_feature 1..22: note = chemically synthesized
  source 1..22: mol_type = other DNA
cccacgcttctgtctgagtgtg

SEQ ID NO: 48929 - DNA, 22 bp, synthetic construct
  misc_feature 1..22: note = chemically synthesized
  source 1..22: mol_type = other DNA
ctgtctgagtgtgctgggtggc

SEQ ID NO: 48930 - DNA, 22 bp, synthetic construct
  misc_feature 1..22: note = chemically synthesized
  source 1..22: mol_type = other DNA
tgtctgagtgtgctgggtggca

SEQ ID NO: 48931 - DNA, 22 bp, synthetic construct
  misc_feature 1..22: note = chemically synthesized
  source 1..22: mol_type = other DNA
tctgagtgtgctgggtggcagg

SEQ ID NO: 48932 - DNA, 22 bp, synthetic construct
  misc_feature 1..22: note = chemically synthesized
  source 1..22: mol_type = other DNA
agtgtgctgggtggcaggatgg

SEQ ID NO: 48933 - DNA, 22 bp, synthetic construct
  misc_feature 1..22: note = chemically synthesized
  source 1..22: mol_type = other DNA
ggtggcaggatggcaagtcctt

SEQ ID NO: 48934 - DNA, 22 bp, synthetic construct
  misc_feature 1..22: note = chemically synthesized
  source 1..22: mol_type = other DNA
actcagctcagtatagccctct

SEQ ID NO: 48935 - DNA, 22 bp, synthetic construct
  misc_feature 1..22: note = chemically synthesized
  source 1..22: mol_type = other DNA
ctcagctcagtatagccctctt

SEQ ID NO: 48936 - DNA, 22 bp, synthetic construct
  misc_feature 1..22: note = chemically synthesized
  source 1..22: mol_type = other DNA
agctcagtatagccctcttcct

SEQ ID NO: 48937 - DNA, 22 bp, synthetic construct
  misc_feature 1..22: note = chemically synthesized
  source 1..22: mol_type = other DNA
agtatagccctcttccttgttc

SEQ ID NO: 48938 - DNA, 22 bp, synthetic construct
  misc_feature 1..22: note = chemically synthesized
  source 1..22: mol_type = other DNA
ttccttgttccctgagcctttg

SEQ ID NO: 48939 - DNA, 22 bp, synthetic construct
  misc_feature 1..22: note = chemically synthesized
  source 1..22: mol_type = other DNA
ccttgttccctgagcctttgac

SEQ ID NO: 48940 - DNA, 22 bp, synthetic construct
  misc_feature 1..22: note = chemically synthesized
  source 1..22: mol_type = other DNA
cttgttccctgagcctttgact

SEQ ID NO: 48941 - DNA, 22 bp, synthetic construct
  misc_feature 1..22: note = chemically synthesized
  source 1..22: mol_type = other DNA
gttccctgagcctttgactttc

SEQ ID NO: 48942 - DNA, 22 bp, synthetic construct
  misc_feature 1..22: note = chemically synthesized
  source 1..22: mol_type = other DNA
ttccctgagcctttgactttct

SEQ ID NO: 48943 - DNA, 22 bp, synthetic construct
  misc_feature 1..22: note = chemically synthesized
  source 1..22: mol_type = other DNA
cctgagcctttgactttctcga

SEQ ID NO: 48944 - DNA, 22 bp, synthetic construct
  misc_feature 1..22: note = chemically synthesized
  source 1..22: mol_type = other DNA
agcctttgactttctcgaggga

SEQ ID NO: 48945 - DNA, 22 bp, synthetic construct
  misc_feature 1..22: note = chemically synthesized
  source 1..22: mol_type = other DNA
tgactttctcgagggatgttgt

SEQ ID NO: 48946 - DNA, 22 bp, synthetic construct
  misc_feature 1..22: note = chemically synthesized
  source 1..22: mol_type = other DNA
gactttctcgagggatgttgtg

SEQ ID NO: 48947 - DNA, 22 bp, synthetic construct
  misc_feature 1..22: note = chemically synthesized
  source 1..22: mol_type = other DNA
actttctcgagggatgttgtgg

SEQ ID NO: 48948 - DNA, 22 bp, synthetic construct
  misc_feature 1..22: note = chemically synthesized
  source 1..22: mol_type = other DNA
tctcgagggatgttgtggggtt

SEQ ID NO: 48949 - DNA, 22 bp, synthetic construct
  misc_feature 1..22: note = chemically synthesized
  source 1..22: mol_type = other DNA
ctcgagggatgttgtggggttg

SEQ ID NO: 48950 - DNA, 22 bp, synthetic construct
  misc_feature 1..22: note = chemically synthesized
  source 1..22: mol_type = other DNA
tcgagggatgttgtggggttgt

SEQ ID NO: 48951 - DNA, 22 bp, synthetic construct
  misc_feature 1..22: note = chemically synthesized
  source 1..22: mol_type = other DNA
gagggatgttgtggggttgtgg

SEQ ID NO: 48952 - DNA, 22 bp, synthetic construct
  misc_feature 1..22: note = chemically synthesized
  source 1..22: mol_type = other DNA
tggggttgtggccaggataaga

SEQ ID NO: 48953 - DNA, 22 bp, synthetic construct
  misc_feature 1..22: note = chemically synthesized
  source 1..22: mol_type = other DNA
tggccaggataagaaagggcat

SEQ ID NO: 48954 - DNA, 22 bp, synthetic construct
  misc_feature 1..22: note = chemically synthesized
  source 1..22: mol_type = other DNA
caagttaccactgctccaaaac

SEQ ID NO: 48955 - DNA, 22 bp, synthetic construct
  misc_feature 1..22: note = chemically synthesized
  source 1..22: mol_type = other DNA
aagttaccactgctccaaaaca

SEQ ID NO: 48956 - DNA, 22 bp, synthetic construct
  misc_feature 1..22: note = chemically synthesized
  source 1..22: mol_type = other DNA
ccactgctccaaaacaactgtt

SEQ ID NO: 48957 - DNA, 22 bp, synthetic construct
  misc_feature 1..22: note = chemically synthesized
  source 1..22: mol_type = other DNA
ctccaaaacaactgttctggaa

SEQ ID NO: 48958 - DNA, 22 bp, synthetic construct
  misc_feature 1..22: note = chemically synthesized
  source 1..22: mol_type = other DNA
caaaacaactgttctggaaata

SEQ ID NO: 48959 - DNA, 22 bp, synthetic construct
  misc_feature 1..22: note = chemically synthesized
  source 1..22: mol_type = other DNA
ttctggaaatagtgagtacccc

SEQ ID NO: 48960 - DNA, 22 bp, synthetic construct
  misc_feature 1..22: note = chemically synthesized
  source 1..22: mol_type = other DNA
tggaaatagtgagtaccccatc

SEQ ID NO: 48961 - DNA, 22 bp, synthetic construct
  misc_feature 1..22: note = chemically synthesized
  source 1..22: mol_type = other DNA
gaaatagtgagtaccccatcct

SEQ ID NO: 48962 - DNA, 22 bp, synthetic construct
  misc_feature 1..22: note = chemically synthesized
  source 1..22: mol_type = other DNA
agaggtgagtaagcagaggctg

SEQ ID NO: 48963 - DNA, 22 bp, synthetic construct
  misc_feature 1..22: note = chemically synthesized
  source 1..22: mol_type = other DNA
tatgaccacctgaaccaagccc

SEQ ID NO: 48964 - DNA, 22 bp, synthetic construct
  misc_feature 1..22: note = chemically synthesized
  source 1..22: mol_type = other DNA
aaccaagcccttgaggatgttt

SEQ ID NO: 48965 - DNA, 22 bp, synthetic construct
  misc_feature 1..22: note = chemically synthesized
  source 1..22: mol_type = other DNA
gaggatgtttcttctctggtgg

SEQ ID NO: 48966 - DNA, 22 bp, synthetic construct
  misc_feature 1..22: note = chemically synthesized
  source 1..22: mol_type = other DNA
aggatgtttcttctctggtgga

SEQ ID NO: 48967 - DNA, 22 bp, synthetic construct
  misc_feature 1..22: note = chemically synthesized
  source 1..22: mol_type = other DNA
cttctctggtggaagtttggaa

SEQ ID NO: 48968 - DNA, 22 bp, synthetic construct
  misc_feature 1..22: note = chemically synthesized
  source 1..22: mol_type = other DNA
ttctctggtggaagtttggaac

SEQ ID NO: 48969 - DNA, 22 bp, synthetic construct
  misc_feature 1..22: note = chemically synthesized
  source 1..22: mol_type = other DNA
ctctggtggaagtttggaacag

SEQ ID NO: 48970 - DNA, 22 bp, synthetic construct
  misc_feature 1..22: note = chemically synthesized
  source 1..22: mol_type = other DNA
tctggtggaagtttggaacagg

SEQ ID NO: 48971 - DNA, 22 bp, synthetic construct
  misc_feature 1..22: note = chemically synthesized
  source 1..22: mol_type = other DNA
tggtggaagtttggaacaggag

SEQ ID NO: 48972 - DNA, 22 bp, synthetic construct
  misc_feature 1..22: note = chemically synthesized
  source 1..22: mol_type = other DNA
gtggaagtttggaacaggagcc

SEQ ID NO: 48973 - DNA, 22 bp, synthetic construct
  misc_feature 1..22: note = chemically synthesized
  source 1..22: mol_type = other DNA
ggaacaggagcctcctcaagtt

SEQ ID NO: 48974 - DNA, 22 bp, synthetic construct
  misc_feature 1..22: note = chemically synthesized
  source 1..22: mol_type = other DNA
gaacaggagcctcctcaagttc

SEQ ID NO: 48975 - DNA, 22 bp, synthetic construct
  misc_feature 1..22: note = chemically synthesized
  source 1..22: mol_type = other DNA
ctcaagttcatttattcattca

SEQ ID NO: 48976 - DNA, 22 bp, synthetic construct
  misc_feature 1..22: note = chemically synthesized
  source 1..22: mol_type = other DNA
aagttcatttattcattcattc

SEQ ID NO: 48977 - DNA, 22 bp, synthetic construct
  misc_feature 1..22: note = chemically synthesized
  source 1..22: mol_type = other DNA
atttattcattcattcaatggt

SEQ ID NO: 48978 - DNA, 22 bp, synthetic construct
  misc_feature 1..22: note = chemically synthesized
  source 1..22: mol_type = other DNA
attcattcattcaatggttatt

SEQ ID NO: 48979 - DNA, 22 bp, synthetic construct
  misc_feature 1..22: note = chemically synthesized
  source 1..22: mol_type = other DNA
ttcattcattcaatggttattt

SEQ ID NO: 48980 - DNA, 22 bp, synthetic construct
  misc_feature 1..22: note = chemically synthesized
  source 1..22: mol_type = other DNA
attcattcaatggttattttgt

SEQ ID NO: 48981 - DNA, 22 bp, synthetic construct
  misc_feature 1..22: note = chemically synthesized
  source 1..22: mol_type = other DNA
attcaatggttattttgtggga

SEQ ID NO: 48982 - DNA, 22 bp, synthetic construct
  misc_feature 1..22: note = chemically synthesized
  source 1..22: mol_type = other DNA
aatggttattttgtgggaatcg

SEQ ID NO: 48983 - DNA, 22 bp, synthetic construct
  misc_feature 1..22: note = chemically synthesized
  source 1..22: mol_type = other DNA
ttttgtgggaatcgaatttaga

SEQ ID NO: 48984 - DNA, 22 bp, synthetic construct
  misc_feature 1..22: note = chemically synthesized
  source 1..22: mol_type = other DNA
tgtgggaatcgaatttagaatg

SEQ ID NO: 48985 - DNA, 22 bp, synthetic construct
  misc_feature 1..22: note = chemically synthesized
  source 1..22: mol_type = other DNA
gtgggaatcgaatttagaatga

SEQ ID NO: 48986 - DNA, 22 bp, synthetic construct
  misc_feature 1..22: note = chemically synthesized
  source 1..22: mol_type = other DNA
tgggaatcgaatttagaatgaa

SEQ ID NO: 48987 - DNA, 22 bp, synthetic construct
  misc_feature 1..22: note = chemically synthesized
  source 1..22: mol_type = other DNA
agaatgaaaatattttttggca

SEQ ID NO: 48988 - DNA, 22 bp, synthetic construct
  misc_feature 1..22: note = chemically synthesized
  source 1..22: mol_type = other DNA
gaatgaaaatattttttggcaa

SEQ ID NO: 48989 - DNA, 22 bp, synthetic construct
  misc_feature 1..22: note = chemically synthesized
  source 1..22: mol_type = other DNA
tttggcaagcagaaaataattt

SEQ ID NO: 48990 - DNA, 22 bp, synthetic construct
  misc_feature 1..22: note = chemically synthesized
  source 1..22: mol_type = other DNA
ttggcaagcagaaaataatttt

SEQ ID NO: 48991 - DNA, 22 bp, synthetic construct
  misc_feature 1..22: note = chemically synthesized
  source 1..22: mol_type = other DNA
tggcaagcagaaaataattttt

SEQ ID NO: 48992 - DNA, 22 bp, synthetic construct
  misc_feature 1..22: note = chemically synthesized
  source 1..22: mol_type = other DNA
ggcaagcagaaaataattttta

SEQ ID NO: 48993 - DNA, 22 bp, synthetic construct
  misc_feature 1..22: note = chemically synthesized
  source 1..22: mol_type = other DNA
gcaagcagaaaataatttttag

SEQ ID NO: 48994 - DNA, 22 bp, synthetic construct
  misc_feature 1..22: note = chemically synthesized
  source 1..22: mol_type = other DNA
ttagaccaatccttttctttta

SEQ ID NO: 48995 - DNA, 22 bp, synthetic construct
  misc_feature 1..22: note = chemically synthesized
  source 1..22: mol_type = other DNA
tagaccaatccttttcttttag

SEQ ID NO: 48996 - DNA, 22 bp, synthetic construct
  misc_feature 1..22: note = chemically synthesized
  source 1..22: mol_type = other DNA
agaccaatccttttcttttagt

SEQ ID NO: 48997 - DNA, 22 bp, synthetic construct
  misc_feature 1..22: note = chemically synthesized
  source 1..22: mol_type = other DNA
gaccaatccttttcttttagtc

SEQ ID NO: 48998 - DNA, 22 bp, synthetic construct
  misc_feature 1..22: note = chemically synthesized
  source 1..22: mol_type = other DNA
ttcttttagtcatgagaaactg

SEQ ID NO: 48999 - DNA, 22 bp, synthetic construct
  misc_feature 1..22: note = chemically synthesized
  source 1..22: mol_type = other DNA
tcttttagtcatgagaaactga

SEQ ID NO: 49000 - DNA, 22 bp, synthetic construct
  misc_feature 1..22: note = chemically synthesized
  source 1..22: mol_type = other DNA
cttttagtcatgagaaactgag

SEQ ID NO: 49001 - DNA, 22 bp, synthetic construct
  misc_feature 1..22: note = chemically synthesized
  source 1..22: mol_type = other DNA
ttttagtcatgagaaactgagg

SEQ ID NO: 49002 - DNA, 22 bp, synthetic construct
  misc_feature 1..22: note = chemically synthesized
  source 1..22: mol_type = other DNA
ttagtcatgagaaactgaggcc

SEQ ID NO: 49003 - DNA, 22 bp, synthetic construct
  misc_feature 1..22: note = chemically synthesized
  source 1..22: mol_type = other DNA
tagtcatgagaaactgaggccc

SEQ ID NO: 49004 - DNA, 22 bp, synthetic construct
  misc_feature 1..22: note = chemically synthesized
  source 1..22: mol_type = other DNA
agtcatgagaaactgaggccca

SEQ ID NO: 49005 - DNA, 22 bp, synthetic construct
  misc_feature 1..22: note = chemically synthesized
  source 1..22: mol_type = other DNA
gtcatgagaaactgaggcccag

SEQ ID NO: 49006 - DNA, 22 bp, synthetic construct
  misc_feature 1..22: note = chemically synthesized
  source 1..22: mol_type = other DNA
aggcccagagagaggaggtcac

SEQ ID NO: 49007 - DNA, 22 bp, synthetic construct
  misc_feature 1..22: note = chemically synthesized
  source 1..22: mol_type = other DNA
gaactgggtttccagaactgac

SEQ ID NO: 49008 - DNA, 22 bp, synthetic construct
  misc_feature 1..22: note = chemically synthesized
  source 1..22: mol_type = other DNA
ggtttccagaactgacactcca

SEQ ID NO: 49009 - DNA, 22 bp, synthetic construct
  misc_feature 1..22: note = chemically synthesized
  source 1..22: mol_type = other DNA
ccagaactgacactccactgca

SEQ ID NO: 49010 - DNA, 22 bp, synthetic construct
  misc_feature 1..22: note = chemically synthesized
  source 1..22: mol_type = other DNA
cagaactgacactccactgcac

SEQ ID NO: 49011 - DNA, 22 bp, synthetic construct
  misc_feature 1..22: note = chemically synthesized
  source 1..22: mol_type = other DNA
acactccactgcacagagtact

SEQ ID NO: 49012 - DNA, 22 bp, synthetic construct
  misc_feature 1..22: note = chemically synthesized
  source 1..22: mol_type = other DNA
cactgcacagagtactctccca

SEQ ID NO: 49013 - DNA, 22 bp, synthetic construct
  misc_feature 1..22: note = chemically synthesized
  source 1..22: mol_type = other DNA
cacagagtactctcccaattca

SEQ ID NO: 49014 - DNA, 22 bp, synthetic construct
  misc_feature 1..22: note = chemically synthesized
  source 1..22: mol_type = other DNA
tcccaattcattcaatttttat

SEQ ID NO: 49015 - DNA, 22 bp, synthetic construct
  misc_feature 1..22: note = chemically synthesized
  source 1..22: mol_type = other DNA
ccaattcattcaatttttattt

SEQ ID NO: 49016 - DNA, 22 bp, synthetic construct
  misc_feature 1..22: note = chemically synthesized
  source 1..22: mol_type = other DNA
attcaatttttatttagcggaa

SEQ ID NO: 49017 - DNA, 22 bp, synthetic construct
  misc_feature 1..22: note = chemically synthesized
  source 1..22: mol_type = other DNA
aatttttatttagcggaaggca

SEQ ID NO: 49018 - DNA, 22 bp, synthetic construct
  misc_feature 1..22: note = chemically synthesized
  source 1..22: mol_type = other DNA
ttatttagcggaaggcattttc

SEQ ID NO: 49019 - DNA, 22 bp, synthetic construct
  misc_feature 1..22: note = chemically synthesized
  source 1..22: mol_type = other DNA
tatttagcggaaggcattttca

SEQ ID NO: 49020 - DNA, 22 bp, synthetic construct
  misc_feature 1..22: note = chemically synthesized
  source 1..22: mol_type = other DNA
atttagcggaaggcattttcag

SEQ ID NO: 49021 - DNA, 22 bp, synthetic construct
  misc_feature 1..22: note = chemically synthesized
  source 1..22: mol_type = other DNA
tttagcggaaggcattttcaga

SEQ ID NO: 49022 - DNA, 22 bp, synthetic construct
  misc_feature 1..22: note = chemically synthesized
  source 1..22: mol_type = other DNA
agcggaaggcattttcagatgg

SEQ ID NO: 49023 - DNA, 22 bp, synthetic construct
  misc_feature 1..22: note = chemically synthesized
  source 1..22: mol_type = other DNA
gcggaaggcattttcagatggg

SEQ ID NO: 49024 - DNA, 22 bp, synthetic construct
  misc_feature 1..22: note = chemically synthesized
  source 1..22: mol_type = other DNA
tcagatgggtctttgaagcatt

SEQ ID NO: 49025 - DNA, 22 bp, synthetic construct
  misc_feature 1..22: note = chemically synthesized
  source 1..22: mol_type = other DNA
cagatgggtctttgaagcatta

SEQ ID NO: 49026 - DNA, 22 bp, synthetic construct
  misc_feature 1..22: note = chemically synthesized
  source 1..22: mol_type = other DNA
agatgggtctttgaagcattag

SEQ ID NO: 49027 - DNA, 22 bp, synthetic construct
  misc_feature 1..22: note = chemically synthesized
  source 1..22: mol_type = other DNA
tgaagcattagtaggagttcag

SEQ ID NO: 49028 - DNA, 22 bp, synthetic construct
  misc_feature 1..22: note = chemically synthesized
  source 1..22: mol_type = other DNA
gaagcattagtaggagttcagc

SEQ ID NO: 49029 - DNA, 22 bp, synthetic construct
  misc_feature 1..22: note = chemically synthesized
  source 1..22: mol_type = other DNA
aagcattagtaggagttcagcg

SEQ ID NO: 49030 - DNA, 22 bp, synthetic construct
  misc_feature 1..22: note = chemically synthesized
  source 1..22: mol_type = other DNA
gtaggagttcagcgatgatggt

SEQ ID NO: 49031 - DNA, 22 bp, synthetic construct
  misc_feature 1..22: note = chemically synthesized
  source 1..22: mol_type = other DNA
agcgatgatggtgtcatgagaa

SEQ ID NO: 49032 - DNA, 22 bp, synthetic construct
  misc_feature 1..22: note = chemically synthesized
  source 1..22: mol_type = other DNA
tattctaggattaggaggtacc

SEQ ID NO: 49033 - DNA, 22 bp, synthetic construct
  misc_feature 1..22: note = chemically synthesized
  source 1..22: mol_type = other DNA
attctaggattaggaggtacca

SEQ ID NO: 49034 - DNA, 22 bp, synthetic construct
  misc_feature 1..22: note = chemically synthesized
  source 1..22: mol_type = other DNA
ttctaggattaggaggtaccat

SEQ ID NO: 49035 - DNA, 22 bp, synthetic construct
  misc_feature 1..22: note = chemically synthesized
  source 1..22: mol_type = other DNA
taggattaggaggtaccatgaa

SEQ ID NO: 49036 - DNA, 22 bp, synthetic construct
  misc_feature 1..22: note = chemically synthesized
  source 1..22: mol_type = other DNA
ggattaggaggtaccatgaaca

SEQ ID NO: 49037 - DNA, 22 bp, synthetic construct
  misc_feature 1..22: note = chemically synthesized
  source 1..22: mol_type = other DNA
ggaggtaccatgaacaaagata

SEQ ID NO: 49038 - DNA, 22 bp, synthetic construct
  misc_feature 1..22: note = chemically synthesized
  source 1..22: mol_type = other DNA
ggaaaaccagaggtggaagata

SEQ ID NO: 49039 - DNA, 22 bp, synthetic construct
  misc_feature 1..22: note = chemically synthesized
  source 1..22: mol_type = other DNA
tttttcttttttttttgagatg

SEQ ID NO: 49040 - DNA, 22 bp, synthetic construct
  misc_feature 1..22: note = chemically synthesized
  source 1..22: mol_type = other DNA
tttcttttttttttgagatgga

SEQ ID NO: 49041 - DNA, 22 bp, synthetic construct
  misc_feature 1..22: note = chemically synthesized
  source 1..22: mol_type = other DNA
ttcttttttttttgagatggag

SEQ ID NO: 49042 - DNA, 22 bp, synthetic construct
  misc_feature 1..22: note = chemically synthesized
  source 1..22: mol_type = other DNA
tcttttttttttgagatggagt

SEQ ID NO: 49043 - DNA, 22 bp, synthetic construct
  misc_feature 1..22: note = chemically synthesized
  source 1..22: mol_type = other DNA
cttttttttttgagatggagtt

SEQ ID NO: 49044 - DNA, 22 bp, synthetic construct
  misc_feature 1..22: note = chemically synthesized
  source 1..22: mol_type = other DNA
ttttttttttgagatggagttt

SEQ ID NO: 49045 - DNA, 22 bp, synthetic construct
  misc_feature 1..22: note = chemically synthesized
  source 1..22: mol_type = other DNA
ttttttttgagatggagtttcg

SEQ ID NO: 49046 - DNA, 22 bp, synthetic construct
  misc_feature 1..22: note = chemically synthesized
  source 1..22: mol_type = other DNA
tttttttgagatggagtttcgc

SEQ ID NO: 49047 - DNA, 22 bp, synthetic construct
  misc_feature 1..22: note = chemically synthesized
  source 1..22: mol_type = other DNA
ttttttgagatggagtttcgct

SEQ ID NO: 49048 - DNA, 22 bp, synthetic construct
  misc_feature 1..22: note = chemically synthesized
  source 1..22: mol_type = other DNA
tttttgagatggagtttcgctc

SEQ ID NO: 49049 - DNA, 22 bp, synthetic construct
  misc_feature 1..22: note = chemically synthesized
  source 1..22: mol_type = other DNA
ttttgagatggagtttcgctct

SEQ ID NO: 49050 - DNA, 22 bp, synthetic construct
  misc_feature 1..22: note = chemically synthesized
  source 1..22: mol_type = other DNA
tttgagatggagtttcgctctt

SEQ ID NO: 49051 - DNA, 22 bp, synthetic construct
  misc_feature 1..22: note = chemically synthesized
  source 1..22: mol_type = other DNA
ttgagatggagtttcgctcttg

SEQ ID NO: 49052 - DNA, 22 bp, synthetic construct
  misc_feature 1..22: note = chemically synthesized
  source 1..22: mol_type = other DNA
tgagatggagtttcgctcttgt

SEQ ID NO: 49053 - DNA, 22 bp, synthetic construct
  misc_feature 1..22: note = chemically synthesized
  source 1..22: mol_type = other DNA
gagatggagtttcgctcttgtt

SEQ ID NO: 49054 - DNA, 22 bp, synthetic construct
  misc_feature 1..22: note = chemically synthesized
  source 1..22: mol_type = other DNA
agatggagtttcgctcttgttg

SEQ ID NO: 49055 - DNA, 22 bp, synthetic construct
  misc_feature 1..22: note = chemically synthesized
  source 1..22: mol_type = other DNA
cgctcttgttgcccaggctgga

SEQ ID NO: 49056 - DNA, 22 bp, synthetic construct
  misc_feature 1..22: note = chemically synthesized
  source 1..22: mol_type = other DNA
gctcttgttgcccaggctggag

SEQ ID NO: 49057 - DNA, 22 bp, synthetic construct
  misc_feature 1..22: note = chemically synthesized
  source 1..22: mol_type = other DNA
ttgttgcccaggctggagtgca

SEQ ID NO: 49058 - DNA, 22 bp, synthetic construct
  misc_feature 1..22: note = chemically synthesized
  source 1..22: mol_type = other DNA
gttgcccaggctggagtgcaat

SEQ ID NO: 49059 - DNA, 22 bp, synthetic construct
  misc_feature 1..22: note = chemically synthesized
  source 1..22: mol_type = other DNA
ttgcccaggctggagtgcaatg

SEQ ID NO: 49060 - DNA, 22 bp, synthetic construct
  misc_feature 1..22: note = chemically synthesized
  source 1..22: mol_type = other DNA
cccaggctggagtgcaatggtg

SEQ ID NO: 49061 - DNA, 22 bp, synthetic construct
  misc_feature 1..22: note = chemically synthesized
  source 1..22: mol_type = other DNA
gagtgcaatggtgcagtctcag

SEQ ID NO: 49062 - DNA, 22 bp, synthetic construct
  misc_feature 1..22: note = chemically synthesized
  source 1..22: mol_type = other DNA
agctcactgcaacatctgtctc

SEQ ID NO: 49063 - DNA, 22 bp, synthetic construct
  misc_feature 1..22: note = chemically synthesized
  source 1..22: mol_type = other DNA
actgcaacatctgtctcccggg

SEQ ID NO: 49064 - DNA, 22 bp, synthetic construct
  misc_feature 1..22: note = chemically synthesized
  source 1..22: mol_type = other DNA
caacatctgtctcccgggttca

SEQ ID NO: 49065 - DNA, 22 bp, synthetic construct
  misc_feature 1..22: note = chemically synthesized
  source 1..22: mol_type = other DNA
tctcccgggttcaagtggttct

SEQ ID NO: 49066 - DNA, 22 bp, synthetic construct
  misc_feature 1..22: note = chemically synthesized
  source 1..22: mol_type = other DNA
ccgggttcaagtggttctcctg

SEQ ID NO: 49067 - DNA, 22 bp, synthetic construct
  misc_feature 1..22: note = chemically synthesized
  source 1..22: mol_type = other DNA
aagtggttctcctgcctcagcc

SEQ ID NO: 49068 - DNA, 22 bp, synthetic construct
  misc_feature 1..22: note = chemically synthesized
  source 1..22: mol_type = other DNA
tcctgcctcagcctcccaagaa

SEQ ID NO: 49069 - DNA, 22 bp, synthetic construct
  misc_feature 1..22: note = chemically synthesized
  source 1..22: mol_type = other DNA
ctgcctcagcctcccaagaagc

SEQ ID NO: 49070 - DNA, 22 bp, synthetic construct
  misc_feature 1..22: note = chemically synthesized
  source 1..22: mol_type = other DNA
cctcagcctcccaagaagctgg

SEQ ID NO: 49071 - DNA, 22 bp, synthetic construct
  misc_feature 1..22: note = chemically synthesized
  source 1..22: mol_type = other DNA
agcctcccaagaagctgggatt

SEQ ID NO: 49072 - DNA, 22 bp, synthetic construct
  misc_feature 1..22: note = chemically synthesized
  source 1..22: mol_type = other DNA
ccaagaagctgggattacaggt

SEQ ID NO: 49073 - DNA, 22 bp, synthetic construct
  misc_feature 1..22: note = chemically synthesized
  source 1..22: mol_type = other DNA
ggattacaggtacctgccacca

SEQ ID NO: 49074 - DNA, 22 bp, synthetic construct
  misc_feature 1..22: note = chemically synthesized
  source 1..22: mol_type = other DNA
caggtacctgccaccacgcccg

SEQ ID NO: 49075 - DNA, 22 bp, synthetic construct
  misc_feature 1..22: note = chemically synthesized
  source 1..22: mol_type = other DNA
ccaccacgcccggctaattttt

SEQ ID NO: 49076 - DNA, 22 bp, synthetic construct
  misc_feature 1..22: note = chemically synthesized
  source 1..22: mol_type = other DNA
atttttgtatttttagtagaga

SEQ ID NO: 49077 - DNA, 22 bp, synthetic construct
  misc_feature 1..22: note = chemically synthesized
  source 1..22: mol_type = other DNA
ttgtatttttagtagagaaggg

SEQ ID NO: 49078 - DNA, 22 bp, synthetic construct
  misc_feature 1..22: note = chemically synthesized
  source 1..22: mol_type = other DNA
tgtatttttagtagagaagggg

SEQ ID NO: 49079 - DNA, 22 bp, synthetic construct
  misc_feature 1..22: note = chemically synthesized
  source 1..22: mol_type = other DNA
gtatttttagtagagaaggggt

SEQ ID NO: 49080 - DNA, 22 bp, synthetic construct
  misc_feature 1..22: note = chemically synthesized
  source 1..22: mol_type = other DNA
tatttttagtagagaaggggtt

SEQ ID NO: 49081 - DNA, 22 bp, synthetic construct
  misc_feature 1..22: note = chemically synthesized
  source 1..22: mol_type = other DNA
ttagtagagaaggggtttcacc

SEQ ID NO: 49082 - DNA, 22 bp, synthetic construct
  misc_feature 1..22: note = chemically synthesized
  source 1..22: mol_type = other DNA
tagtagagaaggggtttcacca

SEQ ID NO: 49083 - DNA, 22 bp, synthetic construct
  misc_feature 1..22: note = chemically synthesized
  source 1..22: mol_type = other DNA
agtagagaaggggtttcaccac

SEQ ID NO: 49084 - DNA, 22 bp, synthetic construct
  misc_feature 1..22: note = chemically synthesized
  source 1..22: mol_type = other DNA
gtagagaaggggtttcaccacg

SEQ ID NO: 49085 - DNA, 22 bp, synthetic construct
  misc_feature 1..22: note = chemically synthesized
  source 1..22: mol_type = other DNA
caccacgttggccaggctagtc

SEQ ID NO: 49086 - DNA, 22 bp, synthetic construct
  misc_feature 1..22: note = chemically synthesized
  source 1..22: mol_type = other DNA
accacgttggccaggctagtcg

SEQ ID NO: 49087 - DNA, 22 bp, synthetic construct
  misc_feature 1..22: note = chemically synthesized
  source 1..22: mol_type = other DNA
gccaggctagtcgcaaactcct

SEQ ID NO: 49088 - DNA, 22 bp, synthetic construct
  misc_feature 1..22: note = chemically synthesized
  source 1..22: mol_type = other DNA
gtcgcaaactcctgacctcctc

SEQ ID NO: 49089 - DNA, 22 bp, synthetic construct
  misc_feature 1..22: note = chemically synthesized
  source 1..22: mol_type = other DNA
ctgacctcctcagtggatccga

SEQ ID NO: 49090 - DNA, 22 bp, synthetic construct
  misc_feature 1..22: note = chemically synthesized
  source 1..22: mol_type = other DNA
acctcctcagtggatccgagga

SEQ ID NO: 49091 - DNA, 22 bp, synthetic construct
  misc_feature 1..22: note = chemically synthesized
  source 1..22: mol_type = other DNA
ctcagtggatccgaggaggtga

SEQ ID NO: 49092 - DNA, 22 bp, synthetic construct
  misc_feature 1..22: note = chemically synthesized
  source 1..22: mol_type = other DNA
agtggatccgaggaggtgatcc

SEQ ID NO: 49093 - DNA, 22 bp, synthetic construct
  misc_feature 1..22: note = chemically synthesized
  source 1..22: mol_type = other DNA
ccgcctcagcctcccaaagtgc

SEQ ID NO: 49094 - DNA, 22 bp, synthetic construct
  misc_feature 1..22: note = chemically synthesized
  source 1..22: mol_type = other DNA
agcctcccaaagtgctcgaatt

SEQ ID NO: 49095 - DNA, 22 bp, synthetic construct
  misc_feature 1..22: note = chemically synthesized
  source 1..22: mol_type = other DNA
ccaaagtgctcgaattacaggt

SEQ ID NO: 49096 - DNA, 22 bp, synthetic construct
  misc_feature 1..22: note = chemically synthesized
  source 1..22: mol_type = other DNA
gaattacaggtgtgagccacca

SEQ ID NO: 49097 - DNA, 22 bp, synthetic construct
  misc_feature 1..22: note = chemically synthesized
  source 1..22: mol_type = other DNA
caggtgtgagccaccacgcctg

SEQ ID NO: 49098 - DNA, 22 bp, synthetic construct
  misc_feature 1..22: note = chemically synthesized
  source 1..22: mol_type = other DNA
gcctccacagttctttatccac

SEQ ID NO: 49099 - DNA, 22 bp, synthetic construct
  misc_feature 1..22: note = chemically synthesized
  source 1..22: mol_type = other DNA
cacagttctttatccaccgtct

SEQ ID NO: 49100 - DNA, 22 bp, synthetic construct
  misc_feature 1..22: note = chemically synthesized
  source 1..22: mol_type = other DNA
tttatccaccgtctgaaatgta

SEQ ID NO: 49101 - DNA, 22 bp, synthetic construct
  misc_feature 1..22: note = chemically synthesized
  source 1..22: mol_type = other DNA
tatccaccgtctgaaatgtaaa

SEQ ID NO: 49102 - DNA, 22 bp, synthetic construct
  misc_feature 1..22: note = chemically synthesized
  source 1..22: mol_type = other DNA
atccaccgtctgaaatgtaaaa

SEQ ID NO: 49103 - DNA, 22 bp, synthetic construct
  misc_feature 1..22: note = chemically synthesized
  source 1..22: mol_type = other DNA
tccaccgtctgaaatgtaaaat

SEQ ID NO: 49104 - DNA, 22 bp, synthetic construct
  misc_feature 1..22: note = chemically synthesized
  source 1..22: mol_type = other DNA
aaatgtaaaatgttacgaaaac

SEQ ID NO: 49105 - DNA, 22 bp, synthetic construct
  misc_feature 1..22: note = chemically synthesized
  source 1..22: mol_type = other DNA
cgaaaaccaaaagttttttttg

SEQ ID NO: 49106 - DNA, 22 bp, synthetic construct
  misc_feature 1..22: note = chemically synthesized
  source 1..22: mol_type = other DNA
tttttgtgatttatttgatggt

SEQ ID NO: 49107 - DNA, 22 bp, synthetic construct
  misc_feature 1..22: note = chemically synthesized
  source 1..22: mol_type = other DNA
ttttgtgatttatttgatggta

SEQ ID NO: 49108 - DNA, 22 bp, synthetic construct
  misc_feature 1..22: note = chemically synthesized
  source 1..22: mol_type = other DNA
tttgtgatttatttgatggtag

SEQ ID NO: 49109 - DNA, 22 bp, synthetic construct
  misc_feature 1..22: note = chemically synthesized
  source 1..22: mol_type = other DNA
ttgtgatttatttgatggtagc

SEQ ID NO: 49110 - DNA, 22 bp, synthetic construct
  misc_feature 1..22: note = chemically synthesized
  source 1..22: mol_type = other DNA
tgtgatttatttgatggtagca

SEQ ID NO: 49111 - DNA, 22 bp, synthetic construct
  misc_feature 1..22: note = chemically synthesized
  source 1..22: mol_type = other DNA
gtgatttatttgatggtagcac

SEQ ID NO: 49112 - DNA, 22 bp, synthetic construct
  misc_feature 1..22: note = chemically synthesized
  source 1..22: mol_type = other DNA
tgatttatttgatggtagcacc

SEQ ID NO: 49113 - DNA, 22 bp, synthetic construct
  misc_feature 1..22: note = chemically synthesized
  source 1..22: mol_type = other DNA
atttgatggtagcacctgacgt

SEQ ID NO: 49114 - DNA, 22 bp, synthetic construct
  misc_feature 1..22: note = chemically synthesized
  source 1..22: mol_type = other DNA
tttgatggtagcacctgacgtg

SEQ ID NO: 49115 - DNA, 22 bp, synthetic construct
  misc_feature 1..22: note = chemically synthesized
  source 1..22: mol_type = other DNA
gatggtagcacctgacgtgaac

SEQ ID NO: 49116 - DNA, 22 bp, synthetic construct
  misc_feature 1..22: note = chemically synthesized
  source 1..22: mol_type = other DNA
atggtagcacctgacgtgaact

SEQ ID NO: 49117 - DNA, 22 bp, synthetic construct
  misc_feature 1..22: note = chemically synthesized
  source 1..22: mol_type = other DNA
acgtgaactgacatgagattat

SEQ ID NO: 49118 - DNA, 22 bp, synthetic construct
  misc_feature 1..22: note = chemically synthesized
  source 1..22: mol_type = other DNA
acatgagattatttttaattta

SEQ ID NO: 49119 - DNA, 22 bp, synthetic construct
  misc_feature 1..22: note = chemically synthesized
  source 1..22: mol_type = other DNA
tttttaatttagttgtgtgaat

SEQ ID NO: 49120 - DNA, 22 bp, synthetic construct
  misc_feature 1..22: note = chemically synthesized
  source 1..22: mol_type = other DNA
ttaatttagttgtgtgaatatg

SEQ ID NO: 49121 - DNA, 22 bp, synthetic construct
  misc_feature 1..22: note = chemically synthesized
  source 1..22: mol_type = other DNA
taatttagttgtgtgaatatgc

SEQ ID NO: 49122 - DNA, 22 bp, synthetic construct
  misc_feature 1..22: note = chemically synthesized
  source 1..22: mol_type = other DNA
aatttagttgtgtgaatatgca

SEQ ID NO: 49123 - DNA, 22 bp, synthetic construct
  misc_feature 1..22: note = chemically synthesized
  source 1..22: mol_type = other DNA
atttagttgtgtgaatatgcat

SEQ ID NO: 49124 - DNA, 22 bp, synthetic construct
  misc_feature 1..22: note = chemically synthesized
  source 1..22: mol_type = other DNA
agttgtgtgaatatgcatattc

SEQ ID NO: 49125 - DNA, 22 bp, synthetic construct
  misc_feature 1..22: note = chemically synthesized
  source 1..22: mol_type = other DNA
gttgtgtgaatatgcatattca

SEQ ID NO: 49126 - DNA, 22 bp, synthetic construct
  misc_feature 1..22: note = chemically synthesized
  source 1..22: mol_type = other DNA
tgtgaatatgcatattcatata

SEQ ID NO: 49127 - DNA, 22 bp, synthetic construct
  misc_feature 1..22: note = chemically synthesized
  source 1..22: mol_type = other DNA
atatattttgctgcatagatta

SEQ ID NO: 49128 - DNA, 22 bp, synthetic construct
  misc_feature 1..22: note = chemically synthesized
  source 1..22: mol_type = other DNA
tgctgcatagattacagtatgc

SEQ ID NO: 49129 - DNA, 22 bp, synthetic construct
  misc_feature 1..22: note = chemically synthesized
  source 1..22: mol_type = other DNA
gctgcatagattacagtatgca

SEQ ID NO: 49130 - DNA, 22 bp, synthetic construct
  misc_feature 1..22: note = chemically synthesized
  source 1..22: mol_type = other DNA
ctgcatagattacagtatgcag

SEQ ID NO: 49131 - DNA, 22 bp, synthetic construct
  misc_feature 1..22: note = chemically synthesized
  source 1..22: mol_type = other DNA
catagattacagtatgcagctc

SEQ ID NO: 49132 - DNA, 22 bp, synthetic construct
  misc_feature 1..22: note = chemically synthesized
  source 1..22: mol_type = other DNA
cagtatgcagctccagattctt

SEQ ID NO: 49133 - DNA, 22 bp, synthetic construct
  misc_feature 1..22: note = chemically synthesized
  source 1..22: mol_type = other DNA
cagattcttccaagcagactct

SEQ ID NO: 49134 - DNA, 22 bp, synthetic construct
  misc_feature 1..22: note = chemically synthesized
  source 1..22: mol_type = other DNA
ttccaagcagactctgattgcc

SEQ ID NO: 49135 - DNA, 22 bp, synthetic construct
  misc_feature 1..22: note = chemically synthesized
  source 1..22: mol_type = other DNA
ccaagcagactctgattgccca

SEQ ID NO: 49136 - DNA, 22 bp, synthetic construct
  misc_feature 1..22: note = chemically synthesized
  source 1..22: mol_type = other DNA
caagcagactctgattgcccat

SEQ ID NO: 49137 - DNA, 22 bp, synthetic construct
  misc_feature 1..22: note = chemically synthesized
  source 1..22: mol_type = other DNA
tgattgcccattactgcctttc

SEQ ID NO: 49138 - DNA, 22 bp, synthetic construct
  misc_feature 1..22: note = chemically synthesized
  source 1..22: mol_type = other DNA
attgcccattactgcctttcta

SEQ ID NO: 49139 - DNA, 22 bp, synthetic construct
  misc_feature 1..22: note = chemically synthesized
  source 1..22: mol_type = other DNA
cccattactgcctttctaaaat

SEQ ID NO: 49140 - DNA, 22 bp, synthetic construct
  misc_feature 1..22: note = chemically synthesized
  source 1..22: mol_type = other DNA
ctgcctttctaaaatccaaaca

SEQ ID NO: 49141 - DNA, 22 bp, synthetic construct
  misc_feature 1..22: note = chemically synthesized
  source 1..22: mol_type = other DNA
cctttctaaaatccaaacaagt

SEQ ID NO: 49142 - DNA, 22 bp, synthetic construct
  misc_feature 1..22: note = chemically synthesized
  source 1..22: mol_type = other DNA
tctaaaatccaaacaagttctg

SEQ ID NO: 49143 - DNA, 22 bp, synthetic construct
  misc_feature 1..22: note = chemically synthesized
  source 1..22: mol_type = other DNA
ctaaaatccaaacaagttctga

SEQ ID NO: 49144 - DNA, 22 bp, synthetic construct
  misc_feature 1..22: note = chemically synthesized
  source 1..22: mol_type = other DNA
taaaatccaaacaagttctgag

SEQ ID NO: 49145 - DNA, 22 bp, synthetic construct
  misc_feature 1..22: note = chemically synthesized
  source 1..22: mol_type = other DNA
aaatccaaacaagttctgaggt

SEQ ID NO: 49146 - DNA, 22 bp, synthetic construct
  misc_feature 1..22: note = chemically synthesized
  source 1..22: mol_type = other DNA
tgaggttcaaaaccgttttggc

SEQ ID NO: 49147 - DNA, 22 bp, synthetic construct
  misc_feature 1..22: note = chemically synthesized
  source 1..22: mol_type = other DNA
aggttcaaaaccgttttggccc

SEQ ID NO: 49148 - DNA, 22 bp, synthetic construct
  misc_feature 1..22: note = chemically synthesized
  source 1..22: mol_type = other DNA
aaaaccgttttggccctaaggc

SEQ ID NO: 49149 - DNA, 22 bp, synthetic construct
  misc_feature 1..22: note = chemically synthesized
  source 1..22: mol_type = other DNA
tggccctaaggctttgggtaaa

SEQ ID NO: 49150 - DNA, 22 bp, synthetic construct
  misc_feature 1..22: note = chemically synthesized
  source 1..22: mol_type = other DNA
ggccctaaggctttgggtaaag

SEQ ID NO: 49151 - DNA, 22 bp, synthetic construct
  misc_feature 1..22: note = chemically synthesized
  source 1..22: mol_type = other DNA
gccctaaggctttgggtaaagg

SEQ ID NO: 49152 - DNA, 22 bp, synthetic construct
  misc_feature 1..22: note = chemically synthesized
  source 1..22: mol_type = other DNA
aggctttgggtaaagggggtgg

SEQ ID NO: 49153 - DNA, 22 bp, synthetic construct
  misc_feature 1..22: note = chemically synthesized
  source 1..22: mol_type = other DNA
tgggtaaagggggtggactctg

SEQ ID NO: 49154 - DNA, 22 bp, synthetic construct
  misc_feature 1..22: note = chemically synthesized
  source 1..22: mol_type = other DNA
gggtaaagggggtggactctgt

SEQ ID NO: 49155 - DNA, 22 bp, synthetic construct
  misc_feature 1..22: note = chemically synthesized
  source 1..22: mol_type = other DNA
ggtaaagggggtggactctgtt

SEQ ID NO: 49156 - DNA, 22 bp, synthetic construct
  misc_feature 1..22: note = chemically synthesized
  source 1..22: mol_type = other DNA
tgttctactctgactggagtcc

SEQ ID NO: 49157 - DNA, 22 bp, synthetic construct
  misc_feature 1..22: note = chemically synthesized
  source 1..22: mol_type = other DNA
ttctactctgactggagtccaa

SEQ ID NO: 49158 - DNA, 22 bp, synthetic construct
  misc_feature 1..22: note = chemically synthesized
  source 1..22: mol_type = other DNA
tactctgactggagtccaagat

SEQ ID NO: 49159 - DNA, 22 bp, synthetic construct
  misc_feature 1..22: note = chemically synthesized
  source 1..22: mol_type = other DNA
ctctgactggagtccaagatgc

SEQ ID NO: 49160 - DNA, 22 bp, synthetic construct
  misc_feature 1..22: note = chemically synthesized
  source 1..22: mol_type = other DNA
tgactggagtccaagatgcata

SEQ ID NO: 49161 - DNA, 22 bp, synthetic construct
  misc_feature 1..22: note = chemically synthesized
  source 1..22: mol_type = other DNA
actggagtccaagatgcatata

SEQ ID NO: 49162 - DNA, 22 bp, synthetic construct
  misc_feature 1..22: note = chemically synthesized
  source 1..22: mol_type = other DNA
gagtccaagatgcatatataca

SEQ ID NO: 49163 - DNA, 22 bp, synthetic construct
  misc_feature 1..22: note = chemically synthesized
  source 1..22: mol_type = other DNA
caaggtaggttgaggtaggggc

SEQ ID NO: 49164 - DNA, 22 bp, synthetic construct
  misc_feature 1..22: note = chemically synthesized
  source 1..22: mol_type = other DNA
aggtaggggccaaggaggagca

SEQ ID NO: 49165 - DNA, 22 bp, synthetic construct
  misc_feature 1..22: note = chemically synthesized
  source 1..22: mol_type = other DNA
ggacttgattcatgaggctgtg

SEQ ID NO: 49166 - DNA, 22 bp, synthetic construct
  misc_feature 1..22: note = chemically synthesized
  source 1..22: mol_type = other DNA
gacttgattcatgaggctgtgg

SEQ ID NO: 49167 - DNA, 22 bp, synthetic construct
  misc_feature 1..22: note = chemically synthesized
  source 1..22: mol_type = other DNA
gattcatgaggctgtggggagc

SEQ ID NO: 49168 - DNA, 22 bp, synthetic construct
  misc_feature 1..22: note = chemically synthesized
  source 1..22: mol_type = other DNA
attcatgaggctgtggggagcc

SEQ ID NO: 49169 - DNA, 22 bp, synthetic construct
  misc_feature 1..22: note = chemically synthesized
  source 1..22: mol_type = other DNA
atgaggctgtggggagccagtg

SEQ ID NO: 49170 - DNA, 22 bp, synthetic construct
  misc_feature 1..22: note = chemically synthesized
  source 1..22: mol_type = other DNA
tggggagccagtgaaggttctt

SEQ ID NO: 49171 - DNA, 22 bp, synthetic construct
  misc_feature 1..22: note = chemically synthesized
  source 1..22: mol_type = other DNA
ttaagcaggtatgtctgcctga

SEQ ID NO: 49172 - DNA, 22 bp, synthetic construct
  misc_feature 1..22: note = chemically synthesized
  source 1..22: mol_type = other DNA
aagcaggtatgtctgcctgaga

SEQ ID NO: 49173 - DNA, 22 bp, synthetic construct
  misc_feature 1..22: note = chemically synthesized
  source 1..22: mol_type = other DNA
agcaggtatgtctgcctgagag

SEQ ID NO: 49174 - DNA, 22 bp, synthetic construct
  misc_feature 1..22: note = chemically synthesized
  source 1..22: mol_type = other DNA
cctgagagcagttggagcagac

SEQ ID NO: 49175 - DNA, 22 bp, synthetic construct
  misc_feature 1..22: note = chemically synthesized
  source 1..22: mol_type = other DNA
agagcagttggagcagacaaga

SEQ ID NO: 49176 - DNA, 22 bp, synthetic construct
  misc_feature 1..22: note = chemically synthesized
  source 1..22: mol_type = other DNA
gagcagacaagagctaaaaacc

SEQ ID NO: 49177 - DNA, 22 bp, synthetic construct
  misc_feature 1..22: note = chemically synthesized
  source 1..22: mol_type = other DNA
aaaaccaaacaaatcaccatag

SEQ ID NO: 49178 - DNA, 22 bp, synthetic construct
  misc_feature 1..22: note = chemically synthesized
  source 1..22: mol_type = other DNA
ctataatttgtttgtcccctcc

SEQ ID NO: 49179 - DNA, 22 bp, synthetic construct
  misc_feature 1..22: note = chemically synthesized
  source 1..22: mol_type = other DNA
taatttgtttgtcccctccaaa

SEQ ID NO: 49180 - DNA, 22 bp, synthetic construct
  misc_feature 1..22: note = chemically synthesized
  source 1..22: mol_type = other DNA
gtttgtcccctccaaatctcat

SEQ ID NO: 49181 - DNA, 22 bp, synthetic construct
  misc_feature 1..22: note = chemically synthesized
  source 1..22: mol_type = other DNA
tttgtcccctccaaatctcatg

SEQ ID NO: 49182 - DNA, 22 bp, synthetic construct
  misc_feature 1..22: note = chemically synthesized
  source 1..22: mol_type = other DNA
gtcccctccaaatctcatgtgg

SEQ ID NO: 49183 - DNA, 22 bp, synthetic construct
  misc_feature 1..22: note = chemically synthesized
  source 1..22: mol_type = other DNA
tcccctccaaatctcatgtgga

SEQ ID NO: 49184 - DNA, 22 bp, synthetic construct
  misc_feature 1..22: note = chemically synthesized
  source 1..22: mol_type = other DNA
caaatctcatgtggaaatttgg

SEQ ID NO: 49185 - DNA, 22 bp, synthetic construct
  misc_feature 1..22: note = chemically synthesized
  source 1..22: mol_type = other DNA
atgtggaaatttggtcctcagt

SEQ ID NO: 49186 - DNA, 22 bp, synthetic construct
  misc_feature 1..22: note = chemically synthesized
  source 1..22: mol_type = other DNA
ggtcctcagtgttggaagtggg

SEQ ID NO: 49187 - DNA, 22 bp, synthetic construct
  misc_feature 1..22: note = chemically synthesized
  source 1..22: mol_type = other DNA
gtcctcagtgttggaagtgggg

SEQ ID NO: 49188 - DNA, 22 bp, synthetic construct
  misc_feature 1..22: note = chemically synthesized
  source 1..22: mol_type = other DNA
agtgttggaagtggggcctaat

SEQ ID NO: 49189 - DNA, 22 bp, synthetic construct
  misc_feature 1..22: note = chemically synthesized
  source 1..22: mol_type = other DNA
gaagtggggcctaatgggaggt

SEQ ID NO: 49190 - DNA, 22 bp, synthetic construct
  misc_feature 1..22: note = chemically synthesized
  source 1..22: mol_type = other DNA
atgggaggtgtttgggtcatgg

SEQ ID NO: 49191 - DNA, 22 bp, synthetic construct
  misc_feature 1..22: note = chemically synthesized
  source 1..22: mol_type = other DNA
gggtcatgggggaggaacccct

SEQ ID NO: 49192 - DNA, 22 bp, synthetic construct
  misc_feature 1..22: note = chemically synthesized
  source 1..22: mol_type = other DNA
ggtcatgggggaggaacccctg

SEQ ID NO: 49193 - DNA, 22 bp, synthetic construct
  misc_feature 1..22: note = chemically synthesized
  source 1..22: mol_type = other DNA
tgaaaggcttggtgccgtcctt

SEQ ID NO: 49194 - DNA, 22 bp, synthetic construct
  misc_feature 1..22: note = chemically synthesized
  source 1..22: mol_type = other DNA
ggtgccgtccttgtgataatga

SEQ ID NO: 49195 - DNA, 22 bp, synthetic construct
  misc_feature 1..22: note = chemically synthesized
  source 1..22: mol_type = other DNA
gtgccgtccttgtgataatgag

SEQ ID NO: 49196 - DNA, 22 bp, synthetic construct
  misc_feature 1..22: note = chemically synthesized
  source 1..22: mol_type = other DNA
gtgataatgagtaagttctccc

SEQ ID NO: 49197 - DNA, 22 bp, synthetic construct
  misc_feature 1..22: note = chemically synthesized
  source 1..22: mol_type = other DNA
tgataatgagtaagttctcccg

SEQ ID NO: 49198 - DNA, 22 bp, synthetic construct
  misc_feature 1..22: note = chemically synthesized
  source 1..22: mol_type = other DNA
tcccgctatgatttcccttgaa

SEQ ID NO: 49199 - DNA, 22 bp, synthetic construct
  misc_feature 1..22: note = chemically synthesized
  source 1..22: mol_type = other DNA
ccgctatgatttcccttgaagg

SEQ ID NO: 49200 - DNA, 22 bp, synthetic construct
  misc_feature 1..22: note = chemically synthesized
  source 1..22: mol_type = other DNA
tgatttcccttgaaggctgatt

SEQ ID NO: 49201 - DNA, 22 bp, synthetic construct
  misc_feature 1..22: note = chemically synthesized
  source 1..22: mol_type = other DNA
cccttgaaggctgattattaaa

SEQ ID NO: 49202 - DNA, 22 bp, synthetic construct
  misc_feature 1..22: note = chemically synthesized
  source 1..22: mol_type = other DNA
ccttgaaggctgattattaaaa

SEQ ID NO: 49203 - DNA, 22 bp, synthetic construct
  misc_feature 1..22: note = chemically synthesized
  source 1..22: mol_type = other DNA
gaaggctgattattaaaaagag

SEQ ID NO: 49204 - DNA, 22 bp, synthetic construct
  misc_feature 1..22: note = chemically synthesized
  source 1..22: mol_type = other DNA
aaggctgattattaaaaagagc

SEQ ID NO: 49205 - DNA, 22 bp, synthetic construct
  misc_feature 1..22: note = chemically synthesized
  source 1..22: mol_type = other DNA
attattaaaaagagcttggcac

SEQ ID NO: 49206 - DNA, 22 bp, synthetic construct
  misc_feature 1..22: note = chemically synthesized
  source 1..22: mol_type = other DNA
ttaaaaagagcttggcacctcc

SEQ ID NO: 49207 - DNA, 22 bp, synthetic construct
  misc_feature 1..22: note = chemically synthesized
  source 1..22: mol_type = other DNA
aaaagagcttggcacctccctc

SEQ ID NO: 49208 - DNA, 22 bp, synthetic construct
  misc_feature 1..22: note = chemically synthesized
  source 1..22: mol_type = other DNA
ggcacctccctctcttctctct

SEQ ID NO: 49209 - DNA, 22 bp, synthetic construct
  misc_feature 1..22: note = chemically synthesized
  source 1..22: mol_type = other DNA
gcacctccctctcttctctctt

SEQ ID NO: 49210 - DNA, 22 bp, synthetic construct
  misc_feature 1..22: note = chemically synthesized
  source 1..22: mol_type = other DNA
cctctcttctctcttgcttctt

SEQ ID NO: 49211 - DNA, 22 bp, synthetic construct
  misc_feature 1..22: note = chemically synthesized
  source 1..22: mol_type = other DNA
tcttctctcttgcttcttctct

SEQ ID NO: 49212 - DNA, 22 bp, synthetic construct
  misc_feature 1..22: note = chemically synthesized
  source 1..22: mol_type = other DNA
ttctctcttgcttcttctcttg

SEQ ID NO: 49213 - DNA, 22 bp, synthetic construct
  misc_feature 1..22: note = chemically synthesized
  source 1..22: mol_type = other DNA
ctctcttgcttcttctcttgcc

SEQ ID NO: 49214 - DNA, 22 bp, synthetic construct
  misc_feature 1..22: note = chemically synthesized
  source 1..22: mol_type = other DNA
tctcttgcttcttctcttgcca

SEQ ID NO: 49215 - DNA, 22 bp, synthetic construct
  misc_feature 1..22: note = chemically synthesized
  source 1..22: mol_type = other DNA
tcttgcttcttctcttgccatg

SEQ ID NO: 49216 - DNA, 22 bp, synthetic construct
  misc_feature 1..22: note = chemically synthesized
  source 1..22: mol_type = other DNA
ttgcttcttctcttgccatgtg

SEQ ID NO: 49217 - DNA, 22 bp, synthetic construct
  misc_feature 1..22: note = chemically synthesized
  source 1..22: mol_type = other DNA
gcttcttctcttgccatgtgat

SEQ ID NO: 49218 - DNA, 22 bp, synthetic construct
  misc_feature 1..22: note = chemically synthesized
  source 1..22: mol_type = other DNA
cttcttctcttgccatgtgatt

SEQ ID NO: 49219 - DNA, 22 bp, synthetic construct
  misc_feature 1..22: note = chemically synthesized
  source 1..22: mol_type = other DNA
cttctcttgccatgtgattgat

SEQ ID NO: 49220 - DNA, 22 bp, synthetic construct
  misc_feature 1..22: note = chemically synthesized
  source 1..22: mol_type = other DNA
ttctcttgccatgtgattgatc

SEQ ID NO: 49221 - DNA, 22 bp, synthetic construct
  misc_feature 1..22: note = chemically synthesized
  source 1..22: mol_type = other DNA
ctcttgccatgtgattgatctc

SEQ ID NO: 49222 - DNA, 22 bp, synthetic construct
  misc_feature 1..22: note = chemically synthesized
  source 1..22: mol_type = other DNA
tcttgccatgtgattgatctct

SEQ ID NO: 49223 - DNA, 22 bp, synthetic construct
  misc_feature 1..22: note = chemically synthesized
  source 1..22: mol_type = other DNA
ttgccatgtgattgatctctgc

SEQ ID NO: 49224 - DNA, 22 bp, synthetic construct
  misc_feature 1..22: note = chemically synthesized
  source 1..22: mol_type = other DNA
gccatgtgattgatctctgcac

SEQ ID NO: 49225 - DNA, 22 bp, synthetic construct
  misc_feature 1..22: note = chemically synthesized
  source 1..22: mol_type = other DNA
ccatgtgattgatctctgcaca

SEQ ID NO: 49226 - DNA, 22 bp, synthetic construct
  misc_feature 1..22: note = chemically synthesized
  source 1..22: mol_type = other DNA
atctctgcacatgtaggctccc

SEQ ID NO: 49227 - DNA, 22 bp, synthetic construct
  misc_feature 1..22: note = chemically synthesized
  source 1..22: mol_type = other DNA
tgcacatgtaggctccccttca

SEQ ID NO: 49228 - DNA, 22 bp, synthetic construct
  misc_feature 1..22: note = chemically synthesized
  source 1..22: mol_type = other DNA
cacatgtaggctccccttcacc

SEQ ID NO: 49229 - DNA, 22 bp, synthetic construct
  misc_feature 1..22: note = chemically synthesized
  source 1..22: mol_type = other DNA
cccttcaccttctgccatcagt

SEQ ID NO: 49230 - DNA, 22 bp, synthetic construct
  misc_feature 1..22: note = chemically synthesized
  source 1..22: mol_type = other DNA
caccttctgccatcagtgaaag

SEQ ID NO: 49231 - DNA, 22 bp, synthetic construct
  misc_feature 1..22: note = chemically synthesized
  source 1..22: mol_type = other DNA
accttctgccatcagtgaaagc

SEQ ID NO: 49232 - DNA, 22 bp, synthetic construct
  misc_feature 1..22: note = chemically synthesized
  source 1..22: mol_type = other DNA
ctgccatcagtgaaagcagctt

SEQ ID NO: 49233 - DNA, 22 bp, synthetic construct
  misc_feature 1..22: note = chemically synthesized
  source 1..22: mol_type = other DNA
tgccatcagtgaaagcagctta

SEQ ID NO: 49234 - DNA, 22 bp, synthetic construct
  misc_feature 1..22: note = chemically synthesized
  source 1..22: mol_type = other DNA
ccatcagtgaaagcagcttaag

SEQ ID NO: 49235 - DNA, 22 bp, synthetic construct
  misc_feature 1..22: note = chemically synthesized
  source 1..22: mol_type = other DNA
aaggccctcaccagaagcagat

SEQ ID NO: 49236 - DNA, 22 bp, synthetic construct
  misc_feature 1..22: note = chemically synthesized
  source 1..22: mol_type = other DNA
aggccctcaccagaagcagatg

SEQ ID NO: 49237 - DNA, 22 bp, synthetic construct
  misc_feature 1..22: note = chemically synthesized
  source 1..22: mol_type = other DNA
accagaagcagatgctggtgcc

SEQ ID NO: 49238 - DNA, 22 bp, synthetic construct
  misc_feature 1..22: note = chemically synthesized
  source 1..22: mol_type = other DNA
gtgccatgcttcctggagagct

SEQ ID NO: 49239 - DNA, 22 bp, synthetic construct
  misc_feature 1..22: note = chemically synthesized
  source 1..22: mol_type = other DNA
cctggagagcttgcagaatcat

SEQ ID NO: 49240 - DNA, 22 bp, synthetic construct
  misc_feature 1..22: note = chemically synthesized
  source 1..22: mol_type = other DNA
ctggagagcttgcagaatcatg

SEQ ID NO: 49241 - DNA, 22 bp, synthetic construct
  misc_feature 1..22: note = chemically synthesized
  source 1..22: mol_type = other DNA
gagagcttgcagaatcatgagc

SEQ ID NO: 49242 - DNA, 22 bp, synthetic construct
  misc_feature 1..22: note = chemically synthesized
  source 1..22: mol_type = other DNA
gcagaatcatgagctgaataaa

SEQ ID NO: 49243 - DNA, 22 bp, synthetic construct
  misc_feature 1..22: note = chemically synthesized
  source 1..22: mol_type = other DNA
cagaatcatgagctgaataaat

SEQ ID NO: 49244 - DNA, 22 bp, synthetic construct
  misc_feature 1..22: note = chemically synthesized
  source 1..22: mol_type = other DNA
aataaatcccttttccttgtaa

SEQ ID NO: 49245 - DNA, 22 bp, synthetic construct
  misc_feature 1..22: note = chemically synthesized
  source 1..22: mol_type = other DNA
ttccttgtaaattactcacctt

SEQ ID NO: 49246 - DNA, 22 bp, synthetic construct
  misc_feature 1..22: note = chemically synthesized
  source 1..22: mol_type = other DNA
tccttgtaaattactcaccttc

SEQ ID NO: 49247 - DNA, 22 bp, synthetic construct
  misc_feature 1..22: note = chemically synthesized
  source 1..22: mol_type = other DNA
ccttgtaaattactcaccttca

SEQ ID NO: 49248 - DNA, 22 bp, synthetic construct
  misc_feature 1..22: note = chemically synthesized
  source 1..22: mol_type = other DNA
cttgtaaattactcaccttcag

SEQ ID NO: 49249 - DNA, 22 bp, synthetic construct
  misc_feature 1..22: note = chemically synthesized
  source 1..22: mol_type = other DNA
gtaaattactcaccttcaggta

SEQ ID NO: 49250 - DNA, 22 bp, synthetic construct
  misc_feature 1..22: note = chemically synthesized
  source 1..22: mol_type = other DNA
taaattactcaccttcaggtat

SEQ ID NO: 49251 - DNA, 22 bp, synthetic construct
  misc_feature 1..22: note = chemically synthesized
  source 1..22: mol_type = other DNA
ctcaccttcaggtattccttta

SEQ ID NO: 49252 - DNA, 22 bp, synthetic construct
  misc_feature 1..22: note = chemically synthesized
  source 1..22: mol_type = other DNA
accttcaggtattcctttatat

SEQ ID NO: 49253 - DNA, 22 bp, synthetic construct
  misc_feature 1..22: note = chemically synthesized
  source 1..22: mol_type = other DNA
caggtattcctttatatagcaa

SEQ ID NO: 49254 - DNA, 22 bp, synthetic construct
  misc_feature 1..22: note = chemically synthesized
  source 1..22: mol_type = other DNA
aggtattcctttatatagcaac

SEQ ID NO: 49255 - DNA, 22 bp, synthetic construct
  misc_feature 1..22: note = chemically synthesized
  source 1..22: mol_type = other DNA
ctttatatagcaacacaaaagg

SEQ ID NO: 49256 - DNA, 22 bp, synthetic construct
  misc_feature 1..22: note = chemically synthesized
  source 1..22: mol_type = other DNA
tatatagcaacacaaaaggact

SEQ ID NO: 49257 - DNA, 22 bp, synthetic construct
  misc_feature 1..22: note = chemically synthesized
  source 1..22: mol_type = other DNA
atatagcaacacaaaaggacta

SEQ ID NO: 49258 - DNA, 22 bp, synthetic construct
  misc_feature 1..22: note = chemically synthesized
  source 1..22: mol_type = other DNA
tatagcaacacaaaaggactaa

SEQ ID NO: 49259 - DNA, 22 bp, synthetic construct
  misc_feature 1..22: note = chemically synthesized
  source 1..22: mol_type = other DNA
agacagtggccttgacttttct

SEQ ID NO: 49260 - DNA, 22 bp, synthetic construct
  misc_feature 1..22: note = chemically synthesized
  source 1..22: mol_type = other DNA
gacttttctctctctttaagaa

SEQ ID NO: 49261 - DNA, 22 bp, synthetic construct
  misc_feature 1..22: note = chemically synthesized
  source 1..22: mol_type = other DNA
acttttctctctctttaagaag

SEQ ID NO: 49262 - DNA, 22 bp, synthetic construct
  misc_feature 1..22: note = chemically synthesized
  source 1..22: mol_type = other DNA
ttctctctctttaagaagtgtt

SEQ ID NO: 49263 - DNA, 22 bp, synthetic construct
  misc_feature 1..22: note = chemically synthesized
  source 1..22: mol_type = other DNA
tctctctctttaagaagtgttg

SEQ ID NO: 49264 - DNA, 22 bp, synthetic construct
  misc_feature 1..22: note = chemically synthesized
  source 1..22: mol_type = other DNA
ctctctctttaagaagtgttgc

SEQ ID NO: 49265 - DNA, 22 bp, synthetic construct
  misc_feature 1..22: note = chemically synthesized
  source 1..22: mol_type = other DNA
tctctctttaagaagtgttgcc

SEQ ID NO: 49266 - DNA, 22 bp, synthetic construct
  misc_feature 1..22: note = chemically synthesized
  source 1..22: mol_type = other DNA
tctctttaagaagtgttgcctt

SEQ ID NO: 49267 - DNA, 22 bp, synthetic construct
  misc_feature 1..22: note = chemically synthesized
  source 1..22: mol_type = other DNA
tctttaagaagtgttgcctttg

SEQ ID NO: 49268 - DNA, 22 bp, synthetic construct
  misc_feature 1..22: note = chemically synthesized
  source 1..22: mol_type = other DNA
tttaagaagtgttgcctttgct

SEQ ID NO: 49269 - DNA, 22 bp, synthetic construct
  misc_feature 1..22: note = chemically synthesized
  source 1..22: mol_type = other DNA
taagaagtgttgcctttgctca

SEQ ID NO: 49270 - DNA, 22 bp, synthetic construct
  misc_feature 1..22: note = chemically synthesized
  source 1..22: mol_type = other DNA
aagaagtgttgcctttgctcac

SEQ ID NO: 49271 - DNA, 22 bp, synthetic construct
  misc_feature 1..22: note = chemically synthesized
  source 1..22: mol_type = other DNA
agaagtgttgcctttgctcact

SEQ ID NO: 49272 - DNA, 22 bp, synthetic construct
  misc_feature 1..22: note = chemically synthesized
  source 1..22: mol_type = other DNA
cctttgctcacttagtcatccc

SEQ ID NO: 49273 - DNA, 22 bp, synthetic construct
  misc_feature 1..22: note = chemically synthesized
  source 1..22: mol_type = other DNA
tgctcacttagtcatcccttct

SEQ ID NO: 49274 - DNA, 22 bp, synthetic construct
  misc_feature 1..22: note = chemically synthesized
  source 1..22: mol_type = other DNA
gctcacttagtcatcccttctg

SEQ ID NO: 49275 - DNA, 22 bp, synthetic construct
  misc_feature 1..22: note = chemically synthesized
  source 1..22: mol_type = other DNA
ctcacttagtcatcccttctgc

SEQ ID NO: 49276 - DNA, 22 bp, synthetic construct
  misc_feature 1..22: note = chemically synthesized
  source 1..22: mol_type = other DNA
acttagtcatcccttctgcctg

SEQ ID NO: 49277 - DNA, 22 bp, synthetic construct
  misc_feature 1..22: note = chemically synthesized
  source 1..22: mol_type = other DNA
agtcatcccttctgcctgcatt

SEQ ID NO: 49278 - DNA, 22 bp, synthetic construct
  misc_feature 1..22: note = chemically synthesized
  source 1..22: mol_type = other DNA
gtcatcccttctgcctgcattt

SEQ ID NO: 49279 - DNA, 22 bp, synthetic construct
  misc_feature 1..22: note = chemically synthesized
  source 1..22: mol_type = other DNA
ctgcctgcatttgtagagcatc

SEQ ID NO: 49280 - DNA, 22 bp, synthetic construct
  misc_feature 1..22: note = chemically synthesized
  source 1..22: mol_type = other DNA
tgcctgcatttgtagagcatct

SEQ ID NO: 49281 - DNA, 22 bp, synthetic construct
  misc_feature 1..22: note = chemically synthesized
  source 1..22: mol_type = other DNA
cctgcatttgtagagcatctgg

SEQ ID NO: 49282 - DNA, 22 bp, synthetic construct
  misc_feature 1..22: note = chemically synthesized
  source 1..22: mol_type = other DNA
catttgtagagcatctggatgg

SEQ ID NO: 49283 - DNA, 22 bp, synthetic construct
  misc_feature 1..22: note = chemically synthesized
  source 1..22: mol_type = other DNA
gtagagcatctggatgggagat

SEQ ID NO: 49284 - DNA, 22 bp, synthetic construct
  misc_feature 1..22: note = chemically synthesized
  source 1..22: mol_type = other DNA
tagagcatctggatgggagatt

SEQ ID NO: 49285 - DNA, 22 bp, synthetic construct
  misc_feature 1..22: note = chemically synthesized
  source 1..22: mol_type = other DNA
gatgggagatttatataaccgt

SEQ ID NO: 49286 - DNA, 22 bp, synthetic construct
  misc_feature 1..22: note = chemically synthesized
  source 1..22: mol_type = other DNA
atataaccgtcactcttgactt

SEQ ID NO: 49287 - DNA, 22 bp, synthetic construct
  misc_feature 1..22: note = chemically synthesized
  source 1..22: mol_type = other DNA
tataaccgtcactcttgacttt

SEQ ID NO: 49288 - DNA, 22 bp, synthetic construct
  misc_feature 1..22: note = chemically synthesized
  source 1..22: mol_type = other DNA
ttgactttcccagcaggcctat

SEQ ID NO: 49289 - DNA, 22 bp, synthetic construct
  misc_feature 1..22: note = chemically synthesized
  source 1..22: mol_type = other DNA
gactttcccagcaggcctatgt

SEQ ID NO: 49290 - DNA, 22 bp, synthetic construct
  misc_feature 1..22: note = chemically synthesized
  source 1..22: mol_type = other DNA
actttcccagcaggcctatgtc

SEQ ID NO: 49291 - DNA, 22 bp, synthetic construct
  misc_feature 1..22: note = chemically synthesized
  source 1..22: mol_type = other DNA
tcccagcaggcctatgtcatag

SEQ ID NO: 49292 - DNA, 22 bp, synthetic construct
  misc_feature 1..22: note = chemically synthesized
  source 1..22: mol_type = other DNA
cccagcaggcctatgtcatagg

SEQ ID NO: 49293 - DNA, 22 bp, synthetic construct
  misc_feature 1..22: note = chemically synthesized
  source 1..22: mol_type = other DNA
ccagcaggcctatgtcataggt

SEQ ID NO: 49294 - DNA, 22 bp, synthetic construct
  misc_feature 1..22: note = chemically synthesized
  source 1..22: mol_type = other DNA
tgtcataggtactgtggtctct

SEQ ID NO: 49295 - DNA, 22 bp, synthetic construct
  misc_feature 1..22: note = chemically synthesized
  source 1..22: mol_type = other DNA
tggtctctacaatacagcagag

SEQ ID NO: 49296 - DNA, 22 bp, synthetic construct
  misc_feature 1..22: note = chemically synthesized
  source 1..22: mol_type = other DNA
tacaatacagcagaggtatctg

SEQ ID NO: 49297 - DNA, 22 bp, synthetic construct
  misc_feature 1..22: note = chemically synthesized
  source 1..22: mol_type = other DNA
caatacagcagaggtatctgag

SEQ ID NO: 49298 - DNA, 22 bp, synthetic construct
  misc_feature 1..22: note = chemically synthesized
  source 1..22: mol_type = other DNA
aggctccgagaggttgagtgac

SEQ ID NO: 49299 - DNA, 22 bp, synthetic construct
  misc_feature 1..22: note = chemically synthesized
  source 1..22: mol_type = other DNA
cgagaggttgagtgacttgctc

SEQ ID NO: 49300 - DNA, 22 bp, synthetic construct
  misc_feature 1..22: note = chemically synthesized
  source 1..22: mol_type = other DNA
agtgacttgctcatggctgcac

SEQ ID NO: 49301 - DNA, 22 bp, synthetic construct
  misc_feature 1..22: note = chemically synthesized
  source 1..22: mol_type = other DNA
gctcatggctgcacaaccagta

SEQ ID NO: 49302 - DNA, 22 bp, synthetic construct
  misc_feature 1..22: note = chemically synthesized
  source 1..22: mol_type = other DNA
ctcatggctgcacaaccagtaa

SEQ ID NO: 49303 - DNA, 22 bp, synthetic construct
  misc_feature 1..22: note = chemically synthesized
  source 1..22: mol_type = other DNA
atggctgcacaaccagtaaata

SEQ ID NO: 49304 - DNA, 22 bp, synthetic construct
  misc_feature 1..22: note = chemically synthesized
  source 1..22: mol_type = other DNA
cacaaccagtaaatattggagc

SEQ ID NO: 49305 - DNA, 22 bp, synthetic construct
  misc_feature 1..22: note = chemically synthesized
  source 1..22: mol_type = other DNA
gagctggaattcaggtccacgg

SEQ ID NO: 49306 - DNA, 22 bp, synthetic construct
  misc_feature 1..22: note = chemically synthesized
  source 1..22: mol_type = other DNA
gaattcaggtccacggtttcct

SEQ ID NO: 49307 - DNA, 22 bp, synthetic construct
  misc_feature 1..22: note = chemically synthesized
  source 1..22: mol_type = other DNA
aggtccacggtttcctggctcc

SEQ ID NO: 49308 - DNA, 22 bp, synthetic construct
  misc_feature 1..22: note = chemically synthesized
  source 1..22: mol_type = other DNA
cctggctccaaagcccatgatt

SEQ ID NO: 49309 - DNA, 22 bp, synthetic construct
  misc_feature 1..22: note = chemically synthesized
  source 1..22: mol_type = other DNA
ctggctccaaagcccatgattt

SEQ ID NO: 49310 - DNA, 22 bp, synthetic construct
  misc_feature 1..22: note = chemically synthesized
  source 1..22: mol_type = other DNA
gctccaaagcccatgatttttt

SEQ ID NO: 49311 - DNA, 22 bp, synthetic construct
  misc_feature 1..22: note = chemically synthesized
  source 1..22: mol_type = other DNA
caaagcccatgattttttccct

SEQ ID NO: 49312 - DNA, 22 bp, synthetic construct
  misc_feature 1..22: note = chemically synthesized
  source 1..22: mol_type = other DNA
tttccctcaatttattctgact

SEQ ID NO: 49313 - DNA, 22 bp, synthetic construct
  misc_feature 1..22: note = chemically synthesized
  source 1..22: mol_type = other DNA
ttccctcaatttattctgactg

SEQ ID NO: 49314 - DNA, 22 bp, synthetic construct
  misc_feature 1..22: note = chemically synthesized
  source 1..22: mol_type = other DNA
tccctcaatttattctgactgg

SEQ ID NO: 49315 - DNA, 22 bp, synthetic construct
  misc_feature 1..22: note = chemically synthesized
  source 1..22: mol_type = other DNA
ccctcaatttattctgactggg

SEQ ID NO: 49316 - DNA, 22 bp, synthetic construct
  misc_feature 1..22: note = chemically synthesized
  source 1..22: mol_type = other DNA
cctcaatttattctgactgggg

SEQ ID NO: 49317 - DNA, 22 bp, synthetic construct
  misc_feature 1..22: note = chemically synthesized
  source 1..22: mol_type = other DNA
aatttattctgactggggcatg

SEQ ID NO: 49318 - DNA, 22 bp, synthetic construct
  misc_feature 1..22: note = chemically synthesized
  source 1..22: mol_type = other DNA
attctgactggggcatggggga

SEQ ID NO: 49319 - DNA, 22 bp, synthetic construct
  misc_feature 1..22: note = chemically synthesized
  source 1..22: mol_type = other DNA
ttctgactggggcatgggggag

SEQ ID NO: 49320 - DNA, 22 bp, synthetic construct
  misc_feature 1..22: note = chemically synthesized
  source 1..22: mol_type = other DNA
tgactggggcatgggggagggg

SEQ ID NO: 49321 - DNA, 22 bp, synthetic construct
  misc_feature 1..22: note = chemically synthesized
  source 1..22: mol_type = other DNA
actggggcatgggggagggggt

SEQ ID NO: 49322 - DNA, 22 bp, synthetic construct
  misc_feature 1..22: note = chemically synthesized
  source 1..22: mol_type = other DNA
gggcatgggggagggggtggcc

SEQ ID NO: 49323 - DNA, 22 bp, synthetic construct
  misc_feature 1..22: note = chemically synthesized
  source 1..22: mol_type = other DNA
tgggcagggccaccaggagcga

SEQ ID NO: 49324 - DNA, 22 bp, synthetic construct
  misc_feature 1..22: note = chemically synthesized
  source 1..22: mol_type = other DNA
gggcagggccaccaggagcgac

SEQ ID NO: 49325 - DNA, 22 bp, synthetic construct
  misc_feature 1..22: note = chemically synthesized
  source 1..22: mol_type = other DNA
ggcagggccaccaggagcgacc

SEQ ID NO: 49326 - DNA, 22 bp, synthetic construct
  misc_feature 1..22: note = chemically synthesized
  source 1..22: mol_type = other DNA
ggtgcaggtacagaggaaaacc

SEQ ID NO: 49327 - DNA, 22 bp, synthetic construct
  misc_feature 1..22: note = chemically synthesized
  source 1..22: mol_type = other DNA
ttgtcgagtgtggcccgtagtt

SEQ ID NO: 49328 - DNA, 22 bp, synthetic construct
  misc_feature 1..22: note = chemically synthesized
  source 1..22: mol_type = other DNA
tcgagtgtggcccgtagttccc

SEQ ID NO: 49329 - DNA, 22 bp, synthetic construct
  misc_feature 1..22: note = chemically synthesized
  source 1..22: mol_type = other DNA
ccatttttgcctgaatggcaca

SEQ ID NO: 49330 - DNA, 22 bp, synthetic construct
  misc_feature 1..22: note = chemically synthesized
  source 1..22: mol_type = other DNA
ttgcctgaatggcacatttgaa

SEQ ID NO: 49331 - DNA, 22 bp, synthetic construct
  misc_feature 1..22: note = chemically synthesized
  source 1..22: mol_type = other DNA
tgcctgaatggcacatttgaaa

SEQ ID NO: 49332 - DNA, 22 bp, synthetic construct
  misc_feature 1..22: note = chemically synthesized
  source 1..22: mol_type = other DNA
gcctgaatggcacatttgaaag

SEQ ID NO: 49333 - DNA, 22 bp, synthetic construct
  misc_feature 1..22: note = chemically synthesized
  source 1..22: mol_type = other DNA
cctgaatggcacatttgaaagt

SEQ ID NO: 49334 - DNA, 22 bp, synthetic construct
  misc_feature 1..22: note = chemically synthesized
  source 1..22: mol_type = other DNA
aatggcacatttgaaagtgtta

SEQ ID NO: 49335 - DNA, 22 bp, synthetic construct
  misc_feature 1..22: note = chemically synthesized
  source 1..22: mol_type = other DNA
gaaagtgttatataaccatgtg

SEQ ID NO: 49336 - DNA, 22 bp, synthetic construct
  misc_feature 1..22: note = chemically synthesized
  source 1..22: mol_type = other DNA
aaagtgttatataaccatgtga

SEQ ID NO: 49337 - DNA, 22 bp, synthetic construct
  misc_feature 1..22: note = chemically synthesized
  source 1..22: mol_type = other DNA
tataaccatgtgaataataata

SEQ ID NO: 49338 - DNA, 22 bp, synthetic construct
  misc_feature 1..22: note = chemically synthesized
  source 1..22: mol_type = other DNA
gcctatatgagttctttaattt

SEQ ID NO: 49339 - DNA, 22 bp, synthetic construct
  misc_feature 1..22: note = chemically synthesized
  source 1..22: mol_type = other DNA
tatgagttctttaatttgcttt

SEQ ID NO: 49340 - DNA, 22 bp, synthetic construct
  misc_feature 1..22: note = chemically synthesized
  source 1..22: mol_type = other DNA
tttaatttgctttttggtccgc

SEQ ID NO: 49341 - DNA, 22 bp, synthetic construct
  misc_feature 1..22: note = chemically synthesized
  source 1..22: mol_type = other DNA
taatttgctttttggtccgcat

SEQ ID NO: 49342 - DNA, 22 bp, synthetic construct
  misc_feature 1..22: note = chemically synthesized
  source 1..22: mol_type = other DNA
aatttgctttttggtccgcatt

SEQ ID NO: 49343 - DNA, 22 bp, synthetic construct
  misc_feature 1..22: note = chemically synthesized
  source 1..22: mol_type = other DNA
atttgctttttggtccgcattt

SEQ ID NO: 49344 - DNA, 22 bp, synthetic construct
  misc_feature 1..22: note = chemically synthesized
  source 1..22: mol_type = other DNA
gctttttggtccgcatttggta

SEQ ID NO: 49345 - DNA, 22 bp, synthetic construct
  misc_feature 1..22: note = chemically synthesized
  source 1..22: mol_type = other DNA
ctttttggtccgcatttggtaa

SEQ ID NO: 49346 - DNA, 22 bp, synthetic construct
  misc_feature 1..22: note = chemically synthesized
  source 1..22: mol_type = other DNA
tttggtccgcatttggtaactt

SEQ ID NO: 49347 - DNA, 22 bp, synthetic construct
  misc_feature 1..22: note = chemically synthesized
  source 1..22: mol_type = other DNA
ttggtccgcatttggtaacttc

SEQ ID NO: 49348 - DNA, 22 bp, synthetic construct
  misc_feature 1..22: note = chemically synthesized
  source 1..22: mol_type = other DNA
tggtccgcatttggtaacttct

SEQ ID NO: 49349 - DNA, 22 bp, synthetic construct
  misc_feature 1..22: note = chemically synthesized
  source 1..22: mol_type = other DNA
ggtccgcatttggtaacttctt

SEQ ID NO: 49350 - DNA, 22 bp, synthetic construct
  misc_feature 1..22: note = chemically synthesized
  source 1..22: mol_type = other DNA
gtccgcatttggtaacttcttt

SEQ ID NO: 49351 - DNA, 22 bp, synthetic construct
  misc_feature 1..22: note = chemically synthesized
  source 1..22: mol_type = other DNA
ggtaacttctttatcatctact

SEQ ID NO: 49352 - DNA, 22 bp, synthetic construct
  misc_feature 1..22: note = chemically synthesized
  source 1..22: mol_type = other DNA
gtaacttctttatcatctacta

SEQ ID NO: 49353 - DNA, 22 bp, synthetic construct
  misc_feature 1..22: note = chemically synthesized
  source 1..22: mol_type = other DNA
ctttatcatctactatactctg

SEQ ID NO: 49354 - DNA, 22 bp, synthetic construct
  misc_feature 1..22: note = chemically synthesized
  source 1..22: mol_type = other DNA
tttatcatctactatactctgt

SEQ ID NO: 49355 - DNA, 22 bp, synthetic construct
  misc_feature 1..22: note = chemically synthesized
  source 1..22: mol_type = other DNA
tatcatctactatactctgttg

SEQ ID NO: 49356 - DNA, 22 bp, synthetic construct
  misc_feature 1..22: note = chemically synthesized
  source 1..22: mol_type = other DNA
atcatctactatactctgttgt

SEQ ID NO: 49357 - DNA, 22 bp, synthetic construct
  misc_feature 1..22: note = chemically synthesized
  source 1..22: mol_type = other DNA
tcatctactatactctgttgtg

SEQ ID NO: 49358 - DNA, 22 bp, synthetic construct
  misc_feature 1..22: note = chemically synthesized
  source 1..22: mol_type = other DNA
ctatactctgttgtgtctcttt

SEQ ID NO: 49359 - DNA, 22 bp, synthetic construct
  misc_feature 1..22: note = chemically synthesized
  source 1..22: mol_type = other DNA
tactctgttgtgtctcttttgt

SEQ ID NO: 49360 - DNA, 22 bp, synthetic construct
  misc_feature 1..22: note = chemically synthesized
  source 1..22: mol_type = other DNA
tgttgtgtctcttttgttgtaa

SEQ ID NO: 49361 - DNA, 22 bp, synthetic construct
  misc_feature 1..22: note = chemically synthesized
  source 1..22: mol_type = other DNA
ttgtgtctcttttgttgtaatt

SEQ ID NO: 49362 - DNA, 22 bp, synthetic construct
  misc_feature 1..22: note = chemically synthesized
  source 1..22: mol_type = other DNA
tgtctcttttgttgtaatttgt

SEQ ID NO: 49363 - DNA, 22 bp, synthetic construct
  misc_feature 1..22: note = chemically synthesized
  source 1..22: mol_type = other DNA
ttttgttgtaatttgtaagtag

SEQ ID NO: 49364 - DNA, 22 bp, synthetic construct
  misc_feature 1..22: note = chemically synthesized
  source 1..22: mol_type = other DNA
ttgttgtaatttgtaagtaggg

SEQ ID NO: 49365 - DNA, 22 bp, synthetic construct
  misc_feature 1..22: note = chemically synthesized
  source 1..22: mol_type = other DNA
tgttgtaatttgtaagtagggg

SEQ ID NO: 49366 - DNA, 22 bp, synthetic construct
  misc_feature 1..22: note = chemically synthesized
  source 1..22: mol_type = other DNA
gttgtaatttgtaagtaggggt

SEQ ID NO: 49367 - DNA, 22 bp, synthetic construct
  misc_feature 1..22: note = chemically synthesized
  source 1..22: mol_type = other DNA
ttgtaatttgtaagtaggggtg

SEQ ID NO: 49368 - DNA, 22 bp, synthetic construct
  misc_feature 1..22: note = chemically synthesized
  source 1..22: mol_type = other DNA
taatttgtaagtaggggtgaga

SEQ ID NO: 49369 - DNA, 22 bp, synthetic construct
  misc_feature 1..22: note = chemically synthesized
  source 1..22: mol_type = other DNA
gtaagtaggggtgagataaagt

SEQ ID NO: 49370 - DNA, 22 bp, synthetic construct
  misc_feature 1..22: note = chemically synthesized
  source 1..22: mol_type = other DNA
taagtaggggtgagataaagta

SEQ ID NO: 49371 - DNA, 22 bp, synthetic construct
  misc_feature 1..22: note = chemically synthesized
  source 1..22: mol_type = other DNA
gggtttgctgggtttcttccat

SEQ ID NO: 49372 - DNA, 22 bp, synthetic construct
  misc_feature 1..22: note = chemically synthesized
  source 1..22: mol_type = other DNA
gctgggtttcttccatgtcatc

SEQ ID NO: 49373 - DNA, 22 bp, synthetic construct
  misc_feature 1..22: note = chemically synthesized
  source 1..22: mol_type = other DNA
ctgggtttcttccatgtcatca

SEQ ID NO: 49374 - DNA, 22 bp, synthetic construct
  misc_feature 1..22: note = chemically synthesized
  source 1..22: mol_type = other DNA
ggtttcttccatgtcatcatgt

SEQ ID NO: 49375 - DNA, 22 bp, synthetic construct
  misc_feature 1..22: note = chemically synthesized
  source 1..22: mol_type = other DNA
cttccatgtcatcatgttcctc

SEQ ID NO: 49376 - DNA, 22 bp, synthetic construct
  misc_feature 1..22: note = chemically synthesized
  source 1..22: mol_type = other DNA
ttccatgtcatcatgttcctcc

SEQ ID NO: 49377 - DNA, 22 bp, synthetic construct
  misc_feature 1..22: note = chemically synthesized
  source 1..22: mol_type = other DNA
ccatgtcatcatgttcctcctt

SEQ ID NO: 49378 - DNA, 22 bp, synthetic construct
  misc_feature 1..22: note = chemically synthesized
  source 1..22: mol_type = other DNA
catgtcatcatgttcctccttg

SEQ ID NO: 49379 - DNA, 22 bp, synthetic construct
  misc_feature 1..22: note = chemically synthesized
  source 1..22: mol_type = other DNA
ctccttgcatggggccaggatc

SEQ ID NO: 49380 - DNA, 22 bp, synthetic construct
  misc_feature 1..22: note = chemically synthesized
  source 1..22: mol_type = other DNA
cttgcatggggccaggatccgt

SEQ ID NO: 49381 - DNA, 22 bp, synthetic construct
  misc_feature 1..22: note = chemically synthesized
  source 1..22: mol_type = other DNA
gcatggggccaggatccgtgga

SEQ ID NO: 49382 - DNA, 22 bp, synthetic construct
  misc_feature 1..22: note = chemically synthesized
  source 1..22: mol_type = other DNA
catggggccaggatccgtggag

SEQ ID NO: 49383 - DNA, 22 bp, synthetic construct
  misc_feature 1..22: note = chemically synthesized
  source 1..22: mol_type = other DNA
cctggcacctacgtggtggtgc

SEQ ID NO: 49384 - DNA, 22 bp, synthetic construct
  misc_feature 1..22: note = chemically synthesized
  source 1..22: mol_type = other DNA
gcacctacgtggtggtgctgaa

SEQ ID NO: 49385 - DNA, 22 bp, synthetic construct
  misc_feature 1..22: note = chemically synthesized
  source 1..22: mol_type = other DNA
cgtggtggtgctgaaggaggag

SEQ ID NO: 49386 - DNA, 22 bp, synthetic construct
  misc_feature 1..22: note = chemically synthesized
  source 1..22: mol_type = other DNA
aaggaggagacccacctctcgc

SEQ ID NO: 49387 - DNA, 22 bp, synthetic construct
  misc_feature 1..22: note = chemically synthesized
  source 1..22: mol_type = other DNA
tcgcagtcagagcgcactgccc

SEQ ID NO: 49388 - DNA, 22 bp, synthetic construct
  misc_feature 1..22: note = chemically synthesized
  source 1..22: mol_type = other DNA
gcagtcagagcgcactgcccgc

SEQ ID NO: 49389 - DNA, 22 bp, synthetic construct
  misc_feature 1..22: note = chemically synthesized
  source 1..22: mol_type = other DNA
cccgccgcctgcaggcccaggc

SEQ ID NO: 49390 - DNA, 22 bp, synthetic construct
  misc_feature 1..22: note = chemically synthesized
  source 1..22: mol_type = other DNA
caggcccaggctgcccgccggg

SEQ ID NO: 49391 - DNA, 22 bp, synthetic construct
  misc_feature 1..22: note = chemically synthesized
  source 1..22: mol_type = other DNA
cccgccggggatacctcaccaa

SEQ ID NO: 49392 - DNA, 22 bp, synthetic construct
  misc_feature 1..22: note = chemically synthesized
  source 1..22: mol_type = other DNA
accaagatcctgcatgtcttcc

SEQ ID NO: 49393 - DNA, 22 bp, synthetic construct
  misc_feature 1..22: note = chemically synthesized
  source 1..22: mol_type = other DNA
catgtcttccatggccttcttc

SEQ ID NO: 49394 - DNA, 22 bp, synthetic construct
  misc_feature 1..22: note = chemically synthesized
  source 1..22: mol_type = other DNA
ccatggccttcttcctggcttc

SEQ ID NO: 49395 - DNA, 22 bp, synthetic construct
  misc_feature 1..22: note = chemically synthesized
  source 1..22: mol_type = other DNA
catggccttcttcctggcttcc

SEQ ID NO: 49396 - DNA, 22 bp, synthetic construct
  misc_feature 1..22: note = chemically synthesized
  source 1..22: mol_type = other DNA
cttcctggcttcctggtgaaga

SEQ ID NO: 49397 - DNA, 22 bp, synthetic construct
  misc_feature 1..22: note = chemically synthesized
  source 1..22: mol_type = other DNA
ttcctggcttcctggtgaagat

SEQ ID NO: 49398 - DNA, 22 bp, synthetic construct
  misc_feature 1..22: note = chemically synthesized
  source 1..22: mol_type = other DNA
cctggcttcctggtgaagatga

SEQ ID NO: 49399 - DNA, 22 bp, synthetic construct
  misc_feature 1..22: note = chemically synthesized
  source 1..22: mol_type = other DNA
ctggcttcctggtgaagatgag

SEQ ID NO: 49400 - DNA, 22 bp, synthetic construct
  misc_feature 1..22: note = chemically synthesized
  source 1..22: mol_type = other DNA
gcttcctggtgaagatgagtgg

SEQ ID NO: 49401 - DNA, 22 bp, synthetic construct
  misc_feature 1..22: note = chemically synthesized
  source 1..22: mol_type = other DNA
cctggtgaagatgagtggcgac

SEQ ID NO: 49402 - DNA, 22 bp, synthetic construct
  misc_feature 1..22: note = chemically synthesized
  source 1..22: mol_type = other DNA
ctggtgaagatgagtggcgacc

SEQ ID NO: 49403 - DNA, 22 bp, synthetic construct
  misc_feature 1..22: note = chemically synthesized
  source 1..22: mol_type = other DNA
gtgaagatgagtggcgacctgc

SEQ ID NO: 49404 - DNA, 22 bp, synthetic construct
  misc_feature 1..22: note = chemically synthesized
  source 1..22: mol_type = other DNA
ctggagctggtgagccaccctt

SEQ ID NO: 49405 - DNA, 22 bp, synthetic construct
  misc_feature 1..22: note = chemically synthesized
  source 1..22: mol_type = other DNA
gagctggtgagccacccttttt

SEQ ID NO: 49406 - DNA, 22 bp, synthetic construct
  misc_feature 1..22: note = chemically synthesized
  source 1..22: mol_type = other DNA
gtgagccaccctttttgggaat

SEQ ID NO: 49407 - DNA, 22 bp, synthetic construct
  misc_feature 1..22: note = chemically synthesized
  source 1..22: mol_type = other DNA
tttgggaatggcacttcctgat

SEQ ID NO: 49408 - DNA, 22 bp, synthetic construct
  misc_feature 1..22: note = chemically synthesized
  source 1..22: mol_type = other DNA
ttgggaatggcacttcctgata

SEQ ID NO: 49409 - DNA, 22 bp, synthetic construct
  misc_feature 1..22: note = chemically synthesized
  source 1..22: mol_type = other DNA
tgggaatggcacttcctgatag

SEQ ID NO: 49410 - DNA, 22 bp, synthetic construct
  misc_feature 1..22: note = chemically synthesized
  source 1..22: mol_type = other DNA
gggaatggcacttcctgatagg

SEQ ID NO: 49411 - DNA, 22 bp, synthetic construct
  misc_feature 1..22: note = chemically synthesized
  source 1..22: mol_type = other DNA
ggaatggcacttcctgataggg

SEQ ID NO: 49412 - DNA, 22 bp, synthetic construct
  misc_feature 1..22: note = chemically synthesized
  source 1..22: mol_type = other DNA
cctgatagggctgggccactgc

SEQ ID NO: 49413 - DNA, 22 bp, synthetic construct
  misc_feature 1..22: note = chemically synthesized
  source 1..22: mol_type = other DNA
ctgatagggctgggccactgca

SEQ ID NO: 49414 - DNA, 22 bp, synthetic construct
  misc_feature 1..22: note = chemically synthesized
  source 1..22: mol_type = other DNA
atagggctgggccactgcatat

SEQ ID NO: 49415 - DNA, 22 bp, synthetic construct
  misc_feature 1..22: note = chemically synthesized
  source 1..22: mol_type = other DNA
ggccactgcatatacactgggg

SEQ ID NO: 49416 - DNA, 22 bp, synthetic construct
  misc_feature 1..22: note = chemically synthesized
  source 1..22: mol_type = other DNA
catatacactggggactgtgct

SEQ ID NO: 49417 - DNA, 22 bp, synthetic construct
  misc_feature 1..22: note = chemically synthesized
  source 1..22: mol_type = other DNA
gggactgtgcttagtaggccca

SEQ ID NO: 49418 - DNA, 22 bp, synthetic construct
  misc_feature 1..22: note = chemically synthesized
  source 1..22: mol_type = other DNA
tgcttagtaggcccattgctga

SEQ ID NO: 49419 - DNA, 22 bp, synthetic construct
  misc_feature 1..22: note = chemically synthesized
  source 1..22: mol_type = other DNA
agtaggcccattgctgaaaatc

SEQ ID NO: 49420 - DNA, 22 bp, synthetic construct
  misc_feature 1..22: note = chemically synthesized
  source 1..22: mol_type = other DNA
gtaggcccattgctgaaaatca

SEQ ID NO: 49421 - DNA, 22 bp, synthetic construct
  misc_feature 1..22: note = chemically synthesized
  source 1..22: mol_type = other DNA
ctgaaaatcagaaggggacagc

SEQ ID NO: 49422 - DNA, 22 bp, synthetic construct
  misc_feature 1..22: note = chemically synthesized
  source 1..22: mol_type = other DNA
aaaatcagaaggggacagcaag

SEQ ID NO: 49423 - DNA, 22 bp, synthetic construct
  misc_feature 1..22: note = chemically synthesized
  source 1..22: mol_type = other DNA
agcacttatcgggtaccaagca

SEQ ID NO: 49424 - DNA, 22 bp, synthetic construct
  misc_feature 1..22: note = chemically synthesized
  source 1..22: mol_type = other DNA
atcgggtaccaagcacagtaac

SEQ ID NO: 49425 - DNA, 22 bp, synthetic construct
  misc_feature 1..22: note = chemically synthesized
  source 1..22: mol_type = other DNA
tcgggtaccaagcacagtaact

SEQ ID NO: 49426 - DNA, 22 bp, synthetic construct
  misc_feature 1..22: note = chemically synthesized
  source 1..22: mol_type = other DNA
ctggctttctgtatagaattcc

SEQ ID NO: 49427 - DNA, 22 bp, synthetic construct
  misc_feature 1..22: note = chemically synthesized
  source 1..22: mol_type = other DNA
gctttctgtatagaattccctt

SEQ ID NO: 49428 - DNA, 22 bp, synthetic construct
  misc_feature 1..22: note = chemically synthesized
  source 1..22: mol_type = other DNA
tctgtatagaattccctttaag

SEQ ID NO: 49429 - DNA, 22 bp, synthetic construct
  misc_feature 1..22: note = chemically synthesized
  source 1..22: mol_type = other DNA
ctgtatagaattccctttaagc

SEQ ID NO: 49430 - DNA, 22 bp, synthetic construct
  misc_feature 1..22: note = chemically synthesized
  source 1..22: mol_type = other DNA
tgtatagaattccctttaagcc

SEQ ID NO: 49431 - DNA, 22 bp, synthetic construct
  misc_feature 1..22: note = chemically synthesized
  source 1..22: mol_type = other DNA
tatagaattccctttaagcctg

SEQ ID NO: 49432 - DNA, 22 bp, synthetic construct
  misc_feature 1..22: note = chemically synthesized
  source 1..22: mol_type = other DNA
cctttaagcctggccatgcccc

SEQ ID NO: 49433 - DNA, 22 bp, synthetic construct
  misc_feature 1..22: note = chemically synthesized
  source 1..22: mol_type = other DNA
taagcctggccatgccccagtg

SEQ ID NO: 49434 - DNA, 22 bp, synthetic construct
  misc_feature 1..22: note = chemically synthesized
  source 1..22: mol_type = other DNA
aagcctggccatgccccagtgg

SEQ ID NO: 49435 - DNA, 22 bp, synthetic construct
  misc_feature 1..22: note = chemically synthesized
  source 1..22: mol_type = other DNA
agcctggccatgccccagtggt

SEQ ID NO: 49436 - DNA, 22 bp, synthetic construct
  misc_feature 1..22: note = chemically synthesized
  source 1..22: mol_type = other DNA
gccatgccccagtggtacgtct

SEQ ID NO: 49437 - DNA, 22 bp, synthetic construct
  misc_feature 1..22: note = chemically synthesized
  source 1..22: mol_type = other DNA
tcttcatttgaaagacgaggag

SEQ ID NO: 49438 - DNA, 22 bp, synthetic construct
  misc_feature 1..22: note = chemically synthesized
  source 1..22: mol_type = other DNA
catttgaaagacgaggagactg

SEQ ID NO: 49439 - DNA, 22 bp, synthetic construct
  misc_feature 1..22: note = chemically synthesized
  source 1..22: mol_type = other DNA
atttgaaagacgaggagactga

SEQ ID NO: 49440 - DNA, 22 bp, synthetic construct
  misc_feature 1..22: note = chemically synthesized
  source 1..22: mol_type = other DNA
gaaagacgaggagactgaagtt

SEQ ID NO: 49441 - DNA, 22 bp, synthetic construct
  misc_feature 1..22: note = chemically synthesized
  source 1..22: mol_type = other DNA
aaagacgaggagactgaagttc

SEQ ID NO: 49442 - DNA, 22 bp, synthetic construct
  misc_feature 1..22: note = chemically synthesized
  source 1..22: mol_type = other DNA
aagttcagaggggaccacacag

SEQ ID NO: 49443 - DNA, 22 bp, synthetic construct
  misc_feature 1..22: note = chemically synthesized
  source 1..22: mol_type = other DNA
agaggggaccacacagacagct

SEQ ID NO: 49444 - DNA, 22 bp, synthetic construct
  misc_feature 1..22: note = chemically synthesized
  source 1..22: mol_type = other DNA
ggggtagagcctggatcaaacc

SEQ ID NO: 49445 - DNA, 22 bp, synthetic construct
  misc_feature 1..22: note = chemically synthesized
  source 1..22: mol_type = other DNA
gatcaaacccattggtctgcct

SEQ ID NO: 49446 - DNA, 22 bp, synthetic construct
  misc_feature 1..22: note = chemically synthesized
  source 1..22: mol_type = other DNA
gtctgcctgccagccattcttg

SEQ ID NO: 49447 - DNA, 22 bp, synthetic construct
  misc_feature 1..22: note = chemically synthesized
  source 1..22: mol_type = other DNA
cctgccagccattcttgtgcca

SEQ ID NO: 49448 - DNA, 22 bp, synthetic construct
  misc_feature 1..22: note = chemically synthesized
  source 1..22: mol_type = other DNA
ccagccattcttgtgccaatgc

SEQ ID NO: 49449 - DNA, 22 bp, synthetic construct
  misc_feature 1..22: note = chemically synthesized
  source 1..22: mol_type = other DNA
ttgtgccaatgcatctgctgcc

SEQ ID NO: 49450 - DNA, 22 bp, synthetic construct
  misc_feature 1..22: note = chemically synthesized
  source 1..22: mol_type = other DNA
gtgccaatgcatctgctgccta

SEQ ID NO: 49451 - DNA, 22 bp, synthetic construct
  misc_feature 1..22: note = chemically synthesized
  source 1..22: mol_type = other DNA
tgccaatgcatctgctgcctac

SEQ ID NO: 49452 - DNA, 22 bp, synthetic construct
  misc_feature 1..22: note = chemically synthesized
  source 1..22: mol_type = other DNA
ctgcctacggaaacctgtaggg

SEQ ID NO: 49453 - DNA, 22 bp, synthetic construct
  misc_feature 1..22: note = chemically synthesized
  source 1..22: mol_type = other DNA
cctacggaaacctgtagggaca

SEQ ID NO: 49454 - DNA, 22 bp, synthetic construct
  misc_feature 1..22: note = chemically synthesized
  source 1..22: mol_type = other DNA
cggaaacctgtagggacaaggc

SEQ ID NO: 49455 - DNA, 22 bp, synthetic construct
  misc_feature 1..22: note = chemically synthesized
  source 1..22: mol_type = other DNA
tagggacaaggccctgggatgt

SEQ ID NO: 49456 - DNA, 22 bp, synthetic construct
  misc_feature 1..22: note = chemically synthesized
  source 1..22: mol_type = other DNA
ggatgttcagtggagcctgagt

SEQ ID NO: 49457 - DNA, 22 bp, synthetic construct
  misc_feature 1..22: note = chemically synthesized
  source 1..22: mol_type = other DNA
agtggagcctgagtcattttat

SEQ ID NO: 49458 - DNA, 22 bp, synthetic construct
  misc_feature 1..22: note = chemically synthesized
  source 1..22: mol_type = other DNA
agtcattttataaaaaagcatg

SEQ ID NO: 49459 - DNA, 22 bp, synthetic construct
  misc_feature 1..22: note = chemically synthesized
  source 1..22: mol_type = other DNA
tataaaaaagcatgactctagg

SEQ ID NO: 49460 - DNA, 22 bp, synthetic construct
  misc_feature 1..22: note = chemically synthesized
  source 1..22: mol_type = other DNA
ataaaaaagcatgactctaggg

SEQ ID NO: 49461 - DNA, 22 bp, synthetic construct
  misc_feature 1..22: note = chemically synthesized
  source 1..22: mol_type = other DNA
taaaaaagcatgactctagggt

SEQ ID NO: 49462 - DNA, 22 bp, synthetic construct
  misc_feature 1..22: note = chemically synthesized
  source 1..22: mol_type = other DNA
tagggtccaaaattcctttgaa

SEQ ID NO: 49463 - DNA, 22 bp, synthetic construct
  misc_feature 1..22: note = chemically synthesized
  source 1..22: mol_type = other DNA
gggtccaaaattcctttgaagc

SEQ ID NO: 49464 - DNA, 22 bp, synthetic construct
  misc_feature 1..22: note = chemically synthesized
  source 1..22: mol_type = other DNA
ctttgaagctgttgctatccag

SEQ ID NO: 49465 - DNA, 22 bp, synthetic construct
  misc_feature 1..22: note = chemically synthesized
  source 1..22: mol_type = other DNA
tgaagctgttgctatccagagt

SEQ ID NO: 49466 - DNA, 22 bp, synthetic construct
  misc_feature 1..22: note = chemically synthesized
  source 1..22: mol_type = other DNA
gaagctgttgctatccagagtg

SEQ ID NO: 49467 - DNA, 22 bp, synthetic construct
  misc_feature 1..22: note = chemically synthesized
  source 1..22: mol_type = other DNA
aagctgttgctatccagagtga

SEQ ID NO: 49468 - DNA, 22 bp, synthetic construct
  misc_feature 1..22: note = chemically synthesized
  source 1..22: mol_type = other DNA
ttgctatccagagtgaagtccc

SEQ ID NO: 49469 - DNA, 22 bp, synthetic construct
  misc_feature 1..22: note = chemically synthesized
  source 1..22: mol_type = other DNA
ctatccagagtgaagtcccttc

SEQ ID NO: 49470 - DNA, 22 bp, synthetic construct
  misc_feature 1..22: note = chemically synthesized
  source 1..22: mol_type = other DNA
tccagagtgaagtcccttcttt

SEQ ID NO: 49471 - DNA, 22 bp, synthetic construct
  misc_feature 1..22: note = chemically synthesized
  source 1..22: mol_type = other DNA
ctttaggacagggtggccctcc

SEQ ID NO: 49472 - DNA, 22 bp, synthetic construct
  misc_feature 1..22: note = chemically synthesized
  source 1..22: mol_type = other DNA
tttaggacagggtggccctcct

SEQ ID NO: 49473 - DNA, 22 bp, synthetic construct
  misc_feature 1..22: note = chemically synthesized
  source 1..22: mol_type = other DNA
taggacagggtggccctcctcc

SEQ ID NO: 49474 - DNA, 22 bp, synthetic construct
  misc_feature 1..22: note = chemically synthesized
  source 1..22: mol_type = other DNA
aggacagggtggccctcctccc

SEQ ID NO: 49475 - DNA, 22 bp, synthetic construct
  misc_feature 1..22: note = chemically synthesized
  source 1..22: mol_type = other DNA
ggacagggtggccctcctccct

SEQ ID NO: 49476 - DNA, 22 bp, synthetic construct
  misc_feature 1..22: note = chemically synthesized
  source 1..22: mol_type = other DNA
ctccctcctggatgtcacatct

SEQ ID NO: 49477 - DNA, 22 bp, synthetic construct
  misc_feature 1..22: note = chemically synthesized
  source 1..22: mol_type = other DNA
cctcctggatgtcacatcttcg

SEQ ID NO: 49478 - DNA, 22 bp, synthetic construct
  misc_feature 1..22: note = chemically synthesized
  source 1..22: mol_type = other DNA
ctggatgtcacatcttcggtgg

SEQ ID NO: 49479 - DNA, 22 bp, synthetic construct
  misc_feature 1..22: note = chemically synthesized
  source 1..22: mol_type = other DNA
gatgtcacatcttcggtggagg

SEQ ID NO: 49480 - DNA, 22 bp, synthetic construct
  misc_feature 1..22: note = chemically synthesized
  source 1..22: mol_type = other DNA
cggtggaggggcagaaagggga

SEQ ID NO: 49481 - DNA, 22 bp, synthetic construct
  misc_feature 1..22: note = chemically synthesized
  source 1..22: mol_type = other DNA
ggtggaggggcagaaaggggac

SEQ ID NO: 49482 - DNA, 22 bp, synthetic construct
  misc_feature 1..22: note = chemically synthesized
  source 1..22: mol_type = other DNA
ggtattctcctcaccctggccc

SEQ ID NO: 49483 - DNA, 22 bp, synthetic construct
  misc_feature 1..22: note = chemically synthesized
  source 1..22: mol_type = other DNA
tcctcaccctggccctagtgct

SEQ ID NO: 49484 - DNA, 22 bp, synthetic construct
  misc_feature 1..22: note = chemically synthesized
  source 1..22: mol_type = other DNA
ctcaccctggccctagtgcttc

SEQ ID NO: 49485 - DNA, 22 bp, synthetic construct
  misc_feature 1..22: note = chemically synthesized
  source 1..22: mol_type = other DNA
accctggccctagtgcttcaaa

SEQ ID NO: 49486 - DNA, 22 bp, synthetic construct
  misc_feature 1..22: note = chemically synthesized
  source 1..22: mol_type = other DNA
gccctagtgcttcaaatcttaa

SEQ ID NO: 49487 - DNA, 22 bp, synthetic construct
  misc_feature 1..22: note = chemically synthesized
  source 1..22: mol_type = other DNA
gtgcttcaaatcttaaaaaaac

SEQ ID NO: 49488 - DNA, 22 bp, synthetic construct
  misc_feature 1..22: note = chemically synthesized
  source 1..22: mol_type = other DNA
caaatcttaaaaaaacgttttt

SEQ ID NO: 49489 - DNA, 22 bp, synthetic construct
  misc_feature 1..22: note = chemically synthesized
  source 1..22: mol_type = other DNA
aaatcttaaaaaaacgttttta

SEQ ID NO: 49490 - DNA, 22 bp, synthetic construct
  misc_feature 1..22: note = chemically synthesized
  source 1..22: mol_type = other DNA
aaaaaaacgtttttatttgtgc

SEQ ID NO: 49491 - DNA, 22 bp, synthetic construct
  misc_feature 1..22: note = chemically synthesized
  source 1..22: mol_type = other DNA
aaaaaacgtttttatttgtgct

SEQ ID NO: 49492 - DNA, 22 bp, synthetic construct
  misc_feature 1..22: note = chemically synthesized
  source 1..22: mol_type = other DNA
ttatttgtgcttctgcaccacc

SEQ ID NO: 49493 - DNA, 22 bp, synthetic construct
  misc_feature 1..22: note = chemically synthesized
  source 1..22: mol_type = other DNA
tatttgtgcttctgcaccacct

SEQ ID NO: 49494 - DNA, 22 bp, synthetic construct
  misc_feature 1..22: note = chemically synthesized
  source 1..22: mol_type = other DNA
atttgtgcttctgcaccacctt

SEQ ID NO: 49495 - DNA, 22 bp, synthetic construct
  misc_feature 1..22: note = chemically synthesized
  source 1..22: mol_type = other DNA
tttgtgcttctgcaccaccttc

SEQ ID NO: 49496 - DNA, 22 bp, synthetic construct
  misc_feature 1..22: note = chemically synthesized
  source 1..22: mol_type = other DNA
gtgcttctgcaccaccttctag

SEQ ID NO: 49497 - DNA, 22 bp, synthetic construct
  misc_feature 1..22: note = chemically synthesized
  source 1..22: mol_type = other DNA
tgcttctgcaccaccttctagc

SEQ ID NO: 49498 - DNA, 22 bp, synthetic construct
  misc_feature 1..22: note = chemically synthesized
  source 1..22: mol_type = other DNA
gaaggtggtgcagaagcacaaa

SEQ ID NO: 49499 - DNA, 22 bp, synthetic construct
  misc_feature 1..22: note = chemically synthesized
  source 1..22: mol_type = other DNA
ttttaagatttgaagcactagg

SEQ ID NO: 49500 - DNA, 22 bp, synthetic construct
  misc_feature 1..22: note = chemically synthesized
  source 1..22: mol_type = other DNA
tttaagatttgaagcactaggg

SEQ ID NO: 49501 - DNA, 22 bp, synthetic construct
  misc_feature 1..22: note = chemically synthesized
  source 1..22: mol_type = other DNA
ttaagatttgaagcactagggc

SEQ ID NO: 49502 - DNA, 22 bp, synthetic construct
  misc_feature 1..22: note = chemically synthesized
  source 1..22: mol_type = other DNA
taagatttgaagcactagggcc

SEQ ID NO: 49503 - DNA, 22 bp, synthetic construct
  misc_feature 1..22: note = chemically synthesized
  source 1..22: mol_type = other DNA
aagatttgaagcactagggcca

SEQ ID NO: 49504 - DNA, 22 bp, synthetic construct
  misc_feature 1..22: note = chemically synthesized
  source 1..22: mol_type = other DNA
agatttgaagcactagggccag

SEQ ID NO: 49505 - DNA, 22 bp, synthetic construct
  misc_feature 1..22: note = chemically synthesized
  source 1..22: mol_type = other DNA
gaagcactagggccagggtgag

SEQ ID NO: 49506 - DNA, 22 bp, synthetic construct
  misc_feature 1..22: note = chemically synthesized
  source 1..22: mol_type = other DNA
aagcactagggccagggtgagg

SEQ ID NO: 49507 - DNA, 22 bp, synthetic construct
  misc_feature 1..22: note = chemically synthesized
  source 1..22: mol_type = other DNA
gggccagggtgaggagaatacc

SEQ ID NO: 49508 - DNA, 22 bp, synthetic construct
  misc_feature 1..22: note = chemically synthesized
  source 1..22: mol_type = other DNA
tctgcccctccaccgaagatgt

SEQ ID NO: 49509 - DNA, 22 bp, synthetic construct
  misc_feature 1..22: note = chemically synthesized
  source 1..22: mol_type = other DNA
ctgcccctccaccgaagatgtg

SEQ ID NO: 49510 - DNA, 22 bp, synthetic construct
  misc_feature 1..22: note = chemically synthesized
  source 1..22: mol_type = other DNA
tgcccctccaccgaagatgtga

SEQ ID NO: 49511 - DNA, 22 bp, synthetic construct
  misc_feature 1..22: note = chemically synthesized
  source 1..22: mol_type = other DNA
cccctccaccgaagatgtgaca

SEQ ID NO: 49512 - DNA, 22 bp, synthetic construct
  misc_feature 1..22: note = chemically synthesized
  source 1..22: mol_type = other DNA
caccgaagatgtgacatccagg

SEQ ID NO: 49513 - DNA, 22 bp, synthetic construct
  misc_feature 1..22: note = chemically synthesized
  source 1..22: mol_type = other DNA
tcctaaagaagggacttcactc

SEQ ID NO: 49514 - DNA, 22 bp, synthetic construct
  misc_feature 1..22: note = chemically synthesized
  source 1..22: mol_type = other DNA
aagaagggacttcactctggat

SEQ ID NO: 49515 - DNA, 22 bp, synthetic construct
  misc_feature 1..22: note = chemically synthesized
  source 1..22: mol_type = other DNA
cactctggatagcaacagcttc

SEQ ID NO: 49516 - DNA, 22 bp, synthetic construct
  misc_feature 1..22: note = chemically synthesized
  source 1..22: mol_type = other DNA
actctggatagcaacagcttca

SEQ ID NO: 49517 - DNA, 22 bp, synthetic construct
  misc_feature 1..22: note = chemically synthesized
  source 1..22: mol_type = other DNA
tggatagcaacagcttcaaagg

SEQ ID NO: 49518 - DNA, 22 bp, synthetic construct
  misc_feature 1..22: note = chemically synthesized
  source 1..22: mol_type = other DNA
gatagcaacagcttcaaaggaa

SEQ ID NO: 49519 - DNA, 22 bp, synthetic construct
  misc_feature 1..22: note = chemically synthesized
  source 1..22: mol_type = other DNA
caaaggaattttggaccctaga

SEQ ID NO: 49520 - DNA, 22 bp, synthetic construct
  misc_feature 1..22: note = chemically synthesized
  source 1..22: mol_type = other DNA
aaaggaattttggaccctagag

SEQ ID NO: 49521 - DNA, 22 bp, synthetic construct
  misc_feature 1..22: note = chemically synthesized
  source 1..22: mol_type = other DNA
tggaccctagagtcatgctttt

SEQ ID NO: 49522 - DNA, 22 bp, synthetic construct
  misc_feature 1..22: note = chemically synthesized
  source 1..22: mol_type = other DNA
ggaccctagagtcatgcttttt

SEQ ID NO: 49523 - DNA, 22 bp, synthetic construct
  misc_feature 1..22: note = chemically synthesized
  source 1..22: mol_type = other DNA
gaccctagagtcatgctttttt

SEQ ID NO: 49524 - DNA, 22 bp, synthetic construct
  misc_feature 1..22: note = chemically synthesized
  source 1..22: mol_type = other DNA
gagtcatgcttttttataaaat

SEQ ID NO: 49525 - DNA, 22 bp, synthetic construct
  misc_feature 1..22: note = chemically synthesized
  source 1..22: mol_type = other DNA
ttttataaaatgactcaggctc

SEQ ID NO: 49526 - DNA, 22 bp, synthetic construct
  misc_feature 1..22: note = chemically synthesized
  source 1..22: mol_type = other DNA
tttataaaatgactcaggctcc

SEQ ID NO: 49527 - DNA, 22 bp, synthetic construct
  misc_feature 1..22: note = chemically synthesized
  source 1..22: mol_type = other DNA
ttataaaatgactcaggctcca

SEQ ID NO: 49528 - DNA, 22 bp, synthetic construct
  misc_feature 1..22: note = chemically synthesized
  source 1..22: mol_type = other DNA
tataaaatgactcaggctccac

SEQ ID NO: 49529 - DNA, 22 bp, synthetic construct
  misc_feature 1..22: note = chemically synthesized
  source 1..22: mol_type = other DNA
ataaaatgactcaggctccact

SEQ ID NO: 49530 - DNA, 22 bp, synthetic construct
  misc_feature 1..22: note = chemically synthesized
  source 1..22: mol_type = other DNA
taaaatgactcaggctccactg

SEQ ID NO: 49531 - DNA, 22 bp, synthetic construct
  misc_feature 1..22: note = chemically synthesized
  source 1..22: mol_type = other DNA
aggctccactgaacatcccagg

SEQ ID NO: 49532 - DNA, 22 bp, synthetic construct
  misc_feature 1..22: note = chemically synthesized
  source 1..22: mol_type = other DNA
cactgaacatcccagggccttg

SEQ ID NO: 49533 - DNA, 22 bp, synthetic construct
  misc_feature 1..22: note = chemically synthesized
  source 1..22: mol_type = other DNA
aacatcccagggccttgtccct

SEQ ID NO: 49534 - DNA, 22 bp, synthetic construct
  misc_feature 1..22: note = chemically synthesized
  source 1..22: mol_type = other DNA
gtccctacaggtttccgtaggc

SEQ ID NO: 49535 - DNA, 22 bp, synthetic construct
  misc_feature 1..22: note = chemically synthesized
  source 1..22: mol_type = other DNA
tccctacaggtttccgtaggca

SEQ ID NO: 49536 - DNA, 22 bp, synthetic construct
  misc_feature 1..22: note = chemically synthesized
  source 1..22: mol_type = other DNA
caggtttccgtaggcagcagat

SEQ ID NO: 49537 - DNA, 22 bp, synthetic construct
  misc_feature 1..22: note = chemically synthesized
  source 1..22: mol_type = other DNA
ccgtaggcagcagatgcattgg

SEQ ID NO: 49538 - DNA, 22 bp, synthetic construct
  misc_feature 1..22: note = chemically synthesized
  source 1..22: mol_type = other DNA
cgtaggcagcagatgcattggc

SEQ ID NO: 49539 - DNA, 22 bp, synthetic construct
  misc_feature 1..22: note = chemically synthesized
  source 1..22: mol_type = other DNA
gcacaagaatggctggcaggca

SEQ ID NO: 49540 - DNA, 22 bp, synthetic construct
  misc_feature 1..22: note = chemically synthesized
  source 1..22: mol_type = other DNA
gcaggcagaccaatgggtttga

SEQ ID NO: 49541 - DNA, 22 bp, synthetic construct
  misc_feature 1..22: note = chemically synthesized
  source 1..22: mol_type = other DNA
gatccaggctctacccctagct

SEQ ID NO: 49542 - DNA, 22 bp, synthetic construct
  misc_feature 1..22: note = chemically synthesized
  source 1..22: mol_type = other DNA
atccaggctctacccctagctg

SEQ ID NO: 49543 - DNA, 22 bp, synthetic construct
  misc_feature 1..22: note = chemically synthesized
  source 1..22: mol_type = other DNA
tacccctagctgtctgtgtggt

SEQ ID NO: 49544 - DNA, 22 bp, synthetic construct
  misc_feature 1..22: note = chemically synthesized
  source 1..22: mol_type = other DNA
cccctagctgtctgtgtggtcc

SEQ ID NO: 49545 - DNA, 22 bp, synthetic construct
  misc_feature 1..22: note = chemically synthesized
  source 1..22: mol_type = other DNA
gctgtctgtgtggtcccctctg

SEQ ID NO: 49546 - DNA, 22 bp, synthetic construct
  misc_feature 1..22: note = chemically synthesized
  source 1..22: mol_type = other DNA
tctgtgtggtcccctctgaact

SEQ ID NO: 49547 - DNA, 22 bp, synthetic construct
  misc_feature 1..22: note = chemically synthesized
  source 1..22: mol_type = other DNA
tgtggtcccctctgaacttcag

SEQ ID NO: 49548 - DNA, 22 bp, synthetic construct
  misc_feature 1..22: note = chemically synthesized
  source 1..22: mol_type = other DNA
tgaacttcagtctcctcgtctt

SEQ ID NO: 49549 - DNA, 22 bp, synthetic construct
  misc_feature 1..22: note = chemically synthesized
  source 1..22: mol_type = other DNA
aacttcagtctcctcgtctttc

SEQ ID NO: 49550 - DNA, 22 bp, synthetic construct
  misc_feature 1..22: note = chemically synthesized
  source 1..22: mol_type = other DNA
cagtctcctcgtctttcaaatg

SEQ ID NO: 49551 - DNA, 22 bp, synthetic construct
  misc_feature 1..22: note = chemically synthesized
  source 1..22: mol_type = other DNA
agtctcctcgtctttcaaatga

SEQ ID NO: 49552 - DNA, 22 bp, synthetic construct
  misc_feature 1..22: note = chemically synthesized
  source 1..22: mol_type = other DNA
ctcgtctttcaaatgaagatag

SEQ ID NO: 49553 - DNA, 22 bp, synthetic construct
  misc_feature 1..22: note = chemically synthesized
  source 1..22: mol_type = other DNA
gtctttcaaatgaagatagacg

SEQ ID NO: 49554 - DNA, 22 bp, synthetic construct
  misc_feature 1..22: note = chemically synthesized
  source 1..22: mol_type = other DNA
tcaaatgaagatagacgtacca

SEQ ID NO: 49555 - DNA, 22 bp, synthetic construct
  misc_feature 1..22: note = chemically synthesized
  source 1..22: mol_type = other DNA
caaatgaagatagacgtaccac

SEQ ID NO: 49556 - DNA, 22 bp, synthetic construct
  misc_feature 1..22: note = chemically synthesized
  source 1..22: mol_type = other DNA
aaatgaagatagacgtaccact

SEQ ID NO: 49557 - DNA, 22 bp, synthetic construct
  misc_feature 1..22: note = chemically synthesized
  source 1..22: mol_type = other DNA
gggcatggccaggcttaaaggg

SEQ ID NO: 49558 - DNA, 22 bp, synthetic construct
  misc_feature 1..22: note = chemically synthesized
  source 1..22: mol_type = other DNA
aaagggaattctatacagaaag

SEQ ID NO: 49559 - DNA, 22 bp, synthetic construct
  misc_feature 1..22: note = chemically synthesized
  source 1..22: mol_type = other DNA
aagggaattctatacagaaagc

SEQ ID NO: 49560 - DNA, 22 bp, synthetic construct
  misc_feature 1..22: note = chemically synthesized
  source 1..22: mol_type = other DNA
tatacagaaagccagtagttac

SEQ ID NO: 49561 - DNA, 22 bp, synthetic construct
  misc_feature 1..22: note = chemically synthesized
  source 1..22: mol_type = other DNA
tacagaaagccagtagttactg

SEQ ID NO: 49562 - DNA, 22 bp, synthetic construct
  misc_feature 1..22: note = chemically synthesized
  source 1..22: mol_type = other DNA
ctgtgcttggtacccgataagt

SEQ ID NO: 49563 - DNA, 22 bp, synthetic construct
  misc_feature 1..22: note = chemically synthesized
  source 1..22: mol_type = other DNA
tgcttggtacccgataagtgct

SEQ ID NO: 49564 - DNA, 22 bp, synthetic construct
  misc_feature 1..22: note = chemically synthesized
  source 1..22: mol_type = other DNA
ggtacccgataagtgctcaata

SEQ ID NO: 49565 - DNA, 22 bp, synthetic construct
  misc_feature 1..22: note = chemically synthesized
  source 1..22: mol_type = other DNA
gtacccgataagtgctcaatac

SEQ ID NO: 49566 - DNA, 22 bp, synthetic construct
  misc_feature 1..22: note = chemically synthesized
  source 1..22: mol_type = other DNA
aatacatacttgctgtcccctt

SEQ ID NO: 49567 - DNA, 22 bp, synthetic construct
  misc_feature 1..22: note = chemically synthesized
  source 1..22: mol_type = other DNA
gctgtccccttctgattttcag

SEQ ID NO: 49568 - DNA, 22 bp, synthetic construct
  misc_feature 1..22: note = chemically synthesized
  source 1..22: mol_type = other DNA
ctgtccccttctgattttcagc

SEQ ID NO: 49569 - DNA, 22 bp, synthetic construct
  misc_feature 1..22: note = chemically synthesized
  source 1..22: mol_type = other DNA
tccccttctgattttcagcaat

SEQ ID NO: 49570 - DNA, 22 bp, synthetic construct
  misc_feature 1..22: note = chemically synthesized
  source 1..22: mol_type = other DNA
ctgattttcagcaatgggccta

SEQ ID NO: 49571 - DNA, 22 bp, synthetic construct
  misc_feature 1..22: note = chemically synthesized
  source 1..22: mol_type = other DNA
tgattttcagcaatgggcctac

SEQ ID NO: 49572 - DNA, 22 bp, synthetic construct
  misc_feature 1..22: note = chemically synthesized
  source 1..22: mol_type = other DNA
attttcagcaatgggcctacta

SEQ ID NO: 49573 - DNA, 22 bp, synthetic construct
  misc_feature 1..22: note = chemically synthesized
  source 1..22: mol_type = other DNA
tcagcaatgggcctactaagca

SEQ ID NO: 49574 - DNA, 22 bp, synthetic construct
  misc_feature 1..22: note = chemically synthesized
  source 1..22: mol_type = other DNA
cagcaatgggcctactaagcac

SEQ ID NO: 49575 - DNA, 22 bp, synthetic construct
  misc_feature 1..22: note = chemically synthesized
  source 1..22: mol_type = other DNA
agcaatgggcctactaagcaca

SEQ ID NO: 49576 - DNA, 22 bp, synthetic construct
  misc_feature 1..22: note = chemically synthesized
  source 1..22: mol_type = other DNA
ctaagcacagtccccagtgtat

SEQ ID NO: 49577 - DNA, 22 bp, synthetic construct
  misc_feature 1..22: note = chemically synthesized
  source 1..22: mol_type = other DNA
agcacagtccccagtgtatatg

SEQ ID NO: 49578 - DNA, 22 bp, synthetic construct
  misc_feature 1..22: note = chemically synthesized
  source 1..22: mol_type = other DNA
tcaggaagtgccattcccaaaa

SEQ ID NO: 49579 - DNA, 22 bp, synthetic construct
  misc_feature 1..22: note = chemically synthesized
  source 1..22: mol_type = other DNA
ccaaaaagggtggctcaccagc

SEQ ID NO: 49580 - DNA, 22 bp, synthetic construct
  misc_feature 1..22: note = chemically synthesized
  source 1..22: mol_type = other DNA
accagctccagcaggtcgccac

SEQ ID NO: 49581 - DNA, 22 bp, synthetic construct
  misc_feature 1..22: note = chemically synthesized
  source 1..22: mol_type = other DNA
cagcaggtcgccactcatcttc

SEQ ID NO: 49582 - DNA, 22 bp, synthetic construct
  misc_feature 1..22: note = chemically synthesized
  source 1..22: mol_type = other DNA
atcttcaccaggaagccaggaa

SEQ ID NO: 49583 - DNA, 22 bp, synthetic construct
  misc_feature 1..22: note = chemically synthesized
  source 1..22: mol_type = other DNA
caccaggaagccaggaagaagg

SEQ ID NO: 49584 - DNA, 22 bp, synthetic construct
  misc_feature 1..22: note = chemically synthesized
  source 1..22: mol_type = other DNA
accaggaagccaggaagaaggc

SEQ ID NO: 49585 - DNA, 22 bp, synthetic construct
  misc_feature 1..22: note = chemically synthesized
  source 1..22: mol_type = other DNA
ggtgaggtatccccggcgggca

SEQ ID NO: 49586 - DNA, 22 bp, synthetic construct
  misc_feature 1..22: note = chemically synthesized
  source 1..22: mol_type = other DNA
gtgaggtatccccggcgggcag

SEQ ID NO: 49587 - DNA, 22 bp, synthetic construct
  misc_feature 1..22: note = chemically synthesized
  source 1..22: mol_type = other DNA
ggcctgcaggcggcgggcagtg

SEQ ID NO: 49588 - DNA, 22 bp, synthetic construct
  misc_feature 1..22: note = chemically synthesized
  source 1..22: mol_type = other DNA
caggcggcgggcagtgcgctct

SEQ ID NO: 49589 - DNA, 22 bp, synthetic construct
  misc_feature 1..22: note = chemically synthesized
  source 1..22: mol_type = other DNA
tgactgcgagaggtgggtctcc

SEQ ID NO: 49590 - DNA, 22 bp, synthetic construct
  misc_feature 1..22: note = chemically synthesized
  source 1..22: mol_type = other DNA
actgcgagaggtgggtctcctc

SEQ ID NO: 49591 - DNA, 22 bp, synthetic construct
  misc_feature 1..22: note = chemically synthesized
  source 1..22: mol_type = other DNA
cgagaggtgggtctcctccttc

SEQ ID NO: 49592 - DNA, 22 bp, synthetic construct
  misc_feature 1..22: note = chemically synthesized
  source 1..22: mol_type = other DNA
ctccttcagcaccaccacgtag

SEQ ID NO: 49593 - DNA, 22 bp, synthetic construct
  misc_feature 1..22: note = chemically synthesized
  source 1..22: mol_type = other DNA
cttcagcaccaccacgtaggtg

SEQ ID NO: 49594 - DNA, 22 bp, synthetic construct
  misc_feature 1..22: note = chemically synthesized
  source 1..22: mol_type = other DNA
cagcaccaccacgtaggtgcca

SEQ ID NO: 49595 - DNA, 22 bp, synthetic construct
  misc_feature 1..22: note = chemically synthesized
  source 1..22: mol_type = other DNA
agcaccaccacgtaggtgccag

SEQ ID NO: 49596 - DNA, 22 bp, synthetic construct
  misc_feature 1..22: note = chemically synthesized
  source 1..22: mol_type = other DNA
cacggatcctggccccatgcaa

SEQ ID NO: 49597 - DNA, 22 bp, synthetic construct
  misc_feature 1..22: note = chemically synthesized
  source 1..22: mol_type = other DNA
gccccatgcaaggaggaacatg

SEQ ID NO: 49598 - DNA, 22 bp, synthetic construct
  misc_feature 1..22: note = chemically synthesized
  source 1..22: mol_type = other DNA
ggtgtactttatctcaccccta

SEQ ID NO: 49599 - DNA, 22 bp, synthetic construct
  misc_feature 1..22: note = chemically synthesized
  source 1..22: mol_type = other DNA
tatctcacccctacttacaaat

SEQ ID NO: 49600 - DNA, 22 bp, synthetic construct
  misc_feature 1..22: note = chemically synthesized
  source 1..22: mol_type = other DNA
atctcacccctacttacaaatt

SEQ ID NO: 49601 - DNA, 22 bp, synthetic construct
  misc_feature 1..22: note = chemically synthesized
  source 1..22: mol_type = other DNA
tctcacccctacttacaaatta

SEQ ID NO: 49602 - DNA, 22 bp, synthetic construct
  misc_feature 1..22: note = chemically synthesized
  source 1..22: mol_type = other DNA
acccctacttacaaattacaac

SEQ ID NO: 49603 - DNA, 22 bp, synthetic construct
  misc_feature 1..22: note = chemically synthesized
  source 1..22: mol_type = other DNA
cttacaaattacaacaaaagag

SEQ ID NO: 49604 - DNA, 22 bp, synthetic construct
  misc_feature 1..22: note = chemically synthesized
  source 1..22: mol_type = other DNA
acaaattacaacaaaagagaca

SEQ ID NO: 49605 - DNA, 22 bp, synthetic construct
  misc_feature 1..22: note = chemically synthesized
  source 1..22: mol_type = other DNA
caaattacaacaaaagagacac

SEQ ID NO: 49606 - DNA, 22 bp, synthetic construct
  misc_feature 1..22: note = chemically synthesized
  source 1..22: mol_type = other DNA
caacaaaagagacacaacagag

SEQ ID NO: 49607 - DNA, 22 bp, synthetic construct
  misc_feature 1..22: note = chemically synthesized
  source 1..22: mol_type = other DNA
ccaaatgcggaccaaaaagcaa

SEQ ID NO: 49608 - DNA, 22 bp, synthetic construct
  misc_feature 1..22: note = chemically synthesized
  source 1..22: mol_type = other DNA
aagaactcatataggccaacta

SEQ ID NO: 49609 - DNA, 22 bp, synthetic construct
  misc_feature 1..22: note = chemically synthesized
  source 1..22: mol_type = other DNA
atataggccaactattattatt

SEQ ID NO: 49610 - DNA, 22 bp, synthetic construct
  misc_feature 1..22: note = chemically synthesized
  source 1..22: mol_type = other DNA
ttattattcacatggttatata

SEQ ID NO: 49611 - DNA, 22 bp, synthetic construct
  misc_feature 1..22: note = chemically synthesized
  source 1..22: mol_type = other DNA
ttattcacatggttatataaca

SEQ ID NO: 49612 - DNA, 22 bp, synthetic construct
  misc_feature 1..22: note = chemically synthesized
  source 1..22: mol_type = other DNA
ttcacatggttatataacactt

SEQ ID NO: 49613 - DNA, 22 bp, synthetic construct
  misc_feature 1..22: note = chemically synthesized
  source 1..22: mol_type = other DNA
acatggttatataacactttca

SEQ ID NO: 49614 - DNA, 22 bp, synthetic construct
  misc_feature 1..22: note = chemically synthesized
  source 1..22: mol_type = other DNA
tataacactttcaaatgtgcca

SEQ ID NO: 49615 - DNA, 22 bp, synthetic construct
  misc_feature 1..22: note = chemically synthesized
  source 1..22: mol_type = other DNA
tcaaatgtgccattcaggcaaa

SEQ ID NO: 49616 - DNA, 22 bp, synthetic construct
  misc_feature 1..22: note = chemically synthesized
  source 1..22: mol_type = other DNA
caaatgtgccattcaggcaaaa

SEQ ID NO: 49617 - DNA, 22 bp, synthetic construct
  misc_feature 1..22: note = chemically synthesized
  source 1..22: mol_type = other DNA
aaatgtgccattcaggcaaaaa

SEQ ID NO: 49618 - DNA, 22 bp, synthetic construct
  misc_feature 1..22: note = chemically synthesized
  source 1..22: mol_type = other DNA
aggcaaaaatgggaactacggg

SEQ ID NO: 49619 - DNA, 22 bp, synthetic construct
  misc_feature 1..22: note = chemically synthesized
  source 1..22: mol_type = other DNA
cgggccacactcgacaacaggt

SEQ ID NO: 49620 - DNA, 22 bp, synthetic construct
  misc_feature 1..22: note = chemically synthesized
  source 1..22: mol_type = other DNA
gacaacaggttttcctctgtac

SEQ ID NO: 49621 - DNA, 22 bp, synthetic construct
  misc_feature 1..22: note = chemically synthesized
  source 1..22: mol_type = other DNA
tcctctgtacctgcacccagct

SEQ ID NO: 49622 - DNA, 22 bp, synthetic construct
  misc_feature 1..22: note = chemically synthesized
  source 1..22: mol_type = other DNA
cctctgtacctgcacccagctc

SEQ ID NO: 49623 - DNA, 22 bp, synthetic construct
  misc_feature 1..22: note = chemically synthesized
  source 1..22: mol_type = other DNA
ctctgtacctgcacccagctct

SEQ ID NO: 49624 - DNA, 22 bp, synthetic construct
  misc_feature 1..22: note = chemically synthesized
  source 1..22: mol_type = other DNA
tgtacctgcacccagctctcta

SEQ ID NO: 49625 - DNA, 22 bp, synthetic construct
  misc_feature 1..22: note = chemically synthesized
  source 1..22: mol_type = other DNA
tacctgcacccagctctctacg

SEQ ID NO: 49626 - DNA, 22 bp, synthetic construct
  misc_feature 1..22: note = chemically synthesized
  source 1..22: mol_type = other DNA
cacccagctctctacgggcctg

SEQ ID NO: 49627 - DNA, 22 bp, synthetic construct
  misc_feature 1..22: note = chemically synthesized
  source 1..22: mol_type = other DNA
tctacgggcctggtcgctcctg

SEQ ID NO: 49628 - DNA, 22 bp, synthetic construct
  misc_feature 1..22: note = chemically synthesized
  source 1..22: mol_type = other DNA
tacgggcctggtcgctcctggt

SEQ ID NO: 49629 - DNA, 22 bp, synthetic construct
  misc_feature 1..22: note = chemically synthesized
  source 1..22: mol_type = other DNA
cgggcctggtcgctcctggtgg

SEQ ID NO: 49630 - DNA, 22 bp, synthetic construct
  misc_feature 1..22: note = chemically synthesized
  source 1..22: mol_type = other DNA
gtcgctcctggtggccctgccc

SEQ ID NO: 49631 - DNA, 22 bp, synthetic construct
  misc_feature 1..22: note = chemically synthesized
  source 1..22: mol_type = other DNA
ctggtggccctgcccaaaggcc

SEQ ID NO: 49632 - DNA, 22 bp, synthetic construct
  misc_feature 1..22: note = chemically synthesized
  source 1..22: mol_type = other DNA
gtggccctgcccaaaggccacc

SEQ ID NO: 49633 - DNA, 22 bp, synthetic construct
  misc_feature 1..22: note = chemically synthesized
  source 1..22: mol_type = other DNA
cccaaaggccaccccctccccc

SEQ ID NO: 49634 - DNA, 22 bp, synthetic construct
  misc_feature 1..22: note = chemically synthesized
  source 1..22: mol_type = other DNA
ccccatgccccagtcagaataa

SEQ ID NO: 49635 - DNA, 22 bp, synthetic construct
  misc_feature 1..22: note = chemically synthesized
  source 1..22: mol_type = other DNA
agggaaaaaatcatgggctttg

SEQ ID NO: 49636 - DNA, 22 bp, synthetic construct
  misc_feature 1..22: note = chemically synthesized
  source 1..22: mol_type = other DNA
tggagccaggaaaccgtggacc

SEQ ID NO: 49637 - DNA, 22 bp, synthetic construct
  misc_feature 1..22: note = chemically synthesized
  source 1..22: mol_type = other DNA
ggagccaggaaaccgtggacct

SEQ ID NO: 49638 - DNA, 22 bp, synthetic construct
  misc_feature 1..22: note = chemically synthesized
  source 1..22: mol_type = other DNA
gagccaggaaaccgtggacctg

SEQ ID NO: 49639 - DNA, 22 bp, synthetic construct
  misc_feature 1..22: note = chemically synthesized
  source 1..22: mol_type = other DNA
aattccagctccaatatttact

SEQ ID NO: 49640 - DNA, 22 bp, synthetic construct
  misc_feature 1..22: note = chemically synthesized
  source 1..22: mol_type = other DNA
cagctccaatatttactggttg

SEQ ID NO: 49641 - DNA, 22 bp, synthetic construct
  misc_feature 1..22: note = chemically synthesized
  source 1..22: mol_type = other DNA
caatatttactggttgtgcagc

SEQ ID NO: 49642 - DNA, 22 bp, synthetic construct
  misc_feature 1..22: note = chemically synthesized
  source 1..22: mol_type = other DNA
actggttgtgcagccatgagca

SEQ ID NO: 49643 - DNA, 22 bp, synthetic construct
  misc_feature 1..22: note = chemically synthesized
  source 1..22: mol_type = other DNA
ctggttgtgcagccatgagcaa

SEQ ID NO: 49644 - DNA, 22 bp, synthetic construct
  misc_feature 1..22: note = chemically synthesized
  source 1..22: mol_type = other DNA
gttgtgcagccatgagcaagtc

SEQ ID NO: 49645 - DNA, 22 bp, synthetic construct
  misc_feature 1..22: note = chemically synthesized
  source 1..22: mol_type = other DNA
tgcagccatgagcaagtcactc

SEQ ID NO: 49646 - DNA, 22 bp, synthetic construct
  misc_feature 1..22: note = chemically synthesized
  source 1..22: mol_type = other DNA
aacctctcggagcctcagatac

SEQ ID NO: 49647 - DNA, 22 bp, synthetic construct
  misc_feature 1..22: note = chemically synthesized
  source 1..22: mol_type = other DNA
tcggagcctcagatacctctgc

SEQ ID NO: 49648 - DNA, 22 bp, synthetic construct
  misc_feature 1..22: note = chemically synthesized
  source 1..22: mol_type = other DNA
ggagcctcagatacctctgctg

SEQ ID NO: 49649 - DNA, 22 bp, synthetic construct
  misc_feature 1..22: note = chemically synthesized
  source 1..22: mol_type = other DNA
agatacctctgctgtattgtag

SEQ ID NO: 49650 - DNA, 22 bp, synthetic construct
  misc_feature 1..22: note = chemically synthesized
  source 1..22: mol_type = other DNA
tgctgtattgtagagaccacag

SEQ ID NO: 49651 - DNA, 22 bp, synthetic construct
  misc_feature 1..22: note = chemically synthesized
  source 1..22: mol_type = other DNA
ctgtattgtagagaccacagta

SEQ ID NO: 49652 - DNA, 22 bp, synthetic construct
  misc_feature 1..22: note = chemically synthesized
  source 1..22: mol_type = other DNA
tattgtagagaccacagtacct

SEQ ID NO: 49653 - DNA, 22 bp, synthetic construct
  misc_feature 1..22: note = chemically synthesized
  source 1..22: mol_type = other DNA
tagagaccacagtacctatgac

SEQ ID NO: 49654 - DNA, 22 bp, synthetic construct
  misc_feature 1..22: note = chemically synthesized
  source 1..22: mol_type = other DNA
tgacataggcctgctgggaaag

SEQ ID NO: 49655 - DNA, 22 bp, synthetic construct
  misc_feature 1..22: note = chemically synthesized
  source 1..22: mol_type = other DNA
ctgggaaagtcaagagtgacgg

SEQ ID NO: 49656 - DNA, 22 bp, synthetic construct
  misc_feature 1..22: note = chemically synthesized
  source 1..22: mol_type = other DNA
ggaaagtcaagagtgacggtta

SEQ ID NO: 49657 - DNA, 22 bp, synthetic construct
  misc_feature 1..22: note = chemically synthesized
  source 1..22: mol_type = other DNA
tataaatctcccatccagatgc

SEQ ID NO: 49658 - DNA, 22 bp, synthetic construct
  misc_feature 1..22: note = chemically synthesized
  source 1..22: mol_type = other DNA
ccatccagatgctctacaaatg

SEQ ID NO: 49659 - DNA, 22 bp, synthetic construct
  misc_feature 1..22: note = chemically synthesized
  source 1..22: mol_type = other DNA
tacaaatgcaggcagaagggat

SEQ ID NO: 49660 - DNA, 22 bp, synthetic construct
  misc_feature 1..22: note = chemically synthesized
  source 1..22: mol_type = other DNA
caaatgcaggcagaagggatga

SEQ ID NO: 49661 - DNA, 22 bp, synthetic construct
  misc_feature 1..22: note = chemically synthesized
  source 1..22: mol_type = other DNA
agtgagcaaaggcaacacttct

SEQ ID NO: 49662 - DNA, 22 bp, synthetic construct
  misc_feature 1..22: note = chemically synthesized
  source 1..22: mol_type = other DNA
cttaaagagagagaaaagtcaa

SEQ ID NO: 49663 - DNA, 22 bp, synthetic construct
  misc_feature 1..22: note = chemically synthesized
  source 1..22: mol_type = other DNA
ttaaagagagagaaaagtcaag

SEQ ID NO: 49664 - DNA, 22 bp, synthetic construct
  misc_feature 1..22: note = chemically synthesized
  source 1..22: mol_type = other DNA
aaagagagagaaaagtcaaggc

SEQ ID NO: 49665 - DNA, 22 bp, synthetic construct
  misc_feature 1..22: note = chemically synthesized
  source 1..22: mol_type = other DNA
aagagagagaaaagtcaaggcc

SEQ ID NO: 49666 - DNA, 22 bp, synthetic construct
  misc_feature 1..22: note = chemically synthesized
  source 1..22: mol_type = other DNA
tcttagtccttttgtgttgcta

SEQ ID NO: 49667 - DNA, 22 bp, synthetic construct
  misc_feature 1..22: note = chemically synthesized
  source 1..22: mol_type = other DNA
agtccttttgtgttgctatata

SEQ ID NO: 49668 - DNA, 22 bp, synthetic construct
  misc_feature 1..22: note = chemically synthesized
  source 1..22: mol_type = other DNA
gtccttttgtgttgctatataa

SEQ ID NO: 49669 - DNA, 22 bp, synthetic construct
  misc_feature 1..22: note = chemically synthesized
  source 1..22: mol_type = other DNA
ttgtgttgctatataaaggaat

SEQ ID NO: 49670 - DNA, 22 bp, synthetic construct
  misc_feature 1..22: note = chemically synthesized
  source 1..22: mol_type = other DNA
tgtgttgctatataaaggaata

SEQ ID NO: 49671 - DNA, 22 bp, synthetic construct
  misc_feature 1..22: note = chemically synthesized
  source 1..22: mol_type = other DNA
gtgttgctatataaaggaatac

SEQ ID NO: 49672 - DNA, 22 bp, synthetic construct
  misc_feature 1..22: note = chemically synthesized
  source 1..22: mol_type = other DNA
tgttgctatataaaggaatacc

SEQ ID NO: 49673 - DNA, 22 bp, synthetic construct
  misc_feature 1..22: note = chemically synthesized
  source 1..22: mol_type = other DNA
ctatataaaggaatacctgaag

SEQ ID NO: 49674 - DNA, 22 bp, synthetic construct
  misc_feature 1..22: note = chemically synthesized
  source 1..22: mol_type = other DNA
tataaaggaatacctgaaggtg

SEQ ID NO: 49675 - DNA, 22 bp, synthetic construct
  misc_feature 1..22: note = chemically synthesized
  source 1..22: mol_type = other DNA
aaggtgagtaatttacaaggaa

SEQ ID NO: 49676 - DNA, 22 bp, synthetic construct
  misc_feature 1..22: note = chemically synthesized
  source 1..22: mol_type = other DNA
acaaggaaaagggatttattca

SEQ ID NO: 49677 - DNA, 22 bp, synthetic construct
  misc_feature 1..22: note = chemically synthesized
  source 1..22: mol_type = other DNA
caaggaaaagggatttattcag

SEQ ID NO: 49678 - DNA, 22 bp, synthetic construct
  misc_feature 1..22: note = chemically synthesized
  source 1..22: mol_type = other DNA
attcagctcatgattctgcaag

SEQ ID NO: 49679 - DNA, 22 bp, synthetic construct
  misc_feature 1..22: note = chemically synthesized
  source 1..22: mol_type = other DNA
ttcagctcatgattctgcaagc

SEQ ID NO: 49680 - DNA, 22 bp, synthetic construct
  misc_feature 1..22: note = chemically synthesized
  source 1..22: mol_type = other DNA
agctcatgattctgcaagctct

SEQ ID NO: 49681 - DNA, 22 bp, synthetic construct
  misc_feature 1..22: note = chemically synthesized
  source 1..22: mol_type = other DNA
atgattctgcaagctctccagg

SEQ ID NO: 49682 - DNA, 22 bp, synthetic construct
  misc_feature 1..22: note = chemically synthesized
  source 1..22: mol_type = other DNA
tgcaagctctccaggaagcatg

SEQ ID NO: 49683 - DNA, 22 bp, synthetic construct
  misc_feature 1..22: note = chemically synthesized
  source 1..22: mol_type = other DNA
caagctctccaggaagcatggc

SEQ ID NO: 49684 - DNA, 22 bp, synthetic construct
  misc_feature 1..22: note = chemically synthesized
  source 1..22: mol_type = other DNA
tccaggaagcatggcaccagca

SEQ ID NO: 49685 - DNA, 22 bp, synthetic construct
  misc_feature 1..22: note = chemically synthesized
  source 1..22: mol_type = other DNA
caggaagcatggcaccagcatc

SEQ ID NO: 49686 - DNA, 22 bp, synthetic construct
  misc_feature 1..22: note = chemically synthesized
  source 1..22: mol_type = other DNA
cttctggtgagggccttaagct

SEQ ID NO: 49687 - DNA, 22 bp, synthetic construct
  misc_feature 1..22: note = chemically synthesized
  source 1..22: mol_type = other DNA
ctggtgagggccttaagctgct

SEQ ID NO: 49688 - DNA, 22 bp, synthetic construct
  misc_feature 1..22: note = chemically synthesized
  source 1..22: mol_type = other DNA
tggtgagggccttaagctgctt

SEQ ID NO: 49689 - DNA, 22 bp, synthetic construct
  misc_feature 1..22: note = chemically synthesized
  source 1..22: mol_type = other DNA
gtgagggccttaagctgctttc

SEQ ID NO: 49690 - DNA, 22 bp, synthetic construct
  misc_feature 1..22: note = chemically synthesized
  source 1..22: mol_type = other DNA
aagctgctttcactgatggcag

SEQ ID NO: 49691 - DNA, 22 bp, synthetic construct
  misc_feature 1..22: note = chemically synthesized
  source 1..22: mol_type = other DNA
agctgctttcactgatggcaga

SEQ ID NO: 49692 - DNA, 22 bp, synthetic construct
  misc_feature 1..22: note = chemically synthesized
  source 1..22: mol_type = other DNA
ctttcactgatggcagaaggtg

SEQ ID NO: 49693 - DNA, 22 bp, synthetic construct
  misc_feature 1..22: note = chemically synthesized
  source 1..22: mol_type = other DNA
tcactgatggcagaaggtgaag

SEQ ID NO: 49694 - DNA, 22 bp, synthetic construct
  misc_feature 1..22: note = chemically synthesized
  source 1..22: mol_type = other DNA
cactgatggcagaaggtgaagg

SEQ ID NO: 49695 - DNA, 22 bp, synthetic construct
  misc_feature 1..22: note = chemically synthesized
  source 1..22: mol_type = other DNA
actgatggcagaaggtgaaggg

SEQ ID NO: 49696 - DNA, 22 bp, synthetic construct
  misc_feature 1..22: note = chemically synthesized
  source 1..22: mol_type = other DNA
atggcagaaggtgaaggggagc

SEQ ID NO: 49697 - DNA, 22 bp, synthetic construct
  misc_feature 1..22: note = chemically synthesized
  source 1..22: mol_type = other DNA
catgtgcagagatcaatcacat

SEQ ID NO: 49698 - DNA, 22 bp, synthetic construct
  misc_feature 1..22: note = chemically synthesized
  source 1..22: mol_type = other DNA
tttttaataatcagccttcaag

SEQ ID NO: 49699 - DNA, 22 bp, synthetic construct
  misc_feature 1..22: note = chemically synthesized
  source 1..22: mol_type = other DNA
tttaataatcagccttcaaggg

SEQ ID NO: 49700 - DNA, 22 bp, synthetic construct
  misc_feature 1..22: note = chemically synthesized
  source 1..22: mol_type = other DNA
ttaataatcagccttcaaggga

SEQ ID NO: 49701 - DNA, 22 bp, synthetic construct
  misc_feature 1..22: note = chemically synthesized
  source 1..22: mol_type = other DNA
taataatcagccttcaagggaa

SEQ ID NO: 49702 - DNA, 22 bp, synthetic construct
  misc_feature 1..22: note = chemically synthesized
  source 1..22: mol_type = other DNA
aataatcagccttcaagggaaa

SEQ ID NO: 49703 - DNA, 22 bp, synthetic construct
  misc_feature 1..22: note = chemically synthesized
  source 1..22: mol_type = other DNA
ataatcagccttcaagggaaat

SEQ ID NO: 49704 - DNA, 22 bp, synthetic construct
  misc_feature 1..22: note = chemically synthesized
  source 1..22: mol_type = other DNA
caagggaaatcatagcgggaga

SEQ ID NO: 49705 - DNA, 22 bp, synthetic construct
  misc_feature 1..22: note = chemically synthesized
  source 1..22: mol_type = other DNA
aagggaaatcatagcgggagaa

SEQ ID NO: 49706 - DNA, 22 bp, synthetic construct
  misc_feature 1..22: note = chemically synthesized
  source 1..22: mol_type = other DNA
actcattatcacaaggacggca

SEQ ID NO: 49707 - DNA, 22 bp, synthetic construct
  misc_feature 1..22: note = chemically synthesized
  source 1..22: mol_type = other DNA
ctcattatcacaaggacggcac

SEQ ID NO: 49708 - DNA, 22 bp, synthetic construct
  misc_feature 1..22: note = chemically synthesized
  source 1..22: mol_type = other DNA
attatcacaaggacggcaccaa

SEQ ID NO: 49709 - DNA, 22 bp, synthetic construct
  misc_feature 1..22: note = chemically synthesized
  source 1..22: mol_type = other DNA
tcacaaggacggcaccaagcct

SEQ ID NO: 49710 - DNA, 22 bp, synthetic construct
  misc_feature 1..22: note = chemically synthesized
  source 1..22: mol_type = other DNA
tcacaggggttcctcccccatg

SEQ ID NO: 49711 - DNA, 22 bp, synthetic construct
  misc_feature 1..22: note = chemically synthesized
  source 1..22: mol_type = other DNA
cacaggggttcctcccccatga

SEQ ID NO: 49712 - DNA, 22 bp, synthetic construct
  misc_feature 1..22: note = chemically synthesized
  source 1..22: mol_type = other DNA
acaggggttcctcccccatgac

SEQ ID NO: 49713 - DNA, 22 bp, synthetic construct
  misc_feature 1..22: note = chemically synthesized
  source 1..22: mol_type = other DNA
ctcccccatgacccaaacacct

SEQ ID NO: 49714 - DNA, 22 bp, synthetic construct
  misc_feature 1..22: note = chemically synthesized
  source 1..22: mol_type = other DNA
ccccatgacccaaacacctccc

SEQ ID NO: 49715 - DNA, 22 bp, synthetic construct
  misc_feature 1..22: note = chemically synthesized
  source 1..22: mol_type = other DNA
ccattaggccccacttccaaca

SEQ ID NO: 49716 - DNA, 22 bp, synthetic construct
  misc_feature 1..22: note = chemically synthesized
  source 1..22: mol_type = other DNA
ggccccacttccaacactgagg

SEQ ID NO: 49717 - DNA, 22 bp, synthetic construct
  misc_feature 1..22: note = chemically synthesized
  source 1..22: mol_type = other DNA
ccaacactgaggaccaaatttc

SEQ ID NO: 49718 - DNA, 22 bp, synthetic construct
  misc_feature 1..22: note = chemically synthesized
  source 1..22: mol_type = other DNA
caacactgaggaccaaatttcc

SEQ ID NO: 49719 - DNA, 22 bp, synthetic construct
  misc_feature 1..22: note = chemically synthesized
  source 1..22: mol_type = other DNA
aggaccaaatttccacatgaga

SEQ ID NO: 49720 - DNA, 22 bp, synthetic construct
  misc_feature 1..22: note = chemically synthesized
  source 1..22: mol_type = other DNA
ccacatgagatttggaggggac

SEQ ID NO: 49721 - DNA, 22 bp, synthetic construct
  misc_feature 1..22: note = chemically synthesized
  source 1..22: mol_type = other DNA
cacatgagatttggaggggaca

SEQ ID NO: 49722 - DNA, 22 bp, synthetic construct
  misc_feature 1..22: note = chemically synthesized
  source 1..22: mol_type = other DNA
ggaggggacaaacaaattatag

SEQ ID NO: 49723 - DNA, 22 bp, synthetic construct
  misc_feature 1..22: note = chemically synthesized
  source 1..22: mol_type = other DNA
gaggggacaaacaaattatagc

SEQ ID NO: 49724 - DNA, 22 bp, synthetic construct
  misc_feature 1..22: note = chemically synthesized
  source 1..22: mol_type = other DNA
tagcagccactatctatggtga

SEQ ID NO: 49725 - DNA, 22 bp, synthetic construct
  misc_feature 1..22: note = chemically synthesized
  source 1..22: mol_type = other DNA
tctatggtgatttgtttggttt

SEQ ID NO: 49726 - DNA, 22 bp, synthetic construct
  misc_feature 1..22: note = chemically synthesized
  source 1..22: mol_type = other DNA
tggtgatttgtttggtttttag

SEQ ID NO: 49727 - DNA, 22 bp, synthetic construct
  misc_feature 1..22: note = chemically synthesized
  source 1..22: mol_type = other DNA
gtttggtttttagctcttgtct

SEQ ID NO: 49728 - DNA, 22 bp, synthetic construct
  misc_feature 1..22: note = chemically synthesized
  source 1..22: mol_type = other DNA
tttggtttttagctcttgtctg

SEQ ID NO: 49729 - DNA, 22 bp, synthetic construct
  misc_feature 1..22: note = chemically synthesized
  source 1..22: mol_type = other DNA
ggtttttagctcttgtctgctc

SEQ ID NO: 49730 - DNA, 22 bp, synthetic construct
  misc_feature 1..22: note = chemically synthesized
  source 1..22: mol_type = other DNA
gtttttagctcttgtctgctcc

SEQ ID NO: 49731 - DNA, 22 bp, synthetic construct
  misc_feature 1..22: note = chemically synthesized
  source 1..22: mol_type = other DNA
ttagctcttgtctgctccaact

SEQ ID NO: 49732 - DNA, 22 bp, synthetic construct
  misc_feature 1..22: note = chemically synthesized
  source 1..22: mol_type = other DNA
tagctcttgtctgctccaactg

SEQ ID NO: 49733 - DNA, 22 bp, synthetic construct
  misc_feature 1..22: note = chemically synthesized
  source 1..22: mol_type = other DNA
agctcttgtctgctccaactgc

SEQ ID NO: 49734 - DNA, 22 bp, synthetic construct
  misc_feature 1..22: note = chemically synthesized
  source 1..22: mol_type = other DNA
gctcttgtctgctccaactgct

SEQ ID NO: 49735 - DNA, 22 bp, synthetic construct
  misc_feature 1..22: note = chemically synthesized
  source 1..22: mol_type = other DNA
ttgtctgctccaactgctctca

SEQ ID NO: 49736 - DNA, 22 bp, synthetic construct
  misc_feature 1..22: note = chemically synthesized
  source 1..22: mol_type = other DNA
gtctgctccaactgctctcagg

SEQ ID NO: 49737 - DNA, 22 bp, synthetic construct
  misc_feature 1..22: note = chemically synthesized
  source 1..22: mol_type = other DNA
tctgctccaactgctctcaggc

SEQ ID NO: 49738 - DNA, 22 bp, synthetic construct
  misc_feature 1..22: note = chemically synthesized
  source 1..22: mol_type = other DNA
ctccaactgctctcaggcagac

SEQ ID NO: 49739 - DNA, 22 bp, synthetic construct
  misc_feature 1..22: note = chemically synthesized
  source 1..22: mol_type = other DNA
caactgctctcaggcagacata

SEQ ID NO: 49740 - DNA, 22 bp, synthetic construct
  misc_feature 1..22: note = chemically synthesized
  source 1..22: mol_type = other DNA
ctctcaggcagacatacctgct

SEQ ID NO: 49741 - DNA, 22 bp, synthetic construct
  misc_feature 1..22: note = chemically synthesized
  source 1..22: mol_type = other DNA
tcaggcagacatacctgcttaa

SEQ ID NO: 49742 - DNA, 22 bp, synthetic construct
  misc_feature 1..22: note = chemically synthesized
  source 1..22: mol_type = other DNA
aggcagacatacctgcttaaga

SEQ ID NO: 49743 - DNA, 22 bp, synthetic construct
  misc_feature 1..22: note = chemically synthesized
  source 1..22: mol_type = other DNA
cttaagaaccttcactggctcc

SEQ ID NO: 49744 - DNA, 22 bp, synthetic construct
  misc_feature 1..22: note = chemically synthesized
  source 1..22: mol_type = other DNA
aagaaccttcactggctcccca

SEQ ID NO: 49745 - DNA, 22 bp, synthetic construct
  misc_feature 1..22: note = chemically synthesized
  source 1..22: mol_type = other DNA
agaaccttcactggctccccac

SEQ ID NO: 49746 - DNA, 22 bp, synthetic construct
  misc_feature 1..22: note = chemically synthesized
  source 1..22: mol_type = other DNA
cactggctccccacagcctcat

SEQ ID NO: 49747 - DNA, 22 bp, synthetic construct
  misc_feature 1..22: note = chemically synthesized
  source 1..22: mol_type = other DNA
actggctccccacagcctcatg

SEQ ID NO: 49748 - DNA, 22 bp, synthetic construct
  misc_feature 1..22: note = chemically synthesized
  source 1..22: mol_type = other DNA
gctccccacagcctcatgaatc

SEQ ID NO: 49749 - DNA, 22 bp, synthetic construct
  misc_feature 1..22: note = chemically synthesized
  source 1..22: mol_type = other DNA
cccacagcctcatgaatcaagt

SEQ ID NO: 49750 - DNA, 22 bp, synthetic construct
  misc_feature 1..22: note = chemically synthesized
  source 1..22: mol_type = other DNA
atgaatcaagtccaaactccat

SEQ ID NO: 49751 - DNA, 22 bp, synthetic construct
  misc_feature 1..22: note = chemically synthesized
  source 1..22: mol_type = other DNA
catgctcctccttggcccctac

SEQ ID NO: 49752 - DNA, 22 bp, synthetic construct
  misc_feature 1..22: note = chemically synthesized
  source 1..22: mol_type = other DNA
ctccttggcccctacctcaacc

SEQ ID NO: 49753 - DNA, 22 bp, synthetic construct
  misc_feature 1..22: note = chemically synthesized
  source 1..22: mol_type = other DNA
cttggcccctacctcaacctac

SEQ ID NO: 49754 - DNA, 22 bp, synthetic construct
  misc_feature 1..22: note = chemically synthesized
  source 1..22: mol_type = other DNA
ggcccctacctcaacctacctt

SEQ ID NO: 49755 - DNA, 22 bp, synthetic construct
  misc_feature 1..22: note = chemically synthesized
  source 1..22: mol_type = other DNA
gcccctacctcaacctaccttg

SEQ ID NO: 49756 - DNA, 22 bp, synthetic construct
  misc_feature 1..22: note = chemically synthesized
  source 1..22: mol_type = other DNA
cctcaacctaccttgcagcccc

SEQ ID NO: 49757 - DNA, 22 bp, synthetic construct
  misc_feature 1..22: note = chemically synthesized
  source 1..22: mol_type = other DNA
aacctaccttgcagccccatca

SEQ ID NO: 49758 - DNA, 22 bp, synthetic construct
  misc_feature 1..22: note = chemically synthesized
  source 1..22: mol_type = other DNA
ccttgcagccccatcacccata

SEQ ID NO: 49759 - DNA, 22 bp, synthetic construct
  misc_feature 1..22: note = chemically synthesized
  source 1..22: mol_type = other DNA
gcagccccatcacccatatctc

SEQ ID NO: 49760 - DNA, 22 bp, synthetic construct
  misc_feature 1..22: note = chemically synthesized
  source 1..22: mol_type = other DNA
cagccccatcacccatatctct

SEQ ID NO: 49761 - DNA, 22 bp, synthetic construct
  misc_feature 1..22: note = chemically synthesized
  source 1..22: mol_type = other DNA
tgtatatatgcatcttggactc

SEQ ID NO: 49762 - DNA, 22 bp, synthetic construct
  misc_feature 1..22: note = chemically synthesized
  source 1..22: mol_type = other DNA
tatatatgcatcttggactcca

SEQ ID NO: 49763 - DNA, 22 bp, synthetic construct
  misc_feature 1..22: note = chemically synthesized
  source 1..22: mol_type = other DNA
ggactccagtcagagtagaaca

SEQ ID NO: 49764 - DNA, 22 bp, synthetic construct
  misc_feature 1..22: note = chemically synthesized
  source 1..22: mol_type = other DNA
gactccagtcagagtagaacag

SEQ ID NO: 49765 - DNA, 22 bp, synthetic construct
  misc_feature 1..22: note = chemically synthesized
  source 1..22: mol_type = other DNA
cagtcagagtagaacagagtcc

SEQ ID NO: 49766 - DNA, 22 bp, synthetic construct
  misc_feature 1..22: note = chemically synthesized
  source 1..22: mol_type = other DNA
tacccaaagccttagggccaaa

SEQ ID NO: 49767 - DNA, 22 bp, synthetic construct
  misc_feature 1..22: note = chemically synthesized
  source 1..22: mol_type = other DNA
acccaaagccttagggccaaaa

SEQ ID NO: 49768 - DNA, 22 bp, synthetic construct
  misc_feature 1..22: note = chemically synthesized
  source 1..22: mol_type = other DNA
cccaaagccttagggccaaaac

SEQ ID NO: 49769 - DNA, 22 bp, synthetic construct
  misc_feature 1..22: note = chemically synthesized
  source 1..22: mol_type = other DNA
agggccaaaacggttttgaacc

SEQ ID NO: 49770 - DNA, 22 bp, synthetic construct
  misc_feature 1..22: note = chemically synthesized
  source 1..22: mol_type = other DNA
gggccaaaacggttttgaacct

SEQ ID NO: 49771 - DNA, 22 bp, synthetic construct
  misc_feature 1..22: note = chemically synthesized
  source 1..22: mol_type = other DNA
tgaacctcagaacttgtttgga

SEQ ID NO: 49772 - DNA, 22 bp, synthetic construct
  misc_feature 1..22: note = chemically synthesized
  source 1..22: mol_type = other DNA
gaacctcagaacttgtttggat

SEQ ID NO: 49773 - DNA, 22 bp, synthetic construct
  misc_feature 1..22: note = chemically synthesized
  source 1..22: mol_type = other DNA
aacctcagaacttgtttggatt

SEQ ID NO: 49774 - DNA, 22 bp, synthetic construct
  misc_feature 1..22: note = chemically synthesized
  source 1..22: mol_type = other DNA
agaacttgtttggattttagaa

SEQ ID NO: 49775 - DNA, 22 bp, synthetic construct
  misc_feature 1..22: note = chemically synthesized
  source 1..22: mol_type = other DNA
gtttggattttagaaaggcagt

SEQ ID NO: 49776 - DNA, 22 bp, synthetic construct
  misc_feature 1..22: note = chemically synthesized
  source 1..22: mol_type = other DNA
tttggattttagaaaggcagta

SEQ ID NO: 49777 - DNA, 22 bp, synthetic construct
  misc_feature 1..22: note = chemically synthesized
  source 1..22: mol_type = other DNA
ggattttagaaaggcagtaatg

SEQ ID NO: 49778 - DNA, 22 bp, synthetic construct
  misc_feature 1..22: note = chemically synthesized
  source 1..22: mol_type = other DNA
gattttagaaaggcagtaatgg

SEQ ID NO: 49779 - DNA, 22 bp, synthetic construct
  misc_feature 1..22: note = chemically synthesized
  source 1..22: mol_type = other DNA
tagaaaggcagtaatgggcaat

SEQ ID NO: 49780 - DNA, 22 bp, synthetic construct
  misc_feature 1..22: note = chemically synthesized
  source 1..22: mol_type = other DNA
agaaaggcagtaatgggcaatc

SEQ ID NO: 49781 - DNA, 22 bp, synthetic construct
  misc_feature 1..22: note = chemically synthesized
  source 1..22: mol_type = other DNA
gaaaggcagtaatgggcaatca

SEQ ID NO: 49782 - DNA, 22 bp, synthetic construct
  misc_feature 1..22: note = chemically synthesized
  source 1..22: mol_type = other DNA
cttggaagaatctggagctgca

SEQ ID NO: 49783 - DNA, 22 bp, synthetic construct
  misc_feature 1..22: note = chemically synthesized
  source 1..22: mol_type = other DNA
ggaagaatctggagctgcatac

SEQ ID NO: 49784 - DNA, 22 bp, synthetic construct
  misc_feature 1..22: note = chemically synthesized
  source 1..22: mol_type = other DNA
gaagaatctggagctgcatact

SEQ ID NO: 49785 - DNA, 22 bp, synthetic construct
  misc_feature 1..22: note = chemically synthesized
  source 1..22: mol_type = other DNA
gagctgcatactgtaatctatg

SEQ ID NO: 49786 - DNA, 22 bp, synthetic construct
  misc_feature 1..22: note = chemically synthesized
  source 1..22: mol_type = other DNA
catactgtaatctatgcagcaa

SEQ ID NO: 49787 - DNA, 22 bp, synthetic construct
  misc_feature 1..22: note = chemically synthesized
  source 1..22: mol_type = other DNA
taatctatgcagcaaaatatat

SEQ ID NO: 49788 - DNA, 22 bp, synthetic construct
  misc_feature 1..22: note = chemically synthesized
  source 1..22: mol_type = other DNA
tgcagcaaaatatatgaatatg

SEQ ID NO: 49789 - DNA, 22 bp, synthetic construct
  misc_feature 1..22: note = chemically synthesized
  source 1..22: mol_type = other DNA
acacaactaaattaaaaataat

SEQ ID NO: 49790 - DNA, 22 bp, synthetic construct
  misc_feature 1..22: note = chemically synthesized
  source 1..22: mol_type = other DNA
aattaaaaataatctcatgtca

SEQ ID NO: 49791 - DNA, 22 bp, synthetic construct
  misc_feature 1..22: note = chemically synthesized
  source 1..22: mol_type = other DNA
aaaataatctcatgtcagttca

SEQ ID NO: 49792 - DNA, 22 bp, synthetic construct
  misc_feature 1..22: note = chemically synthesized
  source 1..22: mol_type = other DNA
atgtcagttcacgtcaggtgct

SEQ ID NO: 49793 - DNA, 22 bp, synthetic construct
  misc_feature 1..22: note = chemically synthesized
  source 1..22: mol_type = other DNA
acgtcaggtgctaccatcaaat

SEQ ID NO: 49794 - DNA, 22 bp, synthetic construct
  misc_feature 1..22: note = chemically synthesized
  source 1..22: mol_type = other DNA
ccatcaaataaatcacaaaaaa

SEQ ID NO: 49795 - DNA, 22 bp, synthetic construct
  misc_feature 1..22: note = chemically synthesized
  source 1..22: mol_type = other DNA
ttggttttcgtaacattttaca

SEQ ID NO: 49796 - DNA, 22 bp, synthetic construct
  misc_feature 1..22: note = chemically synthesized
  source 1..22: mol_type = other DNA
tggttttcgtaacattttacat

SEQ ID NO: 49797 - DNA, 22 bp, synthetic construct
  misc_feature 1..22: note = chemically synthesized
  source 1..22: mol_type = other DNA
ggttttcgtaacattttacatt

SEQ ID NO: 49798 - DNA, 22 bp, synthetic construct
  misc_feature 1..22: note = chemically synthesized
  source 1..22: mol_type = other DNA
gttttcgtaacattttacattt

SEQ ID NO: 49799 - DNA, 22 bp, synthetic construct
  misc_feature 1..22: note = chemically synthesized
  source 1..22: mol_type = other DNA
tcgtaacattttacatttcaga

SEQ ID NO: 49800 - DNA, 22 bp, synthetic construct
  misc_feature 1..22: note = chemically synthesized
  source 1..22: mol_type = other DNA
cgtaacattttacatttcagac

SEQ ID NO: 49801 - DNA, 22 bp, synthetic construct
  misc_feature 1..22: note = chemically synthesized
  source 1..22: mol_type = other DNA
gtaacattttacatttcagacg

SEQ ID NO: 49802 - DNA, 22 bp, synthetic construct
  misc_feature 1..22: note = chemically synthesized
  source 1..22: mol_type = other DNA
tacatttcagacggtggataaa

SEQ ID NO: 49803 - DNA, 22 bp, synthetic construct
  misc_feature 1..22: note = chemically synthesized
  source 1..22: mol_type = other DNA
acatttcagacggtggataaag

SEQ ID NO: 49804 - DNA, 22 bp, synthetic construct
  misc_feature 1..22: note = chemically synthesized
  source 1..22: mol_type = other DNA
catttcagacggtggataaaga

SEQ ID NO: 49805 - DNA, 22 bp, synthetic construct
  misc_feature 1..22: note = chemically synthesized
  source 1..22: mol_type = other DNA
cagacggtggataaagaactgt

SEQ ID NO: 49806 - DNA, 22 bp, synthetic construct
  misc_feature 1..22: note = chemically synthesized
  source 1..22: mol_type = other DNA
agacggtggataaagaactgtg

SEQ ID NO: 49807 - DNA, 22 bp, synthetic construct
  misc_feature 1..22: note = chemically synthesized
  source 1..22: mol_type = other DNA
tggaggccaggcgtggtggctc

SEQ ID NO: 49808 - DNA, 22 bp, synthetic construct
  misc_feature 1..22: note = chemically synthesized
  source 1..22: mol_type = other DNA
acacctgtaattcgagcacttt

SEQ ID NO: 49809 - DNA, 22 bp, synthetic construct
  misc_feature 1..22: note = chemically synthesized
  source 1..22: mol_type = other DNA
taattcgagcactttgggaggc

SEQ ID NO: 49810 - DNA, 22 bp, synthetic construct
  misc_feature 1..22: note = chemically synthesized
  source 1..22: mol_type = other DNA
gagcactttgggaggctgaggc

SEQ ID NO: 49811 - DNA, 22 bp, synthetic construct
  misc_feature 1..22: note = chemically synthesized
  source 1..22: mol_type = other DNA
tgggaggctgaggcgggaggat

SEQ ID NO: 49812 - DNA, 22 bp, synthetic construct
  misc_feature 1..22: note = chemically synthesized
  source 1..22: mol_type = other DNA
gggaggctgaggcgggaggatc

SEQ ID NO: 49813 - DNA, 22 bp, synthetic construct
  misc_feature 1..22: note = chemically synthesized
  source 1..22: mol_type = other DNA
ggaggctgaggcgggaggatca

SEQ ID NO: 49814 - DNA, 22 bp, synthetic construct
  misc_feature 1..22: note = chemically synthesized
  source 1..22: mol_type = other DNA
aggcgggaggatcacctcctcg

SEQ ID NO: 49815 - DNA, 22 bp, synthetic construct
  misc_feature 1..22: note = chemically synthesized
  source 1..22: mol_type = other DNA
ctcggatccactgaggaggtca

SEQ ID NO: 49816 - DNA, 22 bp, synthetic construct
  misc_feature 1..22: note = chemically synthesized
  source 1..22: mol_type = other DNA
ggatccactgaggaggtcagga

SEQ ID NO: 49817 - DNA, 22 bp, synthetic construct
  misc_feature 1..22: note = chemically synthesized
  source 1..22: mol_type = other DNA
aggaggtcaggagtttgcgact

SEQ ID NO: 49818 - DNA, 22 bp, synthetic construct
  misc_feature 1..22: note = chemically synthesized
  source 1..22: mol_type = other DNA
gcgactagcctggccaacgtgg

SEQ ID NO: 49819 - DNA, 22 bp, synthetic construct
  misc_feature 1..22: note = chemically synthesized
  source 1..22: mol_type = other DNA
cgactagcctggccaacgtggt

SEQ ID NO: 49820 - DNA, 22 bp, synthetic construct
  misc_feature 1..22: note = chemically synthesized
  source 1..22: mol_type = other DNA
gcctggccaacgtggtgaaacc

SEQ ID NO: 49821 - DNA, 22 bp, synthetic construct
  misc_feature 1..22: note = chemically synthesized
  source 1..22: mol_type = other DNA
gccaacgtggtgaaaccccttc

SEQ ID NO: 49822 - DNA, 22 bp, synthetic construct
  misc_feature 1..22: note = chemically synthesized
  source 1..22: mol_type = other DNA
ctctactaaaaatacaaaaatt

SEQ ID NO: 49823 - DNA, 22 bp, synthetic construct
  misc_feature 1..22: note = chemically synthesized
  source 1..22: mol_type = other DNA
tctactaaaaatacaaaaatta

SEQ ID NO: 49824 - DNA, 22 bp, synthetic construct
  misc_feature 1..22: note = chemically synthesized
  source 1..22: mol_type = other DNA
tactaaaaatacaaaaattagc

SEQ ID NO: 49825 - DNA, 22 bp, synthetic construct
  misc_feature 1..22: note = chemically synthesized
  source 1..22: mol_type = other DNA
ctaaaaatacaaaaattagccg

SEQ ID NO: 49826 - DNA, 22 bp, synthetic construct
  misc_feature 1..22: note = chemically synthesized
  source 1..22: mol_type = other DNA
aaaatacaaaaattagccgggc

SEQ ID NO: 49827 - DNA, 22 bp, synthetic construct
  misc_feature 1..22: note = chemically synthesized
  source 1..22: mol_type = other DNA
gccgggcgtggtggcaggtacc

SEQ ID NO: 49828 - DNA, 22 bp, synthetic construct
  misc_feature 1..22: note = chemically synthesized
  source 1..22: mol_type = other DNA
taatcccagcttcttgggaggc

SEQ ID NO: 49829 - DNA, 22 bp, synthetic construct
  misc_feature 1..22: note = chemically synthesized
  source 1..22: mol_type = other DNA
cttgggaggctgaggcaggaga

SEQ ID NO: 49830 - DNA, 22 bp, synthetic construct
  misc_feature 1..22: note = chemically synthesized
  source 1..22: mol_type = other DNA
ttgggaggctgaggcaggagaa

SEQ ID NO: 49831 - DNA, 22 bp, synthetic construct
  misc_feature 1..22: note = chemically synthesized
  source 1..22: mol_type = other DNA
gggaggctgaggcaggagaacc

SEQ ID NO: 49832 - DNA, 22 bp, synthetic construct
  misc_feature 1..22: note = chemically synthesized
  source 1..22: mol_type = other DNA
ggaggctgaggcaggagaacca

SEQ ID NO: 49833 - DNA, 22 bp, synthetic construct
  misc_feature 1..22: note = chemically synthesized
  source 1..22: mol_type = other DNA
aggcaggagaaccacttgaacc

SEQ ID NO: 49834 - DNA, 22 bp, synthetic construct
  misc_feature 1..22: note = chemically synthesized
  source 1..22: mol_type = other DNA
gaacccgggagacagatgttgc

SEQ ID NO: 49835 - DNA, 22 bp, synthetic construct
  misc_feature 1..22: note = chemically synthesized
  source 1..22: mol_type = other DNA
aacccgggagacagatgttgca

SEQ ID NO: 49836 - DNA, 22 bp, synthetic construct
  misc_feature 1..22: note = chemically synthesized
  source 1..22: mol_type = other DNA
cagtgagctgagactgcaccat

SEQ ID NO: 49837 - DNA, 22 bp, synthetic construct
  misc_feature 1..22: note = chemically synthesized
  source 1..22: mol_type = other DNA
agactgcaccattgcactccag

SEQ ID NO: 49838 - DNA, 22 bp, synthetic construct
  misc_feature 1..22: note = chemically synthesized
  source 1..22: mol_type = other DNA
caccattgcactccagcctggg

SEQ ID NO: 49839 - DNA, 22 bp, synthetic construct
  misc_feature 1..22: note = chemically synthesized
  source 1..22: mol_type = other DNA
cactccagcctgggcaacaaga

SEQ ID NO: 49840 - DNA, 22 bp, synthetic construct
  misc_feature 1..22: note = chemically synthesized
  source 1..22: mol_type = other DNA
cagcctgggcaacaagagcgaa

SEQ ID NO: 49841 - DNA, 22 bp, synthetic construct
  misc_feature 1..22: note = chemically synthesized
  source 1..22: mol_type = other DNA
ggcaacaagagcgaaactccat

SEQ ID NO: 49842 - DNA, 22 bp, synthetic construct
  misc_feature 1..22: note = chemically synthesized
  source 1..22: mol_type = other DNA
catctcaaaaaaaaaagaaaaa

SEQ ID NO: 49843 - DNA, 22 bp, synthetic construct
  misc_feature 1..22: note = chemically synthesized
  source 1..22: mol_type = other DNA
aaaaaaaaaagaaaaagaactg

SEQ ID NO: 49844 - DNA, 22 bp, synthetic construct
  misc_feature 1..22: note = chemically synthesized
  source 1..22: mol_type = other DNA
tggacatgtgctccttatcttc

SEQ ID NO: 49845 - DNA, 22 bp, synthetic construct
  misc_feature 1..22: note = chemically synthesized
  source 1..22: mol_type = other DNA
cttatcttccacctctggtttt

SEQ ID NO: 49846 - DNA, 22 bp, synthetic construct
  misc_feature 1..22: note = chemically synthesized
  source 1..22: mol_type = other DNA
atcttccacctctggttttccc

SEQ ID NO: 49847 - DNA, 22 bp, synthetic construct
  misc_feature 1..22: note = chemically synthesized
  source 1..22: mol_type = other DNA
tcttccacctctggttttccca

SEQ ID NO: 49848 - DNA, 22 bp, synthetic construct
  misc_feature 1..22: note = chemically synthesized
  source 1..22: mol_type = other DNA
ccacctctggttttcccagctc

SEQ ID NO: 49849 - DNA, 22 bp, synthetic construct
  misc_feature 1..22: note = chemically synthesized
  source 1..22: mol_type = other DNA
cacctctggttttcccagctct

SEQ ID NO: 49850 - DNA, 22 bp, synthetic construct
  misc_feature 1..22: note = chemically synthesized
  source 1..22: mol_type = other DNA
tggttttcccagctctgtatct

SEQ ID NO: 49851 - DNA, 22 bp, synthetic construct
  misc_feature 1..22: note = chemically synthesized
  source 1..22: mol_type = other DNA
gttttcccagctctgtatcttt

SEQ ID NO: 49852 - DNA, 22 bp, synthetic construct
  misc_feature 1..22: note = chemically synthesized
  source 1..22: mol_type = other DNA
tcccagctctgtatctttgttc

SEQ ID NO: 49853 - DNA, 22 bp, synthetic construct
  misc_feature 1..22: note = chemically synthesized
  source 1..22: mol_type = other DNA
cccagctctgtatctttgttca

SEQ ID NO: 49854 - DNA, 22 bp, synthetic construct
  misc_feature 1..22: note = chemically synthesized
  source 1..22: mol_type = other DNA
ccagctctgtatctttgttcat

SEQ ID NO: 49855 - DNA, 22 bp, synthetic construct
  misc_feature 1..22: note = chemically synthesized
  source 1..22: mol_type = other DNA
tgtatctttgttcatggtacct

SEQ ID NO: 49856 - DNA, 22 bp, synthetic construct
  misc_feature 1..22: note = chemically synthesized
  source 1..22: mol_type = other DNA
tatctttgttcatggtacctcc

SEQ ID NO: 49857 - DNA, 22 bp, synthetic construct
  misc_feature 1..22: note = chemically synthesized
  source 1..22: mol_type = other DNA
tgttcatggtacctcctaatcc

SEQ ID NO: 49858 - DNA, 22 bp, synthetic construct
  misc_feature 1..22: note = chemically synthesized
  source 1..22: mol_type = other DNA
gttcatggtacctcctaatcct

SEQ ID NO: 49859 - DNA, 22 bp, synthetic construct
  misc_feature 1..22: note = chemically synthesized
  source 1..22: mol_type = other DNA
ttcatggtacctcctaatccta

SEQ ID NO: 49860 - DNA, 22 bp, synthetic construct
  misc_feature 1..22: note = chemically synthesized
  source 1..22: mol_type = other DNA
atggtacctcctaatcctagaa

SEQ ID NO: 49861 - DNA, 22 bp, synthetic construct
  misc_feature 1..22: note = chemically synthesized
  source 1..22: mol_type = other DNA
ctaatcctagaataaaattctc

SEQ ID NO: 49862 - DNA, 22 bp, synthetic construct
  misc_feature 1..22: note = chemically synthesized
  source 1..22: mol_type = other DNA
atcctagaataaaattctcatg

SEQ ID NO: 49863 - DNA, 22 bp, synthetic construct
  misc_feature 1..22: note = chemically synthesized
  source 1..22: mol_type = other DNA
gaataaaattctcatgacacca

SEQ ID NO: 49864 - DNA, 22 bp, synthetic construct
  misc_feature 1..22: note = chemically synthesized
  source 1..22: mol_type = other DNA
tcatgacaccatcatcgctgaa

SEQ ID NO: 49865 - DNA, 22 bp, synthetic construct
  misc_feature 1..22: note = chemically synthesized
  source 1..22: mol_type = other DNA
atgacaccatcatcgctgaact

SEQ ID NO: 49866 - DNA, 22 bp, synthetic construct
  misc_feature 1..22: note = chemically synthesized
  source 1..22: mol_type = other DNA
aactcctactaatgcttcaaag

SEQ ID NO: 49867 - DNA, 22 bp, synthetic construct
  misc_feature 1..22: note = chemically synthesized
  source 1..22: mol_type = other DNA
ctactaatgcttcaaagaccca

SEQ ID NO: 49868 - DNA, 22 bp, synthetic construct
  misc_feature 1..22: note = chemically synthesized
  source 1..22: mol_type = other DNA
ctaatgcttcaaagacccatct

SEQ ID NO: 49869 - DNA, 22 bp, synthetic construct
  misc_feature 1..22: note = chemically synthesized
  source 1..22: mol_type = other DNA
atgcttcaaagacccatctgaa

SEQ ID NO: 49870 - DNA, 22 bp, synthetic construct
  misc_feature 1..22: note = chemically synthesized
  source 1..22: mol_type = other DNA
caaagacccatctgaaaatgcc

SEQ ID NO: 49871 - DNA, 22 bp, synthetic construct
  misc_feature 1..22: note = chemically synthesized
  source 1..22: mol_type = other DNA
aaagacccatctgaaaatgcct

SEQ ID NO: 49872 - DNA, 22 bp, synthetic construct
  misc_feature 1..22: note = chemically synthesized
  source 1..22: mol_type = other DNA
aaaatgccttccgctaaataaa

SEQ ID NO: 49873 - DNA, 22 bp, synthetic construct
  misc_feature 1..22: note = chemically synthesized
  source 1..22: mol_type = other DNA
ccgctaaataaaaattgaatga

SEQ ID NO: 49874 - DNA, 22 bp, synthetic construct
  misc_feature 1..22: note = chemically synthesized
  source 1..22: mol_type = other DNA
cgctaaataaaaattgaatgaa

SEQ ID NO: 49875 - DNA, 22 bp, synthetic construct
  misc_feature 1..22: note = chemically synthesized
  source 1..22: mol_type = other DNA
aataaaaattgaatgaattggg

SEQ ID NO: 49876 - DNA, 22 bp, synthetic construct
  misc_feature 1..22: note = chemically synthesized
  source 1..22: mol_type = other DNA
aatgaattgggagagtactctg

SEQ ID NO: 49877 - DNA, 22 bp, synthetic construct
  misc_feature 1..22: note = chemically synthesized
  source 1..22: mol_type = other DNA
ggagagtactctgtgcagtgga

SEQ ID NO: 49878 - DNA, 22 bp, synthetic construct
  misc_feature 1..22: note = chemically synthesized
  source 1..22: mol_type = other DNA
tgtgcagtggagtgtcagttct

SEQ ID NO: 49879 - DNA, 22 bp, synthetic construct
  misc_feature 1..22: note = chemically synthesized
  source 1..22: mol_type = other DNA
tgcagtggagtgtcagttctgg

SEQ ID NO: 49880 - DNA, 22 bp, synthetic construct
  misc_feature 1..22: note = chemically synthesized
  source 1..22: mol_type = other DNA
tggaaacccagttctaatgcac

SEQ ID NO: 49881 - DNA, 22 bp, synthetic construct
  misc_feature 1..22: note = chemically synthesized
  source 1..22: mol_type = other DNA
gaaacccagttctaatgcacct

SEQ ID NO: 49882 - DNA, 22 bp, synthetic construct
  misc_feature 1..22: note = chemically synthesized
  source 1..22: mol_type = other DNA
taatgcacctggggtgacctcc

SEQ ID NO: 49883 - DNA, 22 bp, synthetic construct
  misc_feature 1..22: note = chemically synthesized
  source 1..22: mol_type = other DNA
atgcacctggggtgacctcctc

SEQ ID NO: 49884 - DNA, 22 bp, synthetic construct
  misc_feature 1..22: note = chemically synthesized
  source 1..22: mol_type = other DNA
gggtgacctcctctctctgggc

SEQ ID NO: 49885 - DNA, 22 bp, synthetic construct
  misc_feature 1..22: note = chemically synthesized
  source 1..22: mol_type = other DNA
ctctctctgggcctcagtttct

SEQ ID NO: 49886 - DNA, 22 bp, synthetic construct
  misc_feature 1..22: note = chemically synthesized
  source 1..22: mol_type = other DNA
tctctgggcctcagtttctcat

SEQ ID NO: 49887 - DNA, 22 bp, synthetic construct
  misc_feature 1..22: note = chemically synthesized
  source 1..22: mol_type = other DNA
tctgggcctcagtttctcatga

SEQ ID NO: 49888 - DNA, 22 bp, synthetic construct
  misc_feature 1..22: note = chemically synthesized
  source 1..22: mol_type = other DNA
tgggcctcagtttctcatgact

SEQ ID NO: 49889 - DNA, 22 bp, synthetic construct
  misc_feature 1..22: note = chemically synthesized
  source 1..22: mol_type = other DNA
ggcctcagtttctcatgactaa

SEQ ID NO: 49890 - DNA, 22 bp, synthetic construct
  misc_feature 1..22: note = chemically synthesized
  source 1..22: mol_type = other DNA
agtttctcatgactaaaagaaa

SEQ ID NO: 49891 - DNA, 22 bp, synthetic construct
  misc_feature 1..22: note = chemically synthesized
  source 1..22: mol_type = other DNA
ctcatgactaaaagaaaaggat

SEQ ID NO: 49892 - DNA, 22 bp, synthetic construct
  misc_feature 1..22: note = chemically synthesized
  source 1..22: mol_type = other DNA
tcatgactaaaagaaaaggatt

SEQ ID NO: 49893 - DNA, 22 bp, synthetic construct
  misc_feature 1..22: note = chemically synthesized
  source 1..22: mol_type = other DNA
atgactaaaagaaaaggattgg

SEQ ID NO: 49894 - DNA, 22 bp, synthetic construct
  misc_feature 1..22: note = chemically synthesized
  source 1..22: mol_type = other DNA
aaagaaaaggattggtctaaaa

SEQ ID NO: 49895 - DNA, 22 bp, synthetic construct
  misc_feature 1..22: note = chemically synthesized
  source 1..22: mol_type = other DNA
gtctaaaaattattttctgctt

SEQ ID NO: 49896 - DNA, 22 bp, synthetic construct
  misc_feature 1..22: note = chemically synthesized
  source 1..22: mol_type = other DNA
aaaattattttctgcttgccaa

SEQ ID NO: 49897 - DNA, 22 bp, synthetic construct
  misc_feature 1..22: note = chemically synthesized
  source 1..22: mol_type = other DNA
ttttctgcttgccaaaaaatat

SEQ ID NO: 49898 - DNA, 22 bp, synthetic construct
  misc_feature 1..22: note = chemically synthesized
  source 1..22: mol_type = other DNA
tctgcttgccaaaaaatatttt

SEQ ID NO: 49899 - DNA, 22 bp, synthetic construct
  misc_feature 1..22: note = chemically synthesized
  source 1..22: mol_type = other DNA
ctgcttgccaaaaaatattttc

SEQ ID NO: 49900 - DNA, 22 bp, synthetic construct
  misc_feature 1..22: note = chemically synthesized
  source 1..22: mol_type = other DNA
tgcttgccaaaaaatattttca

SEQ ID NO: 49901 - DNA, 22 bp, synthetic construct
  misc_feature 1..22: note = chemically synthesized
  source 1..22: mol_type = other DNA
cttgccaaaaaatattttcatt

SEQ ID NO: 49902 - DNA, 22 bp, synthetic construct
  misc_feature 1..22: note = chemically synthesized
  source 1..22: mol_type = other DNA
gccaaaaaatattttcattcta

SEQ ID NO: 49903 - DNA, 22 bp, synthetic construct
  misc_feature 1..22: note = chemically synthesized
  source 1..22: mol_type = other DNA
ccaaaaaatattttcattctaa

SEQ ID NO: 49904 - DNA, 22 bp, synthetic construct
  misc_feature 1..22: note = chemically synthesized
  source 1..22: mol_type = other DNA
tcattctaaattcgattcccac

SEQ ID NO: 49905 - DNA, 22 bp, synthetic construct
  misc_feature 1..22: note = chemically synthesized
  source 1..22: mol_type = other DNA
cattctaaattcgattcccaca

SEQ ID NO: 49906 - DNA, 22 bp, synthetic construct
  misc_feature 1..22: note = chemically synthesized
  source 1..22: mol_type = other DNA
attctaaattcgattcccacaa

SEQ ID NO: 49907 - DNA, 22 bp, synthetic construct
  misc_feature 1..22: note = chemically synthesized
  source 1..22: mol_type = other DNA
taaattcgattcccacaaaata

SEQ ID NO: 49908 - DNA, 22 bp, synthetic construct
  misc_feature 1..22: note = chemically synthesized
  source 1..22: mol_type = other DNA
aattcgattcccacaaaataac

SEQ ID NO: 49909 - DNA, 22 bp, synthetic construct
  misc_feature 1..22: note = chemically synthesized
  source 1..22: mol_type = other DNA
gattcccacaaaataaccattg

SEQ ID NO: 49910 - DNA, 22 bp, synthetic construct
  misc_feature 1..22: note = chemically synthesized
  source 1..22: mol_type = other DNA
ccacaaaataaccattgaatga

SEQ ID NO: 49911 - DNA, 22 bp, synthetic construct
  misc_feature 1..22: note = chemically synthesized
  source 1..22: mol_type = other DNA
aatgaatgaataaatgaacttg

SEQ ID NO: 49912 - DNA, 22 bp, synthetic construct
  misc_feature 1..22: note = chemically synthesized
  source 1..22: mol_type = other DNA
gaggaggctcctgttccaaact

SEQ ID NO: 49913 - DNA, 22 bp, synthetic construct
  misc_feature 1..22: note = chemically synthesized
  source 1..22: mol_type = other DNA
aggaggctcctgttccaaactt

SEQ ID NO: 49914 - DNA, 22 bp, synthetic construct
  misc_feature 1..22: note = chemically synthesized
  source 1..22: mol_type = other DNA
ctgttccaaacttccaccagag

SEQ ID NO: 49915 - DNA, 22 bp, synthetic construct
  misc_feature 1..22: note = chemically synthesized
  source 1..22: mol_type = other DNA
ttccaaacttccaccagagaag

SEQ ID NO: 49916 - DNA, 22 bp, synthetic construct
  misc_feature 1..22: note = chemically synthesized
  source 1..22: mol_type = other DNA
caaacttccaccagagaagaaa

SEQ ID NO: 49917 - DNA, 22 bp, synthetic construct
  misc_feature 1..22: note = chemically synthesized
  source 1..22: mol_type = other DNA
ccaccagagaagaaacatcctc

SEQ ID NO: 49918 - DNA, 22 bp, synthetic construct
  misc_feature 1..22: note = chemically synthesized
  source 1..22: mol_type = other DNA
caccagagaagaaacatcctca

SEQ ID NO: 49919 - DNA, 22 bp, synthetic construct
  misc_feature 1..22: note = chemically synthesized
  source 1..22: mol_type = other DNA
aagggcttggttcaggtggtca

SEQ ID NO: 49920 - DNA, 22 bp, synthetic construct
  misc_feature 1..22: note = chemically synthesized
  source 1..22: mol_type = other DNA
ggttcaggtggtcatacagcct

SEQ ID NO: 49921 - DNA, 22 bp, synthetic construct
  misc_feature 1..22: note = chemically synthesized
  source 1..22: mol_type = other DNA
gttcaggtggtcatacagcctc

SEQ ID NO: 49922 - DNA, 22 bp, synthetic construct
  misc_feature 1..22: note = chemically synthesized
  source 1..22: mol_type = other DNA
aggtggtcatacagcctctgct

SEQ ID NO: 49923 - DNA, 22 bp, synthetic construct
  misc_feature 1..22: note = chemically synthesized
  source 1..22: mol_type = other DNA
tgcttactcacctctcaggatg

SEQ ID NO: 49924 - DNA, 22 bp, synthetic construct
  misc_feature 1..22: note = chemically synthesized
  source 1..22: mol_type = other DNA
cttactcacctctcaggatggg

SEQ ID NO: 49925 - DNA, 22 bp, synthetic construct
  misc_feature 1..22: note = chemically synthesized
  source 1..22: mol_type = other DNA
actcacctctcaggatggggta

SEQ ID NO: 49926 - DNA, 22 bp, synthetic construct
  misc_feature 1..22: note = chemically synthesized
  source 1..22: mol_type = other DNA
ctcacctctcaggatggggtac

SEQ ID NO: 49927 - DNA, 22 bp, synthetic construct
  misc_feature 1..22: note = chemically synthesized
  source 1..22: mol_type = other DNA
acctctcaggatggggtactca

SEQ ID NO: 49928 - DNA, 22 bp, synthetic construct
  misc_feature 1..22: note = chemically synthesized
  source 1..22: mol_type = other DNA
tcaggatggggtactcactatt

SEQ ID NO: 49929 - DNA, 22 bp, synthetic construct
  misc_feature 1..22: note = chemically synthesized
  source 1..22: mol_type = other DNA
aggatggggtactcactatttc

SEQ ID NO: 49930 - DNA, 22 bp, synthetic construct
  misc_feature 1..22: note = chemically synthesized
  source 1..22: mol_type = other DNA
actatttccagaacagttgttt

SEQ ID NO: 49931 - DNA, 22 bp, synthetic construct
  misc_feature 1..22: note = chemically synthesized
  source 1..22: mol_type = other DNA
tttccagaacagttgttttgga

SEQ ID NO: 49932 - DNA, 22 bp, synthetic construct
  misc_feature 1..22: note = chemically synthesized
  source 1..22: mol_type = other DNA
ccagaacagttgttttggagca

SEQ ID NO: 49933 - DNA, 22 bp, synthetic construct
  misc_feature 1..22: note = chemically synthesized
  source 1..22: mol_type = other DNA
cagaacagttgttttggagcag

SEQ ID NO: 49934 - DNA, 22 bp, synthetic construct
  misc_feature 1..22: note = chemically synthesized
  source 1..22: mol_type = other DNA
ttttggagcagtggtaacttga

SEQ ID NO: 49935 - DNA, 22 bp, synthetic construct
  misc_feature 1..22: note = chemically synthesized
  source 1..22: mol_type = other DNA
tggagcagtggtaacttgaaat

SEQ ID NO: 49936 - DNA, 22 bp, synthetic construct
  misc_feature 1..22: note = chemically synthesized
  source 1..22: mol_type = other DNA
ggagcagtggtaacttgaaatg

SEQ ID NO: 49937 - DNA, 22 bp, synthetic construct
  misc_feature 1..22: note = chemically synthesized
  source 1..22: mol_type = other DNA
gagcagtggtaacttgaaatgc

SEQ ID NO: 49938 - DNA, 22 bp, synthetic construct
  misc_feature 1..22: note = chemically synthesized
  source 1..22: mol_type = other DNA
gaaatgccctttcttatcctgg

SEQ ID NO: 49939 - DNA, 22 bp, synthetic construct
  misc_feature 1..22: note = chemically synthesized
  source 1..22: mol_type = other DNA
aaatgccctttcttatcctggc

SEQ ID NO: 49940 - DNA, 22 bp, synthetic construct
  misc_feature 1..22: note = chemically synthesized
  source 1..22: mol_type = other DNA
tcttatcctggccacaacccca

SEQ ID NO: 49941 - DNA, 22 bp, synthetic construct
  misc_feature 1..22: note = chemically synthesized
  source 1..22: mol_type = other DNA
cttatcctggccacaaccccac

SEQ ID NO: 49942 - DNA, 22 bp, synthetic construct
  misc_feature 1..22: note = chemically synthesized
  source 1..22: mol_type = other DNA
ttatcctggccacaaccccaca

SEQ ID NO: 49943 - DNA, 22 bp, synthetic construct
  misc_feature 1..22: note = chemically synthesized
  source 1..22: mol_type = other DNA
atcctggccacaaccccacaac

SEQ ID NO: 49944 - DNA, 22 bp, synthetic construct
  misc_feature 1..22: note = chemically synthesized
  source 1..22: mol_type = other DNA
tcctggccacaaccccacaaca

SEQ ID NO: 49945 - DNA, 22 bp, synthetic construct
  misc_feature 1..22: note = chemically synthesized
  source 1..22: mol_type = other DNA
gccacaaccccacaacatccct

SEQ ID NO: 49946 - DNA, 22 bp, synthetic construct
  misc_feature 1..22: note = chemically synthesized
  source 1..22: mol_type = other DNA
gagaaagtcaaaggctcaggga

SEQ ID NO: 49947 - DNA, 22 bp, synthetic construct
  misc_feature 1..22: note = chemically synthesized
  source 1..22: mol_type = other DNA
agggaacaaggaagagggctat

SEQ ID NO: 49948 - DNA, 22 bp, synthetic construct
  misc_feature 1..22: note = chemically synthesized
  source 1..22: mol_type = other DNA
tactgagctgagtaaggacttg

SEQ ID NO: 49949 - DNA, 22 bp, synthetic construct
  misc_feature 1..22: note = chemically synthesized
  source 1..22: mol_type = other DNA
agctgagtaaggacttgccatc

SEQ ID NO: 49950 - DNA, 22 bp, synthetic construct
  misc_feature 1..22: note = chemically synthesized
  source 1..22: mol_type = other DNA
agtaaggacttgccatcctgcc

SEQ ID NO: 49951 - DNA, 22 bp, synthetic construct
  misc_feature 1..22: note = chemically synthesized
  source 1..22: mol_type = other DNA
gccatcctgccacccagcacac

SEQ ID NO: 49952 - DNA, 22 bp, synthetic construct
  misc_feature 1..22: note = chemically synthesized
  source 1..22: mol_type = other DNA
ccatcctgccacccagcacact

SEQ ID NO: 49953 - DNA, 22 bp, synthetic construct
  misc_feature 1..22: note = chemically synthesized
  source 1..22: mol_type = other DNA
ccacccagcacactcagacaga

SEQ ID NO: 49954 - DNA, 22 bp, synthetic construct
  misc_feature 1..22: note = chemically synthesized
  source 1..22: mol_type = other DNA
agacagaagcgtgggcaggcag

SEQ ID NO: 49955 - DNA, 22 bp, synthetic construct
  misc_feature 1..22: note = chemically synthesized
  source 1..22: mol_type = other DNA
tgagtggcagaattttcccctc

SEQ ID NO: 49956 - DNA, 22 bp, synthetic construct
  misc_feature 1..22: note = chemically synthesized
  source 1..22: mol_type = other DNA
tcccctctgccccaggagctgt

SEQ ID NO: 49957 - DNA, 22 bp, synthetic construct
  misc_feature 1..22: note = chemically synthesized
  source 1..22: mol_type = other DNA
cccctctgccccaggagctgtg

SEQ ID NO: 49958 - DNA, 22 bp, synthetic construct
  misc_feature 1..22: note = chemically synthesized
  source 1..22: mol_type = other DNA
ccctctgccccaggagctgtgg

SEQ ID NO: 49959 - DNA, 22 bp, synthetic construct
  misc_feature 1..22: note = chemically synthesized
  source 1..22: mol_type = other DNA
tgccccaggagctgtggtttgg

SEQ ID NO: 49960 - DNA, 22 bp, synthetic construct
  misc_feature 1..22: note = chemically synthesized
  source 1..22: mol_type = other DNA
ccccaggagctgtggtttggag

SEQ ID NO: 49961 - DNA, 22 bp, synthetic construct
  misc_feature 1..22: note = chemically synthesized
  source 1..22: mol_type = other DNA
tggtttggagcaaagacaatgt

SEQ ID NO: 49962 - DNA, 22 bp, synthetic construct
  misc_feature 1..22: note = chemically synthesized
  source 1..22: mol_type = other DNA
ggagcaaagacaatgtcaccaa

SEQ ID NO: 49963 - DNA, 22 bp, synthetic construct
  misc_feature 1..22: note = chemically synthesized
  source 1..22: mol_type = other DNA
gagcaaagacaatgtcaccaac

SEQ ID NO: 49964 - DNA, 22 bp, synthetic construct
  misc_feature 1..22: note = chemically synthesized
  source 1..22: mol_type = other DNA
cagacagggacaaaactgcaag

SEQ ID NO: 49965 - DNA, 22 bp, synthetic construct
  misc_feature 1..22: note = chemically synthesized
  source 1..22: mol_type = other DNA
caagtgatccccccggggcttg

SEQ ID NO: 49966 - DNA, 22 bp, synthetic construct
  misc_feature 1..22: note = chemically synthesized
  source 1..22: mol_type = other DNA
gcattgtaagttcactcatggt

SEQ ID NO: 49967 - DNA, 22 bp, synthetic construct
  misc_feature 1..22: note = chemically synthesized
  source 1..22: mol_type = other DNA
cattgtaagttcactcatggtc

SEQ ID NO: 49968 - DNA, 22 bp, synthetic construct
  misc_feature 1..22: note = chemically synthesized
  source 1..22: mol_type = other DNA
taagttcactcatggtcaacag

SEQ ID NO: 49969 - DNA, 22 bp, synthetic construct
  misc_feature 1..22: note = chemically synthesized
  source 1..22: mol_type = other DNA
actcatggtcaacagaactttc

SEQ ID NO: 49970 - DNA, 22 bp, synthetic construct
  misc_feature 1..22: note = chemically synthesized
  source 1..22: mol_type = other DNA
atggtcaacagaactttccctt

SEQ ID NO: 49971 - DNA, 22 bp, synthetic construct
  misc_feature 1..22: note = chemically synthesized
  source 1..22: mol_type = other DNA
tcccttcatctccccatctgct

SEQ ID NO: 49972 - DNA, 22 bp, synthetic construct
  misc_feature 1..22: note = chemically synthesized
  source 1..22: mol_type = other DNA
cccttcatctccccatctgctg

SEQ ID NO: 49973 - DNA, 22 bp, synthetic construct
  misc_feature 1..22: note = chemically synthesized
  source 1..22: mol_type = other DNA
ccttcatctccccatctgctgc

SEQ ID NO: 49974 - DNA, 22 bp, synthetic construct
  misc_feature 1..22: note = chemically synthesized
  source 1..22: mol_type = other DNA
catctccccatctgctgccact

SEQ ID NO: 49975 - DNA, 22 bp, synthetic construct
  misc_feature 1..22: note = chemically synthesized
  source 1..22: mol_type = other DNA
atctccccatctgctgccactg

SEQ ID NO: 49976 - DNA, 22 bp, synthetic construct
  misc_feature 1..22: note = chemically synthesized
  source 1..22: mol_type = other DNA
cccatctgctgccactgagccg

SEQ ID NO: 49977 - DNA, 22 bp, synthetic construct
  misc_feature 1..22: note = chemically synthesized
  source 1..22: mol_type = other DNA
ctgccactgagccgtagggacg

SEQ ID NO: 49978 - DNA, 22 bp, synthetic construct
  misc_feature 1..22: note = chemically synthesized
  source 1..22: mol_type = other DNA
ccactgagccgtagggacgatt

SEQ ID NO: 49979 - DNA, 22 bp, synthetic construct
  misc_feature 1..22: note = chemically synthesized
  source 1..22: mol_type = other DNA
agccgtagggacgattgtcacc

SEQ ID NO: 49980 - DNA, 22 bp, synthetic construct
  misc_feature 1..22: note = chemically synthesized
  source 1..22: mol_type = other DNA
tcacctcccttttaaagattag

SEQ ID NO: 49981 - DNA, 22 bp, synthetic construct
  misc_feature 1..22: note = chemically synthesized
  source 1..22: mol_type = other DNA
ccttttaaagattaggcaatgg

SEQ ID NO: 49982 - DNA, 22 bp, synthetic construct
  misc_feature 1..22: note = chemically synthesized
  source 1..22: mol_type = other DNA
ttaaagattaggcaatggaggc

SEQ ID NO: 49983 - DNA, 22 bp, synthetic construct
  misc_feature 1..22: note = chemically synthesized
  source 1..22: mol_type = other DNA
taaagattaggcaatggaggct

SEQ ID NO: 49984 - DNA, 22 bp, synthetic construct
  misc_feature 1..22: note = chemically synthesized
  source 1..22: mol_type = other DNA
aaagattaggcaatggaggctc

SEQ ID NO: 49985 - DNA, 22 bp, synthetic construct
  misc_feature 1..22: note = chemically synthesized
  source 1..22: mol_type = other DNA
aagattaggcaatggaggctca

SEQ ID NO: 49986 - DNA, 22 bp, synthetic construct
  misc_feature 1..22: note = chemically synthesized
  source 1..22: mol_type = other DNA
ggcaatggaggctcaaggataa

SEQ ID NO: 49987 - DNA, 22 bp, synthetic construct
  misc_feature 1..22: note = chemically synthesized
  source 1..22: mol_type = other DNA
aaggataagtgacttgtcaagc

SEQ ID NO: 49988 - DNA, 22 bp, synthetic construct
  misc_feature 1..22: note = chemically synthesized
  source 1..22: mol_type = other DNA
gtcaagcaccacagctagtgag

SEQ ID NO: 49989 - DNA, 22 bp, synthetic construct
  misc_feature 1..22: note = chemically synthesized
  source 1..22: mol_type = other DNA
tcaagcaccacagctagtgaga

SEQ ID NO: 49990 - DNA, 22 bp, synthetic construct
  misc_feature 1..22: note = chemically synthesized
  source 1..22: mol_type = other DNA
gtgagaggaagccaagattcaa

SEQ ID NO: 49991 - DNA, 22 bp, synthetic construct
  misc_feature 1..22: note = chemically synthesized
  source 1..22: mol_type = other DNA
aaccccacatctgactccaagc

SEQ ID NO: 49992 - DNA, 22 bp, synthetic construct
  misc_feature 1..22: note = chemically synthesized
  source 1..22: mol_type = other DNA
actccaagctgggggacacaga

SEQ ID NO: 49993 - DNA, 22 bp, synthetic construct
  misc_feature 1..22: note = chemically synthesized
  source 1..22: mol_type = other DNA
caagctgggggacacagaacct

SEQ ID NO: 49994 - DNA, 22 bp, synthetic construct
  misc_feature 1..22: note = chemically synthesized
  source 1..22: mol_type = other DNA
ggggacacagaacctcagccaa

SEQ ID NO: 49995 - DNA, 22 bp, synthetic construct
  misc_feature 1..22: note = chemically synthesized
  source 1..22: mol_type = other DNA
agccaagtcctgggctggtaat

SEQ ID NO: 49996 - DNA, 22 bp, synthetic construct
  misc_feature 1..22: note = chemically synthesized
  source 1..22: mol_type = other DNA
ggctggtaatacttagaaaaag

SEQ ID NO: 49997 - DNA, 22 bp, synthetic construct
  misc_feature 1..22: note = chemically synthesized
  source 1..22: mol_type = other DNA
gtaatacttagaaaaagctagt

SEQ ID NO: 49998 - DNA, 22 bp, synthetic construct
  misc_feature 1..22: note = chemically synthesized
  source 1..22: mol_type = other DNA
agaaaaagctagtggtctcgcc

SEQ ID NO: 49999 - DNA, 22 bp, synthetic construct
  misc_feature 1..22: note = chemically synthesized
  source 1..22: mol_type = other DNA
gaaaaagctagtggtctcgccc

SEQ ID NO: 50000 - DNA, 22 bp, synthetic construct
  misc_feature 1..22: note = chemically synthesized
  source 1..22: mol_type = other DNA
gtggtctcgccccgggaagaag

SEQ ID NO: 50001 - DNA, 22 bp, synthetic construct
  misc_feature 1..22: note = chemically synthesized
  source 1..22: mol_type = other DNA
gccccgggaagaagcttcccac

SEQ ID NO: 50002 - DNA, 22 bp, synthetic construct
  misc_feature 1..22: note = chemically synthesized
  source 1..22: mol_type = other DNA
cccacagcctgagggccagaag

SEQ ID NO: 50003 - DNA, 22 bp, synthetic construct
  misc_feature 1..22: note = chemically synthesized
  source 1..22: mol_type = other DNA
ccacagcctgagggccagaagc

SEQ ID NO: 50004 - DNA, 22 bp, synthetic construct
  misc_feature 1..22: note = chemically synthesized
  source 1..22: mol_type = other DNA
agggccagaagctggcagagtt

SEQ ID NO: 50005 - DNA, 22 bp, synthetic construct
  misc_feature 1..22: note = chemically synthesized
  source 1..22: mol_type = other DNA
gcagagttgttgagcaaactcg

SEQ ID NO: 50006 - DNA, 22 bp, synthetic construct
  misc_feature 1..22: note = chemically synthesized
  source 1..22: mol_type = other DNA
ttgagcaaactcgccccgcaca

SEQ ID NO: 50007 - DNA, 22 bp, synthetic construct
  misc_feature 1..22: note = chemically synthesized
  source 1..22: mol_type = other DNA
agcaaactcgccccgcacacgg

SEQ ID NO: 50008 - DNA, 22 bp, synthetic construct
  misc_feature 1..22: note = chemically synthesized
  source 1..22: mol_type = other DNA
gccccgcacacggtcggcagac

SEQ ID NO: 50009 - DNA, 22 bp, synthetic construct
  misc_feature 1..22: note = chemically synthesized
  source 1..22: mol_type = other DNA
aggcgccgggctcagctccggg

SEQ ID NO: 50010 - DNA, 22 bp, synthetic construct
  misc_feature 1..22: note = chemically synthesized
  source 1..22: mol_type = other DNA
agctccggggtcccagtaccag

SEQ ID NO: 50011 - DNA, 22 bp, synthetic construct
  misc_feature 1..22: note = chemically synthesized
  source 1..22: mol_type = other DNA
cggggtcccagtaccaggcgca

SEQ ID NO: 50012 - DNA, 22 bp, synthetic construct
  misc_feature 1..22: note = chemically synthesized
  source 1..22: mol_type = other DNA
cggctccagagcaccaagggcc

SEQ ID NO: 50013 - DNA, 22 bp, synthetic construct
  misc_feature 1..22: note = chemically synthesized
  source 1..22: mol_type = other DNA
cagagcaccaagggcccttccc

SEQ ID NO: 50014 - DNA, 22 bp, synthetic construct
  misc_feature 1..22: note = chemically synthesized
  source 1..22: mol_type = other DNA
ccctgcctgagtcctaaaggac

SEQ ID NO: 50015 - DNA, 22 bp, synthetic construct
  misc_feature 1..22: note = chemically synthesized
  source 1..22: mol_type = other DNA
cctgcctgagtcctaaaggacg

SEQ ID NO: 50016 - DNA, 22 bp, synthetic construct
  misc_feature 1..22: note = chemically synthesized
  source 1..22: mol_type = other DNA
cctgagtcctaaaggacgccaa

SEQ ID NO: 50017 - DNA, 22 bp, synthetic construct
  misc_feature 1..22: note = chemically synthesized
  source 1..22: mol_type = other DNA
agtcctaaaggacgccaatggg

SEQ ID NO: 50018 - DNA, 22 bp, synthetic construct
  misc_feature 1..22: note = chemically synthesized
  source 1..22: mol_type = other DNA
aaggacgccaatgggcctcgag

SEQ ID NO: 50019 - DNA, 22 bp, synthetic construct
  misc_feature 1..22: note = chemically synthesized
  source 1..22: mol_type = other DNA
gagaatacctccgccccttctc

SEQ ID NO: 50020 - DNA, 22 bp, synthetic construct
  misc_feature 1..22: note = chemically synthesized
  source 1..22: mol_type = other DNA
cgccccttctcccctgcccctt

SEQ ID NO: 50021 - DNA, 22 bp, synthetic construct
  misc_feature 1..22: note = chemically synthesized
  source 1..22: mol_type = other DNA
ctcccctgccccttcagctggt

SEQ ID NO: 50022 - DNA, 22 bp, synthetic construct
  misc_feature 1..22: note = chemically synthesized
  source 1..22: mol_type = other DNA
tcccctgccccttcagctggtt

SEQ ID NO: 50023 - DNA, 22 bp, synthetic construct
  misc_feature 1..22: note = chemically synthesized
  source 1..22: mol_type = other DNA
ccctgccccttcagctggttct

SEQ ID NO: 50024 - DNA, 22 bp, synthetic construct
  misc_feature 1..22: note = chemically synthesized
  source 1..22: mol_type = other DNA
ccccttcagctggttcttttct

SEQ ID NO: 50025 - DNA, 22 bp, synthetic construct
  misc_feature 1..22: note = chemically synthesized
  source 1..22: mol_type = other DNA
cagctggttcttttcttcggct

SEQ ID NO: 50026 - DNA, 22 bp, synthetic construct
  misc_feature 1..22: note = chemically synthesized
  source 1..22: mol_type = other DNA
agctggttcttttcttcggctg

SEQ ID NO: 50027 - DNA, 22 bp, synthetic construct
  misc_feature 1..22: note = chemically synthesized
  source 1..22: mol_type = other DNA
gttcttttcttcggctgaaaca

SEQ ID NO: 50028 - DNA, 22 bp, synthetic construct
  misc_feature 1..22: note = chemically synthesized
  source 1..22: mol_type = other DNA
ttttcttcggctgaaacagatg

SEQ ID NO: 50029 - DNA, 22 bp, synthetic construct
  misc_feature 1..22: note = chemically synthesized
  source 1..22: mol_type = other DNA
ttcttcggctgaaacagatgga

SEQ ID NO: 50030 - DNA, 22 bp, synthetic construct
  misc_feature 1..22: note = chemically synthesized
  source 1..22: mol_type = other DNA
tcttcggctgaaacagatggaa

SEQ ID NO: 50031 - DNA, 22 bp, synthetic construct
  misc_feature 1..22: note = chemically synthesized
  source 1..22: mol_type = other DNA
cttcggctgaaacagatggaat

SEQ ID NO: 50032 - DNA, 22 bp, synthetic construct
  misc_feature 1..22: note = chemically synthesized
  source 1..22: mol_type = other DNA
ttcggctgaaacagatggaata

SEQ ID NO: 50033 - DNA, 22 bp, synthetic construct
  misc_feature 1..22: note = chemically synthesized
  source 1..22: mol_type = other DNA
cggctgaaacagatggaatact

SEQ ID NO: 50034 - DNA, 22 bp, synthetic construct
  misc_feature 1..22: note = chemically synthesized
  source 1..22: mol_type = other DNA
ggctgaaacagatggaatacta

SEQ ID NO: 50035 - DNA, 22 bp, synthetic construct
  misc_feature 1..22: note = chemically synthesized
  source 1..22: mol_type = other DNA
aaacagatggaatactagagca

SEQ ID NO: 50036 - DNA, 22 bp, synthetic construct
  misc_feature 1..22: note = chemically synthesized
  source 1..22: mol_type = other DNA
gagcatgagttctgtgtcataa

SEQ ID NO: 50037 - DNA, 22 bp, synthetic construct
  misc_feature 1..22: note = chemically synthesized
  source 1..22: mol_type = other DNA
tgtgtcataaagaaattgcctc

SEQ ID NO: 50038 - DNA, 22 bp, synthetic construct
  misc_feature 1..22: note = chemically synthesized
  source 1..22: mol_type = other DNA
tgtcataaagaaattgcctcgt

SEQ ID NO: 50039 - DNA, 22 bp, synthetic construct
  misc_feature 1..22: note = chemically synthesized
  source 1..22: mol_type = other DNA
cctcgtgctcccagcatctgcc

SEQ ID NO: 50040 - DNA, 22 bp, synthetic construct
  misc_feature 1..22: note = chemically synthesized
  source 1..22: mol_type = other DNA
gtgctcccagcatctgccgtcc

SEQ ID NO: 50041 - DNA, 22 bp, synthetic construct
  misc_feature 1..22: note = chemically synthesized
  source 1..22: mol_type = other DNA
ccagcatctgccgtccttccca

SEQ ID NO: 50042 - DNA, 22 bp, synthetic construct
  misc_feature 1..22: note = chemically synthesized
  source 1..22: mol_type = other DNA
ccgtccttcccaccccgcccct

SEQ ID NO: 50043 - DNA, 22 bp, synthetic construct
  misc_feature 1..22: note = chemically synthesized
  source 1..22: mol_type = other DNA
cccaccccgcccctgtctcggg

SEQ ID NO: 50044 - DNA, 22 bp, synthetic construct
  misc_feature 1..22: note = chemically synthesized
  source 1..22: mol_type = other DNA
ccaccccgcccctgtctcgggt

SEQ ID NO: 50045 - DNA, 22 bp, synthetic construct
  misc_feature 1..22: note = chemically synthesized
  source 1..22: mol_type = other DNA
tctcgggtagggccttctctcc

SEQ ID NO: 50046 - DNA, 22 bp, synthetic construct
  misc_feature 1..22: note = chemically synthesized
  source 1..22: mol_type = other DNA
gggtagggccttctctccaggc

SEQ ID NO: 50047 - DNA, 22 bp, synthetic construct
  misc_feature 1..22: note = chemically synthesized
  source 1..22: mol_type = other DNA
ctctccaggccctccaccctcc

SEQ ID NO: 50048 - DNA, 22 bp, synthetic construct
  misc_feature 1..22: note = chemically synthesized
  source 1..22: mol_type = other DNA
tctccaggccctccaccctccg

SEQ ID NO: 50049 - DNA, 22 bp, synthetic construct
  misc_feature 1..22: note = chemically synthesized
  source 1..22: mol_type = other DNA
tccaggccctccaccctccgct

SEQ ID NO: 50050 - DNA, 22 bp, synthetic construct
  misc_feature 1..22: note = chemically synthesized
  source 1..22: mol_type = other DNA
caggccctccaccctccgctgc

SEQ ID NO: 50051 - DNA, 22 bp, synthetic construct
  misc_feature 1..22: note = chemically synthesized
  source 1..22: mol_type = other DNA
caccctccgctgcccatgtttt

SEQ ID NO: 50052 - DNA, 22 bp, synthetic construct
  misc_feature 1..22: note = chemically synthesized
  source 1..22: mol_type = other DNA
cgctgcccatgttttccaaacc

SEQ ID NO: 50053 - DNA, 22 bp, synthetic construct
  misc_feature 1..22: note = chemically synthesized
  source 1..22: mol_type = other DNA
cccatgttttccaaaccaaatc

SEQ ID NO: 50054 - DNA, 22 bp, synthetic construct
  misc_feature 1..22: note = chemically synthesized
  source 1..22: mol_type = other DNA
tccaaaccaaatcggaacccac

SEQ ID NO: 50055 - DNA, 22 bp, synthetic construct
  misc_feature 1..22: note = chemically synthesized
  source 1..22: mol_type = other DNA
ccaaaccaaatcggaacccact

SEQ ID NO: 50056 - DNA, 22 bp, synthetic construct
  misc_feature 1..22: note = chemically synthesized
  source 1..22: mol_type = other DNA
caaaccaaatcggaacccacta

SEQ ID NO: 50057 - DNA, 22 bp, synthetic construct
  misc_feature 1..22: note = chemically synthesized
  source 1..22: mol_type = other DNA
taatggcaagcccgctttctct

SEQ ID NO: 50058 - DNA, 22 bp, synthetic construct
  misc_feature 1..22: note = chemically synthesized
  source 1..22: mol_type = other DNA
tctctgtgcctggtgcagttcc

SEQ ID NO: 50059 - DNA, 22 bp, synthetic construct
  misc_feature 1..22: note = chemically synthesized
  source 1..22: mol_type = other DNA
ctctgtgcctggtgcagttccc

SEQ ID NO: 50060 - DNA, 22 bp, synthetic construct
  misc_feature 1..22: note = chemically synthesized
  source 1..22: mol_type = other DNA
tctgtgcctggtgcagttccca

SEQ ID NO: 50061 - DNA, 22 bp, synthetic construct
  misc_feature 1..22: note = chemically synthesized
  source 1..22: mol_type = other DNA
tgtgcctggtgcagttcccagt

SEQ ID NO: 50062 - DNA, 22 bp, synthetic construct
  misc_feature 1..22: note = chemically synthesized
  source 1..22: mol_type = other DNA
tgcctggtgcagttcccagtac

SEQ ID NO: 50063 - DNA, 22 bp, synthetic construct
  misc_feature 1..22: note = chemically synthesized
  source 1..22: mol_type = other DNA
gtgcagttcccagtacgttcca

SEQ ID NO: 50064 - DNA, 22 bp, synthetic construct
  misc_feature 1..22: note = chemically synthesized
  source 1..22: mol_type = other DNA
ccagtacgttccaggcattcac

SEQ ID NO: 50065 - DNA, 22 bp, synthetic construct
  misc_feature 1..22: note = chemically synthesized
  source 1..22: mol_type = other DNA
caggcattcactccttcaccca

SEQ ID NO: 50066 - DNA, 22 bp, synthetic construct
  misc_feature 1..22: note = chemically synthesized
  source 1..22: mol_type = other DNA
actccttcacccacctgtgccg

SEQ ID NO: 50067 - DNA, 22 bp, synthetic construct
  misc_feature 1..22: note = chemically synthesized
  source 1..22: mol_type = other DNA
cttcacccacctgtgccgcggc

SEQ ID NO: 50068 - DNA, 22 bp, synthetic construct
  misc_feature 1..22: note = chemically synthesized
  source 1..22: mol_type = other DNA
cacccacctgtgccgcggcgag

SEQ ID NO: 50069 - DNA, 22 bp, synthetic construct
  misc_feature 1..22: note = chemically synthesized
  source 1..22: mol_type = other DNA
acccacctgtgccgcggcgagg

SEQ ID NO: 50070 - DNA, 22 bp, synthetic construct
  misc_feature 1..22: note = chemically synthesized
  source 1..22: mol_type = other DNA
tgccgcggcgaggcagaaactg

SEQ ID NO: 50071 - DNA, 22 bp, synthetic construct
  misc_feature 1..22: note = chemically synthesized
  source 1..22: mol_type = other DNA
ggaaatctgggcaggatatcct

SEQ ID NO: 50072 - DNA, 22 bp, synthetic construct
  misc_feature 1..22: note = chemically synthesized
  source 1..22: mol_type = other DNA
ggcaggatatcctggcagtgct

SEQ ID NO: 50073 - DNA, 22 bp, synthetic construct
  misc_feature 1..22: note = chemically synthesized
  source 1..22: mol_type = other DNA
gcagtgctctgctcgcccttcc

SEQ ID NO: 50074 - DNA, 22 bp, synthetic construct
  misc_feature 1..22: note = chemically synthesized
  source 1..22: mol_type = other DNA
tgctcgcccttcctcggcctcc

SEQ ID NO: 50075 - DNA, 22 bp, synthetic construct
  misc_feature 1..22: note = chemically synthesized
  source 1..22: mol_type = other DNA
ctcgcccttcctcggcctccgg

SEQ ID NO: 50076 - DNA, 22 bp, synthetic construct
  misc_feature 1..22: note = chemically synthesized
  source 1..22: mol_type = other DNA
gcccttcctcggcctccgggtc

SEQ ID NO: 50077 - DNA, 22 bp, synthetic construct
  misc_feature 1..22: note = chemically synthesized
  source 1..22: mol_type = other DNA
cctcggcctccgggtctcccaa

SEQ ID NO: 50078 - DNA, 22 bp, synthetic construct
  misc_feature 1..22: note = chemically synthesized
  source 1..22: mol_type = other DNA
ctcggcctccgggtctcccaac

SEQ ID NO: 50079 - DNA, 22 bp, synthetic construct
  misc_feature 1..22: note = chemically synthesized
  source 1..22: mol_type = other DNA
ggcctccgggtctcccaacccc

SEQ ID NO: 50080 - DNA, 22 bp, synthetic construct
  misc_feature 1..22: note = chemically synthesized
  source 1..22: mol_type = other DNA
cgggtctcccaaccccgcgaac

SEQ ID NO: 50081 - DNA, 22 bp, synthetic construct
  misc_feature 1..22: note = chemically synthesized
  source 1..22: mol_type = other DNA
ccaaccccgcgaaccttcccac

SEQ ID NO: 50082 - DNA, 22 bp, synthetic construct
  misc_feature 1..22: note = chemically synthesized
  source 1..22: mol_type = other DNA
cccactgaatagcgcagccgca

SEQ ID NO: 50083 - DNA, 22 bp, synthetic construct
  misc_feature 1..22: note = chemically synthesized
  source 1..22: mol_type = other DNA
ccactgaatagcgcagccgcac

SEQ ID NO: 50084 - DNA, 22 bp, synthetic construct
  misc_feature 1..22: note = chemically synthesized
  source 1..22: mol_type = other DNA
aatagcgcagccgcacgcccca

SEQ ID NO: 50085 - DNA, 22 bp, synthetic construct
  misc_feature 1..22: note = chemically synthesized
  source 1..22: mol_type = other DNA
tccaccgtgctccccactaccc

SEQ ID NO: 50086 - DNA, 22 bp, synthetic construct
  misc_feature 1..22: note = chemically synthesized
  source 1..22: mol_type = other DNA
caccgtgctccccactacccgt

SEQ ID NO: 50087 - DNA, 22 bp, synthetic construct
  misc_feature 1..22: note = chemically synthesized
  source 1..22: mol_type = other DNA
cccactacccgtcctcccccgc

SEQ ID NO: 50088 - DNA, 22 bp, synthetic construct
  misc_feature 1..22: note = chemically synthesized
  source 1..22: mol_type = other DNA
cccgtcctcccccgccgccttg

SEQ ID NO: 50089 - DNA, 22 bp, synthetic construct
  misc_feature 1..22: note = chemically synthesized
  source 1..22: mol_type = other DNA
ccccgccgccttgcctgcagtc

SEQ ID NO: 50090 - DNA, 22 bp, synthetic construct
  misc_feature 1..22: note = chemically synthesized
  source 1..22: mol_type = other DNA
gcctgcagtccccaagatcgtg

SEQ ID NO: 50091 - DNA, 22 bp, synthetic construct
  misc_feature 1..22: note = chemically synthesized
  source 1..22: mol_type = other DNA
cctgcagtccccaagatcgtgc

SEQ ID NO: 50092 - DNA, 22 bp, synthetic construct
  misc_feature 1..22: note = chemically synthesized
  source 1..22: mol_type = other DNA
cagtccccaagatcgtgccaag

SEQ ID NO: 50093 - DNA, 22 bp, synthetic construct
  misc_feature 1..22: note = chemically synthesized
  source 1..22: mol_type = other DNA
ggcgacctgcactccacttcct

SEQ ID NO: 50094 - DNA, 22 bp, synthetic construct
  misc_feature 1..22: note = chemically synthesized
  source 1..22: mol_type = other DNA
cactccacttcctctcttacat

SEQ ID NO: 50095 - DNA, 22 bp, synthetic construct
  misc_feature 1..22: note = chemically synthesized
  source 1..22: mol_type = other DNA
cacttcctctcttacatggggg

SEQ ID NO: 50096 - DNA, 22 bp, synthetic construct
  misc_feature 1..22: note = chemically synthesized
  source 1..22: mol_type = other DNA
cctctcttacatggggggaaac

SEQ ID NO: 50097 - DNA, 22 bp, synthetic construct
  misc_feature 1..22: note = chemically synthesized
  source 1..22: mol_type = other DNA
ctctcttacatggggggaaact

SEQ ID NO: 50098 - DNA, 22 bp, synthetic construct
  misc_feature 1..22: note = chemically synthesized
  source 1..22: mol_type = other DNA
tcttacatggggggaaactgag

SEQ ID NO: 50099 - DNA, 22 bp, synthetic construct
  misc_feature 1..22: note = chemically synthesized
  source 1..22: mol_type = other DNA
ttacatggggggaaactgaggc

SEQ ID NO: 50100 - DNA, 22 bp, synthetic construct
  misc_feature 1..22: note = chemically synthesized
  source 1..22: mol_type = other DNA
acatggggggaaactgaggccc

SEQ ID NO: 50101 - DNA, 22 bp, synthetic construct
  misc_feature 1..22: note = chemically synthesized
  source 1..22: mol_type = other DNA
catggggggaaactgaggcccg

SEQ ID NO: 50102 - DNA, 22 bp, synthetic construct
  misc_feature 1..22: note = chemically synthesized
  source 1..22: mol_type = other DNA
aggcccgagaggaaacagcacc

SEQ ID NO: 50103 - DNA, 22 bp, synthetic construct
  misc_feature 1..22: note = chemically synthesized
  source 1..22: mol_type = other DNA
cgggttcgccccggcctcccat

SEQ ID NO: 50104 - DNA, 22 bp, synthetic construct
  misc_feature 1..22: note = chemically synthesized
  source 1..22: mol_type = other DNA
gccccggcctcccatccctaca

SEQ ID NO: 50105 - DNA, 22 bp, synthetic construct
  misc_feature 1..22: note = chemically synthesized
  source 1..22: mol_type = other DNA
ccatccctacacccgcaccttg

SEQ ID NO: 50106 - DNA, 22 bp, synthetic construct
  misc_feature 1..22: note = chemically synthesized
  source 1..22: mol_type = other DNA
cacccgcaccttggcgcagcgg

SEQ ID NO: 50107 - DNA, 22 bp, synthetic construct
  misc_feature 1..22: note = chemically synthesized
  source 1..22: mol_type = other DNA
ggcgcagcggtggaaggtggct

SEQ ID NO: 50108 - DNA, 22 bp, synthetic construct
  misc_feature 1..22: note = chemically synthesized
  source 1..22: mol_type = other DNA
gcgcagcggtggaaggtggctg

SEQ ID NO: 50109 - DNA, 22 bp, synthetic construct
  misc_feature 1..22: note = chemically synthesized
  source 1..22: mol_type = other DNA
tggttccgtgctcgggtgcttc

SEQ ID NO: 50110 - DNA, 22 bp, synthetic construct
  misc_feature 1..22: note = chemically synthesized
  source 1..22: mol_type = other DNA
cgtgctcgggtgcttcggccag

SEQ ID NO: 50111 - DNA, 22 bp, synthetic construct
  misc_feature 1..22: note = chemically synthesized
  source 1..22: mol_type = other DNA
gggtgcttcggccaggccgtcc

SEQ ID NO: 50112 - DNA, 22 bp, synthetic construct
  misc_feature 1..22: note = chemically synthesized
  source 1..22: mol_type = other DNA
cggccaggccgtcctcctcgga

SEQ ID NO: 50113 - DNA, 22 bp, synthetic construct
  misc_feature 1..22: note = chemically synthesized
  source 1..22: mol_type = other DNA
ggccaggccgtcctcctcggaa

SEQ ID NO: 50114 - DNA, 22 bp, synthetic construct
  misc_feature 1..22: note = chemically synthesized
  source 1..22: mol_type = other DNA
ctcggaacgcaaggctagcacc

SEQ ID NO: 50115 - DNA, 22 bp, synthetic construct
  misc_feature 1..22: note = chemically synthesized
  source 1..22: mol_type = other DNA
ggaacgcaaggctagcaccagc

SEQ ID NO: 50116 - DNA, 22 bp, synthetic construct
  misc_feature 1..22: note = chemically synthesized
  source 1..22: mol_type = other DNA
gcaccagctcctcgtagtcgcc

SEQ ID NO: 50117 - DNA, 22 bp, synthetic construct
  misc_feature 1..22: note = chemically synthesized
  source 1..22: mol_type = other DNA
ctcgtagtcgccgtcctcgtcc

SEQ ID NO: 50118 - DNA, 22 bp, synthetic construct
  misc_feature 1..22: note = chemically synthesized
  source 1..22: mol_type = other DNA
gtagtcgccgtcctcgtcctcc

SEQ ID NO: 50119 - DNA, 22 bp, synthetic construct
  misc_feature 1..22: note = chemically synthesized
  source 1..22: mol_type = other DNA
gtcctcctgcgcacgggcgccc

SEQ ID NO: 50120 - DNA, 22 bp, synthetic construct
  misc_feature 1..22: note = chemically synthesized
  source 1..22: mol_type = other DNA
ctgcgcacgggcgcccgcggga

SEQ ID NO: 50121 - DNA, 22 bp, synthetic construct
  misc_feature 1..22: note = chemically synthesized
  source 1..22: mol_type = other DNA
cgcacgggcgcccgcgggaccc

SEQ ID NO: 50122 - DNA, 22 bp, synthetic construct
  misc_feature 1..22: note = chemically synthesized
  source 1..22: mol_type = other DNA
gagctgacggtgcccatgaggg

SEQ ID NO: 50123 - DNA, 22 bp, synthetic construct
  misc_feature 1..22: note = chemically synthesized
  source 1..22: mol_type = other DNA
acggtgcccatgagggccaggg

SEQ ID NO: 50124 - DNA, 22 bp, synthetic construct
  misc_feature 1..22: note = chemically synthesized
  source 1..22: mol_type = other DNA
ctgtcctggcgaggagacctag

SEQ ID NO: 50125 - DNA, 22 bp, synthetic construct
  misc_feature 1..22: note = chemically synthesized
  source 1..22: mol_type = other DNA
tcctggcgaggagacctagagg

SEQ ID NO: 50126 - DNA, 22 bp, synthetic construct
  misc_feature 1..22: note = chemically synthesized
  source 1..22: mol_type = other DNA
gcgaggagacctagaggccgtg

SEQ ID NO: 50127 - DNA, 22 bp, synthetic construct
  misc_feature 1..22: note = chemically synthesized
  source 1..22: mol_type = other DNA
gaggccgtgcgcggtccacgcc

SEQ ID NO: 50128 - DNA, 22 bp, synthetic construct
  misc_feature 1..22: note = chemically synthesized
  source 1..22: mol_type = other DNA
gagccttgcggtggggaggact

SEQ ID NO: 50129 - DNA, 22 bp, synthetic construct
  misc_feature 1..22: note = chemically synthesized
  source 1..22: mol_type = other DNA
agccttgcggtggggaggactg

SEQ ID NO: 50130 - DNA, 22 bp, synthetic construct
  misc_feature 1..22: note = chemically synthesized
  source 1..22: mol_type = other DNA
gcggtggggaggactgtgcagg

SEQ ID NO: 50131 - DNA, 22 bp, synthetic construct
  misc_feature 1..22: note = chemically synthesized
  source 1..22: mol_type = other DNA
cggtggggaggactgtgcagga

SEQ ID NO: 50132 - DNA, 22 bp, synthetic construct
  misc_feature 1..22: note = chemically synthesized
  source 1..22: mol_type = other DNA
tgcaggagctgaagttcaggag

SEQ ID NO: 50133 - DNA, 22 bp, synthetic construct
  misc_feature 1..22: note = chemically synthesized
  source 1..22: mol_type = other DNA
aagttcaggagcagggcgcgtg

SEQ ID NO: 50134 - DNA, 22 bp, synthetic construct
  misc_feature 1..22: note = chemically synthesized
  source 1..22: mol_type = other DNA
aggagcagggcgcgtgaagggg

SEQ ID NO: 50135 - DNA, 22 bp, synthetic construct
  misc_feature 1..22: note = chemically synthesized
  source 1..22: mol_type = other DNA
gctgggagctgggagccgctgc

SEQ ID NO: 50136 - DNA, 22 bp, synthetic construct
  misc_feature 1..22: note = chemically synthesized
  source 1..22: mol_type = other DNA
ggagctgggagccgctgctgca

SEQ ID NO: 50137 - DNA, 22 bp, synthetic construct
  misc_feature 1..22: note = chemically synthesized
  source 1..22: mol_type = other DNA
ggagccgctgctgcaacgacgc

SEQ ID NO: 50138 - DNA, 22 bp, synthetic construct
  misc_feature 1..22: note = chemically synthesized
  source 1..22: mol_type = other DNA
ctgcaacgacgcgtcccggccc

SEQ ID NO: 50139 - DNA, 22 bp, synthetic construct
  misc_feature 1..22: note = chemically synthesized
  source 1..22: mol_type = other DNA
caacgacgcgtcccggcccgcc

SEQ ID NO: 50140 - DNA, 22 bp, synthetic construct
  misc_feature 1..22: note = chemically synthesized
  source 1..22: mol_type = other DNA
actgcctggctcactcctccag

SEQ ID NO: 50141 - DNA, 22 bp, synthetic construct
  misc_feature 1..22: note = chemically synthesized
  source 1..22: mol_type = other DNA
cctggctcactcctccaggctc

SEQ ID NO: 50142 - DNA, 22 bp, synthetic construct
  misc_feature 1..22: note = chemically synthesized
  source 1..22: mol_type = other DNA
gctcactcctccaggctcagac

SEQ ID NO: 50143 - DNA, 22 bp, synthetic construct
  misc_feature 1..22: note = chemically synthesized
  source 1..22: mol_type = other DNA
actcctccaggctcagaccctg

SEQ ID NO: 50144 - DNA, 22 bp, synthetic construct
  misc_feature 1..22: note = chemically synthesized
  source 1..22: mol_type = other DNA
ctccaggctcagaccctgaact

SEQ ID NO: 50145 - DNA, 22 bp, synthetic construct
  misc_feature 1..22: note = chemically synthesized
  source 1..22: mol_type = other DNA
caggctcagaccctgaactgaa

SEQ ID NO: 50146 - DNA, 22 bp, synthetic construct
  misc_feature 1..22: note = chemically synthesized
  source 1..22: mol_type = other DNA
agaccctgaactgaacggcggc

SEQ ID NO: 50147 - DNA, 22 bp, synthetic construct
  misc_feature 1..22: note = chemically synthesized
  source 1..22: mol_type = other DNA
aactgaacggcggcgcccgcct

SEQ ID NO: 50148 - DNA, 22 bp, synthetic construct
  misc_feature 1..22: note = chemically synthesized
  source 1..22: mol_type = other DNA
aacggcggcgcccgcctgcaac

SEQ ID NO: 50149 - DNA, 22 bp, synthetic construct
  misc_feature 1..22: note = chemically synthesized
  source 1..22: mol_type = other DNA
caaccatgagcgcctcgacgtc

SEQ ID NO: 50150 - DNA, 22 bp, synthetic construct
  misc_feature 1..22: note = chemically synthesized
  source 1..22: mol_type = other DNA
gacgtcgctgcggaaaccttct

SEQ ID NO: 50151 - DNA, 22 bp, synthetic construct
  misc_feature 1..22: note = chemically synthesized
  source 1..22: mol_type = other DNA
cggaaaccttctagggtgtggg

SEQ ID NO: 50152 - DNA, 22 bp, synthetic construct
  misc_feature 1..22: note = chemically synthesized
  source 1..22: mol_type = other DNA
ctagggtgtgggtgcttgacgc

SEQ ID NO: 50153 - DNA, 22 bp, synthetic construct
  misc_feature 1..22: note = chemically synthesized
  source 1..22: mol_type = other DNA
tagggtgtgggtgcttgacgcc

SEQ ID NO: 50154 - DNA, 22 bp, synthetic construct
  misc_feature 1..22: note = chemically synthesized
  source 1..22: mol_type = other DNA
gggtgtgggtgcttgacgcctg

SEQ ID NO: 50155 - DNA, 22 bp, synthetic construct
  misc_feature 1..22: note = chemically synthesized
  source 1..22: mol_type = other DNA
gacgcctggggcgcgcagatca

SEQ ID NO: 50156 - DNA, 22 bp, synthetic construct
  misc_feature 1..22: note = chemically synthesized
  source 1..22: mol_type = other DNA
acgcctggggcgcgcagatcac

SEQ ID NO: 50157 - DNA, 22 bp, synthetic construct
  misc_feature 1..22: note = chemically synthesized
  source 1..22: mol_type = other DNA
gggcgcgcagatcacgccacca

SEQ ID NO: 50158 - DNA, 22 bp, synthetic construct
  misc_feature 1..22: note = chemically synthesized
  source 1..22: mol_type = other DNA
tctgattaaacattaacggaac

SEQ ID NO: 50159 - DNA, 22 bp, synthetic construct
  misc_feature 1..22: note = chemically synthesized
  source 1..22: mol_type = other DNA
attaaacattaacggaaccccc

SEQ ID NO: 50160 - DNA, 22 bp, synthetic construct
  misc_feature 1..22: note = chemically synthesized
  source 1..22: mol_type = other DNA
aacattaacggaacccccggac

SEQ ID NO: 50161 - DNA, 22 bp, synthetic construct
  misc_feature 1..22: note = chemically synthesized
  source 1..22: mol_type = other DNA
acggaacccccggactggagga

SEQ ID NO: 50162 - DNA, 22 bp, synthetic construct
  misc_feature 1..22: note = chemically synthesized
  source 1..22: mol_type = other DNA
gaggatcaggtttcggcctcgc

SEQ ID NO: 50163 - DNA, 22 bp, synthetic construct
  misc_feature 1..22: note = chemically synthesized
  source 1..22: mol_type = other DNA
cggcctcgccctccccaaacag

SEQ ID NO: 50164 - DNA, 22 bp, synthetic construct
  misc_feature 1..22: note = chemically synthesized
  source 1..22: mol_type = other DNA
ggcctcgccctccccaaacagc

SEQ ID NO: 50165 - DNA, 22 bp, synthetic construct
  misc_feature 1..22: note = chemically synthesized
  source 1..22: mol_type = other DNA
gccctccccaaacagcgtcaga

SEQ ID NO: 50166 - DNA, 22 bp, synthetic construct
  misc_feature 1..22: note = chemically synthesized
  source 1..22: mol_type = other DNA
cccaaacagcgtcagattacgc

SEQ ID NO: 50167 - DNA, 22 bp, synthetic construct
  misc_feature 1..22: note = chemically synthesized
  source 1..22: mol_type = other DNA
cgcgcagagggaagaaaaaact

SEQ ID NO: 50168 - DNA, 22 bp, synthetic construct
  misc_feature 1..22: note = chemically synthesized
  source 1..22: mol_type = other DNA
ccaaatcctaactgggctggaa

SEQ ID NO: 50169 - DNA, 22 bp, synthetic construct
  misc_feature 1..22: note = chemically synthesized
  source 1..22: mol_type = other DNA
actgggctggaaggcaggccgg

SEQ ID NO: 50170 - DNA, 22 bp, synthetic construct
  misc_feature 1..22: note = chemically synthesized
  source 1..22: mol_type = other DNA
ggctggaaggcaggccggcgcc

SEQ ID NO: 50171 - DNA, 22 bp, synthetic construct
  misc_feature 1..22: note = chemically synthesized
  source 1..22: mol_type = other DNA
gaaggcaggccggcgccctagg

SEQ ID NO: 50172 - DNA, 22 bp, synthetic construct
  misc_feature 1..22: note = chemically synthesized
  source 1..22: mol_type = other DNA
ggggctcctcctctcccgcctc

SEQ ID NO: 50173 - DNA, 22 bp, synthetic construct
  misc_feature 1..22: note = chemically synthesized
  source 1..22: mol_type = other DNA
ctcctctcccgcctctcaccct

SEQ ID NO: 50174 - DNA, 22 bp, synthetic construct
  misc_feature 1..22: note = chemically synthesized
  source 1..22: mol_type = other DNA
ctctcccgcctctcaccctgcg

SEQ ID NO: 50175 - DNA, 22 bp, synthetic construct
  misc_feature 1..22: note = chemically synthesized
  source 1..22: mol_type = other DNA
tcccgcctctcaccctgcgtgg

SEQ ID NO: 50176 - DNA, 22 bp, synthetic construct
  misc_feature 1..22: note = chemically synthesized
  source 1..22: mol_type = other DNA
ccgcctctcaccctgcgtggga

SEQ ID NO: 50177 - DNA, 22 bp, synthetic construct
  misc_feature 1..22: note = chemically synthesized
  source 1..22: mol_type = other DNA
tcaccctgcgtgggatgccaga

SEQ ID NO: 50178 - DNA, 22 bp, synthetic construct
  misc_feature 1..22: note = chemically synthesized
  source 1..22: mol_type = other DNA
accctgcgtgggatgccagact

SEQ ID NO: 50179 - DNA, 22 bp, synthetic construct
  misc_feature 1..22: note = chemically synthesized
  source 1..22: mol_type = other DNA
cgtgggatgccagactccaagt

SEQ ID NO: 50180 - DNA, 22 bp, synthetic construct
  misc_feature 1..22: note = chemically synthesized
  source 1..22: mol_type = other DNA
caagttctgccgggcccacctt

SEQ ID NO: 50181 - DNA, 22 bp, synthetic construct
  misc_feature 1..22: note = chemically synthesized
  source 1..22: mol_type = other DNA
tgccgggcccaccttttcagtg

SEQ ID NO: 50182 - DNA, 22 bp, synthetic construct
  misc_feature 1..22: note = chemically synthesized
  source 1..22: mol_type = other DNA
ccgggcccaccttttcagtgtt

SEQ ID NO: 50183 - DNA, 22 bp, synthetic construct
  misc_feature 1..22: note = chemically synthesized
  source 1..22: mol_type = other DNA
ttcagtgtttcctgggtccacc

SEQ ID NO: 50184 - DNA, 22 bp, synthetic construct
  misc_feature 1..22: note = chemically synthesized
  source 1..22: mol_type = other DNA
tcagtgtttcctgggtccacct

SEQ ID NO: 50185 - DNA, 22 bp, synthetic construct
  misc_feature 1..22: note = chemically synthesized
  source 1..22: mol_type = other DNA
cagtgtttcctgggtccacctt

SEQ ID NO: 50186 - DNA, 22 bp, synthetic construct
  misc_feature 1..22: note = chemically synthesized
  source 1..22: mol_type = other DNA
agtgtttcctgggtccaccttg

SEQ ID NO: 50187 - DNA, 22 bp, synthetic construct
  misc_feature 1..22: note = chemically synthesized
  source 1..22: mol_type = other DNA
cctgggtccaccttgtctcctg

SEQ ID NO: 50188 - DNA, 22 bp, synthetic construct
  misc_feature 1..22: note = chemically synthesized
  source 1..22: mol_type = other DNA
ctgggtccaccttgtctcctgc

SEQ ID NO: 50189 - DNA, 22 bp, synthetic construct
  misc_feature 1..22: note = chemically synthesized
  source 1..22: mol_type = other DNA
ggtccaccttgtctcctgctga

SEQ ID NO: 50190 - DNA, 22 bp, synthetic construct
  misc_feature 1..22: note = chemically synthesized
  source 1..22: mol_type = other DNA
gtctcctgctgaccagtgagac

SEQ ID NO: 50191 - DNA, 22 bp, synthetic construct
  misc_feature 1..22: note = chemically synthesized
  source 1..22: mol_type = other DNA
tctcctgctgaccagtgagact

SEQ ID NO: 50192 - DNA, 22 bp, synthetic construct
  misc_feature 1..22: note = chemically synthesized
  source 1..22: mol_type = other DNA
ctgctgaccagtgagacttctg

SEQ ID NO: 50193 - DNA, 22 bp, synthetic construct
  misc_feature 1..22: note = chemically synthesized
  source 1..22: mol_type = other DNA
ctgaccagtgagacttctgaat

SEQ ID NO: 50194 - DNA, 22 bp, synthetic construct
  misc_feature 1..22: note = chemically synthesized
  source 1..22: mol_type = other DNA
accagtgagacttctgaatcaa

SEQ ID NO: 50195 - DNA, 22 bp, synthetic construct
  misc_feature 1..22: note = chemically synthesized
  source 1..22: mol_type = other DNA
ctgaatcaatcctactgtggac

SEQ ID NO: 50196 - DNA, 22 bp, synthetic construct
  misc_feature 1..22: note = chemically synthesized
  source 1..22: mol_type = other DNA
tgaatcaatcctactgtggact

SEQ ID NO: 50197 - DNA, 22 bp, synthetic construct
  misc_feature 1..22: note = chemically synthesized
  source 1..22: mol_type = other DNA
aatcaatcctactgtggactcc

SEQ ID NO: 50198 - DNA, 22 bp, synthetic construct
  misc_feature 1..22: note = chemically synthesized
  source 1..22: mol_type = other DNA
ctgtggactcctcgctgcccac

SEQ ID NO: 50199 - DNA, 22 bp, synthetic construct
  misc_feature 1..22: note = chemically synthesized
  source 1..22: mol_type = other DNA
tggactcctcgctgcccaccga

SEQ ID NO: 50200 - DNA, 22 bp, synthetic construct
  misc_feature 1..22: note = chemically synthesized
  source 1..22: mol_type = other DNA
ctcgctgcccaccgaattcttt

SEQ ID NO: 50201 - DNA, 22 bp, synthetic construct
  misc_feature 1..22: note = chemically synthesized
  source 1..22: mol_type = other DNA
gctgcccaccgaattctttcca

SEQ ID NO: 50202 - DNA, 22 bp, synthetic construct
  misc_feature 1..22: note = chemically synthesized
  source 1..22: mol_type = other DNA
cccaccgaattctttccactgg

SEQ ID NO: 50203 - DNA, 22 bp, synthetic construct
  misc_feature 1..22: note = chemically synthesized
  source 1..22: mol_type = other DNA
tttccactggccttaacctggc

SEQ ID NO: 50204 - DNA, 22 bp, synthetic construct
  misc_feature 1..22: note = chemically synthesized
  source 1..22: mol_type = other DNA
tccactggccttaacctggcag

SEQ ID NO: 50205 - DNA, 22 bp, synthetic construct
  misc_feature 1..22: note = chemically synthesized
  source 1..22: mol_type = other DNA
ccactggccttaacctggcagc

SEQ ID NO: 50206 - DNA, 22 bp, synthetic construct
  misc_feature 1..22: note = chemically synthesized
  source 1..22: mol_type = other DNA
cactggccttaacctggcagcc

SEQ ID NO: 50207 - DNA, 22 bp, synthetic construct
  misc_feature 1..22: note = chemically synthesized
  source 1..22: mol_type = other DNA
gccttaacctggcagccttcta

SEQ ID NO: 50208 - DNA, 22 bp, synthetic construct
  misc_feature 1..22: note = chemically synthesized
  source 1..22: mol_type = other DNA
aacctggcagccttctaaactt

SEQ ID NO: 50209 - DNA, 22 bp, synthetic construct
  misc_feature 1..22: note = chemically synthesized
  source 1..22: mol_type = other DNA
acctggcagccttctaaactta

SEQ ID NO: 50210 - DNA, 22 bp, synthetic construct
  misc_feature 1..22: note = chemically synthesized
  source 1..22: mol_type = other DNA
gcagccttctaaacttagcctg

SEQ ID NO: 50211 - DNA, 22 bp, synthetic construct
  misc_feature 1..22: note = chemically synthesized
  source 1..22: mol_type = other DNA
ctaaacttagcctggaccccct

SEQ ID NO: 50212 - DNA, 22 bp, synthetic construct
  misc_feature 1..22: note = chemically synthesized
  source 1..22: mol_type = other DNA
taaacttagcctggaccccctc

SEQ ID NO: 50213 - DNA, 22 bp, synthetic construct
  misc_feature 1..22: note = chemically synthesized
  source 1..22: mol_type = other DNA
aacttagcctggaccccctccg

SEQ ID NO: 50214 - DNA, 22 bp, synthetic construct
  misc_feature 1..22: note = chemically synthesized
  source 1..22: mol_type = other DNA
agcctggaccccctccggcctc

SEQ ID NO: 50215 - DNA, 22 bp, synthetic construct
  misc_feature 1..22: note = chemically synthesized
  source 1..22: mol_type = other DNA
gcctggaccccctccggcctct

SEQ ID NO: 50216 - DNA, 22 bp, synthetic construct
  misc_feature 1..22: note = chemically synthesized
  source 1..22: mol_type = other DNA
gaccccctccggcctctgccct

SEQ ID NO: 50217 - DNA, 22 bp, synthetic construct
  misc_feature 1..22: note = chemically synthesized
  source 1..22: mol_type = other DNA
cggcctctgccctttatgcacc

SEQ ID NO: 50218 - DNA, 22 bp, synthetic construct
  misc_feature 1..22: note = chemically synthesized
  source 1..22: mol_type = other DNA
tgccctttatgcaccctgcaca

SEQ ID NO: 50219 - DNA, 22 bp, synthetic construct
  misc_feature 1..22: note = chemically synthesized
  source 1..22: mol_type = other DNA
ccctttatgcaccctgcacact

SEQ ID NO: 50220 - DNA, 22 bp, synthetic construct
  misc_feature 1..22: note = chemically synthesized
  source 1..22: mol_type = other DNA
tatgcaccctgcacactgacct

SEQ ID NO: 50221 - DNA, 22 bp, synthetic construct
  misc_feature 1..22: note = chemically synthesized
  source 1..22: mol_type = other DNA
atgcaccctgcacactgacctt

SEQ ID NO: 50222 - DNA, 22 bp, synthetic construct
  misc_feature 1..22: note = chemically synthesized
  source 1..22: mol_type = other DNA
tgcaccctgcacactgacctta

SEQ ID NO: 50223 - DNA, 22 bp, synthetic construct
  misc_feature 1..22: note = chemically synthesized
  source 1..22: mol_type = other DNA
cacactgaccttaccaactagc

SEQ ID NO: 50224 - DNA, 22 bp, synthetic construct
  misc_feature 1..22: note = chemically synthesized
  source 1..22: mol_type = other DNA
accttaccaactagctgctcct

SEQ ID NO: 50225 - DNA, 22 bp, synthetic construct
  misc_feature 1..22: note = chemically synthesized
  source 1..22: mol_type = other DNA
accaactagctgctccttgaag

SEQ ID NO: 50226 - DNA, 22 bp, synthetic construct
  misc_feature 1..22: note = chemically synthesized
  source 1..22: mol_type = other DNA
ccaactagctgctccttgaaga

SEQ ID NO: 50227 - DNA, 22 bp, synthetic construct
  misc_feature 1..22: note = chemically synthesized
  source 1..22: mol_type = other DNA
gctgctccttgaagagattgct

SEQ ID NO: 50228 - DNA, 22 bp, synthetic construct
  misc_feature 1..22: note = chemically synthesized
  source 1..22: mol_type = other DNA
ctccttgaagagattgcttgct

SEQ ID NO: 50229 - DNA, 22 bp, synthetic construct
  misc_feature 1..22: note = chemically synthesized
  source 1..22: mol_type = other DNA
cttgaagagattgcttgctttt

SEQ ID NO: 50230 - DNA, 22 bp, synthetic construct
  misc_feature 1..22: note = chemically synthesized
  source 1..22: mol_type = other DNA
gaagagattgcttgcttttgat

SEQ ID NO: 50231 - DNA, 22 bp, synthetic construct
  misc_feature 1..22: note = chemically synthesized
  source 1..22: mol_type = other DNA
aagagattgcttgcttttgatg

SEQ ID NO: 50232 - DNA, 22 bp, synthetic construct
  misc_feature 1..22: note = chemically synthesized
  source 1..22: mol_type = other DNA
cttgcttttgatgtccagccta

SEQ ID NO: 50233 - DNA, 22 bp, synthetic construct
  misc_feature 1..22: note = chemically synthesized
  source 1..22: mol_type = other DNA
gcttttgatgtccagcctacat

SEQ ID NO: 50234 - DNA, 22 bp, synthetic construct
  misc_feature 1..22: note = chemically synthesized
  source 1..22: mol_type = other DNA
cttttgatgtccagcctacatg

SEQ ID NO: 50235 - DNA, 22 bp, synthetic construct
  misc_feature 1..22: note = chemically synthesized
  source 1..22: mol_type = other DNA
ttgatgtccagcctacatgcat

SEQ ID NO: 50236 - DNA, 22 bp, synthetic construct
  misc_feature 1..22: note = chemically synthesized
  source 1..22: mol_type = other DNA
tgatgtccagcctacatgcatt

SEQ ID NO: 50237 - DNA, 22 bp, synthetic construct
  misc_feature 1..22: note = chemically synthesized
  source 1..22: mol_type = other DNA
gatgtccagcctacatgcattt

SEQ ID NO: 50238 - DNA, 22 bp, synthetic construct
  misc_feature 1..22: note = chemically synthesized
  source 1..22: mol_type = other DNA
atgtccagcctacatgcatttc

SEQ ID NO: 50239 - DNA, 22 bp, synthetic construct
  misc_feature 1..22: note = chemically synthesized
  source 1..22: mol_type = other DNA
catgcatttcaagggatttata

SEQ ID NO: 50240 - DNA, 22 bp, synthetic construct
  misc_feature 1..22: note = chemically synthesized
  source 1..22: mol_type = other DNA
caagggatttatactacaaaga

SEQ ID NO: 50241 - DNA, 22 bp, synthetic construct
  misc_feature 1..22: note = chemically synthesized
  source 1..22: mol_type = other DNA
aagggatttatactacaaagat

SEQ ID NO: 50242 - DNA, 22 bp, synthetic construct
  misc_feature 1..22: note = chemically synthesized
  source 1..22: mol_type = other DNA
atactacaaagattcaggtttt

SEQ ID NO: 50243 - DNA, 22 bp, synthetic construct
  misc_feature 1..22: note = chemically synthesized
  source 1..22: mol_type = other DNA
tactacaaagattcaggtttta

SEQ ID NO: 50244 - DNA, 22 bp, synthetic construct
  misc_feature 1..22: note = chemically synthesized
  source 1..22: mol_type = other DNA
caaagattcaggttttaagttt

SEQ ID NO: 50245 - DNA, 22 bp, synthetic construct
  misc_feature 1..22: note = chemically synthesized
  source 1..22: mol_type = other DNA
aggttttaagtttgcaaagacg

SEQ ID NO: 50246 - DNA, 22 bp, synthetic construct
  misc_feature 1..22: note = chemically synthesized
  source 1..22: mol_type = other DNA
taagtttgcaaagacgtcatat

SEQ ID NO: 50247 - DNA, 22 bp, synthetic construct
  misc_feature 1..22: note = chemically synthesized
  source 1..22: mol_type = other DNA
aagtttgcaaagacgtcatata

SEQ ID NO: 50248 - DNA, 22 bp, synthetic construct
  misc_feature 1..22: note = chemically synthesized
  source 1..22: mol_type = other DNA
agtttgcaaagacgtcatatag

SEQ ID NO: 50249 - DNA, 22 bp, synthetic construct
  misc_feature 1..22: note = chemically synthesized
  source 1..22: mol_type = other DNA
gcaaagacgtcatataggtaca

SEQ ID NO: 50250 - DNA, 22 bp, synthetic construct
  misc_feature 1..22: note = chemically synthesized
  source 1..22: mol_type = other DNA
caaagacgtcatataggtacat

SEQ ID NO: 50251 - DNA, 22 bp, synthetic construct
  misc_feature 1..22: note = chemically synthesized
  source 1..22: mol_type = other DNA
agaattctatggtaggcacaag

SEQ ID NO: 50252 - DNA, 22 bp, synthetic construct
  misc_feature 1..22: note = chemically synthesized
  source 1..22: mol_type = other DNA
tatggtaggcacaagctcagct

SEQ ID NO: 50253 - DNA, 22 bp, synthetic construct
  misc_feature 1..22: note = chemically synthesized
  source 1..22: mol_type = other DNA
tggtaggcacaagctcagcttt

SEQ ID NO: 50254 - DNA, 22 bp, synthetic construct
  misc_feature 1..22: note = chemically synthesized
  source 1..22: mol_type = other DNA
agctttccagaagattcaattt

SEQ ID NO: 50255 - DNA, 22 bp, synthetic construct
  misc_feature 1..22: note = chemically synthesized
  source 1..22: mol_type = other DNA
tccagaagattcaatttgcaaa

SEQ ID NO: 50256 - DNA, 22 bp, synthetic construct
  misc_feature 1..22: note = chemically synthesized
  source 1..22: mol_type = other DNA
ccagaagattcaatttgcaaag

SEQ ID NO: 50257 - DNA, 22 bp, synthetic construct
  misc_feature 1..22: note = chemically synthesized
  source 1..22: mol_type = other DNA
cagaagattcaatttgcaaaga

SEQ ID NO: 50258 - DNA, 22 bp, synthetic construct
  misc_feature 1..22: note = chemically synthesized
  source 1..22: mol_type = other DNA
aatttgcaaagattccttttac

SEQ ID NO: 50259 - DNA, 22 bp, synthetic construct
  misc_feature 1..22: note = chemically synthesized
  source 1..22: mol_type = other DNA
gcaaagattccttttacacacc

SEQ ID NO: 50260 - DNA, 22 bp, synthetic construct
  misc_feature 1..22: note = chemically synthesized
  source 1..22: mol_type = other DNA
caaagattccttttacacacca

SEQ ID NO: 50261 - DNA, 22 bp, synthetic construct
  misc_feature 1..22: note = chemically synthesized
  source 1..22: mol_type = other DNA
cttttacacaccatgttcaaga

SEQ ID NO: 50262 - DNA, 22 bp, synthetic construct
  misc_feature 1..22: note = chemically synthesized
  source 1..22: mol_type = other DNA
ttacacaccatgttcaagaaat

SEQ ID NO: 50263 - DNA, 22 bp, synthetic construct
  misc_feature 1..22: note = chemically synthesized
  source 1..22: mol_type = other DNA
tacacaccatgttcaagaaatc

SEQ ID NO: 50264 - DNA, 22 bp, synthetic construct
  misc_feature 1..22: note = chemically synthesized
  source 1..22: mol_type = other DNA
acacaccatgttcaagaaatca

SEQ ID NO: 50265 - DNA, 22 bp, synthetic construct
  misc_feature 1..22: note = chemically synthesized
  source 1..22: mol_type = other DNA
cacaccatgttcaagaaatcaa

SEQ ID NO: 50266 - DNA, 22 bp, synthetic construct
  misc_feature 1..22: note = chemically synthesized
  source 1..22: mol_type = other DNA
aagaaatcaactggacaagcat

SEQ ID NO: 50267 - DNA, 22 bp, synthetic construct
  misc_feature 1..22: note = chemically synthesized
  source 1..22: mol_type = other DNA
gacaagcatccagtaaacacct

SEQ ID NO: 50268 - DNA, 22 bp, synthetic construct
  misc_feature 1..22: note = chemically synthesized
  source 1..22: mol_type = other DNA
ttgtgtaccaggcaggaggatg

SEQ ID NO: 50269 - DNA, 22 bp, synthetic construct
  misc_feature 1..22: note = chemically synthesized
  source 1..22: mol_type = other DNA
tgtaccaggcaggaggatgaaa

SEQ ID NO: 50270 - DNA, 22 bp, synthetic construct
  misc_feature 1..22: note = chemically synthesized
  source 1..22: mol_type = other DNA
ctggcctcagattgtacatgtg

SEQ ID NO: 50271 - DNA, 22 bp, synthetic construct
  misc_feature 1..22: note = chemically synthesized
  source 1..22: mol_type = other DNA
gcctcagattgtacatgtggca

SEQ ID NO: 50272 - DNA, 22 bp, synthetic construct
  misc_feature 1..22: note = chemically synthesized
  source 1..22: mol_type = other DNA
agattgtacatgtggcatgaca

SEQ ID NO: 50273 - DNA, 22 bp, synthetic construct
  misc_feature 1..22: note = chemically synthesized
  source 1..22: mol_type = other DNA
tacatgtggcatgacatgaggc

SEQ ID NO: 50274 - DNA, 22 bp, synthetic construct
  misc_feature 1..22: note = chemically synthesized
  source 1..22: mol_type = other DNA
gctctttctggaagggctgtcg

SEQ ID NO: 50275 - DNA, 22 bp, synthetic construct
  misc_feature 1..22: note = chemically synthesized
  source 1..22: mol_type = other DNA
ctctttctggaagggctgtcga

SEQ ID NO: 50276 - DNA, 22 bp, synthetic construct
  misc_feature 1..22: note = chemically synthesized
  source 1..22: mol_type = other DNA
tttctggaagggctgtcgatac

SEQ ID NO: 50277 - DNA, 22 bp, synthetic construct
  misc_feature 1..22: note = chemically synthesized
  source 1..22: mol_type = other DNA
tctggaagggctgtcgatactg

SEQ ID NO: 50278 - DNA, 22 bp, synthetic construct
  misc_feature 1..22: note = chemically synthesized
  source 1..22: mol_type = other DNA
ctggaagggctgtcgatactgg

SEQ ID NO: 50279 - DNA, 22 bp, synthetic construct
  misc_feature 1..22: note = chemically synthesized
  source 1..22: mol_type = other DNA
tggaagggctgtcgatactggg

SEQ ID NO: 50280 - DNA, 22 bp, synthetic construct
  misc_feature 1..22: note = chemically synthesized
  source 1..22: mol_type = other DNA
gaagggctgtcgatactgggaa

SEQ ID NO: 50281 - DNA, 22 bp, synthetic construct
  misc_feature 1..22: note = chemically synthesized
  source 1..22: mol_type = other DNA
tcgatactgggaagaaacaaag

SEQ ID NO: 50282 - DNA, 22 bp, synthetic construct
  misc_feature 1..22: note = chemically synthesized
  source 1..22: mol_type = other DNA
ggaagaaacaaaggcgaattta

SEQ ID NO: 50283 - DNA, 22 bp, synthetic construct
  misc_feature 1..22: note = chemically synthesized
  source 1..22: mol_type = other DNA
atgatcctcccttgcagatgca

SEQ ID NO: 50284 - DNA, 22 bp, synthetic construct
  misc_feature 1..22: note = chemically synthesized
  source 1..22: mol_type = other DNA
tgatcctcccttgcagatgcac

SEQ ID NO: 50285 - DNA, 22 bp, synthetic construct
  misc_feature 1..22: note = chemically synthesized
  source 1..22: mol_type = other DNA
ccttgcagatgcacagcagatt

SEQ ID NO: 50286 - DNA, 22 bp, synthetic construct
  misc_feature 1..22: note = chemically synthesized
  source 1..22: mol_type = other DNA
gcagatgcacagcagattccga

SEQ ID NO: 50287 - DNA, 22 bp, synthetic construct
  misc_feature 1..22: note = chemically synthesized
  source 1..22: mol_type = other DNA
cagatgcacagcagattccgag

SEQ ID NO: 50288 - DNA, 22 bp, synthetic construct
  misc_feature 1..22: note = chemically synthesized
  source 1..22: mol_type = other DNA
cgagtgaaatggcctgctctga

SEQ ID NO: 50289 - DNA, 22 bp, synthetic construct
  misc_feature 1..22: note = chemically synthesized
  source 1..22: mol_type = other DNA
ctctgaatctaggtgctggagt

SEQ ID NO: 50290 - DNA, 22 bp, synthetic construct
  misc_feature 1..22: note = chemically synthesized
  source 1..22: mol_type = other DNA
tgaatctaggtgctggagtcca

SEQ ID NO: 50291 - DNA, 22 bp, synthetic construct
  misc_feature 1..22: note = chemically synthesized
  source 1..22: mol_type = other DNA
aatctaggtgctggagtccaaa

SEQ ID NO: 50292 - DNA, 22 bp, synthetic construct
  misc_feature 1..22: note = chemically synthesized
  source 1..22: mol_type = other DNA
ggtgctggagtccaaagttgat

SEQ ID NO: 50293 - DNA, 22 bp, synthetic construct
  misc_feature 1..22: note = chemically synthesized
  source 1..22: mol_type = other DNA
gagtccaaagttgatgctcttt

SEQ ID NO: 50294 - DNA, 22 bp, synthetic construct
  misc_feature 1..22: note = chemically synthesized
  source 1..22: mol_type = other DNA
atgctctttccactttgtttgc

SEQ ID NO: 50295 - DNA, 22 bp, synthetic construct
  misc_feature 1..22: note = chemically synthesized
  source 1..22: mol_type = other DNA
tttccactttgtttgcaaagac

SEQ ID NO: 50296 - DNA, 22 bp, synthetic construct
  misc_feature 1..22: note = chemically synthesized
  source 1..22: mol_type = other DNA
tccactttgtttgcaaagacct

SEQ ID NO: 50297 - DNA, 22 bp, synthetic construct
  misc_feature 1..22: note = chemically synthesized
  source 1..22: mol_type = other DNA
ccactttgtttgcaaagacctc

SEQ ID NO: 50298 - DNA, 22 bp, synthetic construct
  misc_feature 1..22: note = chemically synthesized
  source 1..22: mol_type = other DNA
cactttgtttgcaaagacctca

SEQ ID NO: 50299 - DNA, 22 bp, synthetic construct
  misc_feature 1..22: note = chemically synthesized
  source 1..22: mol_type = other DNA
tgtttgcaaagacctcactcca

SEQ ID NO: 50300 - DNA, 22 bp, synthetic construct
  misc_feature 1..22: note = chemically synthesized
  source 1..22: mol_type = other DNA
gtttgcaaagacctcactccag

SEQ ID NO: 50301 - DNA, 22 bp, synthetic construct
  misc_feature 1..22: note = chemically synthesized
  source 1..22: mol_type = other DNA
tttgcaaagacctcactccaga

SEQ ID NO: 50302 - DNA, 22 bp, synthetic construct
  misc_feature 1..22: note = chemically synthesized
  source 1..22: mol_type = other DNA
gcaaagacctcactccagagag

SEQ ID NO: 50303 - DNA, 22 bp, synthetic construct
  misc_feature 1..22: note = chemically synthesized
  source 1..22: mol_type = other DNA
caaagacctcactccagagagc

SEQ ID NO: 50304 - DNA, 22 bp, synthetic construct
  misc_feature 1..22: note = chemically synthesized
  source 1..22: mol_type = other DNA
actccagagagccagtgcacaa

SEQ ID NO: 50305 - DNA, 22 bp, synthetic construct
  misc_feature 1..22: note = chemically synthesized
  source 1..22: mol_type = other DNA
cagagagccagtgcacaaagac

SEQ ID NO: 50306 - DNA, 22 bp, synthetic construct
  misc_feature 1..22: note = chemically synthesized
  source 1..22: mol_type = other DNA
acagtgactccatgaggtaagg

SEQ ID NO: 50307 - DNA, 22 bp, synthetic construct
  misc_feature 1..22: note = chemically synthesized
  source 1..22: mol_type = other DNA
catgaggtaaggtcagagttat

SEQ ID NO: 50308 - DNA, 22 bp, synthetic construct
  misc_feature 1..22: note = chemically synthesized
  source 1..22: mol_type = other DNA
tccccatcgagcccgccatcgc

SEQ ID NO: 50309 - DNA, 22 bp, synthetic construct
  misc_feature 1..22: note = chemically synthesized
  source 1..22: mol_type = other DNA
atggtttgctgacagaggtggc

SEQ ID NO: 50310 - DNA, 22 bp, synthetic construct
  misc_feature 1..22: note = chemically synthesized
  source 1..22: mol_type = other DNA
gctgacagaggtggcagaggtg

SEQ ID NO: 50311 - DNA, 22 bp, synthetic construct
  misc_feature 1..22: note = chemically synthesized
  source 1..22: mol_type = other DNA
ctgacagaggtggcagaggtgg

SEQ ID NO: 50312 - DNA, 22 bp, synthetic construct
  misc_feature 1..22: note = chemically synthesized
  source 1..22: mol_type = other DNA
acagaggtggcagaggtggttc

SEQ ID NO: 50313 - DNA, 22 bp, synthetic construct
  misc_feature 1..22: note = chemically synthesized
  source 1..22: mol_type = other DNA
tccttcctgttgcctgtaattg

SEQ ID NO: 50314 - DNA, 22 bp, synthetic construct
  misc_feature 1..22: note = chemically synthesized
  source 1..22: mol_type = other DNA
cttcctgttgcctgtaattgga

SEQ ID NO: 50315 - DNA, 22 bp, synthetic construct
  misc_feature 1..22: note = chemically synthesized
  source 1..22: mol_type = other DNA
cctgttgcctgtaattggaatt

SEQ ID NO: 50316 - DNA, 22 bp, synthetic construct
  misc_feature 1..22: note = chemically synthesized
  source 1..22: mol_type = other DNA
ctgttgcctgtaattggaattg

SEQ ID NO: 50317 - DNA, 22 bp, synthetic construct
  misc_feature 1..22: note = chemically synthesized
  source 1..22: mol_type = other DNA
ttgcctgtaattggaattgtat

SEQ ID NO: 50318 - DNA, 22 bp, synthetic construct
  misc_feature 1..22: note = chemically synthesized
  source 1..22: mol_type = other DNA
cctgtaattggaattgtatttg

SEQ ID NO: 50319 - DNA, 22 bp, synthetic construct
  misc_feature 1..22: note = chemically synthesized
  source 1..22: mol_type = other DNA
taattggaattgtatttgcaat

SEQ ID NO: 50320 - DNA, 22 bp, synthetic construct
  misc_feature 1..22: note = chemically synthesized
  source 1..22: mol_type = other DNA
gaattgtatttgcaatgtgctt

SEQ ID NO: 50321 - DNA, 22 bp, synthetic construct
  misc_feature 1..22: note = chemically synthesized
  source 1..22: mol_type = other DNA
tatttgcaatgtgcttttggca

SEQ ID NO: 50322 - DNA, 22 bp, synthetic construct
  misc_feature 1..22: note = chemically synthesized
  source 1..22: mol_type = other DNA
gcaatgtgcttttggcagcttc

SEQ ID NO: 50323 - DNA, 22 bp, synthetic construct
  misc_feature 1..22: note = chemically synthesized
  source 1..22: mol_type = other DNA
caatgtgcttttggcagcttcc

SEQ ID NO: 50324 - DNA, 22 bp, synthetic construct
  misc_feature 1..22: note = chemically synthesized
  source 1..22: mol_type = other DNA
ttggcagcttcctcatcaaagg

SEQ ID NO: 50325 - DNA, 22 bp, synthetic construct
  misc_feature 1..22: note = chemically synthesized
  source 1..22: mol_type = other DNA
tggcagcttcctcatcaaaggc

SEQ ID NO: 50326 - DNA, 22 bp, synthetic construct
  misc_feature 1..22: note = chemically synthesized
  source 1..22: mol_type = other DNA
ggcagcttcctcatcaaaggcc

SEQ ID NO: 50327 - DNA, 22 bp, synthetic construct
  misc_feature 1..22: note = chemically synthesized
  source 1..22: mol_type = other DNA
gcagcttcctcatcaaaggcct

SEQ ID NO: 50328 - DNA, 22 bp, synthetic construct
  misc_feature 1..22: note = chemically synthesized
  source 1..22: mol_type = other DNA
cctcatcaaaggcctcccctgg

SEQ ID NO: 50329 - DNA, 22 bp, synthetic construct
  misc_feature 1..22: note = chemically synthesized
  source 1..22: mol_type = other DNA
ctcatcaaaggcctcccctgga

SEQ ID NO: 50330 - DNA, 22 bp, synthetic construct
  misc_feature 1..22: note = chemically synthesized
  source 1..22: mol_type = other DNA
atcaaaggcctcccctggagca

SEQ ID NO: 50331 - DNA, 22 bp, synthetic construct
  misc_feature 1..22: note = chemically synthesized
  source 1..22: mol_type = other DNA
ccctggagcaagaatagatggg

SEQ ID NO: 50332 - DNA, 22 bp, synthetic construct
  misc_feature 1..22: note = chemically synthesized
  source 1..22: mol_type = other DNA
gagcaagaatagatgggagcta

SEQ ID NO: 50333 - DNA, 22 bp, synthetic construct
  misc_feature 1..22: note = chemically synthesized
  source 1..22: mol_type = other DNA
actttccctgctgctccccttt

SEQ ID NO: 50334 - DNA, 22 bp, synthetic construct
  misc_feature 1..22: note = chemically synthesized
  source 1..22: mol_type = other DNA
tccctgctgctcccctttggga

SEQ ID NO: 50335 - DNA, 22 bp, synthetic construct
  misc_feature 1..22: note = chemically synthesized
  source 1..22: mol_type = other DNA
ccctgctgctcccctttgggac

SEQ ID NO: 50336 - DNA, 22 bp, synthetic construct
  misc_feature 1..22: note = chemically synthesized
  source 1..22: mol_type = other DNA
cctgctgctcccctttgggacc

SEQ ID NO: 50337 - DNA, 22 bp, synthetic construct
  misc_feature 1..22: note = chemically synthesized
  source 1..22: mol_type = other DNA
ctgctcccctttgggaccttgg

SEQ ID NO: 50338 - DNA, 22 bp, synthetic construct
  misc_feature 1..22: note = chemically synthesized
  source 1..22: mol_type = other DNA
ctcccctttgggaccttggcct

SEQ ID NO: 50339 - DNA, 22 bp, synthetic construct
  misc_feature 1..22: note = chemically synthesized
  source 1..22: mol_type = other DNA
ccctttgggaccttggcctctc

SEQ ID NO: 50340 - DNA, 22 bp, synthetic construct
  misc_feature 1..22: note = chemically synthesized
  source 1..22: mol_type = other DNA
tgggaccttggcctctcaccta

SEQ ID NO: 50341 - DNA, 22 bp, synthetic construct
  misc_feature 1..22: note = chemically synthesized
  source 1..22: mol_type = other DNA
gggaccttggcctctcacctac

SEQ ID NO: 50342 - DNA, 22 bp, synthetic construct
  misc_feature 1..22: note = chemically synthesized
  source 1..22: mol_type = other DNA
ggaccttggcctctcacctacc

SEQ ID NO: 50343 - DNA, 22 bp, synthetic construct
  misc_feature 1..22: note = chemically synthesized
  source 1..22: mol_type = other DNA
ggcctctcacctaccggggtcg

SEQ ID NO: 50344 - DNA, 22 bp, synthetic construct
  misc_feature 1..22: note = chemically synthesized
  source 1..22: mol_type = other DNA
gcctctcacctaccggggtcgt

SEQ ID NO: 50345 - DNA, 20 bp, synthetic construct
  misc_feature 1..20: note = chemically synthesized
  source 1..20: mol_type = other DNA
gtaaggctgaggcctggcac

SEQ ID NO: 50346 - DNA, 20 bp, synthetic construct
  misc_feature 1..20: note = chemically synthesized
  source 1..20: mol_type = other DNA
gcctggcacaggtctgttcc

SEQ ID NO: 50347 - DNA, 20 bp, synthetic construct
  misc_feature 1..20: note = chemically synthesized
  source 1..20: mol_type = other DNA
ggtctgttcctggtcatatc

SEQ ID NO: 50348 - DNA, 20 bp, synthetic construct
  misc_feature 1..20: note = chemically synthesized
  source 1..20: mol_type = other DNA
tctgttcctggtcatatctg

SEQ ID NO: 50349 - DNA, 20 bp, synthetic construct
  misc_feature 1..20: note = chemically synthesized
  source 1..20: mol_type = other DNA
ctgttcctggtcatatctgg

SEQ ID NO: 50350 - DNA, 20 bp, synthetic construct
  misc_feature 1..20: note = chemically synthesized
  source 1..20: mol_type = other DNA
tgttcctggtcatatctgga

SEQ ID NO: 50351 - DNA, 20 bp, synthetic construct
  misc_feature 1..20: note = chemically synthesized
  source 1..20: mol_type = other DNA
gttcctggtcatatctggag

SEQ ID NO: 50352 - DNA, 20 bp, synthetic construct
  misc_feature 1..20: note = chemically synthesized
  source 1..20: mol_type = other DNA
ctggtcatatctggagggga

SEQ ID NO: 50353 - DNA, 20 bp, synthetic construct
  misc_feature 1..20: note = chemically synthesized
  source 1..20: mol_type = other DNA
ggtcatatctggaggggatg

SEQ ID NO: 50354 - DNA, 20 bp, synthetic construct
  misc_feature 1..20: note = chemically synthesized
  source 1..20: mol_type = other DNA
ctggaggggatggagaatgt

SEQ ID NO: 50355 - DNA, 20 bp, synthetic construct
  misc_feature 1..20: note = chemically synthesized
  source 1..20: mol_type = other DNA
aggggatggagaatgtgagc

SEQ ID NO: 50356 - DNA, 20 bp, synthetic construct
  misc_feature 1..20: note = chemically synthesized
  source 1..20: mol_type = other DNA
cgttcctccccacccctctc

SEQ ID NO: 50357 - DNA, 20 bp, synthetic construct
  misc_feature 1..20: note = chemically synthesized
  source 1..20: mol_type = other DNA
gaccttaacctcctcatcta

SEQ ID NO: 50358 - DNA, 20 bp, synthetic construct
  misc_feature 1..20: note = chemically synthesized
  source 1..20: mol_type = other DNA
cttaacctcctcatctatag

SEQ ID NO: 50359 - DNA, 20 bp, synthetic construct
  misc_feature 1..20: note = chemically synthesized
  source 1..20: mol_type = other DNA
ttaacctcctcatctataga

SEQ ID NO: 50360 - DNA, 20 bp, synthetic construct
  misc_feature 1..20: note = chemically synthesized
  source 1..20: mol_type = other DNA
taacctcctcatctatagaa

SEQ ID NO: 50361 - DNA, 20 bp, synthetic construct
  misc_feature 1..20: note = chemically synthesized
  source 1..20: mol_type = other DNA
aacctcctcatctatagaag

SEQ ID NO: 50362 - DNA, 20 bp, synthetic construct
  misc_feature 1..20: note = chemically synthesized
  source 1..20: mol_type = other DNA
cctcctcatctatagaaggg

SEQ ID NO: 50363 - DNA, 20 bp, synthetic construct
  misc_feature 1..20: note = chemically synthesized
  source 1..20: mol_type = other DNA
ctcatctatagaaggggaga

SEQ ID NO: 50364 - DNA, 20 bp, synthetic construct
  misc_feature 1..20: note = chemically synthesized
  source 1..20: mol_type = other DNA
ggggagaaagatgcatgccc

SEQ ID NO: 50365 - DNA, 20 bp, synthetic construct
  misc_feature 1..20: note = chemically synthesized
  source 1..20: mol_type = other DNA
gagaaagatgcatgcccaag

SEQ ID NO: 50366 - DNA, 20 bp, synthetic construct
  misc_feature 1..20: note = chemically synthesized
  source 1..20: mol_type = other DNA
aaagatgcatgcccaagcag

SEQ ID NO: 50367 - DNA, 20 bp, synthetic construct
  misc_feature 1..20: note = chemically synthesized
  source 1..20: mol_type = other DNA
aagatgcatgcccaagcagt

SEQ ID NO: 50368 - DNA, 20 bp, synthetic construct
  misc_feature 1..20: note = chemically synthesized
  source 1..20: mol_type = other DNA
gatgcatgcccaagcagtag

SEQ ID NO: 50369 - DNA, 20 bp, synthetic construct
  misc_feature 1..20: note = chemically synthesized
  source 1..20: mol_type = other DNA
tgcatgcccaagcagtagga

SEQ ID NO: 50370 - DNA, 20 bp, synthetic construct
  misc_feature 1..20: note = chemically synthesized
  source 1..20: mol_type = other DNA
gcatgcccaagcagtaggag

SEQ ID NO: 50371 - DNA, 20 bp, synthetic construct
  misc_feature 1..20: note = chemically synthesized
  source 1..20: mol_type = other DNA
tgcccaagcagtaggagagg

SEQ ID NO: 50372 - DNA, 20 bp, synthetic construct
  misc_feature 1..20: note = chemically synthesized
  source 1..20: mol_type = other DNA
caagcagtaggagaggtggt

SEQ ID NO: 50373 - DNA, 20 bp, synthetic construct
  misc_feature 1..20: note = chemically synthesized
  source 1..20: mol_type = other DNA
aagcagtaggagaggtggtg

SEQ ID NO: 50374 - DNA, 20 bp, synthetic construct
  misc_feature 1..20: note = chemically synthesized
  source 1..20: mol_type = other DNA
aggagaggtggtgaggctta

SEQ ID NO: 50375 - DNA, 20 bp, synthetic construct
  misc_feature 1..20: note = chemically synthesized
  source 1..20: mol_type = other DNA
ggagaggtggtgaggcttat

SEQ ID NO: 50376 - DNA, 20 bp, synthetic construct
  misc_feature 1..20: note = chemically synthesized
  source 1..20: mol_type = other DNA
agaggtggtgaggcttatag

SEQ ID NO: 50377 - DNA, 20 bp, synthetic construct
  misc_feature 1..20: note = chemically synthesized
  source 1..20: mol_type = other DNA
gtgaggcttataggagacaa

SEQ ID NO: 50378 - DNA, 20 bp, synthetic construct
  misc_feature 1..20: note = chemically synthesized
  source 1..20: mol_type = other DNA
ggcttataggagacaacaga

SEQ ID NO: 50379 - DNA, 20 bp, synthetic construct
  misc_feature 1..20: note = chemically synthesized
  source 1..20: mol_type = other DNA
gcttataggagacaacagac

SEQ ID NO: 50380 - DNA, 20 bp, synthetic construct
  misc_feature 1..20: note = chemically synthesized
  source 1..20: mol_type = other DNA
ttataggagacaacagacag

SEQ ID NO: 50381 - DNA, 20 bp, synthetic construct
  misc_feature 1..20: note = chemically synthesized
  source 1..20: mol_type = other DNA
caacagacaggagcccccga

SEQ ID NO: 50382 - DNA, 20 bp, synthetic construct
  misc_feature 1..20: note = chemically synthesized
  source 1..20: mol_type = other DNA
agacaggagcccccgacaga

SEQ ID NO: 50383 - DNA, 20 bp, synthetic construct
  misc_feature 1..20: note = chemically synthesized
  source 1..20: mol_type = other DNA
acaggagcccccgacagaca

SEQ ID NO: 50384 - DNA, 20 bp, synthetic construct
  misc_feature 1..20: note = chemically synthesized
  source 1..20: mol_type = other DNA
caggagcccccgacagacag

SEQ ID NO: 50385 - DNA, 20 bp, synthetic construct
  misc_feature 1..20: note = chemically synthesized
  source 1..20: mol_type = other DNA
ggagcccccgacagacagag

SEQ ID NO: 50386 - DNA, 20 bp, synthetic construct
  misc_feature 1..20: note = chemically synthesized
  source 1..20: mol_type = other DNA
agacagaggagctgtgcaaa

SEQ ID NO: 50387 - DNA, 20 bp, synthetic construct
  misc_feature 1..20: note = chemically synthesized
  source 1..20: mol_type = other DNA
agaggagctgtgcaaacaga

SEQ ID NO: 50388 - DNA, 20 bp, synthetic construct
  misc_feature 1..20: note = chemically synthesized
  source 1..20: mol_type = other DNA
gctgtgcaaacagaaagaaa

SEQ ID NO: 50389 - DNA, 20 bp, synthetic construct
  misc_feature 1..20: note = chemically synthesized
  source 1..20: mol_type = other DNA
ttgttgctgttgctgtatct

SEQ ID NO: 50390 - DNA, 20 bp, synthetic construct
  misc_feature 1..20: note = chemically synthesized
  source 1..20: mol_type = other DNA
tgctgttgctgtatcttggc

SEQ ID NO: 50391 - DNA, 20 bp, synthetic construct
  misc_feature 1..20: note = chemically synthesized
  source 1..20: mol_type = other DNA
ttggctggtgtcccccatcc

SEQ ID NO: 50392 - DNA, 20 bp, synthetic construct
  misc_feature 1..20: note = chemically synthesized
  source 1..20: mol_type = other DNA
tggctggtgtcccccatcct

SEQ ID NO: 50393 - DNA, 20 bp, synthetic construct
  misc_feature 1..20: note = chemically synthesized
  source 1..20: mol_type = other DNA
ggctggtgtcccccatcctg

SEQ ID NO: 50394 - DNA, 20 bp, synthetic construct
  misc_feature 1..20: note = chemically synthesized
  source 1..20: mol_type = other DNA
tgtcccccatcctggggtgc

SEQ ID NO: 50395 - DNA, 20 bp, synthetic construct
  misc_feature 1..20: note = chemically synthesized
  source 1..20: mol_type = other DNA
gtcccccatcctggggtgcc

SEQ ID NO: 50396 - DNA, 20 bp, synthetic construct
  misc_feature 1..20: note = chemically synthesized
  source 1..20: mol_type = other DNA
atcctggggtgccaggactg

SEQ ID NO: 50397 - DNA, 20 bp, synthetic construct
  misc_feature 1..20: note = chemically synthesized
  source 1..20: mol_type = other DNA
gggtgccaggactgcagacc

SEQ ID NO: 50398 - DNA, 20 bp, synthetic construct
  misc_feature 1..20: note = chemically synthesized
  source 1..20: mol_type = other DNA
ccctcatccacttctgctta

SEQ ID NO: 50399 - DNA, 20 bp, synthetic construct
  misc_feature 1..20: note = chemically synthesized
  source 1..20: mol_type = other DNA
cctcatccacttctgcttac

SEQ ID NO: 50400 - DNA, 20 bp, synthetic construct
  misc_feature 1..20: note = chemically synthesized
  source 1..20: mol_type = other DNA
ccacttctgcttacaggaac

SEQ ID NO: 50401 - DNA, 20 bp, synthetic construct
  misc_feature 1..20: note = chemically synthesized
  source 1..20: mol_type = other DNA
acaggaaccagtgtatccac

SEQ ID NO: 50402 - DNA, 20 bp, synthetic construct
  misc_feature 1..20: note = chemically synthesized
  source 1..20: mol_type = other DNA
caggaaccagtgtatccacc

SEQ ID NO: 50403 - DNA, 20 bp, synthetic construct
  misc_feature 1..20: note = chemically synthesized
  source 1..20: mol_type = other DNA
ggaaccagtgtatccaccag

SEQ ID NO: 50404 - DNA, 20 bp, synthetic construct
  misc_feature 1..20: note = chemically synthesized
  source 1..20: mol_type = other DNA
gaaccagtgtatccaccagg

SEQ ID NO: 50405 - DNA, 20 bp, synthetic construct
  misc_feature 1..20: note = chemically synthesized
  source 1..20: mol_type = other DNA
tgtatccaccaggaggtacc

SEQ ID NO: 50406 - DNA, 20 bp, synthetic construct
  misc_feature 1..20: note = chemically synthesized
  source 1..20: mol_type = other DNA
gtatccaccaggaggtaccg

SEQ ID NO: 50407 - DNA, 20 bp, synthetic construct
  misc_feature 1..20: note = chemically synthesized
  source 1..20: mol_type = other DNA
tatccaccaggaggtaccga

SEQ ID NO: 50408 - DNA, 20 bp, synthetic construct
  misc_feature 1..20: note = chemically synthesized
  source 1..20: mol_type = other DNA
atccaccaggaggtaccgag

SEQ ID NO: 50409 - DNA, 20 bp, synthetic construct
  misc_feature 1..20: note = chemically synthesized
  source 1..20: mol_type = other DNA
tccaccaggaggtaccgagg

SEQ ID NO: 50410 - DNA, 20 bp, synthetic construct
  misc_feature 1..20: note = chemically synthesized
  source 1..20: mol_type = other DNA
ccaccaggaggtaccgaggg

SEQ ID NO: 50411 - DNA, 20 bp, synthetic construct
  misc_feature 1..20: note = chemically synthesized
  source 1..20: mol_type = other DNA
aggaggtaccgaggggggac

SEQ ID NO: 50412 - DNA, 20 bp, synthetic construct
  misc_feature 1..20: note = chemically synthesized
  source 1..20: mol_type = other DNA
ggaggtaccgaggggggacc

SEQ ID NO: 50413 - DNA, 20 bp, synthetic construct
  misc_feature 1..20: note = chemically synthesized
  source 1..20: mol_type = other DNA
ggtaccgaggggggaccggg

SEQ ID NO: 50414 - DNA, 20 bp, synthetic construct
  misc_feature 1..20: note = chemically synthesized
  source 1..20: mol_type = other DNA
gtaccgaggggggaccgggc

SEQ ID NO: 50415 - DNA, 20 bp, synthetic construct
  misc_feature 1..20: note = chemically synthesized
  source 1..20: mol_type = other DNA
gaggggggaccgggcaggac

SEQ ID NO: 50416 - DNA, 20 bp, synthetic construct
  misc_feature 1..20: note = chemically synthesized
  source 1..20: mol_type = other DNA
aggggggaccgggcaggact

SEQ ID NO: 50417 - DNA, 20 bp, synthetic construct
  misc_feature 1..20: note = chemically synthesized
  source 1..20: mol_type = other DNA
gaccgggcaggactgggaaa

SEQ ID NO: 50418 - DNA, 20 bp, synthetic construct
  misc_feature 1..20: note = chemically synthesized
  source 1..20: mol_type = other DNA
accgggcaggactgggaaac

SEQ ID NO: 50419 - DNA, 20 bp, synthetic construct
  misc_feature 1..20: note = chemically synthesized
  source 1..20: mol_type = other DNA
gaaacaggacacaaccctca

SEQ ID NO: 50420 - DNA, 20 bp, synthetic construct
  misc_feature 1..20: note = chemically synthesized
  source 1..20: mol_type = other DNA
ggctgctgttattatgaaaa

SEQ ID NO: 50421 - DNA, 20 bp, synthetic construct
  misc_feature 1..20: note = chemically synthesized
  source 1..20: mol_type = other DNA
gctgctgttattatgaaaat

SEQ ID NO: 50422 - DNA, 20 bp, synthetic construct
  misc_feature 1..20: note = chemically synthesized
  source 1..20: mol_type = other DNA
tgctgttattatgaaaatag

SEQ ID NO: 50423 - DNA, 20 bp, synthetic construct
  misc_feature 1..20: note = chemically synthesized
  source 1..20: mol_type = other DNA
ttattatgaaaataggagct

SEQ ID NO: 50424 - DNA, 20 bp, synthetic construct
  misc_feature 1..20: note = chemically synthesized
  source 1..20: mol_type = other DNA
tgaaaataggagctcagctg

SEQ ID NO: 50425 - DNA, 20 bp, synthetic construct
  misc_feature 1..20: note = chemically synthesized
  source 1..20: mol_type = other DNA
tctccatctgccctgcacct

SEQ ID NO: 50426 - DNA, 20 bp, synthetic construct
  misc_feature 1..20: note = chemically synthesized
  source 1..20: mol_type = other DNA
ccatctgccctgcacctcag

SEQ ID NO: 50427 - DNA, 20 bp, synthetic construct
  misc_feature 1..20: note = chemically synthesized
  source 1..20: mol_type = other DNA
catctgccctgcacctcagc

SEQ ID NO: 50428 - DNA, 20 bp, synthetic construct
  misc_feature 1..20: note = chemically synthesized
  source 1..20: mol_type = other DNA
ctgccctgcacctcagcagg

SEQ ID NO: 50429 - DNA, 20 bp, synthetic construct
  misc_feature 1..20: note = chemically synthesized
  source 1..20: mol_type = other DNA
ccacaacccccctcctgccc

SEQ ID NO: 50430 - DNA, 20 bp, synthetic construct
  misc_feature 1..20: note = chemically synthesized
  source 1..20: mol_type = other DNA
ccccagacctgctgcctgcc

SEQ ID NO: 50431 - DNA, 20 bp, synthetic construct
  misc_feature 1..20: note = chemically synthesized
  source 1..20: mol_type = other DNA
cccagacctgctgcctgcct

SEQ ID NO: 50432 - DNA, 20 bp, synthetic construct
  misc_feature 1..20: note = chemically synthesized
  source 1..20: mol_type = other DNA
cctgctgcctgcctgggcca

SEQ ID NO: 50433 - DNA, 20 bp, synthetic construct
  misc_feature 1..20: note = chemically synthesized
  source 1..20: mol_type = other DNA
ctgctgcctgcctgggccat

SEQ ID NO: 50434 - DNA, 20 bp, synthetic construct
  misc_feature 1..20: note = chemically synthesized
  source 1..20: mol_type = other DNA
tgctgcctgcctgggccatg

SEQ ID NO: 50435 - DNA, 20 bp, synthetic construct
  misc_feature 1..20: note = chemically synthesized
  source 1..20: mol_type = other DNA
ctgcctgcctgggccatggg

SEQ ID NO: 50436 - DNA, 20 bp, synthetic construct
  misc_feature 1..20: note = chemically synthesized
  source 1..20: mol_type = other DNA
tgcctgggccatggggagct

SEQ ID NO: 50437 - DNA, 20 bp, synthetic construct
  misc_feature 1..20: note = chemically synthesized
  source 1..20: mol_type = other DNA
ctgggccatggggagctcag

SEQ ID NO: 50438 - DNA, 20 bp, synthetic construct
  misc_feature 1..20: note = chemically synthesized
  source 1..20: mol_type = other DNA
ggggagctcagaagcctctc

SEQ ID NO: 50439 - DNA, 20 bp, synthetic construct
  misc_feature 1..20: note = chemically synthesized
  source 1..20: mol_type = other DNA
agcctctccagaacctctcg

SEQ ID NO: 50440 - DNA, 20 bp, synthetic construct
  misc_feature 1..20: note = chemically synthesized
  source 1..20: mol_type = other DNA
tccagaacctctcgcagtga

SEQ ID NO: 50441 - DNA, 20 bp, synthetic construct
  misc_feature 1..20: note = chemically synthesized
  source 1..20: mol_type = other DNA
ccagaacctctcgcagtgaa

SEQ ID NO: 50442 - DNA, 20 bp, synthetic construct
  misc_feature 1..20: note = chemically synthesized
  source 1..20: mol_type = other DNA
atacttacgattcactgtcc

SEQ ID NO: 50443 - DNA, 20 bp, synthetic construct
  misc_feature 1..20: note = chemically synthesized
  source 1..20: mol_type = other DNA
tacttacgattcactgtccc

SEQ ID NO: 50444 - DNA, 20 bp, synthetic construct
  misc_feature 1..20: note = chemically synthesized
  source 1..20: mol_type = other DNA
tacgattcactgtcccaggt

SEQ ID NO: 50445 - DNA, 20 bp, synthetic construct
  misc_feature 1..20: note = chemically synthesized
  source 1..20: mol_type = other DNA
gattcactgtcccaggtcag

SEQ ID NO: 50446 - DNA, 20 bp, synthetic construct
  misc_feature 1..20: note = chemically synthesized
  source 1..20: mol_type = other DNA
tcactgtcccaggtcagtgg

SEQ ID NO: 50447 - DNA, 20 bp, synthetic construct
  misc_feature 1..20: note = chemically synthesized
  source 1..20: mol_type = other DNA
caggtcagtggtggtgcctg

SEQ ID NO: 50448 - DNA, 20 bp, synthetic construct
  misc_feature 1..20: note = chemically synthesized
  source 1..20: mol_type = other DNA
cagtggtggtgcctgaagct

SEQ ID NO: 50449 - DNA, 20 bp, synthetic construct
  misc_feature 1..20: note = chemically synthesized
  source 1..20: mol_type = other DNA
agtggtggtgcctgaagctg

SEQ ID NO: 50450 - DNA, 20 bp, synthetic construct
  misc_feature 1..20: note = chemically synthesized
  source 1..20: mol_type = other DNA
tggtggtgcctgaagctgag

SEQ ID NO: 50451 - DNA, 20 bp, synthetic construct
  misc_feature 1..20: note = chemically synthesized
  source 1..20: mol_type = other DNA
ggtgcctgaagctgaggaga

SEQ ID NO: 50452 - DNA, 20 bp, synthetic construct
  misc_feature 1..20: note = chemically synthesized
  source 1..20: mol_type = other DNA
gtgcctgaagctgaggagac

SEQ ID NO: 50453 - DNA, 20 bp, synthetic construct
  misc_feature 1..20: note = chemically synthesized
  source 1..20: mol_type = other DNA
tgcctgaagctgaggagaca

SEQ ID NO: 50454 - DNA, 20 bp, synthetic construct
  misc_feature 1..20: note = chemically synthesized
  source 1..20: mol_type = other DNA
ccctgtcctcgtccgtattt

SEQ ID NO: 50455 - DNA, 20 bp, synthetic construct
  misc_feature 1..20: note = chemically synthesized
  source 1..20: mol_type = other DNA
tgtcctcgtccgtatttaag

SEQ ID NO: 50456 - DNA, 20 bp, synthetic construct
  misc_feature 1..20: note = chemically synthesized
  source 1..20: mol_type = other DNA
cctcgtccgtatttaagcag

SEQ ID NO: 50457 - DNA, 20 bp, synthetic construct
  misc_feature 1..20: note = chemically synthesized
  source 1..20: mol_type = other DNA
ccgtatttaagcagtggatc

SEQ ID NO: 50458 - DNA, 20 bp, synthetic construct
  misc_feature 1..20: note = chemically synthesized
  source 1..20: mol_type = other DNA
gtatttaagcagtggatcca

SEQ ID NO: 50459 - DNA, 20 bp, synthetic construct
  misc_feature 1..20: note = chemically synthesized
  source 1..20: mol_type = other DNA
tatttaagcagtggatccag

SEQ ID NO: 50460 - DNA, 20 bp, synthetic construct
  misc_feature 1..20: note = chemically synthesized
  source 1..20: mol_type = other DNA
atttaagcagtggatccaga

SEQ ID NO: 50461 - DNA, 20 bp, synthetic construct
  misc_feature 1..20: note = chemically synthesized
  source 1..20: mol_type = other DNA
tttaagcagtggatccagag

SEQ ID NO: 50462 - DNA, 20 bp, synthetic construct
  misc_feature 1..20: note = chemically synthesized
  source 1..20: mol_type = other DNA
cagtggatccagaggggcaa

SEQ ID NO: 50463 - DNA, 20 bp, synthetic construct
  misc_feature 1..20: note = chemically synthesized
  source 1..20: mol_type = other DNA
agtggatccagaggggcaac

SEQ ID NO: 50464 - DNA, 20 bp, synthetic construct
  misc_feature 1..20: note = chemically synthesized
  source 1..20: mol_type = other DNA
gtggatccagaggggcaacg

SEQ ID NO: 50465 - DNA, 20 bp, synthetic construct
  misc_feature 1..20: note = chemically synthesized
  source 1..20: mol_type = other DNA
tggatccagaggggcaacgg

SEQ ID NO: 50466 - DNA, 20 bp, synthetic construct
  misc_feature 1..20: note = chemically synthesized
  source 1..20: mol_type = other DNA
gatccagaggggcaacgggg

SEQ ID NO: 50467 - DNA, 20 bp, synthetic construct
  misc_feature 1..20: note = chemically synthesized
  source 1..20: mol_type = other DNA
atccagaggggcaacggggg

SEQ ID NO: 50468 - DNA, 20 bp, synthetic construct
  misc_feature 1..20: note = chemically synthesized
  source 1..20: mol_type = other DNA
ggggcaacgggggaggctgc

SEQ ID NO: 50469 - DNA, 20 bp, synthetic construct
  misc_feature 1..20: note = chemically synthesized
  source 1..20: mol_type = other DNA
gctgctggtgaatattaacc

SEQ ID NO: 50470 - DNA, 20 bp, synthetic construct
  misc_feature 1..20: note = chemically synthesized
  source 1..20: mol_type = other DNA
ctgctggtgaatattaacca

SEQ ID NO: 50471 - DNA, 20 bp, synthetic construct
  misc_feature 1..20: note = chemically synthesized
  source 1..20: mol_type = other DNA
aatattaaccaaggtcaccc

SEQ ID NO: 50472 - DNA, 20 bp, synthetic construct
  misc_feature 1..20: note = chemically synthesized
  source 1..20: mol_type = other DNA
accaaggtcaccccagttat

SEQ ID NO: 50473 - DNA, 20 bp, synthetic construct
  misc_feature 1..20: note = chemically synthesized
  source 1..20: mol_type = other DNA
caaggtcaccccagttatcg

SEQ ID NO: 50474 - DNA, 20 bp, synthetic construct
  misc_feature 1..20: note = chemically synthesized
  source 1..20: mol_type = other DNA
aaggtcaccccagttatcgg

SEQ ID NO: 50475 - DNA, 20 bp, synthetic construct
  misc_feature 1..20: note = chemically synthesized
  source 1..20: mol_type = other DNA
ggtcaccccagttatcggag

SEQ ID NO: 50476 - DNA, 20 bp, synthetic construct
  misc_feature 1..20: note = chemically synthesized
  source 1..20: mol_type = other DNA
ccagttatcggaggagcaaa

SEQ ID NO: 50477 - DNA, 20 bp, synthetic construct
  misc_feature 1..20: note = chemically synthesized
  source 1..20: mol_type = other DNA
cagttatcggaggagcaaac

SEQ ID NO: 50478 - DNA, 20 bp, synthetic construct
  misc_feature 1..20: note = chemically synthesized
  source 1..20: mol_type = other DNA
agttatcggaggagcaaaca

SEQ ID NO: 50479 - DNA, 20 bp, synthetic construct
  misc_feature 1..20: note = chemically synthesized
  source 1..20: mol_type = other DNA
gttatcggaggagcaaacag

SEQ ID NO: 50480 - DNA, 20 bp, synthetic construct
  misc_feature 1..20: note = chemically synthesized
  source 1..20: mol_type = other DNA
cggaggagcaaacaggggct

SEQ ID NO: 50481 - DNA, 20 bp, synthetic construct
  misc_feature 1..20: note = chemically synthesized
  source 1..20: mol_type = other DNA
caaacaggggctaagtccac

SEQ ID NO: 50482 - DNA, 20 bp, synthetic construct
  misc_feature 1..20: note = chemically synthesized
  source 1..20: mol_type = other DNA
caggggctaagtccactggc

SEQ ID NO: 50483 - DNA, 20 bp, synthetic construct
  misc_feature 1..20: note = chemically synthesized
  source 1..20: mol_type = other DNA
aggggctaagtccactggct

SEQ ID NO: 50484 - DNA, 20 bp, synthetic construct
  misc_feature 1..20: note = chemically synthesized
  source 1..20: mol_type = other DNA
aagtccactggctgggatct

SEQ ID NO: 50485 - DNA, 20 bp, synthetic construct
  misc_feature 1..20: note = chemically synthesized
  source 1..20: mol_type = other DNA
agtcgcccgcctacgctgcc

SEQ ID NO: 50486 - DNA, 20 bp, synthetic construct
  misc_feature 1..20: note = chemically synthesized
  source 1..20: mol_type = other DNA
cgctgcccggacgctttgcc

SEQ ID NO: 50487 - DNA, 20 bp, synthetic construct
  misc_feature 1..20: note = chemically synthesized
  source 1..20: mol_type = other DNA
gctgcccggacgctttgcct

SEQ ID NO: 50488 - DNA, 20 bp, synthetic construct
  misc_feature 1..20: note = chemically synthesized
  source 1..20: mol_type = other DNA
gcccggacgctttgcctggg

SEQ ID NO: 50489 - DNA, 20 bp, synthetic construct
  misc_feature 1..20: note = chemically synthesized
  source 1..20: mol_type = other DNA
cgctttgcctgggcagtgta

SEQ ID NO: 50490 - DNA, 20 bp, synthetic construct
  misc_feature 1..20: note = chemically synthesized
  source 1..20: mol_type = other DNA
gcttccactgcacttaccga

SEQ ID NO: 50491 - DNA, 20 bp, synthetic construct
  misc_feature 1..20: note = chemically synthesized
  source 1..20: mol_type = other DNA
cttccactgcacttaccgaa

SEQ ID NO: 50492 - DNA, 20 bp, synthetic construct
  misc_feature 1..20: note = chemically synthesized
  source 1..20: mol_type = other DNA
tccactgcacttaccgaaag

SEQ ID NO: 50493 - DNA, 20 bp, synthetic construct
  misc_feature 1..20: note = chemically synthesized
  source 1..20: mol_type = other DNA
ccgaaaggagtcattgtacc

SEQ ID NO: 50494 - DNA, 20 bp, synthetic construct
  misc_feature 1..20: note = chemically synthesized
  source 1..20: mol_type = other DNA
aggagtcattgtacctggct

SEQ ID NO: 50495 - DNA, 20 bp, synthetic construct
  misc_feature 1..20: note = chemically synthesized
  source 1..20: mol_type = other DNA
tgtacctggctcagaaacca

SEQ ID NO: 50496 - DNA, 20 bp, synthetic construct
  misc_feature 1..20: note = chemically synthesized
  source 1..20: mol_type = other DNA
aaccacagcgtcctgtgtcc

SEQ ID NO: 50497 - DNA, 20 bp, synthetic construct
  misc_feature 1..20: note = chemically synthesized
  source 1..20: mol_type = other DNA
accacagcgtcctgtgtcca

SEQ ID NO: 50498 - DNA, 20 bp, synthetic construct
  misc_feature 1..20: note = chemically synthesized
  source 1..20: mol_type = other DNA
acagcgtcctgtgtccaagg

SEQ ID NO: 50499 - DNA, 20 bp, synthetic construct
  misc_feature 1..20: note = chemically synthesized
  source 1..20: mol_type = other DNA
agcgtcctgtgtccaaggtg

SEQ ID NO: 50500 - DNA, 20 bp, synthetic construct
  misc_feature 1..20: note = chemically synthesized
  source 1..20: mol_type = other DNA
gcgtcctgtgtccaaggtgg

SEQ ID NO: 50501 - DNA, 20 bp, synthetic construct
  misc_feature 1..20: note = chemically synthesized
  source 1..20: mol_type = other DNA
cgtcctgtgtccaaggtgga

SEQ ID NO: 50502 - DNA, 20 bp, synthetic construct
  misc_feature 1..20: note = chemically synthesized
  source 1..20: mol_type = other DNA
gtcctgtgtccaaggtggag

SEQ ID NO: 50503 - DNA, 20 bp, synthetic construct
  misc_feature 1..20: note = chemically synthesized
  source 1..20: mol_type = other DNA
tcctgtgtccaaggtggagg

SEQ ID NO: 50504 - DNA, 20 bp, synthetic construct
  misc_feature 1..20: note = chemically synthesized
  source 1..20: mol_type = other DNA
tgtgtccaaggtggaggggg

SEQ ID NO: 50505 - DNA, 20 bp, synthetic construct
  misc_feature 1..20: note = chemically synthesized
  source 1..20: mol_type = other DNA
caaggtggagggggtggcgt

SEQ ID NO: 50506 - DNA, 20 bp, synthetic construct
  misc_feature 1..20: note = chemically synthesized
  source 1..20: mol_type = other DNA
gtggagggggtggcgtgagt

SEQ ID NO: 50507 - DNA, 20 bp, synthetic construct
  misc_feature 1..20: note = chemically synthesized
  source 1..20: mol_type = other DNA
agggggtggcgtgagtcaga

SEQ ID NO: 50508 - DNA, 20 bp, synthetic construct
  misc_feature 1..20: note = chemically synthesized
  source 1..20: mol_type = other DNA
ggcgtgagtcagacagtctc

SEQ ID NO: 50509 - DNA, 20 bp, synthetic construct
  misc_feature 1..20: note = chemically synthesized
  source 1..20: mol_type = other DNA
gcgtgagtcagacagtctct

SEQ ID NO: 50510 - DNA, 20 bp, synthetic construct
  misc_feature 1..20: note = chemically synthesized
  source 1..20: mol_type = other DNA
gtgagtcagacagtctctgg

SEQ ID NO: 50511 - DNA, 20 bp, synthetic construct
  misc_feature 1..20: note = chemically synthesized
  source 1..20: mol_type = other DNA
gagtcagacagtctctggga

SEQ ID NO: 50512 - DNA, 20 bp, synthetic construct
  misc_feature 1..20: note = chemically synthesized
  source 1..20: mol_type = other DNA
gtctctgggagagtaccact

SEQ ID NO: 50513 - DNA, 20 bp, synthetic construct
  misc_feature 1..20: note = chemically synthesized
  source 1..20: mol_type = other DNA
ctgggagagtaccacttagc

SEQ ID NO: 50514 - DNA, 20 bp, synthetic construct
  misc_feature 1..20: note = chemically synthesized
  source 1..20: mol_type = other DNA
ctggccctctgctctcactg

SEQ ID NO: 50515 - DNA, 20 bp, synthetic construct
  misc_feature 1..20: note = chemically synthesized
  source 1..20: mol_type = other DNA
tgctctcactgcagaatcct

SEQ ID NO: 50516 - DNA, 20 bp, synthetic construct
  misc_feature 1..20: note = chemically synthesized
  source 1..20: mol_type = other DNA
tctcactgcagaatccttag

SEQ ID NO: 50517 - DNA, 20 bp, synthetic construct
  misc_feature 1..20: note = chemically synthesized
  source 1..20: mol_type = other DNA
atccttagtggctgttccac

SEQ ID NO: 50518 - DNA, 20 bp, synthetic construct
  misc_feature 1..20: note = chemically synthesized
  source 1..20: mol_type = other DNA
cttagtggctgttccactgg

SEQ ID NO: 50519 - DNA, 20 bp, synthetic construct
  misc_feature 1..20: note = chemically synthesized
  source 1..20: mol_type = other DNA
gtggctgttccactggtagc

SEQ ID NO: 50520 - DNA, 20 bp, synthetic construct
  misc_feature 1..20: note = chemically synthesized
  source 1..20: mol_type = other DNA
agcaagatctaccatttact

SEQ ID NO: 50521 - DNA, 20 bp, synthetic construct
  misc_feature 1..20: note = chemically synthesized
  source 1..20: mol_type = other DNA
ccccaaaatgcctgatgctg

SEQ ID NO: 50522 - DNA, 20 bp, synthetic construct
  misc_feature 1..20: note = chemically synthesized
  source 1..20: mol_type = other DNA
ctgaagacttactgccgccc

SEQ ID NO: 50523 - DNA, 20 bp, synthetic construct
  misc_feature 1..20: note = chemically synthesized
  source 1..20: mol_type = other DNA
tgaagacttactgccgccct

SEQ ID NO: 50524 - DNA, 20 bp, synthetic construct
  misc_feature 1..20: note = chemically synthesized
  source 1..20: mol_type = other DNA
aagacttactgccgccctgg

SEQ ID NO: 50525 - DNA, 20 bp, synthetic construct
  misc_feature 1..20: note = chemically synthesized
  source 1..20: mol_type = other DNA
ttactgccgccctgggagat

SEQ ID NO: 50526 - DNA, 20 bp, synthetic construct
  misc_feature 1..20: note = chemically synthesized
  source 1..20: mol_type = other DNA
actgccgccctgggagatca

SEQ ID NO: 50527 - DNA, 20 bp, synthetic construct
  misc_feature 1..20: note = chemically synthesized
  source 1..20: mol_type = other DNA
gccgccctgggagatcagag

SEQ ID NO: 50528 - DNA, 20 bp, synthetic construct
  misc_feature 1..20: note = chemically synthesized
  source 1..20: mol_type = other DNA
ccgccctgggagatcagagt

SEQ ID NO: 50529 - DNA, 20 bp, synthetic construct
  misc_feature 1..20: note = chemically synthesized
  source 1..20: mol_type = other DNA
cctgggagatcagagtgggt

SEQ ID NO: 50530 - DNA, 20 bp, synthetic construct
  misc_feature 1..20: note = chemically synthesized
  source 1..20: mol_type = other DNA
tgggagatcagagtgggtta

SEQ ID NO: 50531 - DNA, 20 bp, synthetic construct
  misc_feature 1..20: note = chemically synthesized
  source 1..20: mol_type = other DNA
gtgggttagagcccatttga

SEQ ID NO: 50532 - DNA, 20 bp, synthetic construct
  misc_feature 1..20: note = chemically synthesized
  source 1..20: mol_type = other DNA
ttagagcccatttgacagat

SEQ ID NO: 50533 - DNA, 20 bp, synthetic construct
  misc_feature 1..20: note = chemically synthesized
  source 1..20: mol_type = other DNA
tagagcccatttgacagatg

SEQ ID NO: 50534 - DNA, 20 bp, synthetic construct
  misc_feature 1..20: note = chemically synthesized
  source 1..20: mol_type = other DNA
ccatttgacagatgaggaaa

SEQ ID NO: 50535 - DNA, 20 bp, synthetic construct
  misc_feature 1..20: note = chemically synthesized
  source 1..20: mol_type = other DNA
catttgacagatgaggaaac

SEQ ID NO: 50536 - DNA, 20 bp, synthetic construct
  misc_feature 1..20: note = chemically synthesized
  source 1..20: mol_type = other DNA
gacagatgaggaaacaggct

SEQ ID NO: 50537 - DNA, 20 bp, synthetic construct
  misc_feature 1..20: note = chemically synthesized
  source 1..20: mol_type = other DNA
cagatgaggaaacaggctca

SEQ ID NO: 50538 - DNA, 20 bp, synthetic construct
  misc_feature 1..20: note = chemically synthesized
  source 1..20: mol_type = other DNA
atgaggaaacaggctcagag

SEQ ID NO: 50539 - DNA, 20 bp, synthetic construct
  misc_feature 1..20: note = chemically synthesized
  source 1..20: mol_type = other DNA
gaggaaacaggctcagagcg

SEQ ID NO: 50540 - DNA, 20 bp, synthetic construct
  misc_feature 1..20: note = chemically synthesized
  source 1..20: mol_type = other DNA
ggaaacaggctcagagcgga

SEQ ID NO: 50541 - DNA, 20 bp, synthetic construct
  misc_feature 1..20: note = chemically synthesized
  source 1..20: mol_type = other DNA
gcggagagaccgctcatcca

SEQ ID NO: 50542 - DNA, 20 bp, synthetic construct
  misc_feature 1..20: note = chemically synthesized
  source 1..20: mol_type = other DNA
accgctcatccaaagttacc

SEQ ID NO: 50543 - DNA, 20 bp, synthetic construct
  misc_feature 1..20: note = chemically synthesized
  source 1..20: mol_type = other DNA
ctcatccaaagttacccagt

SEQ ID NO: 50544 - DNA, 20 bp, synthetic construct
  misc_feature 1..20: note = chemically synthesized
  source 1..20: mol_type = other DNA
caaagttacccagtcagcct

SEQ ID NO: 50545 - DNA, 20 bp, synthetic construct
  misc_feature 1..20: note = chemically synthesized
  source 1..20: mol_type = other DNA
agacacaaacaccctcttga

SEQ ID NO: 50546 - DNA, 20 bp, synthetic construct
  misc_feature 1..20: note = chemically synthesized
  source 1..20: mol_type = other DNA
caccctcttgatggtcccga

SEQ ID NO: 50547 - DNA, 20 bp, synthetic construct
  misc_feature 1..20: note = chemically synthesized
  source 1..20: mol_type = other DNA
tgatggtcccgatggaaaaa

SEQ ID NO: 50548 - DNA, 20 bp, synthetic construct
  misc_feature 1..20: note = chemically synthesized
  source 1..20: mol_type = other DNA
atggtcccgatggaaaaatg

SEQ ID NO: 50549 - DNA, 20 bp, synthetic construct
  misc_feature 1..20: note = chemically synthesized
  source 1..20: mol_type = other DNA
tggaaaaatggagcatgact

SEQ ID NO: 50550 - DNA, 20 bp, synthetic construct
  misc_feature 1..20: note = chemically synthesized
  source 1..20: mol_type = other DNA
ggaaaaatggagcatgactg

SEQ ID NO: 50551 - DNA, 20 bp, synthetic construct
  misc_feature 1..20: note = chemically synthesized
  source 1..20: mol_type = other DNA
aaaatggagcatgactgagg

SEQ ID NO: 50552 - DNA, 20 bp, synthetic construct
  misc_feature 1..20: note = chemically synthesized
  source 1..20: mol_type = other DNA
actgaggcagacacaaccgt

SEQ ID NO: 50553 - DNA, 20 bp, synthetic construct
  misc_feature 1..20: note = chemically synthesized
  source 1..20: mol_type = other DNA
ctgaggcagacacaaccgtc

SEQ ID NO: 50554 - DNA, 20 bp, synthetic construct
  misc_feature 1..20: note = chemically synthesized
  source 1..20: mol_type = other DNA
ggcagacacaaccgtcaggc

SEQ ID NO: 50555 - DNA, 20 bp, synthetic construct
  misc_feature 1..20: note = chemically synthesized
  source 1..20: mol_type = other DNA
acacaaccgtcaggctggca

SEQ ID NO: 50556 - DNA, 20 bp, synthetic construct
  misc_feature 1..20: note = chemically synthesized
  source 1..20: mol_type = other DNA
cacaaccgtcaggctggcat

SEQ ID NO: 50557 - DNA, 20 bp, synthetic construct
  misc_feature 1..20: note = chemically synthesized
  source 1..20: mol_type = other DNA
acaaccgtcaggctggcatg

SEQ ID NO: 50558 - DNA, 20 bp, synthetic construct
  misc_feature 1..20: note = chemically synthesized
  source 1..20: mol_type = other DNA
caaccgtcaggctggcatgg

SEQ ID NO: 50559 - DNA, 20 bp, synthetic construct
  misc_feature 1..20: note = chemically synthesized
  source 1..20: mol_type = other DNA
aaccgtcaggctggcatggg

SEQ ID NO: 50560 - DNA, 20 bp, synthetic construct
  misc_feature 1..20: note = chemically synthesized
  source 1..20: mol_type = other DNA
aggctggcatggggggccgt

SEQ ID NO: 50561 - DNA, 20 bp, synthetic construct
  misc_feature 1..20: note = chemically synthesized
  source 1..20: mol_type = other DNA
tggcatggggggccgtgaga

SEQ ID NO: 50562 - DNA, 20 bp, synthetic construct
  misc_feature 1..20: note = chemically synthesized
  source 1..20: mol_type = other DNA
ggcatggggggccgtgagac

SEQ ID NO: 50563 - DNA, 20 bp, synthetic construct
  misc_feature 1..20: note = chemically synthesized
  source 1..20: mol_type = other DNA
gcatggggggccgtgagaca

SEQ ID NO: 50564 - DNA, 20 bp, synthetic construct
  misc_feature 1..20: note = chemically synthesized
  source 1..20: mol_type = other DNA
tggggggccgtgagacaggg

SEQ ID NO: 50565 - DNA, 20 bp, synthetic construct
  misc_feature 1..20: note = chemically synthesized
  source 1..20: mol_type = other DNA
gggggccgtgagacagggta

SEQ ID NO: 50566 - DNA, 20 bp, synthetic construct
  misc_feature 1..20: note = chemically synthesized
  source 1..20: mol_type = other DNA
ggggccgtgagacagggtag

SEQ ID NO: 50567 - DNA, 20 bp, synthetic construct
  misc_feature 1..20: note = chemically synthesized
  source 1..20: mol_type = other DNA
gccgtgagacagggtagagg

SEQ ID NO: 50568 - DNA, 20 bp, synthetic construct
  misc_feature 1..20: note = chemically synthesized
  source 1..20: mol_type = other DNA
ccgtgagacagggtagaggt

SEQ ID NO: 50569 - DNA, 20 bp, synthetic construct
  misc_feature 1..20: note = chemically synthesized
  source 1..20: mol_type = other DNA
cgtgagacagggtagaggtg

SEQ ID NO: 50570 - DNA, 20 bp, synthetic construct
  misc_feature 1..20: note = chemically synthesized
  source 1..20: mol_type = other DNA
gagacagggtagaggtgggg

SEQ ID NO: 50571 - DNA, 20 bp, synthetic construct
  misc_feature 1..20: note = chemically synthesized
  source 1..20: mol_type = other DNA
ggtggggaagcacatctgta

SEQ ID NO: 50572 - DNA, 20 bp, synthetic construct
  misc_feature 1..20: note = chemically synthesized
  source 1..20: mol_type = other DNA
ggggaagcacatctgtaaag

SEQ ID NO: 50573 - DNA, 20 bp, synthetic construct
  misc_feature 1..20: note = chemically synthesized
  source 1..20: mol_type = other DNA
ggaagcacatctgtaaagaa

SEQ ID NO: 50574 - DNA, 20 bp, synthetic construct
  misc_feature 1..20: note = chemically synthesized
  source 1..20: mol_type = other DNA
aaagaagagctgtgctgcct

SEQ ID NO: 50575 - DNA, 20 bp, synthetic construct
  misc_feature 1..20: note = chemically synthesized
  source 1..20: mol_type = other DNA
aagaagagctgtgctgcctc

SEQ ID NO: 50576 - DNA, 20 bp, synthetic construct
  misc_feature 1..20: note = chemically synthesized
  source 1..20: mol_type = other DNA
aagagctgtgctgcctcagg

SEQ ID NO: 50577 - DNA, 20 bp, synthetic construct
  misc_feature 1..20: note = chemically synthesized
  source 1..20: mol_type = other DNA
agagctgtgctgcctcaggc

SEQ ID NO: 50578 - DNA, 20 bp, synthetic construct
  misc_feature 1..20: note = chemically synthesized
  source 1..20: mol_type = other DNA
gccgcttcacctctctgaac

SEQ ID NO: 50579 - DNA, 20 bp, synthetic construct
  misc_feature 1..20: note = chemically synthesized
  source 1..20: mol_type = other DNA
ccgcttcacctctctgaacc

SEQ ID NO: 50580 - DNA, 20 bp, synthetic construct
  misc_feature 1..20: note = chemically synthesized
  source 1..20: mol_type = other DNA
actgtttcacctgcatccca

SEQ ID NO: 50581 - DNA, 20 bp, synthetic construct
  misc_feature 1..20: note = chemically synthesized
  source 1..20: mol_type = other DNA
tgtttcacctgcatcccaaa

SEQ ID NO: 50582 - DNA, 20 bp, synthetic construct
  misc_feature 1..20: note = chemically synthesized
  source 1..20: mol_type = other DNA
tcacctgcatcccaaagagt

SEQ ID NO: 50583 - DNA, 20 bp, synthetic construct
  misc_feature 1..20: note = chemically synthesized
  source 1..20: mol_type = other DNA
cctgcatcccaaagagttgg

SEQ ID NO: 50584 - DNA, 20 bp, synthetic construct
  misc_feature 1..20: note = chemically synthesized
  source 1..20: mol_type = other DNA
gagttggaagtttcattccc

SEQ ID NO: 50585 - DNA, 20 bp, synthetic construct
  misc_feature 1..20: note = chemically synthesized
  source 1..20: mol_type = other DNA
cattcccaagcatgcttgtg

SEQ ID NO: 50586 - DNA, 20 bp, synthetic construct
  misc_feature 1..20: note = chemically synthesized
  source 1..20: mol_type = other DNA
agcatgcttgtgaagtgcct

SEQ ID NO: 50587 - DNA, 20 bp, synthetic construct
  misc_feature 1..20: note = chemically synthesized
  source 1..20: mol_type = other DNA
gcatgcttgtgaagtgcctc

SEQ ID NO: 50588 - DNA, 20 bp, synthetic construct
  misc_feature 1..20: note = chemically synthesized
  source 1..20: mol_type = other DNA
cttgtgaagtgcctcgggtg

SEQ ID NO: 50589 - DNA, 20 bp, synthetic construct
  misc_feature 1..20: note = chemically synthesized
  source 1..20: mol_type = other DNA
agtgcctcgggtgaagtgcc

SEQ ID NO: 50590 - DNA, 20 bp, synthetic construct
  misc_feature 1..20: note = chemically synthesized
  source 1..20: mol_type = other DNA
cgggtgaagtgcctggcaca

SEQ ID NO: 50591 - DNA, 20 bp, synthetic construct
  misc_feature 1..20: note = chemically synthesized
  source 1..20: mol_type = other DNA
gtgaagtgcctggcacacag

SEQ ID NO: 50592 - DNA, 20 bp, synthetic construct
  misc_feature 1..20: note = chemically synthesized
  source 1..20: mol_type = other DNA
tgaagtgcctggcacacagt

SEQ ID NO: 50593 - DNA, 20 bp, synthetic construct
  misc_feature 1..20: note = chemically synthesized
  source 1..20: mol_type = other DNA
cacacagtaggctctttatg

SEQ ID NO: 50594 - DNA, 20 bp, synthetic construct
  misc_feature 1..20: note = chemically synthesized
  source 1..20: mol_type = other DNA
acacagtaggctctttatgt

SEQ ID NO: 50595 - DNA, 20 bp, synthetic construct
  misc_feature 1..20: note = chemically synthesized
  source 1..20: mol_type = other DNA
gctctttatgtgggtctgca

SEQ ID NO: 50596 - DNA, 20 bp, synthetic construct
  misc_feature 1..20: note = chemically synthesized
  source 1..20: mol_type = other DNA
ggtctgcacagccctctgct

SEQ ID NO: 50597 - DNA, 20 bp, synthetic construct
  misc_feature 1..20: note = chemically synthesized
  source 1..20: mol_type = other DNA
cctctgcttagtctgccccc

SEQ ID NO: 50598 - DNA, 20 bp, synthetic construct
  misc_feature 1..20: note = chemically synthesized
  source 1..20: mol_type = other DNA
ctctgcttagtctgcccccc

SEQ ID NO: 50599 - DNA, 20 bp, synthetic construct
  misc_feature 1..20: note = chemically synthesized
  source 1..20: mol_type = other DNA
agtctgccccccaggctgct

SEQ ID NO: 50600 - DNA, 20 bp, synthetic construct
  misc_feature 1..20: note = chemically synthesized
  source 1..20: mol_type = other DNA
tctgccccccaggctgctca

SEQ ID NO: 50601 - DNA, 20 bp, synthetic construct
  misc_feature 1..20: note = chemically synthesized
  source 1..20: mol_type = other DNA
gccccccaggctgctcagag

SEQ ID NO: 50602 - DNA, 20 bp, synthetic construct
  misc_feature 1..20: note = chemically synthesized
  source 1..20: mol_type = other DNA
ccccccaggctgctcagagc

SEQ ID NO: 50603 - DNA, 20 bp, synthetic construct
  misc_feature 1..20: note = chemically synthesized
  source 1..20: mol_type = other DNA
ccccaggctgctcagagcag

SEQ ID NO: 50604 - DNA, 20 bp, synthetic construct
  misc_feature 1..20: note = chemically synthesized
  source 1..20: mol_type = other DNA
cccaggctgctcagagcagg

SEQ ID NO: 50605 - DNA, 20 bp, synthetic construct
  misc_feature 1..20: note = chemically synthesized
  source 1..20: mol_type = other DNA
caggctgctcagagcaggag

SEQ ID NO: 50606 - DNA, 20 bp, synthetic construct
  misc_feature 1..20: note = chemically synthesized
  source 1..20: mol_type = other DNA
aggctgctcagagcaggagg

SEQ ID NO: 50607 - DNA, 20 bp, synthetic construct
  misc_feature 1..20: note = chemically synthesized
  source 1..20: mol_type = other DNA
ggaggaggttcaattttgac

SEQ ID NO: 50608 - DNA, 20 bp, synthetic construct
  misc_feature 1..20: note = chemically synthesized
  source 1..20: mol_type = other DNA
ggttcaattttgaccagcct

SEQ ID NO: 50609 - DNA, 20 bp, synthetic construct
  misc_feature 1..20: note = chemically synthesized
  source 1..20: mol_type = other DNA
gttcaattttgaccagcctc

SEQ ID NO: 50610 - DNA, 20 bp, synthetic construct
  misc_feature 1..20: note = chemically synthesized
  source 1..20: mol_type = other DNA
cctgtttctgtttttgctcc

SEQ ID NO: 50611 - DNA, 20 bp, synthetic construct
  misc_feature 1..20: note = chemically synthesized
  source 1..20: mol_type = other DNA
tgtttttgctcctggaaaac

SEQ ID NO: 50612 - DNA, 20 bp, synthetic construct
  misc_feature 1..20: note = chemically synthesized
  source 1..20: mol_type = other DNA
aaaccagtgtgatccgtata

SEQ ID NO: 50613 - DNA, 20 bp, synthetic construct
  misc_feature 1..20: note = chemically synthesized
  source 1..20: mol_type = other DNA
agtgtgatccgtatacagct

SEQ ID NO: 50614 - DNA, 20 bp, synthetic construct
  misc_feature 1..20: note = chemically synthesized
  source 1..20: mol_type = other DNA
tgtgatccgtatacagcttg

SEQ ID NO: 50615 - DNA, 20 bp, synthetic construct
  misc_feature 1..20: note = chemically synthesized
  source 1..20: mol_type = other DNA
tatacagcttggagtttctt

SEQ ID NO: 50616 - DNA, 20 bp, synthetic construct
  misc_feature 1..20: note = chemically synthesized
  source 1..20: mol_type = other DNA
ttggagtttctttggataca

SEQ ID NO: 50617 - DNA, 20 bp, synthetic construct
  misc_feature 1..20: note = chemically synthesized
  source 1..20: mol_type = other DNA
tggatacatggcccccactc

SEQ ID NO: 50618 - DNA, 20 bp, synthetic construct
  misc_feature 1..20: note = chemically synthesized
  source 1..20: mol_type = other DNA
ggatacatggcccccactct

SEQ ID NO: 50619 - DNA, 20 bp, synthetic construct
  misc_feature 1..20: note = chemically synthesized
  source 1..20: mol_type = other DNA
gatacatggcccccactctg

SEQ ID NO: 50620 - DNA, 20 bp, synthetic construct
  misc_feature 1..20: note = chemically synthesized
  source 1..20: mol_type = other DNA
ggcccccactctggggttgt

SEQ ID NO: 50621 - DNA, 20 bp, synthetic construct
  misc_feature 1..20: note = chemically synthesized
  source 1..20: mol_type = other DNA
cccccactctggggttgttg

SEQ ID NO: 50622 - DNA, 20 bp, synthetic construct
  misc_feature 1..20: note = chemically synthesized
  source 1..20: mol_type = other DNA
ccccactctggggttgttgg

SEQ ID NO: 50623 - DNA, 20 bp, synthetic construct
  misc_feature 1..20: note = chemically synthesized
  source 1..20: mol_type = other DNA
ctggggttgttggaggcctt

SEQ ID NO: 50624 - DNA, 20 bp, synthetic construct
  misc_feature 1..20: note = chemically synthesized
  source 1..20: mol_type = other DNA
ggggttgttggaggcctttg

SEQ ID NO: 50625 - DNA, 20 bp, synthetic construct
  misc_feature 1..20: note = chemically synthesized
  source 1..20: mol_type = other DNA
tggaggcctttggagactgc

SEQ ID NO: 50626 - DNA, 20 bp, synthetic construct
  misc_feature 1..20: note = chemically synthesized
  source 1..20: mol_type = other DNA
ggaggcctttggagactgct

SEQ ID NO: 50627 - DNA, 20 bp, synthetic construct
  misc_feature 1..20: note = chemically synthesized
  source 1..20: mol_type = other DNA
gaggcctttggagactgctg

SEQ ID NO: 50628 - DNA, 20 bp, synthetic construct
  misc_feature 1..20: note = chemically synthesized
  source 1..20: mol_type = other DNA
aggcctttggagactgctgg

SEQ ID NO: 50629 - DNA, 20 bp, synthetic construct
  misc_feature 1..20: note = chemically synthesized
  source 1..20: mol_type = other DNA
cctttggagactgctggggg

SEQ ID NO: 50630 - DNA, 20 bp, synthetic construct
  misc_feature 1..20: note = chemically synthesized
  source 1..20: mol_type = other DNA
tttggagactgctgggggtg

SEQ ID NO: 50631 - DNA, 20 bp, synthetic construct
  misc_feature 1..20: note = chemically synthesized
  source 1..20: mol_type = other DNA
ttggagactgctgggggtgg

SEQ ID NO: 50632 - DNA, 20 bp, synthetic construct
  misc_feature 1..20: note = chemically synthesized
  source 1..20: mol_type = other DNA
tggagactgctgggggtgga

SEQ ID NO: 50633 - DNA, 20 bp, synthetic construct
  misc_feature 1..20: note = chemically synthesized
  source 1..20: mol_type = other DNA
ggagactgctgggggtggag

SEQ ID NO: 50634 - DNA, 20 bp, synthetic construct
  misc_feature 1..20: note = chemically synthesized
  source 1..20: mol_type = other DNA
agactgctgggggtggaggg

SEQ ID NO: 50635 - DNA, 20 bp, synthetic construct
  misc_feature 1..20: note = chemically synthesized
  source 1..20: mol_type = other DNA
gactgctgggggtggagggg

SEQ ID NO: 50636 - DNA, 20 bp, synthetic construct
  misc_feature 1..20: note = chemically synthesized
  source 1..20: mol_type = other DNA
actgctgggggtggagggga

SEQ ID NO: 50637 - DNA, 20 bp, synthetic construct
  misc_feature 1..20: note = chemically synthesized
  source 1..20: mol_type = other DNA
ctgctgggggtggaggggag

SEQ ID NO: 50638 - DNA, 20 bp, synthetic construct
  misc_feature 1..20: note = chemically synthesized
  source 1..20: mol_type = other DNA
gctgggggtggaggggaggg

SEQ ID NO: 50639 - DNA, 20 bp, synthetic construct
  misc_feature 1..20: note = chemically synthesized
  source 1..20: mol_type = other DNA
ctgggggtggaggggagggg

SEQ ID NO: 50640 - DNA, 20 bp, synthetic construct
  misc_feature 1..20: note = chemically synthesized
  source 1..20: mol_type = other DNA
ggtggaggggaggggaggta

SEQ ID NO: 50641 - DNA, 20 bp, synthetic construct
  misc_feature 1..20: note = chemically synthesized
  source 1..20: mol_type = other DNA
gtggaggggaggggaggtac

SEQ ID NO: 50642 - DNA, 20 bp, synthetic construct
  misc_feature 1..20: note = chemically synthesized
  source 1..20: mol_type = other DNA
tggaggggaggggaggtaca

SEQ ID NO: 50643 - DNA, 20 bp, synthetic construct
  misc_feature 1..20: note = chemically synthesized
  source 1..20: mol_type = other DNA
gggaggggaggtacagggtt

SEQ ID NO: 50644 - DNA, 20 bp, synthetic construct
  misc_feature 1..20: note = chemically synthesized
  source 1..20: mol_type = other DNA
ggaggggaggtacagggttg

SEQ ID NO: 50645 - DNA, 20 bp, synthetic construct
  misc_feature 1..20: note = chemically synthesized
  source 1..20: mol_type = other DNA
gggaggtacagggttgaggc

SEQ ID NO: 50646 - DNA, 20 bp, synthetic construct
  misc_feature 1..20: note = chemically synthesized
  source 1..20: mol_type = other DNA
aggtacagggttgaggctag

SEQ ID NO: 50647 - DNA, 20 bp, synthetic construct
  misc_feature 1..20: note = chemically synthesized
  source 1..20: mol_type = other DNA
ggtacagggttgaggctagt

SEQ ID NO: 50648 - DNA, 20 bp, synthetic construct
  misc_feature 1..20: note = chemically synthesized
  source 1..20: mol_type = other DNA
gtacagggttgaggctagtg

SEQ ID NO: 50649 - DNA, 20 bp, synthetic construct
  misc_feature 1..20: note = chemically synthesized
  source 1..20: mol_type = other DNA
cttgattgcaatccctttaa

SEQ ID NO: 50650 - DNA, 20 bp, synthetic construct
  misc_feature 1..20: note = chemically synthesized
  source 1..20: mol_type = other DNA
atccctttaaaagcctaaat

SEQ ID NO: 50651 - DNA, 20 bp, synthetic construct
  misc_feature 1..20: note = chemically synthesized
  source 1..20: mol_type = other DNA
gtgcaacccgcaaacctgct

SEQ ID NO: 50652 - DNA, 20 bp, synthetic construct
  misc_feature 1..20: note = chemically synthesized
  source 1..20: mol_type = other DNA
tgcaacccgcaaacctgctt

SEQ ID NO: 50653 - DNA, 20 bp, synthetic construct
  misc_feature 1..20: note = chemically synthesized
  source 1..20: mol_type = other DNA
caacccgcaaacctgcttgg

SEQ ID NO: 50654 - DNA, 20 bp, synthetic construct
  misc_feature 1..20: note = chemically synthesized
  source 1..20: mol_type = other DNA
ccgcaaacctgcttgggagc

SEQ ID NO: 50655 - DNA, 20 bp, synthetic construct
  misc_feature 1..20: note = chemically synthesized
  source 1..20: mol_type = other DNA
gggagctggcgtacgtgccg

SEQ ID NO: 50656 - DNA, 20 bp, synthetic construct
  misc_feature 1..20: note = chemically synthesized
  source 1..20: mol_type = other DNA
gtacgtgccgtagatacttg

SEQ ID NO: 50657 - DNA, 20 bp, synthetic construct
  misc_feature 1..20: note = chemically synthesized
  source 1..20: mol_type = other DNA
acgtgccgtagatacttgca

SEQ ID NO: 50658 - DNA, 20 bp, synthetic construct
  misc_feature 1..20: note = chemically synthesized
  source 1..20: mol_type = other DNA
gtagatacttgcagagtgaa

SEQ ID NO: 50659 - DNA, 20 bp, synthetic construct
  misc_feature 1..20: note = chemically synthesized
  source 1..20: mol_type = other DNA
tacttgcagagtgaatggat

SEQ ID NO: 50660 - DNA, 20 bp, synthetic construct
  misc_feature 1..20: note = chemically synthesized
  source 1..20: mol_type = other DNA
ttgccccttctgtcattcac

SEQ ID NO: 50661 - DNA, 20 bp, synthetic construct
  misc_feature 1..20: note = chemically synthesized
  source 1..20: mol_type = other DNA
tcccatttatgcctccacct

SEQ ID NO: 50662 - DNA, 20 bp, synthetic construct
  misc_feature 1..20: note = chemically synthesized
  source 1..20: mol_type = other DNA
cccatttatgcctccacctt

SEQ ID NO: 50663 - DNA, 20 bp, synthetic construct
  misc_feature 1..20: note = chemically synthesized
  source 1..20: mol_type = other DNA
ccatttatgcctccaccttg

SEQ ID NO: 50664 - DNA, 20 bp, synthetic construct
  misc_feature 1..20: note = chemically synthesized
  source 1..20: mol_type = other DNA
cctccaccttggggctctac

SEQ ID NO: 50665 - DNA, 20 bp, synthetic construct
  misc_feature 1..20: note = chemically synthesized
  source 1..20: mol_type = other DNA
ctccaccttggggctctacc

SEQ ID NO: 50666 - DNA, 20 bp, synthetic construct
  misc_feature 1..20: note = chemically synthesized
  source 1..20: mol_type = other DNA
accttggggctctaccaggc

SEQ ID NO: 50667 - DNA, 20 bp, synthetic construct
  misc_feature 1..20: note = chemically synthesized
  source 1..20: mol_type = other DNA
tctaccaggcgagtgaccca

SEQ ID NO: 50668 - DNA, 20 bp, synthetic construct
  misc_feature 1..20: note = chemically synthesized
  source 1..20: mol_type = other DNA
ctaccaggcgagtgacccac

SEQ ID NO: 50669 - DNA, 20 bp, synthetic construct
  misc_feature 1..20: note = chemically synthesized
  source 1..20: mol_type = other DNA
gagtgacccacaggatcctc

SEQ ID NO: 50670 - DNA, 20 bp, synthetic construct
  misc_feature 1..20: note = chemically synthesized
  source 1..20: mol_type = other DNA
gatcctccagcacacacatt

SEQ ID NO: 50671 - DNA, 20 bp, synthetic construct
  misc_feature 1..20: note = chemically synthesized
  source 1..20: mol_type = other DNA
tccagcacacacattcagac

SEQ ID NO: 50672 - DNA, 20 bp, synthetic construct
  misc_feature 1..20: note = chemically synthesized
  source 1..20: mol_type = other DNA
ccagcacacacattcagacc

SEQ ID NO: 50673 - DNA, 20 bp, synthetic construct
  misc_feature 1..20: note = chemically synthesized
  source 1..20: mol_type = other DNA
cagcacacacattcagacca

SEQ ID NO: 50674 - DNA, 20 bp, synthetic construct
  misc_feature 1..20: note = chemically synthesized
  source 1..20: mol_type = other DNA
agaccagggaacccacttac

SEQ ID NO: 50675 - DNA, 20 bp, synthetic construct
  misc_feature 1..20: note = chemically synthesized
  source 1..20: mol_type = other DNA
ggaacccacttactggctgt

SEQ ID NO: 50676 - DNA, 20 bp, synthetic construct
  misc_feature 1..20: note = chemically synthesized
  source 1..20: mol_type = other DNA
gaacccacttactggctgtg

SEQ ID NO: 50677 - DNA, 20 bp, synthetic construct
  misc_feature 1..20: note = chemically synthesized
  source 1..20: mol_type = other DNA
acttactggctgtgaggcct

SEQ ID NO: 50678 - DNA, 20 bp, synthetic construct
  misc_feature 1..20: note = chemically synthesized
  source 1..20: mol_type = other DNA
cttactggctgtgaggcctc

SEQ ID NO: 50679 - DNA, 20 bp, synthetic construct
  misc_feature 1..20: note = chemically synthesized
  source 1..20: mol_type = other DNA
ctggctgtgaggcctcaggt

SEQ ID NO: 50680 - DNA, 20 bp, synthetic construct
  misc_feature 1..20: note = chemically synthesized
  source 1..20: mol_type = other DNA
gtgagttgtttaaccgctcc

SEQ ID NO: 50681 - DNA, 20 bp, synthetic construct
  misc_feature 1..20: note = chemically synthesized
  source 1..20: mol_type = other DNA
caatttccctatctgtaaaa

SEQ ID NO: 50682 - DNA, 20 bp, synthetic construct
  misc_feature 1..20: note = chemically synthesized
  source 1..20: mol_type = other DNA
aatttccctatctgtaaaat

SEQ ID NO: 50683 - DNA, 20 bp, synthetic construct
  misc_feature 1..20: note = chemically synthesized
  source 1..20: mol_type = other DNA
atttccctatctgtaaaatg

SEQ ID NO: 50684 - DNA, 20 bp, synthetic construct
  misc_feature 1..20: note = chemically synthesized
  source 1..20: mol_type = other DNA
ccctatctgtaaaatgggga

SEQ ID NO: 50685 - DNA, 20 bp, synthetic construct
  misc_feature 1..20: note = chemically synthesized
  source 1..20: mol_type = other DNA
ctgtaaaatggggatggtga

SEQ ID NO: 50686 - DNA, 20 bp, synthetic construct
  misc_feature 1..20: note = chemically synthesized
  source 1..20: mol_type = other DNA
gtgacggtatgtaccttgtt

SEQ ID NO: 50687 - DNA, 20 bp, synthetic construct
  misc_feature 1..20: note = chemically synthesized
  source 1..20: mol_type = other DNA
gtaccttgttgagctgctgt

SEQ ID NO: 50688 - DNA, 20 bp, synthetic construct
  misc_feature 1..20: note = chemically synthesized
  source 1..20: mol_type = other DNA
taccttgttgagctgctgtg

SEQ ID NO: 50689 - DNA, 20 bp, synthetic construct
  misc_feature 1..20: note = chemically synthesized
  source 1..20: mol_type = other DNA
ctgtgaggattaaaatgcaa

SEQ ID NO: 50690 - DNA, 20 bp, synthetic construct
  misc_feature 1..20: note = chemically synthesized
  source 1..20: mol_type = other DNA
ggattaaaatgcaacagttc

SEQ ID NO: 50691 - DNA, 20 bp, synthetic construct
  misc_feature 1..20: note = chemically synthesized
  source 1..20: mol_type = other DNA
gattaaaatgcaacagttca

SEQ ID NO: 50692 - DNA, 20 bp, synthetic construct
  misc_feature 1..20: note = chemically synthesized
  source 1..20: mol_type = other DNA
aaaatgcaacagttcaagga

SEQ ID NO: 50693 - DNA, 20 bp, synthetic construct
  misc_feature 1..20: note = chemically synthesized
  source 1..20: mol_type = other DNA
gcaacagttcaaggaaagct

SEQ ID NO: 50694 - DNA, 20 bp, synthetic construct
  misc_feature 1..20: note = chemically synthesized
  source 1..20: mol_type = other DNA
aacagttcaaggaaagctca

SEQ ID NO: 50695 - DNA, 20 bp, synthetic construct
  misc_feature 1..20: note = chemically synthesized
  source 1..20: mol_type = other DNA
gttcaaggaaagctcagaga

SEQ ID NO: 50696 - DNA, 20 bp, synthetic construct
  misc_feature 1..20: note = chemically synthesized
  source 1..20: mol_type = other DNA
ttcaaggaaagctcagagac

SEQ ID NO: 50697 - DNA, 20 bp, synthetic construct
  misc_feature 1..20: note = chemically synthesized
  source 1..20: mol_type = other DNA
gaaagctcagagacgggtac

SEQ ID NO: 50698 - DNA, 20 bp, synthetic construct
  misc_feature 1..20: note = chemically synthesized
  source 1..20: mol_type = other DNA
aaagctcagagacgggtact

SEQ ID NO: 50699 - DNA, 20 bp, synthetic construct
  misc_feature 1..20: note = chemically synthesized
  source 1..20: mol_type = other DNA
agacgggtactgggtgtgcc

SEQ ID NO: 50700 - DNA, 20 bp, synthetic construct
  misc_feature 1..20: note = chemically synthesized
  source 1..20: mol_type = other DNA
gggtactgggtgtgcccaga

SEQ ID NO: 50701 - DNA, 20 bp, synthetic construct
  misc_feature 1..20: note = chemically synthesized
  source 1..20: mol_type = other DNA
ctgccctccctcccccgtgt

SEQ ID NO: 50702 - DNA, 20 bp, synthetic construct
  misc_feature 1..20: note = chemically synthesized
  source 1..20: mol_type = other DNA
tgccctccctcccccgtgtc

SEQ ID NO: 50703 - DNA, 20 bp, synthetic construct
  misc_feature 1..20: note = chemically synthesized
  source 1..20: mol_type = other DNA
gccctccctcccccgtgtca

SEQ ID NO: 50704 - DNA, 20 bp, synthetic construct
  misc_feature 1..20: note = chemically synthesized
  source 1..20: mol_type = other DNA
ccctccctcccccgtgtcag

SEQ ID NO: 50705 - DNA, 20 bp, synthetic construct
  misc_feature 1..20: note = chemically synthesized
  source 1..20: mol_type = other DNA
ccctcccccgtgtcaggggc

SEQ ID NO: 50706 - DNA, 20 bp, synthetic construct
  misc_feature 1..20: note = chemically synthesized
  source 1..20: mol_type = other DNA
gtgtcaggggctggtgtcac

SEQ ID NO: 50707 - DNA, 20 bp, synthetic construct
  misc_feature 1..20: note = chemically synthesized
  source 1..20: mol_type = other DNA
tgtcaggggctggtgtcact

SEQ ID NO: 50708 - DNA, 20 bp, synthetic construct
  misc_feature 1..20: note = chemically synthesized
  source 1..20: mol_type = other DNA
gtcaggggctggtgtcactg

SEQ ID NO: 50709 - DNA, 20 bp, synthetic construct
  misc_feature 1..20: note = chemically synthesized
  source 1..20: mol_type = other DNA
aggggctggtgtcactgggg

SEQ ID NO: 50710 - DNA, 20 bp, synthetic construct
  misc_feature 1..20: note = chemically synthesized
  source 1..20: mol_type = other DNA
ggggctggtgtcactggggt

SEQ ID NO: 50711 - DNA, 20 bp, synthetic construct
  misc_feature 1..20: note = chemically synthesized
  source 1..20: mol_type = other DNA
gggctggtgtcactggggtg

SEQ ID NO: 50712 - DNA, 20 bp, synthetic construct
  misc_feature 1..20: note = chemically synthesized
  source 1..20: mol_type = other DNA
ctggtgtcactggggtgggg

SEQ ID NO: 50713 - DNA, 20 bp, synthetic construct
  misc_feature 1..20: note = chemically synthesized
  source 1..20: mol_type = other DNA
tggtgtcactggggtggggt

SEQ ID NO: 50714 - DNA, 20 bp, synthetic construct
  misc_feature 1..20: note = chemically synthesized
  source 1..20: mol_type = other DNA
ggtggggtgggccacacttg

SEQ ID NO: 50715 - DNA, 20 bp, synthetic construct
  misc_feature 1..20: note = chemically synthesized
  source 1..20: mol_type = other DNA
tggggtgggccacacttgaa

SEQ ID NO: 50716 - DNA, 20 bp, synthetic construct
  misc_feature 1..20: note = chemically synthesized
  source 1..20: mol_type = other DNA
acacttgaagagctttcctc

SEQ ID NO: 50717 - DNA, 20 bp, synthetic construct
  misc_feature 1..20: note = chemically synthesized
  source 1..20: mol_type = other DNA
cacttgaagagctttcctcc

SEQ ID NO: 50718 - DNA, 20 bp, synthetic construct
  misc_feature 1..20: note = chemically synthesized
  source 1..20: mol_type = other DNA
ttgaagagctttcctccagg

SEQ ID NO: 50719 - DNA, 20 bp, synthetic construct
  misc_feature 1..20: note = chemically synthesized
  source 1..20: mol_type = other DNA
cctccaggcagtctctcatt

SEQ ID NO: 50720 - DNA, 20 bp, synthetic construct
  misc_feature 1..20: note = chemically synthesized
  source 1..20: mol_type = other DNA
tctcattcagttaccctgtg

SEQ ID NO: 50721 - DNA, 20 bp, synthetic construct
  misc_feature 1..20: note = chemically synthesized
  source 1..20: mol_type = other DNA
ctcattcagttaccctgtga

SEQ ID NO: 50722 - DNA, 20 bp, synthetic construct
  misc_feature 1..20: note = chemically synthesized
  source 1..20: mol_type = other DNA
tcattcagttaccctgtgaa

SEQ ID NO: 50723 - DNA, 20 bp, synthetic construct
  misc_feature 1..20: note = chemically synthesized
  source 1..20: mol_type = other DNA
attcagttaccctgtgaagg

SEQ ID NO: 50724 - DNA, 20 bp, synthetic construct
  misc_feature 1..20: note = chemically synthesized
  source 1..20: mol_type = other DNA
cagttaccctgtgaagggag

SEQ ID NO: 50725 - DNA, 20 bp, synthetic construct
  misc_feature 1..20: note = chemically synthesized
  source 1..20: mol_type = other DNA
agttaccctgtgaagggagt

SEQ ID NO: 50726 - DNA, 20 bp, synthetic construct
  misc_feature 1..20: note = chemically synthesized
  source 1..20: mol_type = other DNA
agtaggtaccaccctccttt

SEQ ID NO: 50727 - DNA, 20 bp, synthetic construct
  misc_feature 1..20: note = chemically synthesized
  source 1..20: mol_type = other DNA
gtaggtaccaccctcctttc

SEQ ID NO: 50728 - DNA, 20 bp, synthetic construct
  misc_feature 1..20: note = chemically synthesized
  source 1..20: mol_type = other DNA
ggtaccaccctcctttcagg

SEQ ID NO: 50729 - DNA, 20 bp, synthetic construct
  misc_feature 1..20: note = chemically synthesized
  source 1..20: mol_type = other DNA
accaccctcctttcaggcag

SEQ ID NO: 50730 - DNA, 20 bp, synthetic construct
  misc_feature 1..20: note = chemically synthesized
  source 1..20: mol_type = other DNA
ccaccctcctttcaggcagc

SEQ ID NO: 50731 - DNA, 20 bp, synthetic construct
  misc_feature 1..20: note = chemically synthesized
  source 1..20: mol_type = other DNA
ctttcaggcagcgggaaact

SEQ ID NO: 50732 - DNA, 20 bp, synthetic construct
  misc_feature 1..20: note = chemically synthesized
  source 1..20: mol_type = other DNA
aggcagcgggaaactgagct

SEQ ID NO: 50733 - DNA, 20 bp, synthetic construct
  misc_feature 1..20: note = chemically synthesized
  source 1..20: mol_type = other DNA
actcccctccccttctctct

SEQ ID NO: 50734 - DNA, 20 bp, synthetic construct
  misc_feature 1..20: note = chemically synthesized
  source 1..20: mol_type = other DNA
tctctgagctcccttccctg

SEQ ID NO: 50735 - DNA, 20 bp, synthetic construct
  misc_feature 1..20: note = chemically synthesized
  source 1..20: mol_type = other DNA
ttccctgcagctccatcccc

SEQ ID NO: 50736 - DNA, 20 bp, synthetic construct
  misc_feature 1..20: note = chemically synthesized
  source 1..20: mol_type = other DNA
gcagctccatcccctggctt

SEQ ID NO: 50737 - DNA, 20 bp, synthetic construct
  misc_feature 1..20: note = chemically synthesized
  source 1..20: mol_type = other DNA
cagctccatcccctggcttc

SEQ ID NO: 50738 - DNA, 20 bp, synthetic construct
  misc_feature 1..20: note = chemically synthesized
  source 1..20: mol_type = other DNA
agctccatcccctggcttca

SEQ ID NO: 50739 - DNA, 20 bp, synthetic construct
  misc_feature 1..20: note = chemically synthesized
  source 1..20: mol_type = other DNA
agggcccctgtccttcccct

SEQ ID NO: 50740 - DNA, 20 bp, synthetic construct
  misc_feature 1..20: note = chemically synthesized
  source 1..20: mol_type = other DNA
cccctgtccttcccctgagc

SEQ ID NO: 50741 - DNA, 20 bp, synthetic construct
  misc_feature 1..20: note = chemically synthesized
  source 1..20: mol_type = other DNA
cttcccctgagctggctgaa

SEQ ID NO: 50742 - DNA, 20 bp, synthetic construct
  misc_feature 1..20: note = chemically synthesized
  source 1..20: mol_type = other DNA
cgctgctctacatccactca

SEQ ID NO: 50743 - DNA, 20 bp, synthetic construct
  misc_feature 1..20: note = chemically synthesized
  source 1..20: mol_type = other DNA
tctacatccactcacagctc

SEQ ID NO: 50744 - DNA, 20 bp, synthetic construct
  misc_feature 1..20: note = chemically synthesized
  source 1..20: mol_type = other DNA
tccactcacagctccagcac

SEQ ID NO: 50745 - DNA, 20 bp, synthetic construct
  misc_feature 1..20: note = chemically synthesized
  source 1..20: mol_type = other DNA
ccactcacagctccagcact

SEQ ID NO: 50746 - DNA, 20 bp, synthetic construct
  misc_feature 1..20: note = chemically synthesized
  source 1..20: mol_type = other DNA
acagctccagcactgggctg

SEQ ID NO: 50747 - DNA, 20 bp, synthetic construct
  misc_feature 1..20: note = chemically synthesized
  source 1..20: mol_type = other DNA
tccagcactgggctgtggtt

SEQ ID NO: 50748 - DNA, 20 bp, synthetic construct
  misc_feature 1..20: note = chemically synthesized
  source 1..20: mol_type = other DNA
ccagcactgggctgtggttg

SEQ ID NO: 50749 - DNA, 20 bp, synthetic construct
  misc_feature 1..20: note = chemically synthesized
  source 1..20: mol_type = other DNA
tggttgaggtcgcctgccct

SEQ ID NO: 50750 - DNA, 20 bp, synthetic construct
  misc_feature 1..20: note = chemically synthesized
  source 1..20: mol_type = other DNA
ttgaggtcgcctgccctcgg

SEQ ID NO: 50751 - DNA, 20 bp, synthetic construct
  misc_feature 1..20: note = chemically synthesized
  source 1..20: mol_type = other DNA
cgcctgccctcggtagctcc

SEQ ID NO: 50752 - DNA, 20 bp, synthetic construct
  misc_feature 1..20: note = chemically synthesized
  source 1..20: mol_type = other DNA
gcctgccctcggtagctcct

SEQ ID NO: 50753 - DNA, 20 bp, synthetic construct
  misc_feature 1..20: note = chemically synthesized
  source 1..20: mol_type = other DNA
tgggcatttcttcccctctc

SEQ ID NO: 50754 - DNA, 20 bp, synthetic construct
  misc_feature 1..20: note = chemically synthesized
  source 1..20: mol_type = other DNA
gggcatttcttcccctctct

SEQ ID NO: 50755 - DNA, 20 bp, synthetic construct
  misc_feature 1..20: note = chemically synthesized
  source 1..20: mol_type = other DNA
tgcacaatgacccccactct

SEQ ID NO: 50756 - DNA, 20 bp, synthetic construct
  misc_feature 1..20: note = chemically synthesized
  source 1..20: mol_type = other DNA
cctgctgtccctcccacctg

SEQ ID NO: 50757 - DNA, 20 bp, synthetic construct
  misc_feature 1..20: note = chemically synthesized
  source 1..20: mol_type = other DNA
tccctcccacctgtggaact

SEQ ID NO: 50758 - DNA, 20 bp, synthetic construct
  misc_feature 1..20: note = chemically synthesized
  source 1..20: mol_type = other DNA
tcccacctgtggaactgagt

SEQ ID NO: 50759 - DNA, 20 bp, synthetic construct
  misc_feature 1..20: note = chemically synthesized
  source 1..20: mol_type = other DNA
cacctgtggaactgagtgag

SEQ ID NO: 50760 - DNA, 20 bp, synthetic construct
  misc_feature 1..20: note = chemically synthesized
  source 1..20: mol_type = other DNA
ctgtggaactgagtgagcag

SEQ ID NO: 50761 - DNA, 20 bp, synthetic construct
  misc_feature 1..20: note = chemically synthesized
  source 1..20: mol_type = other DNA
tggaactgagtgagcagcag

SEQ ID NO: 50762 - DNA, 20 bp, synthetic construct
  misc_feature 1..20: note = chemically synthesized
  source 1..20: mol_type = other DNA
ccacctttcctgctctcctc

SEQ ID NO: 50763 - DNA, 20 bp, synthetic construct
  misc_feature 1..20: note = chemically synthesized
  source 1..20: mol_type = other DNA
gctctcctcaagctctcctc

SEQ ID NO: 50764 - DNA, 20 bp, synthetic construct
  misc_feature 1..20: note = chemically synthesized
  source 1..20: mol_type = other DNA
tcctcaagctctgtctcttc

SEQ ID NO: 50765 - DNA, 20 bp, synthetic construct
  misc_feature 1..20: note = chemically synthesized
  source 1..20: mol_type = other DNA
tcaagctctgtctcttctgg

SEQ ID NO: 50766 - DNA, 20 bp, synthetic construct
  misc_feature 1..20: note = chemically synthesized
  source 1..20: mol_type = other DNA
caagctctgtctcttctggc

SEQ ID NO: 50767 - DNA, 20 bp, synthetic construct
  misc_feature 1..20: note = chemically synthesized
  source 1..20: mol_type = other DNA
tctgtctcttctggcaggca

SEQ ID NO: 50768 - DNA, 20 bp, synthetic construct
  misc_feature 1..20: note = chemically synthesized
  source 1..20: mol_type = other DNA
ctgtctcttctggcaggcac

SEQ ID NO: 50769 - DNA, 20 bp, synthetic construct
  misc_feature 1..20: note = chemically synthesized
  source 1..20: mol_type = other DNA
gtctcttctggcaggcacag

SEQ ID NO: 50770 - DNA, 20 bp, synthetic construct
  misc_feature 1..20: note = chemically synthesized
  source 1..20: mol_type = other DNA
ctcttctggcaggcacagga

SEQ ID NO: 50771 - DNA, 20 bp, synthetic construct
  misc_feature 1..20: note = chemically synthesized
  source 1..20: mol_type = other DNA
ttctggcaggcacaggagag

SEQ ID NO: 50772 - DNA, 20 bp, synthetic construct
  misc_feature 1..20: note = chemically synthesized
  source 1..20: mol_type = other DNA
aggcacaggagagtggcctg

SEQ ID NO: 50773 - DNA, 20 bp, synthetic construct
  misc_feature 1..20: note = chemically synthesized
  source 1..20: mol_type = other DNA
ggcacaggagagtggcctga

SEQ ID NO: 50774 - DNA, 20 bp, synthetic construct
  misc_feature 1..20: note = chemically synthesized
  source 1..20: mol_type = other DNA
caggagagtggcctgaaggc

SEQ ID NO: 50775 - DNA, 20 bp, synthetic construct
  misc_feature 1..20: note = chemically synthesized
  source 1..20: mol_type = other DNA
gagagtggcctgaaggctgg

SEQ ID NO: 50776 - DNA, 20 bp, synthetic construct
  misc_feature 1..20: note = chemically synthesized
  source 1..20: mol_type = other DNA
agagtggcctgaaggctggc

SEQ ID NO: 50777 - DNA, 20 bp, synthetic construct
  misc_feature 1..20: note = chemically synthesized
  source 1..20: mol_type = other DNA
agtggcctgaaggctggcag

SEQ ID NO: 50778 - DNA, 20 bp, synthetic construct
  misc_feature 1..20: note = chemically synthesized
  source 1..20: mol_type = other DNA
gtggcctgaaggctggcagg

SEQ ID NO: 50779 - DNA, 20 bp, synthetic construct
  misc_feature 1..20: note = chemically synthesized
  source 1..20: mol_type = other DNA
aggttgccgcccctccaacc

SEQ ID NO: 50780 - DNA, 20 bp, synthetic construct
  misc_feature 1..20: note = chemically synthesized
  source 1..20: mol_type = other DNA
cccctccaacctggaattcc

SEQ ID NO: 50781 - DNA, 20 bp, synthetic construct
  misc_feature 1..20: note = chemically synthesized
  source 1..20: mol_type = other DNA
ctccaacctggaattcctgg

SEQ ID NO: 50782 - DNA, 20 bp, synthetic construct
  misc_feature 1..20: note = chemically synthesized
  source 1..20: mol_type = other DNA
caacctggaattcctggcag

SEQ ID NO: 50783 - DNA, 20 bp, synthetic construct
  misc_feature 1..20: note = chemically synthesized
  source 1..20: mol_type = other DNA
cctggaattcctggcagcag

SEQ ID NO: 50784 - DNA, 20 bp, synthetic construct
  misc_feature 1..20: note = chemically synthesized
  source 1..20: mol_type = other DNA
ggaattcctggcagcagcag

SEQ ID NO: 50785 - DNA, 20 bp, synthetic construct
  misc_feature 1..20: note = chemically synthesized
  source 1..20: mol_type = other DNA
ttcctggcagcagcagcggc

SEQ ID NO: 50786 - DNA, 20 bp, synthetic construct
  misc_feature 1..20: note = chemically synthesized
  source 1..20: mol_type = other DNA
tcctggcagcagcagcggct

SEQ ID NO: 50787 - DNA, 20 bp, synthetic construct
  misc_feature 1..20: note = chemically synthesized
  source 1..20: mol_type = other DNA
agcagcggctaggccttcct

SEQ ID NO: 50788 - DNA, 20 bp, synthetic construct
  misc_feature 1..20: note = chemically synthesized
  source 1..20: mol_type = other DNA
cagcggctaggccttcctcg

SEQ ID NO: 50789 - DNA, 20 bp, synthetic construct
  misc_feature 1..20: note = chemically synthesized
  source 1..20: mol_type = other DNA
agcggctaggccttcctcgg

SEQ ID NO: 50790 - DNA, 20 bp, synthetic construct
  misc_feature 1..20: note = chemically synthesized
  source 1..20: mol_type = other DNA
cccgaccccctcctccttct

SEQ ID NO: 50791 - DNA, 20 bp, synthetic construct
  misc_feature 1..20: note = chemically synthesized
  source 1..20: mol_type = other DNA
ccccctcctccttcttggtt

SEQ ID NO: 50792 - DNA, 20 bp, synthetic construct
  misc_feature 1..20: note = chemically synthesized
  source 1..20: mol_type = other DNA
tcctccttcttggttcagct

SEQ ID NO: 50793 - DNA, 20 bp, synthetic construct
  misc_feature 1..20: note = chemically synthesized
  source 1..20: mol_type = other DNA
cctccttcttggttcagctc

SEQ ID NO: 50794 - DNA, 20 bp, synthetic construct
  misc_feature 1..20: note = chemically synthesized
  source 1..20: mol_type = other DNA
ttggttcagctcaggactct

SEQ ID NO: 50795 - DNA, 20 bp, synthetic construct
  misc_feature 1..20: note = chemically synthesized
  source 1..20: mol_type = other DNA
tggttcagctcaggactctg

SEQ ID NO: 50796 - DNA, 20 bp, synthetic construct
  misc_feature 1..20: note = chemically synthesized
  source 1..20: mol_type = other DNA
ggttcagctcaggactctga

SEQ ID NO: 50797 - DNA, 20 bp, synthetic construct
  misc_feature 1..20: note = chemically synthesized
  source 1..20: mol_type = other DNA
ggactctgagggttgctgcg

SEQ ID NO: 50798 - DNA, 20 bp, synthetic construct
  misc_feature 1..20: note = chemically synthesized
  source 1..20: mol_type = other DNA
actctgagggttgctgcgtg

SEQ ID NO: 50799 - DNA, 20 bp, synthetic construct
  misc_feature 1..20: note = chemically synthesized
  source 1..20: mol_type = other DNA
ctctgagggttgctgcgtgg

SEQ ID NO: 50800 - DNA, 20 bp, synthetic construct
  misc_feature 1..20: note = chemically synthesized
  source 1..20: mol_type = other DNA
tgagggttgctgcgtggagg

SEQ ID NO: 50801 - DNA, 20 bp, synthetic construct
  misc_feature 1..20: note = chemically synthesized
  source 1..20: mol_type = other DNA
cgtggaggcagtgcatgccc

SEQ ID NO: 50802 - DNA, 20 bp, synthetic construct
  misc_feature 1..20: note = chemically synthesized
  source 1..20: mol_type = other DNA
gtggaggcagtgcatgccct

SEQ ID NO: 50803 - DNA, 20 bp, synthetic construct
  misc_feature 1..20: note = chemically synthesized
  source 1..20: mol_type = other DNA
ggcagtgcatgccctgggca

SEQ ID NO: 50804 - DNA, 20 bp, synthetic construct
  misc_feature 1..20: note = chemically synthesized
  source 1..20: mol_type = other DNA
catgccctgggcacagtgcc

SEQ ID NO: 50805 - DNA, 20 bp, synthetic construct
  misc_feature 1..20: note = chemically synthesized
  source 1..20: mol_type = other DNA
gtgcccagttcctgcccacc

SEQ ID NO: 50806 - DNA, 20 bp, synthetic construct
  misc_feature 1..20: note = chemically synthesized
  source 1..20: mol_type = other DNA
tgcccagttcctgcccaccc

SEQ ID NO: 50807 - DNA, 20 bp, synthetic construct
  misc_feature 1..20: note = chemically synthesized
  source 1..20: mol_type = other DNA
ccagttcctgcccacccagg

SEQ ID NO: 50808 - DNA, 20 bp, synthetic construct
  misc_feature 1..20: note = chemically synthesized
  source 1..20: mol_type = other DNA
gttcctgcccacccaggaag

SEQ ID NO: 50809 - DNA, 20 bp, synthetic construct
  misc_feature 1..20: note = chemically synthesized
  source 1..20: mol_type = other DNA
cccacccaggaagtagactt

SEQ ID NO: 50810 - DNA, 20 bp, synthetic construct
  misc_feature 1..20: note = chemically synthesized
  source 1..20: mol_type = other DNA
ccacccaggaagtagacttc

SEQ ID NO: 50811 - DNA, 20 bp, synthetic construct
  misc_feature 1..20: note = chemically synthesized
  source 1..20: mol_type = other DNA
cccaggaagtagacttcggg

SEQ ID NO: 50812 - DNA, 20 bp, synthetic construct
  misc_feature 1..20: note = chemically synthesized
  source 1..20: mol_type = other DNA
caggaagtagacttcgggtg

SEQ ID NO: 50813 - DNA, 20 bp, synthetic construct
  misc_feature 1..20: note = chemically synthesized
  source 1..20: mol_type = other DNA
aggaagtagacttcgggtgg

SEQ ID NO: 50814 - DNA, 20 bp, synthetic construct
  misc_feature 1..20: note = chemically synthesized
  source 1..20: mol_type = other DNA
aagtagacttcgggtggagg

SEQ ID NO: 50815 - DNA, 20 bp, synthetic construct
  misc_feature 1..20: note = chemically synthesized
  source 1..20: mol_type = other DNA
tagacttcgggtggaggcag

SEQ ID NO: 50816 - DNA, 20 bp, synthetic construct
  misc_feature 1..20: note = chemically synthesized
  source 1..20: mol_type = other DNA
agacttcgggtggaggcagt

SEQ ID NO: 50817 - DNA, 20 bp, synthetic construct
  misc_feature 1..20: note = chemically synthesized
  source 1..20: mol_type = other DNA
ttcgggtggaggcagtaggc

SEQ ID NO: 50818 - DNA, 20 bp, synthetic construct
  misc_feature 1..20: note = chemically synthesized
  source 1..20: mol_type = other DNA
tcgggtggaggcagtaggct

SEQ ID NO: 50819 - DNA, 20 bp, synthetic construct
  misc_feature 1..20: note = chemically synthesized
  source 1..20: mol_type = other DNA
cgggtggaggcagtaggctg

SEQ ID NO: 50820 - DNA, 20 bp, synthetic construct
  misc_feature 1..20: note = chemically synthesized
  source 1..20: mol_type = other DNA
ggtggaggcagtaggctggg

SEQ ID NO: 50821 - DNA, 20 bp, synthetic construct
  misc_feature 1..20: note = chemically synthesized
  source 1..20: mol_type = other DNA
gtggaggcagtaggctgggg

SEQ ID NO: 50822 - DNA, 20 bp, synthetic construct
  misc_feature 1..20: note = chemically synthesized
  source 1..20: mol_type = other DNA
tggaggcagtaggctgggga

SEQ ID NO: 50823 - DNA, 20 bp, synthetic construct
  misc_feature 1..20: note = chemically synthesized
  source 1..20: mol_type = other DNA
ggaggcagtaggctggggag

SEQ ID NO: 50824 - DNA, 20 bp, synthetic construct
  misc_feature 1..20: note = chemically synthesized
  source 1..20: mol_type = other DNA
ggcagtaggctggggagggg

SEQ ID NO: 50825 - DNA, 20 bp, synthetic construct
  misc_feature 1..20: note = chemically synthesized
  source 1..20: mol_type = other DNA
gcagtaggctggggaggggc

SEQ ID NO: 50826 - DNA, 20 bp, synthetic construct
  misc_feature 1..20: note = chemically synthesized
  source 1..20: mol_type = other DNA
cagtaggctggggaggggcg

SEQ ID NO: 50827 - DNA, 20 bp, synthetic construct
  misc_feature 1..20: note = chemically synthesized
  source 1..20: mol_type = other DNA
gtaggctggggaggggcggg

SEQ ID NO: 50828 - DNA, 20 bp, synthetic construct
  misc_feature 1..20: note = chemically synthesized
  source 1..20: mol_type = other DNA
ctggggaggggcggggagct

SEQ ID NO: 50829 - DNA, 20 bp, synthetic construct
  misc_feature 1..20: note = chemically synthesized
  source 1..20: mol_type = other DNA
ggaggggcggggagcttgga

SEQ ID NO: 50830 - DNA, 20 bp, synthetic construct
  misc_feature 1..20: note = chemically synthesized
  source 1..20: mol_type = other DNA
gaggggcggggagcttggac

SEQ ID NO: 50831 - DNA, 20 bp, synthetic construct
  misc_feature 1..20: note = chemically synthesized
  source 1..20: mol_type = other DNA
gggcggggagcttggacagg

SEQ ID NO: 50832 - DNA, 20 bp, synthetic construct
  misc_feature 1..20: note = chemically synthesized
  source 1..20: mol_type = other DNA
ggcggggagcttggacagga

SEQ ID NO: 50833 - DNA, 20 bp, synthetic construct
  misc_feature 1..20: note = chemically synthesized
  source 1..20: mol_type = other DNA
cggggagcttggacaggaag

SEQ ID NO: 50834 - DNA, 20 bp, synthetic construct
  misc_feature 1..20: note = chemically synthesized
  source 1..20: mol_type = other DNA
aaggagccttgctcattgcc

SEQ ID NO: 50835 - DNA, 20 bp, synthetic construct
  misc_feature 1..20: note = chemically synthesized
  source 1..20: mol_type = other DNA
gagccttgctcattgcccgg

SEQ ID NO: 50836 - DNA, 20 bp, synthetic construct
  misc_feature 1..20: note = chemically synthesized
  source 1..20: mol_type = other DNA
gctcattgcccggcagacac

SEQ ID NO: 50837 - DNA, 20 bp, synthetic construct
  misc_feature 1..20: note = chemically synthesized
  source 1..20: mol_type = other DNA
ttgcccggcagacacaagac

SEQ ID NO: 50838 - DNA, 20 bp, synthetic construct
  misc_feature 1..20: note = chemically synthesized
  source 1..20: mol_type = other DNA
tgcccggcagacacaagact

SEQ ID NO: 50839 - DNA, 20 bp, synthetic construct
  misc_feature 1..20: note = chemically synthesized
  source 1..20: mol_type = other DNA
agactgggccctcataaact

SEQ ID NO: 50840 - DNA, 20 bp, synthetic construct
  misc_feature 1..20: note = chemically synthesized
  source 1..20: mol_type = other DNA
tgggccctcataaactcaga

SEQ ID NO: 50841 - DNA, 20 bp, synthetic construct
  misc_feature 1..20: note = chemically synthesized
  source 1..20: mol_type = other DNA
cctcataaactcagacagcc

SEQ ID NO: 50842 - DNA, 20 bp, synthetic construct
  misc_feature 1..20: note = chemically synthesized
  source 1..20: mol_type = other DNA
acctgttgtacctgcccttt

SEQ ID NO: 50843 - DNA, 20 bp, synthetic construct
  misc_feature 1..20: note = chemically synthesized
  source 1..20: mol_type = other DNA
gccctttcagctctgtgacc

SEQ ID NO: 50844 - DNA, 20 bp, synthetic construct
  misc_feature 1..20: note = chemically synthesized
  source 1..20: mol_type = other DNA
ccctttcagctctgtgaccc

SEQ ID NO: 50845 - DNA, 20 bp, synthetic construct
  misc_feature 1..20: note = chemically synthesized
  source 1..20: mol_type = other DNA
tcagctctgtgacccgggac

SEQ ID NO: 50846 - DNA, 20 bp, synthetic construct
  misc_feature 1..20: note = chemically synthesized
  source 1..20: mol_type = other DNA
acaagtcaccctctcccttt

SEQ ID NO: 50847 - DNA, 20 bp, synthetic construct
  misc_feature 1..20: note = chemically synthesized
  source 1..20: mol_type = other DNA
ctctccctttgagttgccgc

SEQ ID NO: 50848 - DNA, 20 bp, synthetic construct
  misc_feature 1..20: note = chemically synthesized
  source 1..20: mol_type = other DNA
ctccctttgagttgccgcaa

SEQ ID NO: 50849 - DNA, 20 bp, synthetic construct
  misc_feature 1..20: note = chemically synthesized
  source 1..20: mol_type = other DNA
tccctttgagttgccgcaag

SEQ ID NO: 50850 - DNA, 20 bp, synthetic construct
  misc_feature 1..20: note = chemically synthesized
  source 1..20: mol_type = other DNA
ttgagttgccgcaagaggta

SEQ ID NO: 50851 - DNA, 20 bp, synthetic construct
  misc_feature 1..20: note = chemically synthesized
  source 1..20: mol_type = other DNA
agaggtacagtcacactgcc

SEQ ID NO: 50852 - DNA, 20 bp, synthetic construct
  misc_feature 1..20: note = chemically synthesized
  source 1..20: mol_type = other DNA
aggtacagtcacactgccca

SEQ ID NO: 50853 - DNA, 20 bp, synthetic construct
  misc_feature 1..20: note = chemically synthesized
  source 1..20: mol_type = other DNA
ggtacagtcacactgcccag

SEQ ID NO: 50854 - DNA, 20 bp, synthetic construct
  misc_feature 1..20: note = chemically synthesized
  source 1..20: mol_type = other DNA
cacactgcccagaggattac

SEQ ID NO: 50855 - DNA, 20 bp, synthetic construct
  misc_feature 1..20: note = chemically synthesized
  source 1..20: mol_type = other DNA
cagaggattactagaaatga

SEQ ID NO: 50856 - DNA, 20 bp, synthetic construct
  misc_feature 1..20: note = chemically synthesized
  source 1..20: mol_type = other DNA
agaggattactagaaatgac

SEQ ID NO: 50857 - DNA, 20 bp, synthetic construct
  misc_feature 1..20: note = chemically synthesized
  source 1..20: mol_type = other DNA
aatgacaggcctcgccctcc

SEQ ID NO: 50858 - DNA, 20 bp, synthetic construct
  misc_feature 1..20: note = chemically synthesized
  source 1..20: mol_type = other DNA
caggcctcgccctcctggca

SEQ ID NO: 50859 - DNA, 20 bp, synthetic construct
  misc_feature 1..20: note = chemically synthesized
  source 1..20: mol_type = other DNA
tcgccctcctggcacagacc

SEQ ID NO: 50860 - DNA, 20 bp, synthetic construct
  misc_feature 1..20: note = chemically synthesized
  source 1..20: mol_type = other DNA
acagacctggcaccaataac

SEQ ID NO: 50861 - DNA, 20 bp, synthetic construct
  misc_feature 1..20: note = chemically synthesized
  source 1..20: mol_type = other DNA
gacctggcaccaataactgg

SEQ ID NO: 50862 - DNA, 20 bp, synthetic construct
  misc_feature 1..20: note = chemically synthesized
  source 1..20: mol_type = other DNA
acctggcaccaataactggc

SEQ ID NO: 50863 - DNA, 20 bp, synthetic construct
  misc_feature 1..20: note = chemically synthesized
  source 1..20: mol_type = other DNA
accaataactggcaggtttc

SEQ ID NO: 50864 - DNA, 20 bp, synthetic construct
  misc_feature 1..20: note = chemically synthesized
  source 1..20: mol_type = other DNA
ccaataactggcaggtttct

SEQ ID NO: 50865 - DNA, 20 bp, synthetic construct
  misc_feature 1..20: note = chemically synthesized
  source 1..20: mol_type = other DNA
caataactggcaggtttctg

SEQ ID NO: 50866 - DNA, 20 bp, synthetic construct
  misc_feature 1..20: note = chemically synthesized
  source 1..20: mol_type = other DNA
aactggcaggtttctggggc

SEQ ID NO: 50867 - DNA, 20 bp, synthetic construct
  misc_feature 1..20: note = chemically synthesized
  source 1..20: mol_type = other DNA
caggtttctggggccagctg

SEQ ID NO: 50868 - DNA, 20 bp, synthetic construct
  misc_feature 1..20: note = chemically synthesized
  source 1..20: mol_type = other DNA
ggtttctggggccagctgca

SEQ ID NO: 50869 - DNA, 20 bp, synthetic construct
  misc_feature 1..20: note = chemically synthesized
  source 1..20: mol_type = other DNA
gtttctggggccagctgcag

SEQ ID NO: 50870 - DNA, 20 bp, synthetic construct
  misc_feature 1..20: note = chemically synthesized
  source 1..20: mol_type = other DNA
tttctggggccagctgcaga

SEQ ID NO: 50871 - DNA, 20 bp, synthetic construct
  misc_feature 1..20: note = chemically synthesized
  source 1..20: mol_type = other DNA
ctggggccagctgcagaggg

SEQ ID NO: 50872 - DNA, 20 bp, synthetic construct
  misc_feature 1..20: note = chemically synthesized
  source 1..20: mol_type = other DNA
ggggccagctgcagagggaa

SEQ ID NO: 50873 - DNA, 20 bp, synthetic construct
  misc_feature 1..20: note = chemically synthesized
  source 1..20: mol_type = other DNA
gggccagctgcagagggaag

SEQ ID NO: 50874 - DNA, 20 bp, synthetic construct
  misc_feature 1..20: note = chemically synthesized
  source 1..20: mol_type = other DNA
gctgcagagggaagaggact

SEQ ID NO: 50875 - DNA, 20 bp, synthetic construct
  misc_feature 1..20: note = chemically synthesized
  source 1..20: mol_type = other DNA
tgagccacctatgaaatgcc

SEQ ID NO: 50876 - DNA, 20 bp, synthetic construct
  misc_feature 1..20: note = chemically synthesized
  source 1..20: mol_type = other DNA
gccacctatgaaatgcccag

SEQ ID NO: 50877 - DNA, 20 bp, synthetic construct
  misc_feature 1..20: note = chemically synthesized
  source 1..20: mol_type = other DNA
ccacctatgaaatgcccagt

SEQ ID NO: 50878 - DNA, 20 bp, synthetic construct
  misc_feature 1..20: note = chemically synthesized
  source 1..20: mol_type = other DNA
cctatgaaatgcccagtggg

SEQ ID NO: 50879 - DNA, 20 bp, synthetic construct
  misc_feature 1..20: note = chemically synthesized
  source 1..20: mol_type = other DNA
atgcccagtgggcagcccca

SEQ ID NO: 50880 - DNA, 20 bp, synthetic construct
  misc_feature 1..20: note = chemically synthesized
  source 1..20: mol_type = other DNA
ccagtgggcagccccacagt

SEQ ID NO: 50881 - DNA, 20 bp, synthetic construct
  misc_feature 1..20: note = chemically synthesized
  source 1..20: mol_type = other DNA
cagtgggcagccccacagtt

SEQ ID NO: 50882 - DNA, 20 bp, synthetic construct
  misc_feature 1..20: note = chemically synthesized
  source 1..20: mol_type = other DNA
tgggcagccccacagttggg

SEQ ID NO: 50883 - DNA, 20 bp, synthetic construct
  misc_feature 1..20: note = chemically synthesized
  source 1..20: mol_type = other DNA
gggcagccccacagttgggc

SEQ ID NO: 50884 - DNA, 20 bp, synthetic construct
  misc_feature 1..20: note = chemically synthesized
  source 1..20: mol_type = other DNA
ttgggcaggtctgtgtgcac

SEQ ID NO: 50885 - DNA, 20 bp, synthetic construct
  misc_feature 1..20: note = chemically synthesized
  source 1..20: mol_type = other DNA
tgggcaggtctgtgtgcact

SEQ ID NO: 50886 - DNA, 20 bp, synthetic construct
  misc_feature 1..20: note = chemically synthesized
  source 1..20: mol_type = other DNA
gggcaggtctgtgtgcactg

SEQ ID NO: 50887 - DNA, 20 bp, synthetic construct
  misc_feature 1..20: note = chemically synthesized
  source 1..20: mol_type = other DNA
gcaggtctgtgtgcactggg

SEQ ID NO: 50888 - DNA, 20 bp, synthetic construct
  misc_feature 1..20: note = chemically synthesized
  source 1..20: mol_type = other DNA
caggtctgtgtgcactgggg

SEQ ID NO: 50889 - DNA, 20 bp, synthetic construct
  misc_feature 1..20: note = chemically synthesized
  source 1..20: mol_type = other DNA
cactggggaggtgtgtgtca

SEQ ID NO: 50890 - DNA, 20 bp, synthetic construct
  misc_feature 1..20: note = chemically synthesized
  source 1..20: mol_type = other DNA
actggggaggtgtgtgtcat

SEQ ID NO: 50891 - DNA, 20 bp, synthetic construct
  misc_feature 1..20: note = chemically synthesized
  source 1..20: mol_type = other DNA
gaggtgtgtgtcataggacc

SEQ ID NO: 50892 - DNA, 20 bp, synthetic construct
  misc_feature 1..20: note = chemically synthesized
  source 1..20: mol_type = other DNA
tcctatgacacacacctccc

SEQ ID NO: 50893 - DNA, 20 bp, synthetic construct
  misc_feature 1..20: note = chemically synthesized
  source 1..20: mol_type = other DNA
acacacctccccagtgcaca

SEQ ID NO: 50894 - DNA, 20 bp, synthetic construct
  misc_feature 1..20: note = chemically synthesized
  source 1..20: mol_type = other DNA
cacacagacctgcccaactg

SEQ ID NO: 50895 - DNA, 20 bp, synthetic construct
  misc_feature 1..20: note = chemically synthesized
  source 1..20: mol_type = other DNA
acacagacctgcccaactgt

SEQ ID NO: 50896 - DNA, 20 bp, synthetic construct
  misc_feature 1..20: note = chemically synthesized
  source 1..20: mol_type = other DNA
cacagacctgcccaactgtg

SEQ ID NO: 50897 - DNA, 20 bp, synthetic construct
  misc_feature 1..20: note = chemically synthesized
  source 1..20: mol_type = other DNA
ccaactgtggggctgcccac

SEQ ID NO: 50898 - DNA, 20 bp, synthetic construct
  misc_feature 1..20: note = chemically synthesized
  source 1..20: mol_type = other DNA
caactgtggggctgcccact

SEQ ID NO: 50899 - DNA, 20 bp, synthetic construct
  misc_feature 1..20: note = chemically synthesized
  source 1..20: mol_type = other DNA
gctgcccactgggcatttca

SEQ ID NO: 50900 - DNA, 20 bp, synthetic construct
  misc_feature 1..20: note = chemically synthesized
  source 1..20: mol_type = other DNA
ctgcccactgggcatttcat

SEQ ID NO: 50901 - DNA, 20 bp, synthetic construct
  misc_feature 1..20: note = chemically synthesized
  source 1..20: mol_type = other DNA
cccactgggcatttcatagg

SEQ ID NO: 50902 - DNA, 20 bp, synthetic construct
  misc_feature 1..20: note = chemically synthesized
  source 1..20: mol_type = other DNA
tgggcatttcataggtggct

SEQ ID NO: 50903 - DNA, 20 bp, synthetic construct
  misc_feature 1..20: note = chemically synthesized
  source 1..20: mol_type = other DNA
gctcagtcctcttccctctg

SEQ ID NO: 50904 - DNA, 20 bp, synthetic construct
  misc_feature 1..20: note = chemically synthesized
  source 1..20: mol_type = other DNA
agtcctcttccctctgcagc

SEQ ID NO: 50905 - DNA, 20 bp, synthetic construct
  misc_feature 1..20: note = chemically synthesized
  source 1..20: mol_type = other DNA
cttccctctgcagctggccc

SEQ ID NO: 50906 - DNA, 20 bp, synthetic construct
  misc_feature 1..20: note = chemically synthesized
  source 1..20: mol_type = other DNA
agctggccccagaaacctgc

SEQ ID NO: 50907 - DNA, 20 bp, synthetic construct
  misc_feature 1..20: note = chemically synthesized
  source 1..20: mol_type = other DNA
cccagaaacctgccagttat

SEQ ID NO: 50908 - DNA, 20 bp, synthetic construct
  misc_feature 1..20: note = chemically synthesized
  source 1..20: mol_type = other DNA
aacctgccagttattggtgc

SEQ ID NO: 50909 - DNA, 20 bp, synthetic construct
  misc_feature 1..20: note = chemically synthesized
  source 1..20: mol_type = other DNA
acctgccagttattggtgcc

SEQ ID NO: 50910 - DNA, 20 bp, synthetic construct
  misc_feature 1..20: note = chemically synthesized
  source 1..20: mol_type = other DNA
tattggtgccaggtctgtgc

SEQ ID NO: 50911 - DNA, 20 bp, synthetic construct
  misc_feature 1..20: note = chemically synthesized
  source 1..20: mol_type = other DNA
attggtgccaggtctgtgcc

SEQ ID NO: 50912 - DNA, 20 bp, synthetic construct
  misc_feature 1..20: note = chemically synthesized
  source 1..20: mol_type = other DNA
tggtgccaggtctgtgccag

SEQ ID NO: 50913 - DNA, 20 bp, synthetic construct
  misc_feature 1..20: note = chemically synthesized
  source 1..20: mol_type = other DNA
ggtgccaggtctgtgccagg

SEQ ID NO: 50914 - DNA, 20 bp, synthetic construct
  misc_feature 1..20: note = chemically synthesized
  source 1..20: mol_type = other DNA
gtgccaggtctgtgccagga

SEQ ID NO: 50915 - DNA, 20 bp, synthetic construct
  misc_feature 1..20: note = chemically synthesized
  source 1..20: mol_type = other DNA
caggtctgtgccaggagggc

SEQ ID NO: 50916 - DNA, 20 bp, synthetic construct
  misc_feature 1..20: note = chemically synthesized
  source 1..20: mol_type = other DNA
aggtctgtgccaggagggcg

SEQ ID NO: 50917 - DNA, 20 bp, synthetic construct
  misc_feature 1..20: note = chemically synthesized
  source 1..20: mol_type = other DNA
agggcgaggcctgtcatttc

SEQ ID NO: 50918 - DNA, 20 bp, synthetic construct
  misc_feature 1..20: note = chemically synthesized
  source 1..20: mol_type = other DNA
tgtcatttctagtaatcctc

SEQ ID NO: 50919 - DNA, 20 bp, synthetic construct
  misc_feature 1..20: note = chemically synthesized
  source 1..20: mol_type = other DNA
gtcatttctagtaatcctct

SEQ ID NO: 50920 - DNA, 20 bp, synthetic construct
  misc_feature 1..20: note = chemically synthesized
  source 1..20: mol_type = other DNA
atttctagtaatcctctggg

SEQ ID NO: 50921 - DNA, 20 bp, synthetic construct
  misc_feature 1..20: note = chemically synthesized
  source 1..20: mol_type = other DNA
cagtgtgactgtacctcttg

SEQ ID NO: 50922 - DNA, 20 bp, synthetic construct
  misc_feature 1..20: note = chemically synthesized
  source 1..20: mol_type = other DNA
gtacctcttgcggcaactca

SEQ ID NO: 50923 - DNA, 20 bp, synthetic construct
  misc_feature 1..20: note = chemically synthesized
  source 1..20: mol_type = other DNA
tacctcttgcggcaactcaa

SEQ ID NO: 50924 - DNA, 20 bp, synthetic construct
  misc_feature 1..20: note = chemically synthesized
  source 1..20: mol_type = other DNA
acctcttgcggcaactcaaa

SEQ ID NO: 50925 - DNA, 20 bp, synthetic construct
  misc_feature 1..20: note = chemically synthesized
  source 1..20: mol_type = other DNA
ctcttgcggcaactcaaagg

SEQ ID NO: 50926 - DNA, 20 bp, synthetic construct
  misc_feature 1..20: note = chemically synthesized
  source 1..20: mol_type = other DNA
cttgcggcaactcaaaggga

SEQ ID NO: 50927 - DNA, 20 bp, synthetic construct
  misc_feature 1..20: note = chemically synthesized
  source 1..20: mol_type = other DNA
ttgcggcaactcaaagggag

SEQ ID NO: 50928 - DNA, 20 bp, synthetic construct
  misc_feature 1..20: note = chemically synthesized
  source 1..20: mol_type = other DNA
tgcggcaactcaaagggaga

SEQ ID NO: 50929 - DNA, 20 bp, synthetic construct
  misc_feature 1..20: note = chemically synthesized
  source 1..20: mol_type = other DNA
agggagagggtgacttgtcc

SEQ ID NO: 50930 - DNA, 20 bp, synthetic construct
  misc_feature 1..20: note = chemically synthesized
  source 1..20: mol_type = other DNA
gggagagggtgacttgtccc

SEQ ID NO: 50931 - DNA, 20 bp, synthetic construct
  misc_feature 1..20: note = chemically synthesized
  source 1..20: mol_type = other DNA
gggtgacttgtcccgggtca

SEQ ID NO: 50932 - DNA, 20 bp, synthetic construct
  misc_feature 1..20: note = chemically synthesized
  source 1..20: mol_type = other DNA
gtgacttgtcccgggtcaca

SEQ ID NO: 50933 - DNA, 20 bp, synthetic construct
  misc_feature 1..20: note = chemically synthesized
  source 1..20: mol_type = other DNA
gtcccgggtcacagagctga

SEQ ID NO: 50934 - DNA, 20 bp, synthetic construct
  misc_feature 1..20: note = chemically synthesized
  source 1..20: mol_type = other DNA
tcccgggtcacagagctgaa

SEQ ID NO: 50935 - DNA, 20 bp, synthetic construct
  misc_feature 1..20: note = chemically synthesized
  source 1..20: mol_type = other DNA
cccgggtcacagagctgaaa

SEQ ID NO: 50936 - DNA, 20 bp, synthetic construct
  misc_feature 1..20: note = chemically synthesized
  source 1..20: mol_type = other DNA
gggtcacagagctgaaaggg

SEQ ID NO: 50937 - DNA, 20 bp, synthetic construct
  misc_feature 1..20: note = chemically synthesized
  source 1..20: mol_type = other DNA
ggtcacagagctgaaagggc

SEQ ID NO: 50938 - DNA, 20 bp, synthetic construct
  misc_feature 1..20: note = chemically synthesized
  source 1..20: mol_type = other DNA
agctgaaagggcaggtacaa

SEQ ID NO: 50939 - DNA, 20 bp, synthetic construct
  misc_feature 1..20: note = chemically synthesized
  source 1..20: mol_type = other DNA
gctgaaagggcaggtacaac

SEQ ID NO: 50940 - DNA, 20 bp, synthetic construct
  misc_feature 1..20: note = chemically synthesized
  source 1..20: mol_type = other DNA
aggtacaacaggtgacatgc

SEQ ID NO: 50941 - DNA, 20 bp, synthetic construct
  misc_feature 1..20: note = chemically synthesized
  source 1..20: mol_type = other DNA
ggtacaacaggtgacatgcc

SEQ ID NO: 50942 - DNA, 20 bp, synthetic construct
  misc_feature 1..20: note = chemically synthesized
  source 1..20: mol_type = other DNA
ggtgacatgccgggctgtct

SEQ ID NO: 50943 - DNA, 20 bp, synthetic construct
  misc_feature 1..20: note = chemically synthesized
  source 1..20: mol_type = other DNA
gccgggctgtctgagtttat

SEQ ID NO: 50944 - DNA, 20 bp, synthetic construct
  misc_feature 1..20: note = chemically synthesized
  source 1..20: mol_type = other DNA
ccgggctgtctgagtttatg

SEQ ID NO: 50945 - DNA, 20 bp, synthetic construct
  misc_feature 1..20: note = chemically synthesized
  source 1..20: mol_type = other DNA
cgggctgtctgagtttatga

SEQ ID NO: 50946 - DNA, 20 bp, synthetic construct
  misc_feature 1..20: note = chemically synthesized
  source 1..20: mol_type = other DNA
tgtctgagtttatgagggcc

SEQ ID NO: 50947 - DNA, 20 bp, synthetic construct
  misc_feature 1..20: note = chemically synthesized
  source 1..20: mol_type = other DNA
gggcccagtcttgtgtctgc

SEQ ID NO: 50948 - DNA, 20 bp, synthetic construct
  misc_feature 1..20: note = chemically synthesized
  source 1..20: mol_type = other DNA
ggcccagtcttgtgtctgcc

SEQ ID NO: 50949 - DNA, 20 bp, synthetic construct
  misc_feature 1..20: note = chemically synthesized
  source 1..20: mol_type = other DNA
tcttgtgtctgccgggcaat

SEQ ID NO: 50950 - DNA, 20 bp, synthetic construct
  misc_feature 1..20: note = chemically synthesized
  source 1..20: mol_type = other DNA
gtgtctgccgggcaatgagc

SEQ ID NO: 50951 - DNA, 20 bp, synthetic construct
  misc_feature 1..20: note = chemically synthesized
  source 1..20: mol_type = other DNA
tgtctgccgggcaatgagca

SEQ ID NO: 50952 - DNA, 20 bp, synthetic construct
  misc_feature 1..20: note = chemically synthesized
  source 1..20: mol_type = other DNA
agcaaggctccttcctgtcc

SEQ ID NO: 50953 - DNA, 20 bp, synthetic construct
  misc_feature 1..20: note = chemically synthesized
  source 1..20: mol_type = other DNA
ccaagctccccgcccctccc

SEQ ID NO: 50954 - DNA, 20 bp, synthetic construct
  misc_feature 1..20: note = chemically synthesized
  source 1..20: mol_type = other DNA
cagcctactgcctccacccg

SEQ ID NO: 50955 - DNA, 20 bp, synthetic construct
  misc_feature 1..20: note = chemically synthesized
  source 1..20: mol_type = other DNA
tccacccgaagtctacttcc

SEQ ID NO: 50956 - DNA, 20 bp, synthetic construct
  misc_feature 1..20: note = chemically synthesized
  source 1..20: mol_type = other DNA
ccacccgaagtctacttcct

SEQ ID NO: 50957 - DNA, 20 bp, synthetic construct
  misc_feature 1..20: note = chemically synthesized
  source 1..20: mol_type = other DNA
cccgaagtctacttcctggg

SEQ ID NO: 50958 - DNA, 20 bp, synthetic construct
  misc_feature 1..20: note = chemically synthesized
  source 1..20: mol_type = other DNA
ccgaagtctacttcctgggt

SEQ ID NO: 50959 - DNA, 20 bp, synthetic construct
  misc_feature 1..20: note = chemically synthesized
  source 1..20: mol_type = other DNA
aagtctacttcctgggtggg

SEQ ID NO: 50960 - DNA, 20 bp, synthetic construct
  misc_feature 1..20: note = chemically synthesized
  source 1..20: mol_type = other DNA
agtctacttcctgggtgggc

SEQ ID NO: 50961 - DNA, 20 bp, synthetic construct
  misc_feature 1..20: note = chemically synthesized
  source 1..20: mol_type = other DNA
cttcctgggtgggcaggaac

SEQ ID NO: 50962 - DNA, 20 bp, synthetic construct
  misc_feature 1..20: note = chemically synthesized
  source 1..20: mol_type = other DNA
ttcctgggtgggcaggaact

SEQ ID NO: 50963 - DNA, 20 bp, synthetic construct
  misc_feature 1..20: note = chemically synthesized
  source 1..20: mol_type = other DNA
caggaactgggcactgtgcc

SEQ ID NO: 50964 - DNA, 20 bp, synthetic construct
  misc_feature 1..20: note = chemically synthesized
  source 1..20: mol_type = other DNA
aggaactgggcactgtgccc

SEQ ID NO: 50965 - DNA, 20 bp, synthetic construct
  misc_feature 1..20: note = chemically synthesized
  source 1..20: mol_type = other DNA
ggaactgggcactgtgccca

SEQ ID NO: 50966 - DNA, 20 bp, synthetic construct
  misc_feature 1..20: note = chemically synthesized
  source 1..20: mol_type = other DNA
gggcatgcactgcctccacg

SEQ ID NO: 50967 - DNA, 20 bp, synthetic construct
  misc_feature 1..20: note = chemically synthesized
  source 1..20: mol_type = other DNA
tgcctccacgcagcaaccct

SEQ ID NO: 50968 - DNA, 20 bp, synthetic construct
  misc_feature 1..20: note = chemically synthesized
  source 1..20: mol_type = other DNA
cctccacgcagcaaccctca

SEQ ID NO: 50969 - DNA, 20 bp, synthetic construct
  misc_feature 1..20: note = chemically synthesized
  source 1..20: mol_type = other DNA
gcagcaaccctcagagtcct

SEQ ID NO: 50970 - DNA, 20 bp, synthetic construct
  misc_feature 1..20: note = chemically synthesized
  source 1..20: mol_type = other DNA
tcagagtcctgagctgaacc

SEQ ID NO: 50971 - DNA, 20 bp, synthetic construct
  misc_feature 1..20: note = chemically synthesized
  source 1..20: mol_type = other DNA
gagtcctgagctgaaccaag

SEQ ID NO: 50972 - DNA, 20 bp, synthetic construct
  misc_feature 1..20: note = chemically synthesized
  source 1..20: mol_type = other DNA
agtcctgagctgaaccaaga

SEQ ID NO: 50973 - DNA, 20 bp, synthetic construct
  misc_feature 1..20: note = chemically synthesized
  source 1..20: mol_type = other DNA
tcctgagctgaaccaagaag

SEQ ID NO: 50974 - DNA, 20 bp, synthetic construct
  misc_feature 1..20: note = chemically synthesized
  source 1..20: mol_type = other DNA
cctgagctgaaccaagaagg

SEQ ID NO: 50975 - DNA, 20 bp, synthetic construct
  misc_feature 1..20: note = chemically synthesized
  source 1..20: mol_type = other DNA
tgagctgaaccaagaaggag

SEQ ID NO: 50976 - DNA, 20 bp, synthetic construct
  misc_feature 1..20: note = chemically synthesized
  source 1..20: mol_type = other DNA
gagctgaaccaagaaggagg

SEQ ID NO: 50977 - DNA, 20 bp, synthetic construct
  misc_feature 1..20: note = chemically synthesized
  source 1..20: mol_type = other DNA
agctgaaccaagaaggagga

SEQ ID NO: 50978 - DNA, 20 bp, synthetic construct
  misc_feature 1..20: note = chemically synthesized
  source 1..20: mol_type = other DNA
gctgaaccaagaaggaggag

SEQ ID NO: 50979 - DNA, 20 bp, synthetic construct
  misc_feature 1..20: note = chemically synthesized
  source 1..20: mol_type = other DNA
ctgaaccaagaaggaggagg

SEQ ID NO: 50980 - DNA, 20 bp, synthetic construct
  misc_feature 1..20: note = chemically synthesized
  source 1..20: mol_type = other DNA
accaagaaggaggagggggt

SEQ ID NO: 50981 - DNA, 20 bp, synthetic construct
  misc_feature 1..20: note = chemically synthesized
  source 1..20: mol_type = other DNA
ccaagaaggaggagggggtc

SEQ ID NO: 50982 - DNA, 20 bp, synthetic construct
  misc_feature 1..20: note = chemically synthesized
  source 1..20: mol_type = other DNA
gaggagggggtcgggcctcc

SEQ ID NO: 50983 - DNA, 20 bp, synthetic construct
  misc_feature 1..20: note = chemically synthesized
  source 1..20: mol_type = other DNA
aggagggggtcgggcctccg

SEQ ID NO: 50984 - DNA, 20 bp, synthetic construct
  misc_feature 1..20: note = chemically synthesized
  source 1..20: mol_type = other DNA
agggggtcgggcctccgagg

SEQ ID NO: 50985 - DNA, 20 bp, synthetic construct
  misc_feature 1..20: note = chemically synthesized
  source 1..20: mol_type = other DNA
gggggtcgggcctccgagga

SEQ ID NO: 50986 - DNA, 20 bp, synthetic construct
  misc_feature 1..20: note = chemically synthesized
  source 1..20: mol_type = other DNA
tcgggcctccgaggaaggcc

SEQ ID NO: 50987 - DNA, 20 bp, synthetic construct
  misc_feature 1..20: note = chemically synthesized
  source 1..20: mol_type = other DNA
ggcctagccgctgctgctgc

SEQ ID NO: 50988 - DNA, 20 bp, synthetic construct
  misc_feature 1..20: note = chemically synthesized
  source 1..20: mol_type = other DNA
gcctagccgctgctgctgcc

SEQ ID NO: 50989 - DNA, 20 bp, synthetic construct
  misc_feature 1..20: note = chemically synthesized
  source 1..20: mol_type = other DNA
gctgctgctgccaggaattc

SEQ ID NO: 50990 - DNA, 20 bp, synthetic construct
  misc_feature 1..20: note = chemically synthesized
  source 1..20: mol_type = other DNA
ctgctgctgccaggaattcc

SEQ ID NO: 50991 - DNA, 20 bp, synthetic construct
  misc_feature 1..20: note = chemically synthesized
  source 1..20: mol_type = other DNA
tgctgccaggaattccaggt

SEQ ID NO: 50992 - DNA, 20 bp, synthetic construct
  misc_feature 1..20: note = chemically synthesized
  source 1..20: mol_type = other DNA
ctgccaggaattccaggttg

SEQ ID NO: 50993 - DNA, 20 bp, synthetic construct
  misc_feature 1..20: note = chemically synthesized
  source 1..20: mol_type = other DNA
tgccaggaattccaggttgg

SEQ ID NO: 50994 - DNA, 20 bp, synthetic construct
  misc_feature 1..20: note = chemically synthesized
  source 1..20: mol_type = other DNA
gccaggaattccaggttgga

SEQ ID NO: 50995 - DNA, 20 bp, synthetic construct
  misc_feature 1..20: note = chemically synthesized
  source 1..20: mol_type = other DNA
ccaggaattccaggttggag

SEQ ID NO: 50996 - DNA, 20 bp, synthetic construct
  misc_feature 1..20: note = chemically synthesized
  source 1..20: mol_type = other DNA
ggaattccaggttggagggg

SEQ ID NO: 50997 - DNA, 20 bp, synthetic construct
  misc_feature 1..20: note = chemically synthesized
  source 1..20: mol_type = other DNA
gaggggcggcaacctcctgc

SEQ ID NO: 50998 - DNA, 20 bp, synthetic construct
  misc_feature 1..20: note = chemically synthesized
  source 1..20: mol_type = other DNA
ggcaacctcctgccagcctt

SEQ ID NO: 50999 - DNA, 20 bp, synthetic construct
  misc_feature 1..20: note = chemically synthesized
  source 1..20: mol_type = other DNA
gcaacctcctgccagccttc

SEQ ID NO: 51000 - DNA, 20 bp, synthetic construct
  misc_feature 1..20: note = chemically synthesized
  source 1..20: mol_type = other DNA
ggccactctcctgtgcctgc

SEQ ID NO: 51001 - DNA, 20 bp, synthetic construct
  misc_feature 1..20: note = chemically synthesized
  source 1..20: mol_type = other DNA
cactctcctgtgcctgccag

SEQ ID NO: 51002 - DNA, 20 bp, synthetic construct
  misc_feature 1..20: note = chemically synthesized
  source 1..20: mol_type = other DNA
ctctcctgtgcctgccagaa

SEQ ID NO: 51003 - DNA, 20 bp, synthetic construct
  misc_feature 1..20: note = chemically synthesized
  source 1..20: mol_type = other DNA
cctgtgcctgccagaagaga

SEQ ID NO: 51004 - DNA, 20 bp, synthetic construct
  misc_feature 1..20: note = chemically synthesized
  source 1..20: mol_type = other DNA
tgtgcctgccagaagagaca

SEQ ID NO: 51005 - DNA, 20 bp, synthetic construct
  misc_feature 1..20: note = chemically synthesized
  source 1..20: mol_type = other DNA
tgccagaagagacagagctt

SEQ ID NO: 51006 - DNA, 20 bp, synthetic construct
  misc_feature 1..20: note = chemically synthesized
  source 1..20: mol_type = other DNA
gccagaagagacagagcttg

SEQ ID NO: 51007 - DNA, 20 bp, synthetic construct
  misc_feature 1..20: note = chemically synthesized
  source 1..20: mol_type = other DNA
cagaagagacagagcttgag

SEQ ID NO: 51008 - DNA, 20 bp, synthetic construct
  misc_feature 1..20: note = chemically synthesized
  source 1..20: mol_type = other DNA
gaagagacagagcttgagga

SEQ ID NO: 51009 - DNA, 20 bp, synthetic construct
  misc_feature 1..20: note = chemically synthesized
  source 1..20: mol_type = other DNA
acagagcttgaggagagctt

SEQ ID NO: 51010 - DNA, 20 bp, synthetic construct
  misc_feature 1..20: note = chemically synthesized
  source 1..20: mol_type = other DNA
cagagcttgaggagagcttg

SEQ ID NO: 51011 - DNA, 20 bp, synthetic construct
  misc_feature 1..20: note = chemically synthesized
  source 1..20: mol_type = other DNA
gagcttgaggagagcttgag

SEQ ID NO: 51012 - DNA, 20 bp, synthetic construct
  misc_feature 1..20: note = chemically synthesized
  source 1..20: mol_type = other DNA
gcttgaggagagcttgagga

SEQ ID NO: 51013 - DNA, 20 bp, synthetic construct
  misc_feature 1..20: note = chemically synthesized
  source 1..20: mol_type = other DNA
tgaggagagcttgaggagag

SEQ ID NO: 51014 - DNA, 20 bp, synthetic construct
  misc_feature 1..20: note = chemically synthesized
  source 1..20: mol_type = other DNA
gaggagagcttgaggagagc

SEQ ID NO: 51015 - DNA, 20 bp, synthetic construct
  misc_feature 1..20: note = chemically synthesized
  source 1..20: mol_type = other DNA
agagcttgaggagagcagga

SEQ ID NO: 51016 - DNA, 20 bp, synthetic construct
  misc_feature 1..20: note = chemically synthesized
  source 1..20: mol_type = other DNA
gagcttgaggagagcaggaa

SEQ ID NO: 51017 - DNA, 20 bp, synthetic construct
  misc_feature 1..20: note = chemically synthesized
  source 1..20: mol_type = other DNA
cttgaggagagcaggaaagg

SEQ ID NO: 51018 - DNA, 20 bp, synthetic construct
  misc_feature 1..20: note = chemically synthesized
  source 1..20: mol_type = other DNA
ttgaggagagcaggaaaggt

SEQ ID NO: 51019 - DNA, 20 bp, synthetic construct
  misc_feature 1..20: note = chemically synthesized
  source 1..20: mol_type = other DNA
cattgctgctgctgctcact

SEQ ID NO: 51020 - DNA, 20 bp, synthetic construct
  misc_feature 1..20: note = chemically synthesized
  source 1..20: mol_type = other DNA
ctgctgctcactcagttcca

SEQ ID NO: 51021 - DNA, 20 bp, synthetic construct
  misc_feature 1..20: note = chemically synthesized
  source 1..20: mol_type = other DNA
tgctgctcactcagttccac

SEQ ID NO: 51022 - DNA, 20 bp, synthetic construct
  misc_feature 1..20: note = chemically synthesized
  source 1..20: mol_type = other DNA
tgctcactcagttccacagg

SEQ ID NO: 51023 - DNA, 20 bp, synthetic construct
  misc_feature 1..20: note = chemically synthesized
  source 1..20: mol_type = other DNA
gctcactcagttccacaggt

SEQ ID NO: 51024 - DNA, 20 bp, synthetic construct
  misc_feature 1..20: note = chemically synthesized
  source 1..20: mol_type = other DNA
tcactcagttccacaggtgg

SEQ ID NO: 51025 - DNA, 20 bp, synthetic construct
  misc_feature 1..20: note = chemically synthesized
  source 1..20: mol_type = other DNA
cactcagttccacaggtggg

SEQ ID NO: 51026 - DNA, 20 bp, synthetic construct
  misc_feature 1..20: note = chemically synthesized
  source 1..20: mol_type = other DNA
actcagttccacaggtggga

SEQ ID NO: 51027 - DNA, 20 bp, synthetic construct
  misc_feature 1..20: note = chemically synthesized
  source 1..20: mol_type = other DNA
agttccacaggtgggaggga

SEQ ID NO: 51028 - DNA, 20 bp, synthetic construct
  misc_feature 1..20: note = chemically synthesized
  source 1..20: mol_type = other DNA
tccacaggtgggagggacag

SEQ ID NO: 51029 - DNA, 20 bp, synthetic construct
  misc_feature 1..20: note = chemically synthesized
  source 1..20: mol_type = other DNA
ccacaggtgggagggacagc

SEQ ID NO: 51030 - DNA, 20 bp, synthetic construct
  misc_feature 1..20: note = chemically synthesized
  source 1..20: mol_type = other DNA
cacaggtgggagggacagca

SEQ ID NO: 51031 - DNA, 20 bp, synthetic construct
  misc_feature 1..20: note = chemically synthesized
  source 1..20: mol_type = other DNA
gtgggagggacagcagggct

SEQ ID NO: 51032 - DNA, 20 bp, synthetic construct
  misc_feature 1..20: note = chemically synthesized
  source 1..20: mol_type = other DNA
gggagggacagcagggctta

SEQ ID NO: 51033 - DNA, 20 bp, synthetic construct
  misc_feature 1..20: note = chemically synthesized
  source 1..20: mol_type = other DNA
agggacagcagggcttagag

SEQ ID NO: 51034 - DNA, 20 bp, synthetic construct
  misc_feature 1..20: note = chemically synthesized
  source 1..20: mol_type = other DNA
gggacagcagggcttagagt

SEQ ID NO: 51035 - DNA, 20 bp, synthetic construct
  misc_feature 1..20: note = chemically synthesized
  source 1..20: mol_type = other DNA
ggacagcagggcttagagtg

SEQ ID NO: 51036 - DNA, 20 bp, synthetic construct
  misc_feature 1..20: note = chemically synthesized
  source 1..20: mol_type = other DNA
gacagcagggcttagagtgg

SEQ ID NO: 51037 - DNA, 20 bp, synthetic construct
  misc_feature 1..20: note = chemically synthesized
  source 1..20: mol_type = other DNA
ttagagtgggggtcattgtg

SEQ ID NO: 51038 - DNA, 20 bp, synthetic construct
  misc_feature 1..20: note = chemically synthesized
  source 1..20: mol_type = other DNA
agtgggggtcattgtgcaga

SEQ ID NO: 51039 - DNA, 20 bp, synthetic construct
  misc_feature 1..20: note = chemically synthesized
  source 1..20: mol_type = other DNA
gtgggggtcattgtgcagat

SEQ ID NO: 51040 - DNA, 20 bp, synthetic construct
  misc_feature 1..20: note = chemically synthesized
  source 1..20: mol_type = other DNA
attgtgcagatgggaaaaca

SEQ ID NO: 51041 - DNA, 20 bp, synthetic construct
  misc_feature 1..20: note = chemically synthesized
  source 1..20: mol_type = other DNA
ttgtgcagatgggaaaacaa

SEQ ID NO: 51042 - DNA, 20 bp, synthetic construct
  misc_feature 1..20: note = chemically synthesized
  source 1..20: mol_type = other DNA
cagatgggaaaacaaaggcc

SEQ ID NO: 51043 - DNA, 20 bp, synthetic construct
  misc_feature 1..20: note = chemically synthesized
  source 1..20: mol_type = other DNA
gatgggaaaacaaaggccca

SEQ ID NO: 51044 - DNA, 20 bp, synthetic construct
  misc_feature 1..20: note = chemically synthesized
  source 1..20: mol_type = other DNA
tgggaaaacaaaggcccaga

SEQ ID NO: 51045 - DNA, 20 bp, synthetic construct
  misc_feature 1..20: note = chemically synthesized
  source 1..20: mol_type = other DNA
gggaaaacaaaggcccagag

SEQ ID NO: 51046 - DNA, 20 bp, synthetic construct
  misc_feature 1..20: note = chemically synthesized
  source 1..20: mol_type = other DNA
ggaaaacaaaggcccagaga

SEQ ID NO: 51047 - DNA, 20 bp, synthetic construct
  misc_feature 1..20: note = chemically synthesized
  source 1..20: mol_type = other DNA
gaaaacaaaggcccagagag

SEQ ID NO: 51048 - DNA, 20 bp, synthetic construct
  misc_feature 1..20: note = chemically synthesized
  source 1..20: mol_type = other DNA
aacaaaggcccagagagggg

SEQ ID NO: 51049 - DNA, 20 bp, synthetic construct
  misc_feature 1..20: note = chemically synthesized
  source 1..20: mol_type = other DNA
cagagaggggaagaaatgcc

SEQ ID NO: 51050 - DNA, 20 bp, synthetic construct
  misc_feature 1..20: note = chemically synthesized
  source 1..20: mol_type = other DNA
agagaggggaagaaatgccc

SEQ ID NO: 51051 - DNA, 20 bp, synthetic construct
  misc_feature 1..20: note = chemically synthesized
  source 1..20: mol_type = other DNA
agaggggaagaaatgcccag

SEQ ID NO: 51052 - DNA, 20 bp, synthetic construct
  misc_feature 1..20: note = chemically synthesized
  source 1..20: mol_type = other DNA
agaaatgcccaggagctacc

SEQ ID NO: 51053 - DNA, 20 bp, synthetic construct
  misc_feature 1..20: note = chemically synthesized
  source 1..20: mol_type = other DNA
gaaatgcccaggagctaccg

SEQ ID NO: 51054 - DNA, 20 bp, synthetic construct
  misc_feature 1..20: note = chemically synthesized
  source 1..20: mol_type = other DNA
aaatgcccaggagctaccga

SEQ ID NO: 51055 - DNA, 20 bp, synthetic construct
  misc_feature 1..20: note = chemically synthesized
  source 1..20: mol_type = other DNA
tgcccaggagctaccgaggg

SEQ ID NO: 51056 - DNA, 20 bp, synthetic construct
  misc_feature 1..20: note = chemically synthesized
  source 1..20: mol_type = other DNA
gcccaggagctaccgagggc

SEQ ID NO: 51057 - DNA, 20 bp, synthetic construct
  misc_feature 1..20: note = chemically synthesized
  source 1..20: mol_type = other DNA
agggcaggcgacctcaacca

SEQ ID NO: 51058 - DNA, 20 bp, synthetic construct
  misc_feature 1..20: note = chemically synthesized
  source 1..20: mol_type = other DNA
aggcgacctcaaccacagcc

SEQ ID NO: 51059 - DNA, 20 bp, synthetic construct
  misc_feature 1..20: note = chemically synthesized
  source 1..20: mol_type = other DNA
cctcaaccacagcccagtgc

SEQ ID NO: 51060 - DNA, 20 bp, synthetic construct
  misc_feature 1..20: note = chemically synthesized
  source 1..20: mol_type = other DNA
tcaaccacagcccagtgctg

SEQ ID NO: 51061 - DNA, 20 bp, synthetic construct
  misc_feature 1..20: note = chemically synthesized
  source 1..20: mol_type = other DNA
cagcccagtgctggagctgt

SEQ ID NO: 51062 - DNA, 20 bp, synthetic construct
  misc_feature 1..20: note = chemically synthesized
  source 1..20: mol_type = other DNA
cccagtgctggagctgtgag

SEQ ID NO: 51063 - DNA, 20 bp, synthetic construct
  misc_feature 1..20: note = chemically synthesized
  source 1..20: mol_type = other DNA
gctggagctgtgagtggatg

SEQ ID NO: 51064 - DNA, 20 bp, synthetic construct
  misc_feature 1..20: note = chemically synthesized
  source 1..20: mol_type = other DNA
tggagctgtgagtggatgta

SEQ ID NO: 51065 - DNA, 20 bp, synthetic construct
  misc_feature 1..20: note = chemically synthesized
  source 1..20: mol_type = other DNA
agctgtgagtggatgtagag

SEQ ID NO: 51066 - DNA, 20 bp, synthetic construct
  misc_feature 1..20: note = chemically synthesized
  source 1..20: mol_type = other DNA
tgtgagtggatgtagagcag

SEQ ID NO: 51067 - DNA, 20 bp, synthetic construct
  misc_feature 1..20: note = chemically synthesized
  source 1..20: mol_type = other DNA
agagcagcggaatatccatt

SEQ ID NO: 51068 - DNA, 20 bp, synthetic construct
  misc_feature 1..20: note = chemically synthesized
  source 1..20: mol_type = other DNA
cagcggaatatccattcagc

SEQ ID NO: 51069 - DNA, 20 bp, synthetic construct
  misc_feature 1..20: note = chemically synthesized
  source 1..20: mol_type = other DNA
gaatatccattcagccagct

SEQ ID NO: 51070 - DNA, 20 bp, synthetic construct
  misc_feature 1..20: note = chemically synthesized
  source 1..20: mol_type = other DNA
aatatccattcagccagctc

SEQ ID NO: 51071 - DNA, 20 bp, synthetic construct
  misc_feature 1..20: note = chemically synthesized
  source 1..20: mol_type = other DNA
atatccattcagccagctca

SEQ ID NO: 51072 - DNA, 20 bp, synthetic construct
  misc_feature 1..20: note = chemically synthesized
  source 1..20: mol_type = other DNA
tatccattcagccagctcag

SEQ ID NO: 51073 - DNA, 20 bp, synthetic construct
  misc_feature 1..20: note = chemically synthesized
  source 1..20: mol_type = other DNA
ccattcagccagctcagggg

SEQ ID NO: 51074 - DNA, 20 bp, synthetic construct
  misc_feature 1..20: note = chemically synthesized
  source 1..20: mol_type = other DNA
cattcagccagctcagggga

SEQ ID NO: 51075 - DNA, 20 bp, synthetic construct
  misc_feature 1..20: note = chemically synthesized
  source 1..20: mol_type = other DNA
cagccagctcaggggaagga

SEQ ID NO: 51076 - DNA, 20 bp, synthetic construct
  misc_feature 1..20: note = chemically synthesized
  source 1..20: mol_type = other DNA
agccagctcaggggaaggac

SEQ ID NO: 51077 - DNA, 20 bp, synthetic construct
  misc_feature 1..20: note = chemically synthesized
  source 1..20: mol_type = other DNA
gccagctcaggggaaggaca

SEQ ID NO: 51078 - DNA, 20 bp, synthetic construct
  misc_feature 1..20: note = chemically synthesized
  source 1..20: mol_type = other DNA
ccagctcaggggaaggacag

SEQ ID NO: 51079 - DNA, 20 bp, synthetic construct
  misc_feature 1..20: note = chemically synthesized
  source 1..20: mol_type = other DNA
ggggaaggacaggggccctg

SEQ ID NO: 51080 - DNA, 20 bp, synthetic construct
  misc_feature 1..20: note = chemically synthesized
  source 1..20: mol_type = other DNA
aaggacaggggccctgaagc

SEQ ID NO: 51081 - DNA, 20 bp, synthetic construct
  misc_feature 1..20: note = chemically synthesized
  source 1..20: mol_type = other DNA
aggacaggggccctgaagcc

SEQ ID NO: 51082 - DNA, 20 bp, synthetic construct
  misc_feature 1..20: note = chemically synthesized
  source 1..20: mol_type = other DNA
ggacaggggccctgaagcca

SEQ ID NO: 51083 - DNA, 20 bp, synthetic construct
  misc_feature 1..20: note = chemically synthesized
  source 1..20: mol_type = other DNA
gacaggggccctgaagccag

SEQ ID NO: 51084 - DNA, 20 bp, synthetic construct
  misc_feature 1..20: note = chemically synthesized
  source 1..20: mol_type = other DNA
ggggccctgaagccagggga

SEQ ID NO: 51085 - DNA, 20 bp, synthetic construct
  misc_feature 1..20: note = chemically synthesized
  source 1..20: mol_type = other DNA
ggccctgaagccaggggatg

SEQ ID NO: 51086 - DNA, 20 bp, synthetic construct
  misc_feature 1..20: note = chemically synthesized
  source 1..20: mol_type = other DNA
gaagccaggggatggagctg

SEQ ID NO: 51087 - DNA, 20 bp, synthetic construct
  misc_feature 1..20: note = chemically synthesized
  source 1..20: mol_type = other DNA
aagccaggggatggagctgc

SEQ ID NO: 51088 - DNA, 20 bp, synthetic construct
  misc_feature 1..20: note = chemically synthesized
  source 1..20: mol_type = other DNA
agccaggggatggagctgca

SEQ ID NO: 51089 - DNA, 20 bp, synthetic construct
  misc_feature 1..20: note = chemically synthesized
  source 1..20: mol_type = other DNA
caggggatggagctgcaggg

SEQ ID NO: 51090 - DNA, 20 bp, synthetic construct
  misc_feature 1..20: note = chemically synthesized
  source 1..20: mol_type = other DNA
aggggatggagctgcaggga

SEQ ID NO: 51091 - DNA, 20 bp, synthetic construct
  misc_feature 1..20: note = chemically synthesized
  source 1..20: mol_type = other DNA
ggggatggagctgcagggaa

SEQ ID NO: 51092 - DNA, 20 bp, synthetic construct
  misc_feature 1..20: note = chemically synthesized
  source 1..20: mol_type = other DNA
ggatggagctgcagggaagg

SEQ ID NO: 51093 - DNA, 20 bp, synthetic construct
  misc_feature 1..20: note = chemically synthesized
  source 1..20: mol_type = other DNA
gagctgcagggaagggagct

SEQ ID NO: 51094 - DNA, 20 bp, synthetic construct
  misc_feature 1..20: note = chemically synthesized
  source 1..20: mol_type = other DNA
gctgcagggaagggagctca

SEQ ID NO: 51095 - DNA, 20 bp, synthetic construct
  misc_feature 1..20: note = chemically synthesized
  source 1..20: mol_type = other DNA
tgcagggaagggagctcaga

SEQ ID NO: 51096 - DNA, 20 bp, synthetic construct
  misc_feature 1..20: note = chemically synthesized
  source 1..20: mol_type = other DNA
agggaagggagctcagagag

SEQ ID NO: 51097 - DNA, 20 bp, synthetic construct
  misc_feature 1..20: note = chemically synthesized
  source 1..20: mol_type = other DNA
gggaagggagctcagagaga

SEQ ID NO: 51098 - DNA, 20 bp, synthetic construct
  misc_feature 1..20: note = chemically synthesized
  source 1..20: mol_type = other DNA
ggaagggagctcagagagaa

SEQ ID NO: 51099 - DNA, 20 bp, synthetic construct
  misc_feature 1..20: note = chemically synthesized
  source 1..20: mol_type = other DNA
gaagggagctcagagagaag

SEQ ID NO: 51100 - DNA, 20 bp, synthetic construct
  misc_feature 1..20: note = chemically synthesized
  source 1..20: mol_type = other DNA
agggagctcagagagaaggg

SEQ ID NO: 51101 - DNA, 20 bp, synthetic construct
  misc_feature 1..20: note = chemically synthesized
  source 1..20: mol_type = other DNA
gggagctcagagagaagggg

SEQ ID NO: 51102 - DNA, 20 bp, synthetic construct
  misc_feature 1..20: note = chemically synthesized
  source 1..20: mol_type = other DNA
ggagctcagagagaagggga

SEQ ID NO: 51103 - DNA, 20 bp, synthetic construct
  misc_feature 1..20: note = chemically synthesized
  source 1..20: mol_type = other DNA
gagctcagagagaaggggag

SEQ ID NO: 51104 - DNA, 20 bp, synthetic construct
  misc_feature 1..20: note = chemically synthesized
  source 1..20: mol_type = other DNA
gctcagagagaaggggaggg

SEQ ID NO: 51105 - DNA, 20 bp, synthetic construct
  misc_feature 1..20: note = chemically synthesized
  source 1..20: mol_type = other DNA
agagaaggggaggggagtct

SEQ ID NO: 51106 - DNA, 20 bp, synthetic construct
  misc_feature 1..20: note = chemically synthesized
  source 1..20: mol_type = other DNA
aggggaggggagtctgagct

SEQ ID NO: 51107 - DNA, 20 bp, synthetic construct
  misc_feature 1..20: note = chemically synthesized
  source 1..20: mol_type = other DNA
ctcagtttcccgctgcctga

SEQ ID NO: 51108 - DNA, 20 bp, synthetic construct
  misc_feature 1..20: note = chemically synthesized
  source 1..20: mol_type = other DNA
tcagtttcccgctgcctgaa

SEQ ID NO: 51109 - DNA, 20 bp, synthetic construct
  misc_feature 1..20: note = chemically synthesized
  source 1..20: mol_type = other DNA
agtttcccgctgcctgaaag

SEQ ID NO: 51110 - DNA, 20 bp, synthetic construct
  misc_feature 1..20: note = chemically synthesized
  source 1..20: mol_type = other DNA
gtttcccgctgcctgaaagg

SEQ ID NO: 51111 - DNA, 20 bp, synthetic construct
  misc_feature 1..20: note = chemically synthesized
  source 1..20: mol_type = other DNA
tttcccgctgcctgaaagga

SEQ ID NO: 51112 - DNA, 20 bp, synthetic construct
  misc_feature 1..20: note = chemically synthesized
  source 1..20: mol_type = other DNA
cccgctgcctgaaaggaggg

SEQ ID NO: 51113 - DNA, 20 bp, synthetic construct
  misc_feature 1..20: note = chemically synthesized
  source 1..20: mol_type = other DNA
ggtggtacctactcccttca

SEQ ID NO: 51114 - DNA, 20 bp, synthetic construct
  misc_feature 1..20: note = chemically synthesized
  source 1..20: mol_type = other DNA
gtggtacctactcccttcac

SEQ ID NO: 51115 - DNA, 20 bp, synthetic construct
  misc_feature 1..20: note = chemically synthesized
  source 1..20: mol_type = other DNA
tggtacctactcccttcaca

SEQ ID NO: 51116 - DNA, 20 bp, synthetic construct
  misc_feature 1..20: note = chemically synthesized
  source 1..20: mol_type = other DNA
ccttcacagggtaactgaat

SEQ ID NO: 51117 - DNA, 20 bp, synthetic construct
  misc_feature 1..20: note = chemically synthesized
  source 1..20: mol_type = other DNA
ttcacagggtaactgaatga

SEQ ID NO: 51118 - DNA, 20 bp, synthetic construct
  misc_feature 1..20: note = chemically synthesized
  source 1..20: mol_type = other DNA
taactgaatgagagactgcc

SEQ ID NO: 51119 - DNA, 20 bp, synthetic construct
  misc_feature 1..20: note = chemically synthesized
  source 1..20: mol_type = other DNA
actgaatgagagactgcctg

SEQ ID NO: 51120 - DNA, 20 bp, synthetic construct
  misc_feature 1..20: note = chemically synthesized
  source 1..20: mol_type = other DNA
ctgaatgagagactgcctgg

SEQ ID NO: 51121 - DNA, 20 bp, synthetic construct
  misc_feature 1..20: note = chemically synthesized
  source 1..20: mol_type = other DNA
atgagagactgcctggagga

SEQ ID NO: 51122 - DNA, 20 bp, synthetic construct
  misc_feature 1..20: note = chemically synthesized
  source 1..20: mol_type = other DNA
tgcctggaggaaagctcttc

SEQ ID NO: 51123 - DNA, 20 bp, synthetic construct
  misc_feature 1..20: note = chemically synthesized
  source 1..20: mol_type = other DNA
ggaggaaagctcttcaagtg

SEQ ID NO: 51124 - DNA, 20 bp, synthetic construct
  misc_feature 1..20: note = chemically synthesized
  source 1..20: mol_type = other DNA
aagtgtggcccaccccaccc

SEQ ID NO: 51125 - DNA, 20 bp, synthetic construct
  misc_feature 1..20: note = chemically synthesized
  source 1..20: mol_type = other DNA
ccaccccaccccagtgacac

SEQ ID NO: 51126 - DNA, 20 bp, synthetic construct
  misc_feature 1..20: note = chemically synthesized
  source 1..20: mol_type = other DNA
agtgacaccagcccctgaca

SEQ ID NO: 51127 - DNA, 20 bp, synthetic construct
  misc_feature 1..20: note = chemically synthesized
  source 1..20: mol_type = other DNA
gtgacaccagcccctgacac

SEQ ID NO: 51128 - DNA, 20 bp, synthetic construct
  misc_feature 1..20: note = chemically synthesized
  source 1..20: mol_type = other DNA
tgacaccagcccctgacacg

SEQ ID NO: 51129 - DNA, 20 bp, synthetic construct
  misc_feature 1..20: note = chemically synthesized
  source 1..20: mol_type = other DNA
gacaccagcccctgacacgg

SEQ ID NO: 51130 - DNA, 20 bp, synthetic construct
  misc_feature 1..20: note = chemically synthesized
  source 1..20: mol_type = other DNA
caccagcccctgacacgggg

SEQ ID NO: 51131 - DNA, 20 bp, synthetic construct
  misc_feature 1..20: note = chemically synthesized
  source 1..20: mol_type = other DNA
accagcccctgacacggggg

SEQ ID NO: 51132 - DNA, 20 bp, synthetic construct
  misc_feature 1..20: note = chemically synthesized
  source 1..20: mol_type = other DNA
ccagcccctgacacggggga

SEQ ID NO: 51133 - DNA, 20 bp, synthetic construct
  misc_feature 1..20: note = chemically synthesized
  source 1..20: mol_type = other DNA
agcccctgacacgggggagg

SEQ ID NO: 51134 - DNA, 20 bp, synthetic construct
  misc_feature 1..20: note = chemically synthesized
  source 1..20: mol_type = other DNA
gcccctgacacgggggaggg

SEQ ID NO: 51135 - DNA, 20 bp, synthetic construct
  misc_feature 1..20: note = chemically synthesized
  source 1..20: mol_type = other DNA
cccctgacacgggggaggga

SEQ ID NO: 51136 - DNA, 20 bp, synthetic construct
  misc_feature 1..20: note = chemically synthesized
  source 1..20: mol_type = other DNA
ctgacacgggggagggaggg

SEQ ID NO: 51137 - DNA, 20 bp, synthetic construct
  misc_feature 1..20: note = chemically synthesized
  source 1..20: mol_type = other DNA
cgggggagggagggcagcat

SEQ ID NO: 51138 - DNA, 20 bp, synthetic construct
  misc_feature 1..20: note = chemically synthesized
  source 1..20: mol_type = other DNA
gggggagggagggcagcatc

SEQ ID NO: 51139 - DNA, 20 bp, synthetic construct
  misc_feature 1..20: note = chemically synthesized
  source 1..20: mol_type = other DNA
gggagggagggcagcatcag

SEQ ID NO: 51140 - DNA, 20 bp, synthetic construct
  misc_feature 1..20: note = chemically synthesized
  source 1..20: mol_type = other DNA
ggagggagggcagcatcagg

SEQ ID NO: 51141 - DNA, 20 bp, synthetic construct
  misc_feature 1..20: note = chemically synthesized
  source 1..20: mol_type = other DNA
gagggagggcagcatcagga

SEQ ID NO: 51142 - DNA, 20 bp, synthetic construct
  misc_feature 1..20: note = chemically synthesized
  source 1..20: mol_type = other DNA
agggagggcagcatcaggag

SEQ ID NO: 51143 - DNA, 20 bp, synthetic construct
  misc_feature 1..20: note = chemically synthesized
  source 1..20: mol_type = other DNA
cagcatcaggaggggctttc

SEQ ID NO: 51144 - DNA, 20 bp, synthetic construct
  misc_feature 1..20: note = chemically synthesized
  source 1..20: mol_type = other DNA
agcatcaggaggggctttct

SEQ ID NO: 51145 - DNA, 20 bp, synthetic construct
  misc_feature 1..20: note = chemically synthesized
  source 1..20: mol_type = other DNA
aggggctttctgggcacacc

SEQ ID NO: 51146 - DNA, 20 bp, synthetic construct
  misc_feature 1..20: note = chemically synthesized
  source 1..20: mol_type = other DNA
cacacccagtacccgtctct

SEQ ID NO: 51147 - DNA, 20 bp, synthetic construct
  misc_feature 1..20: note = chemically synthesized
  source 1..20: mol_type = other DNA
ctgttgcattttaatcctca

SEQ ID NO: 51148 - DNA, 20 bp, synthetic construct
  misc_feature 1..20: note = chemically synthesized
  source 1..20: mol_type = other DNA
ttgcattttaatcctcacag

SEQ ID NO: 51149 - DNA, 20 bp, synthetic construct
  misc_feature 1..20: note = chemically synthesized
  source 1..20: mol_type = other DNA
aatcctcacagcagctcaac

SEQ ID NO: 51150 - DNA, 20 bp, synthetic construct
  misc_feature 1..20: note = chemically synthesized
  source 1..20: mol_type = other DNA
atcctcacagcagctcaaca

SEQ ID NO: 51151 - DNA, 20 bp, synthetic construct
  misc_feature 1..20: note = chemically synthesized
  source 1..20: mol_type = other DNA
ccgtcaccatccccatttta

SEQ ID NO: 51152 - DNA, 20 bp, synthetic construct
  misc_feature 1..20: note = chemically synthesized
  source 1..20: mol_type = other DNA
caccatccccattttacaga

SEQ ID NO: 51153 - DNA, 20 bp, synthetic construct
  misc_feature 1..20: note = chemically synthesized
  source 1..20: mol_type = other DNA
accatccccattttacagat

SEQ ID NO: 51154 - DNA, 20 bp, synthetic construct
  misc_feature 1..20: note = chemically synthesized
  source 1..20: mol_type = other DNA
ccatccccattttacagata

SEQ ID NO: 51155 - DNA, 20 bp, synthetic construct
  misc_feature 1..20: note = chemically synthesized
  source 1..20: mol_type = other DNA
attttacagatagggaaatt

SEQ ID NO: 51156 - DNA, 20 bp, synthetic construct
  misc_feature 1..20: note = chemically synthesized
  source 1..20: mol_type = other DNA
ttttacagatagggaaattg

SEQ ID NO: 51157 - DNA, 20 bp, synthetic construct
  misc_feature 1..20: note = chemically synthesized
  source 1..20: mol_type = other DNA
cagatagggaaattgaggct

SEQ ID NO: 51158 - DNA, 20 bp, synthetic construct
  misc_feature 1..20: note = chemically synthesized
  source 1..20: mol_type = other DNA
gatagggaaattgaggctcg

SEQ ID NO: 51159 - DNA, 20 bp, synthetic construct
  misc_feature 1..20: note = chemically synthesized
  source 1..20: mol_type = other DNA
agggaaattgaggctcggag

SEQ ID NO: 51160 - DNA, 20 bp, synthetic construct
  misc_feature 1..20: note = chemically synthesized
  source 1..20: mol_type = other DNA
agcggttaaacaactcacct

SEQ ID NO: 51161 - DNA, 20 bp, synthetic construct
  misc_feature 1..20: note = chemically synthesized
  source 1..20: mol_type = other DNA
gcggttaaacaactcacctg

SEQ ID NO: 51162 - DNA, 20 bp, synthetic construct
  misc_feature 1..20: note = chemically synthesized
  source 1..20: mol_type = other DNA
acaactcacctgaggcctca

SEQ ID NO: 51163 - DNA, 20 bp, synthetic construct
  misc_feature 1..20: note = chemically synthesized
  source 1..20: mol_type = other DNA
ctcacctgaggcctcacagc

SEQ ID NO: 51164 - DNA, 20 bp, synthetic construct
  misc_feature 1..20: note = chemically synthesized
  source 1..20: mol_type = other DNA
cctgaggcctcacagccagt

SEQ ID NO: 51165 - DNA, 20 bp, synthetic construct
  misc_feature 1..20: note = chemically synthesized
  source 1..20: mol_type = other DNA
gaggcctcacagccagtaag

SEQ ID NO: 51166 - DNA, 20 bp, synthetic construct
  misc_feature 1..20: note = chemically synthesized
  source 1..20: mol_type = other DNA
aggcctcacagccagtaagt

SEQ ID NO: 51167 - DNA, 20 bp, synthetic construct
  misc_feature 1..20: note = chemically synthesized
  source 1..20: mol_type = other DNA
cagccagtaagtgggttccc

SEQ ID NO: 51168 - DNA, 20 bp, synthetic construct
  misc_feature 1..20: note = chemically synthesized
  source 1..20: mol_type = other DNA
cctggtctgaatgtgtgtgc

SEQ ID NO: 51169 - DNA, 20 bp, synthetic construct
  misc_feature 1..20: note = chemically synthesized
  source 1..20: mol_type = other DNA
tggtctgaatgtgtgtgctg

SEQ ID NO: 51170 - DNA, 20 bp, synthetic construct
  misc_feature 1..20: note = chemically synthesized
  source 1..20: mol_type = other DNA
ggtctgaatgtgtgtgctgg

SEQ ID NO: 51171 - DNA, 20 bp, synthetic construct
  misc_feature 1..20: note = chemically synthesized
  source 1..20: mol_type = other DNA
gtgtgtgctggaggatcctg

SEQ ID NO: 51172 - DNA, 20 bp, synthetic construct
  misc_feature 1..20: note = chemically synthesized
  source 1..20: mol_type = other DNA
tgtgtgctggaggatcctgt

SEQ ID NO: 51173 - DNA, 20 bp, synthetic construct
  misc_feature 1..20: note = chemically synthesized
  source 1..20: mol_type = other DNA
gatcctgtgggtcactcgcc

SEQ ID NO: 51174 - DNA, 20 bp, synthetic construct
  misc_feature 1..20: note = chemically synthesized
  source 1..20: mol_type = other DNA
cctgtgggtcactcgcctgg

SEQ ID NO: 51175 - DNA, 20 bp, synthetic construct
  misc_feature 1..20: note = chemically synthesized
  source 1..20: mol_type = other DNA
tgtgggtcactcgcctggta

SEQ ID NO: 51176 - DNA, 20 bp, synthetic construct
  misc_feature 1..20: note = chemically synthesized
  source 1..20: mol_type = other DNA
cactcgcctggtagagcccc

SEQ ID NO: 51177 - DNA, 20 bp, synthetic construct
  misc_feature 1..20: note = chemically synthesized
  source 1..20: mol_type = other DNA
actcgcctggtagagcccca

SEQ ID NO: 51178 - DNA, 20 bp, synthetic construct
  misc_feature 1..20: note = chemically synthesized
  source 1..20: mol_type = other DNA
cgcctggtagagccccaagg

SEQ ID NO: 51179 - DNA, 20 bp, synthetic construct
  misc_feature 1..20: note = chemically synthesized
  source 1..20: mol_type = other DNA
cctggtagagccccaaggtg

SEQ ID NO: 51180 - DNA, 20 bp, synthetic construct
  misc_feature 1..20: note = chemically synthesized
  source 1..20: mol_type = other DNA
ctggtagagccccaaggtgg

SEQ ID NO: 51181 - DNA, 20 bp, synthetic construct
  misc_feature 1..20: note = chemically synthesized
  source 1..20: mol_type = other DNA
ccccaaggtggaggcataaa

SEQ ID NO: 51182 - DNA, 20 bp, synthetic construct
  misc_feature 1..20: note = chemically synthesized
  source 1..20: mol_type = other DNA
cccaaggtggaggcataaat

SEQ ID NO: 51183 - DNA, 20 bp, synthetic construct
  misc_feature 1..20: note = chemically synthesized
  source 1..20: mol_type = other DNA
ggtggaggcataaatgggac

SEQ ID NO: 51184 - DNA, 20 bp, synthetic construct
  misc_feature 1..20: note = chemically synthesized
  source 1..20: mol_type = other DNA
taaatgggactggtgaatga

SEQ ID NO: 51185 - DNA, 20 bp, synthetic construct
  misc_feature 1..20: note = chemically synthesized
  source 1..20: mol_type = other DNA
atgggactggtgaatgacag

SEQ ID NO: 51186 - DNA, 20 bp, synthetic construct
  misc_feature 1..20: note = chemically synthesized
  source 1..20: mol_type = other DNA
tgggactggtgaatgacaga

SEQ ID NO: 51187 - DNA, 20 bp, synthetic construct
  misc_feature 1..20: note = chemically synthesized
  source 1..20: mol_type = other DNA
gggactggtgaatgacagaa

SEQ ID NO: 51188 - DNA, 20 bp, synthetic construct
  misc_feature 1..20: note = chemically synthesized
  source 1..20: mol_type = other DNA
ggactggtgaatgacagaag

SEQ ID NO: 51189 - DNA, 20 bp, synthetic construct
  misc_feature 1..20: note = chemically synthesized
  source 1..20: mol_type = other DNA
cactcatccattcactctgc

SEQ ID NO: 51190 - DNA, 20 bp, synthetic construct
  misc_feature 1..20: note = chemically synthesized
  source 1..20: mol_type = other DNA
attcactctgcaagtatcta

SEQ ID NO: 51191 - DNA, 20 bp, synthetic construct
  misc_feature 1..20: note = chemically synthesized
  source 1..20: mol_type = other DNA
agtatctacggcacgtacgc

SEQ ID NO: 51192 - DNA, 20 bp, synthetic construct
  misc_feature 1..20: note = chemically synthesized
  source 1..20: mol_type = other DNA
cggcacgtacgccagctccc

SEQ ID NO: 51193 - DNA, 20 bp, synthetic construct
  misc_feature 1..20: note = chemically synthesized
  source 1..20: mol_type = other DNA
cacgtacgccagctcccaag

SEQ ID NO: 51194 - DNA, 20 bp, synthetic construct
  misc_feature 1..20: note = chemically synthesized
  source 1..20: mol_type = other DNA
acgtacgccagctcccaagc

SEQ ID NO: 51195 - DNA, 20 bp, synthetic construct
  misc_feature 1..20: note = chemically synthesized
  source 1..20: mol_type = other DNA
ccagctcccaagcaggtttg

SEQ ID NO: 51196 - DNA, 20 bp, synthetic construct
  misc_feature 1..20: note = chemically synthesized
  source 1..20: mol_type = other DNA
cagctcccaagcaggtttgc

SEQ ID NO: 51197 - DNA, 20 bp, synthetic construct
  misc_feature 1..20: note = chemically synthesized
  source 1..20: mol_type = other DNA
aagcaggtttgcgggttgca

SEQ ID NO: 51198 - DNA, 20 bp, synthetic construct
  misc_feature 1..20: note = chemically synthesized
  source 1..20: mol_type = other DNA
caggtttgcgggttgcacag

SEQ ID NO: 51199 - DNA, 20 bp, synthetic construct
  misc_feature 1..20: note = chemically synthesized
  source 1..20: mol_type = other DNA
aggtttgcgggttgcacagc

SEQ ID NO: 51200 - DNA, 20 bp, synthetic construct
  misc_feature 1..20: note = chemically synthesized
  source 1..20: mol_type = other DNA
gcgggcgatgcaatctgatt

SEQ ID NO: 51201 - DNA, 20 bp, synthetic construct
  misc_feature 1..20: note = chemically synthesized
  source 1..20: mol_type = other DNA
cgggcgatgcaatctgattt

SEQ ID NO: 51202 - DNA, 20 bp, synthetic construct
  misc_feature 1..20: note = chemically synthesized
  source 1..20: mol_type = other DNA
caatctgatttaggctttta

SEQ ID NO: 51203 - DNA, 20 bp, synthetic construct
  misc_feature 1..20: note = chemically synthesized
  source 1..20: mol_type = other DNA
aatctgatttaggcttttaa

SEQ ID NO: 51204 - DNA, 20 bp, synthetic construct
  misc_feature 1..20: note = chemically synthesized
  source 1..20: mol_type = other DNA
atctgatttaggcttttaaa

SEQ ID NO: 51205 - DNA, 20 bp, synthetic construct
  misc_feature 1..20: note = chemically synthesized
  source 1..20: mol_type = other DNA
cttttaaagggattgcaatc

SEQ ID NO: 51206 - DNA, 20 bp, synthetic construct
  misc_feature 1..20: note = chemically synthesized
  source 1..20: mol_type = other DNA
ttaaagggattgcaatcaag

SEQ ID NO: 51207 - DNA, 20 bp, synthetic construct
  misc_feature 1..20: note = chemically synthesized
  source 1..20: mol_type = other DNA
taaagggattgcaatcaagt

SEQ ID NO: 51208 - DNA, 20 bp, synthetic construct
  misc_feature 1..20: note = chemically synthesized
  source 1..20: mol_type = other DNA
aaagggattgcaatcaagtg

SEQ ID NO: 51209 - DNA, 20 bp, synthetic construct
  misc_feature 1..20: note = chemically synthesized
  source 1..20: mol_type = other DNA
gcaatcaagtggggccccac

SEQ ID NO: 51210 - DNA, 20 bp, synthetic construct
  misc_feature 1..20: note = chemically synthesized
  source 1..20: mol_type = other DNA
cctcccctcccctccacccc

SEQ ID NO: 51211 - DNA, 20 bp, synthetic construct
  misc_feature 1..20: note = chemically synthesized
  source 1..20: mol_type = other DNA
cccctcccctccacccccag

SEQ ID NO: 51212 - DNA, 20 bp, synthetic construct
  misc_feature 1..20: note = chemically synthesized
  source 1..20: mol_type = other DNA
tccacccccagcagtctcca

SEQ ID NO: 51213 - DNA, 20 bp, synthetic construct
  misc_feature 1..20: note = chemically synthesized
  source 1..20: mol_type = other DNA
ccacccccagcagtctccaa

SEQ ID NO: 51214 - DNA, 20 bp, synthetic construct
  misc_feature 1..20: note = chemically synthesized
  source 1..20: mol_type = other DNA
ccaaaggcctccaacaaccc

SEQ ID NO: 51215 - DNA, 20 bp, synthetic construct
  misc_feature 1..20: note = chemically synthesized
  source 1..20: mol_type = other DNA
aaaggcctccaacaacccca

SEQ ID NO: 51216 - DNA, 20 bp, synthetic construct
  misc_feature 1..20: note = chemically synthesized
  source 1..20: mol_type = other DNA
ggcctccaacaaccccagag

SEQ ID NO: 51217 - DNA, 20 bp, synthetic construct
  misc_feature 1..20: note = chemically synthesized
  source 1..20: mol_type = other DNA
gcctccaacaaccccagagt

SEQ ID NO: 51218 - DNA, 20 bp, synthetic construct
  misc_feature 1..20: note = chemically synthesized
  source 1..20: mol_type = other DNA
cctccaacaaccccagagtg

SEQ ID NO: 51219 - DNA, 20 bp, synthetic construct
  misc_feature 1..20: note = chemically synthesized
  source 1..20: mol_type = other DNA
ctccaacaaccccagagtgg

SEQ ID NO: 51220 - DNA, 20 bp, synthetic construct
  misc_feature 1..20: note = chemically synthesized
  source 1..20: mol_type = other DNA
gagtgggggccatgtatcca

SEQ ID NO: 51221 - DNA, 20 bp, synthetic construct
  misc_feature 1..20: note = chemically synthesized
  source 1..20: mol_type = other DNA
catgtatccaaagaaactcc

SEQ ID NO: 51222 - DNA, 20 bp, synthetic construct
  misc_feature 1..20: note = chemically synthesized
  source 1..20: mol_type = other DNA
aagaaactccaagctgtata

SEQ ID NO: 51223 - DNA, 20 bp, synthetic construct
  misc_feature 1..20: note = chemically synthesized
  source 1..20: mol_type = other DNA
aagctgtatacggatcacac

SEQ ID NO: 51224 - DNA, 20 bp, synthetic construct
  misc_feature 1..20: note = chemically synthesized
  source 1..20: mol_type = other DNA
tacggatcacactggttttc

SEQ ID NO: 51225 - DNA, 20 bp, synthetic construct
  misc_feature 1..20: note = chemically synthesized
  source 1..20: mol_type = other DNA
acggatcacactggttttcc

SEQ ID NO: 51226 - DNA, 20 bp, synthetic construct
  misc_feature 1..20: note = chemically synthesized
  source 1..20: mol_type = other DNA
ggatcacactggttttccag

SEQ ID NO: 51227 - DNA, 20 bp, synthetic construct
  misc_feature 1..20: note = chemically synthesized
  source 1..20: mol_type = other DNA
tggttttccaggagcaaaaa

SEQ ID NO: 51228 - DNA, 20 bp, synthetic construct
  misc_feature 1..20: note = chemically synthesized
  source 1..20: mol_type = other DNA
tccaggagcaaaaacagaaa

SEQ ID NO: 51229 - DNA, 20 bp, synthetic construct
  misc_feature 1..20: note = chemically synthesized
  source 1..20: mol_type = other DNA
ccaggagcaaaaacagaaac

SEQ ID NO: 51230 - DNA, 20 bp, synthetic construct
  misc_feature 1..20: note = chemically synthesized
  source 1..20: mol_type = other DNA
gcaaaaacagaaacaggcct

SEQ ID NO: 51231 - DNA, 20 bp, synthetic construct
  misc_feature 1..20: note = chemically synthesized
  source 1..20: mol_type = other DNA
caaaaacagaaacaggcctg

SEQ ID NO: 51232 - DNA, 20 bp, synthetic construct
  misc_feature 1..20: note = chemically synthesized
  source 1..20: mol_type = other DNA
aacagaaacaggcctgaggc

SEQ ID NO: 51233 - DNA, 20 bp, synthetic construct
  misc_feature 1..20: note = chemically synthesized
  source 1..20: mol_type = other DNA
attgaacctcctcctgctct

SEQ ID NO: 51234 - DNA, 20 bp, synthetic construct
  misc_feature 1..20: note = chemically synthesized
  source 1..20: mol_type = other DNA
gaacctcctcctgctctgag

SEQ ID NO: 51235 - DNA, 20 bp, synthetic construct
  misc_feature 1..20: note = chemically synthesized
  source 1..20: mol_type = other DNA
tcctcctgctctgagcagcc

SEQ ID NO: 51236 - DNA, 20 bp, synthetic construct
  misc_feature 1..20: note = chemically synthesized
  source 1..20: mol_type = other DNA
cctcctgctctgagcagcct

SEQ ID NO: 51237 - DNA, 20 bp, synthetic construct
  misc_feature 1..20: note = chemically synthesized
  source 1..20: mol_type = other DNA
ctcctgctctgagcagcctg

SEQ ID NO: 51238 - DNA, 20 bp, synthetic construct
  misc_feature 1..20: note = chemically synthesized
  source 1..20: mol_type = other DNA
tcctgctctgagcagcctgg

SEQ ID NO: 51239 - DNA, 20 bp, synthetic construct
  misc_feature 1..20: note = chemically synthesized
  source 1..20: mol_type = other DNA
cctgctctgagcagcctggg

SEQ ID NO: 51240 - DNA, 20 bp, synthetic construct
  misc_feature 1..20: note = chemically synthesized
  source 1..20: mol_type = other DNA
gctctgagcagcctgggggg

SEQ ID NO: 51241 - DNA, 20 bp, synthetic construct
  misc_feature 1..20: note = chemically synthesized
  source 1..20: mol_type = other DNA
agcagcctggggggcagact

SEQ ID NO: 51242 - DNA, 20 bp, synthetic construct
  misc_feature 1..20: note = chemically synthesized
  source 1..20: mol_type = other DNA
agcctggggggcagactaag

SEQ ID NO: 51243 - DNA, 20 bp, synthetic construct
  misc_feature 1..20: note = chemically synthesized
  source 1..20: mol_type = other DNA
cctggggggcagactaagca

SEQ ID NO: 51244 - DNA, 20 bp, synthetic construct
  misc_feature 1..20: note = chemically synthesized
  source 1..20: mol_type = other DNA
ctggggggcagactaagcag

SEQ ID NO: 51245 - DNA, 20 bp, synthetic construct
  misc_feature 1..20: note = chemically synthesized
  source 1..20: mol_type = other DNA
tggggggcagactaagcaga

SEQ ID NO: 51246 - DNA, 20 bp, synthetic construct
  misc_feature 1..20: note = chemically synthesized
  source 1..20: mol_type = other DNA
agactaagcagagggctgtg

SEQ ID NO: 51247 - DNA, 20 bp, synthetic construct
  misc_feature 1..20: note = chemically synthesized
  source 1..20: mol_type = other DNA
gggctgtgcagacccacata

SEQ ID NO: 51248 - DNA, 20 bp, synthetic construct
  misc_feature 1..20: note = chemically synthesized
  source 1..20: mol_type = other DNA
gctgtgcagacccacataaa

SEQ ID NO: 51249 - DNA, 20 bp, synthetic construct
  misc_feature 1..20: note = chemically synthesized
  source 1..20: mol_type = other DNA
ataaagagcctactgtgtgc

SEQ ID NO: 51250 - DNA, 20 bp, synthetic construct
  misc_feature 1..20: note = chemically synthesized
  source 1..20: mol_type = other DNA
taaagagcctactgtgtgcc

SEQ ID NO: 51251 - DNA, 20 bp, synthetic construct
  misc_feature 1..20: note = chemically synthesized
  source 1..20: mol_type = other DNA
gtgtgccaggcacttcaccc

SEQ ID NO: 51252 - DNA, 20 bp, synthetic construct
  misc_feature 1..20: note = chemically synthesized
  source 1..20: mol_type = other DNA
tgtgccaggcacttcacccg

SEQ ID NO: 51253 - DNA, 20 bp, synthetic construct
  misc_feature 1..20: note = chemically synthesized
  source 1..20: mol_type = other DNA
cttcacccgaggcacttcac

SEQ ID NO: 51254 - DNA, 20 bp, synthetic construct
  misc_feature 1..20: note = chemically synthesized
  source 1..20: mol_type = other DNA
aggcacttcacaagcatgct

SEQ ID NO: 51255 - DNA, 20 bp, synthetic construct
  misc_feature 1..20: note = chemically synthesized
  source 1..20: mol_type = other DNA
ggcacttcacaagcatgctt

SEQ ID NO: 51256 - DNA, 20 bp, synthetic construct
  misc_feature 1..20: note = chemically synthesized
  source 1..20: mol_type = other DNA
gaatgaaacttccaactctt

SEQ ID NO: 51257 - DNA, 20 bp, synthetic construct
  misc_feature 1..20: note = chemically synthesized
  source 1..20: mol_type = other DNA
aatgaaacttccaactcttt

SEQ ID NO: 51258 - DNA, 20 bp, synthetic construct
  misc_feature 1..20: note = chemically synthesized
  source 1..20: mol_type = other DNA
acttccaactctttgggatg

SEQ ID NO: 51259 - DNA, 20 bp, synthetic construct
  misc_feature 1..20: note = chemically synthesized
  source 1..20: mol_type = other DNA
cttccaactctttgggatgc

SEQ ID NO: 51260 - DNA, 20 bp, synthetic construct
  misc_feature 1..20: note = chemically synthesized
  source 1..20: mol_type = other DNA
tctttgggatgcaggtgaaa

SEQ ID NO: 51261 - DNA, 20 bp, synthetic construct
  misc_feature 1..20: note = chemically synthesized
  source 1..20: mol_type = other DNA
gatgcaggtgaaacagttcc

SEQ ID NO: 51262 - DNA, 20 bp, synthetic construct
  misc_feature 1..20: note = chemically synthesized
  source 1..20: mol_type = other DNA
aggtgaaacagttcctggtt

SEQ ID NO: 51263 - DNA, 20 bp, synthetic construct
  misc_feature 1..20: note = chemically synthesized
  source 1..20: mol_type = other DNA
gtgaaacagttcctggttca

SEQ ID NO: 51264 - DNA, 20 bp, synthetic construct
  misc_feature 1..20: note = chemically synthesized
  source 1..20: mol_type = other DNA
gaaacagttcctggttcaga

SEQ ID NO: 51265 - DNA, 20 bp, synthetic construct
  misc_feature 1..20: note = chemically synthesized
  source 1..20: mol_type = other DNA
aaacagttcctggttcagag

SEQ ID NO: 51266 - DNA, 20 bp, synthetic construct
  misc_feature 1..20: note = chemically synthesized
  source 1..20: mol_type = other DNA
gttcctggttcagagaggtg

SEQ ID NO: 51267 - DNA, 20 bp, synthetic construct
  misc_feature 1..20: note = chemically synthesized
  source 1..20: mol_type = other DNA
cctggttcagagaggtgaag

SEQ ID NO: 51268 - DNA, 20 bp, synthetic construct
  misc_feature 1..20: note = chemically synthesized
  source 1..20: mol_type = other DNA
agaggtgaagcggcctgcct

SEQ ID NO: 51269 - DNA, 20 bp, synthetic construct
  misc_feature 1..20: note = chemically synthesized
  source 1..20: mol_type = other DNA
gaggtgaagcggcctgcctg

SEQ ID NO: 51270 - DNA, 20 bp, synthetic construct
  misc_feature 1..20: note = chemically synthesized
  source 1..20: mol_type = other DNA
gtgaagcggcctgcctgagg

SEQ ID NO: 51271 - DNA, 20 bp, synthetic construct
  misc_feature 1..20: note = chemically synthesized
  source 1..20: mol_type = other DNA
gcggcctgcctgaggcagca

SEQ ID NO: 51272 - DNA, 20 bp, synthetic construct
  misc_feature 1..20: note = chemically synthesized
  source 1..20: mol_type = other DNA
ggcagcacagctcttcttta

SEQ ID NO: 51273 - DNA, 20 bp, synthetic construct
  misc_feature 1..20: note = chemically synthesized
  source 1..20: mol_type = other DNA
cccacctctaccctgtctca

SEQ ID NO: 51274 - DNA, 20 bp, synthetic construct
  misc_feature 1..20: note = chemically synthesized
  source 1..20: mol_type = other DNA
tgtctcacggccccccatgc

SEQ ID NO: 51275 - DNA, 20 bp, synthetic construct
  misc_feature 1..20: note = chemically synthesized
  source 1..20: mol_type = other DNA
ggccccccatgccagcctga

SEQ ID NO: 51276 - DNA, 20 bp, synthetic construct
  misc_feature 1..20: note = chemically synthesized
  source 1..20: mol_type = other DNA
cctgacggttgtgtctgcct

SEQ ID NO: 51277 - DNA, 20 bp, synthetic construct
  misc_feature 1..20: note = chemically synthesized
  source 1..20: mol_type = other DNA
gtcatgctccatttttccat

SEQ ID NO: 51278 - DNA, 20 bp, synthetic construct
  misc_feature 1..20: note = chemically synthesized
  source 1..20: mol_type = other DNA
tcatgctccatttttccatc

SEQ ID NO: 51279 - DNA, 20 bp, synthetic construct
  misc_feature 1..20: note = chemically synthesized
  source 1..20: mol_type = other DNA
atttttccatcgggaccatc

SEQ ID NO: 51280 - DNA, 20 bp, synthetic construct
  misc_feature 1..20: note = chemically synthesized
  source 1..20: mol_type = other DNA
ttttccatcgggaccatcaa

SEQ ID NO: 51281 - DNA, 20 bp, synthetic construct
  misc_feature 1..20: note = chemically synthesized
  source 1..20: mol_type = other DNA
tttccatcgggaccatcaag

SEQ ID NO: 51282 - DNA, 20 bp, synthetic construct
  misc_feature 1..20: note = chemically synthesized
  source 1..20: mol_type = other DNA
ttccatcgggaccatcaaga

SEQ ID NO: 51283 - DNA, 20 bp, synthetic construct
  misc_feature 1..20: note = chemically synthesized
  source 1..20: mol_type = other DNA
tcaagagggtgtttgtgtct

SEQ ID NO: 51284 - DNA, 20 bp, synthetic construct
  misc_feature 1..20: note = chemically synthesized
  source 1..20: mol_type = other DNA
caagagggtgtttgtgtcta

SEQ ID NO: 51285 - DNA, 20 bp, synthetic construct
  misc_feature 1..20: note = chemically synthesized
  source 1..20: mol_type = other DNA
tgtttgtgtctaaggctgac

SEQ ID NO: 51286 - DNA, 20 bp, synthetic construct
  misc_feature 1..20: note = chemically synthesized
  source 1..20: mol_type = other DNA
gtttgtgtctaaggctgact

SEQ ID NO: 51287 - DNA, 20 bp, synthetic construct
  misc_feature 1..20: note = chemically synthesized
  source 1..20: mol_type = other DNA
taaggctgactgggtaactt

SEQ ID NO: 51288 - DNA, 20 bp, synthetic construct
  misc_feature 1..20: note = chemically synthesized
  source 1..20: mol_type = other DNA
ctgactgggtaactttggat

SEQ ID NO: 51289 - DNA, 20 bp, synthetic construct
  misc_feature 1..20: note = chemically synthesized
  source 1..20: mol_type = other DNA
actgggtaactttggatgag

SEQ ID NO: 51290 - DNA, 20 bp, synthetic construct
  misc_feature 1..20: note = chemically synthesized
  source 1..20: mol_type = other DNA
atgagcggtctctccgctct

SEQ ID NO: 51291 - DNA, 20 bp, synthetic construct
  misc_feature 1..20: note = chemically synthesized
  source 1..20: mol_type = other DNA
ctgtttcctcatctgtcaaa

SEQ ID NO: 51292 - DNA, 20 bp, synthetic construct
  misc_feature 1..20: note = chemically synthesized
  source 1..20: mol_type = other DNA
tgtttcctcatctgtcaaat

SEQ ID NO: 51293 - DNA, 20 bp, synthetic construct
  misc_feature 1..20: note = chemically synthesized
  source 1..20: mol_type = other DNA
tctaacccactctgatctcc

SEQ ID NO: 51294 - DNA, 20 bp, synthetic construct
  misc_feature 1..20: note = chemically synthesized
  source 1..20: mol_type = other DNA
ctaacccactctgatctccc

SEQ ID NO: 51295 - DNA, 20 bp, synthetic construct
  misc_feature 1..20: note = chemically synthesized
  source 1..20: mol_type = other DNA
taacccactctgatctccca

SEQ ID NO: 51296 - DNA, 20 bp, synthetic construct
  misc_feature 1..20: note = chemically synthesized
  source 1..20: mol_type = other DNA
cccactctgatctcccaggg

SEQ ID NO: 51297 - DNA, 20 bp, synthetic construct
  misc_feature 1..20: note = chemically synthesized
  source 1..20: mol_type = other DNA
actctgatctcccagggcgg

SEQ ID NO: 51298 - DNA, 20 bp, synthetic construct
  misc_feature 1..20: note = chemically synthesized
  source 1..20: mol_type = other DNA
tgatctcccagggcggcagt

SEQ ID NO: 51299 - DNA, 20 bp, synthetic construct
  misc_feature 1..20: note = chemically synthesized
  source 1..20: mol_type = other DNA
ccagggcggcagtaagtctt

SEQ ID NO: 51300 - DNA, 20 bp, synthetic construct
  misc_feature 1..20: note = chemically synthesized
  source 1..20: mol_type = other DNA
cggcagtaagtcttcagcat

SEQ ID NO: 51301 - DNA, 20 bp, synthetic construct
  misc_feature 1..20: note = chemically synthesized
  source 1..20: mol_type = other DNA
ggcagtaagtcttcagcatc

SEQ ID NO: 51302 - DNA, 20 bp, synthetic construct
  misc_feature 1..20: note = chemically synthesized
  source 1..20: mol_type = other DNA
gtcttcagcatcaggcattt

SEQ ID NO: 51303 - DNA, 20 bp, synthetic construct
  misc_feature 1..20: note = chemically synthesized
  source 1..20: mol_type = other DNA
tcttcagcatcaggcatttt

SEQ ID NO: 51304 - DNA, 20 bp, synthetic construct
  misc_feature 1..20: note = chemically synthesized
  source 1..20: mol_type = other DNA
cttcagcatcaggcattttg

SEQ ID NO: 51305 - DNA, 20 bp, synthetic construct
  misc_feature 1..20: note = chemically synthesized
  source 1..20: mol_type = other DNA
tcaggcattttggggtgact

SEQ ID NO: 51306 - DNA, 20 bp, synthetic construct
  misc_feature 1..20: note = chemically synthesized
  source 1..20: mol_type = other DNA
ttttggggtgactcagtaaa

SEQ ID NO: 51307 - DNA, 20 bp, synthetic construct
  misc_feature 1..20: note = chemically synthesized
  source 1..20: mol_type = other DNA
tggggtgactcagtaaatgg

SEQ ID NO: 51308 - DNA, 20 bp, synthetic construct
  misc_feature 1..20: note = chemically synthesized
  source 1..20: mol_type = other DNA
taaatggtagatcttgctac

SEQ ID NO: 51309 - DNA, 20 bp, synthetic construct
  misc_feature 1..20: note = chemically synthesized
  source 1..20: mol_type = other DNA
atggtagatcttgctaccag

SEQ ID NO: 51310 - DNA, 20 bp, synthetic construct
  misc_feature 1..20: note = chemically synthesized
  source 1..20: mol_type = other DNA
agatcttgctaccagtggaa

SEQ ID NO: 51311 - DNA, 20 bp, synthetic construct
  misc_feature 1..20: note = chemically synthesized
  source 1..20: mol_type = other DNA
ctaccagtggaacagccact

SEQ ID NO: 51312 - DNA, 20 bp, synthetic construct
  misc_feature 1..20: note = chemically synthesized
  source 1..20: mol_type = other DNA
taccagtggaacagccacta

SEQ ID NO: 51313 - DNA, 20 bp, synthetic construct
  misc_feature 1..20: note = chemically synthesized
  source 1..20: mol_type = other DNA
aacagccactaaggattctg

SEQ ID NO: 51314 - DNA, 20 bp, synthetic construct
  misc_feature 1..20: note = chemically synthesized
  source 1..20: mol_type = other DNA
gccactaaggattctgcagt

SEQ ID NO: 51315 - DNA, 20 bp, synthetic construct
  misc_feature 1..20: note = chemically synthesized
  source 1..20: mol_type = other DNA
cactaaggattctgcagtga

SEQ ID NO: 51316 - DNA, 20 bp, synthetic construct
  misc_feature 1..20: note = chemically synthesized
  source 1..20: mol_type = other DNA
taaggattctgcagtgagag

SEQ ID NO: 51317 - DNA, 20 bp, synthetic construct
  misc_feature 1..20: note = chemically synthesized
  source 1..20: mol_type = other DNA
aggattctgcagtgagagca

SEQ ID NO: 51318 - DNA, 20 bp, synthetic construct
  misc_feature 1..20: note = chemically synthesized
  source 1..20: mol_type = other DNA
ggattctgcagtgagagcag

SEQ ID NO: 51319 - DNA, 20 bp, synthetic construct
  misc_feature 1..20: note = chemically synthesized
  source 1..20: mol_type = other DNA
gattctgcagtgagagcaga

SEQ ID NO: 51320 - DNA, 20 bp, synthetic construct
  misc_feature 1..20: note = chemically synthesized
  source 1..20: mol_type = other DNA
ctgcagtgagagcagagggc

SEQ ID NO: 51321 - DNA, 20 bp, synthetic construct
  misc_feature 1..20: note = chemically synthesized
  source 1..20: mol_type = other DNA
gtgagagcagagggccagct

SEQ ID NO: 51322 - DNA, 20 bp, synthetic construct
  misc_feature 1..20: note = chemically synthesized
  source 1..20: mol_type = other DNA
agagcagagggccagctaag

SEQ ID NO: 51323 - DNA, 20 bp, synthetic construct
  misc_feature 1..20: note = chemically synthesized
  source 1..20: mol_type = other DNA
ccagctaagtggtactctcc

SEQ ID NO: 51324 - DNA, 20 bp, synthetic construct
  misc_feature 1..20: note = chemically synthesized
  source 1..20: mol_type = other DNA
agctaagtggtactctccca

SEQ ID NO: 51325 - DNA, 20 bp, synthetic construct
  misc_feature 1..20: note = chemically synthesized
  source 1..20: mol_type = other DNA
tcacgccaccccctccacct

SEQ ID NO: 51326 - DNA, 20 bp, synthetic construct
  misc_feature 1..20: note = chemically synthesized
  source 1..20: mol_type = other DNA
caccccctccaccttggaca

SEQ ID NO: 51327 - DNA, 20 bp, synthetic construct
  misc_feature 1..20: note = chemically synthesized
  source 1..20: mol_type = other DNA
accccctccaccttggacac

SEQ ID NO: 51328 - DNA, 20 bp, synthetic construct
  misc_feature 1..20: note = chemically synthesized
  source 1..20: mol_type = other DNA
accttggacacaggacgctg

SEQ ID NO: 51329 - DNA, 20 bp, synthetic construct
  misc_feature 1..20: note = chemically synthesized
  source 1..20: mol_type = other DNA
cacaggacgctgtggtttct

SEQ ID NO: 51330 - DNA, 20 bp, synthetic construct
  misc_feature 1..20: note = chemically synthesized
  source 1..20: mol_type = other DNA
ggacgctgtggtttctgagc

SEQ ID NO: 51331 - DNA, 20 bp, synthetic construct
  misc_feature 1..20: note = chemically synthesized
  source 1..20: mol_type = other DNA
gacgctgtggtttctgagcc

SEQ ID NO: 51332 - DNA, 20 bp, synthetic construct
  misc_feature 1..20: note = chemically synthesized
  source 1..20: mol_type = other DNA
ccaggtacaatgactccttt

SEQ ID NO: 51333 - DNA, 20 bp, synthetic construct
  misc_feature 1..20: note = chemically synthesized
  source 1..20: mol_type = other DNA
gtacaatgactcctttcggt

SEQ ID NO: 51334 - DNA, 20 bp, synthetic construct
  misc_feature 1..20: note = chemically synthesized
  source 1..20: mol_type = other DNA
atgactcctttcggtaagtg

SEQ ID NO: 51335 - DNA, 20 bp, synthetic construct
  misc_feature 1..20: note = chemically synthesized
  source 1..20: mol_type = other DNA
actcctttcggtaagtgcag

SEQ ID NO: 51336 - DNA, 20 bp, synthetic construct
  misc_feature 1..20: note = chemically synthesized
  source 1..20: mol_type = other DNA
cctttcggtaagtgcagtgg

SEQ ID NO: 51337 - DNA, 20 bp, synthetic construct
  misc_feature 1..20: note = chemically synthesized
  source 1..20: mol_type = other DNA
agtggaagctgtacactgcc

SEQ ID NO: 51338 - DNA, 20 bp, synthetic construct
  misc_feature 1..20: note = chemically synthesized
  source 1..20: mol_type = other DNA
gtggaagctgtacactgccc

SEQ ID NO: 51339 - DNA, 20 bp, synthetic construct
  misc_feature 1..20: note = chemically synthesized
  source 1..20: mol_type = other DNA
agctgtacactgcccaggca

SEQ ID NO: 51340 - DNA, 20 bp, synthetic construct
  misc_feature 1..20: note = chemically synthesized
  source 1..20: mol_type = other DNA
cactgcccaggcaaagcgtc

SEQ ID NO: 51341 - DNA, 20 bp, synthetic construct
  misc_feature 1..20: note = chemically synthesized
  source 1..20: mol_type = other DNA
actgcccaggcaaagcgtcc

SEQ ID NO: 51342 - DNA, 20 bp, synthetic construct
  misc_feature 1..20: note = chemically synthesized
  source 1..20: mol_type = other DNA
gcccaggcaaagcgtccggg

SEQ ID NO: 51343 - DNA, 20 bp, synthetic construct
  misc_feature 1..20: note = chemically synthesized
  source 1..20: mol_type = other DNA
ggcaaagcgtccgggcagcg

SEQ ID NO: 51344 - DNA, 20 bp, synthetic construct
  misc_feature 1..20: note = chemically synthesized
  source 1..20: mol_type = other DNA
gcaaagcgtccgggcagcgt

SEQ ID NO: 51345 - DNA, 20 bp, synthetic construct
  misc_feature 1..20: note = chemically synthesized
  source 1..20: mol_type = other DNA
aagcgtccgggcagcgtagg

SEQ ID NO: 51346 - DNA, 20 bp, synthetic construct
  misc_feature 1..20: note = chemically synthesized
  source 1..20: mol_type = other DNA
agcgtccgggcagcgtaggc

SEQ ID NO: 51347 - DNA, 20 bp, synthetic construct
  misc_feature 1..20: note = chemically synthesized
  source 1..20: mol_type = other DNA
ggcagcgtaggcgggcgact

SEQ ID NO: 51348 - DNA, 20 bp, synthetic construct
  misc_feature 1..20: note = chemically synthesized
  source 1..20: mol_type = other DNA
taggcgggcgactcagatcc

SEQ ID NO: 51349 - DNA, 20 bp, synthetic construct
  misc_feature 1..20: note = chemically synthesized
  source 1..20: mol_type = other DNA
cgggcgactcagatcccagc

SEQ ID NO: 51350 - DNA, 20 bp, synthetic construct
  misc_feature 1..20: note = chemically synthesized
  source 1..20: mol_type = other DNA
gcgactcagatcccagccag

SEQ ID NO: 51351 - DNA, 20 bp, synthetic construct
  misc_feature 1..20: note = chemically synthesized
  source 1..20: mol_type = other DNA
cagatcccagccagtggact

SEQ ID NO: 51352 - DNA, 20 bp, synthetic construct
  misc_feature 1..20: note = chemically synthesized
  source 1..20: mol_type = other DNA
ctgtttgctcctccgataac

SEQ ID NO: 51353 - DNA, 20 bp, synthetic construct
  misc_feature 1..20: note = chemically synthesized
  source 1..20: mol_type = other DNA
tgtttgctcctccgataact

SEQ ID NO: 51354 - DNA, 20 bp, synthetic construct
  misc_feature 1..20: note = chemically synthesized
  source 1..20: mol_type = other DNA
gtttgctcctccgataactg

SEQ ID NO: 51355 - DNA, 20 bp, synthetic construct
  misc_feature 1..20: note = chemically synthesized
  source 1..20: mol_type = other DNA
tccgataactggggtgacct

SEQ ID NO: 51356 - DNA, 20 bp, synthetic construct
  misc_feature 1..20: note = chemically synthesized
  source 1..20: mol_type = other DNA
tgaccttggttaatattcac

SEQ ID NO: 51357 - DNA, 20 bp, synthetic construct
  misc_feature 1..20: note = chemically synthesized
  source 1..20: mol_type = other DNA
ccttggttaatattcaccag

SEQ ID NO: 51358 - DNA, 20 bp, synthetic construct
  misc_feature 1..20: note = chemically synthesized
  source 1..20: mol_type = other DNA
agcctcccccgttgcccctc

SEQ ID NO: 51359 - DNA, 20 bp, synthetic construct
  misc_feature 1..20: note = chemically synthesized
  source 1..20: mol_type = other DNA
ctggatccactgcttaaata

SEQ ID NO: 51360 - DNA, 20 bp, synthetic construct
  misc_feature 1..20: note = chemically synthesized
  source 1..20: mol_type = other DNA
tccactgcttaaatacggac

SEQ ID NO: 51361 - DNA, 20 bp, synthetic construct
  misc_feature 1..20: note = chemically synthesized
  source 1..20: mol_type = other DNA
ccactgcttaaatacggacg

SEQ ID NO: 51362 - DNA, 20 bp, synthetic construct
  misc_feature 1..20: note = chemically synthesized
  source 1..20: mol_type = other DNA
tgcttaaatacggacgagga

SEQ ID NO: 51363 - DNA, 20 bp, synthetic construct
  misc_feature 1..20: note = chemically synthesized
  source 1..20: mol_type = other DNA
gcttaaatacggacgaggac

SEQ ID NO: 51364 - DNA, 20 bp, synthetic construct
  misc_feature 1..20: note = chemically synthesized
  source 1..20: mol_type = other DNA
cttaaatacggacgaggaca

SEQ ID NO: 51365 - DNA, 20 bp, synthetic construct
  misc_feature 1..20: note = chemically synthesized
  source 1..20: mol_type = other DNA
aggacagggccctgtctcct

SEQ ID NO: 51366 - DNA, 20 bp, synthetic construct
  misc_feature 1..20: note = chemically synthesized
  source 1..20: mol_type = other DNA
gggccctgtctcctcagctt

SEQ ID NO: 51367 - DNA, 20 bp, synthetic construct
  misc_feature 1..20: note = chemically synthesized
  source 1..20: mol_type = other DNA
ggccctgtctcctcagcttc

SEQ ID NO: 51368 - DNA, 20 bp, synthetic construct
  misc_feature 1..20: note = chemically synthesized
  source 1..20: mol_type = other DNA
ttcaggcaccaccactgacc

SEQ ID NO: 51369 - DNA, 20 bp, synthetic construct
  misc_feature 1..20: note = chemically synthesized
  source 1..20: mol_type = other DNA
tcaggcaccaccactgacct

SEQ ID NO: 51370 - DNA, 20 bp, synthetic construct
  misc_feature 1..20: note = chemically synthesized
  source 1..20: mol_type = other DNA
gcaccaccactgacctggga

SEQ ID NO: 51371 - DNA, 20 bp, synthetic construct
  misc_feature 1..20: note = chemically synthesized
  source 1..20: mol_type = other DNA
gacctgggacagtgaatcgt

SEQ ID NO: 51372 - DNA, 20 bp, synthetic construct
  misc_feature 1..20: note = chemically synthesized
  source 1..20: mol_type = other DNA
gtaagtatgcctttcactgc

SEQ ID NO: 51373 - DNA, 20 bp, synthetic construct
  misc_feature 1..20: note = chemically synthesized
  source 1..20: mol_type = other DNA
aagtatgcctttcactgcga

SEQ ID NO: 51374 - DNA, 20 bp, synthetic construct
  misc_feature 1..20: note = chemically synthesized
  source 1..20: mol_type = other DNA
agtatgcctttcactgcgag

SEQ ID NO: 51375 - DNA, 20 bp, synthetic construct
  misc_feature 1..20: note = chemically synthesized
  source 1..20: mol_type = other DNA
cctttcactgcgagaggttc

SEQ ID NO: 51376 - DNA, 20 bp, synthetic construct
  misc_feature 1..20: note = chemically synthesized
  source 1..20: mol_type = other DNA
tttcactgcgagaggttctg

SEQ ID NO: 51377 - DNA, 20 bp, synthetic construct
  misc_feature 1..20: note = chemically synthesized
  source 1..20: mol_type = other DNA
tcactgcgagaggttctgga

SEQ ID NO: 51378 - DNA, 20 bp, synthetic construct
  misc_feature 1..20: note = chemically synthesized
  source 1..20: mol_type = other DNA
cactgcgagaggttctggag

SEQ ID NO: 51379 - DNA, 20 bp, synthetic construct
  misc_feature 1..20: note = chemically synthesized
  source 1..20: mol_type = other DNA
gaggttctggagaggcttct

SEQ ID NO: 51380 - DNA, 20 bp, synthetic construct
  misc_feature 1..20: note = chemically synthesized
  source 1..20: mol_type = other DNA
agaggcttctgagctcccca

SEQ ID NO: 51381 - DNA, 20 bp, synthetic construct
  misc_feature 1..20: note = chemically synthesized
  source 1..20: mol_type = other DNA
cttctgagctccccatggcc

SEQ ID NO: 51382 - DNA, 20 bp, synthetic construct
  misc_feature 1..20: note = chemically synthesized
  source 1..20: mol_type = other DNA
ttctgagctccccatggccc

SEQ ID NO: 51383 - DNA, 20 bp, synthetic construct
  misc_feature 1..20: note = chemically synthesized
  source 1..20: mol_type = other DNA
tgagctccccatggcccagg

SEQ ID NO: 51384 - DNA, 20 bp, synthetic construct
  misc_feature 1..20: note = chemically synthesized
  source 1..20: mol_type = other DNA
gagctccccatggcccaggc

SEQ ID NO: 51385 - DNA, 20 bp, synthetic construct
  misc_feature 1..20: note = chemically synthesized
  source 1..20: mol_type = other DNA
ctccccatggcccaggcagg

SEQ ID NO: 51386 - DNA, 20 bp, synthetic construct
  misc_feature 1..20: note = chemically synthesized
  source 1..20: mol_type = other DNA
cccatggcccaggcaggcag

SEQ ID NO: 51387 - DNA, 20 bp, synthetic construct
  misc_feature 1..20: note = chemically synthesized
  source 1..20: mol_type = other DNA
ccatggcccaggcaggcagc

SEQ ID NO: 51388 - DNA, 20 bp, synthetic construct
  misc_feature 1..20: note = chemically synthesized
  source 1..20: mol_type = other DNA
gcccaggcaggcagcaggtc

SEQ ID NO: 51389 - DNA, 20 bp, synthetic construct
  misc_feature 1..20: note = chemically synthesized
  source 1..20: mol_type = other DNA
cccaggcaggcagcaggtct

SEQ ID NO: 51390 - DNA, 20 bp, synthetic construct
  misc_feature 1..20: note = chemically synthesized
  source 1..20: mol_type = other DNA
ccaggcaggcagcaggtctg

SEQ ID NO: 51391 - DNA, 20 bp, synthetic construct
  misc_feature 1..20: note = chemically synthesized
  source 1..20: mol_type = other DNA
ggcaggcagcaggtctgggg

SEQ ID NO: 51392 - DNA, 20 bp, synthetic construct
  misc_feature 1..20: note = chemically synthesized
  source 1..20: mol_type = other DNA
gcaggcagcaggtctggggc

SEQ ID NO: 51393 - DNA, 20 bp, synthetic construct
  misc_feature 1..20: note = chemically synthesized
  source 1..20: mol_type = other DNA
aggcagcaggtctggggcag

SEQ ID NO: 51394 - DNA, 20 bp, synthetic construct
  misc_feature 1..20: note = chemically synthesized
  source 1..20: mol_type = other DNA
ggcagcaggtctggggcagg

SEQ ID NO: 51395 - DNA, 20 bp, synthetic construct
  misc_feature 1..20: note = chemically synthesized
  source 1..20: mol_type = other DNA
gcagcaggtctggggcagga

SEQ ID NO: 51396 - DNA, 20 bp, synthetic construct
  misc_feature 1..20: note = chemically synthesized
  source 1..20: mol_type = other DNA
cagcaggtctggggcaggag

SEQ ID NO: 51397 - DNA, 20 bp, synthetic construct
  misc_feature 1..20: note = chemically synthesized
  source 1..20: mol_type = other DNA
agcaggtctggggcaggagg

SEQ ID NO: 51398 - DNA, 20 bp, synthetic construct
  misc_feature 1..20: note = chemically synthesized
  source 1..20: mol_type = other DNA
gcaggtctggggcaggaggg

SEQ ID NO: 51399 - DNA, 20 bp, synthetic construct
  misc_feature 1..20: note = chemically synthesized
  source 1..20: mol_type = other DNA
ctggggcaggaggggggttg

SEQ ID NO: 51400 - DNA, 20 bp, synthetic construct
  misc_feature 1..20: note = chemically synthesized
  source 1..20: mol_type = other DNA
ggggcaggaggggggttgtg

SEQ ID NO: 51401 - DNA, 20 bp, synthetic construct
  misc_feature 1..20: note = chemically synthesized
  source 1..20: mol_type = other DNA
gcaggaggggggttgtggag

SEQ ID NO: 51402 - DNA, 20 bp, synthetic construct
  misc_feature 1..20: note = chemically synthesized
  source 1..20: mol_type = other DNA
caggaggggggttgtggagt

SEQ ID NO: 51403 - DNA, 20 bp, synthetic construct
  misc_feature 1..20: note = chemically synthesized
  source 1..20: mol_type = other DNA
ggagtgggtatccgcctgct

SEQ ID NO: 51404 - DNA, 20 bp, synthetic construct
  misc_feature 1..20: note = chemically synthesized
  source 1..20: mol_type = other DNA
gagtgggtatccgcctgctg

SEQ ID NO: 51405 - DNA, 20 bp, synthetic construct
  misc_feature 1..20: note = chemically synthesized
  source 1..20: mol_type = other DNA
ggtatccgcctgctgaggtg

SEQ ID NO: 51406 - DNA, 20 bp, synthetic construct
  misc_feature 1..20: note = chemically synthesized
  source 1..20: mol_type = other DNA
gtatccgcctgctgaggtgc

SEQ ID NO: 51407 - DNA, 20 bp, synthetic construct
  misc_feature 1..20: note = chemically synthesized
  source 1..20: mol_type = other DNA
tatccgcctgctgaggtgca

SEQ ID NO: 51408 - DNA, 20 bp, synthetic construct
  misc_feature 1..20: note = chemically synthesized
  source 1..20: mol_type = other DNA
ccgcctgctgaggtgcaggg

SEQ ID NO: 51409 - DNA, 20 bp, synthetic construct
  misc_feature 1..20: note = chemically synthesized
  source 1..20: mol_type = other DNA
ctgctgaggtgcagggcaga

SEQ ID NO: 51410 - DNA, 20 bp, synthetic construct
  misc_feature 1..20: note = chemically synthesized
  source 1..20: mol_type = other DNA
gctgaggtgcagggcagatg

SEQ ID NO: 51411 - DNA, 20 bp, synthetic construct
  misc_feature 1..20: note = chemically synthesized
  source 1..20: mol_type = other DNA
tgaggtgcagggcagatgga

SEQ ID NO: 51412 - DNA, 20 bp, synthetic construct
  misc_feature 1..20: note = chemically synthesized
  source 1..20: mol_type = other DNA
gaggtgcagggcagatggag

SEQ ID NO: 51413 - DNA, 20 bp, synthetic construct
  misc_feature 1..20: note = chemically synthesized
  source 1..20: mol_type = other DNA
cagggcagatggagaggctg

SEQ ID NO: 51414 - DNA, 20 bp, synthetic construct
  misc_feature 1..20: note = chemically synthesized
  source 1..20: mol_type = other DNA
cagatggagaggctgcagct

SEQ ID NO: 51415 - DNA, 20 bp, synthetic construct
  misc_feature 1..20: note = chemically synthesized
  source 1..20: mol_type = other DNA
agctcctattttcataataa

SEQ ID NO: 51416 - DNA, 20 bp, synthetic construct
  misc_feature 1..20: note = chemically synthesized
  source 1..20: mol_type = other DNA
tcctattttcataataacag

SEQ ID NO: 51417 - DNA, 20 bp, synthetic construct
  misc_feature 1..20: note = chemically synthesized
  source 1..20: mol_type = other DNA
ttcataataacagcagccat

SEQ ID NO: 51418 - DNA, 20 bp, synthetic construct
  misc_feature 1..20: note = chemically synthesized
  source 1..20: mol_type = other DNA
tcataataacagcagccatg

SEQ ID NO: 51419 - DNA, 20 bp, synthetic construct
  misc_feature 1..20: note = chemically synthesized
  source 1..20: mol_type = other DNA
cataataacagcagccatga

SEQ ID NO: 51420 - DNA, 20 bp, synthetic construct
  misc_feature 1..20: note = chemically synthesized
  source 1..20: mol_type = other DNA
gagggttgtgtcctgtttcc

SEQ ID NO: 51421 - DNA, 20 bp, synthetic construct
  misc_feature 1..20: note = chemically synthesized
  source 1..20: mol_type = other DNA
tcctgtttcccagtcctgcc

SEQ ID NO: 51422 - DNA, 20 bp, synthetic construct
  misc_feature 1..20: note = chemically synthesized
  source 1..20: mol_type = other DNA
agtcctgcccggtcccccct

SEQ ID NO: 51423 - DNA, 20 bp, synthetic construct
  misc_feature 1..20: note = chemically synthesized
  source 1..20: mol_type = other DNA
ggtcccccctcggtacctcc

SEQ ID NO: 51424 - DNA, 20 bp, synthetic construct
  misc_feature 1..20: note = chemically synthesized
  source 1..20: mol_type = other DNA
cccccctcggtacctcctgg

SEQ ID NO: 51425 - DNA, 20 bp, synthetic construct
  misc_feature 1..20: note = chemically synthesized
  source 1..20: mol_type = other DNA
gtacctcctggtggatacac

SEQ ID NO: 51426 - DNA, 20 bp, synthetic construct
  misc_feature 1..20: note = chemically synthesized
  source 1..20: mol_type = other DNA
gtggatacactggttcctgt

SEQ ID NO: 51427 - DNA, 20 bp, synthetic construct
  misc_feature 1..20: note = chemically synthesized
  source 1..20: mol_type = other DNA
gatacactggttcctgtaag

SEQ ID NO: 51428 - DNA, 20 bp, synthetic construct
  misc_feature 1..20: note = chemically synthesized
  source 1..20: mol_type = other DNA
acactggttcctgtaagcag

SEQ ID NO: 51429 - DNA, 20 bp, synthetic construct
  misc_feature 1..20: note = chemically synthesized
  source 1..20: mol_type = other DNA
ctggttcctgtaagcagaag

SEQ ID NO: 51430 - DNA, 20 bp, synthetic construct
  misc_feature 1..20: note = chemically synthesized
  source 1..20: mol_type = other DNA
tcctgtaagcagaagtggat

SEQ ID NO: 51431 - DNA, 20 bp, synthetic construct
  misc_feature 1..20: note = chemically synthesized
  source 1..20: mol_type = other DNA
cctgtaagcagaagtggatg

SEQ ID NO: 51432 - DNA, 20 bp, synthetic construct
  misc_feature 1..20: note = chemically synthesized
  source 1..20: mol_type = other DNA
ctgtaagcagaagtggatga

SEQ ID NO: 51433 - DNA, 20 bp, synthetic construct
  misc_feature 1..20: note = chemically synthesized
  source 1..20: mol_type = other DNA
cagaagtggatgagggtgtc

SEQ ID NO: 51434 - DNA, 20 bp, synthetic construct
  misc_feature 1..20: note = chemically synthesized
  source 1..20: mol_type = other DNA
agaagtggatgagggtgtct

SEQ ID NO: 51435 - DNA, 20 bp, synthetic construct
  misc_feature 1..20: note = chemically synthesized
  source 1..20: mol_type = other DNA
gatgagggtgtctaggtctg

SEQ ID NO: 51436 - DNA, 20 bp, synthetic construct
  misc_feature 1..20: note = chemically synthesized
  source 1..20: mol_type = other DNA
ggtgtctaggtctgcagtcc

SEQ ID NO: 51437 - DNA, 20 bp, synthetic construct
  misc_feature 1..20: note = chemically synthesized
  source 1..20: mol_type = other DNA
ggtctgcagtcctggcaccc

SEQ ID NO: 51438 - DNA, 20 bp, synthetic construct
  misc_feature 1..20: note = chemically synthesized
  source 1..20: mol_type = other DNA
gtctgcagtcctggcacccc

SEQ ID NO: 51439 - DNA, 20 bp, synthetic construct
  misc_feature 1..20: note = chemically synthesized
  source 1..20: mol_type = other DNA
gcagtcctggcaccccagga

SEQ ID NO: 51440 - DNA, 20 bp, synthetic construct
  misc_feature 1..20: note = chemically synthesized
  source 1..20: mol_type = other DNA
cagtcctggcaccccaggat

SEQ ID NO: 51441 - DNA, 20 bp, synthetic construct
  misc_feature 1..20: note = chemically synthesized
  source 1..20: mol_type = other DNA
agtcctggcaccccaggatg

SEQ ID NO: 51442 - DNA, 20 bp, synthetic construct
  misc_feature 1..20: note = chemically synthesized
  source 1..20: mol_type = other DNA
gtcctggcaccccaggatgg

SEQ ID NO: 51443 - DNA, 20 bp, synthetic construct
  misc_feature 1..20: note = chemically synthesized
  source 1..20: mol_type = other DNA
caccccaggatgggggacac

SEQ ID NO: 51444 - DNA, 20 bp, synthetic construct
  misc_feature 1..20: note = chemically synthesized
  source 1..20: mol_type = other DNA
caggatgggggacaccagcc

SEQ ID NO: 51445 - DNA, 20 bp, synthetic construct
  misc_feature 1..20: note = chemically synthesized
  source 1..20: mol_type = other DNA
gggggacaccagccaagata

SEQ ID NO: 51446 - DNA, 20 bp, synthetic construct
  misc_feature 1..20: note = chemically synthesized
  source 1..20: mol_type = other DNA
caccagccaagatacagcaa

SEQ ID NO: 51447 - DNA, 20 bp, synthetic construct
  misc_feature 1..20: note = chemically synthesized
  source 1..20: mol_type = other DNA
aagatacagcaacagcaaca

SEQ ID NO: 51448 - DNA, 20 bp, synthetic construct
  misc_feature 1..20: note = chemically synthesized
  source 1..20: mol_type = other DNA
acagcaacagcaacaaagcg

SEQ ID NO: 51449 - DNA, 20 bp, synthetic construct
  misc_feature 1..20: note = chemically synthesized
  source 1..20: mol_type = other DNA
gccatttctttctgtttgca

SEQ ID NO: 51450 - DNA, 20 bp, synthetic construct
  misc_feature 1..20: note = chemically synthesized
  source 1..20: mol_type = other DNA
tgcacagctcctctgtctgt

SEQ ID NO: 51451 - DNA, 20 bp, synthetic construct
  misc_feature 1..20: note = chemically synthesized
  source 1..20: mol_type = other DNA
gcacagctcctctgtctgtc

SEQ ID NO: 51452 - DNA, 20 bp, synthetic construct
  misc_feature 1..20: note = chemically synthesized
  source 1..20: mol_type = other DNA
cacagctcctctgtctgtcg

SEQ ID NO: 51453 - DNA, 20 bp, synthetic construct
  misc_feature 1..20: note = chemically synthesized
  source 1..20: mol_type = other DNA
acagctcctctgtctgtcgg

SEQ ID NO: 51454 - DNA, 20 bp, synthetic construct
  misc_feature 1..20: note = chemically synthesized
  source 1..20: mol_type = other DNA
tcctgtctgttgtctcctat

SEQ ID NO: 51455 - DNA, 20 bp, synthetic construct
  misc_feature 1..20: note = chemically synthesized
  source 1..20: mol_type = other DNA
tcaccacctctcctactgct

SEQ ID NO: 51456 - DNA, 20 bp, synthetic construct
  misc_feature 1..20: note = chemically synthesized
  source 1..20: mol_type = other DNA
caccacctctcctactgctt

SEQ ID NO: 51457 - DNA, 20 bp, synthetic construct
  misc_feature 1..20: note = chemically synthesized
  source 1..20: mol_type = other DNA
tgcatctttctccccttcta

SEQ ID NO: 51458 - DNA, 20 bp, synthetic construct
  misc_feature 1..20: note = chemically synthesized
  source 1..20: mol_type = other DNA
ctttctccccttctatagat

SEQ ID NO: 51459 - DNA, 20 bp, synthetic construct
  misc_feature 1..20: note = chemically synthesized
  source 1..20: mol_type = other DNA
tttctccccttctatagatg

SEQ ID NO: 51460 - DNA, 20 bp, synthetic construct
  misc_feature 1..20: note = chemically synthesized
  source 1..20: mol_type = other DNA
tctccccttctatagatgag

SEQ ID NO: 51461 - DNA, 20 bp, synthetic construct
  misc_feature 1..20: note = chemically synthesized
  source 1..20: mol_type = other DNA
ctccccttctatagatgagg

SEQ ID NO: 51462 - DNA, 20 bp, synthetic construct
  misc_feature 1..20: note = chemically synthesized
  source 1..20: mol_type = other DNA
cttctatagatgaggaggtt

SEQ ID NO: 51463 - DNA, 20 bp, synthetic construct
  misc_feature 1..20: note = chemically synthesized
  source 1..20: mol_type = other DNA
ttctatagatgaggaggtta

SEQ ID NO: 51464 - DNA, 20 bp, synthetic construct
  misc_feature 1..20: note = chemically synthesized
  source 1..20: mol_type = other DNA
tagatgaggaggttaaggtc

SEQ ID NO: 51465 - DNA, 20 bp, synthetic construct
  misc_feature 1..20: note = chemically synthesized
  source 1..20: mol_type = other DNA
gatgaggaggttaaggtcca

SEQ ID NO: 51466 - DNA, 20 bp, synthetic construct
  misc_feature 1..20: note = chemically synthesized
  source 1..20: mol_type = other DNA
tgaggaggttaaggtccaga

SEQ ID NO: 51467 - DNA, 20 bp, synthetic construct
  misc_feature 1..20: note = chemically synthesized
  source 1..20: mol_type = other DNA
gaggaggttaaggtccagag

SEQ ID NO: 51468 - DNA, 20 bp, synthetic construct
  misc_feature 1..20: note = chemically synthesized
  source 1..20: mol_type = other DNA
aggaggttaaggtccagaga

SEQ ID NO: 51469 - DNA, 20 bp, synthetic construct
  misc_feature 1..20: note = chemically synthesized
  source 1..20: mol_type = other DNA
ggaggttaaggtccagagag

SEQ ID NO: 51470 - DNA, 20 bp, synthetic construct
  misc_feature 1..20: note = chemically synthesized
  source 1..20: mol_type = other DNA
ggttaaggtccagagagggg

SEQ ID NO: 51471 - DNA, 20 bp, synthetic construct
  misc_feature 1..20: note = chemically synthesized
  source 1..20: mol_type = other DNA
gttaaggtccagagaggggt

SEQ ID NO: 51472 - DNA, 20 bp, synthetic construct
  misc_feature 1..20: note = chemically synthesized
  source 1..20: mol_type = other DNA
ttaaggtccagagaggggtg

SEQ ID NO: 51473 - DNA, 20 bp, synthetic construct
  misc_feature 1..20: note = chemically synthesized
  source 1..20: mol_type = other DNA
aaggtccagagaggggtggg

SEQ ID NO: 51474 - DNA, 20 bp, synthetic construct
  misc_feature 1..20: note = chemically synthesized
  source 1..20: mol_type = other DNA
aggtccagagaggggtgggg

SEQ ID NO: 51475 - DNA, 20 bp, synthetic construct
  misc_feature 1..20: note = chemically synthesized
  source 1..20: mol_type = other DNA
agaggggtggggaggaacgc

SEQ ID NO: 51476 - DNA, 20 bp, synthetic construct
  misc_feature 1..20: note = chemically synthesized
  source 1..20: mol_type = other DNA
ctcacattctccatcccctc

SEQ ID NO: 51477 - DNA, 20 bp, synthetic construct
  misc_feature 1..20: note = chemically synthesized
  source 1..20: mol_type = other DNA
ccatcccctccagatatgac

SEQ ID NO: 51478 - DNA, 20 bp, synthetic construct
  misc_feature 1..20: note = chemically synthesized
  source 1..20: mol_type = other DNA
catcccctccagatatgacc

SEQ ID NO: 51479 - DNA, 20 bp, synthetic construct
  misc_feature 1..20: note = chemically synthesized
  source 1..20: mol_type = other DNA
cctccagatatgaccaggaa

SEQ ID NO: 51480 - DNA, 20 bp, synthetic construct
  misc_feature 1..20: note = chemically synthesized
  source 1..20: mol_type = other DNA
gaccaggaacagacctgtgc

SEQ ID NO: 51481 - DNA, 20 bp, synthetic construct
  misc_feature 1..20: note = chemically synthesized
  source 1..20: mol_type = other DNA
accaggaacagacctgtgcc

SEQ ID NO: 51482 - DNA, 20 bp, synthetic construct
  misc_feature 1..20: note = chemically synthesized
  source 1..20: mol_type = other DNA
aacagacctgtgccaggcct

SEQ ID NO: 51483 - DNA, 20 bp, synthetic construct
  misc_feature 1..20: note = chemically synthesized
  source 1..20: mol_type = other DNA
tgttcctggtcatatctgga

SEQ ID NO: 51484 - DNA, 20 bp, synthetic construct
  misc_feature 1..20: note = chemically synthesized
  source 1..20: mol_type = other DNA
ggtcatatctggaggggatg

SEQ ID NO: 51485 - DNA, 20 bp, synthetic construct
  misc_feature 1..20: note = chemically synthesized
  source 1..20: mol_type = other DNA
ttggctggtgtcccccatcc

SEQ ID NO: 51486 - DNA, 20 bp, synthetic construct
  misc_feature 1..20: note = chemically synthesized
  source 1..20: mol_type = other DNA
tctgccctgcacctcagcag

SEQ ID NO: 51487 - DNA, 20 bp, synthetic construct
  misc_feature 1..20: note = chemically synthesized
  source 1..20: mol_type = other DNA
tcctcgtccgtatttaagca

SEQ ID NO: 51488 - DNA, 20 bp, synthetic construct
  misc_feature 1..20: note = chemically synthesized
  source 1..20: mol_type = other DNA
ggcaacgggggaggctgctg

SEQ ID NO: 51489 - DNA, 20 bp, synthetic construct
  misc_feature 1..20: note = chemically synthesized
  source 1..20: mol_type = other DNA
caggggctaagtccactggc

SEQ ID NO: 51490 - DNA, 20 bp, synthetic construct
  misc_feature 1..20: note = chemically synthesized
  source 1..20: mol_type = other DNA
ctaagtccactggctgggat

SEQ ID NO: 51491 - DNA, 20 bp, synthetic construct
  misc_feature 1..20: note = chemically synthesized
  source 1..20: mol_type = other DNA
cttccactgcacttaccgaa

SEQ ID NO: 51492 - DNA, 20 bp, synthetic construct
  misc_feature 1..20: note = chemically synthesized
  source 1..20: mol_type = other DNA
cgtcctgtgtccaaggtgga

SEQ ID NO: 51493 - DNA, 20 bp, synthetic construct
  misc_feature 1..20: note = chemically synthesized
  source 1..20: mol_type = other DNA
tccaaggtggagggggtggc

SEQ ID NO: 51494 - DNA, 20 bp, synthetic construct
  misc_feature 1..20: note = chemically synthesized
  source 1..20: mol_type = other DNA
gtgagtcagacagtctctgg

SEQ ID NO: 51495 - DNA, 20 bp, synthetic construct
  misc_feature 1..20: note = chemically synthesized
  source 1..20: mol_type = other DNA
ctggccctctgctctcactg

SEQ ID NO: 51496 - DNA, 20 bp, synthetic construct
  misc_feature 1..20: note = chemically synthesized
  source 1..20: mol_type = other DNA
gtagcaagatctaccattta

SEQ ID NO: 51497 - DNA, 20 bp, synthetic construct
  misc_feature 1..20: note = chemically synthesized
  source 1..20: mol_type = other DNA
ttactgccgccctgggagat

SEQ ID NO: 51498 - DNA, 20 bp, synthetic construct
  misc_feature 1..20: note = chemically synthesized
  source 1..20: mol_type = other DNA
tgccgccctgggagatcaga

SEQ ID NO: 51499 - DNA, 20 bp, synthetic construct
  misc_feature 1..20: note = chemically synthesized
  source 1..20: mol_type = other DNA
tggcatggggggccgtgaga

SEQ ID NO: 51500 - DNA, 20 bp, synthetic construct
  misc_feature 1..20: note = chemically synthesized
  source 1..20: mol_type = other DNA
actgtttcacctgcatccca

SEQ ID NO: 51501 - DNA, 20 bp, synthetic construct
  misc_feature 1..20: note = chemically synthesized
  source 1..20: mol_type = other DNA
aagcatgcttgtgaagtgcc

SEQ ID NO: 51502 - DNA, 20 bp, synthetic construct
  misc_feature 1..20: note = chemically synthesized
  source 1..20: mol_type = other DNA
gcacacagtaggctctttat

SEQ ID NO: 51503 - DNA, 20 bp, synthetic construct
  misc_feature 1..20: note = chemically synthesized
  source 1..20: mol_type = other DNA
agtgtgatccgtatacagct

SEQ ID NO: 51504 - DNA, 20 bp, synthetic construct
  misc_feature 1..20: note = chemically synthesized
  source 1..20: mol_type = other DNA
gtatacagcttggagtttct

SEQ ID NO: 51505 - DNA, 20 bp, synthetic construct
  misc_feature 1..20: note = chemically synthesized
  source 1..20: mol_type = other DNA
tggatacatggcccccactc

SEQ ID NO: 51506 - DNA, 20 bp, synthetic construct
  misc_feature 1..20: note = chemically synthesized
  source 1..20: mol_type = other DNA
ggaggcctttggagactgct

SEQ ID NO: 51507 - DNA, 20 bp, synthetic construct
  misc_feature 1..20: note = chemically synthesized
  source 1..20: mol_type = other DNA
ggtggaggggaggggaggta

SEQ ID NO: 51508 - DNA, 20 bp, synthetic construct
  misc_feature 1..20: note = chemically synthesized
  source 1..20: mol_type = other DNA
gtacgtgccgtagatacttg

SEQ ID NO: 51509 - DNA, 20 bp, synthetic construct
  misc_feature 1..20: note = chemically synthesized
  source 1..20: mol_type = other DNA
gtgccgtagatacttgcaga

SEQ ID NO: 51510 - DNA, 20 bp, synthetic construct
  misc_feature 1..20: note = chemically synthesized
  source 1..20: mol_type = other DNA
cgtagatacttgcagagtga

SEQ ID NO: 51511 - DNA, 20 bp, synthetic construct
  misc_feature 1..20: note = chemically synthesized
  source 1..20: mol_type = other DNA
gatacttgcagagtgaatgg

SEQ ID NO: 51512 - DNA, 20 bp, synthetic construct
  misc_feature 1..20: note = chemically synthesized
  source 1..20: mol_type = other DNA
ccaccttggggctctaccag

SEQ ID NO: 51513 - DNA, 20 bp, synthetic construct
  misc_feature 1..20: note = chemically synthesized
  source 1..20: mol_type = other DNA
tctaccaggcgagtgaccca

SEQ ID NO: 51514 - DNA, 20 bp, synthetic construct
  misc_feature 1..20: note = chemically synthesized
  source 1..20: mol_type = other DNA
tactggctgtgaggcctcag

SEQ ID NO: 51515 - DNA, 20 bp, synthetic construct
  misc_feature 1..20: note = chemically synthesized
  source 1..20: mol_type = other DNA
aatttccctatctgtaaaat

SEQ ID NO: 51516 - DNA, 20 bp, synthetic construct
  misc_feature 1..20: note = chemically synthesized
  source 1..20: mol_type = other DNA
gtaccttgttgagctgctgt

SEQ ID NO: 51517 - DNA, 20 bp, synthetic construct
  misc_feature 1..20: note = chemically synthesized
  source 1..20: mol_type = other DNA
agttcaaggaaagctcagag

SEQ ID NO: 51518 - DNA, 20 bp, synthetic construct
  misc_feature 1..20: note = chemically synthesized
  source 1..20: mol_type = other DNA
ggaaagctcagagacgggta

SEQ ID NO: 51519 - DNA, 20 bp, synthetic construct
  misc_feature 1..20: note = chemically synthesized
  source 1..20: mol_type = other DNA
gtgtcaggggctggtgtcac

SEQ ID NO: 51520 - DNA, 20 bp, synthetic construct
  misc_feature 1..20: note = chemically synthesized
  source 1..20: mol_type = other DNA
aggggctggtgtcactgggg

SEQ ID NO: 51521 - DNA, 20 bp, synthetic construct
  misc_feature 1..20: note = chemically synthesized
  source 1..20: mol_type = other DNA
tcattcagttaccctgtgaa

SEQ ID NO: 51522 - DNA, 20 bp, synthetic construct
  misc_feature 1..20: note = chemically synthesized
  source 1..20: mol_type = other DNA
ctgtccttcccctgagctgg

SEQ ID NO: 51523 - DNA, 20 bp, synthetic construct
  misc_feature 1..20: note = chemically synthesized
  source 1..20: mol_type = other DNA
ccttcccctgagctggctga

SEQ ID NO: 51524 - DNA, 20 bp, synthetic construct
  misc_feature 1..20: note = chemically synthesized
  source 1..20: mol_type = other DNA
tgtccctcccacctgtggaa

SEQ ID NO: 51525 - DNA, 20 bp, synthetic construct
  misc_feature 1..20: note = chemically synthesized
  source 1..20: mol_type = other DNA
gtctcttctggcaggcacag

SEQ ID NO: 51526 - DNA, 20 bp, synthetic construct
  misc_feature 1..20: note = chemically synthesized
  source 1..20: mol_type = other DNA
aggttgccgcccctccaacc

SEQ ID NO: 51527 - DNA, 20 bp, synthetic construct
  misc_feature 1..20: note = chemically synthesized
  source 1..20: mol_type = other DNA
ttggttcagctcaggactct

SEQ ID NO: 51528 - DNA, 20 bp, synthetic construct
  misc_feature 1..20: note = chemically synthesized
  source 1..20: mol_type = other DNA
gcccacccaggaagtagact

SEQ ID NO: 51529 - DNA, 20 bp, synthetic construct
  misc_feature 1..20: note = chemically synthesized
  source 1..20: mol_type = other DNA
ggacaagtcaccctctccct

SEQ ID NO: 51530 - DNA, 20 bp, synthetic construct
  misc_feature 1..20: note = chemically synthesized
  source 1..20: mol_type = other DNA
aggtacagtcacactgccca

SEQ ID NO: 51531 - DNA, 20 bp, synthetic construct
  misc_feature 1..20: note = chemically synthesized
  source 1..20: mol_type = other DNA
cttgcggcaactcaaaggga

SEQ ID NO: 51532 - DNA, 20 bp, synthetic construct
  misc_feature 1..20: note = chemically synthesized
  source 1..20: mol_type = other DNA
aagggagagggtgacttgtc

SEQ ID NO: 51533 - DNA, 20 bp, synthetic construct
  misc_feature 1..20: note = chemically synthesized
  source 1..20: mol_type = other DNA
caggtgacatgccgggctgt

SEQ ID NO: 51534 - DNA, 20 bp, synthetic construct
  misc_feature 1..20: note = chemically synthesized
  source 1..20: mol_type = other DNA
ctccacccgaagtctacttc

SEQ ID NO: 51535 - DNA, 20 bp, synthetic construct
  misc_feature 1..20: note = chemically synthesized
  source 1..20: mol_type = other DNA
tgcctccacgcagcaaccct

SEQ ID NO: 51536 - DNA, 20 bp, synthetic construct
  misc_feature 1..20: note = chemically synthesized
  source 1..20: mol_type = other DNA
agctgaaccaagaaggagga

SEQ ID NO: 51537 - DNA, 20 bp, synthetic construct
  misc_feature 1..20: note = chemically synthesized
  source 1..20: mol_type = other DNA
gcctagccgctgctgctgcc

SEQ ID NO: 51538 - DNA, 20 bp, synthetic construct
  misc_feature 1..20: note = chemically synthesized
  source 1..20: mol_type = other DNA
gtgggagggacagcagggct

SEQ ID NO: 51539 - DNA, 20 bp, synthetic construct
  misc_feature 1..20: note = chemically synthesized
  source 1..20: mol_type = other DNA
gggacagcagggcttagagt

SEQ ID NO: 51540 - DNA, 20 bp, synthetic construct
  misc_feature 1..20: note = chemically synthesized
  source 1..20: mol_type = other DNA
cacagcccagtgctggagct

SEQ ID NO: 51541 - DNA, 20 bp, synthetic construct
  misc_feature 1..20: note = chemically synthesized
  source 1..20: mol_type = other DNA
gcccagtgctggagctgtga

SEQ ID NO: 51542 - DNA, 20 bp, synthetic construct
  misc_feature 1..20: note = chemically synthesized
  source 1..20: mol_type = other DNA
tgtgagtggatgtagagcag

SEQ ID NO: 51543 - DNA, 20 bp, synthetic construct
  misc_feature 1..20: note = chemically synthesized
  source 1..20: mol_type = other DNA
ggacaggggccctgaagcca

SEQ ID NO: 51544 - DNA, 20 bp, synthetic construct
  misc_feature 1..20: note = chemically synthesized
  source 1..20: mol_type = other DNA
gagctcagagagaaggggag

SEQ ID NO: 51545 - DNA, 20 bp, synthetic construct
  misc_feature 1..20: note = chemically synthesized
  source 1..20: mol_type = other DNA
agtttcccgctgcctgaaag

SEQ ID NO: 51546 - DNA, 20 bp, synthetic construct
  misc_feature 1..20: note = chemically synthesized
  source 1..20: mol_type = other DNA
ggtggtacctactcccttca

SEQ ID NO: 51547 - DNA, 20 bp, synthetic construct
  misc_feature 1..20: note = chemically synthesized
  source 1..20: mol_type = other DNA
ctactcccttcacagggtaa

SEQ ID NO: 51548 - DNA, 20 bp, synthetic construct
  misc_feature 1..20: note = chemically synthesized
  source 1..20: mol_type = other DNA
tgaggcctcacagccagtaa

SEQ ID NO: 51549 - DNA, 20 bp, synthetic construct
  misc_feature 1..20: note = chemically synthesized
  source 1..20: mol_type = other DNA
cagtaagtgggttccctggt

SEQ ID NO: 51550 - DNA, 20 bp, synthetic construct
  misc_feature 1..20: note = chemically synthesized
  source 1..20: mol_type = other DNA
tggtctgaatgtgtgtgctg

SEQ ID NO: 51551 - DNA, 20 bp, synthetic construct
  misc_feature 1..20: note = chemically synthesized
  source 1..20: mol_type = other DNA
tgtgtgtgctggaggatcct

SEQ ID NO: 51552 - DNA, 20 bp, synthetic construct
  misc_feature 1..20: note = chemically synthesized
  source 1..20: mol_type = other DNA
tggaggcataaatgggactg

SEQ ID NO: 51553 - DNA, 20 bp, synthetic construct
  misc_feature 1..20: note = chemically synthesized
  source 1..20: mol_type = other DNA
gccagctcccaagcaggttt

SEQ ID NO: 51554 - DNA, 20 bp, synthetic construct
  misc_feature 1..20: note = chemically synthesized
  source 1..20: mol_type = other DNA
aatctgatttaggcttttaa

SEQ ID NO: 51555 - DNA, 20 bp, synthetic construct
  misc_feature 1..20: note = chemically synthesized
  source 1..20: mol_type = other DNA
ccaaaggcctccaacaaccc

SEQ ID NO: 51556 - DNA, 20 bp, synthetic construct
  misc_feature 1..20: note = chemically synthesized
  source 1..20: mol_type = other DNA
aaagaaactccaagctgtat

SEQ ID NO: 51557 - DNA, 20 bp, synthetic construct
  misc_feature 1..20: note = chemically synthesized
  source 1..20: mol_type = other DNA
ggcacttcacaagcatgctt

SEQ ID NO: 51558 - DNA, 20 bp, synthetic construct
  misc_feature 1..20: note = chemically synthesized
  source 1..20: mol_type = other DNA
gaatgaaacttccaactctt

SEQ ID NO: 51559 - DNA, 20 bp, synthetic construct
  misc_feature 1..20: note = chemically synthesized
  source 1..20: mol_type = other DNA
ttttccatcgggaccatcaa

SEQ ID NO: 51560 - DNA, 20 bp, synthetic construct
  misc_feature 1..20: note = chemically synthesized
  source 1..20: mol_type = other DNA
gtgtttgtgtctaaggctga

SEQ ID NO: 51561 - DNA, 20 bp, synthetic construct
  misc_feature 1..20: note = chemically synthesized
  source 1..20: mol_type = other DNA
ctaaggctgactgggtaact

SEQ ID NO: 51562 - DNA, 20 bp, synthetic construct
  misc_feature 1..20: note = chemically synthesized
  source 1..20: mol_type = other DNA
gtcttcagcatcaggcattt

SEQ ID NO: 51563 - DNA, 20 bp, synthetic construct
  misc_feature 1..20: note = chemically synthesized
  source 1..20: mol_type = other DNA
ctaccagtggaacagccact

SEQ ID NO: 51564 - DNA, 20 bp, synthetic construct
  misc_feature 1..20: note = chemically synthesized
  source 1..20: mol_type = other DNA
ctgtttgctcctccgataac

SEQ ID NO: 51565 - DNA, 20 bp, synthetic construct
  misc_feature 1..20: note = chemically synthesized
  source 1..20: mol_type = other DNA
cagcctcccccgttgcccct

SEQ ID NO: 51566 - DNA, 20 bp, synthetic construct
  misc_feature 1..20: note = chemically synthesized
  source 1..20: mol_type = other DNA
accaccactgacctgggaca

SEQ ID NO: 51567 - DNA, 20 bp, synthetic construct
  misc_feature 1..20: note = chemically synthesized
  source 1..20: mol_type = other DNA
cagcaggtctggggcaggag

SEQ ID NO: 51568 - DNA, 20 bp, synthetic construct
  misc_feature 1..20: note = chemically synthesized
  source 1..20: mol_type = other DNA
ctggggcaggaggggggttg

SEQ ID NO: 51569 - DNA, 20 bp, synthetic construct
  misc_feature 1..20: note = chemically synthesized
  source 1..20: mol_type = other DNA
ggcaggaggggggttgtgga

SEQ ID NO: 51570 - DNA, 20 bp, synthetic construct
  misc_feature 1..20: note = chemically synthesized
  source 1..20: mol_type = other DNA
ttcataataacagcagccat

SEQ ID NO: 51571 - DNA, 20 bp, synthetic construct
  misc_feature 1..20: note = chemically synthesized
  source 1..20: mol_type = other DNA
tcccccctcggtacctcctg

SEQ ID NO: 51572 - DNA, 20 bp, synthetic construct
  misc_feature 1..20: note = chemically synthesized
  source 1..20: mol_type = other DNA
actggttcctgtaagcagaa

SEQ ID NO: 51573 - DNA, 20 bp, synthetic construct
  misc_feature 1..20: note = chemically synthesized
  source 1..20: mol_type = other DNA
tcctgtaagcagaagtggat

SEQ ID NO: 51574 - DNA, 20 bp, synthetic construct
  misc_feature 1..20: note = chemically synthesized
  source 1..20: mol_type = other DNA
ggtctgcagtcctggcaccc

SEQ ID NO: 51575 - DNA, 20 bp, synthetic construct
  misc_feature 1..20: note = chemically synthesized
  source 1..20: mol_type = other DNA
gaggaggttaaggtccagag

SEQ ID NO: 51576 - DNA, 20 bp, synthetic construct
  misc_feature 1..20: note = chemically synthesized
  source 1..20: mol_type = other DNA
tggtcatatctggaggggat

SEQ ID NO: 51577 - DNA, 20 bp, synthetic construct
  misc_feature 1..20: note = chemically synthesized
  source 1..20: mol_type = other DNA
acctcctcatctatagaagg

SEQ ID NO: 51578 - DNA, 20 bp, synthetic construct
  misc_feature 1..20: note = chemically synthesized
  source 1..20: mol_type = other DNA
cagacagaggagctgtgcaa

SEQ ID NO: 51579 - DNA, 20 bp, synthetic construct
  misc_feature 1..20: note = chemically synthesized
  source 1..20: mol_type = other DNA
cagaggagctgtgcaaacag

SEQ ID NO: 51580 - DNA, 20 bp, synthetic construct
  misc_feature 1..20: note = chemically synthesized
  source 1..20: mol_type = other DNA
aaggagtcattgtacctggc

SEQ ID NO: 51581 - DNA, 20 bp, synthetic construct
  misc_feature 1..20: note = chemically synthesized
  source 1..20: mol_type = other DNA
gctggccctctgctctcact

SEQ ID NO: 51582 - DNA, 20 bp, synthetic construct
  misc_feature 1..20: note = chemically synthesized
  source 1..20: mol_type = other DNA
gagacgggtactgggtgtgc

SEQ ID NO: 51583 - DNA, 20 bp, synthetic construct
  misc_feature 1..20: note = chemically synthesized
  source 1..20: mol_type = other DNA
tcacactgcccagaggatta

SEQ ID NO: 51584 - DNA, 20 bp, synthetic construct
  misc_feature 1..20: note = chemically synthesized
  source 1..20: mol_type = other DNA
tcttccctctgcagctggcc

SEQ ID NO: 51585 - DNA, 20 bp, synthetic construct
  misc_feature 1..20: note = chemically synthesized
  source 1..20: mol_type = other DNA
aaacaaaggcccagagaggg

SEQ ID NO: 51586 - DNA, 20 bp, synthetic construct
  misc_feature 1..20: note = chemically synthesized
  source 1..20: mol_type = other DNA
agagtgggggccatgtatcc

SEQ ID NO: 51587 - DNA, 20 bp, synthetic construct
  misc_feature 1..20: note = chemically synthesized
  source 1..20: mol_type = other DNA
ctggttttccaggagcaaaa

SEQ ID NO: 51588 - DNA, 20 bp, synthetic construct
  misc_feature 1..20: note = chemically synthesized
  source 1..20: mol_type = other DNA
tgtttctgtttttgctcctg

SEQ ID NO: 51589 - DNA, 20 bp, synthetic construct
  misc_feature 1..20: note = chemically synthesized
  source 1..20: mol_type = other DNA
gggggtcattgtgcagatgg

SEQ ID NO: 51590 - DNA, 20 bp, synthetic construct
  misc_feature 1..20: note = chemically synthesized
  source 1..20: mol_type = other DNA
cacactggttttccaggagc

SEQ ID NO: 51591 - DNA, 20 bp, synthetic construct
  misc_feature 1..20: note = chemically synthesized
  source 1..20: mol_type = other DNA
ccaagcagtaggagaggtgg

SEQ ID NO: 51592 - DNA, 20 bp, synthetic construct
  misc_feature 1..20: note = chemically synthesized
  source 1..20: mol_type = other DNA
gtgcaaacagaaagaaatgg

SEQ ID NO: 51593 - DNA, 20 bp, synthetic construct
  misc_feature 1..20: note = chemically synthesized
  source 1..20: mol_type = other DNA
acctagacaccctcatccac

SEQ ID NO: 51594 - DNA, 20 bp, synthetic construct
  misc_feature 1..20: note = chemically synthesized
  source 1..20: mol_type = other DNA
tctcgcagtgaaaggcatac

SEQ ID NO: 51595 - DNA, 20 bp, synthetic construct
  misc_feature 1..20: note = chemically synthesized
  source 1..20: mol_type = other DNA
gtcgcccgcctacgctgccc

SEQ ID NO: 51596 - DNA, 20 bp, synthetic construct
  misc_feature 1..20: note = chemically synthesized
  source 1..20: mol_type = other DNA
gacgctttgcctgggcagtg

SEQ ID NO: 51597 - DNA, 20 bp, synthetic construct
  misc_feature 1..20: note = chemically synthesized
  source 1..20: mol_type = other DNA
gagctgtgctgcctcaggca

SEQ ID NO: 51598 - DNA, 20 bp, synthetic construct
  misc_feature 1..20: note = chemically synthesized
  source 1..20: mol_type = other DNA
cttcacctctctgaaccagg

SEQ ID NO: 51599 - DNA, 20 bp, synthetic construct
  misc_feature 1..20: note = chemically synthesized
  source 1..20: mol_type = other DNA
cacctgcatcccaaagagtt

SEQ ID NO: 51600 - DNA, 20 bp, synthetic construct
  misc_feature 1..20: note = chemically synthesized
  source 1..20: mol_type = other DNA
gttggaagtttcattcccaa

SEQ ID NO: 51601 - DNA, 20 bp, synthetic construct
  misc_feature 1..20: note = chemically synthesized
  source 1..20: mol_type = other DNA
ttatgtgggtctgcacagcc

SEQ ID NO: 51602 - DNA, 20 bp, synthetic construct
  misc_feature 1..20: note = chemically synthesized
  source 1..20: mol_type = other DNA
tcaattttgaccagcctcag

SEQ ID NO: 51603 - DNA, 20 bp, synthetic construct
  misc_feature 1..20: note = chemically synthesized
  source 1..20: mol_type = other DNA
ttgaccagcctcaggcctgt

SEQ ID NO: 51604 - DNA, 20 bp, synthetic construct
  misc_feature 1..20: note = chemically synthesized
  source 1..20: mol_type = other DNA
gaaaaccagtgtgatccgta

SEQ ID NO: 51605 - DNA, 20 bp, synthetic construct
  misc_feature 1..20: note = chemically synthesized
  source 1..20: mol_type = other DNA
agtgtgatccgtatacagct

SEQ ID NO: 51606 - DNA, 20 bp, synthetic construct
  misc_feature 1..20: note = chemically synthesized
  source 1..20: mol_type = other DNA
gttgaggctagtggggcccc

SEQ ID NO: 51607 - DNA, 20 bp, synthetic construct
  misc_feature 1..20: note = chemically synthesized
  source 1..20: mol_type = other DNA
caatccctttaaaagcctaa

SEQ ID NO: 51608 - DNA, 20 bp, synthetic construct
  misc_feature 1..20: note = chemically synthesized
  source 1..20: mol_type = other DNA
gcccgctgtgcaacccgcaa

SEQ ID NO: 51609 - DNA, 20 bp, synthetic construct
  misc_feature 1..20: note = chemically synthesized
  source 1..20: mol_type = other DNA
tggctgtgaggcctcaggtg

SEQ ID NO: 51610 - DNA, 20 bp, synthetic construct
  misc_feature 1..20: note = chemically synthesized
  source 1..20: mol_type = other DNA
tgtaccttgttgagctgctg

SEQ ID NO: 51611 - DNA, 20 bp, synthetic construct
  misc_feature 1..20: note = chemically synthesized
  source 1..20: mol_type = other DNA
ggtggggtgggccacacttg

SEQ ID NO: 51612 - DNA, 20 bp, synthetic construct
  misc_feature 1..20: note = chemically synthesized
  source 1..20: mol_type = other DNA
ccttccctgcagctccatcc

SEQ ID NO: 51613 - DNA, 20 bp, synthetic construct
  misc_feature 1..20: note = chemically synthesized
  source 1..20: mol_type = other DNA
atttcttcccctctctgggc

SEQ ID NO: 51614 - DNA, 20 bp, synthetic construct
  misc_feature 1..20: note = chemically synthesized
  source 1..20: mol_type = other DNA
cagtaggctggggaggggcg

SEQ ID NO: 51615 - DNA, 20 bp, synthetic construct
  misc_feature 1..20: note = chemically synthesized
  source 1..20: mol_type = other DNA
gaggtacagtcacactgccc

SEQ ID NO: 51616 - DNA, 20 bp, synthetic construct
  misc_feature 1..20: note = chemically synthesized
  source 1..20: mol_type = other DNA
agacctggcaccaataactg

SEQ ID NO: 51617 - DNA, 20 bp, synthetic construct
  misc_feature 1..20: note = chemically synthesized
  source 1..20: mol_type = other DNA
caggtgacatgccgggctgt

SEQ ID NO: 51618 - DNA, 20 bp, synthetic construct
  misc_feature 1..20: note = chemically synthesized
  source 1..20: mol_type = other DNA
cctgtgcctgccagaagaga

SEQ ID NO: 51619 - DNA, 20 bp, synthetic construct
  misc_feature 1..20: note = chemically synthesized
  source 1..20: mol_type = other DNA
cagaagagacagagcttgag

SEQ ID NO: 51620 - DNA, 20 bp, synthetic construct
  misc_feature 1..20: note = chemically synthesized
  source 1..20: mol_type = other DNA
tccacaggtgggagggacag

SEQ ID NO: 51621 - DNA, 20 bp, synthetic construct
  misc_feature 1..20: note = chemically synthesized
  source 1..20: mol_type = other DNA
gaaggggaggggagtctgag

SEQ ID NO: 51622 - DNA, 20 bp, synthetic construct
  misc_feature 1..20: note = chemically synthesized
  source 1..20: mol_type = other DNA
ggagggagggcagcatcagg

SEQ ID NO: 51623 - DNA, 20 bp, synthetic construct
  misc_feature 1..20: note = chemically synthesized
  source 1..20: mol_type = other DNA
ggcacacccagtacccgtct

SEQ ID NO: 51624 - DNA, 20 bp, synthetic construct
  misc_feature 1..20: note = chemically synthesized
  source 1..20: mol_type = other DNA
gcacgtacgccagctcccaa

SEQ ID NO: 51625 - DNA, 20 bp, synthetic construct
  misc_feature 1..20: note = chemically synthesized
  source 1..20: mol_type = other DNA
gttgcacagcgggcgatgca

SEQ ID NO: 51626 - DNA, 20 bp, synthetic construct
  misc_feature 1..20: note = chemically synthesized
  source 1..20: mol_type = other DNA
agcgggcgatgcaatctgat

SEQ ID NO: 51627 - DNA, 20 bp, synthetic construct
  misc_feature 1..20: note = chemically synthesized
  source 1..20: mol_type = other DNA
caatctgatttaggctttta

SEQ ID NO: 51628 - DNA, 20 bp, synthetic construct
  misc_feature 1..20: note = chemically synthesized
  source 1..20: mol_type = other DNA
ccaagctgtatacggatcac

SEQ ID NO: 51629 - DNA, 20 bp, synthetic construct
  misc_feature 1..20: note = chemically synthesized
  source 1..20: mol_type = other DNA
tcacccgaggcacttcacaa

SEQ ID NO: 51630 - DNA, 20 bp, synthetic construct
  misc_feature 1..20: note = chemically synthesized
  source 1..20: mol_type = other DNA
agcacagctcttctttacag

SEQ ID NO: 51631 - DNA, 20 bp, synthetic construct
  misc_feature 1..20: note = chemically synthesized
  source 1..20: mol_type = other DNA
ttccatcgggaccatcaaga

SEQ ID NO: 51632 - DNA, 20 bp, synthetic construct
  misc_feature 1..20: note = chemically synthesized
  source 1..20: mol_type = other DNA
gagcggtctctccgctctga

SEQ ID NO: 51633 - DNA, 20 bp, synthetic construct
  misc_feature 1..20: note = chemically synthesized
  source 1..20: mol_type = other DNA
gctaccagtggaacagccac

SEQ ID NO: 51634 - DNA, 20 bp, synthetic construct
  misc_feature 1..20: note = chemically synthesized
  source 1..20: mol_type = other DNA
ccaccttggacacaggacgc

SEQ ID NO: 51635 - DNA, 20 bp, synthetic construct
  misc_feature 1..20: note = chemically synthesized
  source 1..20: mol_type = other DNA
tcccagccagtggacttagc

SEQ ID NO: 51636 - DNA, 20 bp, synthetic construct
  misc_feature 1..20: note = chemically synthesized
  source 1..20: mol_type = other DNA
ccccgttgcccctctggatc

SEQ ID NO: 51637 - DNA, 20 bp, synthetic construct
  misc_feature 1..20: note = chemically synthesized
  source 1..20: mol_type = other DNA
cgaggacagggccctgtctc

SEQ ID NO: 51638 - DNA, 20 bp, synthetic construct
  misc_feature 1..20: note = chemically synthesized
  source 1..20: mol_type = other DNA
ttcactgcgagaggttctgg

SEQ ID NO: 51639 - DNA, 20 bp, synthetic construct
  misc_feature 1..20: note = chemically synthesized
  source 1..20: mol_type = other DNA
cagcagccatgagggttgtg

SEQ ID NO: 51640 - DNA, 20 bp, synthetic construct
  misc_feature 1..20: note = chemically synthesized
  source 1..20: mol_type = other DNA
aacaaagcgcagccatttct

SEQ ID NO: 51641 - DNA, 20 bp, synthetic construct
  misc_feature 1..20: note = chemically synthesized
  source 1..20: mol_type = other DNA
ataagcctcaccacctctcc

SEQ ID NO: 51642 - DNA, 22 bp, synthetic construct
  misc_feature 1..22: note = chemically synthesized
  source 1..22: mol_type = other DNA
aggcctggcacaggtctgttcc

SEQ ID NO: 51643 - DNA, 22 bp, synthetic construct
  misc_feature 1..22: note = chemically synthesized
  source 1..22: mol_type = other DNA
gcacaggtctgttcctggtcat

SEQ ID NO: 51644 - DNA, 22 bp, synthetic construct
  misc_feature 1..22: note = chemically synthesized
  source 1..22: mol_type = other DNA
ttcctggtcatatctggagggg

SEQ ID NO: 51645 - DNA, 22 bp, synthetic construct
  misc_feature 1..22: note = chemically synthesized
  source 1..22: mol_type = other DNA
ctggtcatatctggaggggatg

SEQ ID NO: 51646 - DNA, 22 bp, synthetic construct
  misc_feature 1..22: note = chemically synthesized
  source 1..22: mol_type = other DNA
gtcatatctggaggggatggag

SEQ ID NO: 51647 - DNA, 22 bp, synthetic construct
  misc_feature 1..22: note = chemically synthesized
  source 1..22: mol_type = other DNA
gaggggatggagaatgtgagcc

SEQ ID NO: 51648 - DNA, 22 bp, synthetic construct
  misc_feature 1..22: note = chemically synthesized
  source 1..22: mol_type = other DNA
ctccccacccctctctggacct

SEQ ID NO: 51649 - DNA, 22 bp, synthetic construct
  misc_feature 1..22: note = chemically synthesized
  source 1..22: mol_type = other DNA
cccacccctctctggaccttaa

SEQ ID NO: 51650 - DNA, 22 bp, synthetic construct
  misc_feature 1..22: note = chemically synthesized
  source 1..22: mol_type = other DNA
tctggaccttaacctcctcatc

SEQ ID NO: 51651 - DNA, 22 bp, synthetic construct
  misc_feature 1..22: note = chemically synthesized
  source 1..22: mol_type = other DNA
tggaccttaacctcctcatcta

SEQ ID NO: 51652 - DNA, 22 bp, synthetic construct
  misc_feature 1..22: note = chemically synthesized
  source 1..22: mol_type = other DNA
gaccttaacctcctcatctata

SEQ ID NO: 51653 - DNA, 22 bp, synthetic construct
  misc_feature 1..22: note = chemically synthesized
  source 1..22: mol_type = other DNA
aacctcctcatctatagaaggg

SEQ ID NO: 51654 - DNA, 22 bp, synthetic construct
  misc_feature 1..22: note = chemically synthesized
  source 1..22: mol_type = other DNA
acctcctcatctatagaagggg

SEQ ID NO: 51655 - DNA, 22 bp, synthetic construct
  misc_feature 1..22: note = chemically synthesized
  source 1..22: mol_type = other DNA
ctcatctatagaaggggagaaa

SEQ ID NO: 51656 - DNA, 22 bp, synthetic construct
  misc_feature 1..22: note = chemically synthesized
  source 1..22: mol_type = other DNA
atctatagaaggggagaaagat

SEQ ID NO: 51657 - DNA, 22 bp, synthetic construct
  misc_feature 1..22: note = chemically synthesized
  source 1..22: mol_type = other DNA
tagaaggggagaaagatgcatg

SEQ ID NO: 51658 - DNA, 22 bp, synthetic construct
  misc_feature 1..22: note = chemically synthesized
  source 1..22: mol_type = other DNA
ataggagacaacagacaggagc

SEQ ID NO: 51659 - DNA, 22 bp, synthetic construct
  misc_feature 1..22: note = chemically synthesized
  source 1..22: mol_type = other DNA
taggagacaacagacaggagcc

SEQ ID NO: 51660 - DNA, 22 bp, synthetic construct
  misc_feature 1..22: note = chemically synthesized
  source 1..22: mol_type = other DNA
tgcaaacagaaagaaatggctg

SEQ ID NO: 51661 - DNA, 22 bp, synthetic construct
  misc_feature 1..22: note = chemically synthesized
  source 1..22: mol_type = other DNA
cgctttgttgctgttgctgtat

SEQ ID NO: 51662 - DNA, 22 bp, synthetic construct
  misc_feature 1..22: note = chemically synthesized
  source 1..22: mol_type = other DNA
tgttgctgttgctgtatcttgg

SEQ ID NO: 51663 - DNA, 22 bp, synthetic construct
  misc_feature 1..22: note = chemically synthesized
  source 1..22: mol_type = other DNA
gttgctgttgctgtatcttggc

SEQ ID NO: 51664 - DNA, 22 bp, synthetic construct
  misc_feature 1..22: note = chemically synthesized
  source 1..22: mol_type = other DNA
ttgctgttgctgtatcttggct

SEQ ID NO: 51665 - DNA, 22 bp, synthetic construct
  misc_feature 1..22: note = chemically synthesized
  source 1..22: mol_type = other DNA
ctgttgctgtatcttggctggt

SEQ ID NO: 51666 - DNA, 22 bp, synthetic construct
  misc_feature 1..22: note = chemically synthesized
  source 1..22: mol_type = other DNA
ttgctgtatcttggctggtgtc

SEQ ID NO: 51667 - DNA, 22 bp, synthetic construct
  misc_feature 1..22: note = chemically synthesized
  source 1..22: mol_type = other DNA
ctgtatcttggctggtgtcccc

SEQ ID NO: 51668 - DNA, 22 bp, synthetic construct
  misc_feature 1..22: note = chemically synthesized
  source 1..22: mol_type = other DNA
tatcttggctggtgtcccccat

SEQ ID NO: 51669 - DNA, 22 bp, synthetic construct
  misc_feature 1..22: note = chemically synthesized
  source 1..22: mol_type = other DNA
ggctggtgtcccccatcctggg

SEQ ID NO: 51670 - DNA, 22 bp, synthetic construct
  misc_feature 1..22: note = chemically synthesized
  source 1..22: mol_type = other DNA
gctggtgtcccccatcctgggg

SEQ ID NO: 51671 - DNA, 22 bp, synthetic construct
  misc_feature 1..22: note = chemically synthesized
  source 1..22: mol_type = other DNA
gtgtcccccatcctggggtgcc

SEQ ID NO: 51672 - DNA, 22 bp, synthetic construct
  misc_feature 1..22: note = chemically synthesized
  source 1..22: mol_type = other DNA
gggtgccaggactgcagaccta

SEQ ID NO: 51673 - DNA, 22 bp, synthetic construct
  misc_feature 1..22: note = chemically synthesized
  source 1..22: mol_type = other DNA
cagacctagacaccctcatcca

SEQ ID NO: 51674 - DNA, 22 bp, synthetic construct
  misc_feature 1..22: note = chemically synthesized
  source 1..22: mol_type = other DNA
gacaccctcatccacttctgct

SEQ ID NO: 51675 - DNA, 22 bp, synthetic construct
  misc_feature 1..22: note = chemically synthesized
  source 1..22: mol_type = other DNA
atccacttctgcttacaggaac

SEQ ID NO: 51676 - DNA, 22 bp, synthetic construct
  misc_feature 1..22: note = chemically synthesized
  source 1..22: mol_type = other DNA
ctgcttacaggaaccagtgtat

SEQ ID NO: 51677 - DNA, 22 bp, synthetic construct
  misc_feature 1..22: note = chemically synthesized
  source 1..22: mol_type = other DNA
tgcttacaggaaccagtgtatc

SEQ ID NO: 51678 - DNA, 22 bp, synthetic construct
  misc_feature 1..22: note = chemically synthesized
  source 1..22: mol_type = other DNA
cttacaggaaccagtgtatcca

SEQ ID NO: 51679 - DNA, 22 bp, synthetic construct
  misc_feature 1..22: note = chemically synthesized
  source 1..22: mol_type = other DNA
acaggaaccagtgtatccacca

SEQ ID NO: 51680 - DNA, 22 bp, synthetic construct
  misc_feature 1..22: note = chemically synthesized
  source 1..22: mol_type = other DNA
caggaaccagtgtatccaccag

SEQ ID NO: 51681 - DNA, 22 bp, synthetic construct
  misc_feature 1..22: note = chemically synthesized
  source 1..22: mol_type = other DNA
ggaaacaggacacaaccctcat

SEQ ID NO: 51682 - DNA, 22 bp, synthetic construct
  misc_feature 1..22: note = chemically synthesized
  source 1..22: mol_type = other DNA
atggctgctgttattatgaaaa

SEQ ID NO: 51683 - DNA, 22 bp, synthetic construct
  misc_feature 1..22: note = chemically synthesized
  source 1..22: mol_type = other DNA
ctgttattatgaaaataggagc

SEQ ID NO: 51684 - DNA, 22 bp, synthetic construct
  misc_feature 1..22: note = chemically synthesized
  source 1..22: mol_type = other DNA
ttattatgaaaataggagctca

SEQ ID NO: 51685 - DNA, 22 bp, synthetic construct
  misc_feature 1..22: note = chemically synthesized
  source 1..22: mol_type = other DNA
ttatgaaaataggagctcagct

SEQ ID NO: 51686 - DNA, 22 bp, synthetic construct
  misc_feature 1..22: note = chemically synthesized
  source 1..22: mol_type = other DNA
tgaaaataggagctcagctgca

SEQ ID NO: 51687 - DNA, 22 bp, synthetic construct
  misc_feature 1..22: note = chemically synthesized
  source 1..22: mol_type = other DNA
agctgcagcctctccatctgcc

SEQ ID NO: 51688 - DNA, 22 bp, synthetic construct
  misc_feature 1..22: note = chemically synthesized
  source 1..22: mol_type = other DNA
cagcctctccatctgccctgca

SEQ ID NO: 51689 - DNA, 22 bp, synthetic construct
  misc_feature 1..22: note = chemically synthesized
  source 1..22: mol_type = other DNA
tccatctgccctgcacctcagc

SEQ ID NO: 51690 - DNA, 22 bp, synthetic construct
  misc_feature 1..22: note = chemically synthesized
  source 1..22: mol_type = other DNA
catctgccctgcacctcagcag

SEQ ID NO: 51691 - DNA, 22 bp, synthetic construct
  misc_feature 1..22: note = chemically synthesized
  source 1..22: mol_type = other DNA
ccctgcacctcagcaggcggat

SEQ ID NO: 51692 - DNA, 22 bp, synthetic construct
  misc_feature 1..22: note = chemically synthesized
  source 1..22: mol_type = other DNA
cacctcagcaggcggataccca

SEQ ID NO: 51693 - DNA, 22 bp, synthetic construct
  misc_feature 1..22: note = chemically synthesized
  source 1..22: mol_type = other DNA
agcaggcggatacccactccac

SEQ ID NO: 51694 - DNA, 22 bp, synthetic construct
  misc_feature 1..22: note = chemically synthesized
  source 1..22: mol_type = other DNA
cacaacccccctcctgccccag

SEQ ID NO: 51695 - DNA, 22 bp, synthetic construct
  misc_feature 1..22: note = chemically synthesized
  source 1..22: mol_type = other DNA
ctgccccagacctgctgcctgc

SEQ ID NO: 51696 - DNA, 22 bp, synthetic construct
  misc_feature 1..22: note = chemically synthesized
  source 1..22: mol_type = other DNA
ccccagacctgctgcctgcctg

SEQ ID NO: 51697 - DNA, 22 bp, synthetic construct
  misc_feature 1..22: note = chemically synthesized
  source 1..22: mol_type = other DNA
ctgcctgcctgggccatgggga

SEQ ID NO: 51698 - DNA, 22 bp, synthetic construct
  misc_feature 1..22: note = chemically synthesized
  source 1..22: mol_type = other DNA
cctgcctgggccatggggagct

SEQ ID NO: 51699 - DNA, 22 bp, synthetic construct
  misc_feature 1..22: note = chemically synthesized
  source 1..22: mol_type = other DNA
cctgggccatggggagctcaga

SEQ ID NO: 51700 - DNA, 22 bp, synthetic construct
  misc_feature 1..22: note = chemically synthesized
  source 1..22: mol_type = other DNA
ggccatggggagctcagaagcc

SEQ ID NO: 51701 - DNA, 22 bp, synthetic construct
  misc_feature 1..22: note = chemically synthesized
  source 1..22: mol_type = other DNA
agaagcctctccagaacctctc

SEQ ID NO: 51702 - DNA, 22 bp, synthetic construct
  misc_feature 1..22: note = chemically synthesized
  source 1..22: mol_type = other DNA
tccagaacctctcgcagtgaaa

SEQ ID NO: 51703 - DNA, 22 bp, synthetic construct
  misc_feature 1..22: note = chemically synthesized
  source 1..22: mol_type = other DNA
cagaacctctcgcagtgaaagg

SEQ ID NO: 51704 - DNA, 22 bp, synthetic construct
  misc_feature 1..22: note = chemically synthesized
  source 1..22: mol_type = other DNA
tcgcagtgaaaggcatacttac

SEQ ID NO: 51705 - DNA, 22 bp, synthetic construct
  misc_feature 1..22: note = chemically synthesized
  source 1..22: mol_type = other DNA
gcagtgaaaggcatacttacga

SEQ ID NO: 51706 - DNA, 22 bp, synthetic construct
  misc_feature 1..22: note = chemically synthesized
  source 1..22: mol_type = other DNA
acgattcactgtcccaggtcag

SEQ ID NO: 51707 - DNA, 22 bp, synthetic construct
  misc_feature 1..22: note = chemically synthesized
  source 1..22: mol_type = other DNA
cgattcactgtcccaggtcagt

SEQ ID NO: 51708 - DNA, 22 bp, synthetic construct
  misc_feature 1..22: note = chemically synthesized
  source 1..22: mol_type = other DNA
actgtcccaggtcagtggtggt

SEQ ID NO: 51709 - DNA, 22 bp, synthetic construct
  misc_feature 1..22: note = chemically synthesized
  source 1..22: mol_type = other DNA
tcccaggtcagtggtggtgcct

SEQ ID NO: 51710 - DNA, 22 bp, synthetic construct
  misc_feature 1..22: note = chemically synthesized
  source 1..22: mol_type = other DNA
aagctgaggagacagggccctg

SEQ ID NO: 51711 - DNA, 22 bp, synthetic construct
  misc_feature 1..22: note = chemically synthesized
  source 1..22: mol_type = other DNA
aggagacagggccctgtcctcg

SEQ ID NO: 51712 - DNA, 22 bp, synthetic construct
  misc_feature 1..22: note = chemically synthesized
  source 1..22: mol_type = other DNA
tcctcgtccgtatttaagcagt

SEQ ID NO: 51713 - DNA, 22 bp, synthetic construct
  misc_feature 1..22: note = chemically synthesized
  source 1..22: mol_type = other DNA
gtccgtatttaagcagtggatc

SEQ ID NO: 51714 - DNA, 22 bp, synthetic construct
  misc_feature 1..22: note = chemically synthesized
  source 1..22: mol_type = other DNA
aagcagtggatccagaggggca

SEQ ID NO: 51715 - DNA, 22 bp, synthetic construct
  misc_feature 1..22: note = chemically synthesized
  source 1..22: mol_type = other DNA
agcagtggatccagaggggcaa

SEQ ID NO: 51716 - DNA, 22 bp, synthetic construct
  misc_feature 1..22: note = chemically synthesized
  source 1..22: mol_type = other DNA
ctggtgaatattaaccaaggtc

SEQ ID NO: 51717 - DNA, 22 bp, synthetic construct
  misc_feature 1..22: note = chemically synthesized
  source 1..22: mol_type = other DNA
gtgaatattaaccaaggtcacc

SEQ ID NO: 51718 - DNA, 22 bp, synthetic construct
  misc_feature 1..22: note = chemically synthesized
  source 1..22: mol_type = other DNA
accaaggtcaccccagttatcg

SEQ ID NO: 51719 - DNA, 22 bp, synthetic construct
  misc_feature 1..22: note = chemically synthesized
  source 1..22: mol_type = other DNA
tcggaggagcaaacaggggcta

SEQ ID NO: 51720 - DNA, 22 bp, synthetic construct
  misc_feature 1..22: note = chemically synthesized
  source 1..22: mol_type = other DNA
agtccactggctgggatctgag

SEQ ID NO: 51721 - DNA, 22 bp, synthetic construct
  misc_feature 1..22: note = chemically synthesized
  source 1..22: mol_type = other DNA
gctgggatctgagtcgcccgcc

SEQ ID NO: 51722 - DNA, 22 bp, synthetic construct
  misc_feature 1..22: note = chemically synthesized
  source 1..22: mol_type = other DNA
ggatctgagtcgcccgcctacg

SEQ ID NO: 51723 - DNA, 22 bp, synthetic construct
  misc_feature 1..22: note = chemically synthesized
  source 1..22: mol_type = other DNA
agtcgcccgcctacgctgcccg

SEQ ID NO: 51724 - DNA, 22 bp, synthetic construct
  misc_feature 1..22: note = chemically synthesized
  source 1..22: mol_type = other DNA
cgctgcccggacgctttgcctg

SEQ ID NO: 51725 - DNA, 22 bp, synthetic construct
  misc_feature 1..22: note = chemically synthesized
  source 1..22: mol_type = other DNA
cccggacgctttgcctgggcag

SEQ ID NO: 51726 - DNA, 22 bp, synthetic construct
  misc_feature 1..22: note = chemically synthesized
  source 1..22: mol_type = other DNA
tgcctgggcagtgtacagcttc

SEQ ID NO: 51727 - DNA, 22 bp, synthetic construct
  misc_feature 1..22: note = chemically synthesized
  source 1..22: mol_type = other DNA
gcctgggcagtgtacagcttcc

SEQ ID NO: 51728 - DNA, 22 bp, synthetic construct
  misc_feature 1..22: note = chemically synthesized
  source 1..22: mol_type = other DNA
cctgggcagtgtacagcttcca

SEQ ID NO: 51729 - DNA, 22 bp, synthetic construct
  misc_feature 1..22: note = chemically synthesized
  source 1..22: mol_type = other DNA
ggcagtgtacagcttccactgc

SEQ ID NO: 51730 - DNA, 22 bp, synthetic construct
  misc_feature 1..22: note = chemically synthesized
  source 1..22: mol_type = other DNA
ccactgcacttaccgaaaggag

SEQ ID NO: 51731 - DNA, 22 bp, synthetic construct
  misc_feature 1..22: note = chemically synthesized
  source 1..22: mol_type = other DNA
cactgcacttaccgaaaggagt

SEQ ID NO: 51732 - DNA, 22 bp, synthetic construct
  misc_feature 1..22: note = chemically synthesized
  source 1..22: mol_type = other DNA
cacttaccgaaaggagtcattg

SEQ ID NO: 51733 - DNA, 22 bp, synthetic construct
  misc_feature 1..22: note = chemically synthesized
  source 1..22: mol_type = other DNA
accgaaaggagtcattgtacct

SEQ ID NO: 51734 - DNA, 22 bp, synthetic construct
  misc_feature 1..22: note = chemically synthesized
  source 1..22: mol_type = other DNA
ccgaaaggagtcattgtacctg

SEQ ID NO: 51735 - DNA, 22 bp, synthetic construct
  misc_feature 1..22: note = chemically synthesized
  source 1..22: mol_type = other DNA
tacctggctcagaaaccacagc

SEQ ID NO: 51736 - DNA, 22 bp, synthetic construct
  misc_feature 1..22: note = chemically synthesized
  source 1..22: mol_type = other DNA
gctcagaaaccacagcgtcctg

SEQ ID NO: 51737 - DNA, 22 bp, synthetic construct
  misc_feature 1..22: note = chemically synthesized
  source 1..22: mol_type = other DNA
agaaaccacagcgtcctgtgtc

SEQ ID NO: 51738 - DNA, 22 bp, synthetic construct
  misc_feature 1..22: note = chemically synthesized
  source 1..22: mol_type = other DNA
tgtccaaggtggagggggtggc

SEQ ID NO: 51739 - DNA, 22 bp, synthetic construct
  misc_feature 1..22: note = chemically synthesized
  source 1..22: mol_type = other DNA
tgggagagtaccacttagctgg

SEQ ID NO: 51740 - DNA, 22 bp, synthetic construct
  misc_feature 1..22: note = chemically synthesized
  source 1..22: mol_type = other DNA
ggagagtaccacttagctggcc

SEQ ID NO: 51741 - DNA, 22 bp, synthetic construct
  misc_feature 1..22: note = chemically synthesized
  source 1..22: mol_type = other DNA
agctggccctctgctctcactg

SEQ ID NO: 51742 - DNA, 22 bp, synthetic construct
  misc_feature 1..22: note = chemically synthesized
  source 1..22: mol_type = other DNA
gctggccctctgctctcactgc

SEQ ID NO: 51743 - DNA, 22 bp, synthetic construct
  misc_feature 1..22: note = chemically synthesized
  source 1..22: mol_type = other DNA
gccctctgctctcactgcagaa

SEQ ID NO: 51744 - DNA, 22 bp, synthetic construct
  misc_feature 1..22: note = chemically synthesized
  source 1..22: mol_type = other DNA
tgctctcactgcagaatcctta

SEQ ID NO: 51745 - DNA, 22 bp, synthetic construct
  misc_feature 1..22: note = chemically synthesized
  source 1..22: mol_type = other DNA
ctctcactgcagaatccttagt

SEQ ID NO: 51746 - DNA, 22 bp, synthetic construct
  misc_feature 1..22: note = chemically synthesized
  source 1..22: mol_type = other DNA
tcactgcagaatccttagtggc

SEQ ID NO: 51747 - DNA, 22 bp, synthetic construct
  misc_feature 1..22: note = chemically synthesized
  source 1..22: mol_type = other DNA
actgcagaatccttagtggctg

SEQ ID NO: 51748 - DNA, 22 bp, synthetic construct
  misc_feature 1..22: note = chemically synthesized
  source 1..22: mol_type = other DNA
cagaatccttagtggctgttcc

SEQ ID NO: 51749 - DNA, 22 bp, synthetic construct
  misc_feature 1..22: note = chemically synthesized
  source 1..22: mol_type = other DNA
agtggctgttccactggtagca

SEQ ID NO: 51750 - DNA, 22 bp, synthetic construct
  misc_feature 1..22: note = chemically synthesized
  source 1..22: mol_type = other DNA
gtggctgttccactggtagcaa

SEQ ID NO: 51751 - DNA, 22 bp, synthetic construct
  misc_feature 1..22: note = chemically synthesized
  source 1..22: mol_type = other DNA
ttccactggtagcaagatctac

SEQ ID NO: 51752 - DNA, 22 bp, synthetic construct
  misc_feature 1..22: note = chemically synthesized
  source 1..22: mol_type = other DNA
cactggtagcaagatctaccat

SEQ ID NO: 51753 - DNA, 22 bp, synthetic construct
  misc_feature 1..22: note = chemically synthesized
  source 1..22: mol_type = other DNA
gtagcaagatctaccatttact

SEQ ID NO: 51754 - DNA, 22 bp, synthetic construct
  misc_feature 1..22: note = chemically synthesized
  source 1..22: mol_type = other DNA
ccatttactgagtcaccccaaa

SEQ ID NO: 51755 - DNA, 22 bp, synthetic construct
  misc_feature 1..22: note = chemically synthesized
  source 1..22: mol_type = other DNA
actgagtcaccccaaaatgcct

SEQ ID NO: 51756 - DNA, 22 bp, synthetic construct
  misc_feature 1..22: note = chemically synthesized
  source 1..22: mol_type = other DNA
ctgagtcaccccaaaatgcctg

SEQ ID NO: 51757 - DNA, 22 bp, synthetic construct
  misc_feature 1..22: note = chemically synthesized
  source 1..22: mol_type = other DNA
agtcaccccaaaatgcctgatg

SEQ ID NO: 51758 - DNA, 22 bp, synthetic construct
  misc_feature 1..22: note = chemically synthesized
  source 1..22: mol_type = other DNA
atgctgaagacttactgccgcc

SEQ ID NO: 51759 - DNA, 22 bp, synthetic construct
  misc_feature 1..22: note = chemically synthesized
  source 1..22: mol_type = other DNA
aagacttactgccgccctggga

SEQ ID NO: 51760 - DNA, 22 bp, synthetic construct
  misc_feature 1..22: note = chemically synthesized
  source 1..22: mol_type = other DNA
actgccgccctgggagatcaga

SEQ ID NO: 51761 - DNA, 22 bp, synthetic construct
  misc_feature 1..22: note = chemically synthesized
  source 1..22: mol_type = other DNA
ctgccgccctgggagatcagag

SEQ ID NO: 51762 - DNA, 22 bp, synthetic construct
  misc_feature 1..22: note = chemically synthesized
  source 1..22: mol_type = other DNA
ccgccctgggagatcagagtgg

SEQ ID NO: 51763 - DNA, 22 bp, synthetic construct
  misc_feature 1..22: note = chemically synthesized
  source 1..22: mol_type = other DNA
ggagatcagagtgggttagagc

SEQ ID NO: 51764 - DNA, 22 bp, synthetic construct
  misc_feature 1..22: note = chemically synthesized
  source 1..22: mol_type = other DNA
gagcccatttgacagatgagga

SEQ ID NO: 51765 - DNA, 22 bp, synthetic construct
  misc_feature 1..22: note = chemically synthesized
  source 1..22: mol_type = other DNA
gacagatgaggaaacaggctca

SEQ ID NO: 51766 - DNA, 22 bp, synthetic construct
  misc_feature 1..22: note = chemically synthesized
  source 1..22: mol_type = other DNA
acagatgaggaaacaggctcag

SEQ ID NO: 51767 - DNA, 22 bp, synthetic construct
  misc_feature 1..22: note = chemically synthesized
  source 1..22: mol_type = other DNA
agagcggagagaccgctcatcc

SEQ ID NO: 51768 - DNA, 22 bp, synthetic construct
  misc_feature 1..22: note = chemically synthesized
  source 1..22: mol_type = other DNA
atccaaagttacccagtcagcc

SEQ ID NO: 51769 - DNA, 22 bp, synthetic construct
  misc_feature 1..22: note = chemically synthesized
  source 1..22: mol_type = other DNA
cccagtcagccttagacacaaa

SEQ ID NO: 51770 - DNA, 22 bp, synthetic construct
  misc_feature 1..22: note = chemically synthesized
  source 1..22: mol_type = other DNA
agacacaaacaccctcttgatg

SEQ ID NO: 51771 - DNA, 22 bp, synthetic construct
  misc_feature 1..22: note = chemically synthesized
  source 1..22: mol_type = other DNA
gacacaaacaccctcttgatgg

SEQ ID NO: 51772 - DNA, 22 bp, synthetic construct
  misc_feature 1..22: note = chemically synthesized
  source 1..22: mol_type = other DNA
ttgatggtcccgatggaaaaat

SEQ ID NO: 51773 - DNA, 22 bp, synthetic construct
  misc_feature 1..22: note = chemically synthesized
  source 1..22: mol_type = other DNA
gatggtcccgatggaaaaatgg

SEQ ID NO: 51774 - DNA, 22 bp, synthetic construct
  misc_feature 1..22: note = chemically synthesized
  source 1..22: mol_type = other DNA
atggtcccgatggaaaaatgga

SEQ ID NO: 51775 - DNA, 22 bp, synthetic construct
  misc_feature 1..22: note = chemically synthesized
  source 1..22: mol_type = other DNA
aggcagacacaaccgtcaggct

SEQ ID NO: 51776 - DNA, 22 bp, synthetic construct
  misc_feature 1..22: note = chemically synthesized
  source 1..22: mol_type = other DNA
gcatggggggccgtgagacagg

SEQ ID NO: 51777 - DNA, 22 bp, synthetic construct
  misc_feature 1..22: note = chemically synthesized
  source 1..22: mol_type = other DNA
taaagaagagctgtgctgcctc

SEQ ID NO: 51778 - DNA, 22 bp, synthetic construct
  misc_feature 1..22: note = chemically synthesized
  source 1..22: mol_type = other DNA
tgctgcctcaggcaggccgctt

SEQ ID NO: 51779 - DNA, 22 bp, synthetic construct
  misc_feature 1..22: note = chemically synthesized
  source 1..22: mol_type = other DNA
cctcaggcaggccgcttcacct

SEQ ID NO: 51780 - DNA, 22 bp, synthetic construct
  misc_feature 1..22: note = chemically synthesized
  source 1..22: mol_type = other DNA
aggcaggccgcttcacctctct

SEQ ID NO: 51781 - DNA, 22 bp, synthetic construct
  misc_feature 1..22: note = chemically synthesized
  source 1..22: mol_type = other DNA
cacctctctgaaccaggaactg

SEQ ID NO: 51782 - DNA, 22 bp, synthetic construct
  misc_feature 1..22: note = chemically synthesized
  source 1..22: mol_type = other DNA
acctctctgaaccaggaactgt

SEQ ID NO: 51783 - DNA, 22 bp, synthetic construct
  misc_feature 1..22: note = chemically synthesized
  source 1..22: mol_type = other DNA
tctgaaccaggaactgtttcac

SEQ ID NO: 51784 - DNA, 22 bp, synthetic construct
  misc_feature 1..22: note = chemically synthesized
  source 1..22: mol_type = other DNA
tgaaccaggaactgtttcacct

SEQ ID NO: 51785 - DNA, 22 bp, synthetic construct
  misc_feature 1..22: note = chemically synthesized
  source 1..22: mol_type = other DNA
aaccaggaactgtttcacctgc

SEQ ID NO: 51786 - DNA, 22 bp, synthetic construct
  misc_feature 1..22: note = chemically synthesized
  source 1..22: mol_type = other DNA
tttcacctgcatcccaaagagt

SEQ ID NO: 51787 - DNA, 22 bp, synthetic construct
  misc_feature 1..22: note = chemically synthesized
  source 1..22: mol_type = other DNA
cacctgcatcccaaagagttgg

SEQ ID NO: 51788 - DNA, 22 bp, synthetic construct
  misc_feature 1..22: note = chemically synthesized
  source 1..22: mol_type = other DNA
acctgcatcccaaagagttgga

SEQ ID NO: 51789 - DNA, 22 bp, synthetic construct
  misc_feature 1..22: note = chemically synthesized
  source 1..22: mol_type = other DNA
catcccaaagagttggaagttt

SEQ ID NO: 51790 - DNA, 22 bp, synthetic construct
  misc_feature 1..22: note = chemically synthesized
  source 1..22: mol_type = other DNA
gaagtttcattcccaagcatgc

SEQ ID NO: 51791 - DNA, 22 bp, synthetic construct
  misc_feature 1..22: note = chemically synthesized
  source 1..22: mol_type = other DNA
cattcccaagcatgcttgtgaa

SEQ ID NO: 51792 - DNA, 22 bp, synthetic construct
  misc_feature 1..22: note = chemically synthesized
  source 1..22: mol_type = other DNA
attcccaagcatgcttgtgaag

SEQ ID NO: 51793 - DNA, 22 bp, synthetic construct
  misc_feature 1..22: note = chemically synthesized
  source 1..22: mol_type = other DNA
ccaagcatgcttgtgaagtgcc

SEQ ID NO: 51794 - DNA, 22 bp, synthetic construct
  misc_feature 1..22: note = chemically synthesized
  source 1..22: mol_type = other DNA
gtgaagtgcctcgggtgaagtg

SEQ ID NO: 51795 - DNA, 22 bp, synthetic construct
  misc_feature 1..22: note = chemically synthesized
  source 1..22: mol_type = other DNA
tgaagtgcctcgggtgaagtgc

SEQ ID NO: 51796 - DNA, 22 bp, synthetic construct
  misc_feature 1..22: note = chemically synthesized
  source 1..22: mol_type = other DNA
gggtgaagtgcctggcacacag

SEQ ID NO: 51797 - DNA, 22 bp, synthetic construct
  misc_feature 1..22: note = chemically synthesized
  source 1..22: mol_type = other DNA
gcacacagtaggctctttatgt

SEQ ID NO: 51798 - DNA, 22 bp, synthetic construct
  misc_feature 1..22: note = chemically synthesized
  source 1..22: mol_type = other DNA
tttatgtgggtctgcacagccc

SEQ ID NO: 51799 - DNA, 22 bp, synthetic construct
  misc_feature 1..22: note = chemically synthesized
  source 1..22: mol_type = other DNA
tatgtgggtctgcacagccctc

SEQ ID NO: 51800 - DNA, 22 bp, synthetic construct
  misc_feature 1..22: note = chemically synthesized
  source 1..22: mol_type = other DNA
atgtgggtctgcacagccctct

SEQ ID NO: 51801 - DNA, 22 bp, synthetic construct
  misc_feature 1..22: note = chemically synthesized
  source 1..22: mol_type = other DNA
tgtgggtctgcacagccctctg

SEQ ID NO: 51802 - DNA, 22 bp, synthetic construct
  misc_feature 1..22: note = chemically synthesized
  source 1..22: mol_type = other DNA
cacagccctctgcttagtctgc

SEQ ID NO: 51803 - DNA, 22 bp, synthetic construct
  misc_feature 1..22: note = chemically synthesized
  source 1..22: mol_type = other DNA
tgcttagtctgccccccaggct

SEQ ID NO: 51804 - DNA, 22 bp, synthetic construct
  misc_feature 1..22: note = chemically synthesized
  source 1..22: mol_type = other DNA
cttagtctgccccccaggctgc

SEQ ID NO: 51805 - DNA, 22 bp, synthetic construct
  misc_feature 1..22: note = chemically synthesized
  source 1..22: mol_type = other DNA
agtctgccccccaggctgctca

SEQ ID NO: 51806 - DNA, 22 bp, synthetic construct
  misc_feature 1..22: note = chemically synthesized
  source 1..22: mol_type = other DNA
gtctgccccccaggctgctcag

SEQ ID NO: 51807 - DNA, 22 bp, synthetic construct
  misc_feature 1..22: note = chemically synthesized
  source 1..22: mol_type = other DNA
ccccccaggctgctcagagcag

SEQ ID NO: 51808 - DNA, 22 bp, synthetic construct
  misc_feature 1..22: note = chemically synthesized
  source 1..22: mol_type = other DNA
ctcagagcaggaggaggttcaa

SEQ ID NO: 51809 - DNA, 22 bp, synthetic construct
  misc_feature 1..22: note = chemically synthesized
  source 1..22: mol_type = other DNA
agagcaggaggaggttcaattt

SEQ ID NO: 51810 - DNA, 22 bp, synthetic construct
  misc_feature 1..22: note = chemically synthesized
  source 1..22: mol_type = other DNA
aattttgaccagcctcaggcct

SEQ ID NO: 51811 - DNA, 22 bp, synthetic construct
  misc_feature 1..22: note = chemically synthesized
  source 1..22: mol_type = other DNA
tgaccagcctcaggcctgtttc

SEQ ID NO: 51812 - DNA, 22 bp, synthetic construct
  misc_feature 1..22: note = chemically synthesized
  source 1..22: mol_type = other DNA
gaccagcctcaggcctgtttct

SEQ ID NO: 51813 - DNA, 22 bp, synthetic construct
  misc_feature 1..22: note = chemically synthesized
  source 1..22: mol_type = other DNA
accagcctcaggcctgtttctg

SEQ ID NO: 51814 - DNA, 22 bp, synthetic construct
  misc_feature 1..22: note = chemically synthesized
  source 1..22: mol_type = other DNA
aggcctgtttctgtttttgctc

SEQ ID NO: 51815 - DNA, 22 bp, synthetic construct
  misc_feature 1..22: note = chemically synthesized
  source 1..22: mol_type = other DNA
tttctgtttttgctcctggaaa

SEQ ID NO: 51816 - DNA, 22 bp, synthetic construct
  misc_feature 1..22: note = chemically synthesized
  source 1..22: mol_type = other DNA
ctgtttttgctcctggaaaacc

SEQ ID NO: 51817 - DNA, 22 bp, synthetic construct
  misc_feature 1..22: note = chemically synthesized
  source 1..22: mol_type = other DNA
tgtttttgctcctggaaaacca

SEQ ID NO: 51818 - DNA, 22 bp, synthetic construct
  misc_feature 1..22: note = chemically synthesized
  source 1..22: mol_type = other DNA
tttttgctcctggaaaaccagt

SEQ ID NO: 51819 - DNA, 22 bp, synthetic construct
  misc_feature 1..22: note = chemically synthesized
  source 1..22: mol_type = other DNA
ttgctcctggaaaaccagtgtg

SEQ ID NO: 51820 - DNA, 22 bp, synthetic construct
  misc_feature 1..22: note = chemically synthesized
  source 1..22: mol_type = other DNA
tgctcctggaaaaccagtgtga

SEQ ID NO: 51821 - DNA, 22 bp, synthetic construct
  misc_feature 1..22: note = chemically synthesized
  source 1..22: mol_type = other DNA
gctcctggaaaaccagtgtgat

SEQ ID NO: 51822 - DNA, 22 bp, synthetic construct
  misc_feature 1..22: note = chemically synthesized
  source 1..22: mol_type = other DNA
ctcctggaaaaccagtgtgatc

SEQ ID NO: 51823 - DNA, 22 bp, synthetic construct
  misc_feature 1..22: note = chemically synthesized
  source 1..22: mol_type = other DNA
ctggaaaaccagtgtgatccgt

SEQ ID NO: 51824 - DNA, 22 bp, synthetic construct
  misc_feature 1..22: note = chemically synthesized
  source 1..22: mol_type = other DNA
gaaaaccagtgtgatccgtata

SEQ ID NO: 51825 - DNA, 22 bp, synthetic construct
  misc_feature 1..22: note = chemically synthesized
  source 1..22: mol_type = other DNA
ggagtttctttggatacatggc

SEQ ID NO: 51826 - DNA, 22 bp, synthetic construct
  misc_feature 1..22: note = chemically synthesized
  source 1..22: mol_type = other DNA
gagtttctttggatacatggcc

SEQ ID NO: 51827 - DNA, 22 bp, synthetic construct
  misc_feature 1..22: note = chemically synthesized
  source 1..22: mol_type = other DNA
ctttggatacatggcccccact

SEQ ID NO: 51828 - DNA, 22 bp, synthetic construct
  misc_feature 1..22: note = chemically synthesized
  source 1..22: mol_type = other DNA
tttggatacatggcccccactc

SEQ ID NO: 51829 - DNA, 22 bp, synthetic construct
  misc_feature 1..22: note = chemically synthesized
  source 1..22: mol_type = other DNA
tggatacatggcccccactctg

SEQ ID NO: 51830 - DNA, 22 bp, synthetic construct
  misc_feature 1..22: note = chemically synthesized
  source 1..22: mol_type = other DNA
ggatacatggcccccactctgg

SEQ ID NO: 51831 - DNA, 22 bp, synthetic construct
  misc_feature 1..22: note = chemically synthesized
  source 1..22: mol_type = other DNA
gatacatggcccccactctggg

SEQ ID NO: 51832 - DNA, 22 bp, synthetic construct
  misc_feature 1..22: note = chemically synthesized
  source 1..22: mol_type = other DNA
tggggttgttggaggcctttgg

SEQ ID NO: 51833 - DNA, 22 bp, synthetic construct
  misc_feature 1..22: note = chemically synthesized
  source 1..22: mol_type = other DNA
gggttgttggaggcctttggag

SEQ ID NO: 51834 - DNA, 22 bp, synthetic construct
  misc_feature 1..22: note = chemically synthesized
  source 1..22: mol_type = other DNA
ttggaggcctttggagactgct

SEQ ID NO: 51835 - DNA, 22 bp, synthetic construct
  misc_feature 1..22: note = chemically synthesized
  source 1..22: mol_type = other DNA
gaggcctttggagactgctggg

SEQ ID NO: 51836 - DNA, 22 bp, synthetic construct
  misc_feature 1..22: note = chemically synthesized
  source 1..22: mol_type = other DNA
tggagactgctgggggtggagg

SEQ ID NO: 51837 - DNA, 22 bp, synthetic construct
  misc_feature 1..22: note = chemically synthesized
  source 1..22: mol_type = other DNA
ggagactgctgggggtggaggg

SEQ ID NO: 51838 - DNA, 22 bp, synthetic construct
  misc_feature 1..22: note = chemically synthesized
  source 1..22: mol_type = other DNA
gagactgctgggggtggagggg

SEQ ID NO: 51839 - DNA, 22 bp, synthetic construct
  misc_feature 1..22: note = chemically synthesized
  source 1..22: mol_type = other DNA
ctgggggtggaggggaggggag

SEQ ID NO: 51840 - DNA, 22 bp, synthetic construct
  misc_feature 1..22: note = chemically synthesized
  source 1..22: mol_type = other DNA
ggggtggaggggaggggaggta

SEQ ID NO: 51841 - DNA, 22 bp, synthetic construct
  misc_feature 1..22: note = chemically synthesized
  source 1..22: mol_type = other DNA
aggctagtggggccccacttga

SEQ ID NO: 51842 - DNA, 22 bp, synthetic construct
  misc_feature 1..22: note = chemically synthesized
  source 1..22: mol_type = other DNA
gtggggccccacttgattgcaa

SEQ ID NO: 51843 - DNA, 22 bp, synthetic construct
  misc_feature 1..22: note = chemically synthesized
  source 1..22: mol_type = other DNA
gattgcaatccctttaaaagcc

SEQ ID NO: 51844 - DNA, 22 bp, synthetic construct
  misc_feature 1..22: note = chemically synthesized
  source 1..22: mol_type = other DNA
attgcaatccctttaaaagcct

SEQ ID NO: 51845 - DNA, 22 bp, synthetic construct
  misc_feature 1..22: note = chemically synthesized
  source 1..22: mol_type = other DNA
caatccctttaaaagcctaaat

SEQ ID NO: 51846 - DNA, 22 bp, synthetic construct
  misc_feature 1..22: note = chemically synthesized
  source 1..22: mol_type = other DNA
taaaagcctaaatcagattgca

SEQ ID NO: 51847 - DNA, 22 bp, synthetic construct
  misc_feature 1..22: note = chemically synthesized
  source 1..22: mol_type = other DNA
aaaagcctaaatcagattgcat

SEQ ID NO: 51848 - DNA, 22 bp, synthetic construct
  misc_feature 1..22: note = chemically synthesized
  source 1..22: mol_type = other DNA
aaagcctaaatcagattgcatc

SEQ ID NO: 51849 - DNA, 22 bp, synthetic construct
  misc_feature 1..22: note = chemically synthesized
  source 1..22: mol_type = other DNA
aatcagattgcatcgcccgctg

SEQ ID NO: 51850 - DNA, 22 bp, synthetic construct
  misc_feature 1..22: note = chemically synthesized
  source 1..22: mol_type = other DNA
catcgcccgctgtgcaacccgc

SEQ ID NO: 51851 - DNA, 22 bp, synthetic construct
  misc_feature 1..22: note = chemically synthesized
  source 1..22: mol_type = other DNA
tgcaacccgcaaacctgcttgg

SEQ ID NO: 51852 - DNA, 22 bp, synthetic construct
  misc_feature 1..22: note = chemically synthesized
  source 1..22: mol_type = other DNA
cttgggagctggcgtacgtgcc

SEQ ID NO: 51853 - DNA, 22 bp, synthetic construct
  misc_feature 1..22: note = chemically synthesized
  source 1..22: mol_type = other DNA
gggagctggcgtacgtgccgta

SEQ ID NO: 51854 - DNA, 22 bp, synthetic construct
  misc_feature 1..22: note = chemically synthesized
  source 1..22: mol_type = other DNA
ggagctggcgtacgtgccgtag

SEQ ID NO: 51855 - DNA, 22 bp, synthetic construct
  misc_feature 1..22: note = chemically synthesized
  source 1..22: mol_type = other DNA
gcgtacgtgccgtagatacttg

SEQ ID NO: 51856 - DNA, 22 bp, synthetic construct
  misc_feature 1..22: note = chemically synthesized
  source 1..22: mol_type = other DNA
gcagagtgaatggatgagtgca

SEQ ID NO: 51857 - DNA, 22 bp, synthetic construct
  misc_feature 1..22: note = chemically synthesized
  source 1..22: mol_type = other DNA
cagagtgaatggatgagtgcat

SEQ ID NO: 51858 - DNA, 22 bp, synthetic construct
  misc_feature 1..22: note = chemically synthesized
  source 1..22: mol_type = other DNA
ttgccccttctgtcattcacca

SEQ ID NO: 51859 - DNA, 22 bp, synthetic construct
  misc_feature 1..22: note = chemically synthesized
  source 1..22: mol_type = other DNA
tgccccttctgtcattcaccag

SEQ ID NO: 51860 - DNA, 22 bp, synthetic construct
  misc_feature 1..22: note = chemically synthesized
  source 1..22: mol_type = other DNA
gccccttctgtcattcaccagt

SEQ ID NO: 51861 - DNA, 22 bp, synthetic construct
  misc_feature 1..22: note = chemically synthesized
  source 1..22: mol_type = other DNA
ccccttctgtcattcaccagtc

SEQ ID NO: 51862 - DNA, 22 bp, synthetic construct
  misc_feature 1..22: note = chemically synthesized
  source 1..22: mol_type = other DNA
ctgtcattcaccagtcccattt

SEQ ID NO: 51863 - DNA, 22 bp, synthetic construct
  misc_feature 1..22: note = chemically synthesized
  source 1..22: mol_type = other DNA
tgtcattcaccagtcccattta

SEQ ID NO: 51864 - DNA, 22 bp, synthetic construct
  misc_feature 1..22: note = chemically synthesized
  source 1..22: mol_type = other DNA
tcattcaccagtcccatttatg

SEQ ID NO: 51865 - DNA, 22 bp, synthetic construct
  misc_feature 1..22: note = chemically synthesized
  source 1..22: mol_type = other DNA
accagtcccatttatgcctcca

SEQ ID NO: 51866 - DNA, 22 bp, synthetic construct
  misc_feature 1..22: note = chemically synthesized
  source 1..22: mol_type = other DNA
atgcctccaccttggggctcta

SEQ ID NO: 51867 - DNA, 22 bp, synthetic construct
  misc_feature 1..22: note = chemically synthesized
  source 1..22: mol_type = other DNA
tgcctccaccttggggctctac

SEQ ID NO: 51868 - DNA, 22 bp, synthetic construct
  misc_feature 1..22: note = chemically synthesized
  source 1..22: mol_type = other DNA
caccttggggctctaccaggcg

SEQ ID NO: 51869 - DNA, 22 bp, synthetic construct
  misc_feature 1..22: note = chemically synthesized
  source 1..22: mol_type = other DNA
ggggctctaccaggcgagtgac

SEQ ID NO: 51870 - DNA, 22 bp, synthetic construct
  misc_feature 1..22: note = chemically synthesized
  source 1..22: mol_type = other DNA
gggctctaccaggcgagtgacc

SEQ ID NO: 51871 - DNA, 22 bp, synthetic construct
  misc_feature 1..22: note = chemically synthesized
  source 1..22: mol_type = other DNA
taccaggcgagtgacccacagg

SEQ ID NO: 51872 - DNA, 22 bp, synthetic construct
  misc_feature 1..22: note = chemically synthesized
  source 1..22: mol_type = other DNA
ccaggcgagtgacccacaggat

SEQ ID NO: 51873 - DNA, 22 bp, synthetic construct
  misc_feature 1..22: note = chemically synthesized
  source 1..22: mol_type = other DNA
cagcacacacattcagaccagg

SEQ ID NO: 51874 - DNA, 22 bp, synthetic construct
  misc_feature 1..22: note = chemically synthesized
  source 1..22: mol_type = other DNA
agaccagggaacccacttactg

SEQ ID NO: 51875 - DNA, 22 bp, synthetic construct
  misc_feature 1..22: note = chemically synthesized
  source 1..22: mol_type = other DNA
actggctgtgaggcctcaggtg

SEQ ID NO: 51876 - DNA, 22 bp, synthetic construct
  misc_feature 1..22: note = chemically synthesized
  source 1..22: mol_type = other DNA
ctggctgtgaggcctcaggtga

SEQ ID NO: 51877 - DNA, 22 bp, synthetic construct
  misc_feature 1..22: note = chemically synthesized
  source 1..22: mol_type = other DNA
gctgtgaggcctcaggtgagtt

SEQ ID NO: 51878 - DNA, 22 bp, synthetic construct
  misc_feature 1..22: note = chemically synthesized
  source 1..22: mol_type = other DNA
tgaggcctcaggtgagttgttt

SEQ ID NO: 51879 - DNA, 22 bp, synthetic construct
  misc_feature 1..22: note = chemically synthesized
  source 1..22: mol_type = other DNA
aggtgagttgtttaaccgctcc

SEQ ID NO: 51880 - DNA, 22 bp, synthetic construct
  misc_feature 1..22: note = chemically synthesized
  source 1..22: mol_type = other DNA
tttaaccgctccgagcctcaat

SEQ ID NO: 51881 - DNA, 22 bp, synthetic construct
  misc_feature 1..22: note = chemically synthesized
  source 1..22: mol_type = other DNA
aaccgctccgagcctcaatttc

SEQ ID NO: 51882 - DNA, 22 bp, synthetic construct
  misc_feature 1..22: note = chemically synthesized
  source 1..22: mol_type = other DNA
accgctccgagcctcaatttcc

SEQ ID NO: 51883 - DNA, 22 bp, synthetic construct
  misc_feature 1..22: note = chemically synthesized
  source 1..22: mol_type = other DNA
cgagcctcaatttccctatctg

SEQ ID NO: 51884 - DNA, 22 bp, synthetic construct
  misc_feature 1..22: note = chemically synthesized
  source 1..22: mol_type = other DNA
aatttccctatctgtaaaatgg

SEQ ID NO: 51885 - DNA, 22 bp, synthetic construct
  misc_feature 1..22: note = chemically synthesized
  source 1..22: mol_type = other DNA
ccctatctgtaaaatggggatg

SEQ ID NO: 51886 - DNA, 22 bp, synthetic construct
  misc_feature 1..22: note = chemically synthesized
  source 1..22: mol_type = other DNA
cctatctgtaaaatggggatgg

SEQ ID NO: 51887 - DNA, 22 bp, synthetic construct
  misc_feature 1..22: note = chemically synthesized
  source 1..22: mol_type = other DNA
tctgtaaaatggggatggtgac

SEQ ID NO: 51888 - DNA, 22 bp, synthetic construct
  misc_feature 1..22: note = chemically synthesized
  source 1..22: mol_type = other DNA
taaaatggggatggtgacggta

SEQ ID NO: 51889 - DNA, 22 bp, synthetic construct
  misc_feature 1..22: note = chemically synthesized
  source 1..22: mol_type = other DNA
gttgagctgctgtgaggattaa

SEQ ID NO: 51890 - DNA, 22 bp, synthetic construct
  misc_feature 1..22: note = chemically synthesized
  source 1..22: mol_type = other DNA
ttgagctgctgtgaggattaaa

SEQ ID NO: 51891 - DNA, 22 bp, synthetic construct
  misc_feature 1..22: note = chemically synthesized
  source 1..22: mol_type = other DNA
agctgctgtgaggattaaaatg

SEQ ID NO: 51892 - DNA, 22 bp, synthetic construct
  misc_feature 1..22: note = chemically synthesized
  source 1..22: mol_type = other DNA
ctgtgaggattaaaatgcaaca

SEQ ID NO: 51893 - DNA, 22 bp, synthetic construct
  misc_feature 1..22: note = chemically synthesized
  source 1..22: mol_type = other DNA
tgaggattaaaatgcaacagtt

SEQ ID NO: 51894 - DNA, 22 bp, synthetic construct
  misc_feature 1..22: note = chemically synthesized
  source 1..22: mol_type = other DNA
aaatgcaacagttcaaggaaag

SEQ ID NO: 51895 - DNA, 22 bp, synthetic construct
  misc_feature 1..22: note = chemically synthesized
  source 1..22: mol_type = other DNA
aaggaaagctcagagacgggta

SEQ ID NO: 51896 - DNA, 22 bp, synthetic construct
  misc_feature 1..22: note = chemically synthesized
  source 1..22: mol_type = other DNA
agagacgggtactgggtgtgcc

SEQ ID NO: 51897 - DNA, 22 bp, synthetic construct
  misc_feature 1..22: note = chemically synthesized
  source 1..22: mol_type = other DNA
ggtgtgcccagaaagcccctcc

SEQ ID NO: 51898 - DNA, 22 bp, synthetic construct
  misc_feature 1..22: note = chemically synthesized
  source 1..22: mol_type = other DNA
ctgatgctgccctccctccccc

SEQ ID NO: 51899 - DNA, 22 bp, synthetic construct
  misc_feature 1..22: note = chemically synthesized
  source 1..22: mol_type = other DNA
atgctgccctccctcccccgtg

SEQ ID NO: 51900 - DNA, 22 bp, synthetic construct
  misc_feature 1..22: note = chemically synthesized
  source 1..22: mol_type = other DNA
ccctccctcccccgtgtcaggg

SEQ ID NO: 51901 - DNA, 22 bp, synthetic construct
  misc_feature 1..22: note = chemically synthesized
  source 1..22: mol_type = other DNA
cctcccccgtgtcaggggctgg

SEQ ID NO: 51902 - DNA, 22 bp, synthetic construct
  misc_feature 1..22: note = chemically synthesized
  source 1..22: mol_type = other DNA
ccccgtgtcaggggctggtgtc

SEQ ID NO: 51903 - DNA, 22 bp, synthetic construct
  misc_feature 1..22: note = chemically synthesized
  source 1..22: mol_type = other DNA
gtgtcactggggtggggtgggc

SEQ ID NO: 51904 - DNA, 22 bp, synthetic construct
  misc_feature 1..22: note = chemically synthesized
  source 1..22: mol_type = other DNA
gggtggggtgggccacacttga

SEQ ID NO: 51905 - DNA, 22 bp, synthetic construct
  misc_feature 1..22: note = chemically synthesized
  source 1..22: mol_type = other DNA
gaagagctttcctccaggcagt

SEQ ID NO: 51906 - DNA, 22 bp, synthetic construct
  misc_feature 1..22: note = chemically synthesized
  source 1..22: mol_type = other DNA
aagagctttcctccaggcagtc

SEQ ID NO: 51907 - DNA, 22 bp, synthetic construct
  misc_feature 1..22: note = chemically synthesized
  source 1..22: mol_type = other DNA
tcctccaggcagtctctcattc

SEQ ID NO: 51908 - DNA, 22 bp, synthetic construct
  misc_feature 1..22: note = chemically synthesized
  source 1..22: mol_type = other DNA
cctccaggcagtctctcattca

SEQ ID NO: 51909 - DNA, 22 bp, synthetic construct
  misc_feature 1..22: note = chemically synthesized
  source 1..22: mol_type = other DNA
ctccaggcagtctctcattcag

SEQ ID NO: 51910 - DNA, 22 bp, synthetic construct
  misc_feature 1..22: note = chemically synthesized
  source 1..22: mol_type = other DNA
caggcagtctctcattcagtta

SEQ ID NO: 51911 - DNA, 22 bp, synthetic construct
  misc_feature 1..22: note = chemically synthesized
  source 1..22: mol_type = other DNA
tcattcagttaccctgtgaagg

SEQ ID NO: 51912 - DNA, 22 bp, synthetic construct
  misc_feature 1..22: note = chemically synthesized
  source 1..22: mol_type = other DNA
attcagttaccctgtgaaggga

SEQ ID NO: 51913 - DNA, 22 bp, synthetic construct
  misc_feature 1..22: note = chemically synthesized
  source 1..22: mol_type = other DNA
agttaccctgtgaagggagtag

SEQ ID NO: 51914 - DNA, 22 bp, synthetic construct
  misc_feature 1..22: note = chemically synthesized
  source 1..22: mol_type = other DNA
ccctgtgaagggagtaggtacc

SEQ ID NO: 51915 - DNA, 22 bp, synthetic construct
  misc_feature 1..22: note = chemically synthesized
  source 1..22: mol_type = other DNA
tgaagggagtaggtaccaccct

SEQ ID NO: 51916 - DNA, 22 bp, synthetic construct
  misc_feature 1..22: note = chemically synthesized
  source 1..22: mol_type = other DNA
ctttcaggcagcgggaaactga

SEQ ID NO: 51917 - DNA, 22 bp, synthetic construct
  misc_feature 1..22: note = chemically synthesized
  source 1..22: mol_type = other DNA
tcaggcagcgggaaactgagct

SEQ ID NO: 51918 - DNA, 22 bp, synthetic construct
  misc_feature 1..22: note = chemically synthesized
  source 1..22: mol_type = other DNA
caggcagcgggaaactgagctc

SEQ ID NO: 51919 - DNA, 22 bp, synthetic construct
  misc_feature 1..22: note = chemically synthesized
  source 1..22: mol_type = other DNA
aggcagcgggaaactgagctca

SEQ ID NO: 51920 - DNA, 22 bp, synthetic construct
  misc_feature 1..22: note = chemically synthesized
  source 1..22: mol_type = other DNA
agctcagactcccctccccttc

SEQ ID NO: 51921 - DNA, 22 bp, synthetic construct
  misc_feature 1..22: note = chemically synthesized
  source 1..22: mol_type = other DNA
agactcccctccccttctctct

SEQ ID NO: 51922 - DNA, 22 bp, synthetic construct
  misc_feature 1..22: note = chemically synthesized
  source 1..22: mol_type = other DNA
ccctccccttctctctgagctc

SEQ ID NO: 51923 - DNA, 22 bp, synthetic construct
  misc_feature 1..22: note = chemically synthesized
  source 1..22: mol_type = other DNA
cccttctctctgagctcccttc

SEQ ID NO: 51924 - DNA, 22 bp, synthetic construct
  misc_feature 1..22: note = chemically synthesized
  source 1..22: mol_type = other DNA
ctctctgagctcccttccctgc

SEQ ID NO: 51925 - DNA, 22 bp, synthetic construct
  misc_feature 1..22: note = chemically synthesized
  source 1..22: mol_type = other DNA
tctctgagctcccttccctgca

SEQ ID NO: 51926 - DNA, 22 bp, synthetic construct
  misc_feature 1..22: note = chemically synthesized
  source 1..22: mol_type = other DNA
tctgagctcccttccctgcagc

SEQ ID NO: 51927 - DNA, 22 bp, synthetic construct
  misc_feature 1..22: note = chemically synthesized
  source 1..22: mol_type = other DNA
tgagctcccttccctgcagctc

SEQ ID NO: 51928 - DNA, 22 bp, synthetic construct
  misc_feature 1..22: note = chemically synthesized
  source 1..22: mol_type = other DNA
agctcccttccctgcagctcca

SEQ ID NO: 51929 - DNA, 22 bp, synthetic construct
  misc_feature 1..22: note = chemically synthesized
  source 1..22: mol_type = other DNA
ccttccctgcagctccatcccc

SEQ ID NO: 51930 - DNA, 22 bp, synthetic construct
  misc_feature 1..22: note = chemically synthesized
  source 1..22: mol_type = other DNA
ccctgcagctccatcccctggc

SEQ ID NO: 51931 - DNA, 22 bp, synthetic construct
  misc_feature 1..22: note = chemically synthesized
  source 1..22: mol_type = other DNA
cctgcagctccatcccctggct

SEQ ID NO: 51932 - DNA, 22 bp, synthetic construct
  misc_feature 1..22: note = chemically synthesized
  source 1..22: mol_type = other DNA
cagctccatcccctggcttcag

SEQ ID NO: 51933 - DNA, 22 bp, synthetic construct
  misc_feature 1..22: note = chemically synthesized
  source 1..22: mol_type = other DNA
catcccctggcttcagggcccc

SEQ ID NO: 51934 - DNA, 22 bp, synthetic construct
  misc_feature 1..22: note = chemically synthesized
  source 1..22: mol_type = other DNA
gcttcagggcccctgtccttcc

SEQ ID NO: 51935 - DNA, 22 bp, synthetic construct
  misc_feature 1..22: note = chemically synthesized
  source 1..22: mol_type = other DNA
cagggcccctgtccttcccctg

SEQ ID NO: 51936 - DNA, 22 bp, synthetic construct
  misc_feature 1..22: note = chemically synthesized
  source 1..22: mol_type = other DNA
agggcccctgtccttcccctga

SEQ ID NO: 51937 - DNA, 22 bp, synthetic construct
  misc_feature 1..22: note = chemically synthesized
  source 1..22: mol_type = other DNA
tccttcccctgagctggctgaa

SEQ ID NO: 51938 - DNA, 22 bp, synthetic construct
  misc_feature 1..22: note = chemically synthesized
  source 1..22: mol_type = other DNA
cccctgagctggctgaatggat

SEQ ID NO: 51939 - DNA, 22 bp, synthetic construct
  misc_feature 1..22: note = chemically synthesized
  source 1..22: mol_type = other DNA
ccctgagctggctgaatggata

SEQ ID NO: 51940 - DNA, 22 bp, synthetic construct
  misc_feature 1..22: note = chemically synthesized
  source 1..22: mol_type = other DNA
agctggctgaatggatattccg

SEQ ID NO: 51941 - DNA, 22 bp, synthetic construct
  misc_feature 1..22: note = chemically synthesized
  source 1..22: mol_type = other DNA
gctgaatggatattccgctgct

SEQ ID NO: 51942 - DNA, 22 bp, synthetic construct
  misc_feature 1..22: note = chemically synthesized
  source 1..22: mol_type = other DNA
aatggatattccgctgctctac

SEQ ID NO: 51943 - DNA, 22 bp, synthetic construct
  misc_feature 1..22: note = chemically synthesized
  source 1..22: mol_type = other DNA
cgctgctctacatccactcaca

SEQ ID NO: 51944 - DNA, 22 bp, synthetic construct
  misc_feature 1..22: note = chemically synthesized
  source 1..22: mol_type = other DNA
ctctacatccactcacagctcc

SEQ ID NO: 51945 - DNA, 22 bp, synthetic construct
  misc_feature 1..22: note = chemically synthesized
  source 1..22: mol_type = other DNA
tacatccactcacagctccagc

SEQ ID NO: 51946 - DNA, 22 bp, synthetic construct
  misc_feature 1..22: note = chemically synthesized
  source 1..22: mol_type = other DNA
catccactcacagctccagcac

SEQ ID NO: 51947 - DNA, 22 bp, synthetic construct
  misc_feature 1..22: note = chemically synthesized
  source 1..22: mol_type = other DNA
acagctccagcactgggctgtg

SEQ ID NO: 51948 - DNA, 22 bp, synthetic construct
  misc_feature 1..22: note = chemically synthesized
  source 1..22: mol_type = other DNA
cagcactgggctgtggttgagg

SEQ ID NO: 51949 - DNA, 22 bp, synthetic construct
  misc_feature 1..22: note = chemically synthesized
  source 1..22: mol_type = other DNA
ggctgtggttgaggtcgcctgc

SEQ ID NO: 51950 - DNA, 22 bp, synthetic construct
  misc_feature 1..22: note = chemically synthesized
  source 1..22: mol_type = other DNA
tggttgaggtcgcctgccctcg

SEQ ID NO: 51951 - DNA, 22 bp, synthetic construct
  misc_feature 1..22: note = chemically synthesized
  source 1..22: mol_type = other DNA
aggtcgcctgccctcggtagct

SEQ ID NO: 51952 - DNA, 22 bp, synthetic construct
  misc_feature 1..22: note = chemically synthesized
  source 1..22: mol_type = other DNA
ccctcggtagctcctgggcatt

SEQ ID NO: 51953 - DNA, 22 bp, synthetic construct
  misc_feature 1..22: note = chemically synthesized
  source 1..22: mol_type = other DNA
ggtagctcctgggcatttcttc

SEQ ID NO: 51954 - DNA, 22 bp, synthetic construct
  misc_feature 1..22: note = chemically synthesized
  source 1..22: mol_type = other DNA
ctgggcatttcttcccctctct

SEQ ID NO: 51955 - DNA, 22 bp, synthetic construct
  misc_feature 1..22: note = chemically synthesized
  source 1..22: mol_type = other DNA
ggcatttcttcccctctctggg

SEQ ID NO: 51956 - DNA, 22 bp, synthetic construct
  misc_feature 1..22: note = chemically synthesized
  source 1..22: mol_type = other DNA
cttcccctctctgggcctttgt

SEQ ID NO: 51957 - DNA, 22 bp, synthetic construct
  misc_feature 1..22: note = chemically synthesized
  source 1..22: mol_type = other DNA
ttcccctctctgggcctttgtt

SEQ ID NO: 51958 - DNA, 22 bp, synthetic construct
  misc_feature 1..22: note = chemically synthesized
  source 1..22: mol_type = other DNA
cccctctctgggcctttgtttt

SEQ ID NO: 51959 - DNA, 22 bp, synthetic construct
  misc_feature 1..22: note = chemically synthesized
  source 1..22: mol_type = other DNA
ccctctctgggcctttgttttc

SEQ ID NO: 51960 - DNA, 22 bp, synthetic construct
  misc_feature 1..22: note = chemically synthesized
  source 1..22: mol_type = other DNA
tctgggcctttgttttcccatc

SEQ ID NO: 51961 - DNA, 22 bp, synthetic construct
  misc_feature 1..22: note = chemically synthesized
  source 1..22: mol_type = other DNA
tgggcctttgttttcccatctg

SEQ ID NO: 51962 - DNA, 22 bp, synthetic construct
  misc_feature 1..22: note = chemically synthesized
  source 1..22: mol_type = other DNA
ggcctttgttttcccatctgca

SEQ ID NO: 51963 - DNA, 22 bp, synthetic construct
  misc_feature 1..22: note = chemically synthesized
  source 1..22: mol_type = other DNA
tgttttcccatctgcacaatga

SEQ ID NO: 51964 - DNA, 22 bp, synthetic construct
  misc_feature 1..22: note = chemically synthesized
  source 1..22: mol_type = other DNA
gttttcccatctgcacaatgac

SEQ ID NO: 51965 - DNA, 22 bp, synthetic construct
  misc_feature 1..22: note = chemically synthesized
  source 1..22: mol_type = other DNA
ttttcccatctgcacaatgacc

SEQ ID NO: 51966 - DNA, 22 bp, synthetic construct
  misc_feature 1..22: note = chemically synthesized
  source 1..22: mol_type = other DNA
tcccatctgcacaatgaccccc

SEQ ID NO: 51967 - DNA, 22 bp, synthetic construct
  misc_feature 1..22: note = chemically synthesized
  source 1..22: mol_type = other DNA
cccatctgcacaatgaccccca

SEQ ID NO: 51968 - DNA, 22 bp, synthetic construct
  misc_feature 1..22: note = chemically synthesized
  source 1..22: mol_type = other DNA
ccatctgcacaatgacccccac

SEQ ID NO: 51969 - DNA, 22 bp, synthetic construct
  misc_feature 1..22: note = chemically synthesized
  source 1..22: mol_type = other DNA
cacaatgacccccactctaagc

SEQ ID NO: 51970 - DNA, 22 bp, synthetic construct
  misc_feature 1..22: note = chemically synthesized
  source 1..22: mol_type = other DNA
taagccctgctgtccctcccac

SEQ ID NO: 51971 - DNA, 22 bp, synthetic construct
  misc_feature 1..22: note = chemically synthesized
  source 1..22: mol_type = other DNA
agccctgctgtccctcccacct

SEQ ID NO: 51972 - DNA, 22 bp, synthetic construct
  misc_feature 1..22: note = chemically synthesized
  source 1..22: mol_type = other DNA
ctgtccctcccacctgtggaac

SEQ ID NO: 51973 - DNA, 22 bp, synthetic construct
  misc_feature 1..22: note = chemically synthesized
  source 1..22: mol_type = other DNA
tccctcccacctgtggaactga

SEQ ID NO: 51974 - DNA, 22 bp, synthetic construct
  misc_feature 1..22: note = chemically synthesized
  source 1..22: mol_type = other DNA
ccacctgtggaactgagtgagc

SEQ ID NO: 51975 - DNA, 22 bp, synthetic construct
  misc_feature 1..22: note = chemically synthesized
  source 1..22: mol_type = other DNA
tggaactgagtgagcagcagca

SEQ ID NO: 51976 - DNA, 22 bp, synthetic construct
  misc_feature 1..22: note = chemically synthesized
  source 1..22: mol_type = other DNA
agtgagcagcagcagcaatgtc

SEQ ID NO: 51977 - DNA, 22 bp, synthetic construct
  misc_feature 1..22: note = chemically synthesized
  source 1..22: mol_type = other DNA
tcctgctctcctcaagctctcc

SEQ ID NO: 51978 - DNA, 22 bp, synthetic construct
  misc_feature 1..22: note = chemically synthesized
  source 1..22: mol_type = other DNA
cctgctctcctcaagctctcct

SEQ ID NO: 51979 - DNA, 22 bp, synthetic construct
  misc_feature 1..22: note = chemically synthesized
  source 1..22: mol_type = other DNA
ctgctctcctcaagctctcctc

SEQ ID NO: 51980 - DNA, 22 bp, synthetic construct
  misc_feature 1..22: note = chemically synthesized
  source 1..22: mol_type = other DNA
ctctcctcaagctctcctcaag

SEQ ID NO: 51981 - DNA, 22 bp, synthetic construct
  misc_feature 1..22: note = chemically synthesized
  source 1..22: mol_type = other DNA
tcctcaagctctcctcaagctc

SEQ ID NO: 51982 - DNA, 22 bp, synthetic construct
  misc_feature 1..22: note = chemically synthesized
  source 1..22: mol_type = other DNA
ctcaagctctcctcaagctctg

SEQ ID NO: 51983 - DNA, 22 bp, synthetic construct
  misc_feature 1..22: note = chemically synthesized
  source 1..22: mol_type = other DNA
aagctctcctcaagctctgtct

SEQ ID NO: 51984 - DNA, 22 bp, synthetic construct
  misc_feature 1..22: note = chemically synthesized
  source 1..22: mol_type = other DNA
tcctcaagctctgtctcttctg

SEQ ID NO: 51985 - DNA, 22 bp, synthetic construct
  misc_feature 1..22: note = chemically synthesized
  source 1..22: mol_type = other DNA
ctcaagctctgtctcttctggc

SEQ ID NO: 51986 - DNA, 22 bp, synthetic construct
  misc_feature 1..22: note = chemically synthesized
  source 1..22: mol_type = other DNA
aagctctgtctcttctggcagg

SEQ ID NO: 51987 - DNA, 22 bp, synthetic construct
  misc_feature 1..22: note = chemically synthesized
  source 1..22: mol_type = other DNA
tgtctcttctggcaggcacagg

SEQ ID NO: 51988 - DNA, 22 bp, synthetic construct
  misc_feature 1..22: note = chemically synthesized
  source 1..22: mol_type = other DNA
tctcttctggcaggcacaggag

SEQ ID NO: 51989 - DNA, 22 bp, synthetic construct
  misc_feature 1..22: note = chemically synthesized
  source 1..22: mol_type = other DNA
ttctggcaggcacaggagagtg

SEQ ID NO: 51990 - DNA, 22 bp, synthetic construct
  misc_feature 1..22: note = chemically synthesized
  source 1..22: mol_type = other DNA
ctggcaggcacaggagagtggc

SEQ ID NO: 51991 - DNA, 22 bp, synthetic construct
  misc_feature 1..22: note = chemically synthesized
  source 1..22: mol_type = other DNA
tggcaggcacaggagagtggcc

SEQ ID NO: 51992 - DNA, 22 bp, synthetic construct
  misc_feature 1..22: note = chemically synthesized
  source 1..22: mol_type = other DNA
gcaggcacaggagagtggcctg

SEQ ID NO: 51993 - DNA, 22 bp, synthetic construct
  misc_feature 1..22: note = chemically synthesized
  source 1..22: mol_type = other DNA
aaggctggcaggaggttgccgc

SEQ ID NO: 51994 - DNA, 22 bp, synthetic construct
  misc_feature 1..22: note = chemically synthesized
  source 1..22: mol_type = other DNA
gcaggaggttgccgcccctcca

SEQ ID NO: 51995 - DNA, 22 bp, synthetic construct
  misc_feature 1..22: note = chemically synthesized
  source 1..22: mol_type = other DNA
ccgcccctccaacctggaattc

SEQ ID NO: 51996 - DNA, 22 bp, synthetic construct
  misc_feature 1..22: note = chemically synthesized
  source 1..22: mol_type = other DNA
caacctggaattcctggcagca

SEQ ID NO: 51997 - DNA, 22 bp, synthetic construct
  misc_feature 1..22: note = chemically synthesized
  source 1..22: mol_type = other DNA
gaattcctggcagcagcagcgg

SEQ ID NO: 51998 - DNA, 22 bp, synthetic construct
  misc_feature 1..22: note = chemically synthesized
  source 1..22: mol_type = other DNA
ctggcagcagcagcggctaggc

SEQ ID NO: 51999 - DNA, 22 bp, synthetic construct
  misc_feature 1..22: note = chemically synthesized
  source 1..22: mol_type = other DNA
gcagcagcagcggctaggcctt

SEQ ID NO: 52000 - DNA, 22 bp, synthetic construct
  misc_feature 1..22: note = chemically synthesized
  source 1..22: mol_type = other DNA
ggccttcctcggaggcccgacc

SEQ ID NO: 52001 - DNA, 22 bp, synthetic construct
  misc_feature 1..22: note = chemically synthesized
  source 1..22: mol_type = other DNA
cctcggaggcccgaccccctcc

SEQ ID NO: 52002 - DNA, 22 bp, synthetic construct
  misc_feature 1..22: note = chemically synthesized
  source 1..22: mol_type = other DNA
ctcggaggcccgaccccctcct

SEQ ID NO: 52003 - DNA, 22 bp, synthetic construct
  misc_feature 1..22: note = chemically synthesized
  source 1..22: mol_type = other DNA
ggaggcccgaccccctcctcct

SEQ ID NO: 52004 - DNA, 22 bp, synthetic construct
  misc_feature 1..22: note = chemically synthesized
  source 1..22: mol_type = other DNA
ctccttcttggttcagctcagg

SEQ ID NO: 52005 - DNA, 22 bp, synthetic construct
  misc_feature 1..22: note = chemically synthesized
  source 1..22: mol_type = other DNA
cttcttggttcagctcaggact

SEQ ID NO: 52006 - DNA, 22 bp, synthetic construct
  misc_feature 1..22: note = chemically synthesized
  source 1..22: mol_type = other DNA
cttggttcagctcaggactctg

SEQ ID NO: 52007 - DNA, 22 bp, synthetic construct
  misc_feature 1..22: note = chemically synthesized
  source 1..22: mol_type = other DNA
ttggttcagctcaggactctga

SEQ ID NO: 52008 - DNA, 22 bp, synthetic construct
  misc_feature 1..22: note = chemically synthesized
  source 1..22: mol_type = other DNA
ggttcagctcaggactctgagg

SEQ ID NO: 52009 - DNA, 22 bp, synthetic construct
  misc_feature 1..22: note = chemically synthesized
  source 1..22: mol_type = other DNA
gttcagctcaggactctgaggg

SEQ ID NO: 52010 - DNA, 22 bp, synthetic construct
  misc_feature 1..22: note = chemically synthesized
  source 1..22: mol_type = other DNA
agctcaggactctgagggttgc

SEQ ID NO: 52011 - DNA, 22 bp, synthetic construct
  misc_feature 1..22: note = chemically synthesized
  source 1..22: mol_type = other DNA
aggactctgagggttgctgcgt

SEQ ID NO: 52012 - DNA, 22 bp, synthetic construct
  misc_feature 1..22: note = chemically synthesized
  source 1..22: mol_type = other DNA
tgagggttgctgcgtggaggca

SEQ ID NO: 52013 - DNA, 22 bp, synthetic construct
  misc_feature 1..22: note = chemically synthesized
  source 1..22: mol_type = other DNA
agggttgctgcgtggaggcagt

SEQ ID NO: 52014 - DNA, 22 bp, synthetic construct
  misc_feature 1..22: note = chemically synthesized
  source 1..22: mol_type = other DNA
ctgcgtggaggcagtgcatgcc

SEQ ID NO: 52015 - DNA, 22 bp, synthetic construct
  misc_feature 1..22: note = chemically synthesized
  source 1..22: mol_type = other DNA
cgtggaggcagtgcatgccctg

SEQ ID NO: 52016 - DNA, 22 bp, synthetic construct
  misc_feature 1..22: note = chemically synthesized
  source 1..22: mol_type = other DNA
ggcacagtgcccagttcctgcc

SEQ ID NO: 52017 - DNA, 22 bp, synthetic construct
  misc_feature 1..22: note = chemically synthesized
  source 1..22: mol_type = other DNA
ctgcccacccaggaagtagact

SEQ ID NO: 52018 - DNA, 22 bp, synthetic construct
  misc_feature 1..22: note = chemically synthesized
  source 1..22: mol_type = other DNA
cccacccaggaagtagacttcg

SEQ ID NO: 52019 - DNA, 22 bp, synthetic construct
  misc_feature 1..22: note = chemically synthesized
  source 1..22: mol_type = other DNA
cgggtggaggcagtaggctggg

SEQ ID NO: 52020 - DNA, 22 bp, synthetic construct
  misc_feature 1..22: note = chemically synthesized
  source 1..22: mol_type = other DNA
gggtggaggcagtaggctgggg

SEQ ID NO: 52021 - DNA, 22 bp, synthetic construct
  misc_feature 1..22: note = chemically synthesized
  source 1..22: mol_type = other DNA
gggaggggcggggagcttggac

SEQ ID NO: 52022 - DNA, 22 bp, synthetic construct
  misc_feature 1..22: note = chemically synthesized
  source 1..22: mol_type = other DNA
ggacaggaaggagccttgctca

SEQ ID NO: 52023 - DNA, 22 bp, synthetic construct
  misc_feature 1..22: note = chemically synthesized
  source 1..22: mol_type = other DNA
gacaggaaggagccttgctcat

SEQ ID NO: 52024 - DNA, 22 bp, synthetic construct
  misc_feature 1..22: note = chemically synthesized
  source 1..22: mol_type = other DNA
gctcattgcccggcagacacaa

SEQ ID NO: 52025 - DNA, 22 bp, synthetic construct
  misc_feature 1..22: note = chemically synthesized
  source 1..22: mol_type = other DNA
ctcattgcccggcagacacaag

SEQ ID NO: 52026 - DNA, 22 bp, synthetic construct
  misc_feature 1..22: note = chemically synthesized
  source 1..22: mol_type = other DNA
attgcccggcagacacaagact

SEQ ID NO: 52027 - DNA, 22 bp, synthetic construct
  misc_feature 1..22: note = chemically synthesized
  source 1..22: mol_type = other DNA
cccggcagacacaagactgggc

SEQ ID NO: 52028 - DNA, 22 bp, synthetic construct
  misc_feature 1..22: note = chemically synthesized
  source 1..22: mol_type = other DNA
ggccctcataaactcagacagc

SEQ ID NO: 52029 - DNA, 22 bp, synthetic construct
  misc_feature 1..22: note = chemically synthesized
  source 1..22: mol_type = other DNA
ataaactcagacagcccggcat

SEQ ID NO: 52030 - DNA, 22 bp, synthetic construct
  misc_feature 1..22: note = chemically synthesized
  source 1..22: mol_type = other DNA
agacagcccggcatgtcacctg

SEQ ID NO: 52031 - DNA, 22 bp, synthetic construct
  misc_feature 1..22: note = chemically synthesized
  source 1..22: mol_type = other DNA
ttgtacctgccctttcagctct

SEQ ID NO: 52032 - DNA, 22 bp, synthetic construct
  misc_feature 1..22: note = chemically synthesized
  source 1..22: mol_type = other DNA
tacctgccctttcagctctgtg

SEQ ID NO: 52033 - DNA, 22 bp, synthetic construct
  misc_feature 1..22: note = chemically synthesized
  source 1..22: mol_type = other DNA
ccctttcagctctgtgacccgg

SEQ ID NO: 52034 - DNA, 22 bp, synthetic construct
  misc_feature 1..22: note = chemically synthesized
  source 1..22: mol_type = other DNA
tcagctctgtgacccgggacaa

SEQ ID NO: 52035 - DNA, 22 bp, synthetic construct
  misc_feature 1..22: note = chemically synthesized
  source 1..22: mol_type = other DNA
cagctctgtgacccgggacaag

SEQ ID NO: 52036 - DNA, 22 bp, synthetic construct
  misc_feature 1..22: note = chemically synthesized
  source 1..22: mol_type = other DNA
agctctgtgacccgggacaagt

SEQ ID NO: 52037 - DNA, 22 bp, synthetic construct
  misc_feature 1..22: note = chemically synthesized
  source 1..22: mol_type = other DNA
tgtgacccgggacaagtcaccc

SEQ ID NO: 52038 - DNA, 22 bp, synthetic construct
  misc_feature 1..22: note = chemically synthesized
  source 1..22: mol_type = other DNA
tgacccgggacaagtcaccctc

SEQ ID NO: 52039 - DNA, 22 bp, synthetic construct
  misc_feature 1..22: note = chemically synthesized
  source 1..22: mol_type = other DNA
tccctttgagttgccgcaagag

SEQ ID NO: 52040 - DNA, 22 bp, synthetic construct
  misc_feature 1..22: note = chemically synthesized
  source 1..22: mol_type = other DNA
cctttgagttgccgcaagaggt

SEQ ID NO: 52041 - DNA, 22 bp, synthetic construct
  misc_feature 1..22: note = chemically synthesized
  source 1..22: mol_type = other DNA
tgagttgccgcaagaggtacag

SEQ ID NO: 52042 - DNA, 22 bp, synthetic construct
  misc_feature 1..22: note = chemically synthesized
  source 1..22: mol_type = other DNA
gagttgccgcaagaggtacagt

SEQ ID NO: 52043 - DNA, 22 bp, synthetic construct
  misc_feature 1..22: note = chemically synthesized
  source 1..22: mol_type = other DNA
agttgccgcaagaggtacagtc

SEQ ID NO: 52044 - DNA, 22 bp, synthetic construct
  misc_feature 1..22: note = chemically synthesized
  source 1..22: mol_type = other DNA
ccgcaagaggtacagtcacact

SEQ ID NO: 52045 - DNA, 22 bp, synthetic construct
  misc_feature 1..22: note = chemically synthesized
  source 1..22: mol_type = other DNA
cccagaggattactagaaatga

SEQ ID NO: 52046 - DNA, 22 bp, synthetic construct
  misc_feature 1..22: note = chemically synthesized
  source 1..22: mol_type = other DNA
ctagaaatgacaggcctcgccc

SEQ ID NO: 52047 - DNA, 22 bp, synthetic construct
  misc_feature 1..22: note = chemically synthesized
  source 1..22: mol_type = other DNA
gaaatgacaggcctcgccctcc

SEQ ID NO: 52048 - DNA, 22 bp, synthetic construct
  misc_feature 1..22: note = chemically synthesized
  source 1..22: mol_type = other DNA
gccctcctggcacagacctggc

SEQ ID NO: 52049 - DNA, 22 bp, synthetic construct
  misc_feature 1..22: note = chemically synthesized
  source 1..22: mol_type = other DNA
ctggcacagacctggcaccaat

SEQ ID NO: 52050 - DNA, 22 bp, synthetic construct
  misc_feature 1..22: note = chemically synthesized
  source 1..22: mol_type = other DNA
gcacagacctggcaccaataac

SEQ ID NO: 52051 - DNA, 22 bp, synthetic construct
  misc_feature 1..22: note = chemically synthesized
  source 1..22: mol_type = other DNA
gcaccaataactggcaggtttc

SEQ ID NO: 52052 - DNA, 22 bp, synthetic construct
  misc_feature 1..22: note = chemically synthesized
  source 1..22: mol_type = other DNA
gcaggtttctggggccagctgc

SEQ ID NO: 52053 - DNA, 22 bp, synthetic construct
  misc_feature 1..22: note = chemically synthesized
  source 1..22: mol_type = other DNA
ctggggccagctgcagagggaa

SEQ ID NO: 52054 - DNA, 22 bp, synthetic construct
  misc_feature 1..22: note = chemically synthesized
  source 1..22: mol_type = other DNA
tggggccagctgcagagggaag

SEQ ID NO: 52055 - DNA, 22 bp, synthetic construct
  misc_feature 1..22: note = chemically synthesized
  source 1..22: mol_type = other DNA
gggccagctgcagagggaagag

SEQ ID NO: 52056 - DNA, 22 bp, synthetic construct
  misc_feature 1..22: note = chemically synthesized
  source 1..22: mol_type = other DNA
cagagggaagaggactgagcca

SEQ ID NO: 52057 - DNA, 22 bp, synthetic construct
  misc_feature 1..22: note = chemically synthesized
  source 1..22: mol_type = other DNA
agccacctatgaaatgcccagt

SEQ ID NO: 52058 - DNA, 22 bp, synthetic construct
  misc_feature 1..22: note = chemically synthesized
  source 1..22: mol_type = other DNA
tgaaatgcccagtgggcagccc

SEQ ID NO: 52059 - DNA, 22 bp, synthetic construct
  misc_feature 1..22: note = chemically synthesized
  source 1..22: mol_type = other DNA
ggcaggtctgtgtgcactgggg

SEQ ID NO: 52060 - DNA, 22 bp, synthetic construct
  misc_feature 1..22: note = chemically synthesized
  source 1..22: mol_type = other DNA
tgtgcactggggaggtgtgtgt

SEQ ID NO: 52061 - DNA, 22 bp, synthetic construct
  misc_feature 1..22: note = chemically synthesized
  source 1..22: mol_type = other DNA
gggaggtgtgtgtcataggacc

SEQ ID NO: 52062 - DNA, 22 bp, synthetic construct
  misc_feature 1..22: note = chemically synthesized
  source 1..22: mol_type = other DNA
tgacacacacctccccagtgca

SEQ ID NO: 52063 - DNA, 22 bp, synthetic construct
  misc_feature 1..22: note = chemically synthesized
  source 1..22: mol_type = other DNA
cccagtgcacacagacctgccc

SEQ ID NO: 52064 - DNA, 22 bp, synthetic construct
  misc_feature 1..22: note = chemically synthesized
  source 1..22: mol_type = other DNA
cccaactgtggggctgcccact

SEQ ID NO: 52065 - DNA, 22 bp, synthetic construct
  misc_feature 1..22: note = chemically synthesized
  source 1..22: mol_type = other DNA
tggggctgcccactgggcattt

SEQ ID NO: 52066 - DNA, 22 bp, synthetic construct
  misc_feature 1..22: note = chemically synthesized
  source 1..22: mol_type = other DNA
cccactgggcatttcataggtg

SEQ ID NO: 52067 - DNA, 22 bp, synthetic construct
  misc_feature 1..22: note = chemically synthesized
  source 1..22: mol_type = other DNA
ggcatttcataggtggctcagt

SEQ ID NO: 52068 - DNA, 22 bp, synthetic construct
  misc_feature 1..22: note = chemically synthesized
  source 1..22: mol_type = other DNA
cataggtggctcagtcctcttc

SEQ ID NO: 52069 - DNA, 22 bp, synthetic construct
  misc_feature 1..22: note = chemically synthesized
  source 1..22: mol_type = other DNA
ataggtggctcagtcctcttcc

SEQ ID NO: 52070 - DNA, 22 bp, synthetic construct
  misc_feature 1..22: note = chemically synthesized
  source 1..22: mol_type = other DNA
agtcctcttccctctgcagctg

SEQ ID NO: 52071 - DNA, 22 bp, synthetic construct
  misc_feature 1..22: note = chemically synthesized
  source 1..22: mol_type = other DNA
ttccctctgcagctggccccag

SEQ ID NO: 52072 - DNA, 22 bp, synthetic construct
  misc_feature 1..22: note = chemically synthesized
  source 1..22: mol_type = other DNA
ccctctgcagctggccccagaa

SEQ ID NO: 52073 - DNA, 22 bp, synthetic construct
  misc_feature 1..22: note = chemically synthesized
  source 1..22: mol_type = other DNA
cctctgcagctggccccagaaa

SEQ ID NO: 52074 - DNA, 22 bp, synthetic construct
  misc_feature 1..22: note = chemically synthesized
  source 1..22: mol_type = other DNA
tgcagctggccccagaaacctg

SEQ ID NO: 52075 - DNA, 22 bp, synthetic construct
  misc_feature 1..22: note = chemically synthesized
  source 1..22: mol_type = other DNA
cagctggccccagaaacctgcc

SEQ ID NO: 52076 - DNA, 22 bp, synthetic construct
  misc_feature 1..22: note = chemically synthesized
  source 1..22: mol_type = other DNA
gccccagaaacctgccagttat

SEQ ID NO: 52077 - DNA, 22 bp, synthetic construct
  misc_feature 1..22: note = chemically synthesized
  source 1..22: mol_type = other DNA
ccagttattggtgccaggtctg

SEQ ID NO: 52078 - DNA, 22 bp, synthetic construct
  misc_feature 1..22: note = chemically synthesized
  source 1..22: mol_type = other DNA
ttggtgccaggtctgtgccagg

SEQ ID NO: 52079 - DNA, 22 bp, synthetic construct
  misc_feature 1..22: note = chemically synthesized
  source 1..22: mol_type = other DNA
gtgccaggtctgtgccaggagg

SEQ ID NO: 52080 - DNA, 22 bp, synthetic construct
  misc_feature 1..22: note = chemically synthesized
  source 1..22: mol_type = other DNA
tgccaggagggcgaggcctgtc

SEQ ID NO: 52081 - DNA, 22 bp, synthetic construct
  misc_feature 1..22: note = chemically synthesized
  source 1..22: mol_type = other DNA
tcatttctagtaatcctctggg

SEQ ID NO: 52082 - DNA, 22 bp, synthetic construct
  misc_feature 1..22: note = chemically synthesized
  source 1..22: mol_type = other DNA
ctagtaatcctctgggcagtgt

SEQ ID NO: 52083 - DNA, 22 bp, synthetic construct
  misc_feature 1..22: note = chemically synthesized
  source 1..22: mol_type = other DNA
tagtaatcctctgggcagtgtg

SEQ ID NO: 52084 - DNA, 22 bp, synthetic construct
  misc_feature 1..22: note = chemically synthesized
  source 1..22: mol_type = other DNA
gtaatcctctgggcagtgtgac

SEQ ID NO: 52085 - DNA, 22 bp, synthetic construct
  misc_feature 1..22: note = chemically synthesized
  source 1..22: mol_type = other DNA
tgggcagtgtgactgtacctct

SEQ ID NO: 52086 - DNA, 22 bp, synthetic construct
  misc_feature 1..22: note = chemically synthesized
  source 1..22: mol_type = other DNA
ggcagtgtgactgtacctcttg

SEQ ID NO: 52087 - DNA, 22 bp, synthetic construct
  misc_feature 1..22: note = chemically synthesized
  source 1..22: mol_type = other DNA
tacctcttgcggcaactcaaag

SEQ ID NO: 52088 - DNA, 22 bp, synthetic construct
  misc_feature 1..22: note = chemically synthesized
  source 1..22: mol_type = other DNA
ttgcggcaactcaaagggagag

SEQ ID NO: 52089 - DNA, 22 bp, synthetic construct
  misc_feature 1..22: note = chemically synthesized
  source 1..22: mol_type = other DNA
gcggcaactcaaagggagaggg

SEQ ID NO: 52090 - DNA, 22 bp, synthetic construct
  misc_feature 1..22: note = chemically synthesized
  source 1..22: mol_type = other DNA
cggcaactcaaagggagagggt

SEQ ID NO: 52091 - DNA, 22 bp, synthetic construct
  misc_feature 1..22: note = chemically synthesized
  source 1..22: mol_type = other DNA
aaagggagagggtgacttgtcc

SEQ ID NO: 52092 - DNA, 22 bp, synthetic construct
  misc_feature 1..22: note = chemically synthesized
  source 1..22: mol_type = other DNA
gtcccgggtcacagagctgaaa

SEQ ID NO: 52093 - DNA, 22 bp, synthetic construct
  misc_feature 1..22: note = chemically synthesized
  source 1..22: mol_type = other DNA
tcccgggtcacagagctgaaag

SEQ ID NO: 52094 - DNA, 22 bp, synthetic construct
  misc_feature 1..22: note = chemically synthesized
  source 1..22: mol_type = other DNA
aaagggcaggtacaacaggtga

SEQ ID NO: 52095 - DNA, 22 bp, synthetic construct
  misc_feature 1..22: note = chemically synthesized
  source 1..22: mol_type = other DNA
tctgagtttatgagggcccagt

SEQ ID NO: 52096 - DNA, 22 bp, synthetic construct
  misc_feature 1..22: note = chemically synthesized
  source 1..22: mol_type = other DNA
agtttatgagggcccagtcttg

SEQ ID NO: 52097 - DNA, 22 bp, synthetic construct
  misc_feature 1..22: note = chemically synthesized
  source 1..22: mol_type = other DNA
atgagggcccagtcttgtgtct

SEQ ID NO: 52098 - DNA, 22 bp, synthetic construct
  misc_feature 1..22: note = chemically synthesized
  source 1..22: mol_type = other DNA
tgagggcccagtcttgtgtctg

SEQ ID NO: 52099 - DNA, 22 bp, synthetic construct
  misc_feature 1..22: note = chemically synthesized
  source 1..22: mol_type = other DNA
gtgtctgccgggcaatgagcaa

SEQ ID NO: 52100 - DNA, 22 bp, synthetic construct
  misc_feature 1..22: note = chemically synthesized
  source 1..22: mol_type = other DNA
tgtctgccgggcaatgagcaag

SEQ ID NO: 52101 - DNA, 22 bp, synthetic construct
  misc_feature 1..22: note = chemically synthesized
  source 1..22: mol_type = other DNA
ccgggcaatgagcaaggctcct

SEQ ID NO: 52102 - DNA, 22 bp, synthetic construct
  misc_feature 1..22: note = chemically synthesized
  source 1..22: mol_type = other DNA
cttcctgtccaagctccccgcc

SEQ ID NO: 52103 - DNA, 22 bp, synthetic construct
  misc_feature 1..22: note = chemically synthesized
  source 1..22: mol_type = other DNA
cctgtccaagctccccgcccct

SEQ ID NO: 52104 - DNA, 22 bp, synthetic construct
  misc_feature 1..22: note = chemically synthesized
  source 1..22: mol_type = other DNA
ctgtccaagctccccgcccctc

SEQ ID NO: 52105 - DNA, 22 bp, synthetic construct
  misc_feature 1..22: note = chemically synthesized
  source 1..22: mol_type = other DNA
tccaagctccccgcccctcccc

SEQ ID NO: 52106 - DNA, 22 bp, synthetic construct
  misc_feature 1..22: note = chemically synthesized
  source 1..22: mol_type = other DNA
cccgcccctccccagcctactg

SEQ ID NO: 52107 - DNA, 22 bp, synthetic construct
  misc_feature 1..22: note = chemically synthesized
  source 1..22: mol_type = other DNA
cccagcctactgcctccacccg

SEQ ID NO: 52108 - DNA, 22 bp, synthetic construct
  misc_feature 1..22: note = chemically synthesized
  source 1..22: mol_type = other DNA
ctgcctccacccgaagtctact

SEQ ID NO: 52109 - DNA, 22 bp, synthetic construct
  misc_feature 1..22: note = chemically synthesized
  source 1..22: mol_type = other DNA
cctccacccgaagtctacttcc

SEQ ID NO: 52110 - DNA, 22 bp, synthetic construct
  misc_feature 1..22: note = chemically synthesized
  source 1..22: mol_type = other DNA
cacccgaagtctacttcctggg

SEQ ID NO: 52111 - DNA, 22 bp, synthetic construct
  misc_feature 1..22: note = chemically synthesized
  source 1..22: mol_type = other DNA
cttcctgggtgggcaggaactg

SEQ ID NO: 52112 - DNA, 22 bp, synthetic construct
  misc_feature 1..22: note = chemically synthesized
  source 1..22: mol_type = other DNA
cctgggtgggcaggaactgggc

SEQ ID NO: 52113 - DNA, 22 bp, synthetic construct
  misc_feature 1..22: note = chemically synthesized
  source 1..22: mol_type = other DNA
ctgggtgggcaggaactgggca

SEQ ID NO: 52114 - DNA, 22 bp, synthetic construct
  misc_feature 1..22: note = chemically synthesized
  source 1..22: mol_type = other DNA
ggtgggcaggaactgggcactg

SEQ ID NO: 52115 - DNA, 22 bp, synthetic construct
  misc_feature 1..22: note = chemically synthesized
  source 1..22: mol_type = other DNA
ggcactgtgcccagggcatgca

SEQ ID NO: 52116 - DNA, 22 bp, synthetic construct
  misc_feature 1..22: note = chemically synthesized
  source 1..22: mol_type = other DNA
tgcccagggcatgcactgcctc

SEQ ID NO: 52117 - DNA, 22 bp, synthetic construct
  misc_feature 1..22: note = chemically synthesized
  source 1..22: mol_type = other DNA
cctccacgcagcaaccctcaga

SEQ ID NO: 52118 - DNA, 22 bp, synthetic construct
  misc_feature 1..22: note = chemically synthesized
  source 1..22: mol_type = other DNA
cacgcagcaaccctcagagtcc

SEQ ID NO: 52119 - DNA, 22 bp, synthetic construct
  misc_feature 1..22: note = chemically synthesized
  source 1..22: mol_type = other DNA
agagtcctgagctgaaccaaga

SEQ ID NO: 52120 - DNA, 22 bp, synthetic construct
  misc_feature 1..22: note = chemically synthesized
  source 1..22: mol_type = other DNA
agctgaaccaagaaggaggagg

SEQ ID NO: 52121 - DNA, 22 bp, synthetic construct
  misc_feature 1..22: note = chemically synthesized
  source 1..22: mol_type = other DNA
aaccaagaaggaggagggggtc

SEQ ID NO: 52122 - DNA, 22 bp, synthetic construct
  misc_feature 1..22: note = chemically synthesized
  source 1..22: mol_type = other DNA
cgaggaaggcctagccgctgct

SEQ ID NO: 52123 - DNA, 22 bp, synthetic construct
  misc_feature 1..22: note = chemically synthesized
  source 1..22: mol_type = other DNA
gccgctgctgctgccaggaatt

SEQ ID NO: 52124 - DNA, 22 bp, synthetic construct
  misc_feature 1..22: note = chemically synthesized
  source 1..22: mol_type = other DNA
ctgctgccaggaattccaggtt

SEQ ID NO: 52125 - DNA, 22 bp, synthetic construct
  misc_feature 1..22: note = chemically synthesized
  source 1..22: mol_type = other DNA
ctgccaggaattccaggttgga

SEQ ID NO: 52126 - DNA, 22 bp, synthetic construct
  misc_feature 1..22: note = chemically synthesized
  source 1..22: mol_type = other DNA
ccaggaattccaggttggaggg

SEQ ID NO: 52127 - DNA, 22 bp, synthetic construct
  misc_feature 1..22: note = chemically synthesized
  source 1..22: mol_type = other DNA
caggttggaggggcggcaacct

SEQ ID NO: 52128 - DNA, 22 bp, synthetic construct
  misc_feature 1..22: note = chemically synthesized
  source 1..22: mol_type = other DNA
gaggggcggcaacctcctgcca

SEQ ID NO: 52129 - DNA, 22 bp, synthetic construct
  misc_feature 1..22: note = chemically synthesized
  source 1..22: mol_type = other DNA
ctgccagccttcaggccactct

SEQ ID NO: 52130 - DNA, 22 bp, synthetic construct
  misc_feature 1..22: note = chemically synthesized
  source 1..22: mol_type = other DNA
ccagccttcaggccactctcct

SEQ ID NO: 52131 - DNA, 22 bp, synthetic construct
  misc_feature 1..22: note = chemically synthesized
  source 1..22: mol_type = other DNA
caggccactctcctgtgcctgc

SEQ ID NO: 52132 - DNA, 22 bp, synthetic construct
  misc_feature 1..22: note = chemically synthesized
  source 1..22: mol_type = other DNA
aggccactctcctgtgcctgcc

SEQ ID NO: 52133 - DNA, 22 bp, synthetic construct
  misc_feature 1..22: note = chemically synthesized
  source 1..22: mol_type = other DNA
tcctgtgcctgccagaagagac

SEQ ID NO: 52134 - DNA, 22 bp, synthetic construct
  misc_feature 1..22: note = chemically synthesized
  source 1..22: mol_type = other DNA
ctgtgcctgccagaagagacag

SEQ ID NO: 52135 - DNA, 22 bp, synthetic construct
  misc_feature 1..22: note = chemically synthesized
  source 1..22: mol_type = other DNA
tgcctgccagaagagacagagc

SEQ ID NO: 52136 - DNA, 22 bp, synthetic construct
  misc_feature 1..22: note = chemically synthesized
  source 1..22: mol_type = other DNA
ccagaagagacagagcttgagg

SEQ ID NO: 52137 - DNA, 22 bp, synthetic construct
  misc_feature 1..22: note = chemically synthesized
  source 1..22: mol_type = other DNA
gaggagagcttgaggagagcag

SEQ ID NO: 52138 - DNA, 22 bp, synthetic construct
  misc_feature 1..22: note = chemically synthesized
  source 1..22: mol_type = other DNA
aggagagcttgaggagagcagg

SEQ ID NO: 52139 - DNA, 22 bp, synthetic construct
  misc_feature 1..22: note = chemically synthesized
  source 1..22: mol_type = other DNA
gaggagagcaggaaaggtggga

SEQ ID NO: 52140 - DNA, 22 bp, synthetic construct
  misc_feature 1..22: note = chemically synthesized
  source 1..22: mol_type = other DNA
aggagagcaggaaaggtgggac

SEQ ID NO: 52141 - DNA, 22 bp, synthetic construct
  misc_feature 1..22: note = chemically synthesized
  source 1..22: mol_type = other DNA
ctgctgctgctcactcagttcc

SEQ ID NO: 52142 - DNA, 22 bp, synthetic construct
  misc_feature 1..22: note = chemically synthesized
  source 1..22: mol_type = other DNA
ctgctgctcactcagttccaca

SEQ ID NO: 52143 - DNA, 22 bp, synthetic construct
  misc_feature 1..22: note = chemically synthesized
  source 1..22: mol_type = other DNA
ctgctcactcagttccacaggt

SEQ ID NO: 52144 - DNA, 22 bp, synthetic construct
  misc_feature 1..22: note = chemically synthesized
  source 1..22: mol_type = other DNA
ctcactcagttccacaggtggg

SEQ ID NO: 52145 - DNA, 22 bp, synthetic construct
  misc_feature 1..22: note = chemically synthesized
  source 1..22: mol_type = other DNA
actcagttccacaggtgggagg

SEQ ID NO: 52146 - DNA, 22 bp, synthetic construct
  misc_feature 1..22: note = chemically synthesized
  source 1..22: mol_type = other DNA
agttccacaggtgggagggaca

SEQ ID NO: 52147 - DNA, 22 bp, synthetic construct
  misc_feature 1..22: note = chemically synthesized
  source 1..22: mol_type = other DNA
cacaggtgggagggacagcagg

SEQ ID NO: 52148 - DNA, 22 bp, synthetic construct
  misc_feature 1..22: note = chemically synthesized
  source 1..22: mol_type = other DNA
agagtgggggtcattgtgcaga

SEQ ID NO: 52149 - DNA, 22 bp, synthetic construct
  misc_feature 1..22: note = chemically synthesized
  source 1..22: mol_type = other DNA
gagtgggggtcattgtgcagat

SEQ ID NO: 52150 - DNA, 22 bp, synthetic construct
  misc_feature 1..22: note = chemically synthesized
  source 1..22: mol_type = other DNA
tgcagatgggaaaacaaaggcc

SEQ ID NO: 52151 - DNA, 22 bp, synthetic construct
  misc_feature 1..22: note = chemically synthesized
  source 1..22: mol_type = other DNA
ccgagggcaggcgacctcaacc

SEQ ID NO: 52152 - DNA, 22 bp, synthetic construct
  misc_feature 1..22: note = chemically synthesized
  source 1..22: mol_type = other DNA
aaccacagcccagtgctggagc

SEQ ID NO: 52153 - DNA, 22 bp, synthetic construct
  misc_feature 1..22: note = chemically synthesized
  source 1..22: mol_type = other DNA
gagctgtgagtggatgtagagc

SEQ ID NO: 52154 - DNA, 22 bp, synthetic construct
  misc_feature 1..22: note = chemically synthesized
  source 1..22: mol_type = other DNA
tgagtggatgtagagcagcgga

SEQ ID NO: 52155 - DNA, 22 bp, synthetic construct
  misc_feature 1..22: note = chemically synthesized
  source 1..22: mol_type = other DNA
agccagctcaggggaaggacag

SEQ ID NO: 52156 - DNA, 22 bp, synthetic construct
  misc_feature 1..22: note = chemically synthesized
  source 1..22: mol_type = other DNA
aggggaaggacaggggccctga

SEQ ID NO: 52157 - DNA, 22 bp, synthetic construct
  misc_feature 1..22: note = chemically synthesized
  source 1..22: mol_type = other DNA
aagccaggggatggagctgcag

SEQ ID NO: 52158 - DNA, 22 bp, synthetic construct
  misc_feature 1..22: note = chemically synthesized
  source 1..22: mol_type = other DNA
cagggaagggagctcagagaga

SEQ ID NO: 52159 - DNA, 22 bp, synthetic construct
  misc_feature 1..22: note = chemically synthesized
  source 1..22: mol_type = other DNA
agagagaaggggaggggagtct

SEQ ID NO: 52160 - DNA, 22 bp, synthetic construct
  misc_feature 1..22: note = chemically synthesized
  source 1..22: mol_type = other DNA
agctcagtttcccgctgcctga

SEQ ID NO: 52161 - DNA, 22 bp, synthetic construct
  misc_feature 1..22: note = chemically synthesized
  source 1..22: mol_type = other DNA
agtttcccgctgcctgaaagga

SEQ ID NO: 52162 - DNA, 22 bp, synthetic construct
  misc_feature 1..22: note = chemically synthesized
  source 1..22: mol_type = other DNA
cccgctgcctgaaaggagggtg

SEQ ID NO: 52163 - DNA, 22 bp, synthetic construct
  misc_feature 1..22: note = chemically synthesized
  source 1..22: mol_type = other DNA
ccgctgcctgaaaggagggtgg

SEQ ID NO: 52164 - DNA, 22 bp, synthetic construct
  misc_feature 1..22: note = chemically synthesized
  source 1..22: mol_type = other DNA
cctgaaaggagggtggtaccta

SEQ ID NO: 52165 - DNA, 22 bp, synthetic construct
  misc_feature 1..22: note = chemically synthesized
  source 1..22: mol_type = other DNA
aaaggagggtggtacctactcc

SEQ ID NO: 52166 - DNA, 22 bp, synthetic construct
  misc_feature 1..22: note = chemically synthesized
  source 1..22: mol_type = other DNA
ctcccttcacagggtaactgaa

SEQ ID NO: 52167 - DNA, 22 bp, synthetic construct
  misc_feature 1..22: note = chemically synthesized
  source 1..22: mol_type = other DNA
ccttcacagggtaactgaatga

SEQ ID NO: 52168 - DNA, 22 bp, synthetic construct
  misc_feature 1..22: note = chemically synthesized
  source 1..22: mol_type = other DNA
cacagggtaactgaatgagaga

SEQ ID NO: 52169 - DNA, 22 bp, synthetic construct
  misc_feature 1..22: note = chemically synthesized
  source 1..22: mol_type = other DNA
acagggtaactgaatgagagac

SEQ ID NO: 52170 - DNA, 22 bp, synthetic construct
  misc_feature 1..22: note = chemically synthesized
  source 1..22: mol_type = other DNA
aatgagagactgcctggaggaa

SEQ ID NO: 52171 - DNA, 22 bp, synthetic construct
  misc_feature 1..22: note = chemically synthesized
  source 1..22: mol_type = other DNA
cctggaggaaagctcttcaagt

SEQ ID NO: 52172 - DNA, 22 bp, synthetic construct
  misc_feature 1..22: note = chemically synthesized
  source 1..22: mol_type = other DNA
gaggaaagctcttcaagtgtgg

SEQ ID NO: 52173 - DNA, 22 bp, synthetic construct
  misc_feature 1..22: note = chemically synthesized
  source 1..22: mol_type = other DNA
ttcaagtgtggcccaccccacc

SEQ ID NO: 52174 - DNA, 22 bp, synthetic construct
  misc_feature 1..22: note = chemically synthesized
  source 1..22: mol_type = other DNA
caagtgtggcccaccccacccc

SEQ ID NO: 52175 - DNA, 22 bp, synthetic construct
  misc_feature 1..22: note = chemically synthesized
  source 1..22: mol_type = other DNA
aagtgtggcccaccccacccca

SEQ ID NO: 52176 - DNA, 22 bp, synthetic construct
  misc_feature 1..22: note = chemically synthesized
  source 1..22: mol_type = other DNA
acacgggggagggagggcagca

SEQ ID NO: 52177 - DNA, 22 bp, synthetic construct
  misc_feature 1..22: note = chemically synthesized
  source 1..22: mol_type = other DNA
tctgggcacacccagtacccgt

SEQ ID NO: 52178 - DNA, 22 bp, synthetic construct
  misc_feature 1..22: note = chemically synthesized
  source 1..22: mol_type = other DNA
ctgggcacacccagtacccgtc

SEQ ID NO: 52179 - DNA, 22 bp, synthetic construct
  misc_feature 1..22: note = chemically synthesized
  source 1..22: mol_type = other DNA
tgggcacacccagtacccgtct

SEQ ID NO: 52180 - DNA, 22 bp, synthetic construct
  misc_feature 1..22: note = chemically synthesized
  source 1..22: mol_type = other DNA
ggcacacccagtacccgtctct

SEQ ID NO: 52181 - DNA, 22 bp, synthetic construct
  misc_feature 1..22: note = chemically synthesized
  source 1..22: mol_type = other DNA
tgagctttccttgaactgttgc

SEQ ID NO: 52182 - DNA, 22 bp, synthetic construct
  misc_feature 1..22: note = chemically synthesized
  source 1..22: mol_type = other DNA
agctttccttgaactgttgcat

SEQ ID NO: 52183 - DNA, 22 bp, synthetic construct
  misc_feature 1..22: note = chemically synthesized
  source 1..22: mol_type = other DNA
tccttgaactgttgcattttaa

SEQ ID NO: 52184 - DNA, 22 bp, synthetic construct
  misc_feature 1..22: note = chemically synthesized
  source 1..22: mol_type = other DNA
ccttgaactgttgcattttaat

SEQ ID NO: 52185 - DNA, 22 bp, synthetic construct
  misc_feature 1..22: note = chemically synthesized
  source 1..22: mol_type = other DNA
cttgaactgttgcattttaatc

SEQ ID NO: 52186 - DNA, 22 bp, synthetic construct
  misc_feature 1..22: note = chemically synthesized
  source 1..22: mol_type = other DNA
gaactgttgcattttaatcctc

SEQ ID NO: 52187 - DNA, 22 bp, synthetic construct
  misc_feature 1..22: note = chemically synthesized
  source 1..22: mol_type = other DNA
aactgttgcattttaatcctca

SEQ ID NO: 52188 - DNA, 22 bp, synthetic construct
  misc_feature 1..22: note = chemically synthesized
  source 1..22: mol_type = other DNA
ttgcattttaatcctcacagca

SEQ ID NO: 52189 - DNA, 22 bp, synthetic construct
  misc_feature 1..22: note = chemically synthesized
  source 1..22: mol_type = other DNA
cattttaatcctcacagcagct

SEQ ID NO: 52190 - DNA, 22 bp, synthetic construct
  misc_feature 1..22: note = chemically synthesized
  source 1..22: mol_type = other DNA
taatcctcacagcagctcaaca

SEQ ID NO: 52191 - DNA, 22 bp, synthetic construct
  misc_feature 1..22: note = chemically synthesized
  source 1..22: mol_type = other DNA
aatcctcacagcagctcaacaa

SEQ ID NO: 52192 - DNA, 22 bp, synthetic construct
  misc_feature 1..22: note = chemically synthesized
  source 1..22: mol_type = other DNA
atcctcacagcagctcaacaag

SEQ ID NO: 52193 - DNA, 22 bp, synthetic construct
  misc_feature 1..22: note = chemically synthesized
  source 1..22: mol_type = other DNA
acagcagctcaacaaggtacat

SEQ ID NO: 52194 - DNA, 22 bp, synthetic construct
  misc_feature 1..22: note = chemically synthesized
  source 1..22: mol_type = other DNA
aacaaggtacataccgtcacca

SEQ ID NO: 52195 - DNA, 22 bp, synthetic construct
  misc_feature 1..22: note = chemically synthesized
  source 1..22: mol_type = other DNA
tacagatagggaaattgaggct

SEQ ID NO: 52196 - DNA, 22 bp, synthetic construct
  misc_feature 1..22: note = chemically synthesized
  source 1..22: mol_type = other DNA
acagatagggaaattgaggctc

SEQ ID NO: 52197 - DNA, 22 bp, synthetic construct
  misc_feature 1..22: note = chemically synthesized
  source 1..22: mol_type = other DNA
cagatagggaaattgaggctcg

SEQ ID NO: 52198 - DNA, 22 bp, synthetic construct
  misc_feature 1..22: note = chemically synthesized
  source 1..22: mol_type = other DNA
aggctcggagcggttaaacaac

SEQ ID NO: 52199 - DNA, 22 bp, synthetic construct
  misc_feature 1..22: note = chemically synthesized
  source 1..22: mol_type = other DNA
ggagcggttaaacaactcacct

SEQ ID NO: 52200 - DNA, 22 bp, synthetic construct
  misc_feature 1..22: note = chemically synthesized
  source 1..22: mol_type = other DNA
aacaactcacctgaggcctcac

SEQ ID NO: 52201 - DNA, 22 bp, synthetic construct
  misc_feature 1..22: note = chemically synthesized
  source 1..22: mol_type = other DNA
acctgaggcctcacagccagta

SEQ ID NO: 52202 - DNA, 22 bp, synthetic construct
  misc_feature 1..22: note = chemically synthesized
  source 1..22: mol_type = other DNA
aggcctcacagccagtaagtgg

SEQ ID NO: 52203 - DNA, 22 bp, synthetic construct
  misc_feature 1..22: note = chemically synthesized
  source 1..22: mol_type = other DNA
acagccagtaagtgggttccct

SEQ ID NO: 52204 - DNA, 22 bp, synthetic construct
  misc_feature 1..22: note = chemically synthesized
  source 1..22: mol_type = other DNA
cctggtctgaatgtgtgtgctg

SEQ ID NO: 52205 - DNA, 22 bp, synthetic construct
  misc_feature 1..22: note = chemically synthesized
  source 1..22: mol_type = other DNA
gtctgaatgtgtgtgctggagg

SEQ ID NO: 52206 - DNA, 22 bp, synthetic construct
  misc_feature 1..22: note = chemically synthesized
  source 1..22: mol_type = other DNA
aatgtgtgtgctggaggatcct

SEQ ID NO: 52207 - DNA, 22 bp, synthetic construct
  misc_feature 1..22: note = chemically synthesized
  source 1..22: mol_type = other DNA
gaggatcctgtgggtcactcgc

SEQ ID NO: 52208 - DNA, 22 bp, synthetic construct
  misc_feature 1..22: note = chemically synthesized
  source 1..22: mol_type = other DNA
tgggtcactcgcctggtagagc

SEQ ID NO: 52209 - DNA, 22 bp, synthetic construct
  misc_feature 1..22: note = chemically synthesized
  source 1..22: mol_type = other DNA
gcctggtagagccccaaggtgg

SEQ ID NO: 52210 - DNA, 22 bp, synthetic construct
  misc_feature 1..22: note = chemically synthesized
  source 1..22: mol_type = other DNA
gtagagccccaaggtggaggca

SEQ ID NO: 52211 - DNA, 22 bp, synthetic construct
  misc_feature 1..22: note = chemically synthesized
  source 1..22: mol_type = other DNA
gtgaatgacagaaggggcaaaa

SEQ ID NO: 52212 - DNA, 22 bp, synthetic construct
  misc_feature 1..22: note = chemically synthesized
  source 1..22: mol_type = other DNA
atccattcactctgcaagtatc

SEQ ID NO: 52213 - DNA, 22 bp, synthetic construct
  misc_feature 1..22: note = chemically synthesized
  source 1..22: mol_type = other DNA
actctgcaagtatctacggcac

SEQ ID NO: 52214 - DNA, 22 bp, synthetic construct
  misc_feature 1..22: note = chemically synthesized
  source 1..22: mol_type = other DNA
tgcaagtatctacggcacgtac

SEQ ID NO: 52215 - DNA, 22 bp, synthetic construct
  misc_feature 1..22: note = chemically synthesized
  source 1..22: mol_type = other DNA
caagtatctacggcacgtacgc

SEQ ID NO: 52216 - DNA, 22 bp, synthetic construct
  misc_feature 1..22: note = chemically synthesized
  source 1..22: mol_type = other DNA
cggcacgtacgccagctcccaa

SEQ ID NO: 52217 - DNA, 22 bp, synthetic construct
  misc_feature 1..22: note = chemically synthesized
  source 1..22: mol_type = other DNA
ccaagcaggtttgcgggttgca

SEQ ID NO: 52218 - DNA, 22 bp, synthetic construct
  misc_feature 1..22: note = chemically synthesized
  source 1..22: mol_type = other DNA
gcgggttgcacagcgggcgatg

SEQ ID NO: 52219 - DNA, 22 bp, synthetic construct
  misc_feature 1..22: note = chemically synthesized
  source 1..22: mol_type = other DNA
cgggttgcacagcgggcgatgc

SEQ ID NO: 52220 - DNA, 22 bp, synthetic construct
  misc_feature 1..22: note = chemically synthesized
  source 1..22: mol_type = other DNA
cacagcgggcgatgcaatctga

SEQ ID NO: 52221 - DNA, 22 bp, synthetic construct
  misc_feature 1..22: note = chemically synthesized
  source 1..22: mol_type = other DNA
atttaggcttttaaagggattg

SEQ ID NO: 52222 - DNA, 22 bp, synthetic construct
  misc_feature 1..22: note = chemically synthesized
  source 1..22: mol_type = other DNA
aggcttttaaagggattgcaat

SEQ ID NO: 52223 - DNA, 22 bp, synthetic construct
  misc_feature 1..22: note = chemically synthesized
  source 1..22: mol_type = other DNA
ggcttttaaagggattgcaatc

SEQ ID NO: 52224 - DNA, 22 bp, synthetic construct
  misc_feature 1..22: note = chemically synthesized
  source 1..22: mol_type = other DNA
ttaaagggattgcaatcaagtg

SEQ ID NO: 52225 - DNA, 22 bp, synthetic construct
  misc_feature 1..22: note = chemically synthesized
  source 1..22: mol_type = other DNA
taaagggattgcaatcaagtgg

SEQ ID NO: 52226 - DNA, 22 bp, synthetic construct
  misc_feature 1..22: note = chemically synthesized
  source 1..22: mol_type = other DNA
aaagggattgcaatcaagtggg

SEQ ID NO: 52227 - DNA, 22 bp, synthetic construct
  misc_feature 1..22: note = chemically synthesized
  source 1..22: mol_type = other DNA
aagggattgcaatcaagtgggg

SEQ ID NO: 52228 - DNA, 22 bp, synthetic construct
  misc_feature 1..22: note = chemically synthesized
  source 1..22: mol_type = other DNA
caatcaagtggggccccactag

SEQ ID NO: 52229 - DNA, 22 bp, synthetic construct
  misc_feature 1..22: note = chemically synthesized
  source 1..22: mol_type = other DNA
gcctcaaccctgtacctcccct

SEQ ID NO: 52230 - DNA, 22 bp, synthetic construct
  misc_feature 1..22: note = chemically synthesized
  source 1..22: mol_type = other DNA
aaccctgtacctcccctcccct

SEQ ID NO: 52231 - DNA, 22 bp, synthetic construct
  misc_feature 1..22: note = chemically synthesized
  source 1..22: mol_type = other DNA
tacctcccctcccctccacccc

SEQ ID NO: 52232 - DNA, 22 bp, synthetic construct
  misc_feature 1..22: note = chemically synthesized
  source 1..22: mol_type = other DNA
ccctcccctccacccccagcag

SEQ ID NO: 52233 - DNA, 22 bp, synthetic construct
  misc_feature 1..22: note = chemically synthesized
  source 1..22: mol_type = other DNA
ccctccacccccagcagtctcc

SEQ ID NO: 52234 - DNA, 22 bp, synthetic construct
  misc_feature 1..22: note = chemically synthesized
  source 1..22: mol_type = other DNA
cacccccagcagtctccaaagg

SEQ ID NO: 52235 - DNA, 22 bp, synthetic construct
  misc_feature 1..22: note = chemically synthesized
  source 1..22: mol_type = other DNA
caaaggcctccaacaaccccag

SEQ ID NO: 52236 - DNA, 22 bp, synthetic construct
  misc_feature 1..22: note = chemically synthesized
  source 1..22: mol_type = other DNA
caacaaccccagagtgggggcc

SEQ ID NO: 52237 - DNA, 22 bp, synthetic construct
  misc_feature 1..22: note = chemically synthesized
  source 1..22: mol_type = other DNA
caagctgtatacggatcacact

SEQ ID NO: 52238 - DNA, 22 bp, synthetic construct
  misc_feature 1..22: note = chemically synthesized
  source 1..22: mol_type = other DNA
tatacggatcacactggttttc

SEQ ID NO: 52239 - DNA, 22 bp, synthetic construct
  misc_feature 1..22: note = chemically synthesized
  source 1..22: mol_type = other DNA
gttttccaggagcaaaaacaga

SEQ ID NO: 52240 - DNA, 22 bp, synthetic construct
  misc_feature 1..22: note = chemically synthesized
  source 1..22: mol_type = other DNA
tccaggagcaaaaacagaaaca

SEQ ID NO: 52241 - DNA, 22 bp, synthetic construct
  misc_feature 1..22: note = chemically synthesized
  source 1..22: mol_type = other DNA
ccaggagcaaaaacagaaacag

SEQ ID NO: 52242 - DNA, 22 bp, synthetic construct
  misc_feature 1..22: note = chemically synthesized
  source 1..22: mol_type = other DNA
caggagcaaaaacagaaacagg

SEQ ID NO: 52243 - DNA, 22 bp, synthetic construct
  misc_feature 1..22: note = chemically synthesized
  source 1..22: mol_type = other DNA
aggctggtcaaaattgaacctc

SEQ ID NO: 52244 - DNA, 22 bp, synthetic construct
  misc_feature 1..22: note = chemically synthesized
  source 1..22: mol_type = other DNA
gtcaaaattgaacctcctcctg

SEQ ID NO: 52245 - DNA, 22 bp, synthetic construct
  misc_feature 1..22: note = chemically synthesized
  source 1..22: mol_type = other DNA
aacctcctcctgctctgagcag

SEQ ID NO: 52246 - DNA, 22 bp, synthetic construct
  misc_feature 1..22: note = chemically synthesized
  source 1..22: mol_type = other DNA
ctcctgctctgagcagcctggg

SEQ ID NO: 52247 - DNA, 22 bp, synthetic construct
  misc_feature 1..22: note = chemically synthesized
  source 1..22: mol_type = other DNA
ctgctctgagcagcctgggggg

SEQ ID NO: 52248 - DNA, 22 bp, synthetic construct
  misc_feature 1..22: note = chemically synthesized
  source 1..22: mol_type = other DNA
ctctgagcagcctggggggcag

SEQ ID NO: 52249 - DNA, 22 bp, synthetic construct
  misc_feature 1..22: note = chemically synthesized
  source 1..22: mol_type = other DNA
tgagcagcctggggggcagact

SEQ ID NO: 52250 - DNA, 22 bp, synthetic construct
  misc_feature 1..22: note = chemically synthesized
  source 1..22: mol_type = other DNA
agcagcctggggggcagactaa

SEQ ID NO: 52251 - DNA, 22 bp, synthetic construct
  misc_feature 1..22: note = chemically synthesized
  source 1..22: mol_type = other DNA
gggggcagactaagcagagggc

SEQ ID NO: 52252 - DNA, 22 bp, synthetic construct
  misc_feature 1..22: note = chemically synthesized
  source 1..22: mol_type = other DNA
agcagagggctgtgcagaccca

SEQ ID NO: 52253 - DNA, 22 bp, synthetic construct
  misc_feature 1..22: note = chemically synthesized
  source 1..22: mol_type = other DNA
tgcagacccacataaagagcct

SEQ ID NO: 52254 - DNA, 22 bp, synthetic construct
  misc_feature 1..22: note = chemically synthesized
  source 1..22: mol_type = other DNA
ctgtgtgccaggcacttcaccc

SEQ ID NO: 52255 - DNA, 22 bp, synthetic construct
  misc_feature 1..22: note = chemically synthesized
  source 1..22: mol_type = other DNA
tgtgccaggcacttcacccgag

SEQ ID NO: 52256 - DNA, 22 bp, synthetic construct
  misc_feature 1..22: note = chemically synthesized
  source 1..22: mol_type = other DNA
cacccgaggcacttcacaagca

SEQ ID NO: 52257 - DNA, 22 bp, synthetic construct
  misc_feature 1..22: note = chemically synthesized
  source 1..22: mol_type = other DNA
acccgaggcacttcacaagcat

SEQ ID NO: 52258 - DNA, 22 bp, synthetic construct
  misc_feature 1..22: note = chemically synthesized
  source 1..22: mol_type = other DNA
cacaagcatgcttgggaatgaa

SEQ ID NO: 52259 - DNA, 22 bp, synthetic construct
  misc_feature 1..22: note = chemically synthesized
  source 1..22: mol_type = other DNA
acaagcatgcttgggaatgaaa

SEQ ID NO: 52260 - DNA, 22 bp, synthetic construct
  misc_feature 1..22: note = chemically synthesized
  source 1..22: mol_type = other DNA
gggaatgaaacttccaactctt

SEQ ID NO: 52261 - DNA, 22 bp, synthetic construct
  misc_feature 1..22: note = chemically synthesized
  source 1..22: mol_type = other DNA
ggaatgaaacttccaactcttt

SEQ ID NO: 52262 - DNA, 22 bp, synthetic construct
  misc_feature 1..22: note = chemically synthesized
  source 1..22: mol_type = other DNA
ccaactctttgggatgcaggtg

SEQ ID NO: 52263 - DNA, 22 bp, synthetic construct
  misc_feature 1..22: note = chemically synthesized
  source 1..22: mol_type = other DNA
caactctttgggatgcaggtga

SEQ ID NO: 52264 - DNA, 22 bp, synthetic construct
  misc_feature 1..22: note = chemically synthesized
  source 1..22: mol_type = other DNA
tttgggatgcaggtgaaacagt

SEQ ID NO: 52265 - DNA, 22 bp, synthetic construct
  misc_feature 1..22: note = chemically synthesized
  source 1..22: mol_type = other DNA
tgggatgcaggtgaaacagttc

SEQ ID NO: 52266 - DNA, 22 bp, synthetic construct
  misc_feature 1..22: note = chemically synthesized
  source 1..22: mol_type = other DNA
gggatgcaggtgaaacagttcc

SEQ ID NO: 52267 - DNA, 22 bp, synthetic construct
  misc_feature 1..22: note = chemically synthesized
  source 1..22: mol_type = other DNA
ggatgcaggtgaaacagttcct

SEQ ID NO: 52268 - DNA, 22 bp, synthetic construct
  misc_feature 1..22: note = chemically synthesized
  source 1..22: mol_type = other DNA
ctggttcagagaggtgaagcgg

SEQ ID NO: 52269 - DNA, 22 bp, synthetic construct
  misc_feature 1..22: note = chemically synthesized
  source 1..22: mol_type = other DNA
gttcagagaggtgaagcggcct

SEQ ID NO: 52270 - DNA, 22 bp, synthetic construct
  misc_feature 1..22: note = chemically synthesized
  source 1..22: mol_type = other DNA
agagaggtgaagcggcctgcct

SEQ ID NO: 52271 - DNA, 22 bp, synthetic construct
  misc_feature 1..22: note = chemically synthesized
  source 1..22: mol_type = other DNA
cctgaggcagcacagctcttct

SEQ ID NO: 52272 - DNA, 22 bp, synthetic construct
  misc_feature 1..22: note = chemically synthesized
  source 1..22: mol_type = other DNA
aggcagcacagctcttctttac

SEQ ID NO: 52273 - DNA, 22 bp, synthetic construct
  misc_feature 1..22: note = chemically synthesized
  source 1..22: mol_type = other DNA
ttctttacagatgtgcttcccc

SEQ ID NO: 52274 - DNA, 22 bp, synthetic construct
  misc_feature 1..22: note = chemically synthesized
  source 1..22: mol_type = other DNA
ctttacagatgtgcttccccac

SEQ ID NO: 52275 - DNA, 22 bp, synthetic construct
  misc_feature 1..22: note = chemically synthesized
  source 1..22: mol_type = other DNA
tttacagatgtgcttccccacc

SEQ ID NO: 52276 - DNA, 22 bp, synthetic construct
  misc_feature 1..22: note = chemically synthesized
  source 1..22: mol_type = other DNA
tacagatgtgcttccccacctc

SEQ ID NO: 52277 - DNA, 22 bp, synthetic construct
  misc_feature 1..22: note = chemically synthesized
  source 1..22: mol_type = other DNA
acagatgtgcttccccacctct

SEQ ID NO: 52278 - DNA, 22 bp, synthetic construct
  misc_feature 1..22: note = chemically synthesized
  source 1..22: mol_type = other DNA
cagatgtgcttccccacctcta

SEQ ID NO: 52279 - DNA, 22 bp, synthetic construct
  misc_feature 1..22: note = chemically synthesized
  source 1..22: mol_type = other DNA
ccccacctctaccctgtctcac

SEQ ID NO: 52280 - DNA, 22 bp, synthetic construct
  misc_feature 1..22: note = chemically synthesized
  source 1..22: mol_type = other DNA
cccacctctaccctgtctcacg

SEQ ID NO: 52281 - DNA, 22 bp, synthetic construct
  misc_feature 1..22: note = chemically synthesized
  source 1..22: mol_type = other DNA
taccctgtctcacggcccccca

SEQ ID NO: 52282 - DNA, 22 bp, synthetic construct
  misc_feature 1..22: note = chemically synthesized
  source 1..22: mol_type = other DNA
ccctgtctcacggccccccatg

SEQ ID NO: 52283 - DNA, 22 bp, synthetic construct
  misc_feature 1..22: note = chemically synthesized
  source 1..22: mol_type = other DNA
tctcacggccccccatgccagc

SEQ ID NO: 52284 - DNA, 22 bp, synthetic construct
  misc_feature 1..22: note = chemically synthesized
  source 1..22: mol_type = other DNA
acggccccccatgccagcctga

SEQ ID NO: 52285 - DNA, 22 bp, synthetic construct
  misc_feature 1..22: note = chemically synthesized
  source 1..22: mol_type = other DNA
acggttgtgtctgcctcagtca

SEQ ID NO: 52286 - DNA, 22 bp, synthetic construct
  misc_feature 1..22: note = chemically synthesized
  source 1..22: mol_type = other DNA
tgtctgcctcagtcatgctcca

SEQ ID NO: 52287 - DNA, 22 bp, synthetic construct
  misc_feature 1..22: note = chemically synthesized
  source 1..22: mol_type = other DNA
cctcagtcatgctccatttttc

SEQ ID NO: 52288 - DNA, 22 bp, synthetic construct
  misc_feature 1..22: note = chemically synthesized
  source 1..22: mol_type = other DNA
agtcatgctccatttttccatc

SEQ ID NO: 52289 - DNA, 22 bp, synthetic construct
  misc_feature 1..22: note = chemically synthesized
  source 1..22: mol_type = other DNA
catttttccatcgggaccatca

SEQ ID NO: 52290 - DNA, 22 bp, synthetic construct
  misc_feature 1..22: note = chemically synthesized
  source 1..22: mol_type = other DNA
ttccatcgggaccatcaagagg

SEQ ID NO: 52291 - DNA, 22 bp, synthetic construct
  misc_feature 1..22: note = chemically synthesized
  source 1..22: mol_type = other DNA
tccatcgggaccatcaagaggg

SEQ ID NO: 52292 - DNA, 22 bp, synthetic construct
  misc_feature 1..22: note = chemically synthesized
  source 1..22: mol_type = other DNA
ccatcgggaccatcaagagggt

SEQ ID NO: 52293 - DNA, 22 bp, synthetic construct
  misc_feature 1..22: note = chemically synthesized
  source 1..22: mol_type = other DNA
catcgggaccatcaagagggtg

SEQ ID NO: 52294 - DNA, 22 bp, synthetic construct
  misc_feature 1..22: note = chemically synthesized
  source 1..22: mol_type = other DNA
gtgtctaaggctgactgggtaa

SEQ ID NO: 52295 - DNA, 22 bp, synthetic construct
  misc_feature 1..22: note = chemically synthesized
  source 1..22: mol_type = other DNA
tgtctaaggctgactgggtaac

SEQ ID NO: 52296 - DNA, 22 bp, synthetic construct
  misc_feature 1..22: note = chemically synthesized
  source 1..22: mol_type = other DNA
aggctgactgggtaactttgga

SEQ ID NO: 52297 - DNA, 22 bp, synthetic construct
  misc_feature 1..22: note = chemically synthesized
  source 1..22: mol_type = other DNA
actgggtaactttggatgagcg

SEQ ID NO: 52298 - DNA, 22 bp, synthetic construct
  misc_feature 1..22: note = chemically synthesized
  source 1..22: mol_type = other DNA
ggtaactttggatgagcggtct

SEQ ID NO: 52299 - DNA, 22 bp, synthetic construct
  misc_feature 1..22: note = chemically synthesized
  source 1..22: mol_type = other DNA
tggatgagcggtctctccgctc

SEQ ID NO: 52300 - DNA, 22 bp, synthetic construct
  misc_feature 1..22: note = chemically synthesized
  source 1..22: mol_type = other DNA
ggatgagcggtctctccgctct

SEQ ID NO: 52301 - DNA, 22 bp, synthetic construct
  misc_feature 1..22: note = chemically synthesized
  source 1..22: mol_type = other DNA
gatgagcggtctctccgctctg

SEQ ID NO: 52302 - DNA, 22 bp, synthetic construct
  misc_feature 1..22: note = chemically synthesized
  source 1..22: mol_type = other DNA
tccgctctgagcctgtttcctc

SEQ ID NO: 52303 - DNA, 22 bp, synthetic construct
  misc_feature 1..22: note = chemically synthesized
  source 1..22: mol_type = other DNA
cgctctgagcctgtttcctcat

SEQ ID NO: 52304 - DNA, 22 bp, synthetic construct
  misc_feature 1..22: note = chemically synthesized
  source 1..22: mol_type = other DNA
tgagcctgtttcctcatctgtc

SEQ ID NO: 52305 - DNA, 22 bp, synthetic construct
  misc_feature 1..22: note = chemically synthesized
  source 1..22: mol_type = other DNA
agcctgtttcctcatctgtcaa

SEQ ID NO: 52306 - DNA, 22 bp, synthetic construct
  misc_feature 1..22: note = chemically synthesized
  source 1..22: mol_type = other DNA
tttcctcatctgtcaaatgggc

SEQ ID NO: 52307 - DNA, 22 bp, synthetic construct
  misc_feature 1..22: note = chemically synthesized
  source 1..22: mol_type = other DNA
cctcatctgtcaaatgggctct

SEQ ID NO: 52308 - DNA, 22 bp, synthetic construct
  misc_feature 1..22: note = chemically synthesized
  source 1..22: mol_type = other DNA
ctcatctgtcaaatgggctcta

SEQ ID NO: 52309 - DNA, 22 bp, synthetic construct
  misc_feature 1..22: note = chemically synthesized
  source 1..22: mol_type = other DNA
atctgtcaaatgggctctaacc

SEQ ID NO: 52310 - DNA, 22 bp, synthetic construct
  misc_feature 1..22: note = chemically synthesized
  source 1..22: mol_type = other DNA
tcaaatgggctctaacccactc

SEQ ID NO: 52311 - DNA, 22 bp, synthetic construct
  misc_feature 1..22: note = chemically synthesized
  source 1..22: mol_type = other DNA
taacccactctgatctcccagg

SEQ ID NO: 52312 - DNA, 22 bp, synthetic construct
  misc_feature 1..22: note = chemically synthesized
  source 1..22: mol_type = other DNA
acccactctgatctcccagggc

SEQ ID NO: 52313 - DNA, 22 bp, synthetic construct
  misc_feature 1..22: note = chemically synthesized
  source 1..22: mol_type = other DNA
tgatctcccagggcggcagtaa

SEQ ID NO: 52314 - DNA, 22 bp, synthetic construct
  misc_feature 1..22: note = chemically synthesized
  source 1..22: mol_type = other DNA
atctcccagggcggcagtaagt

SEQ ID NO: 52315 - DNA, 22 bp, synthetic construct
  misc_feature 1..22: note = chemically synthesized
  source 1..22: mol_type = other DNA
ccagggcggcagtaagtcttca

SEQ ID NO: 52316 - DNA, 22 bp, synthetic construct
  misc_feature 1..22: note = chemically synthesized
  source 1..22: mol_type = other DNA
cagcatcaggcattttggggtg

SEQ ID NO: 52317 - DNA, 22 bp, synthetic construct
  misc_feature 1..22: note = chemically synthesized
  source 1..22: mol_type = other DNA
agcatcaggcattttggggtga

SEQ ID NO: 52318 - DNA, 22 bp, synthetic construct
  misc_feature 1..22: note = chemically synthesized
  source 1..22: mol_type = other DNA
tggggtgactcagtaaatggta

SEQ ID NO: 52319 - DNA, 22 bp, synthetic construct
  misc_feature 1..22: note = chemically synthesized
  source 1..22: mol_type = other DNA
ggggtgactcagtaaatggtag

SEQ ID NO: 52320 - DNA, 22 bp, synthetic construct
  misc_feature 1..22: note = chemically synthesized
  source 1..22: mol_type = other DNA
gggtgactcagtaaatggtaga

SEQ ID NO: 52321 - DNA, 22 bp, synthetic construct
  misc_feature 1..22: note = chemically synthesized
  source 1..22: mol_type = other DNA
agtaaatggtagatcttgctac

SEQ ID NO: 52322 - DNA, 22 bp, synthetic construct
  misc_feature 1..22: note = chemically synthesized
  source 1..22: mol_type = other DNA
gctaccagtggaacagccacta

SEQ ID NO: 52323 - DNA, 22 bp, synthetic construct
  misc_feature 1..22: note = chemically synthesized
  source 1..22: mol_type = other DNA
ctaccagtggaacagccactaa

SEQ ID NO: 52324 - DNA, 22 bp, synthetic construct
  misc_feature 1..22: note = chemically synthesized
  source 1..22: mol_type = other DNA
ccagtggaacagccactaagga

SEQ ID NO: 52325 - DNA, 22 bp, synthetic construct
  misc_feature 1..22: note = chemically synthesized
  source 1..22: mol_type = other DNA
aggattctgcagtgagagcaga

SEQ ID NO: 52326 - DNA, 22 bp, synthetic construct
  misc_feature 1..22: note = chemically synthesized
  source 1..22: mol_type = other DNA
tgcagtgagagcagagggccag

SEQ ID NO: 52327 - DNA, 22 bp, synthetic construct
  misc_feature 1..22: note = chemically synthesized
  source 1..22: mol_type = other DNA
cagtgagagcagagggccagct

SEQ ID NO: 52328 - DNA, 22 bp, synthetic construct
  misc_feature 1..22: note = chemically synthesized
  source 1..22: mol_type = other DNA
agtggtactctcccagagactg

SEQ ID NO: 52329 - DNA, 22 bp, synthetic construct
  misc_feature 1..22: note = chemically synthesized
  source 1..22: mol_type = other DNA
tcccagagactgtctgactcac

SEQ ID NO: 52330 - DNA, 22 bp, synthetic construct
  misc_feature 1..22: note = chemically synthesized
  source 1..22: mol_type = other DNA
ccagagactgtctgactcacgc

SEQ ID NO: 52331 - DNA, 22 bp, synthetic construct
  misc_feature 1..22: note = chemically synthesized
  source 1..22: mol_type = other DNA
tctgactcacgccaccccctcc

SEQ ID NO: 52332 - DNA, 22 bp, synthetic construct
  misc_feature 1..22: note = chemically synthesized
  source 1..22: mol_type = other DNA
actcacgccaccccctccacct

SEQ ID NO: 52333 - DNA, 22 bp, synthetic construct
  misc_feature 1..22: note = chemically synthesized
  source 1..22: mol_type = other DNA
acgccaccccctccaccttgga

SEQ ID NO: 52334 - DNA, 22 bp, synthetic construct
  misc_feature 1..22: note = chemically synthesized
  source 1..22: mol_type = other DNA
caccttggacacaggacgctgt

SEQ ID NO: 52335 - DNA, 22 bp, synthetic construct
  misc_feature 1..22: note = chemically synthesized
  source 1..22: mol_type = other DNA
ggacacaggacgctgtggtttc

SEQ ID NO: 52336 - DNA, 22 bp, synthetic construct
  misc_feature 1..22: note = chemically synthesized
  source 1..22: mol_type = other DNA
gacacaggacgctgtggtttct

SEQ ID NO: 52337 - DNA, 22 bp, synthetic construct
  misc_feature 1..22: note = chemically synthesized
  source 1..22: mol_type = other DNA
tggtttctgagccaggtacaat

SEQ ID NO: 52338 - DNA, 22 bp, synthetic construct
  misc_feature 1..22: note = chemically synthesized
  source 1..22: mol_type = other DNA
ctgagccaggtacaatgactcc

SEQ ID NO: 52339 - DNA, 22 bp, synthetic construct
  misc_feature 1..22: note = chemically synthesized
  source 1..22: mol_type = other DNA
tgagccaggtacaatgactcct

SEQ ID NO: 52340 - DNA, 22 bp, synthetic construct
  misc_feature 1..22: note = chemically synthesized
  source 1..22: mol_type = other DNA
agccaggtacaatgactccttt

SEQ ID NO: 52341 - DNA, 22 bp, synthetic construct
  misc_feature 1..22: note = chemically synthesized
  source 1..22: mol_type = other DNA
ctttcggtaagtgcagtggaag

SEQ ID NO: 52342 - DNA, 22 bp, synthetic construct
  misc_feature 1..22: note = chemically synthesized
  source 1..22: mol_type = other DNA
tcggtaagtgcagtggaagctg

SEQ ID NO: 52343 - DNA, 22 bp, synthetic construct
  misc_feature 1..22: note = chemically synthesized
  source 1..22: mol_type = other DNA
cggtaagtgcagtggaagctgt

SEQ ID NO: 52344 - DNA, 22 bp, synthetic construct
  misc_feature 1..22: note = chemically synthesized
  source 1..22: mol_type = other DNA
ggtaagtgcagtggaagctgta

SEQ ID NO: 52345 - DNA, 22 bp, synthetic construct
  misc_feature 1..22: note = chemically synthesized
  source 1..22: mol_type = other DNA
tacactgcccaggcaaagcgtc

SEQ ID NO: 52346 - DNA, 22 bp, synthetic construct
  misc_feature 1..22: note = chemically synthesized
  source 1..22: mol_type = other DNA
cccaggcaaagcgtccgggcag

SEQ ID NO: 52347 - DNA, 22 bp, synthetic construct
  misc_feature 1..22: note = chemically synthesized
  source 1..22: mol_type = other DNA
agatcccagccagtggacttag

SEQ ID NO: 52348 - DNA, 22 bp, synthetic construct
  misc_feature 1..22: note = chemically synthesized
  source 1..22: mol_type = other DNA
agcccctgtttgctcctccgat

SEQ ID NO: 52349 - DNA, 22 bp, synthetic construct
  misc_feature 1..22: note = chemically synthesized
  source 1..22: mol_type = other DNA
gcccctgtttgctcctccgata

SEQ ID NO: 52350 - DNA, 22 bp, synthetic construct
  misc_feature 1..22: note = chemically synthesized
  source 1..22: mol_type = other DNA
tttgctcctccgataactgggg

SEQ ID NO: 52351 - DNA, 22 bp, synthetic construct
  misc_feature 1..22: note = chemically synthesized
  source 1..22: mol_type = other DNA
gctcctccgataactggggtga

SEQ ID NO: 52352 - DNA, 22 bp, synthetic construct
  misc_feature 1..22: note = chemically synthesized
  source 1..22: mol_type = other DNA
ctcctccgataactggggtgac

SEQ ID NO: 52353 - DNA, 22 bp, synthetic construct
  misc_feature 1..22: note = chemically synthesized
  source 1..22: mol_type = other DNA
ctccgataactggggtgacctt

SEQ ID NO: 52354 - DNA, 22 bp, synthetic construct
  misc_feature 1..22: note = chemically synthesized
  source 1..22: mol_type = other DNA
cgataactggggtgaccttggt

SEQ ID NO: 52355 - DNA, 22 bp, synthetic construct
  misc_feature 1..22: note = chemically synthesized
  source 1..22: mol_type = other DNA
gggtgaccttggttaatattca

SEQ ID NO: 52356 - DNA, 22 bp, synthetic construct
  misc_feature 1..22: note = chemically synthesized
  source 1..22: mol_type = other DNA
ggttaatattcaccagcagcct

SEQ ID NO: 52357 - DNA, 22 bp, synthetic construct
  misc_feature 1..22: note = chemically synthesized
  source 1..22: mol_type = other DNA
gttaatattcaccagcagcctc

SEQ ID NO: 52358 - DNA, 22 bp, synthetic construct
  misc_feature 1..22: note = chemically synthesized
  source 1..22: mol_type = other DNA
atattcaccagcagcctccccc

SEQ ID NO: 52359 - DNA, 22 bp, synthetic construct
  misc_feature 1..22: note = chemically synthesized
  source 1..22: mol_type = other DNA
accagcagcctcccccgttgcc

SEQ ID NO: 52360 - DNA, 22 bp, synthetic construct
  misc_feature 1..22: note = chemically synthesized
  source 1..22: mol_type = other DNA
ccccgttgcccctctggatcca

SEQ ID NO: 52361 - DNA, 22 bp, synthetic construct
  misc_feature 1..22: note = chemically synthesized
  source 1..22: mol_type = other DNA
cccctctggatccactgcttaa

SEQ ID NO: 52362 - DNA, 22 bp, synthetic construct
  misc_feature 1..22: note = chemically synthesized
  source 1..22: mol_type = other DNA
tggatccactgcttaaatacgg

SEQ ID NO: 52363 - DNA, 22 bp, synthetic construct
  misc_feature 1..22: note = chemically synthesized
  source 1..22: mol_type = other DNA
gatccactgcttaaatacggac

SEQ ID NO: 52364 - DNA, 22 bp, synthetic construct
  misc_feature 1..22: note = chemically synthesized
  source 1..22: mol_type = other DNA
cttaaatacggacgaggacagg

SEQ ID NO: 52365 - DNA, 22 bp, synthetic construct
  misc_feature 1..22: note = chemically synthesized
  source 1..22: mol_type = other DNA
aaatacggacgaggacagggcc

SEQ ID NO: 52366 - DNA, 22 bp, synthetic construct
  misc_feature 1..22: note = chemically synthesized
  source 1..22: mol_type = other DNA
aatacggacgaggacagggccc

SEQ ID NO: 52367 - DNA, 22 bp, synthetic construct
  misc_feature 1..22: note = chemically synthesized
  source 1..22: mol_type = other DNA
tctcctcagcttcaggcaccac

SEQ ID NO: 52368 - DNA, 22 bp, synthetic construct
  misc_feature 1..22: note = chemically synthesized
  source 1..22: mol_type = other DNA
ctcagcttcaggcaccaccact

SEQ ID NO: 52369 - DNA, 22 bp, synthetic construct
  misc_feature 1..22: note = chemically synthesized
  source 1..22: mol_type = other DNA
agcttcaggcaccaccactgac

SEQ ID NO: 52370 - DNA, 22 bp, synthetic construct
  misc_feature 1..22: note = chemically synthesized
  source 1..22: mol_type = other DNA
caggcaccaccactgacctggg

SEQ ID NO: 52371 - DNA, 22 bp, synthetic construct
  misc_feature 1..22: note = chemically synthesized
  source 1..22: mol_type = other DNA
aggcaccaccactgacctggga

SEQ ID NO: 52372 - DNA, 22 bp, synthetic construct
  misc_feature 1..22: note = chemically synthesized
  source 1..22: mol_type = other DNA
acctgggacagtgaatcgtaag

SEQ ID NO: 52373 - DNA, 22 bp, synthetic construct
  misc_feature 1..22: note = chemically synthesized
  source 1..22: mol_type = other DNA
ggacagtgaatcgtaagtatgc

SEQ ID NO: 52374 - DNA, 22 bp, synthetic construct
  misc_feature 1..22: note = chemically synthesized
  source 1..22: mol_type = other DNA
tcactgcgagaggttctggaga

SEQ ID NO: 52375 - DNA, 22 bp, synthetic construct
  misc_feature 1..22: note = chemically synthesized
  source 1..22: mol_type = other DNA
cactgcgagaggttctggagag

SEQ ID NO: 52376 - DNA, 22 bp, synthetic construct
  misc_feature 1..22: note = chemically synthesized
  source 1..22: mol_type = other DNA
actgcgagaggttctggagagg

SEQ ID NO: 52377 - DNA, 22 bp, synthetic construct
  misc_feature 1..22: note = chemically synthesized
  source 1..22: mol_type = other DNA
cgagaggttctggagaggcttc

SEQ ID NO: 52378 - DNA, 22 bp, synthetic construct
  misc_feature 1..22: note = chemically synthesized
  source 1..22: mol_type = other DNA
tggagaggcttctgagctcccc

SEQ ID NO: 52379 - DNA, 22 bp, synthetic construct
  misc_feature 1..22: note = chemically synthesized
  source 1..22: mol_type = other DNA
gagaggcttctgagctccccat

SEQ ID NO: 52380 - DNA, 22 bp, synthetic construct
  misc_feature 1..22: note = chemically synthesized
  source 1..22: mol_type = other DNA
ctgagctccccatggcccaggc

SEQ ID NO: 52381 - DNA, 22 bp, synthetic construct
  misc_feature 1..22: note = chemically synthesized
  source 1..22: mol_type = other DNA
tgagctccccatggcccaggca

SEQ ID NO: 52382 - DNA, 22 bp, synthetic construct
  misc_feature 1..22: note = chemically synthesized
  source 1..22: mol_type = other DNA
agctccccatggcccaggcagg

SEQ ID NO: 52383 - DNA, 22 bp, synthetic construct
  misc_feature 1..22: note = chemically synthesized
  source 1..22: mol_type = other DNA
cccatggcccaggcaggcagca

SEQ ID NO: 52384 - DNA, 22 bp, synthetic construct
  misc_feature 1..22: note = chemically synthesized
  source 1..22: mol_type = other DNA
gggcaggaggggggttgtggag

SEQ ID NO: 52385 - DNA, 22 bp, synthetic construct
  misc_feature 1..22: note = chemically synthesized
  source 1..22: mol_type = other DNA
tggagtgggtatccgcctgctg

SEQ ID NO: 52386 - DNA, 22 bp, synthetic construct
  misc_feature 1..22: note = chemically synthesized
  source 1..22: mol_type = other DNA
ctgaggtgcagggcagatggag

SEQ ID NO: 52387 - DNA, 22 bp, synthetic construct
  misc_feature 1..22: note = chemically synthesized
  source 1..22: mol_type = other DNA
aggtgcagggcagatggagagg

SEQ ID NO: 52388 - DNA, 22 bp, synthetic construct
  misc_feature 1..22: note = chemically synthesized
  source 1..22: mol_type = other DNA
cagctgagctcctattttcata

SEQ ID NO: 52389 - DNA, 22 bp, synthetic construct
  misc_feature 1..22: note = chemically synthesized
  source 1..22: mol_type = other DNA
agctcctattttcataataaca

SEQ ID NO: 52390 - DNA, 22 bp, synthetic construct
  misc_feature 1..22: note = chemically synthesized
  source 1..22: mol_type = other DNA
ctattttcataataacagcagc

SEQ ID NO: 52391 - DNA, 22 bp, synthetic construct
  misc_feature 1..22: note = chemically synthesized
  source 1..22: mol_type = other DNA
ttttcataataacagcagccat

SEQ ID NO: 52392 - DNA, 22 bp, synthetic construct
  misc_feature 1..22: note = chemically synthesized
  source 1..22: mol_type = other DNA
tcataataacagcagccatgag

SEQ ID NO: 52393 - DNA, 22 bp, synthetic construct
  misc_feature 1..22: note = chemically synthesized
  source 1..22: mol_type = other DNA
cataataacagcagccatgagg

SEQ ID NO: 52394 - DNA, 22 bp, synthetic construct
  misc_feature 1..22: note = chemically synthesized
  source 1..22: mol_type = other DNA
ataataacagcagccatgaggg

SEQ ID NO: 52395 - DNA, 22 bp, synthetic construct
  misc_feature 1..22: note = chemically synthesized
  source 1..22: mol_type = other DNA
tgtcctgtttcccagtcctgcc

SEQ ID NO: 52396 - DNA, 22 bp, synthetic construct
  misc_feature 1..22: note = chemically synthesized
  source 1..22: mol_type = other DNA
tttcccagtcctgcccggtccc

SEQ ID NO: 52397 - DNA, 22 bp, synthetic construct
  misc_feature 1..22: note = chemically synthesized
  source 1..22: mol_type = other DNA
cccagtcctgcccggtcccccc

SEQ ID NO: 52398 - DNA, 22 bp, synthetic construct
  misc_feature 1..22: note = chemically synthesized
  source 1..22: mol_type = other DNA
ccagtcctgcccggtcccccct

SEQ ID NO: 52399 - DNA, 22 bp, synthetic construct
  misc_feature 1..22: note = chemically synthesized
  source 1..22: mol_type = other DNA
cccggtcccccctcggtacctc

SEQ ID NO: 52400 - DNA, 22 bp, synthetic construct
  misc_feature 1..22: note = chemically synthesized
  source 1..22: mol_type = other DNA
ggtacctcctggtggatacact

SEQ ID NO: 52401 - DNA, 22 bp, synthetic construct
  misc_feature 1..22: note = chemically synthesized
  source 1..22: mol_type = other DNA
ctggtggatacactggttcctg

SEQ ID NO: 52402 - DNA, 22 bp, synthetic construct
  misc_feature 1..22: note = chemically synthesized
  source 1..22: mol_type = other DNA
gtggatacactggttcctgtaa

SEQ ID NO: 52403 - DNA, 22 bp, synthetic construct
  misc_feature 1..22: note = chemically synthesized
  source 1..22: mol_type = other DNA
gttcctgtaagcagaagtggat

SEQ ID NO: 52404 - DNA, 22 bp, synthetic construct
  misc_feature 1..22: note = chemically synthesized
  source 1..22: mol_type = other DNA
ctgtaagcagaagtggatgagg

SEQ ID NO: 52405 - DNA, 22 bp, synthetic construct
  misc_feature 1..22: note = chemically synthesized
  source 1..22: mol_type = other DNA
taagcagaagtggatgagggtg

SEQ ID NO: 52406 - DNA, 22 bp, synthetic construct
  misc_feature 1..22: note = chemically synthesized
  source 1..22: mol_type = other DNA
ggtctgcagtcctggcacccca

SEQ ID NO: 52407 - DNA, 22 bp, synthetic construct
  misc_feature 1..22: note = chemically synthesized
  source 1..22: mol_type = other DNA
cagtcctggcaccccaggatgg

SEQ ID NO: 52408 - DNA, 22 bp, synthetic construct
  misc_feature 1..22: note = chemically synthesized
  source 1..22: mol_type = other DNA
gcaccccaggatgggggacacc

SEQ ID NO: 52409 - DNA, 22 bp, synthetic construct
  misc_feature 1..22: note = chemically synthesized
  source 1..22: mol_type = other DNA
ctttctgtttgcacagctcctc

SEQ ID NO: 52410 - DNA, 22 bp, synthetic construct
  misc_feature 1..22: note = chemically synthesized
  source 1..22: mol_type = other DNA
tttctgtttgcacagctcctct

SEQ ID NO: 52411 - DNA, 22 bp, synthetic construct
  misc_feature 1..22: note = chemically synthesized
  source 1..22: mol_type = other DNA
tctgtttgcacagctcctctgt

SEQ ID NO: 52412 - DNA, 22 bp, synthetic construct
  misc_feature 1..22: note = chemically synthesized
  source 1..22: mol_type = other DNA
ctgtttgcacagctcctctgtc

SEQ ID NO: 52413 - DNA, 22 bp, synthetic construct
  misc_feature 1..22: note = chemically synthesized
  source 1..22: mol_type = other DNA
tgtttgcacagctcctctgtct

SEQ ID NO: 52414 - DNA, 22 bp, synthetic construct
  misc_feature 1..22: note = chemically synthesized
  source 1..22: mol_type = other DNA
tttgcacagctcctctgtctgt

SEQ ID NO: 52415 - DNA, 22 bp, synthetic construct
  misc_feature 1..22: note = chemically synthesized
  source 1..22: mol_type = other DNA
gcacagctcctctgtctgtcgg

SEQ ID NO: 52416 - DNA, 22 bp, synthetic construct
  misc_feature 1..22: note = chemically synthesized
  source 1..22: mol_type = other DNA
cacagctcctctgtctgtcggg

SEQ ID NO: 52417 - DNA, 22 bp, synthetic construct
  misc_feature 1..22: note = chemically synthesized
  source 1..22: mol_type = other DNA
ctctgtctgtcgggggctcctg

SEQ ID NO: 52418 - DNA, 22 bp, synthetic construct
  misc_feature 1..22: note = chemically synthesized
  source 1..22: mol_type = other DNA
tgtctgtcgggggctcctgtct

SEQ ID NO: 52419 - DNA, 22 bp, synthetic construct
  misc_feature 1..22: note = chemically synthesized
  source 1..22: mol_type = other DNA
tctgtcgggggctcctgtctgt

SEQ ID NO: 52420 - DNA, 22 bp, synthetic construct
  misc_feature 1..22: note = chemically synthesized
  source 1..22: mol_type = other DNA
tcgggggctcctgtctgttgtc

SEQ ID NO: 52421 - DNA, 22 bp, synthetic construct
  misc_feature 1..22: note = chemically synthesized
  source 1..22: mol_type = other DNA
ctgtctgttgtctcctataagc

SEQ ID NO: 52422 - DNA, 22 bp, synthetic construct
  misc_feature 1..22: note = chemically synthesized
  source 1..22: mol_type = other DNA
tctgttgtctcctataagcctc

SEQ ID NO: 52423 - DNA, 22 bp, synthetic construct
  misc_feature 1..22: note = chemically synthesized
  source 1..22: mol_type = other DNA
ttgtctcctataagcctcacca

SEQ ID NO: 52424 - DNA, 22 bp, synthetic construct
  misc_feature 1..22: note = chemically synthesized
  source 1..22: mol_type = other DNA
tctcctataagcctcaccacct

SEQ ID NO: 52425 - DNA, 22 bp, synthetic construct
  misc_feature 1..22: note = chemically synthesized
  source 1..22: mol_type = other DNA
ctataagcctcaccacctctcc

SEQ ID NO: 52426 - DNA, 22 bp, synthetic construct
  misc_feature 1..22: note = chemically synthesized
  source 1..22: mol_type = other DNA
taagcctcaccacctctcctac

SEQ ID NO: 52427 - DNA, 22 bp, synthetic construct
  misc_feature 1..22: note = chemically synthesized
  source 1..22: mol_type = other DNA
accacctctcctactgcttggg

SEQ ID NO: 52428 - DNA, 22 bp, synthetic construct
  misc_feature 1..22: note = chemically synthesized
  source 1..22: mol_type = other DNA
tcctactgcttgggcatgcatc

SEQ ID NO: 52429 - DNA, 22 bp, synthetic construct
  misc_feature 1..22: note = chemically synthesized
  source 1..22: mol_type = other DNA
ctactgcttgggcatgcatctt

SEQ ID NO: 52430 - DNA, 22 bp, synthetic construct
  misc_feature 1..22: note = chemically synthesized
  source 1..22: mol_type = other DNA
ctgcttgggcatgcatctttct

SEQ ID NO: 52431 - DNA, 22 bp, synthetic construct
  misc_feature 1..22: note = chemically synthesized
  source 1..22: mol_type = other DNA
cttgggcatgcatctttctccc

SEQ ID NO: 52432 - DNA, 22 bp, synthetic construct
  misc_feature 1..22: note = chemically synthesized
  source 1..22: mol_type = other DNA
gggcatgcatctttctcccctt

SEQ ID NO: 52433 - DNA, 22 bp, synthetic construct
  misc_feature 1..22: note = chemically synthesized
  source 1..22: mol_type = other DNA
ggcatgcatctttctccccttc

SEQ ID NO: 52434 - DNA, 22 bp, synthetic construct
  misc_feature 1..22: note = chemically synthesized
  source 1..22: mol_type = other DNA
tctccccttctatagatgagga

SEQ ID NO: 52435 - DNA, 22 bp, synthetic construct
  misc_feature 1..22: note = chemically synthesized
  source 1..22: mol_type = other DNA
ctccccttctatagatgaggag

SEQ ID NO: 52436 - DNA, 22 bp, synthetic construct
  misc_feature 1..22: note = chemically synthesized
  source 1..22: mol_type = other DNA
tccccttctatagatgaggagg

SEQ ID NO: 52437 - DNA, 22 bp, synthetic construct
  misc_feature 1..22: note = chemically synthesized
  source 1..22: mol_type = other DNA
cccttctatagatgaggaggtt

SEQ ID NO: 52438 - DNA, 22 bp, synthetic construct
  misc_feature 1..22: note = chemically synthesized
  source 1..22: mol_type = other DNA
ctatagatgaggaggttaaggt

SEQ ID NO: 52439 - DNA, 22 bp, synthetic construct
  misc_feature 1..22: note = chemically synthesized
  source 1..22: mol_type = other DNA
tatagatgaggaggttaaggtc

SEQ ID NO: 52440 - DNA, 22 bp, synthetic construct
  misc_feature 1..22: note = chemically synthesized
  source 1..22: mol_type = other DNA
tagatgaggaggttaaggtcca

SEQ ID NO: 52441 - DNA, 22 bp, synthetic construct
  misc_feature 1..22: note = chemically synthesized
  source 1..22: mol_type = other DNA
aggtccagagaggggtggggag

SEQ ID NO: 52442 - DNA, 22 bp, synthetic construct
  misc_feature 1..22: note = chemically synthesized
  source 1..22: mol_type = other DNA
acattctccatcccctccagat

SEQ ID NO: 52443 - DNA, 22 bp, synthetic construct
  misc_feature 1..22: note = chemically synthesized
  source 1..22: mol_type = other DNA
tccatcccctccagatatgacc

SEQ ID NO: 52444 - DNA, 22 bp, synthetic construct
  misc_feature 1..22: note = chemically synthesized
  source 1..22: mol_type = other DNA
catcccctccagatatgaccag

SEQ ID NO: 52445 - DNA, 22 bp, synthetic construct
  misc_feature 1..22: note = chemically synthesized
  source 1..22: mol_type = other DNA
cagatatgaccaggaacagacc

SEQ ID NO: 52446 - DNA, 20 bp, synthetic construct
  misc_feature 1..20: note = chemically synthesized
  source 1..20: mol_type = other DNA
cgagcgagccgcgatgacaa

SEQ ID NO: 52447 - DNA, 20 bp, synthetic construct
  misc_feature 1..20: note = chemically synthesized
  source 1..20: mol_type = other DNA
tcccatcaacatttctgtgc

SEQ ID NO: 52448 - DNA, 20 bp, synthetic construct
  misc_feature 1..20: note = chemically synthesized
  source 1..20: mol_type = other DNA
tgctggactccttccactcg

SEQ ID NO: 52449 - DNA, 20 bp, synthetic construct
  misc_feature 1..20: note = chemically synthesized
  source 1..20: mol_type = other DNA
gctggactccttccactcgc

SEQ ID NO: 52450 - DNA, 20 bp, synthetic construct
  misc_feature 1..20: note = chemically synthesized
  source 1..20: mol_type = other DNA
ttccactcgcgggtcgtctc

SEQ ID NO: 52451 - DNA, 20 bp, synthetic construct
  misc_feature 1..20: note = chemically synthesized
  source 1..20: mol_type = other DNA
ccactcgcgggtcgtctcca

SEQ ID NO: 52452 - DNA, 20 bp, synthetic construct
  misc_feature 1..20: note = chemically synthesized
  source 1..20: mol_type = other DNA
cgcgggtcgtctccagagct

SEQ ID NO: 52453 - DNA, 20 bp, synthetic construct
  misc_feature 1..20: note = chemically synthesized
  source 1..20: mol_type = other DNA
gtctccagagctcagaaaat

SEQ ID NO: 52454 - DNA, 20 bp, synthetic construct
  misc_feature 1..20: note = chemically synthesized
  source 1..20: mol_type = other DNA
tctccagagctcagaaaatg

SEQ ID NO: 52455 - DNA, 20 bp, synthetic construct
  misc_feature 1..20: note = chemically synthesized
  source 1..20: mol_type = other DNA
agctcagaaaatgaggtgat

SEQ ID NO: 52456 - DNA, 20 bp, synthetic construct
  misc_feature 1..20: note = chemically synthesized
  source 1..20: mol_type = other DNA
tcagaaaatgaggtgatcag

SEQ ID NO: 52457 - DNA, 20 bp, synthetic construct
  misc_feature 1..20: note = chemically synthesized
  source 1..20: mol_type = other DNA
cagaaaatgaggtgatcagt

SEQ ID NO: 52458 - DNA, 20 bp, synthetic construct
  misc_feature 1..20: note = chemically synthesized
  source 1..20: mol_type = other DNA
aatgaggtgatcagtgggac

SEQ ID NO: 52459 - DNA, 20 bp, synthetic construct
  misc_feature 1..20: note = chemically synthesized
  source 1..20: mol_type = other DNA
aggtgatcagtgggacgagt

SEQ ID NO: 52460 - DNA, 20 bp, synthetic construct
  misc_feature 1..20: note = chemically synthesized
  source 1..20: mol_type = other DNA
ggtgatcagtgggacgagta

SEQ ID NO: 52461 - DNA, 20 bp, synthetic construct
  misc_feature 1..20: note = chemically synthesized
  source 1..20: mol_type = other DNA
gatcagtgggacgagtaagg

SEQ ID NO: 52462 - DNA, 20 bp, synthetic construct
  misc_feature 1..20: note = chemically synthesized
  source 1..20: mol_type = other DNA
atcagtgggacgagtaagga

SEQ ID NO: 52463 - DNA, 20 bp, synthetic construct
  misc_feature 1..20: note = chemically synthesized
  source 1..20: mol_type = other DNA
tcagtgggacgagtaaggaa

SEQ ID NO: 52464 - DNA, 20 bp, synthetic construct
  misc_feature 1..20: note = chemically synthesized
  source 1..20: mol_type = other DNA
cagtgggacgagtaaggaag

SEQ ID NO: 52465 - DNA, 20 bp, synthetic construct
  misc_feature 1..20: note = chemically synthesized
  source 1..20: mol_type = other DNA
agtgggacgagtaaggaagg

SEQ ID NO: 52466 - DNA, 20 bp, synthetic construct
  misc_feature 1..20: note = chemically synthesized
  source 1..20: mol_type = other DNA
gtgggacgagtaaggaaggg

SEQ ID NO: 52467 - DNA, 20 bp, synthetic construct
  misc_feature 1..20: note = chemically synthesized
  source 1..20: mol_type = other DNA
gacgagtaaggaaggggggt

SEQ ID NO: 52468 - DNA, 20 bp, synthetic construct
  misc_feature 1..20: note = chemically synthesized
  source 1..20: mol_type = other DNA
acgagtaaggaaggggggtt

SEQ ID NO: 52469 - DNA, 20 bp, synthetic construct
  misc_feature 1..20: note = chemically synthesized
  source 1..20: mol_type = other DNA
gagtaaggaaggggggttgg

SEQ ID NO: 52470 - DNA, 20 bp, synthetic construct
  misc_feature 1..20: note = chemically synthesized
  source 1..20: mol_type = other DNA
gtaaggaaggggggttggga

SEQ ID NO: 52471 - DNA, 20 bp, synthetic construct
  misc_feature 1..20: note = chemically synthesized
  source 1..20: mol_type = other DNA
taaggaaggggggttgggag

SEQ ID NO: 52472 - DNA, 20 bp, synthetic construct
  misc_feature 1..20: note = chemically synthesized
  source 1..20: mol_type = other DNA
aaggaaggggggttgggaga

SEQ ID NO: 52473 - DNA, 20 bp, synthetic construct
  misc_feature 1..20: note = chemically synthesized
  source 1..20: mol_type = other DNA
aggaaggggggttgggagag

SEQ ID NO: 52474 - DNA, 20 bp, synthetic construct
  misc_feature 1..20: note = chemically synthesized
  source 1..20: mol_type = other DNA
ggggttgggagaggggcgat

SEQ ID NO: 52475 - DNA, 20 bp, synthetic construct
  misc_feature 1..20: note = chemically synthesized
  source 1..20: mol_type = other DNA
gggttgggagaggggcgatt

SEQ ID NO: 52476 - DNA, 20 bp, synthetic construct
  misc_feature 1..20: note = chemically synthesized
  source 1..20: mol_type = other DNA
agaggggcgattgggcaacc

SEQ ID NO: 52477 - DNA, 20 bp, synthetic construct
  misc_feature 1..20: note = chemically synthesized
  source 1..20: mol_type = other DNA
gcaacccggctgcacaaaca

SEQ ID NO: 52478 - DNA, 20 bp, synthetic construct
  misc_feature 1..20: note = chemically synthesized
  source 1..20: mol_type = other DNA
caacccggctgcacaaacac

SEQ ID NO: 52479 - DNA, 20 bp, synthetic construct
  misc_feature 1..20: note = chemically synthesized
  source 1..20: mol_type = other DNA
acccggctgcacaaacacgg

SEQ ID NO: 52480 - DNA, 20 bp, synthetic construct
  misc_feature 1..20: note = chemically synthesized
  source 1..20: mol_type = other DNA
cccggctgcacaaacacggg

SEQ ID NO: 52481 - DNA, 20 bp, synthetic construct
  misc_feature 1..20: note = chemically synthesized
  source 1..20: mol_type = other DNA
tgcacaaacacgggaggtca

SEQ ID NO: 52482 - DNA, 20 bp, synthetic construct
  misc_feature 1..20: note = chemically synthesized
  source 1..20: mol_type = other DNA
gggaggtcaaagattgcgcc

SEQ ID NO: 52483 - DNA, 20 bp, synthetic construct
  misc_feature 1..20: note = chemically synthesized
  source 1..20: mol_type = other DNA
aagattgcgcccagcccgcc

SEQ ID NO: 52484 - DNA, 20 bp, synthetic construct
  misc_feature 1..20: note = chemically synthesized
  source 1..20: mol_type = other DNA
agattgcgcccagcccgccc

SEQ ID NO: 52485 - DNA, 20 bp, synthetic construct
  misc_feature 1..20: note = chemically synthesized
  source 1..20: mol_type = other DNA
tgcgcccagcccgcccaggc

SEQ ID NO: 52486 - DNA, 20 bp, synthetic construct
  misc_feature 1..20: note = chemically synthesized
  source 1..20: mol_type = other DNA
gcgcccagcccgcccaggcc

SEQ ID NO: 52487 - DNA, 20 bp, synthetic construct
  misc_feature 1..20: note = chemically synthesized
  source 1..20: mol_type = other DNA
cagcccgcccaggccgggaa

SEQ ID NO: 52488 - DNA, 20 bp, synthetic construct
  misc_feature 1..20: note = chemically synthesized
  source 1..20: mol_type = other DNA
cccaggccgggaatggaata

SEQ ID NO: 52489 - DNA, 20 bp, synthetic construct
  misc_feature 1..20: note = chemically synthesized
  source 1..20: mol_type = other DNA
ccaggccgggaatggaataa

SEQ ID NO: 52490 - DNA, 20 bp, synthetic construct
  misc_feature 1..20: note = chemically synthesized
  source 1..20: mol_type = other DNA
caggccgggaatggaataaa

SEQ ID NO: 52491 - DNA, 20 bp, synthetic construct
  misc_feature 1..20: note = chemically synthesized
  source 1..20: mol_type = other DNA
gggaatggaataaagggacg

SEQ ID NO: 52492 - DNA, 20 bp, synthetic construct
  misc_feature 1..20: note = chemically synthesized
  source 1..20: mol_type = other DNA
ggaatggaataaagggacgc

SEQ ID NO: 52493 - DNA, 20 bp, synthetic construct
  misc_feature 1..20: note = chemically synthesized
  source 1..20: mol_type = other DNA
gaatggaataaagggacgcg

SEQ ID NO: 52494 - DNA, 20 bp, synthetic construct
  misc_feature 1..20: note = chemically synthesized
  source 1..20: mol_type = other DNA
aataaagggacgcggggcgc

SEQ ID NO: 52495 - DNA, 20 bp, synthetic construct
  misc_feature 1..20: note = chemically synthesized
  source 1..20: mol_type = other DNA
taaagggacgcggggcgccg

SEQ ID NO: 52496 - DNA, 20 bp, synthetic construct
  misc_feature 1..20: note = chemically synthesized
  source 1..20: mol_type = other DNA
aaagggacgcggggcgccgg

SEQ ID NO: 52497 - DNA, 20 bp, synthetic construct
  misc_feature 1..20: note = chemically synthesized
  source 1..20: mol_type = other DNA
gcggggcgccggaggctgca

SEQ ID NO: 52498 - DNA, 20 bp, synthetic construct
  misc_feature 1..20: note = chemically synthesized
  source 1..20: mol_type = other DNA
gggcgccggaggctgcacag

SEQ ID NO: 52499 - DNA, 20 bp, synthetic construct
  misc_feature 1..20: note = chemically synthesized
  source 1..20: mol_type = other DNA
gccggaggctgcacagaagc

SEQ ID NO: 52500 - DNA, 20 bp, synthetic construct
  misc_feature 1..20: note = chemically synthesized
  source 1..20: mol_type = other DNA
gtccgactgtgctcgctgct

SEQ ID NO: 52501 - DNA, 20 bp, synthetic construct
  misc_feature 1..20: note = chemically synthesized
  source 1..20: mol_type = other DNA
tcgctgctcagcgccgcacc

SEQ ID NO: 52502 - DNA, 20 bp, synthetic construct
  misc_feature 1..20: note = chemically synthesized
  source 1..20: mol_type = other DNA
ctgctcagcgccgcacccgg

SEQ ID NO: 52503 - DNA, 20 bp, synthetic construct
  misc_feature 1..20: note = chemically synthesized
  source 1..20: mol_type = other DNA
cagcgccgcacccggaagat

SEQ ID NO: 52504 - DNA, 20 bp, synthetic construct
  misc_feature 1..20: note = chemically synthesized
  source 1..20: mol_type = other DNA
agcgccgcacccggaagatg

SEQ ID NO: 52505 - DNA, 20 bp, synthetic construct
  misc_feature 1..20: note = chemically synthesized
  source 1..20: mol_type = other DNA
ccggaagatgaggctcgccg

SEQ ID NO: 52506 - DNA, 20 bp, synthetic construct
  misc_feature 1..20: note = chemically synthesized
  source 1..20: mol_type = other DNA
cggaagatgaggctcgccgt

SEQ ID NO: 52507 - DNA, 20 bp, synthetic construct
  misc_feature 1..20: note = chemically synthesized
  source 1..20: mol_type = other DNA
gaagatgaggctcgccgtgg

SEQ ID NO: 52508 - DNA, 20 bp, synthetic construct
  misc_feature 1..20: note = chemically synthesized
  source 1..20: mol_type = other DNA
gctcgccgtgggagccctgc

SEQ ID NO: 52509 - DNA, 20 bp, synthetic construct
  misc_feature 1..20: note = chemically synthesized
  source 1..20: mol_type = other DNA
cctgctggtctgcgccgtcc

SEQ ID NO: 52510 - DNA, 20 bp, synthetic construct
  misc_feature 1..20: note = chemically synthesized
  source 1..20: mol_type = other DNA
ctgctggtctgcgccgtcct

SEQ ID NO: 52511 - DNA, 20 bp, synthetic construct
  misc_feature 1..20: note = chemically synthesized
  source 1..20: mol_type = other DNA
tggtctgcgccgtcctgggt

SEQ ID NO: 52512 - DNA, 20 bp, synthetic construct
  misc_feature 1..20: note = chemically synthesized
  source 1..20: mol_type = other DNA
tgcgccgtcctgggtgagtg

SEQ ID NO: 52513 - DNA, 20 bp, synthetic construct
  misc_feature 1..20: note = chemically synthesized
  source 1..20: mol_type = other DNA
gcgccgtcctgggtgagtgc

SEQ ID NO: 52514 - DNA, 20 bp, synthetic construct
  misc_feature 1..20: note = chemically synthesized
  source 1..20: mol_type = other DNA
gtcctgggtgagtgcgggca

SEQ ID NO: 52515 - DNA, 20 bp, synthetic construct
  misc_feature 1..20: note = chemically synthesized
  source 1..20: mol_type = other DNA
tcctgggtgagtgcgggcac

SEQ ID NO: 52516 - DNA, 20 bp, synthetic construct
  misc_feature 1..20: note = chemically synthesized
  source 1..20: mol_type = other DNA
cctgggtgagtgcgggcacg

SEQ ID NO: 52517 - DNA, 20 bp, synthetic construct
  misc_feature 1..20: note = chemically synthesized
  source 1..20: mol_type = other DNA
gggtgagtgcgggcacgggg

SEQ ID NO: 52518 - DNA, 20 bp, synthetic construct
  misc_feature 1..20: note = chemically synthesized
  source 1..20: mol_type = other DNA
gcgggcacggggtagcaccg

SEQ ID NO: 52519 - DNA, 20 bp, synthetic construct
  misc_feature 1..20: note = chemically synthesized
  source 1..20: mol_type = other DNA
gggcacggggtagcaccgca

SEQ ID NO: 52520 - DNA, 20 bp, synthetic construct
  misc_feature 1..20: note = chemically synthesized
  source 1..20: mol_type = other DNA
gggtagcaccgcagagtcgc

SEQ ID NO: 52521 - DNA, 20 bp, synthetic construct
  misc_feature 1..20: note = chemically synthesized
  source 1..20: mol_type = other DNA
cccgcgcgttccctgcaacc

SEQ ID NO: 52522 - DNA, 20 bp, synthetic construct
  misc_feature 1..20: note = chemically synthesized
  source 1..20: mol_type = other DNA
ccgcgcgttccctgcaaccc

SEQ ID NO: 52523 - DNA, 20 bp, synthetic construct
  misc_feature 1..20: note = chemically synthesized
  source 1..20: mol_type = other DNA
cgcgttccctgcaacccggg

SEQ ID NO: 52524 - DNA, 20 bp, synthetic construct
  misc_feature 1..20: note = chemically synthesized
  source 1..20: mol_type = other DNA
caacccgggcggccaccgcg

SEQ ID NO: 52525 - DNA, 20 bp, synthetic construct
  misc_feature 1..20: note = chemically synthesized
  source 1..20: mol_type = other DNA
gcctgcatgcactccgcgct

SEQ ID NO: 52526 - DNA, 20 bp, synthetic construct
  misc_feature 1..20: note = chemically synthesized
  source 1..20: mol_type = other DNA
cctgcatgcactccgcgctc

SEQ ID NO: 52527 - DNA, 20 bp, synthetic construct
  misc_feature 1..20: note = chemically synthesized
  source 1..20: mol_type = other DNA
catgcactccgcgctcaggc

SEQ ID NO: 52528 - DNA, 20 bp, synthetic construct
  misc_feature 1..20: note = chemically synthesized
  source 1..20: mol_type = other DNA
gcactccgcgctcaggctgg

SEQ ID NO: 52529 - DNA, 20 bp, synthetic construct
  misc_feature 1..20: note = chemically synthesized
  source 1..20: mol_type = other DNA
ccgcgctcaggctggaagcc

SEQ ID NO: 52530 - DNA, 20 bp, synthetic construct
  misc_feature 1..20: note = chemically synthesized
  source 1..20: mol_type = other DNA
cgcgctcaggctggaagcct

SEQ ID NO: 52531 - DNA, 20 bp, synthetic construct
  misc_feature 1..20: note = chemically synthesized
  source 1..20: mol_type = other DNA
aggctggaagcctgggtgtc

SEQ ID NO: 52532 - DNA, 20 bp, synthetic construct
  misc_feature 1..20: note = chemically synthesized
  source 1..20: mol_type = other DNA
ggctggaagcctgggtgtct

SEQ ID NO: 52533 - DNA, 20 bp, synthetic construct
  misc_feature 1..20: note = chemically synthesized
  source 1..20: mol_type = other DNA
gcctctctacgccccacccc

SEQ ID NO: 52534 - DNA, 20 bp, synthetic construct
  misc_feature 1..20: note = chemically synthesized
  source 1..20: mol_type = other DNA
ccccacccctggcctttgct

SEQ ID NO: 52535 - DNA, 20 bp, synthetic construct
  misc_feature 1..20: note = chemically synthesized
  source 1..20: mol_type = other DNA
cccacccctggcctttgctt

SEQ ID NO: 52536 - DNA, 20 bp, synthetic construct
  misc_feature 1..20: note = chemically synthesized
  source 1..20: mol_type = other DNA
ctggcctttgcttgggcttc

SEQ ID NO: 52537 - DNA, 20 bp, synthetic construct
  misc_feature 1..20: note = chemically synthesized
  source 1..20: mol_type = other DNA
tccccctcctcctctttgtc

SEQ ID NO: 52538 - DNA, 20 bp, synthetic construct
  misc_feature 1..20: note = chemically synthesized
  source 1..20: mol_type = other DNA
tctttgtccagtaaatcttg

SEQ ID NO: 52539 - DNA, 20 bp, synthetic construct
  misc_feature 1..20: note = chemically synthesized
  source 1..20: mol_type = other DNA
ttgtccagtaaatcttgcag

SEQ ID NO: 52540 - DNA, 20 bp, synthetic construct
  misc_feature 1..20: note = chemically synthesized
  source 1..20: mol_type = other DNA
agcagtgaaatacaataaat

SEQ ID NO: 52541 - DNA, 20 bp, synthetic construct
  misc_feature 1..20: note = chemically synthesized
  source 1..20: mol_type = other DNA
cagtgaaatacaataaatca

SEQ ID NO: 52542 - DNA, 20 bp, synthetic construct
  misc_feature 1..20: note = chemically synthesized
  source 1..20: mol_type = other DNA
taaatcagagcacgtctaac

SEQ ID NO: 52543 - DNA, 20 bp, synthetic construct
  misc_feature 1..20: note = chemically synthesized
  source 1..20: mol_type = other DNA
aaatcagagcacgtctaacc

SEQ ID NO: 52544 - DNA, 20 bp, synthetic construct
  misc_feature 1..20: note = chemically synthesized
  source 1..20: mol_type = other DNA
ctttgctgctgcctcttgtc

SEQ ID NO: 52545 - DNA, 20 bp, synthetic construct
  misc_feature 1..20: note = chemically synthesized
  source 1..20: mol_type = other DNA
cttgtcaagtccgaactcct

SEQ ID NO: 52546 - DNA, 20 bp, synthetic construct
  misc_feature 1..20: note = chemically synthesized
  source 1..20: mol_type = other DNA
caagtccgaactccttagca

SEQ ID NO: 52547 - DNA, 20 bp, synthetic construct
  misc_feature 1..20: note = chemically synthesized
  source 1..20: mol_type = other DNA
aactccttagcatggcattc

SEQ ID NO: 52548 - DNA, 20 bp, synthetic construct
  misc_feature 1..20: note = chemically synthesized
  source 1..20: mol_type = other DNA
actccttagcatggcattca

SEQ ID NO: 52549 - DNA, 20 bp, synthetic construct
  misc_feature 1..20: note = chemically synthesized
  source 1..20: mol_type = other DNA
gcatggcattcaaggcctcc

SEQ ID NO: 52550 - DNA, 20 bp, synthetic construct
  misc_feature 1..20: note = chemically synthesized
  source 1..20: mol_type = other DNA
catggcattcaaggcctccc

SEQ ID NO: 52551 - DNA, 20 bp, synthetic construct
  misc_feature 1..20: note = chemically synthesized
  source 1..20: mol_type = other DNA
gggtctgaccattccccttt

SEQ ID NO: 52552 - DNA, 20 bp, synthetic construct
  misc_feature 1..20: note = chemically synthesized
  source 1..20: mol_type = other DNA
gtctgaccattcccctttca

SEQ ID NO: 52553 - DNA, 20 bp, synthetic construct
  misc_feature 1..20: note = chemically synthesized
  source 1..20: mol_type = other DNA
tctgaccattcccctttcag

SEQ ID NO: 52554 - DNA, 20 bp, synthetic construct
  misc_feature 1..20: note = chemically synthesized
  source 1..20: mol_type = other DNA
tttcagaggctgatgtcccc

SEQ ID NO: 52555 - DNA, 20 bp, synthetic construct
  misc_feature 1..20: note = chemically synthesized
  source 1..20: mol_type = other DNA
ttcagaggctgatgtcccct

SEQ ID NO: 52556 - DNA, 20 bp, synthetic construct
  misc_feature 1..20: note = chemically synthesized
  source 1..20: mol_type = other DNA
ctgatgtcccctgggtgccc

SEQ ID NO: 52557 - DNA, 20 bp, synthetic construct
  misc_feature 1..20: note = chemically synthesized
  source 1..20: mol_type = other DNA
tgatgtcccctgggtgccct

SEQ ID NO: 52558 - DNA, 20 bp, synthetic construct
  misc_feature 1..20: note = chemically synthesized
  source 1..20: mol_type = other DNA
atgtcccctgggtgccctgg

SEQ ID NO: 52559 - DNA, 20 bp, synthetic construct
  misc_feature 1..20: note = chemically synthesized
  source 1..20: mol_type = other DNA
cctgggtgccctgggagctg

SEQ ID NO: 52560 - DNA, 20 bp, synthetic construct
  misc_feature 1..20: note = chemically synthesized
  source 1..20: mol_type = other DNA
ggagctgtagatgtcctgcc

SEQ ID NO: 52561 - DNA, 20 bp, synthetic construct
  misc_feature 1..20: note = chemically synthesized
  source 1..20: mol_type = other DNA
gagctgtagatgtcctgcca

SEQ ID NO: 52562 - DNA, 20 bp, synthetic construct
  misc_feature 1..20: note = chemically synthesized
  source 1..20: mol_type = other DNA
ctgtagatgtcctgccaagg

SEQ ID NO: 52563 - DNA, 20 bp, synthetic construct
  misc_feature 1..20: note = chemically synthesized
  source 1..20: mol_type = other DNA
tagatgtcctgccaaggaag

SEQ ID NO: 52564 - DNA, 20 bp, synthetic construct
  misc_feature 1..20: note = chemically synthesized
  source 1..20: mol_type = other DNA
gccaaggaagcggtgccatc

SEQ ID NO: 52565 - DNA, 20 bp, synthetic construct
  misc_feature 1..20: note = chemically synthesized
  source 1..20: mol_type = other DNA
aaggaagcggtgccatcgag

SEQ ID NO: 52566 - DNA, 20 bp, synthetic construct
  misc_feature 1..20: note = chemically synthesized
  source 1..20: mol_type = other DNA
aagcggtgccatcgagcggt

SEQ ID NO: 52567 - DNA, 20 bp, synthetic construct
  misc_feature 1..20: note = chemically synthesized
  source 1..20: mol_type = other DNA
gcggtgccatcgagcggtca

SEQ ID NO: 52568 - DNA, 20 bp, synthetic construct
  misc_feature 1..20: note = chemically synthesized
  source 1..20: mol_type = other DNA
gccatcgagcggtcagagca

SEQ ID NO: 52569 - DNA, 20 bp, synthetic construct
  misc_feature 1..20: note = chemically synthesized
  source 1..20: mol_type = other DNA
ccatcgagcggtcagagcat

SEQ ID NO: 52570 - DNA, 20 bp, synthetic construct
  misc_feature 1..20: note = chemically synthesized
  source 1..20: mol_type = other DNA
catcgagcggtcagagcatg

SEQ ID NO: 52571 - DNA, 20 bp, synthetic construct
  misc_feature 1..20: note = chemically synthesized
  source 1..20: mol_type = other DNA
cggtcagagcatggggtttg

SEQ ID NO: 52572 - DNA, 20 bp, synthetic construct
  misc_feature 1..20: note = chemically synthesized
  source 1..20: mol_type = other DNA
cagagcatggggtttgaagc

SEQ ID NO: 52573 - DNA, 20 bp, synthetic construct
  misc_feature 1..20: note = chemically synthesized
  source 1..20: mol_type = other DNA
gggtttgaagccagacttct

SEQ ID NO: 52574 - DNA, 20 bp, synthetic construct
  misc_feature 1..20: note = chemically synthesized
  source 1..20: mol_type = other DNA
aagccagacttcttggatcc

SEQ ID NO: 52575 - DNA, 20 bp, synthetic construct
  misc_feature 1..20: note = chemically synthesized
  source 1..20: mol_type = other DNA
gacttcttggatccaagtcc

SEQ ID NO: 52576 - DNA, 20 bp, synthetic construct
  misc_feature 1..20: note = chemically synthesized
  source 1..20: mol_type = other DNA
tcttggatccaagtcctggc

SEQ ID NO: 52577 - DNA, 20 bp, synthetic construct
  misc_feature 1..20: note = chemically synthesized
  source 1..20: mol_type = other DNA
agtcctggccggctcctcac

SEQ ID NO: 52578 - DNA, 20 bp, synthetic construct
  misc_feature 1..20: note = chemically synthesized
  source 1..20: mol_type = other DNA
gtcctggccggctcctcacc

SEQ ID NO: 52579 - DNA, 20 bp, synthetic construct
  misc_feature 1..20: note = chemically synthesized
  source 1..20: mol_type = other DNA
tcctggccggctcctcacca

SEQ ID NO: 52580 - DNA, 20 bp, synthetic construct
  misc_feature 1..20: note = chemically synthesized
  source 1..20: mol_type = other DNA
ctggccggctcctcaccagg

SEQ ID NO: 52581 - DNA, 20 bp, synthetic construct
  misc_feature 1..20: note = chemically synthesized
  source 1..20: mol_type = other DNA
tggccggctcctcaccaggg

SEQ ID NO: 52582 - DNA, 20 bp, synthetic construct
  misc_feature 1..20: note = chemically synthesized
  source 1..20: mol_type = other DNA
ggccggctcctcaccaggga

SEQ ID NO: 52583 - DNA, 20 bp, synthetic construct
  misc_feature 1..20: note = chemically synthesized
  source 1..20: mol_type = other DNA
gccggctcctcaccagggag

SEQ ID NO: 52584 - DNA, 20 bp, synthetic construct
  misc_feature 1..20: note = chemically synthesized
  source 1..20: mol_type = other DNA
ccggctcctcaccagggagg

SEQ ID NO: 52585 - DNA, 20 bp, synthetic construct
  misc_feature 1..20: note = chemically synthesized
  source 1..20: mol_type = other DNA
caccagggagggggtcatca

SEQ ID NO: 52586 - DNA, 20 bp, synthetic construct
  misc_feature 1..20: note = chemically synthesized
  source 1..20: mol_type = other DNA
gggtcatcacagcacttgcc

SEQ ID NO: 52587 - DNA, 20 bp, synthetic construct
  misc_feature 1..20: note = chemically synthesized
  source 1..20: mol_type = other DNA
ggtcatcacagcacttgcct

SEQ ID NO: 52588 - DNA, 20 bp, synthetic construct
  misc_feature 1..20: note = chemically synthesized
  source 1..20: mol_type = other DNA
tcatcacagcacttgcctgg

SEQ ID NO: 52589 - DNA, 20 bp, synthetic construct
  misc_feature 1..20: note = chemically synthesized
  source 1..20: mol_type = other DNA
catcacagcacttgcctggg

SEQ ID NO: 52590 - DNA, 20 bp, synthetic construct
  misc_feature 1..20: note = chemically synthesized
  source 1..20: mol_type = other DNA
atcacagcacttgcctggga

SEQ ID NO: 52591 - DNA, 20 bp, synthetic construct
  misc_feature 1..20: note = chemically synthesized
  source 1..20: mol_type = other DNA
cttgcctgggagggtcaaat

SEQ ID NO: 52592 - DNA, 20 bp, synthetic construct
  misc_feature 1..20: note = chemically synthesized
  source 1..20: mol_type = other DNA
ttgcctgggagggtcaaatg

SEQ ID NO: 52593 - DNA, 20 bp, synthetic construct
  misc_feature 1..20: note = chemically synthesized
  source 1..20: mol_type = other DNA
tgcctgggagggtcaaatga

SEQ ID NO: 52594 - DNA, 20 bp, synthetic construct
  misc_feature 1..20: note = chemically synthesized
  source 1..20: mol_type = other DNA
tgggagggtcaaatgagggt

SEQ ID NO: 52595 - DNA, 20 bp, synthetic construct
  misc_feature 1..20: note = chemically synthesized
  source 1..20: mol_type = other DNA
agggtcaaatgagggtcagc

SEQ ID NO: 52596 - DNA, 20 bp, synthetic construct
  misc_feature 1..20: note = chemically synthesized
  source 1..20: mol_type = other DNA
gggtcaaatgagggtcagcg

SEQ ID NO: 52597 - DNA, 20 bp, synthetic construct
  misc_feature 1..20: note = chemically synthesized
  source 1..20: mol_type = other DNA
tcaaatgagggtcagcgagg

SEQ ID NO: 52598 - DNA, 20 bp, synthetic construct
  misc_feature 1..20: note = chemically synthesized
  source 1..20: mol_type = other DNA
aatgagggtcagcgaggtgg

SEQ ID NO: 52599 - DNA, 20 bp, synthetic construct
  misc_feature 1..20: note = chemically synthesized
  source 1..20: mol_type = other DNA
tcagcgaggtggcagatgct

SEQ ID NO: 52600 - DNA, 20 bp, synthetic construct
  misc_feature 1..20: note = chemically synthesized
  source 1..20: mol_type = other DNA
aggtggcagatgctgagtac

SEQ ID NO: 52601 - DNA, 20 bp, synthetic construct
  misc_feature 1..20: note = chemically synthesized
  source 1..20: mol_type = other DNA
tggcagatgctgagtaccag

SEQ ID NO: 52602 - DNA, 20 bp, synthetic construct
  misc_feature 1..20: note = chemically synthesized
  source 1..20: mol_type = other DNA
cagatgctgagtaccagtgg

SEQ ID NO: 52603 - DNA, 20 bp, synthetic construct
  misc_feature 1..20: note = chemically synthesized
  source 1..20: mol_type = other DNA
atgttgcacacatcctgcta

SEQ ID NO: 52604 - DNA, 20 bp, synthetic construct
  misc_feature 1..20: note = chemically synthesized
  source 1..20: mol_type = other DNA
tgttgcacacatcctgctat

SEQ ID NO: 52605 - DNA, 20 bp, synthetic construct
  misc_feature 1..20: note = chemically synthesized
  source 1..20: mol_type = other DNA
gttgcacacatcctgctatg

SEQ ID NO: 52606 - DNA, 20 bp, synthetic construct
  misc_feature 1..20: note = chemically synthesized
  source 1..20: mol_type = other DNA
gcacacatcctgctatgggg

SEQ ID NO: 52607 - DNA, 20 bp, synthetic construct
  misc_feature 1..20: note = chemically synthesized
  source 1..20: mol_type = other DNA
cacatcctgctatggggcag

SEQ ID NO: 52608 - DNA, 20 bp, synthetic construct
  misc_feature 1..20: note = chemically synthesized
  source 1..20: mol_type = other DNA
gccacactccccgacctcct

SEQ ID NO: 52609 - DNA, 20 bp, synthetic construct
  misc_feature 1..20: note = chemically synthesized
  source 1..20: mol_type = other DNA
ccacactccccgacctcctg

SEQ ID NO: 52610 - DNA, 20 bp, synthetic construct
  misc_feature 1..20: note = chemically synthesized
  source 1..20: mol_type = other DNA
cactccccgacctcctgagg

SEQ ID NO: 52611 - DNA, 20 bp, synthetic construct
  misc_feature 1..20: note = chemically synthesized
  source 1..20: mol_type = other DNA
actccccgacctcctgaggt

SEQ ID NO: 52612 - DNA, 20 bp, synthetic construct
  misc_feature 1..20: note = chemically synthesized
  source 1..20: mol_type = other DNA
ctccccgacctcctgaggtg

SEQ ID NO: 52613 - DNA, 20 bp, synthetic construct
  misc_feature 1..20: note = chemically synthesized
  source 1..20: mol_type = other DNA
taacttctgcctgccattca

SEQ ID NO: 52614 - DNA, 20 bp, synthetic construct
  misc_feature 1..20: note = chemically synthesized
  source 1..20: mol_type = other DNA
aacttctgcctgccattcat

SEQ ID NO: 52615 - DNA, 20 bp, synthetic construct
  misc_feature 1..20: note = chemically synthesized
  source 1..20: mol_type = other DNA
acttctgcctgccattcatg

SEQ ID NO: 52616 - DNA, 20 bp, synthetic construct
  misc_feature 1..20: note = chemically synthesized
  source 1..20: mol_type = other DNA
tggggcatttgtcacactgt

SEQ ID NO: 52617 - DNA, 20 bp, synthetic construct
  misc_feature 1..20: note = chemically synthesized
  source 1..20: mol_type = other DNA
ggggcatttgtcacactgtt

SEQ ID NO: 52618 - DNA, 20 bp, synthetic construct
  misc_feature 1..20: note = chemically synthesized
  source 1..20: mol_type = other DNA
gggcatttgtcacactgttg

SEQ ID NO: 52619 - DNA, 20 bp, synthetic construct
  misc_feature 1..20: note = chemically synthesized
  source 1..20: mol_type = other DNA
actgttggggcttccacgtt

SEQ ID NO: 52620 - DNA, 20 bp, synthetic construct
  misc_feature 1..20: note = chemically synthesized
  source 1..20: mol_type = other DNA
gtttagttttctctccccat

SEQ ID NO: 52621 - DNA, 20 bp, synthetic construct
  misc_feature 1..20: note = chemically synthesized
  source 1..20: mol_type = other DNA
agttttctctccccataagc

SEQ ID NO: 52622 - DNA, 20 bp, synthetic construct
  misc_feature 1..20: note = chemically synthesized
  source 1..20: mol_type = other DNA
ccataagctagcaattcctt

SEQ ID NO: 52623 - DNA, 20 bp, synthetic construct
  misc_feature 1..20: note = chemically synthesized
  source 1..20: mol_type = other DNA
ataagctagcaattccttga

SEQ ID NO: 52624 - DNA, 20 bp, synthetic construct
  misc_feature 1..20: note = chemically synthesized
  source 1..20: mol_type = other DNA
aagctagcaattccttgaga

SEQ ID NO: 52625 - DNA, 20 bp, synthetic construct
  misc_feature 1..20: note = chemically synthesized
  source 1..20: mol_type = other DNA
agctagcaattccttgagag

SEQ ID NO: 52626 - DNA, 20 bp, synthetic construct
  misc_feature 1..20: note = chemically synthesized
  source 1..20: mol_type = other DNA
tacttgcctttatccccgca

SEQ ID NO: 52627 - DNA, 20 bp, synthetic construct
  misc_feature 1..20: note = chemically synthesized
  source 1..20: mol_type = other DNA
cttgcctttatccccgcaca

SEQ ID NO: 52628 - DNA, 20 bp, synthetic construct
  misc_feature 1..20: note = chemically synthesized
  source 1..20: mol_type = other DNA
tccccgcacagagcacttca

SEQ ID NO: 52629 - DNA, 20 bp, synthetic construct
  misc_feature 1..20: note = chemically synthesized
  source 1..20: mol_type = other DNA
ccccgcacagagcacttcac

SEQ ID NO: 52630 - DNA, 20 bp, synthetic construct
  misc_feature 1..20: note = chemically synthesized
  source 1..20: mol_type = other DNA
gagcacttcacaggctgtgc

SEQ ID NO: 52631 - DNA, 20 bp, synthetic construct
  misc_feature 1..20: note = chemically synthesized
  source 1..20: mol_type = other DNA
agcacttcacaggctgtgca

SEQ ID NO: 52632 - DNA, 20 bp, synthetic construct
  misc_feature 1..20: note = chemically synthesized
  source 1..20: mol_type = other DNA
gtgcaaggtaatgctccact

SEQ ID NO: 52633 - DNA, 20 bp, synthetic construct
  misc_feature 1..20: note = chemically synthesized
  source 1..20: mol_type = other DNA
tgcaaggtaatgctccactg

SEQ ID NO: 52634 - DNA, 20 bp, synthetic construct
  misc_feature 1..20: note = chemically synthesized
  source 1..20: mol_type = other DNA
tgaggacacattctcgccta

SEQ ID NO: 52635 - DNA, 20 bp, synthetic construct
  misc_feature 1..20: note = chemically synthesized
  source 1..20: mol_type = other DNA
gaggacacattctcgcctat

SEQ ID NO: 52636 - DNA, 20 bp, synthetic construct
  misc_feature 1..20: note = chemically synthesized
  source 1..20: mol_type = other DNA
attctcgcctatgggaactc

SEQ ID NO: 52637 - DNA, 20 bp, synthetic construct
  misc_feature 1..20: note = chemically synthesized
  source 1..20: mol_type = other DNA
tctcgcctatgggaactctg

SEQ ID NO: 52638 - DNA, 20 bp, synthetic construct
  misc_feature 1..20: note = chemically synthesized
  source 1..20: mol_type = other DNA
ctcgcctatgggaactctgg

SEQ ID NO: 52639 - DNA, 20 bp, synthetic construct
  misc_feature 1..20: note = chemically synthesized
  source 1..20: mol_type = other DNA
gcctatgggaactctggagg

SEQ ID NO: 52640 - DNA, 20 bp, synthetic construct
  misc_feature 1..20: note = chemically synthesized
  source 1..20: mol_type = other DNA
cctatgggaactctggaggc

SEQ ID NO: 52641 - DNA, 20 bp, synthetic construct
  misc_feature 1..20: note = chemically synthesized
  source 1..20: mol_type = other DNA
ctatgggaactctggaggca

SEQ ID NO: 52642 - DNA, 20 bp, synthetic construct
  misc_feature 1..20: note = chemically synthesized
  source 1..20: mol_type = other DNA
actctggaggcagggctttg

SEQ ID NO: 52643 - DNA, 20 bp, synthetic construct
  misc_feature 1..20: note = chemically synthesized
  source 1..20: mol_type = other DNA
tctggaggcagggctttgtg

SEQ ID NO: 52644 - DNA, 20 bp, synthetic construct
  misc_feature 1..20: note = chemically synthesized
  source 1..20: mol_type = other DNA
ctggaggcagggctttgtgg

SEQ ID NO: 52645 - DNA, 20 bp, synthetic construct
  misc_feature 1..20: note = chemically synthesized
  source 1..20: mol_type = other DNA
tggaggcagggctttgtgga

SEQ ID NO: 52646 - DNA, 20 bp, synthetic construct
  misc_feature 1..20: note = chemically synthesized
  source 1..20: mol_type = other DNA
ggaggcagggctttgtggag

SEQ ID NO: 52647 - DNA, 20 bp, synthetic construct
  misc_feature 1..20: note = chemically synthesized
  source 1..20: mol_type = other DNA
gctttgtggaggggctgcca

SEQ ID NO: 52648 - DNA, 20 bp, synthetic construct
  misc_feature 1..20: note = chemically synthesized
  source 1..20: mol_type = other DNA
ctttgtggaggggctgccac

SEQ ID NO: 52649 - DNA, 20 bp, synthetic construct
  misc_feature 1..20: note = chemically synthesized
  source 1..20: mol_type = other DNA
cacaggcttatgttgcctcc

SEQ ID NO: 52650 - DNA, 20 bp, synthetic construct
  misc_feature 1..20: note = chemically synthesized
  source 1..20: mol_type = other DNA
acaggcttatgttgcctcct

SEQ ID NO: 52651 - DNA, 20 bp, synthetic construct
  misc_feature 1..20: note = chemically synthesized
  source 1..20: mol_type = other DNA
ttgcctcctaggatttccca

SEQ ID NO: 52652 - DNA, 20 bp, synthetic construct
  misc_feature 1..20: note = chemically synthesized
  source 1..20: mol_type = other DNA
tgcctcctaggatttcccat

SEQ ID NO: 52653 - DNA, 20 bp, synthetic construct
  misc_feature 1..20: note = chemically synthesized
  source 1..20: mol_type = other DNA
cctaggatttcccatgggcc

SEQ ID NO: 52654 - DNA, 20 bp, synthetic construct
  misc_feature 1..20: note = chemically synthesized
  source 1..20: mol_type = other DNA
taggatttcccatgggccaa

SEQ ID NO: 52655 - DNA, 20 bp, synthetic construct
  misc_feature 1..20: note = chemically synthesized
  source 1..20: mol_type = other DNA
aggatttcccatgggccaag

SEQ ID NO: 52656 - DNA, 20 bp, synthetic construct
  misc_feature 1..20: note = chemically synthesized
  source 1..20: mol_type = other DNA
ggatttcccatgggccaaga

SEQ ID NO: 52657 - DNA, 20 bp, synthetic construct
  misc_feature 1..20: note = chemically synthesized
  source 1..20: mol_type = other DNA
ccatgggccaagagggaaaa

SEQ ID NO: 52658 - DNA, 20 bp, synthetic construct
  misc_feature 1..20: note = chemically synthesized
  source 1..20: mol_type = other DNA
catgggccaagagggaaaat

SEQ ID NO: 52659 - DNA, 20 bp, synthetic construct
  misc_feature 1..20: note = chemically synthesized
  source 1..20: mol_type = other DNA
atgggccaagagggaaaatg

SEQ ID NO: 52660 - DNA, 20 bp, synthetic construct
  misc_feature 1..20: note = chemically synthesized
  source 1..20: mol_type = other DNA
tgggccaagagggaaaatgg

SEQ ID NO: 52661 - DNA, 20 bp, synthetic construct
  misc_feature 1..20: note = chemically synthesized
  source 1..20: mol_type = other DNA
agagggaaaatgggggtcgc

SEQ ID NO: 52662 - DNA, 20 bp, synthetic construct
  misc_feature 1..20: note = chemically synthesized
  source 1..20: mol_type = other DNA
gagggaaaatgggggtcgct

SEQ ID NO: 52663 - DNA, 20 bp, synthetic construct
  misc_feature 1..20: note = chemically synthesized
  source 1..20: mol_type = other DNA
agggaaaatgggggtcgctg

SEQ ID NO: 52664 - DNA, 20 bp, synthetic construct
  misc_feature 1..20: note = chemically synthesized
  source 1..20: mol_type = other DNA
gaaaatgggggtcgctgggg

SEQ ID NO: 52665 - DNA, 20 bp, synthetic construct
  misc_feature 1..20: note = chemically synthesized
  source 1..20: mol_type = other DNA
gtcgctggggtggccatccc

SEQ ID NO: 52666 - DNA, 20 bp, synthetic construct
  misc_feature 1..20: note = chemically synthesized
  source 1..20: mol_type = other DNA
gctggggtggccatccctgg

SEQ ID NO: 52667 - DNA, 20 bp, synthetic construct
  misc_feature 1..20: note = chemically synthesized
  source 1..20: mol_type = other DNA
tggcccctcctcatgcatcc

SEQ ID NO: 52668 - DNA, 20 bp, synthetic construct
  misc_feature 1..20: note = chemically synthesized
  source 1..20: mol_type = other DNA
gcccctcctcatgcatcctg

SEQ ID NO: 52669 - DNA, 20 bp, synthetic construct
  misc_feature 1..20: note = chemically synthesized
  source 1..20: mol_type = other DNA
ccctcctcatgcatcctgga

SEQ ID NO: 52670 - DNA, 20 bp, synthetic construct
  misc_feature 1..20: note = chemically synthesized
  source 1..20: mol_type = other DNA
tcatgcatcctggagagctg

SEQ ID NO: 52671 - DNA, 20 bp, synthetic construct
  misc_feature 1..20: note = chemically synthesized
  source 1..20: mol_type = other DNA
catgcatcctggagagctgt

SEQ ID NO: 52672 - DNA, 20 bp, synthetic construct
  misc_feature 1..20: note = chemically synthesized
  source 1..20: mol_type = other DNA
agctgtgggcctcctctcca

SEQ ID NO: 52673 - DNA, 20 bp, synthetic construct
  misc_feature 1..20: note = chemically synthesized
  source 1..20: mol_type = other DNA
gctgtgggcctcctctccac

SEQ ID NO: 52674 - DNA, 20 bp, synthetic construct
  misc_feature 1..20: note = chemically synthesized
  source 1..20: mol_type = other DNA
cctcctctccacaggctttg

SEQ ID NO: 52675 - DNA, 20 bp, synthetic construct
  misc_feature 1..20: note = chemically synthesized
  source 1..20: mol_type = other DNA
caggctttgtggatcttctt

SEQ ID NO: 52676 - DNA, 20 bp, synthetic construct
  misc_feature 1..20: note = chemically synthesized
  source 1..20: mol_type = other DNA
ggctttgtggatcttcttca

SEQ ID NO: 52677 - DNA, 20 bp, synthetic construct
  misc_feature 1..20: note = chemically synthesized
  source 1..20: mol_type = other DNA
ttgtggatcttcttcagagc

SEQ ID NO: 52678 - DNA, 20 bp, synthetic construct
  misc_feature 1..20: note = chemically synthesized
  source 1..20: mol_type = other DNA
ggatcttcttcagagccagt

SEQ ID NO: 52679 - DNA, 20 bp, synthetic construct
  misc_feature 1..20: note = chemically synthesized
  source 1..20: mol_type = other DNA
cttcttcagagccagtgagt

SEQ ID NO: 52680 - DNA, 20 bp, synthetic construct
  misc_feature 1..20: note = chemically synthesized
  source 1..20: mol_type = other DNA
ccagtgagtcagccttgctg

SEQ ID NO: 52681 - DNA, 20 bp, synthetic construct
  misc_feature 1..20: note = chemically synthesized
  source 1..20: mol_type = other DNA
gtgagtcagccttgctgtgg

SEQ ID NO: 52682 - DNA, 20 bp, synthetic construct
  misc_feature 1..20: note = chemically synthesized
  source 1..20: mol_type = other DNA
gccttgctgtggtggcccac

SEQ ID NO: 52683 - DNA, 20 bp, synthetic construct
  misc_feature 1..20: note = chemically synthesized
  source 1..20: mol_type = other DNA
ccttgctgtggtggcccaca

SEQ ID NO: 52684 - DNA, 20 bp, synthetic construct
  misc_feature 1..20: note = chemically synthesized
  source 1..20: mol_type = other DNA
ttgctgtggtggcccacaag

SEQ ID NO: 52685 - DNA, 20 bp, synthetic construct
  misc_feature 1..20: note = chemically synthesized
  source 1..20: mol_type = other DNA
ctgtggtggcccacaaggag

SEQ ID NO: 52686 - DNA, 20 bp, synthetic construct
  misc_feature 1..20: note = chemically synthesized
  source 1..20: mol_type = other DNA
gtggtggcccacaaggagtg

SEQ ID NO: 52687 - DNA, 20 bp, synthetic construct
  misc_feature 1..20: note = chemically synthesized
  source 1..20: mol_type = other DNA
cccacaaggagtggagatga

SEQ ID NO: 52688 - DNA, 20 bp, synthetic construct
  misc_feature 1..20: note = chemically synthesized
  source 1..20: mol_type = other DNA
cacaaggagtggagatgaca

SEQ ID NO: 52689 - DNA, 20 bp, synthetic construct
  misc_feature 1..20: note = chemically synthesized
  source 1..20: mol_type = other DNA
acaaggagtggagatgacag

SEQ ID NO: 52690 - DNA, 20 bp, synthetic construct
  misc_feature 1..20: note = chemically synthesized
  source 1..20: mol_type = other DNA
caaggagtggagatgacaga

SEQ ID NO: 52691 - DNA, 20 bp, synthetic construct
  misc_feature 1..20: note = chemically synthesized
  source 1..20: mol_type = other DNA
gtggagatgacagagggcct

SEQ ID NO: 52692 - DNA, 20 bp, synthetic construct
  misc_feature 1..20: note = chemically synthesized
  source 1..20: mol_type = other DNA
tggagatgacagagggcctt

SEQ ID NO: 52693 - DNA, 20 bp, synthetic construct
  misc_feature 1..20: note = chemically synthesized
  source 1..20: mol_type = other DNA
ggagatgacagagggccttg

SEQ ID NO: 52694 - DNA, 20 bp, synthetic construct
  misc_feature 1..20: note = chemically synthesized
  source 1..20: mol_type = other DNA
atgacagagggccttgggga

SEQ ID NO: 52695 - DNA, 20 bp, synthetic construct
  misc_feature 1..20: note = chemically synthesized
  source 1..20: mol_type = other DNA
tgacagagggccttggggac

SEQ ID NO: 52696 - DNA, 20 bp, synthetic construct
  misc_feature 1..20: note = chemically synthesized
  source 1..20: mol_type = other DNA
gacagagggccttggggaca

SEQ ID NO: 52697 - DNA, 20 bp, synthetic construct
  misc_feature 1..20: note = chemically synthesized
  source 1..20: mol_type = other DNA
gggccttggggacagggcaa

SEQ ID NO: 52698 - DNA, 20 bp, synthetic construct
  misc_feature 1..20: note = chemically synthesized
  source 1..20: mol_type = other DNA
cagggcaaaagctcatgtga

SEQ ID NO: 52699 - DNA, 20 bp, synthetic construct
  misc_feature 1..20: note = chemically synthesized
  source 1..20: mol_type = other DNA
agggcaaaagctcatgtgat

SEQ ID NO: 52700 - DNA, 20 bp, synthetic construct
  misc_feature 1..20: note = chemically synthesized
  source 1..20: mol_type = other DNA
gggcaaaagctcatgtgata

SEQ ID NO: 52701 - DNA, 20 bp, synthetic construct
  misc_feature 1..20: note = chemically synthesized
  source 1..20: mol_type = other DNA
atgctgtctctgcaaccaca

SEQ ID NO: 52702 - DNA, 20 bp, synthetic construct
  misc_feature 1..20: note = chemically synthesized
  source 1..20: mol_type = other DNA
tgcaaccacatggattttaa

SEQ ID NO: 52703 - DNA, 20 bp, synthetic construct
  misc_feature 1..20: note = chemically synthesized
  source 1..20: mol_type = other DNA
tggattttaatagttaccca

SEQ ID NO: 52704 - DNA, 20 bp, synthetic construct
  misc_feature 1..20: note = chemically synthesized
  source 1..20: mol_type = other DNA
ttttaatagttacccatggc

SEQ ID NO: 52705 - DNA, 20 bp, synthetic construct
  misc_feature 1..20: note = chemically synthesized
  source 1..20: mol_type = other DNA
tagttacccatggctggctt

SEQ ID NO: 52706 - DNA, 20 bp, synthetic construct
  misc_feature 1..20: note = chemically synthesized
  source 1..20: mol_type = other DNA
gcttcagctttttttgtgaa

SEQ ID NO: 52707 - DNA, 20 bp, synthetic construct
  misc_feature 1..20: note = chemically synthesized
  source 1..20: mol_type = other DNA
tcagctttttttgtgaatgg

SEQ ID NO: 52708 - DNA, 20 bp, synthetic construct
  misc_feature 1..20: note = chemically synthesized
  source 1..20: mol_type = other DNA
ttttgtgaatggcagccaaa

SEQ ID NO: 52709 - DNA, 20 bp, synthetic construct
  misc_feature 1..20: note = chemically synthesized
  source 1..20: mol_type = other DNA
tgaatggcagccaaaaagtg

SEQ ID NO: 52710 - DNA, 20 bp, synthetic construct
  misc_feature 1..20: note = chemically synthesized
  source 1..20: mol_type = other DNA
gccaaaaagtgtggtgaaaa

SEQ ID NO: 52711 - DNA, 20 bp, synthetic construct
  misc_feature 1..20: note = chemically synthesized
  source 1..20: mol_type = other DNA
caaaaagtgtggtgaaaatg

SEQ ID NO: 52712 - DNA, 20 bp, synthetic construct
  misc_feature 1..20: note = chemically synthesized
  source 1..20: mol_type = other DNA
aaaaagtgtggtgaaaatgg

SEQ ID NO: 52713 - DNA, 20 bp, synthetic construct
  misc_feature 1..20: note = chemically synthesized
  source 1..20: mol_type = other DNA
aaaagtgtggtgaaaatgga

SEQ ID NO: 52714 - DNA, 20 bp, synthetic construct
  misc_feature 1..20: note = chemically synthesized
  source 1..20: mol_type = other DNA
gtgtggtgaaaatggaggga

SEQ ID NO: 52715 - DNA, 20 bp, synthetic construct
  misc_feature 1..20: note = chemically synthesized
  source 1..20: mol_type = other DNA
gtgaaaatggagggatagtt

SEQ ID NO: 52716 - DNA, 20 bp, synthetic construct
  misc_feature 1..20: note = chemically synthesized
  source 1..20: mol_type = other DNA
aaaatggagggatagttcag

SEQ ID NO: 52717 - DNA, 20 bp, synthetic construct
  misc_feature 1..20: note = chemically synthesized
  source 1..20: mol_type = other DNA
aatggagggatagttcagtg

SEQ ID NO: 52718 - DNA, 20 bp, synthetic construct
  misc_feature 1..20: note = chemically synthesized
  source 1..20: mol_type = other DNA
gagggatagttcagtggaga

SEQ ID NO: 52719 - DNA, 20 bp, synthetic construct
  misc_feature 1..20: note = chemically synthesized
  source 1..20: mol_type = other DNA
gggatagttcagtggagaca

SEQ ID NO: 52720 - DNA, 20 bp, synthetic construct
  misc_feature 1..20: note = chemically synthesized
  source 1..20: mol_type = other DNA
ggatagttcagtggagacag

SEQ ID NO: 52721 - DNA, 20 bp, synthetic construct
  misc_feature 1..20: note = chemically synthesized
  source 1..20: mol_type = other DNA
gatagttcagtggagacaga

SEQ ID NO: 52722 - DNA, 20 bp, synthetic construct
  misc_feature 1..20: note = chemically synthesized
  source 1..20: mol_type = other DNA
atagttcagtggagacagag

SEQ ID NO: 52723 - DNA, 20 bp, synthetic construct
  misc_feature 1..20: note = chemically synthesized
  source 1..20: mol_type = other DNA
agttcagtggagacagaggg

SEQ ID NO: 52724 - DNA, 20 bp, synthetic construct
  misc_feature 1..20: note = chemically synthesized
  source 1..20: mol_type = other DNA
aggggagactgttgaatttg

SEQ ID NO: 52725 - DNA, 20 bp, synthetic construct
  misc_feature 1..20: note = chemically synthesized
  source 1..20: mol_type = other DNA
gggagactgttgaatttgtg

SEQ ID NO: 52726 - DNA, 20 bp, synthetic construct
  misc_feature 1..20: note = chemically synthesized
  source 1..20: mol_type = other DNA
tgttgaatttgtggagtttt

SEQ ID NO: 52727 - DNA, 20 bp, synthetic construct
  misc_feature 1..20: note = chemically synthesized
  source 1..20: mol_type = other DNA
agtttttagttcttcctaaa

SEQ ID NO: 52728 - DNA, 20 bp, synthetic construct
  misc_feature 1..20: note = chemically synthesized
  source 1..20: mol_type = other DNA
tttttagttcttcctaaaca

SEQ ID NO: 52729 - DNA, 20 bp, synthetic construct
  misc_feature 1..20: note = chemically synthesized
  source 1..20: mol_type = other DNA
tttagttcttcctaaacaga

SEQ ID NO: 52730 - DNA, 20 bp, synthetic construct
  misc_feature 1..20: note = chemically synthesized
  source 1..20: mol_type = other DNA
tcttcctaaacagagagcaa

SEQ ID NO: 52731 - DNA, 20 bp, synthetic construct
  misc_feature 1..20: note = chemically synthesized
  source 1..20: mol_type = other DNA
ctaaacagagagcaacagac

SEQ ID NO: 52732 - DNA, 20 bp, synthetic construct
  misc_feature 1..20: note = chemically synthesized
  source 1..20: mol_type = other DNA
aaacagagagcaacagacaa

SEQ ID NO: 52733 - DNA, 20 bp, synthetic construct
  misc_feature 1..20: note = chemically synthesized
  source 1..20: mol_type = other DNA
agagcaacagacaagagtta

SEQ ID NO: 52734 - DNA, 20 bp, synthetic construct
  misc_feature 1..20: note = chemically synthesized
  source 1..20: mol_type = other DNA
gttaatttaccctcaactac

SEQ ID NO: 52735 - DNA, 20 bp, synthetic construct
  misc_feature 1..20: note = chemically synthesized
  source 1..20: mol_type = other DNA
tttaccctcaactactggcc

SEQ ID NO: 52736 - DNA, 20 bp, synthetic construct
  misc_feature 1..20: note = chemically synthesized
  source 1..20: mol_type = other DNA
accctcaactactggccaag

SEQ ID NO: 52737 - DNA, 20 bp, synthetic construct
  misc_feature 1..20: note = chemically synthesized
  source 1..20: mol_type = other DNA
ccctcaactactggccaaga

SEQ ID NO: 52738 - DNA, 20 bp, synthetic construct
  misc_feature 1..20: note = chemically synthesized
  source 1..20: mol_type = other DNA
cctcaactactggccaagaa

SEQ ID NO: 52739 - DNA, 20 bp, synthetic construct
  misc_feature 1..20: note = chemically synthesized
  source 1..20: mol_type = other DNA
ctcaactactggccaagaag

SEQ ID NO: 52740 - DNA, 20 bp, synthetic construct
  misc_feature 1..20: note = chemically synthesized
  source 1..20: mol_type = other DNA
ggccaagaaggggtgtaact

SEQ ID NO: 52741 - DNA, 20 bp, synthetic construct
  misc_feature 1..20: note = chemically synthesized
  source 1..20: mol_type = other DNA
gttttcttcttttgtgccct

SEQ ID NO: 52742 - DNA, 20 bp, synthetic construct
  misc_feature 1..20: note = chemically synthesized
  source 1..20: mol_type = other DNA
ttcttcttttgtgccctgag

SEQ ID NO: 52743 - DNA, 20 bp, synthetic construct
  misc_feature 1..20: note = chemically synthesized
  source 1..20: mol_type = other DNA
ttcttttgtgccctgagtag

SEQ ID NO: 52744 - DNA, 20 bp, synthetic construct
  misc_feature 1..20: note = chemically synthesized
  source 1..20: mol_type = other DNA
tgtgccctgagtagcagacc

SEQ ID NO: 52745 - DNA, 20 bp, synthetic construct
  misc_feature 1..20: note = chemically synthesized
  source 1..20: mol_type = other DNA
tgccctgagtagcagaccca

SEQ ID NO: 52746 - DNA, 20 bp, synthetic construct
  misc_feature 1..20: note = chemically synthesized
  source 1..20: mol_type = other DNA
tgagtagcagacccagagtc

SEQ ID NO: 52747 - DNA, 20 bp, synthetic construct
  misc_feature 1..20: note = chemically synthesized
  source 1..20: mol_type = other DNA
agtagcagacccagagtctg

SEQ ID NO: 52748 - DNA, 20 bp, synthetic construct
  misc_feature 1..20: note = chemically synthesized
  source 1..20: mol_type = other DNA
agacccagagtctggagacc

SEQ ID NO: 52749 - DNA, 20 bp, synthetic construct
  misc_feature 1..20: note = chemically synthesized
  source 1..20: mol_type = other DNA
gagtctggagacccagattc

SEQ ID NO: 52750 - DNA, 20 bp, synthetic construct
  misc_feature 1..20: note = chemically synthesized
  source 1..20: mol_type = other DNA
agtctggagacccagattct

SEQ ID NO: 52751 - DNA, 20 bp, synthetic construct
  misc_feature 1..20: note = chemically synthesized
  source 1..20: mol_type = other DNA
ggagacccagattctaggcc

SEQ ID NO: 52752 - DNA, 20 bp, synthetic construct
  misc_feature 1..20: note = chemically synthesized
  source 1..20: mol_type = other DNA
cccagattctaggcctggct

SEQ ID NO: 52753 - DNA, 20 bp, synthetic construct
  misc_feature 1..20: note = chemically synthesized
  source 1..20: mol_type = other DNA
ggcctggcttggccaacgac

SEQ ID NO: 52754 - DNA, 20 bp, synthetic construct
  misc_feature 1..20: note = chemically synthesized
  source 1..20: mol_type = other DNA
ctggcttggccaacgacaag

SEQ ID NO: 52755 - DNA, 20 bp, synthetic construct
  misc_feature 1..20: note = chemically synthesized
  source 1..20: mol_type = other DNA
tggcttggccaacgacaagc

SEQ ID NO: 52756 - DNA, 20 bp, synthetic construct
  misc_feature 1..20: note = chemically synthesized
  source 1..20: mol_type = other DNA
ggcttggccaacgacaagca

SEQ ID NO: 52757 - DNA, 20 bp, synthetic construct
  misc_feature 1..20: note = chemically synthesized
  source 1..20: mol_type = other DNA
aacgacaagcagggtgacct

SEQ ID NO: 52758 - DNA, 20 bp, synthetic construct
  misc_feature 1..20: note = chemically synthesized
  source 1..20: mol_type = other DNA
acgacaagcagggtgacctt

SEQ ID NO: 52759 - DNA, 20 bp, synthetic construct
  misc_feature 1..20: note = chemically synthesized
  source 1..20: mol_type = other DNA
ccttgggttaaaaaaaaaaa

SEQ ID NO: 52760 - DNA, 20 bp, synthetic construct
  misc_feature 1..20: note = chemically synthesized
  source 1..20: mol_type = other DNA
cttgggttaaaaaaaaaaaa

SEQ ID NO: 52761 - DNA, 20 bp, synthetic construct
  misc_feature 1..20: note = chemically synthesized
  source 1..20: mol_type = other DNA
aaaaaaaggcatcattctct

SEQ ID NO: 52762 - DNA, 20 bp, synthetic construct
  misc_feature 1..20: note = chemically synthesized
  source 1..20: mol_type = other DNA
tctcactccctcttctcaaa

SEQ ID NO: 52763 - DNA, 20 bp, synthetic construct
  misc_feature 1..20: note = chemically synthesized
  source 1..20: mol_type = other DNA
actccctcttctcaaaaaga

SEQ ID NO: 52764 - DNA, 20 bp, synthetic construct
  misc_feature 1..20: note = chemically synthesized
  source 1..20: mol_type = other DNA
gatggcaattcctcccccgc

SEQ ID NO: 52765 - DNA, 20 bp, synthetic construct
  misc_feature 1..20: note = chemically synthesized
  source 1..20: mol_type = other DNA
cctcccccgctggttttcca

SEQ ID NO: 52766 - DNA, 20 bp, synthetic construct
  misc_feature 1..20: note = chemically synthesized
  source 1..20: mol_type = other DNA
cccgctggttttccatagtt

SEQ ID NO: 52767 - DNA, 20 bp, synthetic construct
  misc_feature 1..20: note = chemically synthesized
  source 1..20: mol_type = other DNA
ccgctggttttccatagttg

SEQ ID NO: 52768 - DNA, 20 bp, synthetic construct
  misc_feature 1..20: note = chemically synthesized
  source 1..20: mol_type = other DNA
ctggttttccatagttgagg

SEQ ID NO: 52769 - DNA, 20 bp, synthetic construct
  misc_feature 1..20: note = chemically synthesized
  source 1..20: mol_type = other DNA
ttttccatagttgaggtagc

SEQ ID NO: 52770 - DNA, 20 bp, synthetic construct
  misc_feature 1..20: note = chemically synthesized
  source 1..20: mol_type = other DNA
gaggtagcaagccaatgtgt

SEQ ID NO: 52771 - DNA, 20 bp, synthetic construct
  misc_feature 1..20: note = chemically synthesized
  source 1..20: mol_type = other DNA
aggtagcaagccaatgtgtt

SEQ ID NO: 52772 - DNA, 20 bp, synthetic construct
  misc_feature 1..20: note = chemically synthesized
  source 1..20: mol_type = other DNA
ggtagcaagccaatgtgttg

SEQ ID NO: 52773 - DNA, 20 bp, synthetic construct
  misc_feature 1..20: note = chemically synthesized
  source 1..20: mol_type = other DNA
agcaagccaatgtgttgggg

SEQ ID NO: 52774 - DNA, 20 bp, synthetic construct
  misc_feature 1..20: note = chemically synthesized
  source 1..20: mol_type = other DNA
gaaaacgccctgtgcatact

SEQ ID NO: 52775 - DNA, 20 bp, synthetic construct
  misc_feature 1..20: note = chemically synthesized
  source 1..20: mol_type = other DNA
aaaacgccctgtgcatactg

SEQ ID NO: 52776 - DNA, 20 bp, synthetic construct
  misc_feature 1..20: note = chemically synthesized
  source 1..20: mol_type = other DNA
atactgaggcttatgttcca

SEQ ID NO: 52777 - DNA, 20 bp, synthetic construct
  misc_feature 1..20: note = chemically synthesized
  source 1..20: mol_type = other DNA
tactgaggcttatgttccat

SEQ ID NO: 52778 - DNA, 20 bp, synthetic construct
  misc_feature 1..20: note = chemically synthesized
  source 1..20: mol_type = other DNA
actgaggcttatgttccatg

SEQ ID NO: 52779 - DNA, 20 bp, synthetic construct
  misc_feature 1..20: note = chemically synthesized
  source 1..20: mol_type = other DNA
ctgaggcttatgttccatgg

SEQ ID NO: 52780 - DNA, 20 bp, synthetic construct
  misc_feature 1..20: note = chemically synthesized
  source 1..20: mol_type = other DNA
tgaggcttatgttccatggg

SEQ ID NO: 52781 - DNA, 20 bp, synthetic construct
  misc_feature 1..20: note = chemically synthesized
  source 1..20: mol_type = other DNA
gcttatgttccatggggggc

SEQ ID NO: 52782 - DNA, 20 bp, synthetic construct
  misc_feature 1..20: note = chemically synthesized
  source 1..20: mol_type = other DNA
cttatgttccatggggggcc

SEQ ID NO: 52783 - DNA, 20 bp, synthetic construct
  misc_feature 1..20: note = chemically synthesized
  source 1..20: mol_type = other DNA
ttatgttccatggggggcca

SEQ ID NO: 52784 - DNA, 20 bp, synthetic construct
  misc_feature 1..20: note = chemically synthesized
  source 1..20: mol_type = other DNA
tatgttccatggggggccag

SEQ ID NO: 52785 - DNA, 20 bp, synthetic construct
  misc_feature 1..20: note = chemically synthesized
  source 1..20: mol_type = other DNA
ttccatggggggccaggggc

SEQ ID NO: 52786 - DNA, 20 bp, synthetic construct
  misc_feature 1..20: note = chemically synthesized
  source 1..20: mol_type = other DNA
tccatggggggccaggggcc

SEQ ID NO: 52787 - DNA, 20 bp, synthetic construct
  misc_feature 1..20: note = chemically synthesized
  source 1..20: mol_type = other DNA
tggggggccaggggccagga

SEQ ID NO: 52788 - DNA, 20 bp, synthetic construct
  misc_feature 1..20: note = chemically synthesized
  source 1..20: mol_type = other DNA
gccaggggccaggacagtga

SEQ ID NO: 52789 - DNA, 20 bp, synthetic construct
  misc_feature 1..20: note = chemically synthesized
  source 1..20: mol_type = other DNA
ccaggggccaggacagtgat

SEQ ID NO: 52790 - DNA, 20 bp, synthetic construct
  misc_feature 1..20: note = chemically synthesized
  source 1..20: mol_type = other DNA
aggggccaggacagtgatgg

SEQ ID NO: 52791 - DNA, 20 bp, synthetic construct
  misc_feature 1..20: note = chemically synthesized
  source 1..20: mol_type = other DNA
ggggccaggacagtgatggg

SEQ ID NO: 52792 - DNA, 20 bp, synthetic construct
  misc_feature 1..20: note = chemically synthesized
  source 1..20: mol_type = other DNA
ggccaggacagtgatgggag

SEQ ID NO: 52793 - DNA, 20 bp, synthetic construct
  misc_feature 1..20: note = chemically synthesized
  source 1..20: mol_type = other DNA
ggacagtgatgggaggagac

SEQ ID NO: 52794 - DNA, 20 bp, synthetic construct
  misc_feature 1..20: note = chemically synthesized
  source 1..20: mol_type = other DNA
gacagtgatgggaggagaca

SEQ ID NO: 52795 - DNA, 20 bp, synthetic construct
  misc_feature 1..20: note = chemically synthesized
  source 1..20: mol_type = other DNA
agtgatgggaggagacaagg

SEQ ID NO: 52796 - DNA, 20 bp, synthetic construct
  misc_feature 1..20: note = chemically synthesized
  source 1..20: mol_type = other DNA
gggaggagacaaggcggata

SEQ ID NO: 52797 - DNA, 20 bp, synthetic construct
  misc_feature 1..20: note = chemically synthesized
  source 1..20: mol_type = other DNA
gaggagacaaggcggataca

SEQ ID NO: 52798 - DNA, 20 bp, synthetic construct
  misc_feature 1..20: note = chemically synthesized
  source 1..20: mol_type = other DNA
aggagacaaggcggatacag

SEQ ID NO: 52799 - DNA, 20 bp, synthetic construct
  misc_feature 1..20: note = chemically synthesized
  source 1..20: mol_type = other DNA
gagacaaggcggatacagag

SEQ ID NO: 52800 - DNA, 20 bp, synthetic construct
  misc_feature 1..20: note = chemically synthesized
  source 1..20: mol_type = other DNA
acaaggcggatacagaggag

SEQ ID NO: 52801 - DNA, 20 bp, synthetic construct
  misc_feature 1..20: note = chemically synthesized
  source 1..20: mol_type = other DNA
gaggagcagattgtcatctc

SEQ ID NO: 52802 - DNA, 20 bp, synthetic construct
  misc_feature 1..20: note = chemically synthesized
  source 1..20: mol_type = other DNA
agcagattgtcatctccagc

SEQ ID NO: 52803 - DNA, 20 bp, synthetic construct
  misc_feature 1..20: note = chemically synthesized
  source 1..20: mol_type = other DNA
gcagattgtcatctccagct

SEQ ID NO: 52804 - DNA, 20 bp, synthetic construct
  misc_feature 1..20: note = chemically synthesized
  source 1..20: mol_type = other DNA
agattgtcatctccagctgg

SEQ ID NO: 52805 - DNA, 20 bp, synthetic construct
  misc_feature 1..20: note = chemically synthesized
  source 1..20: mol_type = other DNA
gattgtcatctccagctggg

SEQ ID NO: 52806 - DNA, 20 bp, synthetic construct
  misc_feature 1..20: note = chemically synthesized
  source 1..20: mol_type = other DNA
catctccagctgggaggtga

SEQ ID NO: 52807 - DNA, 20 bp, synthetic construct
  misc_feature 1..20: note = chemically synthesized
  source 1..20: mol_type = other DNA
tggccatgcctgcacccctc

SEQ ID NO: 52808 - DNA, 20 bp, synthetic construct
  misc_feature 1..20: note = chemically synthesized
  source 1..20: mol_type = other DNA
catgcctgcacccctctggc

SEQ ID NO: 52809 - DNA, 20 bp, synthetic construct
  misc_feature 1..20: note = chemically synthesized
  source 1..20: mol_type = other DNA
gcctgcacccctctggccag

SEQ ID NO: 52810 - DNA, 20 bp, synthetic construct
  misc_feature 1..20: note = chemically synthesized
  source 1..20: mol_type = other DNA
ctgcacccctctggccagca

SEQ ID NO: 52811 - DNA, 20 bp, synthetic construct
  misc_feature 1..20: note = chemically synthesized
  source 1..20: mol_type = other DNA
tgcacccctctggccagcag

SEQ ID NO: 52812 - DNA, 20 bp, synthetic construct
  misc_feature 1..20: note = chemically synthesized
  source 1..20: mol_type = other DNA
gcacccctctggccagcaga

SEQ ID NO: 52813 - DNA, 20 bp, synthetic construct
  misc_feature 1..20: note = chemically synthesized
  source 1..20: mol_type = other DNA
cccctctggccagcagaggg

SEQ ID NO: 52814 - DNA, 20 bp, synthetic construct
  misc_feature 1..20: note = chemically synthesized
  source 1..20: mol_type = other DNA
tctggccagcagagggtggt

SEQ ID NO: 52815 - DNA, 20 bp, synthetic construct
  misc_feature 1..20: note = chemically synthesized
  source 1..20: mol_type = other DNA
ggccagcagagggtggtcag

SEQ ID NO: 52816 - DNA, 20 bp, synthetic construct
  misc_feature 1..20: note = chemically synthesized
  source 1..20: mol_type = other DNA
gccagcagagggtggtcagt

SEQ ID NO: 52817 - DNA, 20 bp, synthetic construct
  misc_feature 1..20: note = chemically synthesized
  source 1..20: mol_type = other DNA
gagggtggtcagtaggaaac

SEQ ID NO: 52818 - DNA, 20 bp, synthetic construct
  misc_feature 1..20: note = chemically synthesized
  source 1..20: mol_type = other DNA
agggtggtcagtaggaaact

SEQ ID NO: 52819 - DNA, 20 bp, synthetic construct
  misc_feature 1..20: note = chemically synthesized
  source 1..20: mol_type = other DNA
ggtggtcagtaggaaactgg

SEQ ID NO: 52820 - DNA, 20 bp, synthetic construct
  misc_feature 1..20: note = chemically synthesized
  source 1..20: mol_type = other DNA
gtggtcagtaggaaactggg

SEQ ID NO: 52821 - DNA, 20 bp, synthetic construct
  misc_feature 1..20: note = chemically synthesized
  source 1..20: mol_type = other DNA
gtaggaaactgggaggccat

SEQ ID NO: 52822 - DNA, 20 bp, synthetic construct
  misc_feature 1..20: note = chemically synthesized
  source 1..20: mol_type = other DNA
taggaaactgggaggccatt

SEQ ID NO: 52823 - DNA, 20 bp, synthetic construct
  misc_feature 1..20: note = chemically synthesized
  source 1..20: mol_type = other DNA
aggaaactgggaggccatta

SEQ ID NO: 52824 - DNA, 20 bp, synthetic construct
  misc_feature 1..20: note = chemically synthesized
  source 1..20: mol_type = other DNA
ccattagggcaaccttctat

SEQ ID NO: 52825 - DNA, 20 bp, synthetic construct
  misc_feature 1..20: note = chemically synthesized
  source 1..20: mol_type = other DNA
agggcaaccttctattggct

SEQ ID NO: 52826 - DNA, 20 bp, synthetic construct
  misc_feature 1..20: note = chemically synthesized
  source 1..20: mol_type = other DNA
accttctattggctcagact

SEQ ID NO: 52827 - DNA, 20 bp, synthetic construct
  misc_feature 1..20: note = chemically synthesized
  source 1..20: mol_type = other DNA
attggctcagactcagaatg

SEQ ID NO: 52828 - DNA, 20 bp, synthetic construct
  misc_feature 1..20: note = chemically synthesized
  source 1..20: mol_type = other DNA
ggctcagactcagaatgcag

SEQ ID NO: 52829 - DNA, 20 bp, synthetic construct
  misc_feature 1..20: note = chemically synthesized
  source 1..20: mol_type = other DNA
gcagtagaacttgtgccctg

SEQ ID NO: 52830 - DNA, 20 bp, synthetic construct
  misc_feature 1..20: note = chemically synthesized
  source 1..20: mol_type = other DNA
cttgtgccctgtagtgttca

SEQ ID NO: 52831 - DNA, 20 bp, synthetic construct
  misc_feature 1..20: note = chemically synthesized
  source 1..20: mol_type = other DNA
tgccctgtagtgttcatgga

SEQ ID NO: 52832 - DNA, 20 bp, synthetic construct
  misc_feature 1..20: note = chemically synthesized
  source 1..20: mol_type = other DNA
gccctgtagtgttcatggac

SEQ ID NO: 52833 - DNA, 20 bp, synthetic construct
  misc_feature 1..20: note = chemically synthesized
  source 1..20: mol_type = other DNA
cctgtagtgttcatggacag

SEQ ID NO: 52834 - DNA, 20 bp, synthetic construct
  misc_feature 1..20: note = chemically synthesized
  source 1..20: mol_type = other DNA
tagtgttcatggacaggagt

SEQ ID NO: 52835 - DNA, 20 bp, synthetic construct
  misc_feature 1..20: note = chemically synthesized
  source 1..20: mol_type = other DNA
gtgttcatggacaggagtga

SEQ ID NO: 52836 - DNA, 20 bp, synthetic construct
  misc_feature 1..20: note = chemically synthesized
  source 1..20: mol_type = other DNA
tgttcatggacaggagtgag

SEQ ID NO: 52837 - DNA, 20 bp, synthetic construct
  misc_feature 1..20: note = chemically synthesized
  source 1..20: mol_type = other DNA
ttcatggacaggagtgagag

SEQ ID NO: 52838 - DNA, 20 bp, synthetic construct
  misc_feature 1..20: note = chemically synthesized
  source 1..20: mol_type = other DNA
tcatggacaggagtgagagg

SEQ ID NO: 52839 - DNA, 20 bp, synthetic construct
  misc_feature 1..20: note = chemically synthesized
  source 1..20: mol_type = other DNA
ggacaggagtgagaggagga

SEQ ID NO: 52840 - DNA, 20 bp, synthetic construct
  misc_feature 1..20: note = chemically synthesized
  source 1..20: mol_type = other DNA
gacaggagtgagaggaggac

SEQ ID NO: 52841 - DNA, 20 bp, synthetic construct
  misc_feature 1..20: note = chemically synthesized
  source 1..20: mol_type = other DNA
agtgagaggaggacaggact

SEQ ID NO: 52842 - DNA, 20 bp, synthetic construct
  misc_feature 1..20: note = chemically synthesized
  source 1..20: mol_type = other DNA
gtgagaggaggacaggactg

SEQ ID NO: 52843 - DNA, 20 bp, synthetic construct
  misc_feature 1..20: note = chemically synthesized
  source 1..20: mol_type = other DNA
tgagaggaggacaggactga

SEQ ID NO: 52844 - DNA, 20 bp, synthetic construct
  misc_feature 1..20: note = chemically synthesized
  source 1..20: mol_type = other DNA
gagaggaggacaggactgag

SEQ ID NO: 52845 - DNA, 20 bp, synthetic construct
  misc_feature 1..20: note = chemically synthesized
  source 1..20: mol_type = other DNA
aggacaggactgaggggatg

SEQ ID NO: 52846 - DNA, 20 bp, synthetic construct
  misc_feature 1..20: note = chemically synthesized
  source 1..20: mol_type = other DNA
actgaggggatgtggctgtc

SEQ ID NO: 52847 - DNA, 20 bp, synthetic construct
  misc_feature 1..20: note = chemically synthesized
  source 1..20: mol_type = other DNA
ctgaggggatgtggctgtca

SEQ ID NO: 52848 - DNA, 20 bp, synthetic construct
  misc_feature 1..20: note = chemically synthesized
  source 1..20: mol_type = other DNA
tgtggctgtcaaggcctttc

SEQ ID NO: 52849 - DNA, 20 bp, synthetic construct
  misc_feature 1..20: note = chemically synthesized
  source 1..20: mol_type = other DNA
gtggctgtcaaggcctttct

SEQ ID NO: 52850 - DNA, 20 bp, synthetic construct
  misc_feature 1..20: note = chemically synthesized
  source 1..20: mol_type = other DNA
tggctgtcaaggcctttcta

SEQ ID NO: 52851 - DNA, 20 bp, synthetic construct
  misc_feature 1..20: note = chemically synthesized
  source 1..20: mol_type = other DNA
ggctgtcaaggcctttctag

SEQ ID NO: 52852 - DNA, 20 bp, synthetic construct
  misc_feature 1..20: note = chemically synthesized
  source 1..20: mol_type = other DNA
gggcgatgctgtctctccct

SEQ ID NO: 52853 - DNA, 20 bp, synthetic construct
  misc_feature 1..20: note = chemically synthesized
  source 1..20: mol_type = other DNA
atgctgtctctccctcagca

SEQ ID NO: 52854 - DNA, 20 bp, synthetic construct
  misc_feature 1..20: note = chemically synthesized
  source 1..20: mol_type = other DNA
tgctgtctctccctcagcat

SEQ ID NO: 52855 - DNA, 20 bp, synthetic construct
  misc_feature 1..20: note = chemically synthesized
  source 1..20: mol_type = other DNA
gctgtctctccctcagcata

SEQ ID NO: 52856 - DNA, 20 bp, synthetic construct
  misc_feature 1..20: note = chemically synthesized
  source 1..20: mol_type = other DNA
tgtctctccctcagcatagg

SEQ ID NO: 52857 - DNA, 20 bp, synthetic construct
  misc_feature 1..20: note = chemically synthesized
  source 1..20: mol_type = other DNA
ctctccctcagcatagggag

SEQ ID NO: 52858 - DNA, 20 bp, synthetic construct
  misc_feature 1..20: note = chemically synthesized
  source 1..20: mol_type = other DNA
tctccctcagcatagggagt

SEQ ID NO: 52859 - DNA, 20 bp, synthetic construct
  misc_feature 1..20: note = chemically synthesized
  source 1..20: mol_type = other DNA
ggagtgggcccttccacctc

SEQ ID NO: 52860 - DNA, 20 bp, synthetic construct
  misc_feature 1..20: note = chemically synthesized
  source 1..20: mol_type = other DNA
cacctctggcctctctcccc

SEQ ID NO: 52861 - DNA, 20 bp, synthetic construct
  misc_feature 1..20: note = chemically synthesized
  source 1..20: mol_type = other DNA
acctctggcctctctccccc

SEQ ID NO: 52862 - DNA, 20 bp, synthetic construct
  misc_feature 1..20: note = chemically synthesized
  source 1..20: mol_type = other DNA
cctctggcctctctccccca

SEQ ID NO: 52863 - DNA, 20 bp, synthetic construct
  misc_feature 1..20: note = chemically synthesized
  source 1..20: mol_type = other DNA
ctctcccccagggctgtgtc

SEQ ID NO: 52864 - DNA, 20 bp, synthetic construct
  misc_feature 1..20: note = chemically synthesized
  source 1..20: mol_type = other DNA
gctgtccctgataaaactgt

SEQ ID NO: 52865 - DNA, 20 bp, synthetic construct
  misc_feature 1..20: note = chemically synthesized
  source 1..20: mol_type = other DNA
tccctgataaaactgtgaga

SEQ ID NO: 52866 - DNA, 20 bp, synthetic construct
  misc_feature 1..20: note = chemically synthesized
  source 1..20: mol_type = other DNA
taaaactgtgagatggtgtg

SEQ ID NO: 52867 - DNA, 20 bp, synthetic construct
  misc_feature 1..20: note = chemically synthesized
  source 1..20: mol_type = other DNA
tgtgagatggtgtgcagtgt

SEQ ID NO: 52868 - DNA, 20 bp, synthetic construct
  misc_feature 1..20: note = chemically synthesized
  source 1..20: mol_type = other DNA
tgagatggtgtgcagtgtcg

SEQ ID NO: 52869 - DNA, 20 bp, synthetic construct
  misc_feature 1..20: note = chemically synthesized
  source 1..20: mol_type = other DNA
ggtgtgcagtgtcggagcat

SEQ ID NO: 52870 - DNA, 20 bp, synthetic construct
  misc_feature 1..20: note = chemically synthesized
  source 1..20: mol_type = other DNA
gtgtgcagtgtcggagcatg

SEQ ID NO: 52871 - DNA, 20 bp, synthetic construct
  misc_feature 1..20: note = chemically synthesized
  source 1..20: mol_type = other DNA
tgtcggagcatgaggccact

SEQ ID NO: 52872 - DNA, 20 bp, synthetic construct
  misc_feature 1..20: note = chemically synthesized
  source 1..20: mol_type = other DNA
agcatgaggccactaagtgc

SEQ ID NO: 52873 - DNA, 20 bp, synthetic construct
  misc_feature 1..20: note = chemically synthesized
  source 1..20: mol_type = other DNA
catgaggccactaagtgcca

SEQ ID NO: 52874 - DNA, 20 bp, synthetic construct
  misc_feature 1..20: note = chemically synthesized
  source 1..20: mol_type = other DNA
agtttccgcgaccatatgaa

SEQ ID NO: 52875 - DNA, 20 bp, synthetic construct
  misc_feature 1..20: note = chemically synthesized
  source 1..20: mol_type = other DNA
aaaagcgtcattccatccga

SEQ ID NO: 52876 - DNA, 20 bp, synthetic construct
  misc_feature 1..20: note = chemically synthesized
  source 1..20: mol_type = other DNA
gtcattccatccgatggtcc

SEQ ID NO: 52877 - DNA, 20 bp, synthetic construct
  misc_feature 1..20: note = chemically synthesized
  source 1..20: mol_type = other DNA
gtcccagtgttgcttgtgtg

SEQ ID NO: 52878 - DNA, 20 bp, synthetic construct
  misc_feature 1..20: note = chemically synthesized
  source 1..20: mol_type = other DNA
cagtgttgcttgtgtgaaga

SEQ ID NO: 52879 - DNA, 20 bp, synthetic construct
  misc_feature 1..20: note = chemically synthesized
  source 1..20: mol_type = other DNA
gcctcctaccttgattgcat

SEQ ID NO: 52880 - DNA, 20 bp, synthetic construct
  misc_feature 1..20: note = chemically synthesized
  source 1..20: mol_type = other DNA
cctcctaccttgattgcatc

SEQ ID NO: 52881 - DNA, 20 bp, synthetic construct
  misc_feature 1..20: note = chemically synthesized
  source 1..20: mol_type = other DNA
ctcctaccttgattgcatca

SEQ ID NO: 52882 - DNA, 20 bp, synthetic construct
  misc_feature 1..20: note = chemically synthesized
  source 1..20: mol_type = other DNA
gcaatggccctgatgcaatc

SEQ ID NO: 52883 - DNA, 20 bp, synthetic construct
  misc_feature 1..20: note = chemically synthesized
  source 1..20: mol_type = other DNA
caatggccctgatgcaatca

SEQ ID NO: 52884 - DNA, 20 bp, synthetic construct
  misc_feature 1..20: note = chemically synthesized
  source 1..20: mol_type = other DNA
tggccctgatgcaatcaagg

SEQ ID NO: 52885 - DNA, 20 bp, synthetic construct
  misc_feature 1..20: note = chemically synthesized
  source 1..20: mol_type = other DNA
ggccctgatgcaatcaaggt

SEQ ID NO: 52886 - DNA, 20 bp, synthetic construct
  misc_feature 1..20: note = chemically synthesized
  source 1..20: mol_type = other DNA
ccctgatgcaatcaaggtag

SEQ ID NO: 52887 - DNA, 20 bp, synthetic construct
  misc_feature 1..20: note = chemically synthesized
  source 1..20: mol_type = other DNA
cctgatgcaatcaaggtagg

SEQ ID NO: 52888 - DNA, 20 bp, synthetic construct
  misc_feature 1..20: note = chemically synthesized
  source 1..20: mol_type = other DNA
gtaggaggctttcttcacac

SEQ ID NO: 52889 - DNA, 20 bp, synthetic construct
  misc_feature 1..20: note = chemically synthesized
  source 1..20: mol_type = other DNA
tttcttcacacaagcaacac

SEQ ID NO: 52890 - DNA, 20 bp, synthetic construct
  misc_feature 1..20: note = chemically synthesized
  source 1..20: mol_type = other DNA
ttcttcacacaagcaacact

SEQ ID NO: 52891 - DNA, 20 bp, synthetic construct
  misc_feature 1..20: note = chemically synthesized
  source 1..20: mol_type = other DNA
acaagcaacactgggaccat

SEQ ID NO: 52892 - DNA, 20 bp, synthetic construct
  misc_feature 1..20: note = chemically synthesized
  source 1..20: mol_type = other DNA
gcaacactgggaccatcgga

SEQ ID NO: 52893 - DNA, 20 bp, synthetic construct
  misc_feature 1..20: note = chemically synthesized
  source 1..20: mol_type = other DNA
atggaatgacgcttttcata

SEQ ID NO: 52894 - DNA, 20 bp, synthetic construct
  misc_feature 1..20: note = chemically synthesized
  source 1..20: mol_type = other DNA
tgacgcttttcatatggtcg

SEQ ID NO: 52895 - DNA, 20 bp, synthetic construct
  misc_feature 1..20: note = chemically synthesized
  source 1..20: mol_type = other DNA
tcatatggtcgcggaaactc

SEQ ID NO: 52896 - DNA, 20 bp, synthetic construct
  misc_feature 1..20: note = chemically synthesized
  source 1..20: mol_type = other DNA
gtcgcggaaactctggcact

SEQ ID NO: 52897 - DNA, 20 bp, synthetic construct
  misc_feature 1..20: note = chemically synthesized
  source 1..20: mol_type = other DNA
gcggaaactctggcacttag

SEQ ID NO: 52898 - DNA, 20 bp, synthetic construct
  misc_feature 1..20: note = chemically synthesized
  source 1..20: mol_type = other DNA
cgacactgcacaccatctca

SEQ ID NO: 52899 - DNA, 20 bp, synthetic construct
  misc_feature 1..20: note = chemically synthesized
  source 1..20: mol_type = other DNA
acaccatctcacagttttat

SEQ ID NO: 52900 - DNA, 20 bp, synthetic construct
  misc_feature 1..20: note = chemically synthesized
  source 1..20: mol_type = other DNA
caccatctcacagttttatc

SEQ ID NO: 52901 - DNA, 20 bp, synthetic construct
  misc_feature 1..20: note = chemically synthesized
  source 1..20: mol_type = other DNA
accatctcacagttttatca

SEQ ID NO: 52902 - DNA, 20 bp, synthetic construct
  misc_feature 1..20: note = chemically synthesized
  source 1..20: mol_type = other DNA
tctcacagttttatcaggga

SEQ ID NO: 52903 - DNA, 20 bp, synthetic construct
  misc_feature 1..20: note = chemically synthesized
  source 1..20: mol_type = other DNA
acagttttatcagggacagc

SEQ ID NO: 52904 - DNA, 20 bp, synthetic construct
  misc_feature 1..20: note = chemically synthesized
  source 1..20: mol_type = other DNA
ttatcagggacagccagaca

SEQ ID NO: 52905 - DNA, 20 bp, synthetic construct
  misc_feature 1..20: note = chemically synthesized
  source 1..20: mol_type = other DNA
gggacagccagacacagccc

SEQ ID NO: 52906 - DNA, 20 bp, synthetic construct
  misc_feature 1..20: note = chemically synthesized
  source 1..20: mol_type = other DNA
ggacagccagacacagccct

SEQ ID NO: 52907 - DNA, 20 bp, synthetic construct
  misc_feature 1..20: note = chemically synthesized
  source 1..20: mol_type = other DNA
gacagccagacacagccctg

SEQ ID NO: 52908 - DNA, 20 bp, synthetic construct
  misc_feature 1..20: note = chemically synthesized
  source 1..20: mol_type = other DNA
acagccagacacagccctgg

SEQ ID NO: 52909 - DNA, 20 bp, synthetic construct
  misc_feature 1..20: note = chemically synthesized
  source 1..20: mol_type = other DNA
agccagacacagccctgggg

SEQ ID NO: 52910 - DNA, 20 bp, synthetic construct
  misc_feature 1..20: note = chemically synthesized
  source 1..20: mol_type = other DNA
ccagacacagccctggggga

SEQ ID NO: 52911 - DNA, 20 bp, synthetic construct
  misc_feature 1..20: note = chemically synthesized
  source 1..20: mol_type = other DNA
agacacagccctgggggaga

SEQ ID NO: 52912 - DNA, 20 bp, synthetic construct
  misc_feature 1..20: note = chemically synthesized
  source 1..20: mol_type = other DNA
gacacagccctgggggagag

SEQ ID NO: 52913 - DNA, 20 bp, synthetic construct
  misc_feature 1..20: note = chemically synthesized
  source 1..20: mol_type = other DNA
cagccctgggggagagaggc

SEQ ID NO: 52914 - DNA, 20 bp, synthetic construct
  misc_feature 1..20: note = chemically synthesized
  source 1..20: mol_type = other DNA
gccctgggggagagaggcca

SEQ ID NO: 52915 - DNA, 20 bp, synthetic construct
  misc_feature 1..20: note = chemically synthesized
  source 1..20: mol_type = other DNA
ccctgggggagagaggccag

SEQ ID NO: 52916 - DNA, 20 bp, synthetic construct
  misc_feature 1..20: note = chemically synthesized
  source 1..20: mol_type = other DNA
tgggggagagaggccagagg

SEQ ID NO: 52917 - DNA, 20 bp, synthetic construct
  misc_feature 1..20: note = chemically synthesized
  source 1..20: mol_type = other DNA
gggagagaggccagaggtgg

SEQ ID NO: 52918 - DNA, 20 bp, synthetic construct
  misc_feature 1..20: note = chemically synthesized
  source 1..20: mol_type = other DNA
ggagagaggccagaggtgga

SEQ ID NO: 52919 - DNA, 20 bp, synthetic construct
  misc_feature 1..20: note = chemically synthesized
  source 1..20: mol_type = other DNA
gagagaggccagaggtggaa

SEQ ID NO: 52920 - DNA, 20 bp, synthetic construct
  misc_feature 1..20: note = chemically synthesized
  source 1..20: mol_type = other DNA
aagggcccactccctatgct

SEQ ID NO: 52921 - DNA, 20 bp, synthetic construct
  misc_feature 1..20: note = chemically synthesized
  source 1..20: mol_type = other DNA
agggcccactccctatgctg

SEQ ID NO: 52922 - DNA, 20 bp, synthetic construct
  misc_feature 1..20: note = chemically synthesized
  source 1..20: mol_type = other DNA
gggcccactccctatgctga

SEQ ID NO: 52923 - DNA, 20 bp, synthetic construct
  misc_feature 1..20: note = chemically synthesized
  source 1..20: mol_type = other DNA
gcccactccctatgctgagg

SEQ ID NO: 52924 - DNA, 20 bp, synthetic construct
  misc_feature 1..20: note = chemically synthesized
  source 1..20: mol_type = other DNA
ccactccctatgctgaggga

SEQ ID NO: 52925 - DNA, 20 bp, synthetic construct
  misc_feature 1..20: note = chemically synthesized
  source 1..20: mol_type = other DNA
tccctatgctgagggagaga

SEQ ID NO: 52926 - DNA, 20 bp, synthetic construct
  misc_feature 1..20: note = chemically synthesized
  source 1..20: mol_type = other DNA
gggagagacagcatcgcccc

SEQ ID NO: 52927 - DNA, 20 bp, synthetic construct
  misc_feature 1..20: note = chemically synthesized
  source 1..20: mol_type = other DNA
gagacagcatcgcccctaga

SEQ ID NO: 52928 - DNA, 20 bp, synthetic construct
  misc_feature 1..20: note = chemically synthesized
  source 1..20: mol_type = other DNA
agacagcatcgcccctagaa

SEQ ID NO: 52929 - DNA, 20 bp, synthetic construct
  misc_feature 1..20: note = chemically synthesized
  source 1..20: mol_type = other DNA
cgcccctagaaaggccttga

SEQ ID NO: 52930 - DNA, 20 bp, synthetic construct
  misc_feature 1..20: note = chemically synthesized
  source 1..20: mol_type = other DNA
ccttgacagccacatcccct

SEQ ID NO: 52931 - DNA, 20 bp, synthetic construct
  misc_feature 1..20: note = chemically synthesized
  source 1..20: mol_type = other DNA
actcctgtccatgaacacta

SEQ ID NO: 52932 - DNA, 20 bp, synthetic construct
  misc_feature 1..20: note = chemically synthesized
  source 1..20: mol_type = other DNA
ctcctgtccatgaacactac

SEQ ID NO: 52933 - DNA, 20 bp, synthetic construct
  misc_feature 1..20: note = chemically synthesized
  source 1..20: mol_type = other DNA
tcctgtccatgaacactaca

SEQ ID NO: 52934 - DNA, 20 bp, synthetic construct
  misc_feature 1..20: note = chemically synthesized
  source 1..20: mol_type = other DNA
ccatgaacactacagggcac

SEQ ID NO: 52935 - DNA, 20 bp, synthetic construct
  misc_feature 1..20: note = chemically synthesized
  source 1..20: mol_type = other DNA
cacaagttctactgcattct

SEQ ID NO: 52936 - DNA, 20 bp, synthetic construct
  misc_feature 1..20: note = chemically synthesized
  source 1..20: mol_type = other DNA
ttctactgcattctgagtct

SEQ ID NO: 52937 - DNA, 20 bp, synthetic construct
  misc_feature 1..20: note = chemically synthesized
  source 1..20: mol_type = other DNA
gcattctgagtctgagccaa

SEQ ID NO: 52938 - DNA, 20 bp, synthetic construct
  misc_feature 1..20: note = chemically synthesized
  source 1..20: mol_type = other DNA
ttctgagtctgagccaatag

SEQ ID NO: 52939 - DNA, 20 bp, synthetic construct
  misc_feature 1..20: note = chemically synthesized
  source 1..20: mol_type = other DNA
tctgagtctgagccaataga

SEQ ID NO: 52940 - DNA, 20 bp, synthetic construct
  misc_feature 1..20: note = chemically synthesized
  source 1..20: mol_type = other DNA
ccaatagaaggttgccctaa

SEQ ID NO: 52941 - DNA, 20 bp, synthetic construct
  misc_feature 1..20: note = chemically synthesized
  source 1..20: mol_type = other DNA
aggttgccctaatggcctcc

SEQ ID NO: 52942 - DNA, 20 bp, synthetic construct
  misc_feature 1..20: note = chemically synthesized
  source 1..20: mol_type = other DNA
tcctactgaccaccctctgc

SEQ ID NO: 52943 - DNA, 20 bp, synthetic construct
  misc_feature 1..20: note = chemically synthesized
  source 1..20: mol_type = other DNA
actgaccaccctctgctggc

SEQ ID NO: 52944 - DNA, 20 bp, synthetic construct
  misc_feature 1..20: note = chemically synthesized
  source 1..20: mol_type = other DNA
tgaccaccctctgctggcca

SEQ ID NO: 52945 - DNA, 20 bp, synthetic construct
  misc_feature 1..20: note = chemically synthesized
  source 1..20: mol_type = other DNA
gaccaccctctgctggccag

SEQ ID NO: 52946 - DNA, 20 bp, synthetic construct
  misc_feature 1..20: note = chemically synthesized
  source 1..20: mol_type = other DNA
accaccctctgctggccaga

SEQ ID NO: 52947 - DNA, 20 bp, synthetic construct
  misc_feature 1..20: note = chemically synthesized
  source 1..20: mol_type = other DNA
ccaccctctgctggccagag

SEQ ID NO: 52948 - DNA, 20 bp, synthetic construct
  misc_feature 1..20: note = chemically synthesized
  source 1..20: mol_type = other DNA
ctctgctggccagaggggtg

SEQ ID NO: 52949 - DNA, 20 bp, synthetic construct
  misc_feature 1..20: note = chemically synthesized
  source 1..20: mol_type = other DNA
tctgctggccagaggggtgc

SEQ ID NO: 52950 - DNA, 20 bp, synthetic construct
  misc_feature 1..20: note = chemically synthesized
  source 1..20: mol_type = other DNA
tggccagaggggtgcaggca

SEQ ID NO: 52951 - DNA, 20 bp, synthetic construct
  misc_feature 1..20: note = chemically synthesized
  source 1..20: mol_type = other DNA
caggcatggccatcacctcc

SEQ ID NO: 52952 - DNA, 20 bp, synthetic construct
  misc_feature 1..20: note = chemically synthesized
  source 1..20: mol_type = other DNA
catggccatcacctcccagc

SEQ ID NO: 52953 - DNA, 20 bp, synthetic construct
  misc_feature 1..20: note = chemically synthesized
  source 1..20: mol_type = other DNA
tggccatcacctcccagctg

SEQ ID NO: 52954 - DNA, 20 bp, synthetic construct
  misc_feature 1..20: note = chemically synthesized
  source 1..20: mol_type = other DNA
gtctcctcccatcactgtcc

SEQ ID NO: 52955 - DNA, 20 bp, synthetic construct
  misc_feature 1..20: note = chemically synthesized
  source 1..20: mol_type = other DNA
cccatcactgtcctggcccc

SEQ ID NO: 52956 - DNA, 20 bp, synthetic construct
  misc_feature 1..20: note = chemically synthesized
  source 1..20: mol_type = other DNA
tcctggcccctggcccccca

SEQ ID NO: 52957 - DNA, 20 bp, synthetic construct
  misc_feature 1..20: note = chemically synthesized
  source 1..20: mol_type = other DNA
cctggccccccatggaacat

SEQ ID NO: 52958 - DNA, 20 bp, synthetic construct
  misc_feature 1..20: note = chemically synthesized
  source 1..20: mol_type = other DNA
cccccatggaacataagcct

SEQ ID NO: 52959 - DNA, 20 bp, synthetic construct
  misc_feature 1..20: note = chemically synthesized
  source 1..20: mol_type = other DNA
aacataagcctcagtatgca

SEQ ID NO: 52960 - DNA, 20 bp, synthetic construct
  misc_feature 1..20: note = chemically synthesized
  source 1..20: mol_type = other DNA
acataagcctcagtatgcac

SEQ ID NO: 52961 - DNA, 20 bp, synthetic construct
  misc_feature 1..20: note = chemically synthesized
  source 1..20: mol_type = other DNA
cataagcctcagtatgcaca

SEQ ID NO: 52962 - DNA, 20 bp, synthetic construct
  misc_feature 1..20: note = chemically synthesized
  source 1..20: mol_type = other DNA
cagtatgcacagggcgtttt

SEQ ID NO: 52963 - DNA, 20 bp, synthetic construct
  misc_feature 1..20: note = chemically synthesized
  source 1..20: mol_type = other DNA
tttcagctaccccaacacat

SEQ ID NO: 52964 - DNA, 20 bp, synthetic construct
  misc_feature 1..20: note = chemically synthesized
  source 1..20: mol_type = other DNA
ttggcttgctacctcaacta

SEQ ID NO: 52965 - DNA, 20 bp, synthetic construct
  misc_feature 1..20: note = chemically synthesized
  source 1..20: mol_type = other DNA
ctacctcaactatggaaaac

SEQ ID NO: 52966 - DNA, 20 bp, synthetic construct
  misc_feature 1..20: note = chemically synthesized
  source 1..20: mol_type = other DNA
cctcaactatggaaaaccag

SEQ ID NO: 52967 - DNA, 20 bp, synthetic construct
  misc_feature 1..20: note = chemically synthesized
  source 1..20: mol_type = other DNA
ctcaactatggaaaaccagc

SEQ ID NO: 52968 - DNA, 20 bp, synthetic construct
  misc_feature 1..20: note = chemically synthesized
  source 1..20: mol_type = other DNA
tcaactatggaaaaccagcg

SEQ ID NO: 52969 - DNA, 20 bp, synthetic construct
  misc_feature 1..20: note = chemically synthesized
  source 1..20: mol_type = other DNA
caactatggaaaaccagcgg

SEQ ID NO: 52970 - DNA, 20 bp, synthetic construct
  misc_feature 1..20: note = chemically synthesized
  source 1..20: mol_type = other DNA
actatggaaaaccagcgggg

SEQ ID NO: 52971 - DNA, 20 bp, synthetic construct
  misc_feature 1..20: note = chemically synthesized
  source 1..20: mol_type = other DNA
ctatggaaaaccagcggggg

SEQ ID NO: 52972 - DNA, 20 bp, synthetic construct
  misc_feature 1..20: note = chemically synthesized
  source 1..20: mol_type = other DNA
ggaggaattgccatcttttt

SEQ ID NO: 52973 - DNA, 20 bp, synthetic construct
  misc_feature 1..20: note = chemically synthesized
  source 1..20: mol_type = other DNA
ggaattgccatctttttgag

SEQ ID NO: 52974 - DNA, 20 bp, synthetic construct
  misc_feature 1..20: note = chemically synthesized
  source 1..20: mol_type = other DNA
aattgccatctttttgagaa

SEQ ID NO: 52975 - DNA, 20 bp, synthetic construct
  misc_feature 1..20: note = chemically synthesized
  source 1..20: mol_type = other DNA
attgccatctttttgagaag

SEQ ID NO: 52976 - DNA, 20 bp, synthetic construct
  misc_feature 1..20: note = chemically synthesized
  source 1..20: mol_type = other DNA
ttgccatctttttgagaaga

SEQ ID NO: 52977 - DNA, 20 bp, synthetic construct
  misc_feature 1..20: note = chemically synthesized
  source 1..20: mol_type = other DNA
gccatctttttgagaagagg

SEQ ID NO: 52978 - DNA, 20 bp, synthetic construct
  misc_feature 1..20: note = chemically synthesized
  source 1..20: mol_type = other DNA
tctttttgagaagagggagt

SEQ ID NO: 52979 - DNA, 20 bp, synthetic construct
  misc_feature 1..20: note = chemically synthesized
  source 1..20: mol_type = other DNA
tgagaagagggagtgagact

SEQ ID NO: 52980 - DNA, 20 bp, synthetic construct
  misc_feature 1..20: note = chemically synthesized
  source 1..20: mol_type = other DNA
agaagagggagtgagactca

SEQ ID NO: 52981 - DNA, 20 bp, synthetic construct
  misc_feature 1..20: note = chemically synthesized
  source 1..20: mol_type = other DNA
cctttttttttttttaaccc

SEQ ID NO: 52982 - DNA, 20 bp, synthetic construct
  misc_feature 1..20: note = chemically synthesized
  source 1..20: mol_type = other DNA
ctttttttttttttaaccca

SEQ ID NO: 52983 - DNA, 20 bp, synthetic construct
  misc_feature 1..20: note = chemically synthesized
  source 1..20: mol_type = other DNA
aaggtcaccctgcttgtcgt

SEQ ID NO: 52984 - DNA, 20 bp, synthetic construct
  misc_feature 1..20: note = chemically synthesized
  source 1..20: mol_type = other DNA
caccctgcttgtcgttggcc

SEQ ID NO: 52985 - DNA, 20 bp, synthetic construct
  misc_feature 1..20: note = chemically synthesized
  source 1..20: mol_type = other DNA
ctgcttgtcgttggccaagc

SEQ ID NO: 52986 - DNA, 20 bp, synthetic construct
  misc_feature 1..20: note = chemically synthesized
  source 1..20: mol_type = other DNA
tgcttgtcgttggccaagcc

SEQ ID NO: 52987 - DNA, 20 bp, synthetic construct
  misc_feature 1..20: note = chemically synthesized
  source 1..20: mol_type = other DNA
gtcgttggccaagccaggcc

SEQ ID NO: 52988 - DNA, 20 bp, synthetic construct
  misc_feature 1..20: note = chemically synthesized
  source 1..20: mol_type = other DNA
gccaagccaggcctagaatc

SEQ ID NO: 52989 - DNA, 20 bp, synthetic construct
  misc_feature 1..20: note = chemically synthesized
  source 1..20: mol_type = other DNA
ccaagccaggcctagaatct

SEQ ID NO: 52990 - DNA, 20 bp, synthetic construct
  misc_feature 1..20: note = chemically synthesized
  source 1..20: mol_type = other DNA
aggcctagaatctgggtctc

SEQ ID NO: 52991 - DNA, 20 bp, synthetic construct
  misc_feature 1..20: note = chemically synthesized
  source 1..20: mol_type = other DNA
gaatctgggtctccagactc

SEQ ID NO: 52992 - DNA, 20 bp, synthetic construct
  misc_feature 1..20: note = chemically synthesized
  source 1..20: mol_type = other DNA
aatctgggtctccagactct

SEQ ID NO: 52993 - DNA, 20 bp, synthetic construct
  misc_feature 1..20: note = chemically synthesized
  source 1..20: mol_type = other DNA
cagactctgggtctgctact

SEQ ID NO: 52994 - DNA, 20 bp, synthetic construct
  misc_feature 1..20: note = chemically synthesized
  source 1..20: mol_type = other DNA
agactctgggtctgctactc

SEQ ID NO: 52995 - DNA, 20 bp, synthetic construct
  misc_feature 1..20: note = chemically synthesized
  source 1..20: mol_type = other DNA
gactctgggtctgctactca

SEQ ID NO: 52996 - DNA, 20 bp, synthetic construct
  misc_feature 1..20: note = chemically synthesized
  source 1..20: mol_type = other DNA
gtctgctactcagggcacaa

SEQ ID NO: 52997 - DNA, 20 bp, synthetic construct
  misc_feature 1..20: note = chemically synthesized
  source 1..20: mol_type = other DNA
tgctactcagggcacaaaag

SEQ ID NO: 52998 - DNA, 20 bp, synthetic construct
  misc_feature 1..20: note = chemically synthesized
  source 1..20: mol_type = other DNA
acaaaagaagaaaacattct

SEQ ID NO: 52999 - DNA, 20 bp, synthetic construct
  misc_feature 1..20: note = chemically synthesized
  source 1..20: mol_type = other DNA
ttctgagttacaccccttct

SEQ ID NO: 53000 - DNA, 20 bp, synthetic construct
  misc_feature 1..20: note = chemically synthesized
  source 1..20: mol_type = other DNA
gagttacaccccttcttggc

SEQ ID NO: 53001 - DNA, 20 bp, synthetic construct
  misc_feature 1..20: note = chemically synthesized
  source 1..20: mol_type = other DNA
ttacaccccttcttggccag

SEQ ID NO: 53002 - DNA, 20 bp, synthetic construct
  misc_feature 1..20: note = chemically synthesized
  source 1..20: mol_type = other DNA
ccccttcttggccagtagtt

SEQ ID NO: 53003 - DNA, 20 bp, synthetic construct
  misc_feature 1..20: note = chemically synthesized
  source 1..20: mol_type = other DNA
cccttcttggccagtagttg

SEQ ID NO: 53004 - DNA, 20 bp, synthetic construct
  misc_feature 1..20: note = chemically synthesized
  source 1..20: mol_type = other DNA
ccttcttggccagtagttga

SEQ ID NO: 53005 - DNA, 20 bp, synthetic construct
  misc_feature 1..20: note = chemically synthesized
  source 1..20: mol_type = other DNA
gttgagggtaaattaacgaa

SEQ ID NO: 53006 - DNA, 20 bp, synthetic construct
  misc_feature 1..20: note = chemically synthesized
  source 1..20: mol_type = other DNA
cttgtctgttgctctctgtt

SEQ ID NO: 53007 - DNA, 20 bp, synthetic construct
  misc_feature 1..20: note = chemically synthesized
  source 1..20: mol_type = other DNA
ttgtctgttgctctctgttt

SEQ ID NO: 53008 - DNA, 20 bp, synthetic construct
  misc_feature 1..20: note = chemically synthesized
  source 1..20: mol_type = other DNA
tctgttgctctctgtttagg

SEQ ID NO: 53009 - DNA, 20 bp, synthetic construct
  misc_feature 1..20: note = chemically synthesized
  source 1..20: mol_type = other DNA
taaaaactccacaaattcaa

SEQ ID NO: 53010 - DNA, 20 bp, synthetic construct
  misc_feature 1..20: note = chemically synthesized
  source 1..20: mol_type = other DNA
tccattttcaccacactttt

SEQ ID NO: 53011 - DNA, 20 bp, synthetic construct
  misc_feature 1..20: note = chemically synthesized
  source 1..20: mol_type = other DNA
ttggctgccattcacaaaaa

SEQ ID NO: 53012 - DNA, 20 bp, synthetic construct
  misc_feature 1..20: note = chemically synthesized
  source 1..20: mol_type = other DNA
gccattcacaaaaaaagctg

SEQ ID NO: 53013 - DNA, 20 bp, synthetic construct
  misc_feature 1..20: note = chemically synthesized
  source 1..20: mol_type = other DNA
ttcacaaaaaaagctgaagc

SEQ ID NO: 53014 - DNA, 20 bp, synthetic construct
  misc_feature 1..20: note = chemically synthesized
  source 1..20: mol_type = other DNA
aaaaaagctgaagccagcca

SEQ ID NO: 53015 - DNA, 20 bp, synthetic construct
  misc_feature 1..20: note = chemically synthesized
  source 1..20: mol_type = other DNA
aaaaagctgaagccagccat

SEQ ID NO: 53016 - DNA, 20 bp, synthetic construct
  misc_feature 1..20: note = chemically synthesized
  source 1..20: mol_type = other DNA
ggtaactattaaaatccatg

SEQ ID NO: 53017 - DNA, 20 bp, synthetic construct
  misc_feature 1..20: note = chemically synthesized
  source 1..20: mol_type = other DNA
tattaaaatccatgtggttg

SEQ ID NO: 53018 - DNA, 20 bp, synthetic construct
  misc_feature 1..20: note = chemically synthesized
  source 1..20: mol_type = other DNA
ttaaaatccatgtggttgca

SEQ ID NO: 53019 - DNA, 20 bp, synthetic construct
  misc_feature 1..20: note = chemically synthesized
  source 1..20: mol_type = other DNA
aatccatgtggttgcagaga

SEQ ID NO: 53020 - DNA, 20 bp, synthetic construct
  misc_feature 1..20: note = chemically synthesized
  source 1..20: mol_type = other DNA
agacagcatccctatcacat

SEQ ID NO: 53021 - DNA, 20 bp, synthetic construct
  misc_feature 1..20: note = chemically synthesized
  source 1..20: mol_type = other DNA
tgagcttttgccctgtcccc

SEQ ID NO: 53022 - DNA, 20 bp, synthetic construct
  misc_feature 1..20: note = chemically synthesized
  source 1..20: mol_type = other DNA
gagcttttgccctgtcccca

SEQ ID NO: 53023 - DNA, 20 bp, synthetic construct
  misc_feature 1..20: note = chemically synthesized
  source 1..20: mol_type = other DNA
tctgtcatctccactccttg

SEQ ID NO: 53024 - DNA, 20 bp, synthetic construct
  misc_feature 1..20: note = chemically synthesized
  source 1..20: mol_type = other DNA
ctgtcatctccactccttgt

SEQ ID NO: 53025 - DNA, 20 bp, synthetic construct
  misc_feature 1..20: note = chemically synthesized
  source 1..20: mol_type = other DNA
ccactccttgtgggccacca

SEQ ID NO: 53026 - DNA, 20 bp, synthetic construct
  misc_feature 1..20: note = chemically synthesized
  source 1..20: mol_type = other DNA
tccttgtgggccaccacagc

SEQ ID NO: 53027 - DNA, 20 bp, synthetic construct
  misc_feature 1..20: note = chemically synthesized
  source 1..20: mol_type = other DNA
ccttgtgggccaccacagca

SEQ ID NO: 53028 - DNA, 20 bp, synthetic construct
  misc_feature 1..20: note = chemically synthesized
  source 1..20: mol_type = other DNA
ccacagcaaggctgactcac

SEQ ID NO: 53029 - DNA, 20 bp, synthetic construct
  misc_feature 1..20: note = chemically synthesized
  source 1..20: mol_type = other DNA
aggctgactcactggctctg

SEQ ID NO: 53030 - DNA, 20 bp, synthetic construct
  misc_feature 1..20: note = chemically synthesized
  source 1..20: mol_type = other DNA
ctgactcactggctctgaag

SEQ ID NO: 53031 - DNA, 20 bp, synthetic construct
  misc_feature 1..20: note = chemically synthesized
  source 1..20: mol_type = other DNA
ggctctgaagaagatccaca

SEQ ID NO: 53032 - DNA, 20 bp, synthetic construct
  misc_feature 1..20: note = chemically synthesized
  source 1..20: mol_type = other DNA
aagaagatccacaaagcctg

SEQ ID NO: 53033 - DNA, 20 bp, synthetic construct
  misc_feature 1..20: note = chemically synthesized
  source 1..20: mol_type = other DNA
gaagatccacaaagcctgtg

SEQ ID NO: 53034 - DNA, 20 bp, synthetic construct
  misc_feature 1..20: note = chemically synthesized
  source 1..20: mol_type = other DNA
agatccacaaagcctgtgga

SEQ ID NO: 53035 - DNA, 20 bp, synthetic construct
  misc_feature 1..20: note = chemically synthesized
  source 1..20: mol_type = other DNA
gatccacaaagcctgtggag

SEQ ID NO: 53036 - DNA, 20 bp, synthetic construct
  misc_feature 1..20: note = chemically synthesized
  source 1..20: mol_type = other DNA
tccacaaagcctgtggagag

SEQ ID NO: 53037 - DNA, 20 bp, synthetic construct
  misc_feature 1..20: note = chemically synthesized
  source 1..20: mol_type = other DNA
ccacaaagcctgtggagagg

SEQ ID NO: 53038 - DNA, 20 bp, synthetic construct
  misc_feature 1..20: note = chemically synthesized
  source 1..20: mol_type = other DNA
gcctgtggagaggaggccca

SEQ ID NO: 53039 - DNA, 20 bp, synthetic construct
  misc_feature 1..20: note = chemically synthesized
  source 1..20: mol_type = other DNA
agaggaggcccacagctctc

SEQ ID NO: 53040 - DNA, 20 bp, synthetic construct
  misc_feature 1..20: note = chemically synthesized
  source 1..20: mol_type = other DNA
gaggaggcccacagctctcc

SEQ ID NO: 53041 - DNA, 20 bp, synthetic construct
  misc_feature 1..20: note = chemically synthesized
  source 1..20: mol_type = other DNA
cacagctctccaggatgcat

SEQ ID NO: 53042 - DNA, 20 bp, synthetic construct
  misc_feature 1..20: note = chemically synthesized
  source 1..20: mol_type = other DNA
acagctctccaggatgcatg

SEQ ID NO: 53043 - DNA, 20 bp, synthetic construct
  misc_feature 1..20: note = chemically synthesized
  source 1..20: mol_type = other DNA
agctctccaggatgcatgag

SEQ ID NO: 53044 - DNA, 20 bp, synthetic construct
  misc_feature 1..20: note = chemically synthesized
  source 1..20: mol_type = other DNA
gctctccaggatgcatgagg

SEQ ID NO: 53045 - DNA, 20 bp, synthetic construct
  misc_feature 1..20: note = chemically synthesized
  source 1..20: mol_type = other DNA
ctctccaggatgcatgagga

SEQ ID NO: 53046 - DNA, 20 bp, synthetic construct
  misc_feature 1..20: note = chemically synthesized
  source 1..20: mol_type = other DNA
tctccaggatgcatgaggag

SEQ ID NO: 53047 - DNA, 20 bp, synthetic construct
  misc_feature 1..20: note = chemically synthesized
  source 1..20: mol_type = other DNA
gatgcatgaggaggggccac

SEQ ID NO: 53048 - DNA, 20 bp, synthetic construct
  misc_feature 1..20: note = chemically synthesized
  source 1..20: mol_type = other DNA
atgcatgaggaggggccacc

SEQ ID NO: 53049 - DNA, 20 bp, synthetic construct
  misc_feature 1..20: note = chemically synthesized
  source 1..20: mol_type = other DNA
tgcatgaggaggggccacca

SEQ ID NO: 53050 - DNA, 20 bp, synthetic construct
  misc_feature 1..20: note = chemically synthesized
  source 1..20: mol_type = other DNA
tgaggaggggccaccaggga

SEQ ID NO: 53051 - DNA, 20 bp, synthetic construct
  misc_feature 1..20: note = chemically synthesized
  source 1..20: mol_type = other DNA
gccaccagggatggccaccc

SEQ ID NO: 53052 - DNA, 20 bp, synthetic construct
  misc_feature 1..20: note = chemically synthesized
  source 1..20: mol_type = other DNA
gcgacccccattttccctct

SEQ ID NO: 53053 - DNA, 20 bp, synthetic construct
  misc_feature 1..20: note = chemically synthesized
  source 1..20: mol_type = other DNA
ccattttccctcttggccca

SEQ ID NO: 53054 - DNA, 20 bp, synthetic construct
  misc_feature 1..20: note = chemically synthesized
  source 1..20: mol_type = other DNA
cattttccctcttggcccat

SEQ ID NO: 53055 - DNA, 20 bp, synthetic construct
  misc_feature 1..20: note = chemically synthesized
  source 1..20: mol_type = other DNA
tcttggcccatgggaaatcc

SEQ ID NO: 53056 - DNA, 20 bp, synthetic construct
  misc_feature 1..20: note = chemically synthesized
  source 1..20: mol_type = other DNA
cttggcccatgggaaatcct

SEQ ID NO: 53057 - DNA, 20 bp, synthetic construct
  misc_feature 1..20: note = chemically synthesized
  source 1..20: mol_type = other DNA
tggcccatgggaaatcctag

SEQ ID NO: 53058 - DNA, 20 bp, synthetic construct
  misc_feature 1..20: note = chemically synthesized
  source 1..20: mol_type = other DNA
ggcccatgggaaatcctagg

SEQ ID NO: 53059 - DNA, 20 bp, synthetic construct
  misc_feature 1..20: note = chemically synthesized
  source 1..20: mol_type = other DNA
gaaatcctaggaggcaacat

SEQ ID NO: 53060 - DNA, 20 bp, synthetic construct
  misc_feature 1..20: note = chemically synthesized
  source 1..20: mol_type = other DNA
taggaggcaacataagcctg

SEQ ID NO: 53061 - DNA, 20 bp, synthetic construct
  misc_feature 1..20: note = chemically synthesized
  source 1..20: mol_type = other DNA
gaggcaacataagcctgtgg

SEQ ID NO: 53062 - DNA, 20 bp, synthetic construct
  misc_feature 1..20: note = chemically synthesized
  source 1..20: mol_type = other DNA
cctgtggcagcccctccaca

SEQ ID NO: 53063 - DNA, 20 bp, synthetic construct
  misc_feature 1..20: note = chemically synthesized
  source 1..20: mol_type = other DNA
cctccacaaagccctgcctc

SEQ ID NO: 53064 - DNA, 20 bp, synthetic construct
  misc_feature 1..20: note = chemically synthesized
  source 1..20: mol_type = other DNA
tccacaaagccctgcctcca

SEQ ID NO: 53065 - DNA, 20 bp, synthetic construct
  misc_feature 1..20: note = chemically synthesized
  source 1..20: mol_type = other DNA
ccctgcctccagagttccca

SEQ ID NO: 53066 - DNA, 20 bp, synthetic construct
  misc_feature 1..20: note = chemically synthesized
  source 1..20: mol_type = other DNA
cctgcctccagagttcccat

SEQ ID NO: 53067 - DNA, 20 bp, synthetic construct
  misc_feature 1..20: note = chemically synthesized
  source 1..20: mol_type = other DNA
cctccagagttcccataggc

SEQ ID NO: 53068 - DNA, 20 bp, synthetic construct
  misc_feature 1..20: note = chemically synthesized
  source 1..20: mol_type = other DNA
cataggcgagaatgtgtcct

SEQ ID NO: 53069 - DNA, 20 bp, synthetic construct
  misc_feature 1..20: note = chemically synthesized
  source 1..20: mol_type = other DNA
aggcgagaatgtgtcctcag

SEQ ID NO: 53070 - DNA, 20 bp, synthetic construct
  misc_feature 1..20: note = chemically synthesized
  source 1..20: mol_type = other DNA
gcgagaatgtgtcctcagtg

SEQ ID NO: 53071 - DNA, 20 bp, synthetic construct
  misc_feature 1..20: note = chemically synthesized
  source 1..20: mol_type = other DNA
cagtggagcattaccttgca

SEQ ID NO: 53072 - DNA, 20 bp, synthetic construct
  misc_feature 1..20: note = chemically synthesized
  source 1..20: mol_type = other DNA
attaccttgcacagcctgtg

SEQ ID NO: 53073 - DNA, 20 bp, synthetic construct
  misc_feature 1..20: note = chemically synthesized
  source 1..20: mol_type = other DNA
agcctgtgaagtgctctgtg

SEQ ID NO: 53074 - DNA, 20 bp, synthetic construct
  misc_feature 1..20: note = chemically synthesized
  source 1..20: mol_type = other DNA
gcctgtgaagtgctctgtgc

SEQ ID NO: 53075 - DNA, 20 bp, synthetic construct
  misc_feature 1..20: note = chemically synthesized
  source 1..20: mol_type = other DNA
cctgtgaagtgctctgtgcg

SEQ ID NO: 53076 - DNA, 20 bp, synthetic construct
  misc_feature 1..20: note = chemically synthesized
  source 1..20: mol_type = other DNA
aagtgctctgtgcggggata

SEQ ID NO: 53077 - DNA, 20 bp, synthetic construct
  misc_feature 1..20: note = chemically synthesized
  source 1..20: mol_type = other DNA
agtgctctgtgcggggataa

SEQ ID NO: 53078 - DNA, 20 bp, synthetic construct
  misc_feature 1..20: note = chemically synthesized
  source 1..20: mol_type = other DNA
ctctgtgcggggataaaggc

SEQ ID NO: 53079 - DNA, 20 bp, synthetic construct
  misc_feature 1..20: note = chemically synthesized
  source 1..20: mol_type = other DNA
ggggataaaggcaagtaacg

SEQ ID NO: 53080 - DNA, 20 bp, synthetic construct
  misc_feature 1..20: note = chemically synthesized
  source 1..20: mol_type = other DNA
gggataaaggcaagtaacgt

SEQ ID NO: 53081 - DNA, 20 bp, synthetic construct
  misc_feature 1..20: note = chemically synthesized
  source 1..20: mol_type = other DNA
ggataaaggcaagtaacgtg

SEQ ID NO: 53082 - DNA, 20 bp, synthetic construct
  misc_feature 1..20: note = chemically synthesized
  source 1..20: mol_type = other DNA
gtaacgtggggtcctctctc

SEQ ID NO: 53083 - DNA, 20 bp, synthetic construct
  misc_feature 1..20: note = chemically synthesized
  source 1..20: mol_type = other DNA
taacgtggggtcctctctca

SEQ ID NO: 53084 - DNA, 20 bp, synthetic construct
  misc_feature 1..20: note = chemically synthesized
  source 1..20: mol_type = other DNA
gtcctctctcaaggaattgc

SEQ ID NO: 53085 - DNA, 20 bp, synthetic construct
  misc_feature 1..20: note = chemically synthesized
  source 1..20: mol_type = other DNA
ctcaaggaattgctagctta

SEQ ID NO: 53086 - DNA, 20 bp, synthetic construct
  misc_feature 1..20: note = chemically synthesized
  source 1..20: mol_type = other DNA
tcaaggaattgctagcttat

SEQ ID NO: 53087 - DNA, 20 bp, synthetic construct
  misc_feature 1..20: note = chemically synthesized
  source 1..20: mol_type = other DNA
caaggaattgctagcttatg

SEQ ID NO: 53088 - DNA, 20 bp, synthetic construct
  misc_feature 1..20: note = chemically synthesized
  source 1..20: mol_type = other DNA
aggaattgctagcttatggg

SEQ ID NO: 53089 - DNA, 20 bp, synthetic construct
  misc_feature 1..20: note = chemically synthesized
  source 1..20: mol_type = other DNA
gaattgctagcttatgggga

SEQ ID NO: 53090 - DNA, 20 bp, synthetic construct
  misc_feature 1..20: note = chemically synthesized
  source 1..20: mol_type = other DNA
tggggagagaaaactaaacg

SEQ ID NO: 53091 - DNA, 20 bp, synthetic construct
  misc_feature 1..20: note = chemically synthesized
  source 1..20: mol_type = other DNA
ggagagaaaactaaacgtgg

SEQ ID NO: 53092 - DNA, 20 bp, synthetic construct
  misc_feature 1..20: note = chemically synthesized
  source 1..20: mol_type = other DNA
actaaacgtggaagccccaa

SEQ ID NO: 53093 - DNA, 20 bp, synthetic construct
  misc_feature 1..20: note = chemically synthesized
  source 1..20: mol_type = other DNA
tgtgacaaatgccccatgaa

SEQ ID NO: 53094 - DNA, 20 bp, synthetic construct
  misc_feature 1..20: note = chemically synthesized
  source 1..20: mol_type = other DNA
gacaaatgccccatgaatgg

SEQ ID NO: 53095 - DNA, 20 bp, synthetic construct
  misc_feature 1..20: note = chemically synthesized
  source 1..20: mol_type = other DNA
acaaatgccccatgaatggc

SEQ ID NO: 53096 - DNA, 20 bp, synthetic construct
  misc_feature 1..20: note = chemically synthesized
  source 1..20: mol_type = other DNA
aatgccccatgaatggcagg

SEQ ID NO: 53097 - DNA, 20 bp, synthetic construct
  misc_feature 1..20: note = chemically synthesized
  source 1..20: mol_type = other DNA
gccccatgaatggcaggcag

SEQ ID NO: 53098 - DNA, 20 bp, synthetic construct
  misc_feature 1..20: note = chemically synthesized
  source 1..20: mol_type = other DNA
catgaatggcaggcagaagt

SEQ ID NO: 53099 - DNA, 20 bp, synthetic construct
  misc_feature 1..20: note = chemically synthesized
  source 1..20: mol_type = other DNA
tgaatggcaggcagaagtta

SEQ ID NO: 53100 - DNA, 20 bp, synthetic construct
  misc_feature 1..20: note = chemically synthesized
  source 1..20: mol_type = other DNA
caggcagaagttagagtatg

SEQ ID NO: 53101 - DNA, 20 bp, synthetic construct
  misc_feature 1..20: note = chemically synthesized
  source 1..20: mol_type = other DNA
aggcagaagttagagtatga

SEQ ID NO: 53102 - DNA, 20 bp, synthetic construct
  misc_feature 1..20: note = chemically synthesized
  source 1..20: mol_type = other DNA
ggcagaagttagagtatgaa

SEQ ID NO: 53103 - DNA, 20 bp, synthetic construct
  misc_feature 1..20: note = chemically synthesized
  source 1..20: mol_type = other DNA
gcagaagttagagtatgaag

SEQ ID NO: 53104 - DNA, 20 bp, synthetic construct
  misc_feature 1..20: note = chemically synthesized
  source 1..20: mol_type = other DNA
cagaagttagagtatgaagg

SEQ ID NO: 53105 - DNA, 20 bp, synthetic construct
  misc_feature 1..20: note = chemically synthesized
  source 1..20: mol_type = other DNA
gtatgaagggggccccacct

SEQ ID NO: 53106 - DNA, 20 bp, synthetic construct
  misc_feature 1..20: note = chemically synthesized
  source 1..20: mol_type = other DNA
tatgaagggggccccacctc

SEQ ID NO: 53107 - DNA, 20 bp, synthetic construct
  misc_feature 1..20: note = chemically synthesized
  source 1..20: mol_type = other DNA
tgaagggggccccacctcag

SEQ ID NO: 53108 - DNA, 20 bp, synthetic construct
  misc_feature 1..20: note = chemically synthesized
  source 1..20: mol_type = other DNA
gaagggggccccacctcagg

SEQ ID NO: 53109 - DNA, 20 bp, synthetic construct
  misc_feature 1..20: note = chemically synthesized
  source 1..20: mol_type = other DNA
ggggccccacctcaggaggt

SEQ ID NO: 53110 - DNA, 20 bp, synthetic construct
  misc_feature 1..20: note = chemically synthesized
  source 1..20: mol_type = other DNA
gggccccacctcaggaggtc

SEQ ID NO: 53111 - DNA, 20 bp, synthetic construct
  misc_feature 1..20: note = chemically synthesized
  source 1..20: mol_type = other DNA
ggccccacctcaggaggtcg

SEQ ID NO: 53112 - DNA, 20 bp, synthetic construct
  misc_feature 1..20: note = chemically synthesized
  source 1..20: mol_type = other DNA
ccccacctcaggaggtcggg

SEQ ID NO: 53113 - DNA, 20 bp, synthetic construct
  misc_feature 1..20: note = chemically synthesized
  source 1..20: mol_type = other DNA
cctcaggaggtcggggagtg

SEQ ID NO: 53114 - DNA, 20 bp, synthetic construct
  misc_feature 1..20: note = chemically synthesized
  source 1..20: mol_type = other DNA
gaggtcggggagtgtggcgt

SEQ ID NO: 53115 - DNA, 20 bp, synthetic construct
  misc_feature 1..20: note = chemically synthesized
  source 1..20: mol_type = other DNA
tggcgtcagccactgcccca

SEQ ID NO: 53116 - DNA, 20 bp, synthetic construct
  misc_feature 1..20: note = chemically synthesized
  source 1..20: mol_type = other DNA
cgtcagccactgccccatag

SEQ ID NO: 53117 - DNA, 20 bp, synthetic construct
  misc_feature 1..20: note = chemically synthesized
  source 1..20: mol_type = other DNA
gtcagccactgccccatagc

SEQ ID NO: 53118 - DNA, 20 bp, synthetic construct
  misc_feature 1..20: note = chemically synthesized
  source 1..20: mol_type = other DNA
atgtgtgcaacatctgccac

SEQ ID NO: 53119 - DNA, 20 bp, synthetic construct
  misc_feature 1..20: note = chemically synthesized
  source 1..20: mol_type = other DNA
caacatctgccactggtact

SEQ ID NO: 53120 - DNA, 20 bp, synthetic construct
  misc_feature 1..20: note = chemically synthesized
  source 1..20: mol_type = other DNA
tgaccctcatttgaccctcc

SEQ ID NO: 53121 - DNA, 20 bp, synthetic construct
  misc_feature 1..20: note = chemically synthesized
  source 1..20: mol_type = other DNA
gaccctcatttgaccctccc

SEQ ID NO: 53122 - DNA, 20 bp, synthetic construct
  misc_feature 1..20: note = chemically synthesized
  source 1..20: mol_type = other DNA
ctcatttgaccctcccaggc

SEQ ID NO: 53123 - DNA, 20 bp, synthetic construct
  misc_feature 1..20: note = chemically synthesized
  source 1..20: mol_type = other DNA
tgctgtgatgaccccctccc

SEQ ID NO: 53124 - DNA, 20 bp, synthetic construct
  misc_feature 1..20: note = chemically synthesized
  source 1..20: mol_type = other DNA
gtgatgaccccctccctggt

SEQ ID NO: 53125 - DNA, 20 bp, synthetic construct
  misc_feature 1..20: note = chemically synthesized
  source 1..20: mol_type = other DNA
tgatgaccccctccctggtg

SEQ ID NO: 53126 - DNA, 20 bp, synthetic construct
  misc_feature 1..20: note = chemically synthesized
  source 1..20: mol_type = other DNA
atgaccccctccctggtgag

SEQ ID NO: 53127 - DNA, 20 bp, synthetic construct
  misc_feature 1..20: note = chemically synthesized
  source 1..20: mol_type = other DNA
ccccctccctggtgaggagc

SEQ ID NO: 53128 - DNA, 20 bp, synthetic construct
  misc_feature 1..20: note = chemically synthesized
  source 1..20: mol_type = other DNA
ctccctggtgaggagccggc

SEQ ID NO: 53129 - DNA, 20 bp, synthetic construct
  misc_feature 1..20: note = chemically synthesized
  source 1..20: mol_type = other DNA
tccctggtgaggagccggcc

SEQ ID NO: 53130 - DNA, 20 bp, synthetic construct
  misc_feature 1..20: note = chemically synthesized
  source 1..20: mol_type = other DNA
gtgaggagccggccaggact

SEQ ID NO: 53131 - DNA, 20 bp, synthetic construct
  misc_feature 1..20: note = chemically synthesized
  source 1..20: mol_type = other DNA
gccggccaggacttggatcc

SEQ ID NO: 53132 - DNA, 20 bp, synthetic construct
  misc_feature 1..20: note = chemically synthesized
  source 1..20: mol_type = other DNA
ggccaggacttggatccaag

SEQ ID NO: 53133 - DNA, 20 bp, synthetic construct
  misc_feature 1..20: note = chemically synthesized
  source 1..20: mol_type = other DNA
ggacttggatccaagaagtc

SEQ ID NO: 53134 - DNA, 20 bp, synthetic construct
  misc_feature 1..20: note = chemically synthesized
  source 1..20: mol_type = other DNA
cccatgctctgaccgctcga

SEQ ID NO: 53135 - DNA, 20 bp, synthetic construct
  misc_feature 1..20: note = chemically synthesized
  source 1..20: mol_type = other DNA
gctcgatggcaccgcttcct

SEQ ID NO: 53136 - DNA, 20 bp, synthetic construct
  misc_feature 1..20: note = chemically synthesized
  source 1..20: mol_type = other DNA
cgatggcaccgcttccttgg

SEQ ID NO: 53137 - DNA, 20 bp, synthetic construct
  misc_feature 1..20: note = chemically synthesized
  source 1..20: mol_type = other DNA
gatggcaccgcttccttggc

SEQ ID NO: 53138 - DNA, 20 bp, synthetic construct
  misc_feature 1..20: note = chemically synthesized
  source 1..20: mol_type = other DNA
cttccttggcaggacatcta

SEQ ID NO: 53139 - DNA, 20 bp, synthetic construct
  misc_feature 1..20: note = chemically synthesized
  source 1..20: mol_type = other DNA
ggcaggacatctacagctcc

SEQ ID NO: 53140 - DNA, 20 bp, synthetic construct
  misc_feature 1..20: note = chemically synthesized
  source 1..20: mol_type = other DNA
gcaggacatctacagctccc

SEQ ID NO: 53141 - DNA, 20 bp, synthetic construct
  misc_feature 1..20: note = chemically synthesized
  source 1..20: mol_type = other DNA
caggacatctacagctccca

SEQ ID NO: 53142 - DNA, 20 bp, synthetic construct
  misc_feature 1..20: note = chemically synthesized
  source 1..20: mol_type = other DNA
tctacagctcccagggcacc

SEQ ID NO: 53143 - DNA, 20 bp, synthetic construct
  misc_feature 1..20: note = chemically synthesized
  source 1..20: mol_type = other DNA
ctacagctcccagggcaccc

SEQ ID NO: 53144 - DNA, 20 bp, synthetic construct
  misc_feature 1..20: note = chemically synthesized
  source 1..20: mol_type = other DNA
tacagctcccagggcaccca

SEQ ID NO: 53145 - DNA, 20 bp, synthetic construct
  misc_feature 1..20: note = chemically synthesized
  source 1..20: mol_type = other DNA
acagctcccagggcacccag

SEQ ID NO: 53146 - DNA, 20 bp, synthetic construct
  misc_feature 1..20: note = chemically synthesized
  source 1..20: mol_type = other DNA
ccagggcacccaggggacat

SEQ ID NO: 53147 - DNA, 20 bp, synthetic construct
  misc_feature 1..20: note = chemically synthesized
  source 1..20: mol_type = other DNA
caggggacatcagcctctga

SEQ ID NO: 53148 - DNA, 20 bp, synthetic construct
  misc_feature 1..20: note = chemically synthesized
  source 1..20: mol_type = other DNA
aggggacatcagcctctgaa

SEQ ID NO: 53149 - DNA, 20 bp, synthetic construct
  misc_feature 1..20: note = chemically synthesized
  source 1..20: mol_type = other DNA
ggggacatcagcctctgaaa

SEQ ID NO: 53150 - DNA, 20 bp, synthetic construct
  misc_feature 1..20: note = chemically synthesized
  source 1..20: mol_type = other DNA
gggacatcagcctctgaaag

SEQ ID NO: 53151 - DNA, 20 bp, synthetic construct
  misc_feature 1..20: note = chemically synthesized
  source 1..20: mol_type = other DNA
atcagcctctgaaaggggaa

SEQ ID NO: 53152 - DNA, 20 bp, synthetic construct
  misc_feature 1..20: note = chemically synthesized
  source 1..20: mol_type = other DNA
gcctctgaaaggggaatggt

SEQ ID NO: 53153 - DNA, 20 bp, synthetic construct
  misc_feature 1..20: note = chemically synthesized
  source 1..20: mol_type = other DNA
gaaaggggaatggtcagacc

SEQ ID NO: 53154 - DNA, 20 bp, synthetic construct
  misc_feature 1..20: note = chemically synthesized
  source 1..20: mol_type = other DNA
aaaggggaatggtcagaccc

SEQ ID NO: 53155 - DNA, 20 bp, synthetic construct
  misc_feature 1..20: note = chemically synthesized
  source 1..20: mol_type = other DNA
aggggaatggtcagacccgg

SEQ ID NO: 53156 - DNA, 20 bp, synthetic construct
  misc_feature 1..20: note = chemically synthesized
  source 1..20: mol_type = other DNA
ggggaatggtcagacccggg

SEQ ID NO: 53157 - DNA, 20 bp, synthetic construct
  misc_feature 1..20: note = chemically synthesized
  source 1..20: mol_type = other DNA
gaggccttgaatgccatgct

SEQ ID NO: 53158 - DNA, 20 bp, synthetic construct
  misc_feature 1..20: note = chemically synthesized
  source 1..20: mol_type = other DNA
aggccttgaatgccatgcta

SEQ ID NO: 53159 - DNA, 20 bp, synthetic construct
  misc_feature 1..20: note = chemically synthesized
  source 1..20: mol_type = other DNA
gccttgaatgccatgctaag

SEQ ID NO: 53160 - DNA, 20 bp, synthetic construct
  misc_feature 1..20: note = chemically synthesized
  source 1..20: mol_type = other DNA
gaatgccatgctaaggagtt

SEQ ID NO: 53161 - DNA, 20 bp, synthetic construct
  misc_feature 1..20: note = chemically synthesized
  source 1..20: mol_type = other DNA
ctaaggagttcggacttgac

SEQ ID NO: 53162 - DNA, 20 bp, synthetic construct
  misc_feature 1..20: note = chemically synthesized
  source 1..20: mol_type = other DNA
aaggagttcggacttgacaa

SEQ ID NO: 53163 - DNA, 20 bp, synthetic construct
  misc_feature 1..20: note = chemically synthesized
  source 1..20: mol_type = other DNA
aggagttcggacttgacaag

SEQ ID NO: 53164 - DNA, 20 bp, synthetic construct
  misc_feature 1..20: note = chemically synthesized
  source 1..20: mol_type = other DNA
agttcggacttgacaagagg

SEQ ID NO: 53165 - DNA, 20 bp, synthetic construct
  misc_feature 1..20: note = chemically synthesized
  source 1..20: mol_type = other DNA
tcggacttgacaagaggcag

SEQ ID NO: 53166 - DNA, 20 bp, synthetic construct
  misc_feature 1..20: note = chemically synthesized
  source 1..20: mol_type = other DNA
cttgacaagaggcagcagca

SEQ ID NO: 53167 - DNA, 20 bp, synthetic construct
  misc_feature 1..20: note = chemically synthesized
  source 1..20: mol_type = other DNA
ttgacaagaggcagcagcaa

SEQ ID NO: 53168 - DNA, 20 bp, synthetic construct
  misc_feature 1..20: note = chemically synthesized
  source 1..20: mol_type = other DNA
tgacaagaggcagcagcaaa

SEQ ID NO: 53169 - DNA, 20 bp, synthetic construct
  misc_feature 1..20: note = chemically synthesized
  source 1..20: mol_type = other DNA
agcaaagggttttgataacc

SEQ ID NO: 53170 - DNA, 20 bp, synthetic construct
  misc_feature 1..20: note = chemically synthesized
  source 1..20: mol_type = other DNA
aagggttttgataacctggt

SEQ ID NO: 53171 - DNA, 20 bp, synthetic construct
  misc_feature 1..20: note = chemically synthesized
  source 1..20: mol_type = other DNA
ttattgtatttcactgctgc

SEQ ID NO: 53172 - DNA, 20 bp, synthetic construct
  misc_feature 1..20: note = chemically synthesized
  source 1..20: mol_type = other DNA
ttcactgctgcaagatttac

SEQ ID NO: 53173 - DNA, 20 bp, synthetic construct
  misc_feature 1..20: note = chemically synthesized
  source 1..20: mol_type = other DNA
gctgcaagatttactggaca

SEQ ID NO: 53174 - DNA, 20 bp, synthetic construct
  misc_feature 1..20: note = chemically synthesized
  source 1..20: mol_type = other DNA
tgcaagatttactggacaaa

SEQ ID NO: 53175 - DNA, 20 bp, synthetic construct
  misc_feature 1..20: note = chemically synthesized
  source 1..20: mol_type = other DNA
gcaagatttactggacaaag

SEQ ID NO: 53176 - DNA, 20 bp, synthetic construct
  misc_feature 1..20: note = chemically synthesized
  source 1..20: mol_type = other DNA
aagatttactggacaaagag

SEQ ID NO: 53177 - DNA, 20 bp, synthetic construct
  misc_feature 1..20: note = chemically synthesized
  source 1..20: mol_type = other DNA
agatttactggacaaagagg

SEQ ID NO: 53178 - DNA, 20 bp, synthetic construct
  misc_feature 1..20: note = chemically synthesized
  source 1..20: mol_type = other DNA
atttactggacaaagaggag

SEQ ID NO: 53179 - DNA, 20 bp, synthetic construct
  misc_feature 1..20: note = chemically synthesized
  source 1..20: mol_type = other DNA
tttactggacaaagaggagg

SEQ ID NO: 53180 - DNA, 20 bp, synthetic construct
  misc_feature 1..20: note = chemically synthesized
  source 1..20: mol_type = other DNA
ttactggacaaagaggagga

SEQ ID NO: 53181 - DNA, 20 bp, synthetic construct
  misc_feature 1..20: note = chemically synthesized
  source 1..20: mol_type = other DNA
tactggacaaagaggaggag

SEQ ID NO: 53182 - DNA, 20 bp, synthetic construct
  misc_feature 1..20: note = chemically synthesized
  source 1..20: mol_type = other DNA
actggacaaagaggaggagg

SEQ ID NO: 53183 - DNA, 20 bp, synthetic construct
  misc_feature 1..20: note = chemically synthesized
  source 1..20: mol_type = other DNA
tggacaaagaggaggagggg

SEQ ID NO: 53184 - DNA, 20 bp, synthetic construct
  misc_feature 1..20: note = chemically synthesized
  source 1..20: mol_type = other DNA
acaaagaggaggagggggag

SEQ ID NO: 53185 - DNA, 20 bp, synthetic construct
  misc_feature 1..20: note = chemically synthesized
  source 1..20: mol_type = other DNA
agaggaggagggggagaaga

SEQ ID NO: 53186 - DNA, 20 bp, synthetic construct
  misc_feature 1..20: note = chemically synthesized
  source 1..20: mol_type = other DNA
gaggagggggagaagacagt

SEQ ID NO: 53187 - DNA, 20 bp, synthetic construct
  misc_feature 1..20: note = chemically synthesized
  source 1..20: mol_type = other DNA
gggggagaagacagtgagtg

SEQ ID NO: 53188 - DNA, 20 bp, synthetic construct
  misc_feature 1..20: note = chemically synthesized
  source 1..20: mol_type = other DNA
gaagacagtgagtgcagtga

SEQ ID NO: 53189 - DNA, 20 bp, synthetic construct
  misc_feature 1..20: note = chemically synthesized
  source 1..20: mol_type = other DNA
aagacagtgagtgcagtgaa

SEQ ID NO: 53190 - DNA, 20 bp, synthetic construct
  misc_feature 1..20: note = chemically synthesized
  source 1..20: mol_type = other DNA
tgagtgcagtgaaaggtgtc

SEQ ID NO: 53191 - DNA, 20 bp, synthetic construct
  misc_feature 1..20: note = chemically synthesized
  source 1..20: mol_type = other DNA
gtgcagtgaaaggtgtctag

SEQ ID NO: 53192 - DNA, 20 bp, synthetic construct
  misc_feature 1..20: note = chemically synthesized
  source 1..20: mol_type = other DNA
tgaaaggtgtctagaagccc

SEQ ID NO: 53193 - DNA, 20 bp, synthetic construct
  misc_feature 1..20: note = chemically synthesized
  source 1..20: mol_type = other DNA
ggtgtctagaagcccaagca

SEQ ID NO: 53194 - DNA, 20 bp, synthetic construct
  misc_feature 1..20: note = chemically synthesized
  source 1..20: mol_type = other DNA
gtgtctagaagcccaagcaa

SEQ ID NO: 53195 - DNA, 20 bp, synthetic construct
  misc_feature 1..20: note = chemically synthesized
  source 1..20: mol_type = other DNA
ctagaagcccaagcaaaggc

SEQ ID NO: 53196 - DNA, 20 bp, synthetic construct
  misc_feature 1..20: note = chemically synthesized
  source 1..20: mol_type = other DNA
tagaagcccaagcaaaggcc

SEQ ID NO: 53197 - DNA, 20 bp, synthetic construct
  misc_feature 1..20: note = chemically synthesized
  source 1..20: mol_type = other DNA
agaagcccaagcaaaggcca

SEQ ID NO: 53198 - DNA, 20 bp, synthetic construct
  misc_feature 1..20: note = chemically synthesized
  source 1..20: mol_type = other DNA
gaagcccaagcaaaggccag

SEQ ID NO: 53199 - DNA, 20 bp, synthetic construct
  misc_feature 1..20: note = chemically synthesized
  source 1..20: mol_type = other DNA
gcccaagcaaaggccagggg

SEQ ID NO: 53200 - DNA, 20 bp, synthetic construct
  misc_feature 1..20: note = chemically synthesized
  source 1..20: mol_type = other DNA
cccaagcaaaggccaggggt

SEQ ID NO: 53201 - DNA, 20 bp, synthetic construct
  misc_feature 1..20: note = chemically synthesized
  source 1..20: mol_type = other DNA
ccaagcaaaggccaggggtg

SEQ ID NO: 53202 - DNA, 20 bp, synthetic construct
  misc_feature 1..20: note = chemically synthesized
  source 1..20: mol_type = other DNA
caaaggccaggggtggggcg

SEQ ID NO: 53203 - DNA, 20 bp, synthetic construct
  misc_feature 1..20: note = chemically synthesized
  source 1..20: mol_type = other DNA
aaggccaggggtggggcgta

SEQ ID NO: 53204 - DNA, 20 bp, synthetic construct
  misc_feature 1..20: note = chemically synthesized
  source 1..20: mol_type = other DNA
ggccaggggtggggcgtaga

SEQ ID NO: 53205 - DNA, 20 bp, synthetic construct
  misc_feature 1..20: note = chemically synthesized
  source 1..20: mol_type = other DNA
gccaggggtggggcgtagag

SEQ ID NO: 53206 - DNA, 20 bp, synthetic construct
  misc_feature 1..20: note = chemically synthesized
  source 1..20: mol_type = other DNA
ggtggggcgtagagaggcaa

SEQ ID NO: 53207 - DNA, 20 bp, synthetic construct
  misc_feature 1..20: note = chemically synthesized
  source 1..20: mol_type = other DNA
gggcgtagagaggcaatgga

SEQ ID NO: 53208 - DNA, 20 bp, synthetic construct
  misc_feature 1..20: note = chemically synthesized
  source 1..20: mol_type = other DNA
ggcgtagagaggcaatggaa

SEQ ID NO: 53209 - DNA, 20 bp, synthetic construct
  misc_feature 1..20: note = chemically synthesized
  source 1..20: mol_type = other DNA
agaggcaatggaaaggcacc

SEQ ID NO: 53210 - DNA, 20 bp, synthetic construct
  misc_feature 1..20: note = chemically synthesized
  source 1..20: mol_type = other DNA
tggaaaggcacccagacacc

SEQ ID NO: 53211 - DNA, 20 bp, synthetic construct
  misc_feature 1..20: note = chemically synthesized
  source 1..20: mol_type = other DNA
ggaaaggcacccagacaccc

SEQ ID NO: 53212 - DNA, 20 bp, synthetic construct
  misc_feature 1..20: note = chemically synthesized
  source 1..20: mol_type = other DNA
cacccagacacccaggcttc

SEQ ID NO: 53213 - DNA, 20 bp, synthetic construct
  misc_feature 1..20: note = chemically synthesized
  source 1..20: mol_type = other DNA
gacacccaggcttccagcct

SEQ ID NO: 53214 - DNA, 20 bp, synthetic construct
  misc_feature 1..20: note = chemically synthesized
  source 1..20: mol_type = other DNA
ccaggcttccagcctgagcg

SEQ ID NO: 53215 - DNA, 20 bp, synthetic construct
  misc_feature 1..20: note = chemically synthesized
  source 1..20: mol_type = other DNA
aggcttccagcctgagcgcg

SEQ ID NO: 53216 - DNA, 20 bp, synthetic construct
  misc_feature 1..20: note = chemically synthesized
  source 1..20: mol_type = other DNA
gcctgagcgcggagtgcatg

SEQ ID NO: 53217 - DNA, 20 bp, synthetic construct
  misc_feature 1..20: note = chemically synthesized
  source 1..20: mol_type = other DNA
cctgagcgcggagtgcatgc

SEQ ID NO: 53218 - DNA, 20 bp, synthetic construct
  misc_feature 1..20: note = chemically synthesized
  source 1..20: mol_type = other DNA
cggagtgcatgcaggctgcg

SEQ ID NO: 53219 - DNA, 20 bp, synthetic construct
  misc_feature 1..20: note = chemically synthesized
  source 1..20: mol_type = other DNA
agtgcatgcaggctgcgcgg

SEQ ID NO: 53220 - DNA, 20 bp, synthetic construct
  misc_feature 1..20: note = chemically synthesized
  source 1..20: mol_type = other DNA
caggctgcgcggtggccgcc

SEQ ID NO: 53221 - DNA, 20 bp, synthetic construct
  misc_feature 1..20: note = chemically synthesized
  source 1..20: mol_type = other DNA
aggctgcgcggtggccgccc

SEQ ID NO: 53222 - DNA, 20 bp, synthetic construct
  misc_feature 1..20: note = chemically synthesized
  source 1..20: mol_type = other DNA
cgcggtggccgcccgggttg

SEQ ID NO: 53223 - DNA, 20 bp, synthetic construct
  misc_feature 1..20: note = chemically synthesized
  source 1..20: mol_type = other DNA
gcggtggccgcccgggttgc

SEQ ID NO: 53224 - DNA, 20 bp, synthetic construct
  misc_feature 1..20: note = chemically synthesized
  source 1..20: mol_type = other DNA
cggtggccgcccgggttgca

SEQ ID NO: 53225 - DNA, 20 bp, synthetic construct
  misc_feature 1..20: note = chemically synthesized
  source 1..20: mol_type = other DNA
cccgggttgcagggaacgcg

SEQ ID NO: 53226 - DNA, 20 bp, synthetic construct
  misc_feature 1..20: note = chemically synthesized
  source 1..20: mol_type = other DNA
ccgggttgcagggaacgcgc

SEQ ID NO: 53227 - DNA, 20 bp, synthetic construct
  misc_feature 1..20: note = chemically synthesized
  source 1..20: mol_type = other DNA
gttgcagggaacgcgcgggc

SEQ ID NO: 53228 - DNA, 20 bp, synthetic construct
  misc_feature 1..20: note = chemically synthesized
  source 1..20: mol_type = other DNA
cgcgcgggccagcgactctg

SEQ ID NO: 53229 - DNA, 20 bp, synthetic construct
  misc_feature 1..20: note = chemically synthesized
  source 1..20: mol_type = other DNA
accccgtgcccgcactcacc

SEQ ID NO: 53230 - DNA, 20 bp, synthetic construct
  misc_feature 1..20: note = chemically synthesized
  source 1..20: mol_type = other DNA
ccccgtgcccgcactcaccc

SEQ ID NO: 53231 - DNA, 20 bp, synthetic construct
  misc_feature 1..20: note = chemically synthesized
  source 1..20: mol_type = other DNA
gtgcccgcactcacccagga

SEQ ID NO: 53232 - DNA, 20 bp, synthetic construct
  misc_feature 1..20: note = chemically synthesized
  source 1..20: mol_type = other DNA
cgcactcacccaggacggcg

SEQ ID NO: 53233 - DNA, 20 bp, synthetic construct
  misc_feature 1..20: note = chemically synthesized
  source 1..20: mol_type = other DNA
tcacccaggacggcgcagac

SEQ ID NO: 53234 - DNA, 20 bp, synthetic construct
  misc_feature 1..20: note = chemically synthesized
  source 1..20: mol_type = other DNA
cccaggacggcgcagaccag

SEQ ID NO: 53235 - DNA, 20 bp, synthetic construct
  misc_feature 1..20: note = chemically synthesized
  source 1..20: mol_type = other DNA
ccaggacggcgcagaccagc

SEQ ID NO: 53236 - DNA, 20 bp, synthetic construct
  misc_feature 1..20: note = chemically synthesized
  source 1..20: mol_type = other DNA
caggacggcgcagaccagca

SEQ ID NO: 53237 - DNA, 20 bp, synthetic construct
  misc_feature 1..20: note = chemically synthesized
  source 1..20: mol_type = other DNA
gcagaccagcagggctccca

SEQ ID NO: 53238 - DNA, 20 bp, synthetic construct
  misc_feature 1..20: note = chemically synthesized
  source 1..20: mol_type = other DNA
accagcagggctcccacggc

SEQ ID NO: 53239 - DNA, 20 bp, synthetic construct
  misc_feature 1..20: note = chemically synthesized
  source 1..20: mol_type = other DNA
ccacggcgagcctcatcttc

SEQ ID NO: 53240 - DNA, 20 bp, synthetic construct
  misc_feature 1..20: note = chemically synthesized
  source 1..20: mol_type = other DNA
cacggcgagcctcatcttcc

SEQ ID NO: 53241 - DNA, 20 bp, synthetic construct
  misc_feature 1..20: note = chemically synthesized
  source 1..20: mol_type = other DNA
cgagcctcatcttccgggtg

SEQ ID NO: 53242 - DNA, 20 bp, synthetic construct
  misc_feature 1..20: note = chemically synthesized
  source 1..20: mol_type = other DNA
catcttccgggtgcggcgct

SEQ ID NO: 53243 - DNA, 20 bp, synthetic construct
  misc_feature 1..20: note = chemically synthesized
  source 1..20: mol_type = other DNA
cttccgggtgcggcgctgag

SEQ ID NO: 53244 - DNA, 20 bp, synthetic construct
  misc_feature 1..20: note = chemically synthesized
  source 1..20: mol_type = other DNA
cgggtgcggcgctgagcagc

SEQ ID NO: 53245 - DNA, 20 bp, synthetic construct
  misc_feature 1..20: note = chemically synthesized
  source 1..20: mol_type = other DNA
gcggcgctgagcagcgagca

SEQ ID NO: 53246 - DNA, 20 bp, synthetic construct
  misc_feature 1..20: note = chemically synthesized
  source 1..20: mol_type = other DNA
cgctgagcagcgagcacagt

SEQ ID NO: 53247 - DNA, 20 bp, synthetic construct
  misc_feature 1..20: note = chemically synthesized
  source 1..20: mol_type = other DNA
cagtcggactcgcttctgtg

SEQ ID NO: 53248 - DNA, 20 bp, synthetic construct
  misc_feature 1..20: note = chemically synthesized
  source 1..20: mol_type = other DNA
actcgcttctgtgcagcctc

SEQ ID NO: 53249 - DNA, 20 bp, synthetic construct
  misc_feature 1..20: note = chemically synthesized
  source 1..20: mol_type = other DNA
gcgtccctttattccattcc

SEQ ID NO: 53250 - DNA, 20 bp, synthetic construct
  misc_feature 1..20: note = chemically synthesized
  source 1..20: mol_type = other DNA
cctttattccattcccggcc

SEQ ID NO: 53251 - DNA, 20 bp, synthetic construct
  misc_feature 1..20: note = chemically synthesized
  source 1..20: mol_type = other DNA
ctttattccattcccggcct

SEQ ID NO: 53252 - DNA, 20 bp, synthetic construct
  misc_feature 1..20: note = chemically synthesized
  source 1..20: mol_type = other DNA
tattccattcccggcctggg

SEQ ID NO: 53253 - DNA, 20 bp, synthetic construct
  misc_feature 1..20: note = chemically synthesized
  source 1..20: mol_type = other DNA
attccattcccggcctgggc

SEQ ID NO: 53254 - DNA, 20 bp, synthetic construct
  misc_feature 1..20: note = chemically synthesized
  source 1..20: mol_type = other DNA
cattcccggcctgggcgggc

SEQ ID NO: 53255 - DNA, 20 bp, synthetic construct
  misc_feature 1..20: note = chemically synthesized
  source 1..20: mol_type = other DNA
attcccggcctgggcgggct

SEQ ID NO: 53256 - DNA, 20 bp, synthetic construct
  misc_feature 1..20: note = chemically synthesized
  source 1..20: mol_type = other DNA
tttgacctcccgtgtttgtg

SEQ ID NO: 53257 - DNA, 20 bp, synthetic construct
  misc_feature 1..20: note = chemically synthesized
  source 1..20: mol_type = other DNA
acctcccgtgtttgtgcagc

SEQ ID NO: 53258 - DNA, 20 bp, synthetic construct
  misc_feature 1..20: note = chemically synthesized
  source 1..20: mol_type = other DNA
cctcccgtgtttgtgcagcc

SEQ ID NO: 53259 - DNA, 20 bp, synthetic construct
  misc_feature 1..20: note = chemically synthesized
  source 1..20: mol_type = other DNA
cactgatcacctcattttct

SEQ ID NO: 53260 - DNA, 20 bp, synthetic construct
  misc_feature 1..20: note = chemically synthesized
  source 1..20: mol_type = other DNA
tcacctcattttctgagctc

SEQ ID NO: 53261 - DNA, 20 bp, synthetic construct
  misc_feature 1..20: note = chemically synthesized
  source 1..20: mol_type = other DNA
acctcattttctgagctctg

SEQ ID NO: 53262 - DNA, 20 bp, synthetic construct
  misc_feature 1..20: note = chemically synthesized
  source 1..20: mol_type = other DNA
gagctctggagacgacccgc

SEQ ID NO: 53263 - DNA, 20 bp, synthetic construct
  misc_feature 1..20: note = chemically synthesized
  source 1..20: mol_type = other DNA
ctctggagacgacccgcgag

SEQ ID NO: 53264 - DNA, 20 bp, synthetic construct
  misc_feature 1..20: note = chemically synthesized
  source 1..20: mol_type = other DNA
tggagacgacccgcgagtgg

SEQ ID NO: 53265 - DNA, 20 bp, synthetic construct
  misc_feature 1..20: note = chemically synthesized
  source 1..20: mol_type = other DNA
ggagacgacccgcgagtgga

SEQ ID NO: 53266 - DNA, 20 bp, synthetic construct
  misc_feature 1..20: note = chemically synthesized
  source 1..20: mol_type = other DNA
agacgacccgcgagtggaag

SEQ ID NO: 53267 - DNA, 20 bp, synthetic construct
  misc_feature 1..20: note = chemically synthesized
  source 1..20: mol_type = other DNA
acccgcgagtggaaggagtc

SEQ ID NO: 53268 - DNA, 20 bp, synthetic construct
  misc_feature 1..20: note = chemically synthesized
  source 1..20: mol_type = other DNA
cgagtggaaggagtccagca

SEQ ID NO: 53269 - DNA, 20 bp, synthetic construct
  misc_feature 1..20: note = chemically synthesized
  source 1..20: mol_type = other DNA
gtccagcacagaaatgttga

SEQ ID NO: 53270 - DNA, 20 bp, synthetic construct
  misc_feature 1..20: note = chemically synthesized
  source 1..20: mol_type = other DNA
tccagcacagaaatgttgat

SEQ ID NO: 53271 - DNA, 20 bp, synthetic construct
  misc_feature 1..20: note = chemically synthesized
  source 1..20: mol_type = other DNA
agcacagaaatgttgatggg

SEQ ID NO: 53272 - DNA, 20 bp, synthetic construct
  misc_feature 1..20: note = chemically synthesized
  source 1..20: mol_type = other DNA
gcacagaaatgttgatggga

SEQ ID NO: 53273 - DNA, 20 bp, synthetic construct
  misc_feature 1..20: note = chemically synthesized
  source 1..20: mol_type = other DNA
cacagaaatgttgatgggaa

SEQ ID NO: 53274 - DNA, 20 bp, synthetic construct
  misc_feature 1..20: note = chemically synthesized
  source 1..20: mol_type = other DNA
tgttgatgggaagggacatg

SEQ ID NO: 53275 - DNA, 20 bp, synthetic construct
  misc_feature 1..20: note = chemically synthesized
  source 1..20: mol_type = other DNA
aagggacatgaagcacaatg

SEQ ID NO: 53276 - DNA, 20 bp, synthetic construct
  misc_feature 1..20: note = chemically synthesized
  source 1..20: mol_type = other DNA
caatgcagccattgtcatcg

SEQ ID NO: 53277 - DNA, 20 bp, synthetic construct
  misc_feature 1..20: note = chemically synthesized
  source 1..20: mol_type = other DNA
cattgtcatcgcggctcgct

SEQ ID NO: 53278 - DNA, 20 bp, synthetic construct
  misc_feature 1..20: note = chemically synthesized
  source 1..20: mol_type = other DNA
gtgctggactccttccactc

SEQ ID NO: 53279 - DNA, 20 bp, synthetic construct
  misc_feature 1..20: note = chemically synthesized
  source 1..20: mol_type = other DNA
aaaatgaggtgatcagtggg

SEQ ID NO: 53280 - DNA, 20 bp, synthetic construct
  misc_feature 1..20: note = chemically synthesized
  source 1..20: mol_type = other DNA
cagtgggacgagtaaggaag

SEQ ID NO: 53281 - DNA, 20 bp, synthetic construct
  misc_feature 1..20: note = chemically synthesized
  source 1..20: mol_type = other DNA
gcgcccagcccgcccaggcc

SEQ ID NO: 53282 - DNA, 20 bp, synthetic construct
  misc_feature 1..20: note = chemically synthesized
  source 1..20: mol_type = other DNA
cagcccgcccaggccgggaa

SEQ ID NO: 53283 - DNA, 20 bp, synthetic construct
  misc_feature 1..20: note = chemically synthesized
  source 1..20: mol_type = other DNA
gcgccggaggctgcacagaa

SEQ ID NO: 53284 - DNA, 20 bp, synthetic construct
  misc_feature 1..20: note = chemically synthesized
  source 1..20: mol_type = other DNA
ccctgctggtctgcgccgtc

SEQ ID NO: 53285 - DNA, 20 bp, synthetic construct
  misc_feature 1..20: note = chemically synthesized
  source 1..20: mol_type = other DNA
gctggtctgcgccgtcctgg

SEQ ID NO: 53286 - DNA, 20 bp, synthetic construct
  misc_feature 1..20: note = chemically synthesized
  source 1..20: mol_type = other DNA
gtcctgggtgagtgcgggca

SEQ ID NO: 53287 - DNA, 20 bp, synthetic construct
  misc_feature 1..20: note = chemically synthesized
  source 1..20: mol_type = other DNA
gcgggcacggggtagcaccg

SEQ ID NO: 53288 - DNA, 20 bp, synthetic construct
  misc_feature 1..20: note = chemically synthesized
  source 1..20: mol_type = other DNA
tccgcgctcaggctggaagc

SEQ ID NO: 53289 - DNA, 20 bp, synthetic construct
  misc_feature 1..20: note = chemically synthesized
  source 1..20: mol_type = other DNA
caggctggaagcctgggtgt

SEQ ID NO: 53290 - DNA, 20 bp, synthetic construct
  misc_feature 1..20: note = chemically synthesized
  source 1..20: mol_type = other DNA
agcatggcattcaaggcctc

SEQ ID NO: 53291 - DNA, 20 bp, synthetic construct
  misc_feature 1..20: note = chemically synthesized
  source 1..20: mol_type = other DNA
ctttcagaggctgatgtccc

SEQ ID NO: 53292 - DNA, 20 bp, synthetic construct
  misc_feature 1..20: note = chemically synthesized
  source 1..20: mol_type = other DNA
gccatcgagcggtcagagca

SEQ ID NO: 53293 - DNA, 20 bp, synthetic construct
  misc_feature 1..20: note = chemically synthesized
  source 1..20: mol_type = other DNA
ggggtttgaagccagacttc

SEQ ID NO: 53294 - DNA, 20 bp, synthetic construct
  misc_feature 1..20: note = chemically synthesized
  source 1..20: mol_type = other DNA
ggccggctcctcaccaggga

SEQ ID NO: 53295 - DNA, 20 bp, synthetic construct
  misc_feature 1..20: note = chemically synthesized
  source 1..20: mol_type = other DNA
tcatcacagcacttgcctgg

SEQ ID NO: 53296 - DNA, 20 bp, synthetic construct
  misc_feature 1..20: note = chemically synthesized
  source 1..20: mol_type = other DNA
cttgcctgggagggtcaaat

SEQ ID NO: 53297 - DNA, 20 bp, synthetic construct
  misc_feature 1..20: note = chemically synthesized
  source 1..20: mol_type = other DNA
ggtcagcgaggtggcagatg

SEQ ID NO: 53298 - DNA, 20 bp, synthetic construct
  misc_feature 1..20: note = chemically synthesized
  source 1..20: mol_type = other DNA
cacaggcttatgttgcctcc

SEQ ID NO: 53299 - DNA, 20 bp, synthetic construct
  misc_feature 1..20: note = chemically synthesized
  source 1..20: mol_type = other DNA
catgggccaagagggaaaat

SEQ ID NO: 53300 - DNA, 20 bp, synthetic construct
  misc_feature 1..20: note = chemically synthesized
  source 1..20: mol_type = other DNA
agagggaaaatgggggtcgc

SEQ ID NO: 53301 - DNA, 20 bp, synthetic construct
  misc_feature 1..20: note = chemically synthesized
  source 1..20: mol_type = other DNA
gcctcctctccacaggcttt

SEQ ID NO: 53302 - DNA, 20 bp, synthetic construct
  misc_feature 1..20: note = chemically synthesized
  source 1..20: mol_type = other DNA
gtggatcttcttcagagcca

SEQ ID NO: 53303 - DNA, 20 bp, synthetic construct
  misc_feature 1..20: note = chemically synthesized
  source 1..20: mol_type = other DNA
ccttgctgtggtggcccaca

SEQ ID NO: 53304 - DNA, 20 bp, synthetic construct
  misc_feature 1..20: note = chemically synthesized
  source 1..20: mol_type = other DNA
agggcaaaagctcatgtgat

SEQ ID NO: 53305 - DNA, 20 bp, synthetic construct
  misc_feature 1..20: note = chemically synthesized
  source 1..20: mol_type = other DNA
gatgctgtctctgcaaccac

SEQ ID NO: 53306 - DNA, 20 bp, synthetic construct
  misc_feature 1..20: note = chemically synthesized
  source 1..20: mol_type = other DNA
ggctggcttcagcttttttt

SEQ ID NO: 53307 - DNA, 20 bp, synthetic construct
  misc_feature 1..20: note = chemically synthesized
  source 1..20: mol_type = other DNA
aaaaagtgtggtgaaaatgg

SEQ ID NO: 53308 - DNA, 20 bp, synthetic construct
  misc_feature 1..20: note = chemically synthesized
  source 1..20: mol_type = other DNA
tggagacagaggggagactg

SEQ ID NO: 53309 - DNA, 20 bp, synthetic construct
  misc_feature 1..20: note = chemically synthesized
  source 1..20: mol_type = other DNA
aggggagactgttgaatttg

SEQ ID NO: 53310 - DNA, 20 bp, synthetic construct
  misc_feature 1..20: note = chemically synthesized
  source 1..20: mol_type = other DNA
ctaaacagagagcaacagac

SEQ ID NO: 53311 - DNA, 20 bp, synthetic construct
  misc_feature 1..20: note = chemically synthesized
  source 1..20: mol_type = other DNA
ccctcaactactggccaaga

SEQ ID NO: 53312 - DNA, 20 bp, synthetic construct
  misc_feature 1..20: note = chemically synthesized
  source 1..20: mol_type = other DNA
ggccaagaaggggtgtaact

SEQ ID NO: 53313 - DNA, 20 bp, synthetic construct
  misc_feature 1..20: note = chemically synthesized
  source 1..20: mol_type = other DNA
atgttttcttcttttgtgcc

SEQ ID NO: 53314 - DNA, 20 bp, synthetic construct
  misc_feature 1..20: note = chemically synthesized
  source 1..20: mol_type = other DNA
tgtgccctgagtagcagacc

SEQ ID NO: 53315 - DNA, 20 bp, synthetic construct
  misc_feature 1..20: note = chemically synthesized
  source 1..20: mol_type = other DNA
ctggcttggccaacgacaag

SEQ ID NO: 53316 - DNA, 20 bp, synthetic construct
  misc_feature 1..20: note = chemically synthesized
  source 1..20: mol_type = other DNA
caacgacaagcagggtgacc

SEQ ID NO: 53317 - DNA, 20 bp, synthetic construct
  misc_feature 1..20: note = chemically synthesized
  source 1..20: mol_type = other DNA
aaaaaaaaaggcatcattct

SEQ ID NO: 53318 - DNA, 20 bp, synthetic construct
  misc_feature 1..20: note = chemically synthesized
  source 1..20: mol_type = other DNA
gaggtagcaagccaatgtgt

SEQ ID NO: 53319 - DNA, 20 bp, synthetic construct
  misc_feature 1..20: note = chemically synthesized
  source 1..20: mol_type = other DNA
cagtgatgggaggagacaag

SEQ ID NO: 53320 - DNA, 20 bp, synthetic construct
  misc_feature 1..20: note = chemically synthesized
  source 1..20: mol_type = other DNA
ctgcacccctctggccagca

SEQ ID NO: 53321 - DNA, 20 bp, synthetic construct
  misc_feature 1..20: note = chemically synthesized
  source 1..20: mol_type = other DNA
accttctattggctcagact

SEQ ID NO: 53322 - DNA, 20 bp, synthetic construct
  misc_feature 1..20: note = chemically synthesized
  source 1..20: mol_type = other DNA
gccctgtagtgttcatggac

SEQ ID NO: 53323 - DNA, 20 bp, synthetic construct
  misc_feature 1..20: note = chemically synthesized
  source 1..20: mol_type = other DNA
tgagaggaggacaggactga

SEQ ID NO: 53324 - DNA, 20 bp, synthetic construct
  misc_feature 1..20: note = chemically synthesized
  source 1..20: mol_type = other DNA
gctgtctctccctcagcata

SEQ ID NO: 53325 - DNA, 20 bp, synthetic construct
  misc_feature 1..20: note = chemically synthesized
  source 1..20: mol_type = other DNA
agcatgaggccactaagtgc

SEQ ID NO: 53326 - DNA, 20 bp, synthetic construct
  misc_feature 1..20: note = chemically synthesized
  source 1..20: mol_type = other DNA
cacaagcaacactgggacca

SEQ ID NO: 53327 - DNA, 20 bp, synthetic construct
  misc_feature 1..20: note = chemically synthesized
  source 1..20: mol_type = other DNA
gcaacactgggaccatcgga

SEQ ID NO: 53328 - DNA, 20 bp, synthetic construct
  misc_feature 1..20: note = chemically synthesized
  source 1..20: mol_type = other DNA
ggcacaagttctactgcatt

SEQ ID NO: 53329 - DNA, 20 bp, synthetic construct
  misc_feature 1..20: note = chemically synthesized
  source 1..20: mol_type = other DNA
gaccaccctctgctggccag

SEQ ID NO: 53330 - DNA, 20 bp, synthetic construct
  misc_feature 1..20: note = chemically synthesized
  source 1..20: mol_type = other DNA
ctatggaaaaccagcggggg

SEQ ID NO: 53331 - DNA, 20 bp, synthetic construct
  misc_feature 1..20: note = chemically synthesized
  source 1..20: mol_type = other DNA
ttgccatctttttgagaaga

SEQ ID NO: 53332 - DNA, 20 bp, synthetic construct
  misc_feature 1..20: note = chemically synthesized
  source 1..20: mol_type = other DNA
agaagagggagtgagactca

SEQ ID NO: 53333 - DNA, 20 bp, synthetic construct
  misc_feature 1..20: note = chemically synthesized
  source 1..20: mol_type = other DNA
gtcgttggccaagccaggcc

SEQ ID NO: 53334 - DNA, 20 bp, synthetic construct
  misc_feature 1..20: note = chemically synthesized
  source 1..20: mol_type = other DNA
ggccaagccaggcctagaat

SEQ ID NO: 53335 - DNA, 20 bp, synthetic construct
  misc_feature 1..20: note = chemically synthesized
  source 1..20: mol_type = other DNA
agaatctgggtctccagact

SEQ ID NO: 53336 - DNA, 20 bp, synthetic construct
  misc_feature 1..20: note = chemically synthesized
  source 1..20: mol_type = other DNA
gcacaaaagaagaaaacatt

SEQ ID NO: 53337 - DNA, 20 bp, synthetic construct
  misc_feature 1..20: note = chemically synthesized
  source 1..20: mol_type = other DNA
ccccttcttggccagtagtt

SEQ ID NO: 53338 - DNA, 20 bp, synthetic construct
  misc_feature 1..20: note = chemically synthesized
  source 1..20: mol_type = other DNA
gttgagggtaaattaacgaa

SEQ ID NO: 53339 - DNA, 20 bp, synthetic construct
  misc_feature 1..20: note = chemically synthesized
  source 1..20: mol_type = other DNA
aaaaaaagctgaagccagcc

SEQ ID NO: 53340 - DNA, 20 bp, synthetic construct
  misc_feature 1..20: note = chemically synthesized
  source 1..20: mol_type = other DNA
agaggaggcccacagctctc

SEQ ID NO: 53341 - DNA, 20 bp, synthetic construct
  misc_feature 1..20: note = chemically synthesized
  source 1..20: mol_type = other DNA
atgcatgaggaggggccacc

SEQ ID NO: 53342 - DNA, 20 bp, synthetic construct
  misc_feature 1..20: note = chemically synthesized
  source 1..20: mol_type = other DNA
cctccacaaagccctgcctc

SEQ ID NO: 53343 - DNA, 20 bp, synthetic construct
  misc_feature 1..20: note = chemically synthesized
  source 1..20: mol_type = other DNA
cctccagagttcccataggc

SEQ ID NO: 53344 - DNA, 20 bp, synthetic construct
  misc_feature 1..20: note = chemically synthesized
  source 1..20: mol_type = other DNA
gcctgtgaagtgctctgtgc

SEQ ID NO: 53345 - DNA, 20 bp, synthetic construct
  misc_feature 1..20: note = chemically synthesized
  source 1..20: mol_type = other DNA
ggggataaaggcaagtaacg

SEQ ID NO: 53346 - DNA, 20 bp, synthetic construct
  misc_feature 1..20: note = chemically synthesized
  source 1..20: mol_type = other DNA
taacgtggggtcctctctca

SEQ ID NO: 53347 - DNA, 20 bp, synthetic construct
  misc_feature 1..20: note = chemically synthesized
  source 1..20: mol_type = other DNA
aacagtgtgacaaatgcccc

SEQ ID NO: 53348 - DNA, 20 bp, synthetic construct
  misc_feature 1..20: note = chemically synthesized
  source 1..20: mol_type = other DNA
catgaatggcaggcagaagt

SEQ ID NO: 53349 - DNA, 20 bp, synthetic construct
  misc_feature 1..20: note = chemically synthesized
  source 1..20: mol_type = other DNA
ggccccacctcaggaggtcg

SEQ ID NO: 53350 - DNA, 20 bp, synthetic construct
  misc_feature 1..20: note = chemically synthesized
  source 1..20: mol_type = other DNA
cgtcagccactgccccatag

SEQ ID NO: 53351 - DNA, 20 bp, synthetic construct
  misc_feature 1..20: note = chemically synthesized
  source 1..20: mol_type = other DNA
ggtgaggagccggccaggac

SEQ ID NO: 53352 - DNA, 20 bp, synthetic construct
  misc_feature 1..20: note = chemically synthesized
  source 1..20: mol_type = other DNA
gggacatcagcctctgaaag

SEQ ID NO: 53353 - DNA, 20 bp, synthetic construct
  misc_feature 1..20: note = chemically synthesized
  source 1..20: mol_type = other DNA
atggtcagacccgggaggcc

SEQ ID NO: 53354 - DNA, 20 bp, synthetic construct
  misc_feature 1..20: note = chemically synthesized
  source 1..20: mol_type = other DNA
aggccttgaatgccatgcta

SEQ ID NO: 53355 - DNA, 20 bp, synthetic construct
  misc_feature 1..20: note = chemically synthesized
  source 1..20: mol_type = other DNA
cttgacaagaggcagcagca

SEQ ID NO: 53356 - DNA, 20 bp, synthetic construct
  misc_feature 1..20: note = chemically synthesized
  source 1..20: mol_type = other DNA
aggaggagggggagaagaca

SEQ ID NO: 53357 - DNA, 20 bp, synthetic construct
  misc_feature 1..20: note = chemically synthesized
  source 1..20: mol_type = other DNA
tagaagcccaagcaaaggcc

SEQ ID NO: 53358 - DNA, 20 bp, synthetic construct
  misc_feature 1..20: note = chemically synthesized
  source 1..20: mol_type = other DNA
ccaggcttccagcctgagcg

SEQ ID NO: 53359 - DNA, 20 bp, synthetic construct
  misc_feature 1..20: note = chemically synthesized
  source 1..20: mol_type = other DNA
gcaggctgcgcggtggccgc

SEQ ID NO: 53360 - DNA, 20 bp, synthetic construct
  misc_feature 1..20: note = chemically synthesized
  source 1..20: mol_type = other DNA
cccacggcgagcctcatctt

SEQ ID NO: 53361 - DNA, 20 bp, synthetic construct
  misc_feature 1..20: note = chemically synthesized
  source 1..20: mol_type = other DNA
gacctcccgtgtttgtgcag

SEQ ID NO: 53362 - DNA, 20 bp, synthetic construct
  misc_feature 1..20: note = chemically synthesized
  source 1..20: mol_type = other DNA
ctgagctctggagacgaccc

SEQ ID NO: 53363 - DNA, 20 bp, synthetic construct
  misc_feature 1..20: note = chemically synthesized
  source 1..20: mol_type = other DNA
ggagacgacccgcgagtgga

SEQ ID NO: 53364 - DNA, 20 bp, synthetic construct
  misc_feature 1..20: note = chemically synthesized
  source 1..20: mol_type = other DNA
tcgcgggtcgtctccagagc

SEQ ID NO: 53365 - DNA, 20 bp, synthetic construct
  misc_feature 1..20: note = chemically synthesized
  source 1..20: mol_type = other DNA
tggccaagaaggggtgtaac

SEQ ID NO: 53366 - DNA, 20 bp, synthetic construct
  misc_feature 1..20: note = chemically synthesized
  source 1..20: mol_type = other DNA
aaccttctattggctcagac

SEQ ID NO: 53367 - DNA, 20 bp, synthetic construct
  misc_feature 1..20: note = chemically synthesized
  source 1..20: mol_type = other DNA
ggtcccagtgttgcttgtgt

SEQ ID NO: 53368 - DNA, 20 bp, synthetic construct
  misc_feature 1..20: note = chemically synthesized
  source 1..20: mol_type = other DNA
agggagagacagcatcgccc

SEQ ID NO: 53369 - DNA, 20 bp, synthetic construct
  misc_feature 1..20: note = chemically synthesized
  source 1..20: mol_type = other DNA
gagaagagggagtgagactc

SEQ ID NO: 53370 - DNA, 20 bp, synthetic construct
  misc_feature 1..20: note = chemically synthesized
  source 1..20: mol_type = other DNA
tgtcgttggccaagccaggc

SEQ ID NO: 53371 - DNA, 20 bp, synthetic construct
  misc_feature 1..20: note = chemically synthesized
  source 1..20: mol_type = other DNA
ctgctactcagggcacaaaa

SEQ ID NO: 53372 - DNA, 20 bp, synthetic construct
  misc_feature 1..20: note = chemically synthesized
  source 1..20: mol_type = other DNA
agttgagggtaaattaacga

SEQ ID NO: 53373 - DNA, 20 bp, synthetic construct
  misc_feature 1..20: note = chemically synthesized
  source 1..20: mol_type = other DNA
gcctccagagttcccatagg

SEQ ID NO: 53374 - DNA, 20 bp, synthetic construct
  misc_feature 1..20: note = chemically synthesized
  source 1..20: mol_type = other DNA
ggaattgctagcttatgggg

SEQ ID NO: 53375 - DNA, 20 bp, synthetic construct
  misc_feature 1..20: note = chemically synthesized
  source 1..20: mol_type = other DNA
gcgagtggaaggagtccagc

SEQ ID NO: 53376 - DNA, 20 bp, synthetic construct
  misc_feature 1..20: note = chemically synthesized
  source 1..20: mol_type = other DNA
agcacgtctaaccaggttat

SEQ ID NO: 53377 - DNA, 20 bp, synthetic construct
  misc_feature 1..20: note = chemically synthesized
  source 1..20: mol_type = other DNA
gccaatgtgttggggtagct

SEQ ID NO: 53378 - DNA, 20 bp, synthetic construct
  misc_feature 1..20: note = chemically synthesized
  source 1..20: mol_type = other DNA
ctgtgtctggctgtccctga

SEQ ID NO: 53379 - DNA, 20 bp, synthetic construct
  misc_feature 1..20: note = chemically synthesized
  source 1..20: mol_type = other DNA
ggcttgctacctcaactatg

SEQ ID NO: 53380 - DNA, 20 bp, synthetic construct
  misc_feature 1..20: note = chemically synthesized
  source 1..20: mol_type = other DNA
ctactcagggcacaaaagaa

SEQ ID NO: 53381 - DNA, 20 bp, synthetic construct
  misc_feature 1..20: note = chemically synthesized
  source 1..20: mol_type = other DNA
ctctctgtttaggaagaact

SEQ ID NO: 53382 - DNA, 20 bp, synthetic construct
  misc_feature 1..20: note = chemically synthesized
  source 1..20: mol_type = other DNA
attgctagcttatggggaga

SEQ ID NO: 53383 - DNA, 20 bp, synthetic construct
  misc_feature 1..20: note = chemically synthesized
  source 1..20: mol_type = other DNA
ccgcgatgacaatggctgca

SEQ ID NO: 53384 - DNA, 20 bp, synthetic construct
  misc_feature 1..20: note = chemically synthesized
  source 1..20: mol_type = other DNA
aggaaggggggttgggagag

SEQ ID NO: 53385 - DNA, 20 bp, synthetic construct
  misc_feature 1..20: note = chemically synthesized
  source 1..20: mol_type = other DNA
gctgcacaaacacgggaggt

SEQ ID NO: 53386 - DNA, 20 bp, synthetic construct
  misc_feature 1..20: note = chemically synthesized
  source 1..20: mol_type = other DNA
ctctacgccccacccctggc

SEQ ID NO: 53387 - DNA, 20 bp, synthetic construct
  misc_feature 1..20: note = chemically synthesized
  source 1..20: mol_type = other DNA
gccccacccctggcctttgc

SEQ ID NO: 53388 - DNA, 20 bp, synthetic construct
  misc_feature 1..20: note = chemically synthesized
  source 1..20: mol_type = other DNA
gccatcgagcggtcagagca

SEQ ID NO: 53389 - DNA, 20 bp, synthetic construct
  misc_feature 1..20: note = chemically synthesized
  source 1..20: mol_type = other DNA
tggggcatttgtcacactgt

SEQ ID NO: 53390 - DNA, 20 bp, synthetic construct
  misc_feature 1..20: note = chemically synthesized
  source 1..20: mol_type = other DNA
ttgtcacactgttggggctt

SEQ ID NO: 53391 - DNA, 20 bp, synthetic construct
  misc_feature 1..20: note = chemically synthesized
  source 1..20: mol_type = other DNA
acactgttggggcttccacg

SEQ ID NO: 53392 - DNA, 20 bp, synthetic construct
  misc_feature 1..20: note = chemically synthesized
  source 1..20: mol_type = other DNA
gcctatgggaactctggagg

SEQ ID NO: 53393 - DNA, 20 bp, synthetic construct
  misc_feature 1..20: note = chemically synthesized
  source 1..20: mol_type = other DNA
ggctttgtggaggggctgcc

SEQ ID NO: 53394 - DNA, 20 bp, synthetic construct
  misc_feature 1..20: note = chemically synthesized
  source 1..20: mol_type = other DNA
ccacaggcttatgttgcctc

SEQ ID NO: 53395 - DNA, 20 bp, synthetic construct
  misc_feature 1..20: note = chemically synthesized
  source 1..20: mol_type = other DNA
gagctgtgggcctcctctcc

SEQ ID NO: 53396 - DNA, 20 bp, synthetic construct
  misc_feature 1..20: note = chemically synthesized
  source 1..20: mol_type = other DNA
ggatgctgtctctgcaacca

SEQ ID NO: 53397 - DNA, 20 bp, synthetic construct
  misc_feature 1..20: note = chemically synthesized
  source 1..20: mol_type = other DNA
gattttaatagttacccatg

SEQ ID NO: 53398 - DNA, 20 bp, synthetic construct
  misc_feature 1..20: note = chemically synthesized
  source 1..20: mol_type = other DNA
aatagttacccatggctggc

SEQ ID NO: 53399 - DNA, 20 bp, synthetic construct
  misc_feature 1..20: note = chemically synthesized
  source 1..20: mol_type = other DNA
aggggagactgttgaatttg

SEQ ID NO: 53400 - DNA, 20 bp, synthetic construct
  misc_feature 1..20: note = chemically synthesized
  source 1..20: mol_type = other DNA
ccaagaaggggtgtaactca

SEQ ID NO: 53401 - DNA, 20 bp, synthetic construct
  misc_feature 1..20: note = chemically synthesized
  source 1..20: mol_type = other DNA
gcagacccagagtctggaga

SEQ ID NO: 53402 - DNA, 20 bp, synthetic construct
  misc_feature 1..20: note = chemically synthesized
  source 1..20: mol_type = other DNA
ctggagacccagattctagg

SEQ ID NO: 53403 - DNA, 20 bp, synthetic construct
  misc_feature 1..20: note = chemically synthesized
  source 1..20: mol_type = other DNA
aagatggcaattcctccccc

SEQ ID NO: 53404 - DNA, 20 bp, synthetic construct
  misc_feature 1..20: note = chemically synthesized
  source 1..20: mol_type = other DNA
tgaaaacgccctgtgcatac

SEQ ID NO: 53405 - DNA, 20 bp, synthetic construct
  misc_feature 1..20: note = chemically synthesized
  source 1..20: mol_type = other DNA
agacaaggcggatacagagg

SEQ ID NO: 53406 - DNA, 20 bp, synthetic construct
  misc_feature 1..20: note = chemically synthesized
  source 1..20: mol_type = other DNA
agcatgaggccactaagtgc

SEQ ID NO: 53407 - DNA, 20 bp, synthetic construct
  misc_feature 1..20: note = chemically synthesized
  source 1..20: mol_type = other DNA
attccatccgatggtcccag

SEQ ID NO: 53408 - DNA, 20 bp, synthetic construct
  misc_feature 1..20: note = chemically synthesized
  source 1..20: mol_type = other DNA
tgtgtgaagaaagcctccta

SEQ ID NO: 53409 - DNA, 20 bp, synthetic construct
  misc_feature 1..20: note = chemically synthesized
  source 1..20: mol_type = other DNA
gccctgatgcaatcaaggta

SEQ ID NO: 53410 - DNA, 20 bp, synthetic construct
  misc_feature 1..20: note = chemically synthesized
  source 1..20: mol_type = other DNA
actgggaccatcggatggaa

SEQ ID NO: 53411 - DNA, 20 bp, synthetic construct
  misc_feature 1..20: note = chemically synthesized
  source 1..20: mol_type = other DNA
tccgacactgcacaccatct

SEQ ID NO: 53412 - DNA, 20 bp, synthetic construct
  misc_feature 1..20: note = chemically synthesized
  source 1..20: mol_type = other DNA
gaaggttgccctaatggcct

SEQ ID NO: 53413 - DNA, 20 bp, synthetic construct
  misc_feature 1..20: note = chemically synthesized
  source 1..20: mol_type = other DNA
cataagcctcagtatgcaca

SEQ ID NO: 53414 - DNA, 20 bp, synthetic construct
  misc_feature 1..20: note = chemically synthesized
  source 1..20: mol_type = other DNA
gttttcagctaccccaacac

SEQ ID NO: 53415 - DNA, 20 bp, synthetic construct
  misc_feature 1..20: note = chemically synthesized
  source 1..20: mol_type = other DNA
ttttttttaacccaaggtca

SEQ ID NO: 53416 - DNA, 20 bp, synthetic construct
  misc_feature 1..20: note = chemically synthesized
  source 1..20: mol_type = other DNA
tgtaactcttgtctgttgct

SEQ ID NO: 53417 - DNA, 20 bp, synthetic construct
  misc_feature 1..20: note = chemically synthesized
  source 1..20: mol_type = other DNA
agagacagcatccctatcac

SEQ ID NO: 53418 - DNA, 20 bp, synthetic construct
  misc_feature 1..20: note = chemically synthesized
  source 1..20: mol_type = other DNA
gggtcctctctcaaggaatt

SEQ ID NO: 53419 - DNA, 20 bp, synthetic construct
  misc_feature 1..20: note = chemically synthesized
  source 1..20: mol_type = other DNA
caggacttggatccaagaag

SEQ ID NO: 53420 - DNA, 20 bp, synthetic construct
  misc_feature 1..20: note = chemically synthesized
  source 1..20: mol_type = other DNA
atgctctgaccgctcgatgg

SEQ ID NO: 53421 - DNA, 20 bp, synthetic construct
  misc_feature 1..20: note = chemically synthesized
  source 1..20: mol_type = other DNA
cttgacaagaggcagcagca

SEQ ID NO: 53422 - DNA, 20 bp, synthetic construct
  misc_feature 1..20: note = chemically synthesized
  source 1..20: mol_type = other DNA
tgataacctggttagacgtg

SEQ ID NO: 53423 - DNA, 20 bp, synthetic construct
  misc_feature 1..20: note = chemically synthesized
  source 1..20: mol_type = other DNA
atttattgtatttcactgct

SEQ ID NO: 53424 - DNA, 20 bp, synthetic construct
  misc_feature 1..20: note = chemically synthesized
  source 1..20: mol_type = other DNA
atggaaaggcacccagacac

SEQ ID NO: 53425 - DNA, 20 bp, synthetic construct
  misc_feature 1..20: note = chemically synthesized
  source 1..20: mol_type = other DNA
tgagcagcgagcacagtcgg

SEQ ID NO: 53426 - DNA, 20 bp, synthetic construct
  misc_feature 1..20: note = chemically synthesized
  source 1..20: mol_type = other DNA
tgggcgcaatctttgacctc

SEQ ID NO: 53427 - DNA, 22 bp, synthetic construct
  misc_feature 1..22: note = chemically synthesized
  source 1..22: mol_type = other DNA
cattgtgcttcatgtcccttcc

SEQ ID NO: 53428 - DNA, 22 bp, synthetic construct
  misc_feature 1..22: note = chemically synthesized
  source 1..22: mol_type = other DNA
tgcttcatgtcccttcccatca

SEQ ID NO: 53429 - DNA, 22 bp, synthetic construct
  misc_feature 1..22: note = chemically synthesized
  source 1..22: mol_type = other DNA
catgtcccttcccatcaacatt

SEQ ID NO: 53430 - DNA, 22 bp, synthetic construct
  misc_feature 1..22: note = chemically synthesized
  source 1..22: mol_type = other DNA
atgtcccttcccatcaacattt

SEQ ID NO: 53431 - DNA, 22 bp, synthetic construct
  misc_feature 1..22: note = chemically synthesized
  source 1..22: mol_type = other DNA
cccatcaacatttctgtgctgg

SEQ ID NO: 53432 - DNA, 22 bp, synthetic construct
  misc_feature 1..22: note = chemically synthesized
  source 1..22: mol_type = other DNA
ccatcaacatttctgtgctgga

SEQ ID NO: 53433 - DNA, 22 bp, synthetic construct
  misc_feature 1..22: note = chemically synthesized
  source 1..22: mol_type = other DNA
ctgtgctggactccttccactc

SEQ ID NO: 53434 - DNA, 22 bp, synthetic construct
  misc_feature 1..22: note = chemically synthesized
  source 1..22: mol_type = other DNA
tgtgctggactccttccactcg

SEQ ID NO: 53435 - DNA, 22 bp, synthetic construct
  misc_feature 1..22: note = chemically synthesized
  source 1..22: mol_type = other DNA
tgctggactccttccactcgcg

SEQ ID NO: 53436 - DNA, 22 bp, synthetic construct
  misc_feature 1..22: note = chemically synthesized
  source 1..22: mol_type = other DNA
gactccttccactcgcgggtcg

SEQ ID NO: 53437 - DNA, 22 bp, synthetic construct
  misc_feature 1..22: note = chemically synthesized
  source 1..22: mol_type = other DNA
cttccactcgcgggtcgtctcc

SEQ ID NO: 53438 - DNA, 22 bp, synthetic construct
  misc_feature 1..22: note = chemically synthesized
  source 1..22: mol_type = other DNA
ccactcgcgggtcgtctccaga

SEQ ID NO: 53439 - DNA, 22 bp, synthetic construct
  misc_feature 1..22: note = chemically synthesized
  source 1..22: mol_type = other DNA
cactcgcgggtcgtctccagag

SEQ ID NO: 53440 - DNA, 22 bp, synthetic construct
  misc_feature 1..22: note = chemically synthesized
  source 1..22: mol_type = other DNA
gcgggtcgtctccagagctcag

SEQ ID NO: 53441 - DNA, 22 bp, synthetic construct
  misc_feature 1..22: note = chemically synthesized
  source 1..22: mol_type = other DNA
cagagctcagaaaatgaggtga

SEQ ID NO: 53442 - DNA, 22 bp, synthetic construct
  misc_feature 1..22: note = chemically synthesized
  source 1..22: mol_type = other DNA
agaaaatgaggtgatcagtggg

SEQ ID NO: 53443 - DNA, 22 bp, synthetic construct
  misc_feature 1..22: note = chemically synthesized
  source 1..22: mol_type = other DNA
ggagaggggcgattgggcaacc

SEQ ID NO: 53444 - DNA, 22 bp, synthetic construct
  misc_feature 1..22: note = chemically synthesized
  source 1..22: mol_type = other DNA
ggcaacccggctgcacaaacac

SEQ ID NO: 53445 - DNA, 22 bp, synthetic construct
  misc_feature 1..22: note = chemically synthesized
  source 1..22: mol_type = other DNA
cacaaacacgggaggtcaaaga

SEQ ID NO: 53446 - DNA, 22 bp, synthetic construct
  misc_feature 1..22: note = chemically synthesized
  source 1..22: mol_type = other DNA
cgcccagcccgcccaggccggg

SEQ ID NO: 53447 - DNA, 22 bp, synthetic construct
  misc_feature 1..22: note = chemically synthesized
  source 1..22: mol_type = other DNA
cacagaagcgagtccgactgtg

SEQ ID NO: 53448 - DNA, 22 bp, synthetic construct
  misc_feature 1..22: note = chemically synthesized
  source 1..22: mol_type = other DNA
tgctcgctgctcagcgccgcac

SEQ ID NO: 53449 - DNA, 22 bp, synthetic construct
  misc_feature 1..22: note = chemically synthesized
  source 1..22: mol_type = other DNA
gctgctcagcgccgcacccgga

SEQ ID NO: 53450 - DNA, 22 bp, synthetic construct
  misc_feature 1..22: note = chemically synthesized
  source 1..22: mol_type = other DNA
ctcagcgccgcacccggaagat

SEQ ID NO: 53451 - DNA, 22 bp, synthetic construct
  misc_feature 1..22: note = chemically synthesized
  source 1..22: mol_type = other DNA
agcgccgcacccggaagatgag

SEQ ID NO: 53452 - DNA, 22 bp, synthetic construct
  misc_feature 1..22: note = chemically synthesized
  source 1..22: mol_type = other DNA
gccgtgggagccctgctggtct

SEQ ID NO: 53453 - DNA, 22 bp, synthetic construct
  misc_feature 1..22: note = chemically synthesized
  source 1..22: mol_type = other DNA
ctggtctgcgccgtcctgggtg

SEQ ID NO: 53454 - DNA, 22 bp, synthetic construct
  misc_feature 1..22: note = chemically synthesized
  source 1..22: mol_type = other DNA
gtctgcgccgtcctgggtgagt

SEQ ID NO: 53455 - DNA, 22 bp, synthetic construct
  misc_feature 1..22: note = chemically synthesized
  source 1..22: mol_type = other DNA
cgccgtcctgggtgagtgcggg

SEQ ID NO: 53456 - DNA, 22 bp, synthetic construct
  misc_feature 1..22: note = chemically synthesized
  source 1..22: mol_type = other DNA
ggtgagtgcgggcacggggtag

SEQ ID NO: 53457 - DNA, 22 bp, synthetic construct
  misc_feature 1..22: note = chemically synthesized
  source 1..22: mol_type = other DNA
gcccgcgcgttccctgcaaccc

SEQ ID NO: 53458 - DNA, 22 bp, synthetic construct
  misc_feature 1..22: note = chemically synthesized
  source 1..22: mol_type = other DNA
cctgcaacccgggcggccaccg

SEQ ID NO: 53459 - DNA, 22 bp, synthetic construct
  misc_feature 1..22: note = chemically synthesized
  source 1..22: mol_type = other DNA
caacccgggcggccaccgcgca

SEQ ID NO: 53460 - DNA, 22 bp, synthetic construct
  misc_feature 1..22: note = chemically synthesized
  source 1..22: mol_type = other DNA
catgcactccgcgctcaggctg

SEQ ID NO: 53461 - DNA, 22 bp, synthetic construct
  misc_feature 1..22: note = chemically synthesized
  source 1..22: mol_type = other DNA
cgcgctcaggctggaagcctgg

SEQ ID NO: 53462 - DNA, 22 bp, synthetic construct
  misc_feature 1..22: note = chemically synthesized
  source 1..22: mol_type = other DNA
aggctggaagcctgggtgtctg

SEQ ID NO: 53463 - DNA, 22 bp, synthetic construct
  misc_feature 1..22: note = chemically synthesized
  source 1..22: mol_type = other DNA
gaagcctgggtgtctgggtgcc

SEQ ID NO: 53464 - DNA, 22 bp, synthetic construct
  misc_feature 1..22: note = chemically synthesized
  source 1..22: mol_type = other DNA
ggtgtctgggtgcctttccatt

SEQ ID NO: 53465 - DNA, 22 bp, synthetic construct
  misc_feature 1..22: note = chemically synthesized
  source 1..22: mol_type = other DNA
ggtgcctttccattgcctctct

SEQ ID NO: 53466 - DNA, 22 bp, synthetic construct
  misc_feature 1..22: note = chemically synthesized
  source 1..22: mol_type = other DNA
tccattgcctctctacgcccca

SEQ ID NO: 53467 - DNA, 22 bp, synthetic construct
  misc_feature 1..22: note = chemically synthesized
  source 1..22: mol_type = other DNA
ccattgcctctctacgccccac

SEQ ID NO: 53468 - DNA, 22 bp, synthetic construct
  misc_feature 1..22: note = chemically synthesized
  source 1..22: mol_type = other DNA
cattgcctctctacgccccacc

SEQ ID NO: 53469 - DNA, 22 bp, synthetic construct
  misc_feature 1..22: note = chemically synthesized
  source 1..22: mol_type = other DNA
cctctctacgccccacccctgg

SEQ ID NO: 53470 - DNA, 22 bp, synthetic construct
  misc_feature 1..22: note = chemically synthesized
  source 1..22: mol_type = other DNA
tctacgccccacccctggcctt

SEQ ID NO: 53471 - DNA, 22 bp, synthetic construct
  misc_feature 1..22: note = chemically synthesized
  source 1..22: mol_type = other DNA
tacgccccacccctggcctttg

SEQ ID NO: 53472 - DNA, 22 bp, synthetic construct
  misc_feature 1..22: note = chemically synthesized
  source 1..22: mol_type = other DNA
cgccccacccctggcctttgct

SEQ ID NO: 53473 - DNA, 22 bp, synthetic construct
  misc_feature 1..22: note = chemically synthesized
  source 1..22: mol_type = other DNA
gcctttgcttgggcttctagac

SEQ ID NO: 53474 - DNA, 22 bp, synthetic construct
  misc_feature 1..22: note = chemically synthesized
  source 1..22: mol_type = other DNA
tgcttgggcttctagacacctt

SEQ ID NO: 53475 - DNA, 22 bp, synthetic construct
  misc_feature 1..22: note = chemically synthesized
  source 1..22: mol_type = other DNA
gcttgggcttctagacaccttt

SEQ ID NO: 53476 - DNA, 22 bp, synthetic construct
  misc_feature 1..22: note = chemically synthesized
  source 1..22: mol_type = other DNA
cttgggcttctagacacctttc

SEQ ID NO: 53477 - DNA, 22 bp, synthetic construct
  misc_feature 1..22: note = chemically synthesized
  source 1..22: mol_type = other DNA
gggcttctagacacctttcact

SEQ ID NO: 53478 - DNA, 22 bp, synthetic construct
  misc_feature 1..22: note = chemically synthesized
  source 1..22: mol_type = other DNA
ggcttctagacacctttcactg

SEQ ID NO: 53479 - DNA, 22 bp, synthetic construct
  misc_feature 1..22: note = chemically synthesized
  source 1..22: mol_type = other DNA
ctagacacctttcactgcactc

SEQ ID NO: 53480 - DNA, 22 bp, synthetic construct
  misc_feature 1..22: note = chemically synthesized
  source 1..22: mol_type = other DNA
tagacacctttcactgcactca

SEQ ID NO: 53481 - DNA, 22 bp, synthetic construct
  misc_feature 1..22: note = chemically synthesized
  source 1..22: mol_type = other DNA
gacacctttcactgcactcact

SEQ ID NO: 53482 - DNA, 22 bp, synthetic construct
  misc_feature 1..22: note = chemically synthesized
  source 1..22: mol_type = other DNA
tcactgcactcactgtcttctc

SEQ ID NO: 53483 - DNA, 22 bp, synthetic construct
  misc_feature 1..22: note = chemically synthesized
  source 1..22: mol_type = other DNA
cactgcactcactgtcttctcc

SEQ ID NO: 53484 - DNA, 22 bp, synthetic construct
  misc_feature 1..22: note = chemically synthesized
  source 1..22: mol_type = other DNA
actgcactcactgtcttctccc

SEQ ID NO: 53485 - DNA, 22 bp, synthetic construct
  misc_feature 1..22: note = chemically synthesized
  source 1..22: mol_type = other DNA
cactcactgtcttctccccctc

SEQ ID NO: 53486 - DNA, 22 bp, synthetic construct
  misc_feature 1..22: note = chemically synthesized
  source 1..22: mol_type = other DNA
actgtcttctccccctcctcct

SEQ ID NO: 53487 - DNA, 22 bp, synthetic construct
  misc_feature 1..22: note = chemically synthesized
  source 1..22: mol_type = other DNA
tcttctccccctcctcctcttt

SEQ ID NO: 53488 - DNA, 22 bp, synthetic construct
  misc_feature 1..22: note = chemically synthesized
  source 1..22: mol_type = other DNA
ctccccctcctcctctttgtcc

SEQ ID NO: 53489 - DNA, 22 bp, synthetic construct
  misc_feature 1..22: note = chemically synthesized
  source 1..22: mol_type = other DNA
tccccctcctcctctttgtcca

SEQ ID NO: 53490 - DNA, 22 bp, synthetic construct
  misc_feature 1..22: note = chemically synthesized
  source 1..22: mol_type = other DNA
cccctcctcctctttgtccagt

SEQ ID NO: 53491 - DNA, 22 bp, synthetic construct
  misc_feature 1..22: note = chemically synthesized
  source 1..22: mol_type = other DNA
ctcctctttgtccagtaaatct

SEQ ID NO: 53492 - DNA, 22 bp, synthetic construct
  misc_feature 1..22: note = chemically synthesized
  source 1..22: mol_type = other DNA
ctctttgtccagtaaatcttgc

SEQ ID NO: 53493 - DNA, 22 bp, synthetic construct
  misc_feature 1..22: note = chemically synthesized
  source 1..22: mol_type = other DNA
tttgtccagtaaatcttgcagc

SEQ ID NO: 53494 - DNA, 22 bp, synthetic construct
  misc_feature 1..22: note = chemically synthesized
  source 1..22: mol_type = other DNA
tgtccagtaaatcttgcagcag

SEQ ID NO: 53495 - DNA, 22 bp, synthetic construct
  misc_feature 1..22: note = chemically synthesized
  source 1..22: mol_type = other DNA
gtccagtaaatcttgcagcagt

SEQ ID NO: 53496 - DNA, 22 bp, synthetic construct
  misc_feature 1..22: note = chemically synthesized
  source 1..22: mol_type = other DNA
tccagtaaatcttgcagcagtg

SEQ ID NO: 53497 - DNA, 22 bp, synthetic construct
  misc_feature 1..22: note = chemically synthesized
  source 1..22: mol_type = other DNA
gcagcagtgaaatacaataaat

SEQ ID NO: 53498 - DNA, 22 bp, synthetic construct
  misc_feature 1..22: note = chemically synthesized
  source 1..22: mol_type = other DNA
cagcagtgaaatacaataaatc

SEQ ID NO: 53499 - DNA, 22 bp, synthetic construct
  misc_feature 1..22: note = chemically synthesized
  source 1..22: mol_type = other DNA
accaggttatcaaaaccctttg

SEQ ID NO: 53500 - DNA, 22 bp, synthetic construct
  misc_feature 1..22: note = chemically synthesized
  source 1..22: mol_type = other DNA
tcaaaaccctttgctgctgcct

SEQ ID NO: 53501 - DNA, 22 bp, synthetic construct
  misc_feature 1..22: note = chemically synthesized
  source 1..22: mol_type = other DNA
tgctgctgcctcttgtcaagtc

SEQ ID NO: 53502 - DNA, 22 bp, synthetic construct
  misc_feature 1..22: note = chemically synthesized
  source 1..22: mol_type = other DNA
gctgctgcctcttgtcaagtcc

SEQ ID NO: 53503 - DNA, 22 bp, synthetic construct
  misc_feature 1..22: note = chemically synthesized
  source 1..22: mol_type = other DNA
ctgctgcctcttgtcaagtccg

SEQ ID NO: 53504 - DNA, 22 bp, synthetic construct
  misc_feature 1..22: note = chemically synthesized
  source 1..22: mol_type = other DNA
ctgcctcttgtcaagtccgaac

SEQ ID NO: 53505 - DNA, 22 bp, synthetic construct
  misc_feature 1..22: note = chemically synthesized
  source 1..22: mol_type = other DNA
cctcttgtcaagtccgaactcc

SEQ ID NO: 53506 - DNA, 22 bp, synthetic construct
  misc_feature 1..22: note = chemically synthesized
  source 1..22: mol_type = other DNA
ttgtcaagtccgaactccttag

SEQ ID NO: 53507 - DNA, 22 bp, synthetic construct
  misc_feature 1..22: note = chemically synthesized
  source 1..22: mol_type = other DNA
gtcaagtccgaactccttagca

SEQ ID NO: 53508 - DNA, 22 bp, synthetic construct
  misc_feature 1..22: note = chemically synthesized
  source 1..22: mol_type = other DNA
tcaagtccgaactccttagcat

SEQ ID NO: 53509 - DNA, 22 bp, synthetic construct
  misc_feature 1..22: note = chemically synthesized
  source 1..22: mol_type = other DNA
cttagcatggcattcaaggcct

SEQ ID NO: 53510 - DNA, 22 bp, synthetic construct
  misc_feature 1..22: note = chemically synthesized
  source 1..22: mol_type = other DNA
agcatggcattcaaggcctccc

SEQ ID NO: 53511 - DNA, 22 bp, synthetic construct
  misc_feature 1..22: note = chemically synthesized
  source 1..22: mol_type = other DNA
gcatggcattcaaggcctcccg

SEQ ID NO: 53512 - DNA, 22 bp, synthetic construct
  misc_feature 1..22: note = chemically synthesized
  source 1..22: mol_type = other DNA
aaggcctcccgggtctgaccat

SEQ ID NO: 53513 - DNA, 22 bp, synthetic construct
  misc_feature 1..22: note = chemically synthesized
  source 1..22: mol_type = other DNA
ccgggtctgaccattccccttt

SEQ ID NO: 53514 - DNA, 22 bp, synthetic construct
  misc_feature 1..22: note = chemically synthesized
  source 1..22: mol_type = other DNA
accattcccctttcagaggctg

SEQ ID NO: 53515 - DNA, 22 bp, synthetic construct
  misc_feature 1..22: note = chemically synthesized
  source 1..22: mol_type = other DNA
ccctttcagaggctgatgtccc

SEQ ID NO: 53516 - DNA, 22 bp, synthetic construct
  misc_feature 1..22: note = chemically synthesized
  source 1..22: mol_type = other DNA
tcagaggctgatgtcccctggg

SEQ ID NO: 53517 - DNA, 22 bp, synthetic construct
  misc_feature 1..22: note = chemically synthesized
  source 1..22: mol_type = other DNA
cagaggctgatgtcccctgggt

SEQ ID NO: 53518 - DNA, 22 bp, synthetic construct
  misc_feature 1..22: note = chemically synthesized
  source 1..22: mol_type = other DNA
agaggctgatgtcccctgggtg

SEQ ID NO: 53519 - DNA, 22 bp, synthetic construct
  misc_feature 1..22: note = chemically synthesized
  source 1..22: mol_type = other DNA
atgtcccctgggtgccctggga

SEQ ID NO: 53520 - DNA, 22 bp, synthetic construct
  misc_feature 1..22: note = chemically synthesized
  source 1..22: mol_type = other DNA
ggtgccctgggagctgtagatg

SEQ ID NO: 53521 - DNA, 22 bp, synthetic construct
  misc_feature 1..22: note = chemically synthesized
  source 1..22: mol_type = other DNA
ggagctgtagatgtcctgccaa

SEQ ID NO: 53522 - DNA, 22 bp, synthetic construct
  misc_feature 1..22: note = chemically synthesized
  source 1..22: mol_type = other DNA
tagatgtcctgccaaggaagcg

SEQ ID NO: 53523 - DNA, 22 bp, synthetic construct
  misc_feature 1..22: note = chemically synthesized
  source 1..22: mol_type = other DNA
ccaaggaagcggtgccatcgag

SEQ ID NO: 53524 - DNA, 22 bp, synthetic construct
  misc_feature 1..22: note = chemically synthesized
  source 1..22: mol_type = other DNA
gaagccagacttcttggatcca

SEQ ID NO: 53525 - DNA, 22 bp, synthetic construct
  misc_feature 1..22: note = chemically synthesized
  source 1..22: mol_type = other DNA
aagccagacttcttggatccaa

SEQ ID NO: 53526 - DNA, 22 bp, synthetic construct
  misc_feature 1..22: note = chemically synthesized
  source 1..22: mol_type = other DNA
cttggatccaagtcctggccgg

SEQ ID NO: 53527 - DNA, 22 bp, synthetic construct
  misc_feature 1..22: note = chemically synthesized
  source 1..22: mol_type = other DNA
ttggatccaagtcctggccggc

SEQ ID NO: 53528 - DNA, 22 bp, synthetic construct
  misc_feature 1..22: note = chemically synthesized
  source 1..22: mol_type = other DNA
ggatccaagtcctggccggctc

SEQ ID NO: 53529 - DNA, 22 bp, synthetic construct
  misc_feature 1..22: note = chemically synthesized
  source 1..22: mol_type = other DNA
gatccaagtcctggccggctcc

SEQ ID NO: 53530 - DNA, 22 bp, synthetic construct
  misc_feature 1..22: note = chemically synthesized
  source 1..22: mol_type = other DNA
gccggctcctcaccagggaggg

SEQ ID NO: 53531 - DNA, 22 bp, synthetic construct
  misc_feature 1..22: note = chemically synthesized
  source 1..22: mol_type = other DNA
ctcaccagggagggggtcatca

SEQ ID NO: 53532 - DNA, 22 bp, synthetic construct
  misc_feature 1..22: note = chemically synthesized
  source 1..22: mol_type = other DNA
accagggagggggtcatcacag

SEQ ID NO: 53533 - DNA, 22 bp, synthetic construct
  misc_feature 1..22: note = chemically synthesized
  source 1..22: mol_type = other DNA
gcctgggagggtcaaatgaggg

SEQ ID NO: 53534 - DNA, 22 bp, synthetic construct
  misc_feature 1..22: note = chemically synthesized
  source 1..22: mol_type = other DNA
cctgggagggtcaaatgagggt

SEQ ID NO: 53535 - DNA, 22 bp, synthetic construct
  misc_feature 1..22: note = chemically synthesized
  source 1..22: mol_type = other DNA
ggagggtcaaatgagggtcagc

SEQ ID NO: 53536 - DNA, 22 bp, synthetic construct
  misc_feature 1..22: note = chemically synthesized
  source 1..22: mol_type = other DNA
agtaccagtggcagatgttgca

SEQ ID NO: 53537 - DNA, 22 bp, synthetic construct
  misc_feature 1..22: note = chemically synthesized
  source 1..22: mol_type = other DNA
cacacatcctgctatggggcag

SEQ ID NO: 53538 - DNA, 22 bp, synthetic construct
  misc_feature 1..22: note = chemically synthesized
  source 1..22: mol_type = other DNA
ctatggggcagtggctgacgcc

SEQ ID NO: 53539 - DNA, 22 bp, synthetic construct
  misc_feature 1..22: note = chemically synthesized
  source 1..22: mol_type = other DNA
tggggcagtggctgacgccaca

SEQ ID NO: 53540 - DNA, 22 bp, synthetic construct
  misc_feature 1..22: note = chemically synthesized
  source 1..22: mol_type = other DNA
acgccacactccccgacctcct

SEQ ID NO: 53541 - DNA, 22 bp, synthetic construct
  misc_feature 1..22: note = chemically synthesized
  source 1..22: mol_type = other DNA
cccgacctcctgaggtggggcc

SEQ ID NO: 53542 - DNA, 22 bp, synthetic construct
  misc_feature 1..22: note = chemically synthesized
  source 1..22: mol_type = other DNA
ctgaggtggggcccccttcata

SEQ ID NO: 53543 - DNA, 22 bp, synthetic construct
  misc_feature 1..22: note = chemically synthesized
  source 1..22: mol_type = other DNA
aggtggggcccccttcatactc

SEQ ID NO: 53544 - DNA, 22 bp, synthetic construct
  misc_feature 1..22: note = chemically synthesized
  source 1..22: mol_type = other DNA
catactctaacttctgcctgcc

SEQ ID NO: 53545 - DNA, 22 bp, synthetic construct
  misc_feature 1..22: note = chemically synthesized
  source 1..22: mol_type = other DNA
atactctaacttctgcctgcca

SEQ ID NO: 53546 - DNA, 22 bp, synthetic construct
  misc_feature 1..22: note = chemically synthesized
  source 1..22: mol_type = other DNA
taacttctgcctgccattcatg

SEQ ID NO: 53547 - DNA, 22 bp, synthetic construct
  misc_feature 1..22: note = chemically synthesized
  source 1..22: mol_type = other DNA
acttctgcctgccattcatggg

SEQ ID NO: 53548 - DNA, 22 bp, synthetic construct
  misc_feature 1..22: note = chemically synthesized
  source 1..22: mol_type = other DNA
ctgcctgccattcatggggcat

SEQ ID NO: 53549 - DNA, 22 bp, synthetic construct
  misc_feature 1..22: note = chemically synthesized
  source 1..22: mol_type = other DNA
tgcctgccattcatggggcatt

SEQ ID NO: 53550 - DNA, 22 bp, synthetic construct
  misc_feature 1..22: note = chemically synthesized
  source 1..22: mol_type = other DNA
cctgccattcatggggcatttg

SEQ ID NO: 53551 - DNA, 22 bp, synthetic construct
  misc_feature 1..22: note = chemically synthesized
  source 1..22: mol_type = other DNA
ccattcatggggcatttgtcac

SEQ ID NO: 53552 - DNA, 22 bp, synthetic construct
  misc_feature 1..22: note = chemically synthesized
  source 1..22: mol_type = other DNA
atggggcatttgtcacactgtt

SEQ ID NO: 53553 - DNA, 22 bp, synthetic construct
  misc_feature 1..22: note = chemically synthesized
  source 1..22: mol_type = other DNA
gtcacactgttggggcttccac

SEQ ID NO: 53554 - DNA, 22 bp, synthetic construct
  misc_feature 1..22: note = chemically synthesized
  source 1..22: mol_type = other DNA
tcacactgttggggcttccacg

SEQ ID NO: 53555 - DNA, 22 bp, synthetic construct
  misc_feature 1..22: note = chemically synthesized
  source 1..22: mol_type = other DNA
ttggggcttccacgtttagttt

SEQ ID NO: 53556 - DNA, 22 bp, synthetic construct
  misc_feature 1..22: note = chemically synthesized
  source 1..22: mol_type = other DNA
gggcttccacgtttagttttct

SEQ ID NO: 53557 - DNA, 22 bp, synthetic construct
  misc_feature 1..22: note = chemically synthesized
  source 1..22: mol_type = other DNA
ccacgtttagttttctctcccc

SEQ ID NO: 53558 - DNA, 22 bp, synthetic construct
  misc_feature 1..22: note = chemically synthesized
  source 1..22: mol_type = other DNA
cacgtttagttttctctcccca

SEQ ID NO: 53559 - DNA, 22 bp, synthetic construct
  misc_feature 1..22: note = chemically synthesized
  source 1..22: mol_type = other DNA
agttttctctccccataagcta

SEQ ID NO: 53560 - DNA, 22 bp, synthetic construct
  misc_feature 1..22: note = chemically synthesized
  source 1..22: mol_type = other DNA
gttttctctccccataagctag

SEQ ID NO: 53561 - DNA, 22 bp, synthetic construct
  misc_feature 1..22: note = chemically synthesized
  source 1..22: mol_type = other DNA
tctctccccataagctagcaat

SEQ ID NO: 53562 - DNA, 22 bp, synthetic construct
  misc_feature 1..22: note = chemically synthesized
  source 1..22: mol_type = other DNA
ctctccccataagctagcaatt

SEQ ID NO: 53563 - DNA, 22 bp, synthetic construct
  misc_feature 1..22: note = chemically synthesized
  source 1..22: mol_type = other DNA
tctccccataagctagcaattc

SEQ ID NO: 53564 - DNA, 22 bp, synthetic construct
  misc_feature 1..22: note = chemically synthesized
  source 1..22: mol_type = other DNA
tccccataagctagcaattcct

SEQ ID NO: 53565 - DNA, 22 bp, synthetic construct
  misc_feature 1..22: note = chemically synthesized
  source 1..22: mol_type = other DNA
cccataagctagcaattccttg

SEQ ID NO: 53566 - DNA, 22 bp, synthetic construct
  misc_feature 1..22: note = chemically synthesized
  source 1..22: mol_type = other DNA
gcaattccttgagagaggaccc

SEQ ID NO: 53567 - DNA, 22 bp, synthetic construct
  misc_feature 1..22: note = chemically synthesized
  source 1..22: mol_type = other DNA
cttgagagaggaccccacgtta

SEQ ID NO: 53568 - DNA, 22 bp, synthetic construct
  misc_feature 1..22: note = chemically synthesized
  source 1..22: mol_type = other DNA
gagagaggaccccacgttactt

SEQ ID NO: 53569 - DNA, 22 bp, synthetic construct
  misc_feature 1..22: note = chemically synthesized
  source 1..22: mol_type = other DNA
agagaggaccccacgttacttg

SEQ ID NO: 53570 - DNA, 22 bp, synthetic construct
  misc_feature 1..22: note = chemically synthesized
  source 1..22: mol_type = other DNA
cttgcctttatccccgcacaga

SEQ ID NO: 53571 - DNA, 22 bp, synthetic construct
  misc_feature 1..22: note = chemically synthesized
  source 1..22: mol_type = other DNA
gcctttatccccgcacagagca

SEQ ID NO: 53572 - DNA, 22 bp, synthetic construct
  misc_feature 1..22: note = chemically synthesized
  source 1..22: mol_type = other DNA
cctttatccccgcacagagcac

SEQ ID NO: 53573 - DNA, 22 bp, synthetic construct
  misc_feature 1..22: note = chemically synthesized
  source 1..22: mol_type = other DNA
tatccccgcacagagcacttca

SEQ ID NO: 53574 - DNA, 22 bp, synthetic construct
  misc_feature 1..22: note = chemically synthesized
  source 1..22: mol_type = other DNA
atccccgcacagagcacttcac

SEQ ID NO: 53575 - DNA, 22 bp, synthetic construct
  misc_feature 1..22: note = chemically synthesized
  source 1..22: mol_type = other DNA
tccccgcacagagcacttcaca

SEQ ID NO: 53576 - DNA, 22 bp, synthetic construct
  misc_feature 1..22: note = chemically synthesized
  source 1..22: mol_type = other DNA
cacaggctgtgcaaggtaatgc

SEQ ID NO: 53577 - DNA, 22 bp, synthetic construct
  misc_feature 1..22: note = chemically synthesized
  source 1..22: mol_type = other DNA
acaggctgtgcaaggtaatgct

SEQ ID NO: 53578 - DNA, 22 bp, synthetic construct
  misc_feature 1..22: note = chemically synthesized
  source 1..22: mol_type = other DNA
tgcaaggtaatgctccactgag

SEQ ID NO: 53579 - DNA, 22 bp, synthetic construct
  misc_feature 1..22: note = chemically synthesized
  source 1..22: mol_type = other DNA
cactgaggacacattctcgcct

SEQ ID NO: 53580 - DNA, 22 bp, synthetic construct
  misc_feature 1..22: note = chemically synthesized
  source 1..22: mol_type = other DNA
aggacacattctcgcctatggg

SEQ ID NO: 53581 - DNA, 22 bp, synthetic construct
  misc_feature 1..22: note = chemically synthesized
  source 1..22: mol_type = other DNA
tcgcctatgggaactctggagg

SEQ ID NO: 53582 - DNA, 22 bp, synthetic construct
  misc_feature 1..22: note = chemically synthesized
  source 1..22: mol_type = other DNA
gcctatgggaactctggaggca

SEQ ID NO: 53583 - DNA, 22 bp, synthetic construct
  misc_feature 1..22: note = chemically synthesized
  source 1..22: mol_type = other DNA
tgggaactctggaggcagggct

SEQ ID NO: 53584 - DNA, 22 bp, synthetic construct
  misc_feature 1..22: note = chemically synthesized
  source 1..22: mol_type = other DNA
tggaggcagggctttgtggagg

SEQ ID NO: 53585 - DNA, 22 bp, synthetic construct
  misc_feature 1..22: note = chemically synthesized
  source 1..22: mol_type = other DNA
gaggcagggctttgtggagggg

SEQ ID NO: 53586 - DNA, 22 bp, synthetic construct
  misc_feature 1..22: note = chemically synthesized
  source 1..22: mol_type = other DNA
tgtggaggggctgccacaggct

SEQ ID NO: 53587 - DNA, 22 bp, synthetic construct
  misc_feature 1..22: note = chemically synthesized
  source 1..22: mol_type = other DNA
gtggaggggctgccacaggctt

SEQ ID NO: 53588 - DNA, 22 bp, synthetic construct
  misc_feature 1..22: note = chemically synthesized
  source 1..22: mol_type = other DNA
tggaggggctgccacaggctta

SEQ ID NO: 53589 - DNA, 22 bp, synthetic construct
  misc_feature 1..22: note = chemically synthesized
  source 1..22: mol_type = other DNA
ccacaggcttatgttgcctcct

SEQ ID NO: 53590 - DNA, 22 bp, synthetic construct
  misc_feature 1..22: note = chemically synthesized
  source 1..22: mol_type = other DNA
atgttgcctcctaggatttccc

SEQ ID NO: 53591 - DNA, 22 bp, synthetic construct
  misc_feature 1..22: note = chemically synthesized
  source 1..22: mol_type = other DNA
tgttgcctcctaggatttccca

SEQ ID NO: 53592 - DNA, 22 bp, synthetic construct
  misc_feature 1..22: note = chemically synthesized
  source 1..22: mol_type = other DNA
cctcctaggatttcccatgggc

SEQ ID NO: 53593 - DNA, 22 bp, synthetic construct
  misc_feature 1..22: note = chemically synthesized
  source 1..22: mol_type = other DNA
ctaggatttcccatgggccaag

SEQ ID NO: 53594 - DNA, 22 bp, synthetic construct
  misc_feature 1..22: note = chemically synthesized
  source 1..22: mol_type = other DNA
ggatttcccatgggccaagagg

SEQ ID NO: 53595 - DNA, 22 bp, synthetic construct
  misc_feature 1..22: note = chemically synthesized
  source 1..22: mol_type = other DNA
cccatgggccaagagggaaaat

SEQ ID NO: 53596 - DNA, 22 bp, synthetic construct
  misc_feature 1..22: note = chemically synthesized
  source 1..22: mol_type = other DNA
ccatgggccaagagggaaaatg

SEQ ID NO: 53597 - DNA, 22 bp, synthetic construct
  misc_feature 1..22: note = chemically synthesized
  source 1..22: mol_type = other DNA
gggtggccatccctggtggccc

SEQ ID NO: 53598 - DNA, 22 bp, synthetic construct
  misc_feature 1..22: note = chemically synthesized
  source 1..22: mol_type = other DNA
gtggcccctcctcatgcatcct

SEQ ID NO: 53599 - DNA, 22 bp, synthetic construct
  misc_feature 1..22: note = chemically synthesized
  source 1..22: mol_type = other DNA
ctcatgcatcctggagagctgt

SEQ ID NO: 53600 - DNA, 22 bp, synthetic construct
  misc_feature 1..22: note = chemically synthesized
  source 1..22: mol_type = other DNA
atgcatcctggagagctgtggg

SEQ ID NO: 53601 - DNA, 22 bp, synthetic construct
  misc_feature 1..22: note = chemically synthesized
  source 1..22: mol_type = other DNA
gagagctgtgggcctcctctcc

SEQ ID NO: 53602 - DNA, 22 bp, synthetic construct
  misc_feature 1..22: note = chemically synthesized
  source 1..22: mol_type = other DNA
tgggcctcctctccacaggctt

SEQ ID NO: 53603 - DNA, 22 bp, synthetic construct
  misc_feature 1..22: note = chemically synthesized
  source 1..22: mol_type = other DNA
ctctccacaggctttgtggatc

SEQ ID NO: 53604 - DNA, 22 bp, synthetic construct
  misc_feature 1..22: note = chemically synthesized
  source 1..22: mol_type = other DNA
tccacaggctttgtggatcttc

SEQ ID NO: 53605 - DNA, 22 bp, synthetic construct
  misc_feature 1..22: note = chemically synthesized
  source 1..22: mol_type = other DNA
cacaggctttgtggatcttctt

SEQ ID NO: 53606 - DNA, 22 bp, synthetic construct
  misc_feature 1..22: note = chemically synthesized
  source 1..22: mol_type = other DNA
tgtggatcttcttcagagccag

SEQ ID NO: 53607 - DNA, 22 bp, synthetic construct
  misc_feature 1..22: note = chemically synthesized
  source 1..22: mol_type = other DNA
gtggatcttcttcagagccagt

SEQ ID NO: 53608 - DNA, 22 bp, synthetic construct
  misc_feature 1..22: note = chemically synthesized
  source 1..22: mol_type = other DNA
tggatcttcttcagagccagtg

SEQ ID NO: 53609 - DNA, 22 bp, synthetic construct
  misc_feature 1..22: note = chemically synthesized
  source 1..22: mol_type = other DNA
cttcagagccagtgagtcagcc

SEQ ID NO: 53610 - DNA, 22 bp, synthetic construct
  misc_feature 1..22: note = chemically synthesized
  source 1..22: mol_type = other DNA
ttcagagccagtgagtcagcct

SEQ ID NO: 53611 - DNA, 22 bp, synthetic construct
  misc_feature 1..22: note = chemically synthesized
  source 1..22: mol_type = other DNA
cagagccagtgagtcagccttg

SEQ ID NO: 53612 - DNA, 22 bp, synthetic construct
  misc_feature 1..22: note = chemically synthesized
  source 1..22: mol_type = other DNA
agagccagtgagtcagccttgc

SEQ ID NO: 53613 - DNA, 22 bp, synthetic construct
  misc_feature 1..22: note = chemically synthesized
  source 1..22: mol_type = other DNA
gctgtggtggcccacaaggagt

SEQ ID NO: 53614 - DNA, 22 bp, synthetic construct
  misc_feature 1..22: note = chemically synthesized
  source 1..22: mol_type = other DNA
ctgtggtggcccacaaggagtg

SEQ ID NO: 53615 - DNA, 22 bp, synthetic construct
  misc_feature 1..22: note = chemically synthesized
  source 1..22: mol_type = other DNA
tggtggcccacaaggagtggag

SEQ ID NO: 53616 - DNA, 22 bp, synthetic construct
  misc_feature 1..22: note = chemically synthesized
  source 1..22: mol_type = other DNA
ggggacagggcaaaagctcatg

SEQ ID NO: 53617 - DNA, 22 bp, synthetic construct
  misc_feature 1..22: note = chemically synthesized
  source 1..22: mol_type = other DNA
gggacagggcaaaagctcatgt

SEQ ID NO: 53618 - DNA, 22 bp, synthetic construct
  misc_feature 1..22: note = chemically synthesized
  source 1..22: mol_type = other DNA
atgtgatagggatgctgtctct

SEQ ID NO: 53619 - DNA, 22 bp, synthetic construct
  misc_feature 1..22: note = chemically synthesized
  source 1..22: mol_type = other DNA
tctctgcaaccacatggatttt

SEQ ID NO: 53620 - DNA, 22 bp, synthetic construct
  misc_feature 1..22: note = chemically synthesized
  source 1..22: mol_type = other DNA
tgcaaccacatggattttaata

SEQ ID NO: 53621 - DNA, 22 bp, synthetic construct
  misc_feature 1..22: note = chemically synthesized
  source 1..22: mol_type = other DNA
caaccacatggattttaatagt

SEQ ID NO: 53622 - DNA, 22 bp, synthetic construct
  misc_feature 1..22: note = chemically synthesized
  source 1..22: mol_type = other DNA
taatagttacccatggctggct

SEQ ID NO: 53623 - DNA, 22 bp, synthetic construct
  misc_feature 1..22: note = chemically synthesized
  source 1..22: mol_type = other DNA
aatagttacccatggctggctt

SEQ ID NO: 53624 - DNA, 22 bp, synthetic construct
  misc_feature 1..22: note = chemically synthesized
  source 1..22: mol_type = other DNA
atagttacccatggctggcttc

SEQ ID NO: 53625 - DNA, 22 bp, synthetic construct
  misc_feature 1..22: note = chemically synthesized
  source 1..22: mol_type = other DNA
cccatggctggcttcagctttt

SEQ ID NO: 53626 - DNA, 22 bp, synthetic construct
  misc_feature 1..22: note = chemically synthesized
  source 1..22: mol_type = other DNA
gcttcagctttttttgtgaatg

SEQ ID NO: 53627 - DNA, 22 bp, synthetic construct
  misc_feature 1..22: note = chemically synthesized
  source 1..22: mol_type = other DNA
cagctttttttgtgaatggcag

SEQ ID NO: 53628 - DNA, 22 bp, synthetic construct
  misc_feature 1..22: note = chemically synthesized
  source 1..22: mol_type = other DNA
agctttttttgtgaatggcagc

SEQ ID NO: 53629 - DNA, 22 bp, synthetic construct
  misc_feature 1..22: note = chemically synthesized
  source 1..22: mol_type = other DNA
tttttgtgaatggcagccaaaa

SEQ ID NO: 53630 - DNA, 22 bp, synthetic construct
  misc_feature 1..22: note = chemically synthesized
  source 1..22: mol_type = other DNA
ttttgtgaatggcagccaaaaa

SEQ ID NO: 53631 - DNA, 22 bp, synthetic construct
  misc_feature 1..22: note = chemically synthesized
  source 1..22: mol_type = other DNA
tttgtgaatggcagccaaaaag

SEQ ID NO: 53632 - DNA, 22 bp, synthetic construct
  misc_feature 1..22: note = chemically synthesized
  source 1..22: mol_type = other DNA
ttgtgaatggcagccaaaaagt

SEQ ID NO: 53633 - DNA, 22 bp, synthetic construct
  misc_feature 1..22: note = chemically synthesized
  source 1..22: mol_type = other DNA
tgtgaatggcagccaaaaagtg

SEQ ID NO: 53634 - DNA, 22 bp, synthetic construct
  misc_feature 1..22: note = chemically synthesized
  source 1..22: mol_type = other DNA
gtgaatggcagccaaaaagtgt

SEQ ID NO: 53635 - DNA, 22 bp, synthetic construct
  misc_feature 1..22: note = chemically synthesized
  source 1..22: mol_type = other DNA
tgaatggcagccaaaaagtgtg

SEQ ID NO: 53636 - DNA, 22 bp, synthetic construct
  misc_feature 1..22: note = chemically synthesized
  source 1..22: mol_type = other DNA
agtggagacagaggggagactg

SEQ ID NO: 53637 - DNA, 22 bp, synthetic construct
  misc_feature 1..22: note = chemically synthesized
  source 1..22: mol_type = other DNA
ttgaatttgtggagtttttagt

SEQ ID NO: 53638 - DNA, 22 bp, synthetic construct
  misc_feature 1..22: note = chemically synthesized
  source 1..22: mol_type = other DNA
aatttgtggagtttttagttct

SEQ ID NO: 53639 - DNA, 22 bp, synthetic construct
  misc_feature 1..22: note = chemically synthesized
  source 1..22: mol_type = other DNA
gtggagtttttagttcttccta

SEQ ID NO: 53640 - DNA, 22 bp, synthetic construct
  misc_feature 1..22: note = chemically synthesized
  source 1..22: mol_type = other DNA
tggagtttttagttcttcctaa

SEQ ID NO: 53641 - DNA, 22 bp, synthetic construct
  misc_feature 1..22: note = chemically synthesized
  source 1..22: mol_type = other DNA
ttagttcttcctaaacagagag

SEQ ID NO: 53642 - DNA, 22 bp, synthetic construct
  misc_feature 1..22: note = chemically synthesized
  source 1..22: mol_type = other DNA
tagttcttcctaaacagagagc

SEQ ID NO: 53643 - DNA, 22 bp, synthetic construct
  misc_feature 1..22: note = chemically synthesized
  source 1..22: mol_type = other DNA
agttcttcctaaacagagagca

SEQ ID NO: 53644 - DNA, 22 bp, synthetic construct
  misc_feature 1..22: note = chemically synthesized
  source 1..22: mol_type = other DNA
gttcttcctaaacagagagcaa

SEQ ID NO: 53645 - DNA, 22 bp, synthetic construct
  misc_feature 1..22: note = chemically synthesized
  source 1..22: mol_type = other DNA
ttcctaaacagagagcaacaga

SEQ ID NO: 53646 - DNA, 22 bp, synthetic construct
  misc_feature 1..22: note = chemically synthesized
  source 1..22: mol_type = other DNA
cctaaacagagagcaacagaca

SEQ ID NO: 53647 - DNA, 22 bp, synthetic construct
  misc_feature 1..22: note = chemically synthesized
  source 1..22: mol_type = other DNA
ctaaacagagagcaacagacaa

SEQ ID NO: 53648 - DNA, 22 bp, synthetic construct
  misc_feature 1..22: note = chemically synthesized
  source 1..22: mol_type = other DNA
aacagagagcaacagacaagag

SEQ ID NO: 53649 - DNA, 22 bp, synthetic construct
  misc_feature 1..22: note = chemically synthesized
  source 1..22: mol_type = other DNA
cagacaaattaattcttttcgt

SEQ ID NO: 53650 - DNA, 22 bp, synthetic construct
  misc_feature 1..22: note = chemically synthesized
  source 1..22: mol_type = other DNA
attcttttcgttaatttaccct

SEQ ID NO: 53651 - DNA, 22 bp, synthetic construct
  misc_feature 1..22: note = chemically synthesized
  source 1..22: mol_type = other DNA
ttttcgttaatttaccctcaac

SEQ ID NO: 53652 - DNA, 22 bp, synthetic construct
  misc_feature 1..22: note = chemically synthesized
  source 1..22: mol_type = other DNA
ttcgttaatttaccctcaacta

SEQ ID NO: 53653 - DNA, 22 bp, synthetic construct
  misc_feature 1..22: note = chemically synthesized
  source 1..22: mol_type = other DNA
tcgttaatttaccctcaactac

SEQ ID NO: 53654 - DNA, 22 bp, synthetic construct
  misc_feature 1..22: note = chemically synthesized
  source 1..22: mol_type = other DNA
cgttaatttaccctcaactact

SEQ ID NO: 53655 - DNA, 22 bp, synthetic construct
  misc_feature 1..22: note = chemically synthesized
  source 1..22: mol_type = other DNA
gttaatttaccctcaactactg

SEQ ID NO: 53656 - DNA, 22 bp, synthetic construct
  misc_feature 1..22: note = chemically synthesized
  source 1..22: mol_type = other DNA
atttaccctcaactactggcca

SEQ ID NO: 53657 - DNA, 22 bp, synthetic construct
  misc_feature 1..22: note = chemically synthesized
  source 1..22: mol_type = other DNA
accctcaactactggccaagaa

SEQ ID NO: 53658 - DNA, 22 bp, synthetic construct
  misc_feature 1..22: note = chemically synthesized
  source 1..22: mol_type = other DNA
ccctcaactactggccaagaag

SEQ ID NO: 53659 - DNA, 22 bp, synthetic construct
  misc_feature 1..22: note = chemically synthesized
  source 1..22: mol_type = other DNA
aactactggccaagaaggggtg

SEQ ID NO: 53660 - DNA, 22 bp, synthetic construct
  misc_feature 1..22: note = chemically synthesized
  source 1..22: mol_type = other DNA
ctggccaagaaggggtgtaact

SEQ ID NO: 53661 - DNA, 22 bp, synthetic construct
  misc_feature 1..22: note = chemically synthesized
  source 1..22: mol_type = other DNA
gccaagaaggggtgtaactcag

SEQ ID NO: 53662 - DNA, 22 bp, synthetic construct
  misc_feature 1..22: note = chemically synthesized
  source 1..22: mol_type = other DNA
agaatgttttcttcttttgtgc

SEQ ID NO: 53663 - DNA, 22 bp, synthetic construct
  misc_feature 1..22: note = chemically synthesized
  source 1..22: mol_type = other DNA
tcttcttttgtgccctgagtag

SEQ ID NO: 53664 - DNA, 22 bp, synthetic construct
  misc_feature 1..22: note = chemically synthesized
  source 1..22: mol_type = other DNA
cttcttttgtgccctgagtagc

SEQ ID NO: 53665 - DNA, 22 bp, synthetic construct
  misc_feature 1..22: note = chemically synthesized
  source 1..22: mol_type = other DNA
ttcttttgtgccctgagtagca

SEQ ID NO: 53666 - DNA, 22 bp, synthetic construct
  misc_feature 1..22: note = chemically synthesized
  source 1..22: mol_type = other DNA
cttttgtgccctgagtagcaga

SEQ ID NO: 53667 - DNA, 22 bp, synthetic construct
  misc_feature 1..22: note = chemically synthesized
  source 1..22: mol_type = other DNA
ttttgtgccctgagtagcagac

SEQ ID NO: 53668 - DNA, 22 bp, synthetic construct
  misc_feature 1..22: note = chemically synthesized
  source 1..22: mol_type = other DNA
ttgtgccctgagtagcagaccc

SEQ ID NO: 53669 - DNA, 22 bp, synthetic construct
  misc_feature 1..22: note = chemically synthesized
  source 1..22: mol_type = other DNA
tgtgccctgagtagcagaccca

SEQ ID NO: 53670 - DNA, 22 bp, synthetic construct
  misc_feature 1..22: note = chemically synthesized
  source 1..22: mol_type = other DNA
gtgccctgagtagcagacccag

SEQ ID NO: 53671 - DNA, 22 bp, synthetic construct
  misc_feature 1..22: note = chemically synthesized
  source 1..22: mol_type = other DNA
tgccctgagtagcagacccaga

SEQ ID NO: 53672 - DNA, 22 bp, synthetic construct
  misc_feature 1..22: note = chemically synthesized
  source 1..22: mol_type = other DNA
agtagcagacccagagtctgga

SEQ ID NO: 53673 - DNA, 22 bp, synthetic construct
  misc_feature 1..22: note = chemically synthesized
  source 1..22: mol_type = other DNA
gagacccagattctaggcctgg

SEQ ID NO: 53674 - DNA, 22 bp, synthetic construct
  misc_feature 1..22: note = chemically synthesized
  source 1..22: mol_type = other DNA
taggcctggcttggccaacgac

SEQ ID NO: 53675 - DNA, 22 bp, synthetic construct
  misc_feature 1..22: note = chemically synthesized
  source 1..22: mol_type = other DNA
ggcctggcttggccaacgacaa

SEQ ID NO: 53676 - DNA, 22 bp, synthetic construct
  misc_feature 1..22: note = chemically synthesized
  source 1..22: mol_type = other DNA
gcttggccaacgacaagcaggg

SEQ ID NO: 53677 - DNA, 22 bp, synthetic construct
  misc_feature 1..22: note = chemically synthesized
  source 1..22: mol_type = other DNA
ggccaacgacaagcagggtgac

SEQ ID NO: 53678 - DNA, 22 bp, synthetic construct
  misc_feature 1..22: note = chemically synthesized
  source 1..22: mol_type = other DNA
gccaacgacaagcagggtgacc

SEQ ID NO: 53679 - DNA, 22 bp, synthetic construct
  misc_feature 1..22: note = chemically synthesized
  source 1..22: mol_type = other DNA
gggttaaaaaaaaaaaaaggca

SEQ ID NO: 53680 - DNA, 22 bp, synthetic construct
  misc_feature 1..22: note = chemically synthesized
  source 1..22: mol_type = other DNA
ggttaaaaaaaaaaaaaggcat

SEQ ID NO: 53681 - DNA, 22 bp, synthetic construct
  misc_feature 1..22: note = chemically synthesized
  source 1..22: mol_type = other DNA
aaaaaaaaaaaaggcatcattc

SEQ ID NO: 53682 - DNA, 22 bp, synthetic construct
  misc_feature 1..22: note = chemically synthesized
  source 1..22: mol_type = other DNA
tctgagtctcactccctcttct

SEQ ID NO: 53683 - DNA, 22 bp, synthetic construct
  misc_feature 1..22: note = chemically synthesized
  source 1..22: mol_type = other DNA
tgagtctcactccctcttctca

SEQ ID NO: 53684 - DNA, 22 bp, synthetic construct
  misc_feature 1..22: note = chemically synthesized
  source 1..22: mol_type = other DNA
agtctcactccctcttctcaaa

SEQ ID NO: 53685 - DNA, 22 bp, synthetic construct
  misc_feature 1..22: note = chemically synthesized
  source 1..22: mol_type = other DNA
actccctcttctcaaaaagatg

SEQ ID NO: 53686 - DNA, 22 bp, synthetic construct
  misc_feature 1..22: note = chemically synthesized
  source 1..22: mol_type = other DNA
cctcttctcaaaaagatggcaa

SEQ ID NO: 53687 - DNA, 22 bp, synthetic construct
  misc_feature 1..22: note = chemically synthesized
  source 1..22: mol_type = other DNA
ttctcaaaaagatggcaattcc

SEQ ID NO: 53688 - DNA, 22 bp, synthetic construct
  misc_feature 1..22: note = chemically synthesized
  source 1..22: mol_type = other DNA
ctcaaaaagatggcaattcctc

SEQ ID NO: 53689 - DNA, 22 bp, synthetic construct
  misc_feature 1..22: note = chemically synthesized
  source 1..22: mol_type = other DNA
tcaaaaagatggcaattcctcc

SEQ ID NO: 53690 - DNA, 22 bp, synthetic construct
  misc_feature 1..22: note = chemically synthesized
  source 1..22: mol_type = other DNA
aaaaagatggcaattcctcccc

SEQ ID NO: 53691 - DNA, 22 bp, synthetic construct
  misc_feature 1..22: note = chemically synthesized
  source 1..22: mol_type = other DNA
ctcccccgctggttttccatag

SEQ ID NO: 53692 - DNA, 22 bp, synthetic construct
  misc_feature 1..22: note = chemically synthesized
  source 1..22: mol_type = other DNA
ccccgctggttttccatagttg

SEQ ID NO: 53693 - DNA, 22 bp, synthetic construct
  misc_feature 1..22: note = chemically synthesized
  source 1..22: mol_type = other DNA
gttttccatagttgaggtagca

SEQ ID NO: 53694 - DNA, 22 bp, synthetic construct
  misc_feature 1..22: note = chemically synthesized
  source 1..22: mol_type = other DNA
tccatagttgaggtagcaagcc

SEQ ID NO: 53695 - DNA, 22 bp, synthetic construct
  misc_feature 1..22: note = chemically synthesized
  source 1..22: mol_type = other DNA
ccatagttgaggtagcaagcca

SEQ ID NO: 53696 - DNA, 22 bp, synthetic construct
  misc_feature 1..22: note = chemically synthesized
  source 1..22: mol_type = other DNA
catagttgaggtagcaagccaa

SEQ ID NO: 53697 - DNA, 22 bp, synthetic construct
  misc_feature 1..22: note = chemically synthesized
  source 1..22: mol_type = other DNA
aggtagcaagccaatgtgttgg

SEQ ID NO: 53698 - DNA, 22 bp, synthetic construct
  misc_feature 1..22: note = chemically synthesized
  source 1..22: mol_type = other DNA
gggtagctgaaaacgccctgtg

SEQ ID NO: 53699 - DNA, 22 bp, synthetic construct
  misc_feature 1..22: note = chemically synthesized
  source 1..22: mol_type = other DNA
aaaacgccctgtgcatactgag

SEQ ID NO: 53700 - DNA, 22 bp, synthetic construct
  misc_feature 1..22: note = chemically synthesized
  source 1..22: mol_type = other DNA
tgcatactgaggcttatgttcc

SEQ ID NO: 53701 - DNA, 22 bp, synthetic construct
  misc_feature 1..22: note = chemically synthesized
  source 1..22: mol_type = other DNA
aggcttatgttccatggggggc

SEQ ID NO: 53702 - DNA, 22 bp, synthetic construct
  misc_feature 1..22: note = chemically synthesized
  source 1..22: mol_type = other DNA
atgttccatggggggccagggg

SEQ ID NO: 53703 - DNA, 22 bp, synthetic construct
  misc_feature 1..22: note = chemically synthesized
  source 1..22: mol_type = other DNA
tgttccatggggggccaggggc

SEQ ID NO: 53704 - DNA, 22 bp, synthetic construct
  misc_feature 1..22: note = chemically synthesized
  source 1..22: mol_type = other DNA
catggggggccaggggccagga

SEQ ID NO: 53705 - DNA, 22 bp, synthetic construct
  misc_feature 1..22: note = chemically synthesized
  source 1..22: mol_type = other DNA
tcatctccagctgggaggtgat

SEQ ID NO: 53706 - DNA, 22 bp, synthetic construct
  misc_feature 1..22: note = chemically synthesized
  source 1..22: mol_type = other DNA
cagctgggaggtgatggccatg

SEQ ID NO: 53707 - DNA, 22 bp, synthetic construct
  misc_feature 1..22: note = chemically synthesized
  source 1..22: mol_type = other DNA
ggaggtgatggccatgcctgca

SEQ ID NO: 53708 - DNA, 22 bp, synthetic construct
  misc_feature 1..22: note = chemically synthesized
  source 1..22: mol_type = other DNA
cacccctctggccagcagaggg

SEQ ID NO: 53709 - DNA, 22 bp, synthetic construct
  misc_feature 1..22: note = chemically synthesized
  source 1..22: mol_type = other DNA
tggccagcagagggtggtcagt

SEQ ID NO: 53710 - DNA, 22 bp, synthetic construct
  misc_feature 1..22: note = chemically synthesized
  source 1..22: mol_type = other DNA
gccagcagagggtggtcagtag

SEQ ID NO: 53711 - DNA, 22 bp, synthetic construct
  misc_feature 1..22: note = chemically synthesized
  source 1..22: mol_type = other DNA
ggaggccattagggcaaccttc

SEQ ID NO: 53712 - DNA, 22 bp, synthetic construct
  misc_feature 1..22: note = chemically synthesized
  source 1..22: mol_type = other DNA
gggcaaccttctattggctcag

SEQ ID NO: 53713 - DNA, 22 bp, synthetic construct
  misc_feature 1..22: note = chemically synthesized
  source 1..22: mol_type = other DNA
ctattggctcagactcagaatg

SEQ ID NO: 53714 - DNA, 22 bp, synthetic construct
  misc_feature 1..22: note = chemically synthesized
  source 1..22: mol_type = other DNA
tattggctcagactcagaatgc

SEQ ID NO: 53715 - DNA, 22 bp, synthetic construct
  misc_feature 1..22: note = chemically synthesized
  source 1..22: mol_type = other DNA
ttggctcagactcagaatgcag

SEQ ID NO: 53716 - DNA, 22 bp, synthetic construct
  misc_feature 1..22: note = chemically synthesized
  source 1..22: mol_type = other DNA
gctcagactcagaatgcagtag

SEQ ID NO: 53717 - DNA, 22 bp, synthetic construct
  misc_feature 1..22: note = chemically synthesized
  source 1..22: mol_type = other DNA
agactcagaatgcagtagaact

SEQ ID NO: 53718 - DNA, 22 bp, synthetic construct
  misc_feature 1..22: note = chemically synthesized
  source 1..22: mol_type = other DNA
agaatgcagtagaacttgtgcc

SEQ ID NO: 53719 - DNA, 22 bp, synthetic construct
  misc_feature 1..22: note = chemically synthesized
  source 1..22: mol_type = other DNA
gtgccctgtagtgttcatggac

SEQ ID NO: 53720 - DNA, 22 bp, synthetic construct
  misc_feature 1..22: note = chemically synthesized
  source 1..22: mol_type = other DNA
tgccctgtagtgttcatggaca

SEQ ID NO: 53721 - DNA, 22 bp, synthetic construct
  misc_feature 1..22: note = chemically synthesized
  source 1..22: mol_type = other DNA
tagtgttcatggacaggagtga

SEQ ID NO: 53722 - DNA, 22 bp, synthetic construct
  misc_feature 1..22: note = chemically synthesized
  source 1..22: mol_type = other DNA
atggacaggagtgagaggagga

SEQ ID NO: 53723 - DNA, 22 bp, synthetic construct
  misc_feature 1..22: note = chemically synthesized
  source 1..22: mol_type = other DNA
aggggatgtggctgtcaaggcc

SEQ ID NO: 53724 - DNA, 22 bp, synthetic construct
  misc_feature 1..22: note = chemically synthesized
  source 1..22: mol_type = other DNA
tcaaggcctttctaggggcgat

SEQ ID NO: 53725 - DNA, 22 bp, synthetic construct
  misc_feature 1..22: note = chemically synthesized
  source 1..22: mol_type = other DNA
tctaggggcgatgctgtctctc

SEQ ID NO: 53726 - DNA, 22 bp, synthetic construct
  misc_feature 1..22: note = chemically synthesized
  source 1..22: mol_type = other DNA
ctaggggcgatgctgtctctcc

SEQ ID NO: 53727 - DNA, 22 bp, synthetic construct
  misc_feature 1..22: note = chemically synthesized
  source 1..22: mol_type = other DNA
taggggcgatgctgtctctccc

SEQ ID NO: 53728 - DNA, 22 bp, synthetic construct
  misc_feature 1..22: note = chemically synthesized
  source 1..22: mol_type = other DNA
ggggcgatgctgtctctccctc

SEQ ID NO: 53729 - DNA, 22 bp, synthetic construct
  misc_feature 1..22: note = chemically synthesized
  source 1..22: mol_type = other DNA
tctctccctcagcatagggagt

SEQ ID NO: 53730 - DNA, 22 bp, synthetic construct
  misc_feature 1..22: note = chemically synthesized
  source 1..22: mol_type = other DNA
tccctcagcatagggagtgggc

SEQ ID NO: 53731 - DNA, 22 bp, synthetic construct
  misc_feature 1..22: note = chemically synthesized
  source 1..22: mol_type = other DNA
cctcagcatagggagtgggccc

SEQ ID NO: 53732 - DNA, 22 bp, synthetic construct
  misc_feature 1..22: note = chemically synthesized
  source 1..22: mol_type = other DNA
agcatagggagtgggcccttcc

SEQ ID NO: 53733 - DNA, 22 bp, synthetic construct
  misc_feature 1..22: note = chemically synthesized
  source 1..22: mol_type = other DNA
ccacctctggcctctctccccc

SEQ ID NO: 53734 - DNA, 22 bp, synthetic construct
  misc_feature 1..22: note = chemically synthesized
  source 1..22: mol_type = other DNA
cacctctggcctctctccccca

SEQ ID NO: 53735 - DNA, 22 bp, synthetic construct
  misc_feature 1..22: note = chemically synthesized
  source 1..22: mol_type = other DNA
tggcctctctcccccagggctg

SEQ ID NO: 53736 - DNA, 22 bp, synthetic construct
  misc_feature 1..22: note = chemically synthesized
  source 1..22: mol_type = other DNA
gcctctctcccccagggctgtg

SEQ ID NO: 53737 - DNA, 22 bp, synthetic construct
  misc_feature 1..22: note = chemically synthesized
  source 1..22: mol_type = other DNA
tctcccccagggctgtgtctgg

SEQ ID NO: 53738 - DNA, 22 bp, synthetic construct
  misc_feature 1..22: note = chemically synthesized
  source 1..22: mol_type = other DNA
tcccccagggctgtgtctggct

SEQ ID NO: 53739 - DNA, 22 bp, synthetic construct
  misc_feature 1..22: note = chemically synthesized
  source 1..22: mol_type = other DNA
ccccagggctgtgtctggctgt

SEQ ID NO: 53740 - DNA, 22 bp, synthetic construct
  misc_feature 1..22: note = chemically synthesized
  source 1..22: mol_type = other DNA
tgtctggctgtccctgataaaa

SEQ ID NO: 53741 - DNA, 22 bp, synthetic construct
  misc_feature 1..22: note = chemically synthesized
  source 1..22: mol_type = other DNA
gctgtccctgataaaactgtga

SEQ ID NO: 53742 - DNA, 22 bp, synthetic construct
  misc_feature 1..22: note = chemically synthesized
  source 1..22: mol_type = other DNA
tccctgataaaactgtgagatg

SEQ ID NO: 53743 - DNA, 22 bp, synthetic construct
  misc_feature 1..22: note = chemically synthesized
  source 1..22: mol_type = other DNA
ataaaactgtgagatggtgtgc

SEQ ID NO: 53744 - DNA, 22 bp, synthetic construct
  misc_feature 1..22: note = chemically synthesized
  source 1..22: mol_type = other DNA
tgagatggtgtgcagtgtcgga

SEQ ID NO: 53745 - DNA, 22 bp, synthetic construct
  misc_feature 1..22: note = chemically synthesized
  source 1..22: mol_type = other DNA
agtgccagagtttccgcgacca

SEQ ID NO: 53746 - DNA, 22 bp, synthetic construct
  misc_feature 1..22: note = chemically synthesized
  source 1..22: mol_type = other DNA
ccgcgaccatatgaaaagcgtc

SEQ ID NO: 53747 - DNA, 22 bp, synthetic construct
  misc_feature 1..22: note = chemically synthesized
  source 1..22: mol_type = other DNA
cgcgaccatatgaaaagcgtca

SEQ ID NO: 53748 - DNA, 22 bp, synthetic construct
  misc_feature 1..22: note = chemically synthesized
  source 1..22: mol_type = other DNA
catccgatggtcccagtgttgc

SEQ ID NO: 53749 - DNA, 22 bp, synthetic construct
  misc_feature 1..22: note = chemically synthesized
  source 1..22: mol_type = other DNA
cttgtgtgaagaaagcctccta

SEQ ID NO: 53750 - DNA, 22 bp, synthetic construct
  misc_feature 1..22: note = chemically synthesized
  source 1..22: mol_type = other DNA
gtgtgaagaaagcctcctacct

SEQ ID NO: 53751 - DNA, 22 bp, synthetic construct
  misc_feature 1..22: note = chemically synthesized
  source 1..22: mol_type = other DNA
tgtgaagaaagcctcctacctt

SEQ ID NO: 53752 - DNA, 22 bp, synthetic construct
  misc_feature 1..22: note = chemically synthesized
  source 1..22: mol_type = other DNA
ctaccttgattgcatcagggcc

SEQ ID NO: 53753 - DNA, 22 bp, synthetic construct
  misc_feature 1..22: note = chemically synthesized
  source 1..22: mol_type = other DNA
ccttgattgcatcagggccatt

SEQ ID NO: 53754 - DNA, 22 bp, synthetic construct
  misc_feature 1..22: note = chemically synthesized
  source 1..22: mol_type = other DNA
atgcaatcaaggtaggaggctt

SEQ ID NO: 53755 - DNA, 22 bp, synthetic construct
  misc_feature 1..22: note = chemically synthesized
  source 1..22: mol_type = other DNA
tcttcacacaagcaacactggg

SEQ ID NO: 53756 - DNA, 22 bp, synthetic construct
  misc_feature 1..22: note = chemically synthesized
  source 1..22: mol_type = other DNA
cttcacacaagcaacactggga

SEQ ID NO: 53757 - DNA, 22 bp, synthetic construct
  misc_feature 1..22: note = chemically synthesized
  source 1..22: mol_type = other DNA
ttcacacaagcaacactgggac

SEQ ID NO: 53758 - DNA, 22 bp, synthetic construct
  misc_feature 1..22: note = chemically synthesized
  source 1..22: mol_type = other DNA
cacacaagcaacactgggacca

SEQ ID NO: 53759 - DNA, 22 bp, synthetic construct
  misc_feature 1..22: note = chemically synthesized
  source 1..22: mol_type = other DNA
acacaagcaacactgggaccat

SEQ ID NO: 53760 - DNA, 22 bp, synthetic construct
  misc_feature 1..22: note = chemically synthesized
  source 1..22: mol_type = other DNA
ggaccatcggatggaatgacgc

SEQ ID NO: 53761 - DNA, 22 bp, synthetic construct
  misc_feature 1..22: note = chemically synthesized
  source 1..22: mol_type = other DNA
ttcatatggtcgcggaaactct

SEQ ID NO: 53762 - DNA, 22 bp, synthetic construct
  misc_feature 1..22: note = chemically synthesized
  source 1..22: mol_type = other DNA
tcatatggtcgcggaaactctg

SEQ ID NO: 53763 - DNA, 22 bp, synthetic construct
  misc_feature 1..22: note = chemically synthesized
  source 1..22: mol_type = other DNA
catatggtcgcggaaactctgg

SEQ ID NO: 53764 - DNA, 22 bp, synthetic construct
  misc_feature 1..22: note = chemically synthesized
  source 1..22: mol_type = other DNA
atatggtcgcggaaactctggc

SEQ ID NO: 53765 - DNA, 22 bp, synthetic construct
  misc_feature 1..22: note = chemically synthesized
  source 1..22: mol_type = other DNA
tggcacttagtggcctcatgct

SEQ ID NO: 53766 - DNA, 22 bp, synthetic construct
  misc_feature 1..22: note = chemically synthesized
  source 1..22: mol_type = other DNA
gcacttagtggcctcatgctcc

SEQ ID NO: 53767 - DNA, 22 bp, synthetic construct
  misc_feature 1..22: note = chemically synthesized
  source 1..22: mol_type = other DNA
agtggcctcatgctccgacact

SEQ ID NO: 53768 - DNA, 22 bp, synthetic construct
  misc_feature 1..22: note = chemically synthesized
  source 1..22: mol_type = other DNA
gtggcctcatgctccgacactg

SEQ ID NO: 53769 - DNA, 22 bp, synthetic construct
  misc_feature 1..22: note = chemically synthesized
  source 1..22: mol_type = other DNA
atgctccgacactgcacaccat

SEQ ID NO: 53770 - DNA, 22 bp, synthetic construct
  misc_feature 1..22: note = chemically synthesized
  source 1..22: mol_type = other DNA
cgacactgcacaccatctcaca

SEQ ID NO: 53771 - DNA, 22 bp, synthetic construct
  misc_feature 1..22: note = chemically synthesized
  source 1..22: mol_type = other DNA
cacaccatctcacagttttatc

SEQ ID NO: 53772 - DNA, 22 bp, synthetic construct
  misc_feature 1..22: note = chemically synthesized
  source 1..22: mol_type = other DNA
acagttttatcagggacagcca

SEQ ID NO: 53773 - DNA, 22 bp, synthetic construct
  misc_feature 1..22: note = chemically synthesized
  source 1..22: mol_type = other DNA
tatcagggacagccagacacag

SEQ ID NO: 53774 - DNA, 22 bp, synthetic construct
  misc_feature 1..22: note = chemically synthesized
  source 1..22: mol_type = other DNA
atcagggacagccagacacagc

SEQ ID NO: 53775 - DNA, 22 bp, synthetic construct
  misc_feature 1..22: note = chemically synthesized
  source 1..22: mol_type = other DNA
tcagggacagccagacacagcc

SEQ ID NO: 53776 - DNA, 22 bp, synthetic construct
  misc_feature 1..22: note = chemically synthesized
  source 1..22: mol_type = other DNA
ggggagagaggccagaggtgga

SEQ ID NO: 53777 - DNA, 22 bp, synthetic construct
  misc_feature 1..22: note = chemically synthesized
  source 1..22: mol_type = other DNA
cctatgctgagggagagacagc

SEQ ID NO: 53778 - DNA, 22 bp, synthetic construct
  misc_feature 1..22: note = chemically synthesized
  source 1..22: mol_type = other DNA
tgctgagggagagacagcatcg

SEQ ID NO: 53779 - DNA, 22 bp, synthetic construct
  misc_feature 1..22: note = chemically synthesized
  source 1..22: mol_type = other DNA
agggagagacagcatcgcccct

SEQ ID NO: 53780 - DNA, 22 bp, synthetic construct
  misc_feature 1..22: note = chemically synthesized
  source 1..22: mol_type = other DNA
gaaaggccttgacagccacatc

SEQ ID NO: 53781 - DNA, 22 bp, synthetic construct
  misc_feature 1..22: note = chemically synthesized
  source 1..22: mol_type = other DNA
gacagccacatcccctcagtcc

SEQ ID NO: 53782 - DNA, 22 bp, synthetic construct
  misc_feature 1..22: note = chemically synthesized
  source 1..22: mol_type = other DNA
acagccacatcccctcagtcct

SEQ ID NO: 53783 - DNA, 22 bp, synthetic construct
  misc_feature 1..22: note = chemically synthesized
  source 1..22: mol_type = other DNA
agtcctgtcctcctctcactcc

SEQ ID NO: 53784 - DNA, 22 bp, synthetic construct
  misc_feature 1..22: note = chemically synthesized
  source 1..22: mol_type = other DNA
tcctcctctcactcctgtccat

SEQ ID NO: 53785 - DNA, 22 bp, synthetic construct
  misc_feature 1..22: note = chemically synthesized
  source 1..22: mol_type = other DNA
ctctcactcctgtccatgaaca

SEQ ID NO: 53786 - DNA, 22 bp, synthetic construct
  misc_feature 1..22: note = chemically synthesized
  source 1..22: mol_type = other DNA
tcactcctgtccatgaacacta

SEQ ID NO: 53787 - DNA, 22 bp, synthetic construct
  misc_feature 1..22: note = chemically synthesized
  source 1..22: mol_type = other DNA
actcctgtccatgaacactaca

SEQ ID NO: 53788 - DNA, 22 bp, synthetic construct
  misc_feature 1..22: note = chemically synthesized
  source 1..22: mol_type = other DNA
ctgtccatgaacactacagggc

SEQ ID NO: 53789 - DNA, 22 bp, synthetic construct
  misc_feature 1..22: note = chemically synthesized
  source 1..22: mol_type = other DNA
tccatgaacactacagggcaca

SEQ ID NO: 53790 - DNA, 22 bp, synthetic construct
  misc_feature 1..22: note = chemically synthesized
  source 1..22: mol_type = other DNA
cagggcacaagttctactgcat

SEQ ID NO: 53791 - DNA, 22 bp, synthetic construct
  misc_feature 1..22: note = chemically synthesized
  source 1..22: mol_type = other DNA
tactgcattctgagtctgagcc

SEQ ID NO: 53792 - DNA, 22 bp, synthetic construct
  misc_feature 1..22: note = chemically synthesized
  source 1..22: mol_type = other DNA
ctgcattctgagtctgagccaa

SEQ ID NO: 53793 - DNA, 22 bp, synthetic construct
  misc_feature 1..22: note = chemically synthesized
  source 1..22: mol_type = other DNA
cattctgagtctgagccaatag

SEQ ID NO: 53794 - DNA, 22 bp, synthetic construct
  misc_feature 1..22: note = chemically synthesized
  source 1..22: mol_type = other DNA
tgagtctgagccaatagaaggt

SEQ ID NO: 53795 - DNA, 22 bp, synthetic construct
  misc_feature 1..22: note = chemically synthesized
  source 1..22: mol_type = other DNA
agtctgagccaatagaaggttg

SEQ ID NO: 53796 - DNA, 22 bp, synthetic construct
  misc_feature 1..22: note = chemically synthesized
  source 1..22: mol_type = other DNA
agccaatagaaggttgccctaa

SEQ ID NO: 53797 - DNA, 22 bp, synthetic construct
  misc_feature 1..22: note = chemically synthesized
  source 1..22: mol_type = other DNA
ccctaatggcctcccagtttcc

SEQ ID NO: 53798 - DNA, 22 bp, synthetic construct
  misc_feature 1..22: note = chemically synthesized
  source 1..22: mol_type = other DNA
atggcctcccagtttcctactg

SEQ ID NO: 53799 - DNA, 22 bp, synthetic construct
  misc_feature 1..22: note = chemically synthesized
  source 1..22: mol_type = other DNA
ccagtttcctactgaccaccct

SEQ ID NO: 53800 - DNA, 22 bp, synthetic construct
  misc_feature 1..22: note = chemically synthesized
  source 1..22: mol_type = other DNA
cctactgaccaccctctgctgg

SEQ ID NO: 53801 - DNA, 22 bp, synthetic construct
  misc_feature 1..22: note = chemically synthesized
  source 1..22: mol_type = other DNA
ctactgaccaccctctgctggc

SEQ ID NO: 53802 - DNA, 22 bp, synthetic construct
  misc_feature 1..22: note = chemically synthesized
  source 1..22: mol_type = other DNA
ctgaccaccctctgctggccag

SEQ ID NO: 53803 - DNA, 22 bp, synthetic construct
  misc_feature 1..22: note = chemically synthesized
  source 1..22: mol_type = other DNA
accaccctctgctggccagagg

SEQ ID NO: 53804 - DNA, 22 bp, synthetic construct
  misc_feature 1..22: note = chemically synthesized
  source 1..22: mol_type = other DNA
tgctggccagaggggtgcaggc

SEQ ID NO: 53805 - DNA, 22 bp, synthetic construct
  misc_feature 1..22: note = chemically synthesized
  source 1..22: mol_type = other DNA
ctggccagaggggtgcaggcat

SEQ ID NO: 53806 - DNA, 22 bp, synthetic construct
  misc_feature 1..22: note = chemically synthesized
  source 1..22: mol_type = other DNA
gccagaggggtgcaggcatggc

SEQ ID NO: 53807 - DNA, 22 bp, synthetic construct
  misc_feature 1..22: note = chemically synthesized
  source 1..22: mol_type = other DNA
ccagctggagatgacaatctgc

SEQ ID NO: 53808 - DNA, 22 bp, synthetic construct
  misc_feature 1..22: note = chemically synthesized
  source 1..22: mol_type = other DNA
gagatgacaatctgctcctctg

SEQ ID NO: 53809 - DNA, 22 bp, synthetic construct
  misc_feature 1..22: note = chemically synthesized
  source 1..22: mol_type = other DNA
ctcctctgtatccgccttgtct

SEQ ID NO: 53810 - DNA, 22 bp, synthetic construct
  misc_feature 1..22: note = chemically synthesized
  source 1..22: mol_type = other DNA
ctctgtatccgccttgtctcct

SEQ ID NO: 53811 - DNA, 22 bp, synthetic construct
  misc_feature 1..22: note = chemically synthesized
  source 1..22: mol_type = other DNA
tgtatccgccttgtctcctccc

SEQ ID NO: 53812 - DNA, 22 bp, synthetic construct
  misc_feature 1..22: note = chemically synthesized
  source 1..22: mol_type = other DNA
tatccgccttgtctcctcccat

SEQ ID NO: 53813 - DNA, 22 bp, synthetic construct
  misc_feature 1..22: note = chemically synthesized
  source 1..22: mol_type = other DNA
gtctcctcccatcactgtcctg

SEQ ID NO: 53814 - DNA, 22 bp, synthetic construct
  misc_feature 1..22: note = chemically synthesized
  source 1..22: mol_type = other DNA
tctcctcccatcactgtcctgg

SEQ ID NO: 53815 - DNA, 22 bp, synthetic construct
  misc_feature 1..22: note = chemically synthesized
  source 1..22: mol_type = other DNA
ctcccatcactgtcctggcccc

SEQ ID NO: 53816 - DNA, 22 bp, synthetic construct
  misc_feature 1..22: note = chemically synthesized
  source 1..22: mol_type = other DNA
ccatcactgtcctggcccctgg

SEQ ID NO: 53817 - DNA, 22 bp, synthetic construct
  misc_feature 1..22: note = chemically synthesized
  source 1..22: mol_type = other DNA
tcctggcccctggccccccatg

SEQ ID NO: 53818 - DNA, 22 bp, synthetic construct
  misc_feature 1..22: note = chemically synthesized
  source 1..22: mol_type = other DNA
gcccctggccccccatggaaca

SEQ ID NO: 53819 - DNA, 22 bp, synthetic construct
  misc_feature 1..22: note = chemically synthesized
  source 1..22: mol_type = other DNA
gccccccatggaacataagcct

SEQ ID NO: 53820 - DNA, 22 bp, synthetic construct
  misc_feature 1..22: note = chemically synthesized
  source 1..22: mol_type = other DNA
agtatgcacagggcgttttcag

SEQ ID NO: 53821 - DNA, 22 bp, synthetic construct
  misc_feature 1..22: note = chemically synthesized
  source 1..22: mol_type = other DNA
tcagctaccccaacacattggc

SEQ ID NO: 53822 - DNA, 22 bp, synthetic construct
  misc_feature 1..22: note = chemically synthesized
  source 1..22: mol_type = other DNA
cagctaccccaacacattggct

SEQ ID NO: 53823 - DNA, 22 bp, synthetic construct
  misc_feature 1..22: note = chemically synthesized
  source 1..22: mol_type = other DNA
agctaccccaacacattggctt

SEQ ID NO: 53824 - DNA, 22 bp, synthetic construct
  misc_feature 1..22: note = chemically synthesized
  source 1..22: mol_type = other DNA
ccccaacacattggcttgctac

SEQ ID NO: 53825 - DNA, 22 bp, synthetic construct
  misc_feature 1..22: note = chemically synthesized
  source 1..22: mol_type = other DNA
gcttgctacctcaactatggaa

SEQ ID NO: 53826 - DNA, 22 bp, synthetic construct
  misc_feature 1..22: note = chemically synthesized
  source 1..22: mol_type = other DNA
gctacctcaactatggaaaacc

SEQ ID NO: 53827 - DNA, 22 bp, synthetic construct
  misc_feature 1..22: note = chemically synthesized
  source 1..22: mol_type = other DNA
ctacctcaactatggaaaacca

SEQ ID NO: 53828 - DNA, 22 bp, synthetic construct
  misc_feature 1..22: note = chemically synthesized
  source 1..22: mol_type = other DNA
cctcaactatggaaaaccagcg

SEQ ID NO: 53829 - DNA, 22 bp, synthetic construct
  misc_feature 1..22: note = chemically synthesized
  source 1..22: mol_type = other DNA
aactatggaaaaccagcggggg

SEQ ID NO: 53830 - DNA, 22 bp, synthetic construct
  misc_feature 1..22: note = chemically synthesized
  source 1..22: mol_type = other DNA
tggaaaaccagcgggggaggaa

SEQ ID NO: 53831 - DNA, 22 bp, synthetic construct
  misc_feature 1..22: note = chemically synthesized
  source 1..22: mol_type = other DNA
ccatctttttgagaagagggag

SEQ ID NO: 53832 - DNA, 22 bp, synthetic construct
  misc_feature 1..22: note = chemically synthesized
  source 1..22: mol_type = other DNA
tttgagaagagggagtgagact

SEQ ID NO: 53833 - DNA, 22 bp, synthetic construct
  misc_feature 1..22: note = chemically synthesized
  source 1..22: mol_type = other DNA
ttgagaagagggagtgagactc

SEQ ID NO: 53834 - DNA, 22 bp, synthetic construct
  misc_feature 1..22: note = chemically synthesized
  source 1..22: mol_type = other DNA
tgagaagagggagtgagactca

SEQ ID NO: 53835 - DNA, 22 bp, synthetic construct
  misc_feature 1..22: note = chemically synthesized
  source 1..22: mol_type = other DNA
gagaagagggagtgagactcag

SEQ ID NO: 53836 - DNA, 22 bp, synthetic construct
  misc_feature 1..22: note = chemically synthesized
  source 1..22: mol_type = other DNA
agaagagggagtgagactcaga

SEQ ID NO: 53837 - DNA, 22 bp, synthetic construct
  misc_feature 1..22: note = chemically synthesized
  source 1..22: mol_type = other DNA
agagaatgatgccttttttttt

SEQ ID NO: 53838 - DNA, 22 bp, synthetic construct
  misc_feature 1..22: note = chemically synthesized
  source 1..22: mol_type = other DNA
tttttttttttaacccaaggtc

SEQ ID NO: 53839 - DNA, 22 bp, synthetic construct
  misc_feature 1..22: note = chemically synthesized
  source 1..22: mol_type = other DNA
ttttttttttaacccaaggtca

SEQ ID NO: 53840 - DNA, 22 bp, synthetic construct
  misc_feature 1..22: note = chemically synthesized
  source 1..22: mol_type = other DNA
tttttttttaacccaaggtcac

SEQ ID NO: 53841 - DNA, 22 bp, synthetic construct
  misc_feature 1..22: note = chemically synthesized
  source 1..22: mol_type = other DNA
ttttttttaacccaaggtcacc

SEQ ID NO: 53842 - DNA, 22 bp, synthetic construct
  misc_feature 1..22: note = chemically synthesized
  source 1..22: mol_type = other DNA
tttttttaacccaaggtcaccc

SEQ ID NO: 53843 - DNA, 22 bp, synthetic construct
  misc_feature 1..22: note = chemically synthesized
  source 1..22: mol_type = other DNA
ttttttaacccaaggtcaccct

SEQ ID NO: 53844 - DNA, 22 bp, synthetic construct
  misc_feature 1..22: note = chemically synthesized
  source 1..22: mol_type = other DNA
tttttaacccaaggtcaccctg

SEQ ID NO: 53845 - DNA, 22 bp, synthetic construct
  misc_feature 1..22: note = chemically synthesized
  source 1..22: mol_type = other DNA
ttttaacccaaggtcaccctgc

SEQ ID NO: 53846 - DNA, 22 bp, synthetic construct
  misc_feature 1..22: note = chemically synthesized
  source 1..22: mol_type = other DNA
tttaacccaaggtcaccctgct

SEQ ID NO: 53847 - DNA, 22 bp, synthetic construct
  misc_feature 1..22: note = chemically synthesized
  source 1..22: mol_type = other DNA
ttaacccaaggtcaccctgctt

SEQ ID NO: 53848 - DNA, 22 bp, synthetic construct
  misc_feature 1..22: note = chemically synthesized
  source 1..22: mol_type = other DNA
taacccaaggtcaccctgcttg

SEQ ID NO: 53849 - DNA, 22 bp, synthetic construct
  misc_feature 1..22: note = chemically synthesized
  source 1..22: mol_type = other DNA
aacccaaggtcaccctgcttgt

SEQ ID NO: 53850 - DNA, 22 bp, synthetic construct
  misc_feature 1..22: note = chemically synthesized
  source 1..22: mol_type = other DNA
acccaaggtcaccctgcttgtc

SEQ ID NO: 53851 - DNA, 22 bp, synthetic construct
  misc_feature 1..22: note = chemically synthesized
  source 1..22: mol_type = other DNA
cttgtcgttggccaagccaggc

SEQ ID NO: 53852 - DNA, 22 bp, synthetic construct
  misc_feature 1..22: note = chemically synthesized
  source 1..22: mol_type = other DNA
gtcgttggccaagccaggccta

SEQ ID NO: 53853 - DNA, 22 bp, synthetic construct
  misc_feature 1..22: note = chemically synthesized
  source 1..22: mol_type = other DNA
tcgttggccaagccaggcctag

SEQ ID NO: 53854 - DNA, 22 bp, synthetic construct
  misc_feature 1..22: note = chemically synthesized
  source 1..22: mol_type = other DNA
gccaagccaggcctagaatctg

SEQ ID NO: 53855 - DNA, 22 bp, synthetic construct
  misc_feature 1..22: note = chemically synthesized
  source 1..22: mol_type = other DNA
gaatctgggtctccagactctg

SEQ ID NO: 53856 - DNA, 22 bp, synthetic construct
  misc_feature 1..22: note = chemically synthesized
  source 1..22: mol_type = other DNA
ggtctccagactctgggtctgc

SEQ ID NO: 53857 - DNA, 22 bp, synthetic construct
  misc_feature 1..22: note = chemically synthesized
  source 1..22: mol_type = other DNA
cagactctgggtctgctactca

SEQ ID NO: 53858 - DNA, 22 bp, synthetic construct
  misc_feature 1..22: note = chemically synthesized
  source 1..22: mol_type = other DNA
tgggtctgctactcagggcaca

SEQ ID NO: 53859 - DNA, 22 bp, synthetic construct
  misc_feature 1..22: note = chemically synthesized
  source 1..22: mol_type = other DNA
ggtctgctactcagggcacaaa

SEQ ID NO: 53860 - DNA, 22 bp, synthetic construct
  misc_feature 1..22: note = chemically synthesized
  source 1..22: mol_type = other DNA
ctactcagggcacaaaagaaga

SEQ ID NO: 53861 - DNA, 22 bp, synthetic construct
  misc_feature 1..22: note = chemically synthesized
  source 1..22: mol_type = other DNA
ctcagggcacaaaagaagaaaa

SEQ ID NO: 53862 - DNA, 22 bp, synthetic construct
  misc_feature 1..22: note = chemically synthesized
  source 1..22: mol_type = other DNA
agggcacaaaagaagaaaacat

SEQ ID NO: 53863 - DNA, 22 bp, synthetic construct
  misc_feature 1..22: note = chemically synthesized
  source 1..22: mol_type = other DNA
tgagttacaccccttcttggcc

SEQ ID NO: 53864 - DNA, 22 bp, synthetic construct
  misc_feature 1..22: note = chemically synthesized
  source 1..22: mol_type = other DNA
agttacaccccttcttggccag

SEQ ID NO: 53865 - DNA, 22 bp, synthetic construct
  misc_feature 1..22: note = chemically synthesized
  source 1..22: mol_type = other DNA
caccccttcttggccagtagtt

SEQ ID NO: 53866 - DNA, 22 bp, synthetic construct
  misc_feature 1..22: note = chemically synthesized
  source 1..22: mol_type = other DNA
cttggccagtagttgagggtaa

SEQ ID NO: 53867 - DNA, 22 bp, synthetic construct
  misc_feature 1..22: note = chemically synthesized
  source 1..22: mol_type = other DNA
ttggccagtagttgagggtaaa

SEQ ID NO: 53868 - DNA, 22 bp, synthetic construct
  misc_feature 1..22: note = chemically synthesized
  source 1..22: mol_type = other DNA
ggccagtagttgagggtaaatt

SEQ ID NO: 53869 - DNA, 22 bp, synthetic construct
  misc_feature 1..22: note = chemically synthesized
  source 1..22: mol_type = other DNA
gccagtagttgagggtaaatta

SEQ ID NO: 53870 - DNA, 22 bp, synthetic construct
  misc_feature 1..22: note = chemically synthesized
  source 1..22: mol_type = other DNA
agggtaaattaacgaaaagaat

SEQ ID NO: 53871 - DNA, 22 bp, synthetic construct
  misc_feature 1..22: note = chemically synthesized
  source 1..22: mol_type = other DNA
acgaaaagaattaatttgtctg

SEQ ID NO: 53872 - DNA, 22 bp, synthetic construct
  misc_feature 1..22: note = chemically synthesized
  source 1..22: mol_type = other DNA
atttgtctgtaactcttgtctg

SEQ ID NO: 53873 - DNA, 22 bp, synthetic construct
  misc_feature 1..22: note = chemically synthesized
  source 1..22: mol_type = other DNA
gtctgtaactcttgtctgttgc

SEQ ID NO: 53874 - DNA, 22 bp, synthetic construct
  misc_feature 1..22: note = chemically synthesized
  source 1..22: mol_type = other DNA
tctgtaactcttgtctgttgct

SEQ ID NO: 53875 - DNA, 22 bp, synthetic construct
  misc_feature 1..22: note = chemically synthesized
  source 1..22: mol_type = other DNA
taactcttgtctgttgctctct

SEQ ID NO: 53876 - DNA, 22 bp, synthetic construct
  misc_feature 1..22: note = chemically synthesized
  source 1..22: mol_type = other DNA
ttgtctgttgctctctgtttag

SEQ ID NO: 53877 - DNA, 22 bp, synthetic construct
  misc_feature 1..22: note = chemically synthesized
  source 1..22: mol_type = other DNA
gtctgttgctctctgtttagga

SEQ ID NO: 53878 - DNA, 22 bp, synthetic construct
  misc_feature 1..22: note = chemically synthesized
  source 1..22: mol_type = other DNA
tctgttgctctctgtttaggaa

SEQ ID NO: 53879 - DNA, 22 bp, synthetic construct
  misc_feature 1..22: note = chemically synthesized
  source 1..22: mol_type = other DNA
ttgctctctgtttaggaagaac

SEQ ID NO: 53880 - DNA, 22 bp, synthetic construct
  misc_feature 1..22: note = chemically synthesized
  source 1..22: mol_type = other DNA
ctctctgtttaggaagaactaa

SEQ ID NO: 53881 - DNA, 22 bp, synthetic construct
  misc_feature 1..22: note = chemically synthesized
  source 1..22: mol_type = other DNA
tctgtttaggaagaactaaaaa

SEQ ID NO: 53882 - DNA, 22 bp, synthetic construct
  misc_feature 1..22: note = chemically synthesized
  source 1..22: mol_type = other DNA
tgtttaggaagaactaaaaact

SEQ ID NO: 53883 - DNA, 22 bp, synthetic construct
  misc_feature 1..22: note = chemically synthesized
  source 1..22: mol_type = other DNA
tttaggaagaactaaaaactcc

SEQ ID NO: 53884 - DNA, 22 bp, synthetic construct
  misc_feature 1..22: note = chemically synthesized
  source 1..22: mol_type = other DNA
aggaagaactaaaaactccaca

SEQ ID NO: 53885 - DNA, 22 bp, synthetic construct
  misc_feature 1..22: note = chemically synthesized
  source 1..22: mol_type = other DNA
ggaagaactaaaaactccacaa

SEQ ID NO: 53886 - DNA, 22 bp, synthetic construct
  misc_feature 1..22: note = chemically synthesized
  source 1..22: mol_type = other DNA
aaaactccacaaattcaacagt

SEQ ID NO: 53887 - DNA, 22 bp, synthetic construct
  misc_feature 1..22: note = chemically synthesized
  source 1..22: mol_type = other DNA
cacaaattcaacagtctcccct

SEQ ID NO: 53888 - DNA, 22 bp, synthetic construct
  misc_feature 1..22: note = chemically synthesized
  source 1..22: mol_type = other DNA
aacagtctcccctctgtctcca

SEQ ID NO: 53889 - DNA, 22 bp, synthetic construct
  misc_feature 1..22: note = chemically synthesized
  source 1..22: mol_type = other DNA
ccctctgtctccactgaactat

SEQ ID NO: 53890 - DNA, 22 bp, synthetic construct
  misc_feature 1..22: note = chemically synthesized
  source 1..22: mol_type = other DNA
tgtctccactgaactatccctc

SEQ ID NO: 53891 - DNA, 22 bp, synthetic construct
  misc_feature 1..22: note = chemically synthesized
  source 1..22: mol_type = other DNA
tctccactgaactatccctcca

SEQ ID NO: 53892 - DNA, 22 bp, synthetic construct
  misc_feature 1..22: note = chemically synthesized
  source 1..22: mol_type = other DNA
cactgaactatccctccatttt

SEQ ID NO: 53893 - DNA, 22 bp, synthetic construct
  misc_feature 1..22: note = chemically synthesized
  source 1..22: mol_type = other DNA
aactatccctccattttcacca

SEQ ID NO: 53894 - DNA, 22 bp, synthetic construct
  misc_feature 1..22: note = chemically synthesized
  source 1..22: mol_type = other DNA
tccctccattttcaccacactt

SEQ ID NO: 53895 - DNA, 22 bp, synthetic construct
  misc_feature 1..22: note = chemically synthesized
  source 1..22: mol_type = other DNA
cattttcaccacactttttggc

SEQ ID NO: 53896 - DNA, 22 bp, synthetic construct
  misc_feature 1..22: note = chemically synthesized
  source 1..22: mol_type = other DNA
tcaccacactttttggctgcca

SEQ ID NO: 53897 - DNA, 22 bp, synthetic construct
  misc_feature 1..22: note = chemically synthesized
  source 1..22: mol_type = other DNA
caccacactttttggctgccat

SEQ ID NO: 53898 - DNA, 22 bp, synthetic construct
  misc_feature 1..22: note = chemically synthesized
  source 1..22: mol_type = other DNA
accacactttttggctgccatt

SEQ ID NO: 53899 - DNA, 22 bp, synthetic construct
  misc_feature 1..22: note = chemically synthesized
  source 1..22: mol_type = other DNA
tttggctgccattcacaaaaaa

SEQ ID NO: 53900 - DNA, 22 bp, synthetic construct
  misc_feature 1..22: note = chemically synthesized
  source 1..22: mol_type = other DNA
ttggctgccattcacaaaaaaa

SEQ ID NO: 53901 - DNA, 22 bp, synthetic construct
  misc_feature 1..22: note = chemically synthesized
  source 1..22: mol_type = other DNA
tggctgccattcacaaaaaaag

SEQ ID NO: 53902 - DNA, 22 bp, synthetic construct
  misc_feature 1..22: note = chemically synthesized
  source 1..22: mol_type = other DNA
ggctgccattcacaaaaaaagc

SEQ ID NO: 53903 - DNA, 22 bp, synthetic construct
  misc_feature 1..22: note = chemically synthesized
  source 1..22: mol_type = other DNA
gctgccattcacaaaaaaagct

SEQ ID NO: 53904 - DNA, 22 bp, synthetic construct
  misc_feature 1..22: note = chemically synthesized
  source 1..22: mol_type = other DNA
ccattcacaaaaaaagctgaag

SEQ ID NO: 53905 - DNA, 22 bp, synthetic construct
  misc_feature 1..22: note = chemically synthesized
  source 1..22: mol_type = other DNA
acaaaaaaagctgaagccagcc

SEQ ID NO: 53906 - DNA, 22 bp, synthetic construct
  misc_feature 1..22: note = chemically synthesized
  source 1..22: mol_type = other DNA
aagccagccatgggtaactatt

SEQ ID NO: 53907 - DNA, 22 bp, synthetic construct
  misc_feature 1..22: note = chemically synthesized
  source 1..22: mol_type = other DNA
ttaaaatccatgtggttgcaga

SEQ ID NO: 53908 - DNA, 22 bp, synthetic construct
  misc_feature 1..22: note = chemically synthesized
  source 1..22: mol_type = other DNA
aaatccatgtggttgcagagac

SEQ ID NO: 53909 - DNA, 22 bp, synthetic construct
  misc_feature 1..22: note = chemically synthesized
  source 1..22: mol_type = other DNA
cagagacagcatccctatcaca

SEQ ID NO: 53910 - DNA, 22 bp, synthetic construct
  misc_feature 1..22: note = chemically synthesized
  source 1..22: mol_type = other DNA
tcacatgagcttttgccctgtc

SEQ ID NO: 53911 - DNA, 22 bp, synthetic construct
  misc_feature 1..22: note = chemically synthesized
  source 1..22: mol_type = other DNA
ttgccctgtccccaaggccctc

SEQ ID NO: 53912 - DNA, 22 bp, synthetic construct
  misc_feature 1..22: note = chemically synthesized
  source 1..22: mol_type = other DNA
tgccctgtccccaaggccctct

SEQ ID NO: 53913 - DNA, 22 bp, synthetic construct
  misc_feature 1..22: note = chemically synthesized
  source 1..22: mol_type = other DNA
gccctgtccccaaggccctctg

SEQ ID NO: 53914 - DNA, 22 bp, synthetic construct
  misc_feature 1..22: note = chemically synthesized
  source 1..22: mol_type = other DNA
ccctgtccccaaggccctctgt

SEQ ID NO: 53915 - DNA, 22 bp, synthetic construct
  misc_feature 1..22: note = chemically synthesized
  source 1..22: mol_type = other DNA
tccccaaggccctctgtcatct

SEQ ID NO: 53916 - DNA, 22 bp, synthetic construct
  misc_feature 1..22: note = chemically synthesized
  source 1..22: mol_type = other DNA
tgtcatctccactccttgtggg

SEQ ID NO: 53917 - DNA, 22 bp, synthetic construct
  misc_feature 1..22: note = chemically synthesized
  source 1..22: mol_type = other DNA
tcatctccactccttgtgggcc

SEQ ID NO: 53918 - DNA, 22 bp, synthetic construct
  misc_feature 1..22: note = chemically synthesized
  source 1..22: mol_type = other DNA
cactccttgtgggccaccacag

SEQ ID NO: 53919 - DNA, 22 bp, synthetic construct
  misc_feature 1..22: note = chemically synthesized
  source 1..22: mol_type = other DNA
cttgtgggccaccacagcaagg

SEQ ID NO: 53920 - DNA, 22 bp, synthetic construct
  misc_feature 1..22: note = chemically synthesized
  source 1..22: mol_type = other DNA
gtgggccaccacagcaaggctg

SEQ ID NO: 53921 - DNA, 22 bp, synthetic construct
  misc_feature 1..22: note = chemically synthesized
  source 1..22: mol_type = other DNA
tgggccaccacagcaaggctga

SEQ ID NO: 53922 - DNA, 22 bp, synthetic construct
  misc_feature 1..22: note = chemically synthesized
  source 1..22: mol_type = other DNA
actcactggctctgaagaagat

SEQ ID NO: 53923 - DNA, 22 bp, synthetic construct
  misc_feature 1..22: note = chemically synthesized
  source 1..22: mol_type = other DNA
actggctctgaagaagatccac

SEQ ID NO: 53924 - DNA, 22 bp, synthetic construct
  misc_feature 1..22: note = chemically synthesized
  source 1..22: mol_type = other DNA
gctctgaagaagatccacaaag

SEQ ID NO: 53925 - DNA, 22 bp, synthetic construct
  misc_feature 1..22: note = chemically synthesized
  source 1..22: mol_type = other DNA
tgaagaagatccacaaagcctg

SEQ ID NO: 53926 - DNA, 22 bp, synthetic construct
  misc_feature 1..22: note = chemically synthesized
  source 1..22: mol_type = other DNA
aagaagatccacaaagcctgtg

SEQ ID NO: 53927 - DNA, 22 bp, synthetic construct
  misc_feature 1..22: note = chemically synthesized
  source 1..22: mol_type = other DNA
tggagaggaggcccacagctct

SEQ ID NO: 53928 - DNA, 22 bp, synthetic construct
  misc_feature 1..22: note = chemically synthesized
  source 1..22: mol_type = other DNA
tccaggatgcatgaggaggggc

SEQ ID NO: 53929 - DNA, 22 bp, synthetic construct
  misc_feature 1..22: note = chemically synthesized
  source 1..22: mol_type = other DNA
caggatgcatgaggaggggcca

SEQ ID NO: 53930 - DNA, 22 bp, synthetic construct
  misc_feature 1..22: note = chemically synthesized
  source 1..22: mol_type = other DNA
tccctcttggcccatgggaaat

SEQ ID NO: 53931 - DNA, 22 bp, synthetic construct
  misc_feature 1..22: note = chemically synthesized
  source 1..22: mol_type = other DNA
ccctcttggcccatgggaaatc

SEQ ID NO: 53932 - DNA, 22 bp, synthetic construct
  misc_feature 1..22: note = chemically synthesized
  source 1..22: mol_type = other DNA
cctcttggcccatgggaaatcc

SEQ ID NO: 53933 - DNA, 22 bp, synthetic construct
  misc_feature 1..22: note = chemically synthesized
  source 1..22: mol_type = other DNA
ttggcccatgggaaatcctagg

SEQ ID NO: 53934 - DNA, 22 bp, synthetic construct
  misc_feature 1..22: note = chemically synthesized
  source 1..22: mol_type = other DNA
ggcccatgggaaatcctaggag

SEQ ID NO: 53935 - DNA, 22 bp, synthetic construct
  misc_feature 1..22: note = chemically synthesized
  source 1..22: mol_type = other DNA
gcccatgggaaatcctaggagg

SEQ ID NO: 53936 - DNA, 22 bp, synthetic construct
  misc_feature 1..22: note = chemically synthesized
  source 1..22: mol_type = other DNA
ggaggcaacataagcctgtggc

SEQ ID NO: 53937 - DNA, 22 bp, synthetic construct
  misc_feature 1..22: note = chemically synthesized
  source 1..22: mol_type = other DNA
tggcagcccctccacaaagccc

SEQ ID NO: 53938 - DNA, 22 bp, synthetic construct
  misc_feature 1..22: note = chemically synthesized
  source 1..22: mol_type = other DNA
cacaaagccctgcctccagagt

SEQ ID NO: 53939 - DNA, 22 bp, synthetic construct
  misc_feature 1..22: note = chemically synthesized
  source 1..22: mol_type = other DNA
cctccagagttcccataggcga

SEQ ID NO: 53940 - DNA, 22 bp, synthetic construct
  misc_feature 1..22: note = chemically synthesized
  source 1..22: mol_type = other DNA
cagagttcccataggcgagaat

SEQ ID NO: 53941 - DNA, 22 bp, synthetic construct
  misc_feature 1..22: note = chemically synthesized
  source 1..22: mol_type = other DNA
ccataggcgagaatgtgtcctc

SEQ ID NO: 53942 - DNA, 22 bp, synthetic construct
  misc_feature 1..22: note = chemically synthesized
  source 1..22: mol_type = other DNA
agtggagcattaccttgcacag

SEQ ID NO: 53943 - DNA, 22 bp, synthetic construct
  misc_feature 1..22: note = chemically synthesized
  source 1..22: mol_type = other DNA
ccttgcacagcctgtgaagtgc

SEQ ID NO: 53944 - DNA, 22 bp, synthetic construct
  misc_feature 1..22: note = chemically synthesized
  source 1..22: mol_type = other DNA
gcacagcctgtgaagtgctctg

SEQ ID NO: 53945 - DNA, 22 bp, synthetic construct
  misc_feature 1..22: note = chemically synthesized
  source 1..22: mol_type = other DNA
cacagcctgtgaagtgctctgt

SEQ ID NO: 53946 - DNA, 22 bp, synthetic construct
  misc_feature 1..22: note = chemically synthesized
  source 1..22: mol_type = other DNA
tgaagtgctctgtgcggggata

SEQ ID NO: 53947 - DNA, 22 bp, synthetic construct
  misc_feature 1..22: note = chemically synthesized
  source 1..22: mol_type = other DNA
tgtgcggggataaaggcaagta

SEQ ID NO: 53948 - DNA, 22 bp, synthetic construct
  misc_feature 1..22: note = chemically synthesized
  source 1..22: mol_type = other DNA
tgcggggataaaggcaagtaac

SEQ ID NO: 53949 - DNA, 22 bp, synthetic construct
  misc_feature 1..22: note = chemically synthesized
  source 1..22: mol_type = other DNA
tctcaaggaattgctagcttat

SEQ ID NO: 53950 - DNA, 22 bp, synthetic construct
  misc_feature 1..22: note = chemically synthesized
  source 1..22: mol_type = other DNA
tcaaggaattgctagcttatgg

SEQ ID NO: 53951 - DNA, 22 bp, synthetic construct
  misc_feature 1..22: note = chemically synthesized
  source 1..22: mol_type = other DNA
aaggaattgctagcttatgggg

SEQ ID NO: 53952 - DNA, 22 bp, synthetic construct
  misc_feature 1..22: note = chemically synthesized
  source 1..22: mol_type = other DNA
ctagcttatggggagagaaaac

SEQ ID NO: 53953 - DNA, 22 bp, synthetic construct
  misc_feature 1..22: note = chemically synthesized
  source 1..22: mol_type = other DNA
gcttatggggagagaaaactaa

SEQ ID NO: 53954 - DNA, 22 bp, synthetic construct
  misc_feature 1..22: note = chemically synthesized
  source 1..22: mol_type = other DNA
atggggagagaaaactaaacgt

SEQ ID NO: 53955 - DNA, 22 bp, synthetic construct
  misc_feature 1..22: note = chemically synthesized
  source 1..22: mol_type = other DNA
tggggagagaaaactaaacgtg

SEQ ID NO: 53956 - DNA, 22 bp, synthetic construct
  misc_feature 1..22: note = chemically synthesized
  source 1..22: mol_type = other DNA
aacgtggaagccccaacagtgt

SEQ ID NO: 53957 - DNA, 22 bp, synthetic construct
  misc_feature 1..22: note = chemically synthesized
  source 1..22: mol_type = other DNA
gagtatgaagggggccccacct

SEQ ID NO: 53958 - DNA, 22 bp, synthetic construct
  misc_feature 1..22: note = chemically synthesized
  source 1..22: mol_type = other DNA
aggaggtcggggagtgtggcgt

SEQ ID NO: 53959 - DNA, 22 bp, synthetic construct
  misc_feature 1..22: note = chemically synthesized
  source 1..22: mol_type = other DNA
ccccatagcaggatgtgtgcaa

SEQ ID NO: 53960 - DNA, 22 bp, synthetic construct
  misc_feature 1..22: note = chemically synthesized
  source 1..22: mol_type = other DNA
ccactggtactcagcatctgcc

SEQ ID NO: 53961 - DNA, 22 bp, synthetic construct
  misc_feature 1..22: note = chemically synthesized
  source 1..22: mol_type = other DNA
gtactcagcatctgccacctcg

SEQ ID NO: 53962 - DNA, 22 bp, synthetic construct
  misc_feature 1..22: note = chemically synthesized
  source 1..22: mol_type = other DNA
agcatctgccacctcgctgacc

SEQ ID NO: 53963 - DNA, 22 bp, synthetic construct
  misc_feature 1..22: note = chemically synthesized
  source 1..22: mol_type = other DNA
ccacctcgctgaccctcatttg

SEQ ID NO: 53964 - DNA, 22 bp, synthetic construct
  misc_feature 1..22: note = chemically synthesized
  source 1..22: mol_type = other DNA
gctgaccctcatttgaccctcc

SEQ ID NO: 53965 - DNA, 22 bp, synthetic construct
  misc_feature 1..22: note = chemically synthesized
  source 1..22: mol_type = other DNA
accctcatttgaccctcccagg

SEQ ID NO: 53966 - DNA, 22 bp, synthetic construct
  misc_feature 1..22: note = chemically synthesized
  source 1..22: mol_type = other DNA
atttgaccctcccaggcaagtg

SEQ ID NO: 53967 - DNA, 22 bp, synthetic construct
  misc_feature 1..22: note = chemically synthesized
  source 1..22: mol_type = other DNA
gaccctcccaggcaagtgctgt

SEQ ID NO: 53968 - DNA, 22 bp, synthetic construct
  misc_feature 1..22: note = chemically synthesized
  source 1..22: mol_type = other DNA
accctcccaggcaagtgctgtg

SEQ ID NO: 53969 - DNA, 22 bp, synthetic construct
  misc_feature 1..22: note = chemically synthesized
  source 1..22: mol_type = other DNA
ccaggcaagtgctgtgatgacc

SEQ ID NO: 53970 - DNA, 22 bp, synthetic construct
  misc_feature 1..22: note = chemically synthesized
  source 1..22: mol_type = other DNA
tgatgaccccctccctggtgag

SEQ ID NO: 53971 - DNA, 22 bp, synthetic construct
  misc_feature 1..22: note = chemically synthesized
  source 1..22: mol_type = other DNA
cctggtgaggagccggccagga

SEQ ID NO: 53972 - DNA, 22 bp, synthetic construct
  misc_feature 1..22: note = chemically synthesized
  source 1..22: mol_type = other DNA
gtgaggagccggccaggacttg

SEQ ID NO: 53973 - DNA, 22 bp, synthetic construct
  misc_feature 1..22: note = chemically synthesized
  source 1..22: mol_type = other DNA
ggatccaagaagtctggcttca

SEQ ID NO: 53974 - DNA, 22 bp, synthetic construct
  misc_feature 1..22: note = chemically synthesized
  source 1..22: mol_type = other DNA
gatccaagaagtctggcttcaa

SEQ ID NO: 53975 - DNA, 22 bp, synthetic construct
  misc_feature 1..22: note = chemically synthesized
  source 1..22: mol_type = other DNA
gcttcaaaccccatgctctgac

SEQ ID NO: 53976 - DNA, 22 bp, synthetic construct
  misc_feature 1..22: note = chemically synthesized
  source 1..22: mol_type = other DNA
caaaccccatgctctgaccgct

SEQ ID NO: 53977 - DNA, 22 bp, synthetic construct
  misc_feature 1..22: note = chemically synthesized
  source 1..22: mol_type = other DNA
aaaccccatgctctgaccgctc

SEQ ID NO: 53978 - DNA, 22 bp, synthetic construct
  misc_feature 1..22: note = chemically synthesized
  source 1..22: mol_type = other DNA
tgaccgctcgatggcaccgctt

SEQ ID NO: 53979 - DNA, 22 bp, synthetic construct
  misc_feature 1..22: note = chemically synthesized
  source 1..22: mol_type = other DNA
accgctcgatggcaccgcttcc

SEQ ID NO: 53980 - DNA, 22 bp, synthetic construct
  misc_feature 1..22: note = chemically synthesized
  source 1..22: mol_type = other DNA
gatggcaccgcttccttggcag

SEQ ID NO: 53981 - DNA, 22 bp, synthetic construct
  misc_feature 1..22: note = chemically synthesized
  source 1..22: mol_type = other DNA
ccttggcaggacatctacagct

SEQ ID NO: 53982 - DNA, 22 bp, synthetic construct
  misc_feature 1..22: note = chemically synthesized
  source 1..22: mol_type = other DNA
cttggcaggacatctacagctc

SEQ ID NO: 53983 - DNA, 22 bp, synthetic construct
  misc_feature 1..22: note = chemically synthesized
  source 1..22: mol_type = other DNA
ggcaggacatctacagctccca

SEQ ID NO: 53984 - DNA, 22 bp, synthetic construct
  misc_feature 1..22: note = chemically synthesized
  source 1..22: mol_type = other DNA
gcaggacatctacagctcccag

SEQ ID NO: 53985 - DNA, 22 bp, synthetic construct
  misc_feature 1..22: note = chemically synthesized
  source 1..22: mol_type = other DNA
cagctcccagggcacccagggg

SEQ ID NO: 53986 - DNA, 22 bp, synthetic construct
  misc_feature 1..22: note = chemically synthesized
  source 1..22: mol_type = other DNA
ccagggcacccaggggacatca

SEQ ID NO: 53987 - DNA, 22 bp, synthetic construct
  misc_feature 1..22: note = chemically synthesized
  source 1..22: mol_type = other DNA
tgaaaggggaatggtcagaccc

SEQ ID NO: 53988 - DNA, 22 bp, synthetic construct
  misc_feature 1..22: note = chemically synthesized
  source 1..22: mol_type = other DNA
aaaggggaatggtcagacccgg

SEQ ID NO: 53989 - DNA, 22 bp, synthetic construct
  misc_feature 1..22: note = chemically synthesized
  source 1..22: mol_type = other DNA
gaatgccatgctaaggagttcg

SEQ ID NO: 53990 - DNA, 22 bp, synthetic construct
  misc_feature 1..22: note = chemically synthesized
  source 1..22: mol_type = other DNA
aatgccatgctaaggagttcgg

SEQ ID NO: 53991 - DNA, 22 bp, synthetic construct
  misc_feature 1..22: note = chemically synthesized
  source 1..22: mol_type = other DNA
aggagttcggacttgacaagag

SEQ ID NO: 53992 - DNA, 22 bp, synthetic construct
  misc_feature 1..22: note = chemically synthesized
  source 1..22: mol_type = other DNA
ggacttgacaagaggcagcagc

SEQ ID NO: 53993 - DNA, 22 bp, synthetic construct
  misc_feature 1..22: note = chemically synthesized
  source 1..22: mol_type = other DNA
gacaagaggcagcagcaaaggg

SEQ ID NO: 53994 - DNA, 22 bp, synthetic construct
  misc_feature 1..22: note = chemically synthesized
  source 1..22: mol_type = other DNA
acaagaggcagcagcaaagggt

SEQ ID NO: 53995 - DNA, 22 bp, synthetic construct
  misc_feature 1..22: note = chemically synthesized
  source 1..22: mol_type = other DNA
tgataacctggttagacgtgct

SEQ ID NO: 53996 - DNA, 22 bp, synthetic construct
  misc_feature 1..22: note = chemically synthesized
  source 1..22: mol_type = other DNA
gataacctggttagacgtgctc

SEQ ID NO: 53997 - DNA, 22 bp, synthetic construct
  misc_feature 1..22: note = chemically synthesized
  source 1..22: mol_type = other DNA
ataacctggttagacgtgctct

SEQ ID NO: 53998 - DNA, 22 bp, synthetic construct
  misc_feature 1..22: note = chemically synthesized
  source 1..22: mol_type = other DNA
gttagacgtgctctgatttatt

SEQ ID NO: 53999 - DNA, 22 bp, synthetic construct
  misc_feature 1..22: note = chemically synthesized
  source 1..22: mol_type = other DNA
gacgtgctctgatttattgtat

SEQ ID NO: 54000 - DNA, 22 bp, synthetic construct
  misc_feature 1..22: note = chemically synthesized
  source 1..22: mol_type = other DNA
tgatttattgtatttcactgct

SEQ ID NO: 54001 - DNA, 22 bp, synthetic construct
  misc_feature 1..22: note = chemically synthesized
  source 1..22: mol_type = other DNA
atttattgtatttcactgctgc

SEQ ID NO: 54002 - DNA, 22 bp, synthetic construct
  misc_feature 1..22: note = chemically synthesized
  source 1..22: mol_type = other DNA
attgtatttcactgctgcaaga

SEQ ID NO: 54003 - DNA, 22 bp, synthetic construct
  misc_feature 1..22: note = chemically synthesized
  source 1..22: mol_type = other DNA
ttgtatttcactgctgcaagat

SEQ ID NO: 54004 - DNA, 22 bp, synthetic construct
  misc_feature 1..22: note = chemically synthesized
  source 1..22: mol_type = other DNA
tatttcactgctgcaagattta

SEQ ID NO: 54005 - DNA, 22 bp, synthetic construct
  misc_feature 1..22: note = chemically synthesized
  source 1..22: mol_type = other DNA
cactgctgcaagatttactgga

SEQ ID NO: 54006 - DNA, 22 bp, synthetic construct
  misc_feature 1..22: note = chemically synthesized
  source 1..22: mol_type = other DNA
actgctgcaagatttactggac

SEQ ID NO: 54007 - DNA, 22 bp, synthetic construct
  misc_feature 1..22: note = chemically synthesized
  source 1..22: mol_type = other DNA
ctgcaagatttactggacaaag

SEQ ID NO: 54008 - DNA, 22 bp, synthetic construct
  misc_feature 1..22: note = chemically synthesized
  source 1..22: mol_type = other DNA
caagatttactggacaaagagg

SEQ ID NO: 54009 - DNA, 22 bp, synthetic construct
  misc_feature 1..22: note = chemically synthesized
  source 1..22: mol_type = other DNA
actggacaaagaggaggagggg

SEQ ID NO: 54010 - DNA, 22 bp, synthetic construct
  misc_feature 1..22: note = chemically synthesized
  source 1..22: mol_type = other DNA
ctggacaaagaggaggaggggg

SEQ ID NO: 54011 - DNA, 22 bp, synthetic construct
  misc_feature 1..22: note = chemically synthesized
  source 1..22: mol_type = other DNA
gacaaagaggaggagggggaga

SEQ ID NO: 54012 - DNA, 22 bp, synthetic construct
  misc_feature 1..22: note = chemically synthesized
  source 1..22: mol_type = other DNA
gaagcccaagcaaaggccaggg

SEQ ID NO: 54013 - DNA, 22 bp, synthetic construct
  misc_feature 1..22: note = chemically synthesized
  source 1..22: mol_type = other DNA
ccagcctgagcgcggagtgcat

SEQ ID NO: 54014 - DNA, 22 bp, synthetic construct
  misc_feature 1..22: note = chemically synthesized
  source 1..22: mol_type = other DNA
cagcctgagcgcggagtgcatg

SEQ ID NO: 54015 - DNA, 22 bp, synthetic construct
  misc_feature 1..22: note = chemically synthesized
  source 1..22: mol_type = other DNA
agcgcggagtgcatgcaggctg

SEQ ID NO: 54016 - DNA, 22 bp, synthetic construct
  misc_feature 1..22: note = chemically synthesized
  source 1..22: mol_type = other DNA
cgcggtggccgcccgggttgca

SEQ ID NO: 54017 - DNA, 22 bp, synthetic construct
  misc_feature 1..22: note = chemically synthesized
  source 1..22: mol_type = other DNA
cagggaacgcgcgggccagcga

SEQ ID NO: 54018 - DNA, 22 bp, synthetic construct
  misc_feature 1..22: note = chemically synthesized
  source 1..22: mol_type = other DNA
tgcggtgctaccccgtgcccgc

SEQ ID NO: 54019 - DNA, 22 bp, synthetic construct
  misc_feature 1..22: note = chemically synthesized
  source 1..22: mol_type = other DNA
cggtgctaccccgtgcccgcac

SEQ ID NO: 54020 - DNA, 22 bp, synthetic construct
  misc_feature 1..22: note = chemically synthesized
  source 1..22: mol_type = other DNA
ccccgtgcccgcactcacccag

SEQ ID NO: 54021 - DNA, 22 bp, synthetic construct
  misc_feature 1..22: note = chemically synthesized
  source 1..22: mol_type = other DNA
acccaggacggcgcagaccagc

SEQ ID NO: 54022 - DNA, 22 bp, synthetic construct
  misc_feature 1..22: note = chemically synthesized
  source 1..22: mol_type = other DNA
ccacggcgagcctcatcttccg

SEQ ID NO: 54023 - DNA, 22 bp, synthetic construct
  misc_feature 1..22: note = chemically synthesized
  source 1..22: mol_type = other DNA
atcttccgggtgcggcgctgag

SEQ ID NO: 54024 - DNA, 22 bp, synthetic construct
  misc_feature 1..22: note = chemically synthesized
  source 1..22: mol_type = other DNA
ccgggtgcggcgctgagcagcg

SEQ ID NO: 54025 - DNA, 22 bp, synthetic construct
  misc_feature 1..22: note = chemically synthesized
  source 1..22: mol_type = other DNA
cgggtgcggcgctgagcagcga

SEQ ID NO: 54026 - DNA, 22 bp, synthetic construct
  misc_feature 1..22: note = chemically synthesized
  source 1..22: mol_type = other DNA
agcagcgagcacagtcggactc

SEQ ID NO: 54027 - DNA, 22 bp, synthetic construct
  misc_feature 1..22: note = chemically synthesized
  source 1..22: mol_type = other DNA
gcttctgtgcagcctccggcgc

SEQ ID NO: 54028 - DNA, 22 bp, synthetic construct
  misc_feature 1..22: note = chemically synthesized
  source 1..22: mol_type = other DNA
ctgtgcagcctccggcgccccg

SEQ ID NO: 54029 - DNA, 22 bp, synthetic construct
  misc_feature 1..22: note = chemically synthesized
  source 1..22: mol_type = other DNA
tgtgcagcctccggcgccccgc

SEQ ID NO: 54030 - DNA, 22 bp, synthetic construct
  misc_feature 1..22: note = chemically synthesized
  source 1..22: mol_type = other DNA
tgcagcctccggcgccccgcgt

SEQ ID NO: 54031 - DNA, 22 bp, synthetic construct
  misc_feature 1..22: note = chemically synthesized
  source 1..22: mol_type = other DNA
cggcgccccgcgtccctttatt

SEQ ID NO: 54032 - DNA, 22 bp, synthetic construct
  misc_feature 1..22: note = chemically synthesized
  source 1..22: mol_type = other DNA
tattccattcccggcctgggcg

SEQ ID NO: 54033 - DNA, 22 bp, synthetic construct
  misc_feature 1..22: note = chemically synthesized
  source 1..22: mol_type = other DNA
attccattcccggcctgggcgg

SEQ ID NO: 54034 - DNA, 22 bp, synthetic construct
  misc_feature 1..22: note = chemically synthesized
  source 1..22: mol_type = other DNA
ttccattcccggcctgggcggg

SEQ ID NO: 54035 - DNA, 22 bp, synthetic construct
  misc_feature 1..22: note = chemically synthesized
  source 1..22: mol_type = other DNA
cattcccggcctgggcgggctg

SEQ ID NO: 54036 - DNA, 22 bp, synthetic construct
  misc_feature 1..22: note = chemically synthesized
  source 1..22: mol_type = other DNA
ccggcctgggcgggctgggcgc

SEQ ID NO: 54037 - DNA, 22 bp, synthetic construct
  misc_feature 1..22: note = chemically synthesized
  source 1..22: mol_type = other DNA
ggcgggctgggcgcaatctttg

SEQ ID NO: 54038 - DNA, 22 bp, synthetic construct
  misc_feature 1..22: note = chemically synthesized
  source 1..22: mol_type = other DNA
ggcgcaatctttgacctcccgt

SEQ ID NO: 54039 - DNA, 22 bp, synthetic construct
  misc_feature 1..22: note = chemically synthesized
  source 1..22: mol_type = other DNA
tgacctcccgtgtttgtgcagc

SEQ ID NO: 54040 - DNA, 22 bp, synthetic construct
  misc_feature 1..22: note = chemically synthesized
  source 1..22: mol_type = other DNA
gacctcccgtgtttgtgcagcc

SEQ ID NO: 54041 - DNA, 22 bp, synthetic construct
  misc_feature 1..22: note = chemically synthesized
  source 1..22: mol_type = other DNA
acctcccgtgtttgtgcagccg

SEQ ID NO: 54042 - DNA, 22 bp, synthetic construct
  misc_feature 1..22: note = chemically synthesized
  source 1..22: mol_type = other DNA
ccgtgtttgtgcagccgggttg

SEQ ID NO: 54043 - DNA, 22 bp, synthetic construct
  misc_feature 1..22: note = chemically synthesized
  source 1..22: mol_type = other DNA
gtgcagccgggttgcccaatcg

SEQ ID NO: 54044 - DNA, 22 bp, synthetic construct
  misc_feature 1..22: note = chemically synthesized
  source 1..22: mol_type = other DNA
tgcagccgggttgcccaatcgc

SEQ ID NO: 54045 - DNA, 22 bp, synthetic construct
  misc_feature 1..22: note = chemically synthesized
  source 1..22: mol_type = other DNA
cccaatcgcccctctcccaacc

SEQ ID NO: 54046 - DNA, 22 bp, synthetic construct
  misc_feature 1..22: note = chemically synthesized
  source 1..22: mol_type = other DNA
tcccaaccccccttccttactc

SEQ ID NO: 54047 - DNA, 22 bp, synthetic construct
  misc_feature 1..22: note = chemically synthesized
  source 1..22: mol_type = other DNA
ccaaccccccttccttactcgt

SEQ ID NO: 54048 - DNA, 22 bp, synthetic construct
  misc_feature 1..22: note = chemically synthesized
  source 1..22: mol_type = other DNA
ccttactcgtcccactgatcac

SEQ ID NO: 54049 - DNA, 22 bp, synthetic construct
  misc_feature 1..22: note = chemically synthesized
  source 1..22: mol_type = other DNA
cttactcgtcccactgatcacc

SEQ ID NO: 54050 - DNA, 22 bp, synthetic construct
  misc_feature 1..22: note = chemically synthesized
  source 1..22: mol_type = other DNA
actcgtcccactgatcacctca

SEQ ID NO: 54051 - DNA, 22 bp, synthetic construct
  misc_feature 1..22: note = chemically synthesized
  source 1..22: mol_type = other DNA
ctcgtcccactgatcacctcat

SEQ ID NO: 54052 - DNA, 22 bp, synthetic construct
  misc_feature 1..22: note = chemically synthesized
  source 1..22: mol_type = other DNA
gtcccactgatcacctcatttt

SEQ ID NO: 54053 - DNA, 22 bp, synthetic construct
  misc_feature 1..22: note = chemically synthesized
  source 1..22: mol_type = other DNA
atcacctcattttctgagctct

SEQ ID NO: 54054 - DNA, 22 bp, synthetic construct
  misc_feature 1..22: note = chemically synthesized
  source 1..22: mol_type = other DNA
attttctgagctctggagacga

SEQ ID NO: 54055 - DNA, 22 bp, synthetic construct
  misc_feature 1..22: note = chemically synthesized
  source 1..22: mol_type = other DNA
tctgagctctggagacgacccg

SEQ ID NO: 54056 - DNA, 22 bp, synthetic construct
  misc_feature 1..22: note = chemically synthesized
  source 1..22: mol_type = other DNA
ctgagctctggagacgacccgc

SEQ ID NO: 54057 - DNA, 22 bp, synthetic construct
  misc_feature 1..22: note = chemically synthesized
  source 1..22: mol_type = other DNA
tgagctctggagacgacccgcg

SEQ ID NO: 54058 - DNA, 22 bp, synthetic construct
  misc_feature 1..22: note = chemically synthesized
  source 1..22: mol_type = other DNA
agctctggagacgacccgcgag

SEQ ID NO: 54059 - DNA, 22 bp, synthetic construct
  misc_feature 1..22: note = chemically synthesized
  source 1..22: mol_type = other DNA
tggagacgacccgcgagtggaa

SEQ ID NO: 54060 - DNA, 22 bp, synthetic construct
  misc_feature 1..22: note = chemically synthesized
  source 1..22: mol_type = other DNA
gagacgacccgcgagtggaagg

SEQ ID NO: 54061 - DNA, 22 bp, synthetic construct
  misc_feature 1..22: note = chemically synthesized
  source 1..22: mol_type = other DNA
atgggaagggacatgaagcaca

SEQ ID NO: 54062 - DNA, 22 bp, synthetic construct
  misc_feature 1..22: note = chemically synthesized
  source 1..22: mol_type = other DNA
tcatcgcggctcgctcggtgcc

SEQ ID NO: 54063 - DNA, 20 bp, synthetic construct
  misc_feature 1..20: note = chemically synthesized
  source 1..20: mol_type = other DNA
actaagtcaataatcagaat

SEQ ID NO: 54064 - DNA, 20 bp, synthetic construct
  misc_feature 1..20: note = chemically synthesized
  source 1..20: mol_type = other DNA
aagtcaataatcagaatcag

SEQ ID NO: 54065 - DNA, 20 bp, synthetic construct
  misc_feature 1..20: note = chemically synthesized
  source 1..20: mol_type = other DNA
agtcaataatcagaatcagc

SEQ ID NO: 54066 - DNA, 20 bp, synthetic construct
  misc_feature 1..20: note = chemically synthesized
  source 1..20: mol_type = other DNA
aatcagaatcagcaggtttg

SEQ ID NO: 54067 - DNA, 20 bp, synthetic construct
  misc_feature 1..20: note = chemically synthesized
  source 1..20: mol_type = other DNA
agaatcagcaggtttgcagt

SEQ ID NO: 54068 - DNA, 20 bp, synthetic construct
  misc_feature 1..20: note = chemically synthesized
  source 1..20: mol_type = other DNA
cagcaggtttgcagtcagat

SEQ ID NO: 54069 - DNA, 20 bp, synthetic construct
  misc_feature 1..20: note = chemically synthesized
  source 1..20: mol_type = other DNA
caggtttgcagtcagattgg

SEQ ID NO: 54070 - DNA, 20 bp, synthetic construct
  misc_feature 1..20: note = chemically synthesized
  source 1..20: mol_type = other DNA
aggtttgcagtcagattggc

SEQ ID NO: 54071 - DNA, 20 bp, synthetic construct
  misc_feature 1..20: note = chemically synthesized
  source 1..20: mol_type = other DNA
ggtttgcagtcagattggca

SEQ ID NO: 54072 - DNA, 20 bp, synthetic construct
  misc_feature 1..20: note = chemically synthesized
  source 1..20: mol_type = other DNA
gcagtcagattggcagggat

SEQ ID NO: 54073 - DNA, 20 bp, synthetic construct
  misc_feature 1..20: note = chemically synthesized
  source 1..20: mol_type = other DNA
gtcagattggcagggataag

SEQ ID NO: 54074 - DNA, 20 bp, synthetic construct
  misc_feature 1..20: note = chemically synthesized
  source 1..20: mol_type = other DNA
attggcagggataagcagcc

SEQ ID NO: 54075 - DNA, 20 bp, synthetic construct
  misc_feature 1..20: note = chemically synthesized
  source 1..20: mol_type = other DNA
cagggataagcagcctagct

SEQ ID NO: 54076 - DNA, 20 bp, synthetic construct
  misc_feature 1..20: note = chemically synthesized
  source 1..20: mol_type = other DNA
agggataagcagcctagctc

SEQ ID NO: 54077 - DNA, 20 bp, synthetic construct
  misc_feature 1..20: note = chemically synthesized
  source 1..20: mol_type = other DNA
ggataagcagcctagctcag

SEQ ID NO: 54078 - DNA, 20 bp, synthetic construct
  misc_feature 1..20: note = chemically synthesized
  source 1..20: mol_type = other DNA
taagcagcctagctcaggag

SEQ ID NO: 54079 - DNA, 20 bp, synthetic construct
  misc_feature 1..20: note = chemically synthesized
  source 1..20: mol_type = other DNA
cagcctagctcaggagaagt

SEQ ID NO: 54080 - DNA, 20 bp, synthetic construct
  misc_feature 1..20: note = chemically synthesized
  source 1..20: mol_type = other DNA
ctcaggagaagtgagtataa

SEQ ID NO: 54081 - DNA, 20 bp, synthetic construct
  misc_feature 1..20: note = chemically synthesized
  source 1..20: mol_type = other DNA
agaagtgagtataaaagccc

SEQ ID NO: 54082 - DNA, 20 bp, synthetic construct
  misc_feature 1..20: note = chemically synthesized
  source 1..20: mol_type = other DNA
gaagtgagtataaaagcccc

SEQ ID NO: 54083 - DNA, 20 bp, synthetic construct
  misc_feature 1..20: note = chemically synthesized
  source 1..20: mol_type = other DNA
tgagtataaaagccccaggc

SEQ ID NO: 54084 - DNA, 20 bp, synthetic construct
  misc_feature 1..20: note = chemically synthesized
  source 1..20: mol_type = other DNA
gagtataaaagccccaggct

SEQ ID NO: 54085 - DNA, 20 bp, synthetic construct
  misc_feature 1..20: note = chemically synthesized
  source 1..20: mol_type = other DNA
gtataaaagccccaggctgg

SEQ ID NO: 54086 - DNA, 20 bp, synthetic construct
  misc_feature 1..20: note = chemically synthesized
  source 1..20: mol_type = other DNA
taaaagccccaggctgggag

SEQ ID NO: 54087 - DNA, 20 bp, synthetic construct
  misc_feature 1..20: note = chemically synthesized
  source 1..20: mol_type = other DNA
caggctgggagcagccatca

SEQ ID NO: 54088 - DNA, 20 bp, synthetic construct
  misc_feature 1..20: note = chemically synthesized
  source 1..20: mol_type = other DNA
gctgggagcagccatcacag

SEQ ID NO: 54089 - DNA, 20 bp, synthetic construct
  misc_feature 1..20: note = chemically synthesized
  source 1..20: mol_type = other DNA
cacagaagtccactcattct

SEQ ID NO: 54090 - DNA, 20 bp, synthetic construct
  misc_feature 1..20: note = chemically synthesized
  source 1..20: mol_type = other DNA
agaagtccactcattcttgg

SEQ ID NO: 54091 - DNA, 20 bp, synthetic construct
  misc_feature 1..20: note = chemically synthesized
  source 1..20: mol_type = other DNA
gaagtccactcattcttggc

SEQ ID NO: 54092 - DNA, 20 bp, synthetic construct
  misc_feature 1..20: note = chemically synthesized
  source 1..20: mol_type = other DNA
tccactcattcttggcagga

SEQ ID NO: 54093 - DNA, 20 bp, synthetic construct
  misc_feature 1..20: note = chemically synthesized
  source 1..20: mol_type = other DNA
ctgctcctcctctgccttgc

SEQ ID NO: 54094 - DNA, 20 bp, synthetic construct
  misc_feature 1..20: note = chemically synthesized
  source 1..20: mol_type = other DNA
cctcctctgccttgctggac

SEQ ID NO: 54095 - DNA, 20 bp, synthetic construct
  misc_feature 1..20: note = chemically synthesized
  source 1..20: mol_type = other DNA
ctggactggtatttgtgtct

SEQ ID NO: 54096 - DNA, 20 bp, synthetic construct
  misc_feature 1..20: note = chemically synthesized
  source 1..20: mol_type = other DNA
tggactggtatttgtgtctg

SEQ ID NO: 54097 - DNA, 20 bp, synthetic construct
  misc_feature 1..20: note = chemically synthesized
  source 1..20: mol_type = other DNA
ctggtatttgtgtctgaggc

SEQ ID NO: 54098 - DNA, 20 bp, synthetic construct
  misc_feature 1..20: note = chemically synthesized
  source 1..20: mol_type = other DNA
tgtgtctgaggctggcccta

SEQ ID NO: 54099 - DNA, 20 bp, synthetic construct
  misc_feature 1..20: note = chemically synthesized
  source 1..20: mol_type = other DNA
tctgaggctggccctacggt

SEQ ID NO: 54100 - DNA, 20 bp, synthetic construct
  misc_feature 1..20: note = chemically synthesized
  source 1..20: mol_type = other DNA
gacatcccattcctacattt

SEQ ID NO: 54101 - DNA, 20 bp, synthetic construct
  misc_feature 1..20: note = chemically synthesized
  source 1..20: mol_type = other DNA
tttaagattcacgctaaatg

SEQ ID NO: 54102 - DNA, 20 bp, synthetic construct
  misc_feature 1..20: note = chemically synthesized
  source 1..20: mol_type = other DNA
aagattcacgctaaatgaag

SEQ ID NO: 54103 - DNA, 20 bp, synthetic construct
  misc_feature 1..20: note = chemically synthesized
  source 1..20: mol_type = other DNA
attcacgctaaatgaagtag

SEQ ID NO: 54104 - DNA, 20 bp, synthetic construct
  misc_feature 1..20: note = chemically synthesized
  source 1..20: mol_type = other DNA
gaagtagaagtgactccttc

SEQ ID NO: 54105 - DNA, 20 bp, synthetic construct
  misc_feature 1..20: note = chemically synthesized
  source 1..20: mol_type = other DNA
ctccttccagctttgccaac

SEQ ID NO: 54106 - DNA, 20 bp, synthetic construct
  misc_feature 1..20: note = chemically synthesized
  source 1..20: mol_type = other DNA
tgccaaccagcttttattac

SEQ ID NO: 54107 - DNA, 20 bp, synthetic construct
  misc_feature 1..20: note = chemically synthesized
  source 1..20: mol_type = other DNA
gccaaccagcttttattact

SEQ ID NO: 54108 - DNA, 20 bp, synthetic construct
  misc_feature 1..20: note = chemically synthesized
  source 1..20: mol_type = other DNA
ccaaccagcttttattacta

SEQ ID NO: 54109 - DNA, 20 bp, synthetic construct
  misc_feature 1..20: note = chemically synthesized
  source 1..20: mol_type = other DNA
ccagcttttattactagggc

SEQ ID NO: 54110 - DNA, 20 bp, synthetic construct
  misc_feature 1..20: note = chemically synthesized
  source 1..20: mol_type = other DNA
cagcttttattactagggca

SEQ ID NO: 54111 - DNA, 20 bp, synthetic construct
  misc_feature 1..20: note = chemically synthesized
  source 1..20: mol_type = other DNA
agcttttattactagggcaa

SEQ ID NO: 54112 - DNA, 20 bp, synthetic construct
  misc_feature 1..20: note = chemically synthesized
  source 1..20: mol_type = other DNA
attactagggcaagggtacc

SEQ ID NO: 54113 - DNA, 20 bp, synthetic construct
  misc_feature 1..20: note = chemically synthesized
  source 1..20: mol_type = other DNA
taattaattcaaacttcaaa

SEQ ID NO: 54114 - DNA, 20 bp, synthetic construct
  misc_feature 1..20: note = chemically synthesized
  source 1..20: mol_type = other DNA
ttcaaacttcaaaaagaatg

SEQ ID NO: 54115 - DNA, 20 bp, synthetic construct
  misc_feature 1..20: note = chemically synthesized
  source 1..20: mol_type = other DNA
aaaaagaatgaagttccact

SEQ ID NO: 54116 - DNA, 20 bp, synthetic construct
  misc_feature 1..20: note = chemically synthesized
  source 1..20: mol_type = other DNA
gaagttccactgagcttact

SEQ ID NO: 54117 - DNA, 20 bp, synthetic construct
  misc_feature 1..20: note = chemically synthesized
  source 1..20: mol_type = other DNA
ttccactgagcttactgagc

SEQ ID NO: 54118 - DNA, 20 bp, synthetic construct
  misc_feature 1..20: note = chemically synthesized
  source 1..20: mol_type = other DNA
tccactgagcttactgagct

SEQ ID NO: 54119 - DNA, 20 bp, synthetic construct
  misc_feature 1..20: note = chemically synthesized
  source 1..20: mol_type = other DNA
tgagctgggacttgaactct

SEQ ID NO: 54120 - DNA, 20 bp, synthetic construct
  misc_feature 1..20: note = chemically synthesized
  source 1..20: mol_type = other DNA
agcattctacctcattgctt

SEQ ID NO: 54121 - DNA, 20 bp, synthetic construct
  misc_feature 1..20: note = chemically synthesized
  source 1..20: mol_type = other DNA
acctcattgctttggtgcat

SEQ ID NO: 54122 - DNA, 20 bp, synthetic construct
  misc_feature 1..20: note = chemically synthesized
  source 1..20: mol_type = other DNA
cctcattgctttggtgcatt

SEQ ID NO: 54123 - DNA, 20 bp, synthetic construct
  misc_feature 1..20: note = chemically synthesized
  source 1..20: mol_type = other DNA
tgcattaggtttgtaatatc

SEQ ID NO: 54124 - DNA, 20 bp, synthetic construct
  misc_feature 1..20: note = chemically synthesized
  source 1..20: mol_type = other DNA
atctggtacctctgtttcct

SEQ ID NO: 54125 - DNA, 20 bp, synthetic construct
  misc_feature 1..20: note = chemically synthesized
  source 1..20: mol_type = other DNA
ggtacctctgtttcctcaga

SEQ ID NO: 54126 - DNA, 20 bp, synthetic construct
  misc_feature 1..20: note = chemically synthesized
  source 1..20: mol_type = other DNA
ctgtttcctcagatagatga

SEQ ID NO: 54127 - DNA, 20 bp, synthetic construct
  misc_feature 1..20: note = chemically synthesized
  source 1..20: mol_type = other DNA
tcagatagatgatagaaata

SEQ ID NO: 54128 - DNA, 20 bp, synthetic construct
  misc_feature 1..20: note = chemically synthesized
  source 1..20: mol_type = other DNA
agaaataaagatatgatatt

SEQ ID NO: 54129 - DNA, 20 bp, synthetic construct
  misc_feature 1..20: note = chemically synthesized
  source 1..20: mol_type = other DNA
gaaataaagatatgatatta

SEQ ID NO: 54130 - DNA, 20 bp, synthetic construct
  misc_feature 1..20: note = chemically synthesized
  source 1..20: mol_type = other DNA
ataaagatatgatattaagg

SEQ ID NO: 54131 - DNA, 20 bp, synthetic construct
  misc_feature 1..20: note = chemically synthesized
  source 1..20: mol_type = other DNA
agctgttaatactgaatttt

SEQ ID NO: 54132 - DNA, 20 bp, synthetic construct
  misc_feature 1..20: note = chemically synthesized
  source 1..20: mol_type = other DNA
ttaatactgaattttcagaa

SEQ ID NO: 54133 - DNA, 20 bp, synthetic construct
  misc_feature 1..20: note = chemically synthesized
  source 1..20: mol_type = other DNA
atccctccataaaatgtatt

SEQ ID NO: 54134 - DNA, 20 bp, synthetic construct
  misc_feature 1..20: note = chemically synthesized
  source 1..20: mol_type = other DNA
tccctccataaaatgtattt

SEQ ID NO: 54135 - DNA, 20 bp, synthetic construct
  misc_feature 1..20: note = chemically synthesized
  source 1..20: mol_type = other DNA
ccctccataaaatgtatttg

SEQ ID NO: 54136 - DNA, 20 bp, synthetic construct
  misc_feature 1..20: note = chemically synthesized
  source 1..20: mol_type = other DNA
cctccataaaatgtatttgg

SEQ ID NO: 54137 - DNA, 20 bp, synthetic construct
  misc_feature 1..20: note = chemically synthesized
  source 1..20: mol_type = other DNA
tgtatttgggggacaaactg

SEQ ID NO: 54138 - DNA, 20 bp, synthetic construct
  misc_feature 1..20: note = chemically synthesized
  source 1..20: mol_type = other DNA
gtatttgggggacaaactgc

SEQ ID NO: 54139 - DNA, 20 bp, synthetic construct
  misc_feature 1..20: note = chemically synthesized
  source 1..20: mol_type = other DNA
atttgggggacaaactgcag

SEQ ID NO: 54140 - DNA, 20 bp, synthetic construct
  misc_feature 1..20: note = chemically synthesized
  source 1..20: mol_type = other DNA
aactgcaggagattatattc

SEQ ID NO: 54141 - DNA, 20 bp, synthetic construct
  misc_feature 1..20: note = chemically synthesized
  source 1..20: mol_type = other DNA
gagattatattctggcccta

SEQ ID NO: 54142 - DNA, 20 bp, synthetic construct
  misc_feature 1..20: note = chemically synthesized
  source 1..20: mol_type = other DNA
atttattgattaatctttaa

SEQ ID NO: 54143 - DNA, 20 bp, synthetic construct
  misc_feature 1..20: note = chemically synthesized
  source 1..20: mol_type = other DNA
tttattgattaatctttaaa

SEQ ID NO: 54144 - DNA, 20 bp, synthetic construct
  misc_feature 1..20: note = chemically synthesized
  source 1..20: mol_type = other DNA
tgattaatctttaaaaggct

SEQ ID NO: 54145 - DNA, 20 bp, synthetic construct
  misc_feature 1..20: note = chemically synthesized
  source 1..20: mol_type = other DNA
aggcttagtgaacaatattc

SEQ ID NO: 54146 - DNA, 20 bp, synthetic construct
  misc_feature 1..20: note = chemically synthesized
  source 1..20: mol_type = other DNA
ttagtgaacaatattctagt

SEQ ID NO: 54147 - DNA, 20 bp, synthetic construct
  misc_feature 1..20: note = chemically synthesized
  source 1..20: mol_type = other DNA
tatctaattcttaaatcctc

SEQ ID NO: 54148 - DNA, 20 bp, synthetic construct
  misc_feature 1..20: note = chemically synthesized
  source 1..20: mol_type = other DNA
ctaattcttaaatcctctag

SEQ ID NO: 54149 - DNA, 20 bp, synthetic construct
  misc_feature 1..20: note = chemically synthesized
  source 1..20: mol_type = other DNA
aattaactaatactataaaa

SEQ ID NO: 54150 - DNA, 20 bp, synthetic construct
  misc_feature 1..20: note = chemically synthesized
  source 1..20: mol_type = other DNA
attaactaatactataaaat

SEQ ID NO: 54151 - DNA, 20 bp, synthetic construct
  misc_feature 1..20: note = chemically synthesized
  source 1..20: mol_type = other DNA
ctaatactataaaatgggtc

SEQ ID NO: 54152 - DNA, 20 bp, synthetic construct
  misc_feature 1..20: note = chemically synthesized
  source 1..20: mol_type = other DNA
ctataaaatgggtctggatg

SEQ ID NO: 54153 - DNA, 20 bp, synthetic construct
  misc_feature 1..20: note = chemically synthesized
  source 1..20: mol_type = other DNA
tgacattattttataacaac

SEQ ID NO: 54154 - DNA, 20 bp, synthetic construct
  misc_feature 1..20: note = chemically synthesized
  source 1..20: mol_type = other DNA
attattttataacaactggt

SEQ ID NO: 54155 - DNA, 20 bp, synthetic construct
  misc_feature 1..20: note = chemically synthesized
  source 1..20: mol_type = other DNA
tattttataacaactggtaa

SEQ ID NO: 54156 - DNA, 20 bp, synthetic construct
  misc_feature 1..20: note = chemically synthesized
  source 1..20: mol_type = other DNA
attttataacaactggtaag

SEQ ID NO: 54157 - DNA, 20 bp, synthetic construct
  misc_feature 1..20: note = chemically synthesized
  source 1..20: mol_type = other DNA
ttttataacaactggtaaga

SEQ ID NO: 54158 - DNA, 20 bp, synthetic construct
  misc_feature 1..20: note = chemically synthesized
  source 1..20: mol_type = other DNA
ttataacaactggtaagagg

SEQ ID NO: 54159 - DNA, 20 bp, synthetic construct
  misc_feature 1..20: note = chemically synthesized
  source 1..20: mol_type = other DNA
ctggtaagagggagtgacta

SEQ ID NO: 54160 - DNA, 20 bp, synthetic construct
  misc_feature 1..20: note = chemically synthesized
  source 1..20: mol_type = other DNA
agcaacaactaaaatgatct

SEQ ID NO: 54161 - DNA, 20 bp, synthetic construct
  misc_feature 1..20: note = chemically synthesized
  source 1..20: mol_type = other DNA
gcaacaactaaaatgatctc

SEQ ID NO: 54162 - DNA, 20 bp, synthetic construct
  misc_feature 1..20: note = chemically synthesized
  source 1..20: mol_type = other DNA
tgatctcaggaaaacctgtt

SEQ ID NO: 54163 - DNA, 20 bp, synthetic construct
  misc_feature 1..20: note = chemically synthesized
  source 1..20: mol_type = other DNA
aacctgtttggccctatgta

SEQ ID NO: 54164 - DNA, 20 bp, synthetic construct
  misc_feature 1..20: note = chemically synthesized
  source 1..20: mol_type = other DNA
tatggtacattacatctttt

SEQ ID NO: 54165 - DNA, 20 bp, synthetic construct
  misc_feature 1..20: note = chemically synthesized
  source 1..20: mol_type = other DNA
tttcagtaattccactcaaa

SEQ ID NO: 54166 - DNA, 20 bp, synthetic construct
  misc_feature 1..20: note = chemically synthesized
  source 1..20: mol_type = other DNA
tcagtaattccactcaaatg

SEQ ID NO: 54167 - DNA, 20 bp, synthetic construct
  misc_feature 1..20: note = chemically synthesized
  source 1..20: mol_type = other DNA
tcaaatggagacttttaaca

SEQ ID NO: 54168 - DNA, 20 bp, synthetic construct
  misc_feature 1..20: note = chemically synthesized
  source 1..20: mol_type = other DNA
tttaacaaagcaactgttct

SEQ ID NO: 54169 - DNA, 20 bp, synthetic construct
  misc_feature 1..20: note = chemically synthesized
  source 1..20: mol_type = other DNA
ttaacaaagcaactgttctc

SEQ ID NO: 54170 - DNA, 20 bp, synthetic construct
  misc_feature 1..20: note = chemically synthesized
  source 1..20: mol_type = other DNA
taacaaagcaactgttctca

SEQ ID NO: 54171 - DNA, 20 bp, synthetic construct
  misc_feature 1..20: note = chemically synthesized
  source 1..20: mol_type = other DNA
aacaaagcaactgttctcag

SEQ ID NO: 54172 - DNA, 20 bp, synthetic construct
  misc_feature 1..20: note = chemically synthesized
  source 1..20: mol_type = other DNA
aaattcattatacacatccc

SEQ ID NO: 54173 - DNA, 20 bp, synthetic construct
  misc_feature 1..20: note = chemically synthesized
  source 1..20: mol_type = other DNA
ttatacacatccctggttga

SEQ ID NO: 54174 - DNA, 20 bp, synthetic construct
  misc_feature 1..20: note = chemically synthesized
  source 1..20: mol_type = other DNA
tacacatccctggttgatag

SEQ ID NO: 54175 - DNA, 20 bp, synthetic construct
  misc_feature 1..20: note = chemically synthesized
  source 1..20: mol_type = other DNA
ctggttgatagcagtgtgtc

SEQ ID NO: 54176 - DNA, 20 bp, synthetic construct
  misc_feature 1..20: note = chemically synthesized
  source 1..20: mol_type = other DNA
ggttgatagcagtgtgtctg

SEQ ID NO: 54177 - DNA, 20 bp, synthetic construct
  misc_feature 1..20: note = chemically synthesized
  source 1..20: mol_type = other DNA
gttgatagcagtgtgtctgg

SEQ ID NO: 54178 - DNA, 20 bp, synthetic construct
  misc_feature 1..20: note = chemically synthesized
  source 1..20: mol_type = other DNA
gatagcagtgtgtctggagg

SEQ ID NO: 54179 - DNA, 20 bp, synthetic construct
  misc_feature 1..20: note = chemically synthesized
  source 1..20: mol_type = other DNA
ggcagaaaccattcttgctt

SEQ ID NO: 54180 - DNA, 20 bp, synthetic construct
  misc_feature 1..20: note = chemically synthesized
  source 1..20: mol_type = other DNA
aattacgtctgtgttatact

SEQ ID NO: 54181 - DNA, 20 bp, synthetic construct
  misc_feature 1..20: note = chemically synthesized
  source 1..20: mol_type = other DNA
tacgtctgtgttatactgag

SEQ ID NO: 54182 - DNA, 20 bp, synthetic construct
  misc_feature 1..20: note = chemically synthesized
  source 1..20: mol_type = other DNA
acgtctgtgttatactgagt

SEQ ID NO: 54183 - DNA, 20 bp, synthetic construct
  misc_feature 1..20: note = chemically synthesized
  source 1..20: mol_type = other DNA
cgtctgtgttatactgagta

SEQ ID NO: 54184 - DNA, 20 bp, synthetic construct
  misc_feature 1..20: note = chemically synthesized
  source 1..20: mol_type = other DNA
ctgtgttatactgagtaggg

SEQ ID NO: 54185 - DNA, 20 bp, synthetic construct
  misc_feature 1..20: note = chemically synthesized
  source 1..20: mol_type = other DNA
gacacttacgttcctgataa

SEQ ID NO: 54186 - DNA, 20 bp, synthetic construct
  misc_feature 1..20: note = chemically synthesized
  source 1..20: mol_type = other DNA
acacttacgttcctgataat

SEQ ID NO: 54187 - DNA, 20 bp, synthetic construct
  misc_feature 1..20: note = chemically synthesized
  source 1..20: mol_type = other DNA
tacgttcctgataatgggat

SEQ ID NO: 54188 - DNA, 20 bp, synthetic construct
  misc_feature 1..20: note = chemically synthesized
  source 1..20: mol_type = other DNA
gtgtaattcttgtttcgctc

SEQ ID NO: 54189 - DNA, 20 bp, synthetic construct
  misc_feature 1..20: note = chemically synthesized
  source 1..20: mol_type = other DNA
tccagatttctaataccaca

SEQ ID NO: 54190 - DNA, 20 bp, synthetic construct
  misc_feature 1..20: note = chemically synthesized
  source 1..20: mol_type = other DNA
tcacgtgtcttctctacacc

SEQ ID NO: 54191 - DNA, 20 bp, synthetic construct
  misc_feature 1..20: note = chemically synthesized
  source 1..20: mol_type = other DNA
cacgtgtcttctctacaccc

SEQ ID NO: 54192 - DNA, 20 bp, synthetic construct
  misc_feature 1..20: note = chemically synthesized
  source 1..20: mol_type = other DNA
acgtgtcttctctacaccca

SEQ ID NO: 54193 - DNA, 20 bp, synthetic construct
  misc_feature 1..20: note = chemically synthesized
  source 1..20: mol_type = other DNA
cttctctacacccagggcac

SEQ ID NO: 54194 - DNA, 20 bp, synthetic construct
  misc_feature 1..20: note = chemically synthesized
  source 1..20: mol_type = other DNA
cccagggcaccggtgaatcc

SEQ ID NO: 54195 - DNA, 20 bp, synthetic construct
  misc_feature 1..20: note = chemically synthesized
  source 1..20: mol_type = other DNA
tgaatccaagtgtcctctga

SEQ ID NO: 54196 - DNA, 20 bp, synthetic construct
  misc_feature 1..20: note = chemically synthesized
  source 1..20: mol_type = other DNA
caagtgtcctctgatggtca

SEQ ID NO: 54197 - DNA, 20 bp, synthetic construct
  misc_feature 1..20: note = chemically synthesized
  source 1..20: mol_type = other DNA
tcctctgatggtcaaagttc

SEQ ID NO: 54198 - DNA, 20 bp, synthetic construct
  misc_feature 1..20: note = chemically synthesized
  source 1..20: mol_type = other DNA
caaagttctagatgctgtcc

SEQ ID NO: 54199 - DNA, 20 bp, synthetic construct
  misc_feature 1..20: note = chemically synthesized
  source 1..20: mol_type = other DNA
aaagttctagatgctgtccg

SEQ ID NO: 54200 - DNA, 20 bp, synthetic construct
  misc_feature 1..20: note = chemically synthesized
  source 1..20: mol_type = other DNA
gttctagatgctgtccgagg

SEQ ID NO: 54201 - DNA, 20 bp, synthetic construct
  misc_feature 1..20: note = chemically synthesized
  source 1..20: mol_type = other DNA
aggcagtcctgccatcaatg

SEQ ID NO: 54202 - DNA, 20 bp, synthetic construct
  misc_feature 1..20: note = chemically synthesized
  source 1..20: mol_type = other DNA
aatgtggccgtgcatgtgtt

SEQ ID NO: 54203 - DNA, 20 bp, synthetic construct
  misc_feature 1..20: note = chemically synthesized
  source 1..20: mol_type = other DNA
tggccgtgcatgtgttcaga

SEQ ID NO: 54204 - DNA, 20 bp, synthetic construct
  misc_feature 1..20: note = chemically synthesized
  source 1..20: mol_type = other DNA
ggccgtgcatgtgttcagaa

SEQ ID NO: 54205 - DNA, 20 bp, synthetic construct
  misc_feature 1..20: note = chemically synthesized
  source 1..20: mol_type = other DNA
gaaaggctgctgatgacacc

SEQ ID NO: 54206 - DNA, 20 bp, synthetic construct
  misc_feature 1..20: note = chemically synthesized
  source 1..20: mol_type = other DNA
aaaggctgctgatgacacct

SEQ ID NO: 54207 - DNA, 20 bp, synthetic construct
  misc_feature 1..20: note = chemically synthesized
  source 1..20: mol_type = other DNA
aggctgctgatgacacctgg

SEQ ID NO: 54208 - DNA, 20 bp, synthetic construct
  misc_feature 1..20: note = chemically synthesized
  source 1..20: mol_type = other DNA
acctgggagccatttgcctc

SEQ ID NO: 54209 - DNA, 20 bp, synthetic construct
  misc_feature 1..20: note = chemically synthesized
  source 1..20: mol_type = other DNA
aaatggctcccaggtgtcat

SEQ ID NO: 54210 - DNA, 20 bp, synthetic construct
  misc_feature 1..20: note = chemically synthesized
  source 1..20: mol_type = other DNA
tggctcccaggtgtcatcag

SEQ ID NO: 54211 - DNA, 20 bp, synthetic construct
  misc_feature 1..20: note = chemically synthesized
  source 1..20: mol_type = other DNA
agcctttctgaacacatgca

SEQ ID NO: 54212 - DNA, 20 bp, synthetic construct
  misc_feature 1..20: note = chemically synthesized
  source 1..20: mol_type = other DNA
cacatgcacggccacattga

SEQ ID NO: 54213 - DNA, 20 bp, synthetic construct
  misc_feature 1..20: note = chemically synthesized
  source 1..20: mol_type = other DNA
atgcacggccacattgatgg

SEQ ID NO: 54214 - DNA, 20 bp, synthetic construct
  misc_feature 1..20: note = chemically synthesized
  source 1..20: mol_type = other DNA
tgcacggccacattgatggc

SEQ ID NO: 54215 - DNA, 20 bp, synthetic construct
  misc_feature 1..20: note = chemically synthesized
  source 1..20: mol_type = other DNA
cattgatggcaggactgcct

SEQ ID NO: 54216 - DNA, 20 bp, synthetic construct
  misc_feature 1..20: note = chemically synthesized
  source 1..20: mol_type = other DNA
gatggcaggactgcctcgga

SEQ ID NO: 54217 - DNA, 20 bp, synthetic construct
  misc_feature 1..20: note = chemically synthesized
  source 1..20: mol_type = other DNA
ggactgcctcggacagcatc

SEQ ID NO: 54218 - DNA, 20 bp, synthetic construct
  misc_feature 1..20: note = chemically synthesized
  source 1..20: mol_type = other DNA
gcatctagaactttgaccat

SEQ ID NO: 54219 - DNA, 20 bp, synthetic construct
  misc_feature 1..20: note = chemically synthesized
  source 1..20: mol_type = other DNA
atctagaactttgaccatca

SEQ ID NO: 54220 - DNA, 20 bp, synthetic construct
  misc_feature 1..20: note = chemically synthesized
  source 1..20: mol_type = other DNA
tctagaactttgaccatcag

SEQ ID NO: 54221 - DNA, 20 bp, synthetic construct
  misc_feature 1..20: note = chemically synthesized
  source 1..20: mol_type = other DNA
tttgaccatcagaggacact

SEQ ID NO: 54222 - DNA, 20 bp, synthetic construct
  misc_feature 1..20: note = chemically synthesized
  source 1..20: mol_type = other DNA
cagaggacacttggattcac

SEQ ID NO: 54223 - DNA, 20 bp, synthetic construct
  misc_feature 1..20: note = chemically synthesized
  source 1..20: mol_type = other DNA
acttggattcaccggtgccc

SEQ ID NO: 54224 - DNA, 20 bp, synthetic construct
  misc_feature 1..20: note = chemically synthesized
  source 1..20: mol_type = other DNA
cttggattcaccggtgccct

SEQ ID NO: 54225 - DNA, 20 bp, synthetic construct
  misc_feature 1..20: note = chemically synthesized
  source 1..20: mol_type = other DNA
attcaccggtgccctgggtg

SEQ ID NO: 54226 - DNA, 20 bp, synthetic construct
  misc_feature 1..20: note = chemically synthesized
  source 1..20: mol_type = other DNA
tcaccggtgccctgggtgta

SEQ ID NO: 54227 - DNA, 20 bp, synthetic construct
  misc_feature 1..20: note = chemically synthesized
  source 1..20: mol_type = other DNA
ccggtgccctgggtgtagag

SEQ ID NO: 54228 - DNA, 20 bp, synthetic construct
  misc_feature 1..20: note = chemically synthesized
  source 1..20: mol_type = other DNA
tgggtgtagagaagacacgt

SEQ ID NO: 54229 - DNA, 20 bp, synthetic construct
  misc_feature 1..20: note = chemically synthesized
  source 1..20: mol_type = other DNA
gtgtagagaagacacgtgag

SEQ ID NO: 54230 - DNA, 20 bp, synthetic construct
  misc_feature 1..20: note = chemically synthesized
  source 1..20: mol_type = other DNA
gagaagttaacaaaattgat

SEQ ID NO: 54231 - DNA, 20 bp, synthetic construct
  misc_feature 1..20: note = chemically synthesized
  source 1..20: mol_type = other DNA
gaagttaacaaaattgatca

SEQ ID NO: 54232 - DNA, 20 bp, synthetic construct
  misc_feature 1..20: note = chemically synthesized
  source 1..20: mol_type = other DNA
aacaaaattgatcagagtga

SEQ ID NO: 54233 - DNA, 20 bp, synthetic construct
  misc_feature 1..20: note = chemically synthesized
  source 1..20: mol_type = other DNA
acaaaattgatcagagtgaa

SEQ ID NO: 54234 - DNA, 20 bp, synthetic construct
  misc_feature 1..20: note = chemically synthesized
  source 1..20: mol_type = other DNA
gtgaaaggatttattctttg

SEQ ID NO: 54235 - DNA, 20 bp, synthetic construct
  misc_feature 1..20: note = chemically synthesized
  source 1..20: mol_type = other DNA
ggatttattctttgtggtat

SEQ ID NO: 54236 - DNA, 20 bp, synthetic construct
  misc_feature 1..20: note = chemically synthesized
  source 1..20: mol_type = other DNA
tctttgtggtattagaaatc

SEQ ID NO: 54237 - DNA, 20 bp, synthetic construct
  misc_feature 1..20: note = chemically synthesized
  source 1..20: mol_type = other DNA
tttgtggtattagaaatctg

SEQ ID NO: 54238 - DNA, 20 bp, synthetic construct
  misc_feature 1..20: note = chemically synthesized
  source 1..20: mol_type = other DNA
ttagaaatctggagcgaaac

SEQ ID NO: 54239 - DNA, 20 bp, synthetic construct
  misc_feature 1..20: note = chemically synthesized
  source 1..20: mol_type = other DNA
ttacacactgatcccattat

SEQ ID NO: 54240 - DNA, 20 bp, synthetic construct
  misc_feature 1..20: note = chemically synthesized
  source 1..20: mol_type = other DNA
tacacactgatcccattatc

SEQ ID NO: 54241 - DNA, 20 bp, synthetic construct
  misc_feature 1..20: note = chemically synthesized
  source 1..20: mol_type = other DNA
gatcccattatcaggaacgt

SEQ ID NO: 54242 - DNA, 20 bp, synthetic construct
  misc_feature 1..20: note = chemically synthesized
  source 1..20: mol_type = other DNA
cgtaagtgtcgacaattaat

SEQ ID NO: 54243 - DNA, 20 bp, synthetic construct
  misc_feature 1..20: note = chemically synthesized
  source 1..20: mol_type = other DNA
aattaatgagcttccctact

SEQ ID NO: 54244 - DNA, 20 bp, synthetic construct
  misc_feature 1..20: note = chemically synthesized
  source 1..20: mol_type = other DNA
cttccctactcagtataaca

SEQ ID NO: 54245 - DNA, 20 bp, synthetic construct
  misc_feature 1..20: note = chemically synthesized
  source 1..20: mol_type = other DNA
cacagacgtaattgtttcca

SEQ ID NO: 54246 - DNA, 20 bp, synthetic construct
  misc_feature 1..20: note = chemically synthesized
  source 1..20: mol_type = other DNA
gacgtaattgtttccaaagc

SEQ ID NO: 54247 - DNA, 20 bp, synthetic construct
  misc_feature 1..20: note = chemically synthesized
  source 1..20: mol_type = other DNA
aattgtttccaaagcaagaa

SEQ ID NO: 54248 - DNA, 20 bp, synthetic construct
  misc_feature 1..20: note = chemically synthesized
  source 1..20: mol_type = other DNA
gcaagaatggtttctgcctc

SEQ ID NO: 54249 - DNA, 20 bp, synthetic construct
  misc_feature 1..20: note = chemically synthesized
  source 1..20: mol_type = other DNA
ccagacacactgctatcaac

SEQ ID NO: 54250 - DNA, 20 bp, synthetic construct
  misc_feature 1..20: note = chemically synthesized
  source 1..20: mol_type = other DNA
cagacacactgctatcaacc

SEQ ID NO: 54251 - DNA, 20 bp, synthetic construct
  misc_feature 1..20: note = chemically synthesized
  source 1..20: mol_type = other DNA
agacacactgctatcaacca

SEQ ID NO: 54252 - DNA, 20 bp, synthetic construct
  misc_feature 1..20: note = chemically synthesized
  source 1..20: mol_type = other DNA
ggatgtgtataatgaatttt

SEQ ID NO: 54253 - DNA, 20 bp, synthetic construct
  misc_feature 1..20: note = chemically synthesized
  source 1..20: mol_type = other DNA
gatgtgtataatgaatttta

SEQ ID NO: 54254 - DNA, 20 bp, synthetic construct
  misc_feature 1..20: note = chemically synthesized
  source 1..20: mol_type = other DNA
atgtgtataatgaattttaa

SEQ ID NO: 54255 - DNA, 20 bp, synthetic construct
  misc_feature 1..20: note = chemically synthesized
  source 1..20: mol_type = other DNA
gtgtataatgaattttaagg

SEQ ID NO: 54256 - DNA, 20 bp, synthetic construct
  misc_feature 1..20: note = chemically synthesized
  source 1..20: mol_type = other DNA
atgaattttaagggagaaaa

SEQ ID NO: 54257 - DNA, 20 bp, synthetic construct
  misc_feature 1..20: note = chemically synthesized
  source 1..20: mol_type = other DNA
tgaattttaagggagaaaat

SEQ ID NO: 54258 - DNA, 20 bp, synthetic construct
  misc_feature 1..20: note = chemically synthesized
  source 1..20: mol_type = other DNA
agggagaaaataggtcccct

SEQ ID NO: 54259 - DNA, 20 bp, synthetic construct
  misc_feature 1..20: note = chemically synthesized
  source 1..20: mol_type = other DNA
gaaaataggtcccctgagaa

SEQ ID NO: 54260 - DNA, 20 bp, synthetic construct
  misc_feature 1..20: note = chemically synthesized
  source 1..20: mol_type = other DNA
gagaacagttgctttgttaa

SEQ ID NO: 54261 - DNA, 20 bp, synthetic construct
  misc_feature 1..20: note = chemically synthesized
  source 1..20: mol_type = other DNA
tttgttaaaagtctccattt

SEQ ID NO: 54262 - DNA, 20 bp, synthetic construct
  misc_feature 1..20: note = chemically synthesized
  source 1..20: mol_type = other DNA
gttaaaagtctccatttgag

SEQ ID NO: 54263 - DNA, 20 bp, synthetic construct
  misc_feature 1..20: note = chemically synthesized
  source 1..20: mol_type = other DNA
atttgagtggaattactgaa

SEQ ID NO: 54264 - DNA, 20 bp, synthetic construct
  misc_feature 1..20: note = chemically synthesized
  source 1..20: mol_type = other DNA
aagatgtaatgtaccataca

SEQ ID NO: 54265 - DNA, 20 bp, synthetic construct
  misc_feature 1..20: note = chemically synthesized
  source 1..20: mol_type = other DNA
agatgtaatgtaccatacat

SEQ ID NO: 54266 - DNA, 20 bp, synthetic construct
  misc_feature 1..20: note = chemically synthesized
  source 1..20: mol_type = other DNA
gatgtaatgtaccatacata

SEQ ID NO: 54267 - DNA, 20 bp, synthetic construct
  misc_feature 1..20: note = chemically synthesized
  source 1..20: mol_type = other DNA
gtaccatacatagggccaaa

SEQ ID NO: 54268 - DNA, 20 bp, synthetic construct
  misc_feature 1..20: note = chemically synthesized
  source 1..20: mol_type = other DNA
taccatacatagggccaaac

SEQ ID NO: 54269 - DNA, 20 bp, synthetic construct
  misc_feature 1..20: note = chemically synthesized
  source 1..20: mol_type = other DNA
agggccaaacaggttttcct

SEQ ID NO: 54270 - DNA, 20 bp, synthetic construct
  misc_feature 1..20: note = chemically synthesized
  source 1..20: mol_type = other DNA
aggttttcctgagatcattt

SEQ ID NO: 54271 - DNA, 20 bp, synthetic construct
  misc_feature 1..20: note = chemically synthesized
  source 1..20: mol_type = other DNA
gatcattttagttgttgcta

SEQ ID NO: 54272 - DNA, 20 bp, synthetic construct
  misc_feature 1..20: note = chemically synthesized
  source 1..20: mol_type = other DNA
ctatagtcactccctcttac

SEQ ID NO: 54273 - DNA, 20 bp, synthetic construct
  misc_feature 1..20: note = chemically synthesized
  source 1..20: mol_type = other DNA
cagttgttataaaataatgt

SEQ ID NO: 54274 - DNA, 20 bp, synthetic construct
  misc_feature 1..20: note = chemically synthesized
  source 1..20: mol_type = other DNA
aataatgtcagaactacatc

SEQ ID NO: 54275 - DNA, 20 bp, synthetic construct
  misc_feature 1..20: note = chemically synthesized
  source 1..20: mol_type = other DNA
ctacatccagacccatttta

SEQ ID NO: 54276 - DNA, 20 bp, synthetic construct
  misc_feature 1..20: note = chemically synthesized
  source 1..20: mol_type = other DNA
ccagacccattttatagtat

SEQ ID NO: 54277 - DNA, 20 bp, synthetic construct
  misc_feature 1..20: note = chemically synthesized
  source 1..20: mol_type = other DNA
atagtattagttaattcttc

SEQ ID NO: 54278 - DNA, 20 bp, synthetic construct
  misc_feature 1..20: note = chemically synthesized
  source 1..20: mol_type = other DNA
agtattagttaattcttcta

SEQ ID NO: 54279 - DNA, 20 bp, synthetic construct
  misc_feature 1..20: note = chemically synthesized
  source 1..20: mol_type = other DNA
gtattagttaattcttctag

SEQ ID NO: 54280 - DNA, 20 bp, synthetic construct
  misc_feature 1..20: note = chemically synthesized
  source 1..20: mol_type = other DNA
ttaattcttctagaggattt

SEQ ID NO: 54281 - DNA, 20 bp, synthetic construct
  misc_feature 1..20: note = chemically synthesized
  source 1..20: mol_type = other DNA
cttctagaggatttaagaat

SEQ ID NO: 54282 - DNA, 20 bp, synthetic construct
  misc_feature 1..20: note = chemically synthesized
  source 1..20: mol_type = other DNA
ttaagaattagatatctgac

SEQ ID NO: 54283 - DNA, 20 bp, synthetic construct
  misc_feature 1..20: note = chemically synthesized
  source 1..20: mol_type = other DNA
tgactagaatattgttcact

SEQ ID NO: 54284 - DNA, 20 bp, synthetic construct
  misc_feature 1..20: note = chemically synthesized
  source 1..20: mol_type = other DNA
attgttcactaagcctttta

SEQ ID NO: 54285 - DNA, 20 bp, synthetic construct
  misc_feature 1..20: note = chemically synthesized
  source 1..20: mol_type = other DNA
aaatacgttttgaataacta

SEQ ID NO: 54286 - DNA, 20 bp, synthetic construct
  misc_feature 1..20: note = chemically synthesized
  source 1..20: mol_type = other DNA
aatacgttttgaataactat

SEQ ID NO: 54287 - DNA, 20 bp, synthetic construct
  misc_feature 1..20: note = chemically synthesized
  source 1..20: mol_type = other DNA
atacgttttgaataactata

SEQ ID NO: 54288 - DNA, 20 bp, synthetic construct
  misc_feature 1..20: note = chemically synthesized
  source 1..20: mol_type = other DNA
gttttgaataactatagggc

SEQ ID NO: 54289 - DNA, 20 bp, synthetic construct
  misc_feature 1..20: note = chemically synthesized
  source 1..20: mol_type = other DNA
ggccagaatataatctcctg

SEQ ID NO: 54290 - DNA, 20 bp, synthetic construct
  misc_feature 1..20: note = chemically synthesized
  source 1..20: mol_type = other DNA
tgtcccccaaatacatttta

SEQ ID NO: 54291 - DNA, 20 bp, synthetic construct
  misc_feature 1..20: note = chemically synthesized
  source 1..20: mol_type = other DNA
tcccccaaatacattttatg

SEQ ID NO: 54292 - DNA, 20 bp, synthetic construct
  misc_feature 1..20: note = chemically synthesized
  source 1..20: mol_type = other DNA
cccccaaatacattttatgg

SEQ ID NO: 54293 - DNA, 20 bp, synthetic construct
  misc_feature 1..20: note = chemically synthesized
  source 1..20: mol_type = other DNA
ccccaaatacattttatgga

SEQ ID NO: 54294 - DNA, 20 bp, synthetic construct
  misc_feature 1..20: note = chemically synthesized
  source 1..20: mol_type = other DNA
gggatacttttctgaaaatt

SEQ ID NO: 54295 - DNA, 20 bp, synthetic construct
  misc_feature 1..20: note = chemically synthesized
  source 1..20: mol_type = other DNA
ttctgaaaattcagtattaa

SEQ ID NO: 54296 - DNA, 20 bp, synthetic construct
  misc_feature 1..20: note = chemically synthesized
  source 1..20: mol_type = other DNA
tttatttctatcatctatct

SEQ ID NO: 54297 - DNA, 20 bp, synthetic construct
  misc_feature 1..20: note = chemically synthesized
  source 1..20: mol_type = other DNA
ttatttctatcatctatctg

SEQ ID NO: 54298 - DNA, 20 bp, synthetic construct
  misc_feature 1..20: note = chemically synthesized
  source 1..20: mol_type = other DNA
ctatcatctatctgaggaaa

SEQ ID NO: 54299 - DNA, 20 bp, synthetic construct
  misc_feature 1..20: note = chemically synthesized
  source 1..20: mol_type = other DNA
atcatctatctgaggaaaca

SEQ ID NO: 54300 - DNA, 20 bp, synthetic construct
  misc_feature 1..20: note = chemically synthesized
  source 1..20: mol_type = other DNA
tcatctatctgaggaaacag

SEQ ID NO: 54301 - DNA, 20 bp, synthetic construct
  misc_feature 1..20: note = chemically synthesized
  source 1..20: mol_type = other DNA
atctgaggaaacagaggtac

SEQ ID NO: 54302 - DNA, 20 bp, synthetic construct
  misc_feature 1..20: note = chemically synthesized
  source 1..20: mol_type = other DNA
attacaaacctaatgcacca

SEQ ID NO: 54303 - DNA, 20 bp, synthetic construct
  misc_feature 1..20: note = chemically synthesized
  source 1..20: mol_type = other DNA
acctaatgcaccaaagcaat

SEQ ID NO: 54304 - DNA, 20 bp, synthetic construct
  misc_feature 1..20: note = chemically synthesized
  source 1..20: mol_type = other DNA
cctaatgcaccaaagcaatg

SEQ ID NO: 54305 - DNA, 20 bp, synthetic construct
  misc_feature 1..20: note = chemically synthesized
  source 1..20: mol_type = other DNA
aatgcaccaaagcaatgagg

SEQ ID NO: 54306 - DNA, 20 bp, synthetic construct
  misc_feature 1..20: note = chemically synthesized
  source 1..20: mol_type = other DNA
aagcaatgaggtagaatgct

SEQ ID NO: 54307 - DNA, 20 bp, synthetic construct
  misc_feature 1..20: note = chemically synthesized
  source 1..20: mol_type = other DNA
gcaatgaggtagaatgctca

SEQ ID NO: 54308 - DNA, 20 bp, synthetic construct
  misc_feature 1..20: note = chemically synthesized
  source 1..20: mol_type = other DNA
aggtagaatgctcagagttc

SEQ ID NO: 54309 - DNA, 20 bp, synthetic construct
  misc_feature 1..20: note = chemically synthesized
  source 1..20: mol_type = other DNA
aatgctcagagttcaagtcc

SEQ ID NO: 54310 - DNA, 20 bp, synthetic construct
  misc_feature 1..20: note = chemically synthesized
  source 1..20: mol_type = other DNA
tcagagttcaagtcccagct

SEQ ID NO: 54311 - DNA, 20 bp, synthetic construct
  misc_feature 1..20: note = chemically synthesized
  source 1..20: mol_type = other DNA
agttcaagtcccagctcagt

SEQ ID NO: 54312 - DNA, 20 bp, synthetic construct
  misc_feature 1..20: note = chemically synthesized
  source 1..20: mol_type = other DNA
aagtcccagctcagtaagct

SEQ ID NO: 54313 - DNA, 20 bp, synthetic construct
  misc_feature 1..20: note = chemically synthesized
  source 1..20: mol_type = other DNA
tcccagctcagtaagctcag

SEQ ID NO: 54314 - DNA, 20 bp, synthetic construct
  misc_feature 1..20: note = chemically synthesized
  source 1..20: mol_type = other DNA
gtggaacttcattctttttg

SEQ ID NO: 54315 - DNA, 20 bp, synthetic construct
  misc_feature 1..20: note = chemically synthesized
  source 1..20: mol_type = other DNA
tgaattaattatattaaaaa

SEQ ID NO: 54316 - DNA, 20 bp, synthetic construct
  misc_feature 1..20: note = chemically synthesized
  source 1..20: mol_type = other DNA
attatattaaaaatagatgc

SEQ ID NO: 54317 - DNA, 20 bp, synthetic construct
  misc_feature 1..20: note = chemically synthesized
  source 1..20: mol_type = other DNA
ttatattaaaaatagatgct

SEQ ID NO: 54318 - DNA, 20 bp, synthetic construct
  misc_feature 1..20: note = chemically synthesized
  source 1..20: mol_type = other DNA
gatgctgggtacccttgccc

SEQ ID NO: 54319 - DNA, 20 bp, synthetic construct
  misc_feature 1..20: note = chemically synthesized
  source 1..20: mol_type = other DNA
tacccttgccctagtaataa

SEQ ID NO: 54320 - DNA, 20 bp, synthetic construct
  misc_feature 1..20: note = chemically synthesized
  source 1..20: mol_type = other DNA
cttgccctagtaataaaagc

SEQ ID NO: 54321 - DNA, 20 bp, synthetic construct
  misc_feature 1..20: note = chemically synthesized
  source 1..20: mol_type = other DNA
ccctagtaataaaagctggt

SEQ ID NO: 54322 - DNA, 20 bp, synthetic construct
  misc_feature 1..20: note = chemically synthesized
  source 1..20: mol_type = other DNA
gtaataaaagctggttggca

SEQ ID NO: 54323 - DNA, 20 bp, synthetic construct
  misc_feature 1..20: note = chemically synthesized
  source 1..20: mol_type = other DNA
taaaagctggttggcaaagc

SEQ ID NO: 54324 - DNA, 20 bp, synthetic construct
  misc_feature 1..20: note = chemically synthesized
  source 1..20: mol_type = other DNA
aagctggttggcaaagctgg

SEQ ID NO: 54325 - DNA, 20 bp, synthetic construct
  misc_feature 1..20: note = chemically synthesized
  source 1..20: mol_type = other DNA
agctggttggcaaagctgga

SEQ ID NO: 54326 - DNA, 20 bp, synthetic construct
  misc_feature 1..20: note = chemically synthesized
  source 1..20: mol_type = other DNA
ctggttggcaaagctggaag

SEQ ID NO: 54327 - DNA, 20 bp, synthetic construct
  misc_feature 1..20: note = chemically synthesized
  source 1..20: mol_type = other DNA
ggagtcacttctacttcatt

SEQ ID NO: 54328 - DNA, 20 bp, synthetic construct
  misc_feature 1..20: note = chemically synthesized
  source 1..20: mol_type = other DNA
tttagcgtgaatcttaaatg

SEQ ID NO: 54329 - DNA, 20 bp, synthetic construct
  misc_feature 1..20: note = chemically synthesized
  source 1..20: mol_type = other DNA
ttagcgtgaatcttaaatgt

SEQ ID NO: 54330 - DNA, 20 bp, synthetic construct
  misc_feature 1..20: note = chemically synthesized
  source 1..20: mol_type = other DNA
gtgaatcttaaatgtaggaa

SEQ ID NO: 54331 - DNA, 20 bp, synthetic construct
  misc_feature 1..20: note = chemically synthesized
  source 1..20: mol_type = other DNA
tgaatcttaaatgtaggaat

SEQ ID NO: 54332 - DNA, 20 bp, synthetic construct
  misc_feature 1..20: note = chemically synthesized
  source 1..20: mol_type = other DNA
aatgtaggaatgggatgtca

SEQ ID NO: 54333 - DNA, 20 bp, synthetic construct
  misc_feature 1..20: note = chemically synthesized
  source 1..20: mol_type = other DNA
tgtcacagaaacactcaccg

SEQ ID NO: 54334 - DNA, 20 bp, synthetic construct
  misc_feature 1..20: note = chemically synthesized
  source 1..20: mol_type = other DNA
gtcacagaaacactcaccgt

SEQ ID NO: 54335 - DNA, 20 bp, synthetic construct
  misc_feature 1..20: note = chemically synthesized
  source 1..20: mol_type = other DNA
tcacagaaacactcaccgta

SEQ ID NO: 54336 - DNA, 20 bp, synthetic construct
  misc_feature 1..20: note = chemically synthesized
  source 1..20: mol_type = other DNA
agaaacactcaccgtagggc

SEQ ID NO: 54337 - DNA, 20 bp, synthetic construct
  misc_feature 1..20: note = chemically synthesized
  source 1..20: mol_type = other DNA
actcaccgtagggccagcct

SEQ ID NO: 54338 - DNA, 20 bp, synthetic construct
  misc_feature 1..20: note = chemically synthesized
  source 1..20: mol_type = other DNA
ccagcctcagacacaaatac

SEQ ID NO: 54339 - DNA, 20 bp, synthetic construct
  misc_feature 1..20: note = chemically synthesized
  source 1..20: mol_type = other DNA
ctcagacacaaataccagtc

SEQ ID NO: 54340 - DNA, 20 bp, synthetic construct
  misc_feature 1..20: note = chemically synthesized
  source 1..20: mol_type = other DNA
gacacaaataccagtccagc

SEQ ID NO: 54341 - DNA, 20 bp, synthetic construct
  misc_feature 1..20: note = chemically synthesized
  source 1..20: mol_type = other DNA
acacaaataccagtccagca

SEQ ID NO: 54342 - DNA, 20 bp, synthetic construct
  misc_feature 1..20: note = chemically synthesized
  source 1..20: mol_type = other DNA
caaataccagtccagcaagg

SEQ ID NO: 54343 - DNA, 20 bp, synthetic construct
  misc_feature 1..20: note = chemically synthesized
  source 1..20: mol_type = other DNA
aataccagtccagcaaggca

SEQ ID NO: 54344 - DNA, 20 bp, synthetic construct
  misc_feature 1..20: note = chemically synthesized
  source 1..20: mol_type = other DNA
ataccagtccagcaaggcag

SEQ ID NO: 54345 - DNA, 20 bp, synthetic construct
  misc_feature 1..20: note = chemically synthesized
  source 1..20: mol_type = other DNA
accagtccagcaaggcagag

SEQ ID NO: 54346 - DNA, 20 bp, synthetic construct
  misc_feature 1..20: note = chemically synthesized
  source 1..20: mol_type = other DNA
ccagtccagcaaggcagagg

SEQ ID NO: 54347 - DNA, 20 bp, synthetic construct
  misc_feature 1..20: note = chemically synthesized
  source 1..20: mol_type = other DNA
agtccagcaaggcagaggag

SEQ ID NO: 54348 - DNA, 20 bp, synthetic construct
  misc_feature 1..20: note = chemically synthesized
  source 1..20: mol_type = other DNA
ccagcaaggcagaggaggag

SEQ ID NO: 54349 - DNA, 20 bp, synthetic construct
  misc_feature 1..20: note = chemically synthesized
  source 1..20: mol_type = other DNA
gcagaggaggagcagacgat

SEQ ID NO: 54350 - DNA, 20 bp, synthetic construct
  misc_feature 1..20: note = chemically synthesized
  source 1..20: mol_type = other DNA
gaggaggagcagacgatgag

SEQ ID NO: 54351 - DNA, 20 bp, synthetic construct
  misc_feature 1..20: note = chemically synthesized
  source 1..20: mol_type = other DNA
cgatgagaagccatcctgcc

SEQ ID NO: 54352 - DNA, 20 bp, synthetic construct
  misc_feature 1..20: note = chemically synthesized
  source 1..20: mol_type = other DNA
gaagccatcctgccaagaat

SEQ ID NO: 54353 - DNA, 20 bp, synthetic construct
  misc_feature 1..20: note = chemically synthesized
  source 1..20: mol_type = other DNA
gccatcctgccaagaatgag

SEQ ID NO: 54354 - DNA, 20 bp, synthetic construct
  misc_feature 1..20: note = chemically synthesized
  source 1..20: mol_type = other DNA
gaatgagtggacttctgtga

SEQ ID NO: 54355 - DNA, 20 bp, synthetic construct
  misc_feature 1..20: note = chemically synthesized
  source 1..20: mol_type = other DNA
acttctgtgatggctgctcc

SEQ ID NO: 54356 - DNA, 20 bp, synthetic construct
  misc_feature 1..20: note = chemically synthesized
  source 1..20: mol_type = other DNA
tgtgatggctgctcccagcc

SEQ ID NO: 54357 - DNA, 20 bp, synthetic construct
  misc_feature 1..20: note = chemically synthesized
  source 1..20: mol_type = other DNA
gtgatggctgctcccagcct

SEQ ID NO: 54358 - DNA, 20 bp, synthetic construct
  misc_feature 1..20: note = chemically synthesized
  source 1..20: mol_type = other DNA
tgatggctgctcccagcctg

SEQ ID NO: 54359 - DNA, 20 bp, synthetic construct
  misc_feature 1..20: note = chemically synthesized
  source 1..20: mol_type = other DNA
cttttatactcacttctcct

SEQ ID NO: 54360 - DNA, 20 bp, synthetic construct
  misc_feature 1..20: note = chemically synthesized
  source 1..20: mol_type = other DNA
tatactcacttctcctgagc

SEQ ID NO: 54361 - DNA, 20 bp, synthetic construct
  misc_feature 1..20: note = chemically synthesized
  source 1..20: mol_type = other DNA
atactcacttctcctgagct

SEQ ID NO: 54362 - DNA, 20 bp, synthetic construct
  misc_feature 1..20: note = chemically synthesized
  source 1..20: mol_type = other DNA
gctgattctgattattgact

SEQ ID NO: 54363 - DNA, 20 bp, synthetic construct
  misc_feature 1..20: note = chemically synthesized
  source 1..20: mol_type = other DNA
aggtttgcagtcagattggc

SEQ ID NO: 54364 - DNA, 20 bp, synthetic construct
  misc_feature 1..20: note = chemically synthesized
  source 1..20: mol_type = other DNA
agcagcctagctcaggagaa

SEQ ID NO: 54365 - DNA, 20 bp, synthetic construct
  misc_feature 1..20: note = chemically synthesized
  source 1..20: mol_type = other DNA
agaagtccactcattcttgg

SEQ ID NO: 54366 - DNA, 20 bp, synthetic construct
  misc_feature 1..20: note = chemically synthesized
  source 1..20: mol_type = other DNA
tgtctgaggctggccctacg

SEQ ID NO: 54367 - DNA, 20 bp, synthetic construct
  misc_feature 1..20: note = chemically synthesized
  source 1..20: mol_type = other DNA
ccagcttttattactagggc

SEQ ID NO: 54368 - DNA, 20 bp, synthetic construct
  misc_feature 1..20: note = chemically synthesized
  source 1..20: mol_type = other DNA
taattaattcaaacttcaaa

SEQ ID NO: 54369 - DNA, 20 bp, synthetic construct
  misc_feature 1..20: note = chemically synthesized
  source 1..20: mol_type = other DNA
tattaaggaagctgttaata

SEQ ID NO: 54370 - DNA, 20 bp, synthetic construct
  misc_feature 1..20: note = chemically synthesized
  source 1..20: mol_type = other DNA
ctaattcttaaatcctctag

SEQ ID NO: 54371 - DNA, 20 bp, synthetic construct
  misc_feature 1..20: note = chemically synthesized
  source 1..20: mol_type = other DNA
gaattaactaatactataaa

SEQ ID NO: 54372 - DNA, 20 bp, synthetic construct
  misc_feature 1..20: note = chemically synthesized
  source 1..20: mol_type = other DNA
actaatactataaaatgggt

SEQ ID NO: 54373 - DNA, 20 bp, synthetic construct
  misc_feature 1..20: note = chemically synthesized
  source 1..20: mol_type = other DNA
ttttataacaactggtaaga

SEQ ID NO: 54374 - DNA, 20 bp, synthetic construct
  misc_feature 1..20: note = chemically synthesized
  source 1..20: mol_type = other DNA
acaattacgtctgtgttata

SEQ ID NO: 54375 - DNA, 20 bp, synthetic construct
  misc_feature 1..20: note = chemically synthesized
  source 1..20: mol_type = other DNA
gacacttacgttcctgataa

SEQ ID NO: 54376 - DNA, 20 bp, synthetic construct
  misc_feature 1..20: note = chemically synthesized
  source 1..20: mol_type = other DNA
tccagatttctaataccaca

SEQ ID NO: 54377 - DNA, 20 bp, synthetic construct
  misc_feature 1..20: note = chemically synthesized
  source 1..20: mol_type = other DNA
tctctacacccagggcaccg

SEQ ID NO: 54378 - DNA, 20 bp, synthetic construct
  misc_feature 1..20: note = chemically synthesized
  source 1..20: mol_type = other DNA
ctttgaccatcagaggacac

SEQ ID NO: 54379 - DNA, 20 bp, synthetic construct
  misc_feature 1..20: note = chemically synthesized
  source 1..20: mol_type = other DNA
cacttggattcaccggtgcc

SEQ ID NO: 54380 - DNA, 20 bp, synthetic construct
  misc_feature 1..20: note = chemically synthesized
  source 1..20: mol_type = other DNA
gagaagttaacaaaattgat

SEQ ID NO: 54381 - DNA, 20 bp, synthetic construct
  misc_feature 1..20: note = chemically synthesized
  source 1..20: mol_type = other DNA
aacaaaattgatcagagtga

SEQ ID NO: 54382 - DNA, 20 bp, synthetic construct
  misc_feature 1..20: note = chemically synthesized
  source 1..20: mol_type = other DNA
ttagaaatctggagcgaaac

SEQ ID NO: 54383 - DNA, 20 bp, synthetic construct
  misc_feature 1..20: note = chemically synthesized
  source 1..20: mol_type = other DNA
gacgtaattgtttccaaagc

SEQ ID NO: 54384 - DNA, 20 bp, synthetic construct
  misc_feature 1..20: note = chemically synthesized
  source 1..20: mol_type = other DNA
cagacacactgctatcaacc

SEQ ID NO: 54385 - DNA, 20 bp, synthetic construct
  misc_feature 1..20: note = chemically synthesized
  source 1..20: mol_type = other DNA
atcaaccagggatgtgtata

SEQ ID NO: 54386 - DNA, 20 bp, synthetic construct
  misc_feature 1..20: note = chemically synthesized
  source 1..20: mol_type = other DNA
gctttgttaaaagtctccat

SEQ ID NO: 54387 - DNA, 20 bp, synthetic construct
  misc_feature 1..20: note = chemically synthesized
  source 1..20: mol_type = other DNA
gttaaaagtctccatttgag

SEQ ID NO: 54388 - DNA, 20 bp, synthetic construct
  misc_feature 1..20: note = chemically synthesized
  source 1..20: mol_type = other DNA
agtattagttaattcttcta

SEQ ID NO: 54389 - DNA, 20 bp, synthetic construct
  misc_feature 1..20: note = chemically synthesized
  source 1..20: mol_type = other DNA
ttaattcttctagaggattt

SEQ ID NO: 54390 - DNA, 20 bp, synthetic construct
  misc_feature 1..20: note = chemically synthesized
  source 1..20: mol_type = other DNA
ttaagaattagatatctgac

SEQ ID NO: 54391 - DNA, 20 bp, synthetic construct
  misc_feature 1..20: note = chemically synthesized
  source 1..20: mol_type = other DNA
gattaatcaataaatacgtt

SEQ ID NO: 54392 - DNA, 20 bp, synthetic construct
  misc_feature 1..20: note = chemically synthesized
  source 1..20: mol_type = other DNA
gttttgaataactatagggc

SEQ ID NO: 54393 - DNA, 20 bp, synthetic construct
  misc_feature 1..20: note = chemically synthesized
  source 1..20: mol_type = other DNA
cccccaaatacattttatgg

SEQ ID NO: 54394 - DNA, 20 bp, synthetic construct
  misc_feature 1..20: note = chemically synthesized
  source 1..20: mol_type = other DNA
aatgcaccaaagcaatgagg

SEQ ID NO: 54395 - DNA, 20 bp, synthetic construct
  misc_feature 1..20: note = chemically synthesized
  source 1..20: mol_type = other DNA
aagcaatgaggtagaatgct

SEQ ID NO: 54396 - DNA, 20 bp, synthetic construct
  misc_feature 1..20: note = chemically synthesized
  source 1..20: mol_type = other DNA
aacttcattctttttgaagt

SEQ ID NO: 54397 - DNA, 20 bp, synthetic construct
  misc_feature 1..20: note = chemically synthesized
  source 1..20: mol_type = other DNA
aattatattaaaaatagatg

SEQ ID NO: 54398 - DNA, 20 bp, synthetic construct
  misc_feature 1..20: note = chemically synthesized
  source 1..20: mol_type = other DNA
agctggttggcaaagctgga

SEQ ID NO: 54399 - DNA, 20 bp, synthetic construct
  misc_feature 1..20: note = chemically synthesized
  source 1..20: mol_type = other DNA
tcacttctacttcatttagc

SEQ ID NO: 54400 - DNA, 20 bp, synthetic construct
  misc_feature 1..20: note = chemically synthesized
  source 1..20: mol_type = other DNA
ttagcgtgaatcttaaatgt

SEQ ID NO: 54401 - DNA, 20 bp, synthetic construct
  misc_feature 1..20: note = chemically synthesized
  source 1..20: mol_type = other DNA
gtgaatcttaaatgtaggaa

SEQ ID NO: 54402 - DNA, 20 bp, synthetic construct
  misc_feature 1..20: note = chemically synthesized
  source 1..20: mol_type = other DNA
cgatgagaagccatcctgcc

SEQ ID NO: 54403 - DNA, 20 bp, synthetic construct
  misc_feature 1..20: note = chemically synthesized
  source 1..20: mol_type = other DNA
gagaagccatcctgccaaga

SEQ ID NO: 54404 - DNA, 20 bp, synthetic construct
  misc_feature 1..20: note = chemically synthesized
  source 1..20: mol_type = other DNA
ataattaattcaaacttcaa

SEQ ID NO: 54405 - DNA, 20 bp, synthetic construct
  misc_feature 1..20: note = chemically synthesized
  source 1..20: mol_type = other DNA
tctgtttcctcagatagatg

SEQ ID NO: 54406 - DNA, 20 bp, synthetic construct
  misc_feature 1..20: note = chemically synthesized
  source 1..20: mol_type = other DNA
aagctgttaatactgaattt

SEQ ID NO: 54407 - DNA, 20 bp, synthetic construct
  misc_feature 1..20: note = chemically synthesized
  source 1..20: mol_type = other DNA
tctaattcttaaatcctcta

SEQ ID NO: 54408 - DNA, 20 bp, synthetic construct
  misc_feature 1..20: note = chemically synthesized
  source 1..20: mol_type = other DNA
tgatagcagtgtgtctggag

SEQ ID NO: 54409 - DNA, 20 bp, synthetic construct
  misc_feature 1..20: note = chemically synthesized
  source 1..20: mol_type = other DNA
ctccagatttctaataccac

SEQ ID NO: 54410 - DNA, 20 bp, synthetic construct
  misc_feature 1..20: note = chemically synthesized
  source 1..20: mol_type = other DNA
caatgtggccgtgcatgtgt

SEQ ID NO: 54411 - DNA, 20 bp, synthetic construct
  misc_feature 1..20: note = chemically synthesized
  source 1..20: mol_type = other DNA
aggatttattctttgtggta

SEQ ID NO: 54412 - DNA, 20 bp, synthetic construct
  misc_feature 1..20: note = chemically synthesized
  source 1..20: mol_type = other DNA
attagaaatctggagcgaaa

SEQ ID NO: 54413 - DNA, 20 bp, synthetic construct
  misc_feature 1..20: note = chemically synthesized
  source 1..20: mol_type = other DNA
agacgtaattgtttccaaag

SEQ ID NO: 54414 - DNA, 20 bp, synthetic construct
  misc_feature 1..20: note = chemically synthesized
  source 1..20: mol_type = other DNA
tgtgtataatgaattttaag

SEQ ID NO: 54415 - DNA, 20 bp, synthetic construct
  misc_feature 1..20: note = chemically synthesized
  source 1..20: mol_type = other DNA
gttaattcttctagaggatt

SEQ ID NO: 54416 - DNA, 20 bp, synthetic construct
  misc_feature 1..20: note = chemically synthesized
  source 1..20: mol_type = other DNA
tttaagaattagatatctga

SEQ ID NO: 54417 - DNA, 20 bp, synthetic construct
  misc_feature 1..20: note = chemically synthesized
  source 1..20: mol_type = other DNA
cgttttgaataactataggg

SEQ ID NO: 54418 - DNA, 20 bp, synthetic construct
  misc_feature 1..20: note = chemically synthesized
  source 1..20: mol_type = other DNA
taatgcaccaaagcaatgag

SEQ ID NO: 54419 - DNA, 20 bp, synthetic construct
  misc_feature 1..20: note = chemically synthesized
  source 1..20: mol_type = other DNA
aaatgtaggaatgggatgtc

SEQ ID NO: 54420 - DNA, 20 bp, synthetic construct
  misc_feature 1..20: note = chemically synthesized
  source 1..20: mol_type = other DNA
acgatgagaagccatcctgc

SEQ ID NO: 54421 - DNA, 20 bp, synthetic construct
  misc_feature 1..20: note = chemically synthesized
  source 1..20: mol_type = other DNA
attctggccctatagttatt

SEQ ID NO: 54422 - DNA, 20 bp, synthetic construct
  misc_feature 1..20: note = chemically synthesized
  source 1..20: mol_type = other DNA
aacaactaaaatgatctcag

SEQ ID NO: 54423 - DNA, 20 bp, synthetic construct
  misc_feature 1..20: note = chemically synthesized
  source 1..20: mol_type = other DNA
taagtcaataatcagaatca

SEQ ID NO: 54424 - DNA, 20 bp, synthetic construct
  misc_feature 1..20: note = chemically synthesized
  source 1..20: mol_type = other DNA
tcagaatcagcaggtttgca

SEQ ID NO: 54425 - DNA, 20 bp, synthetic construct
  misc_feature 1..20: note = chemically synthesized
  source 1..20: mol_type = other DNA
agtccactcattcttggcag

SEQ ID NO: 54426 - DNA, 20 bp, synthetic construct
  misc_feature 1..20: note = chemically synthesized
  source 1..20: mol_type = other DNA
tctgaggctggccctacggt

SEQ ID NO: 54427 - DNA, 20 bp, synthetic construct
  misc_feature 1..20: note = chemically synthesized
  source 1..20: mol_type = other DNA
gtgacatcccattcctacat

SEQ ID NO: 54428 - DNA, 20 bp, synthetic construct
  misc_feature 1..20: note = chemically synthesized
  source 1..20: mol_type = other DNA
atgaagtagaagtgactcct

SEQ ID NO: 54429 - DNA, 20 bp, synthetic construct
  misc_feature 1..20: note = chemically synthesized
  source 1..20: mol_type = other DNA
gactccttccagctttgcca

SEQ ID NO: 54430 - DNA, 20 bp, synthetic construct
  misc_feature 1..20: note = chemically synthesized
  source 1..20: mol_type = other DNA
tcaaaaagaatgaagttcca

SEQ ID NO: 54431 - DNA, 20 bp, synthetic construct
  misc_feature 1..20: note = chemically synthesized
  source 1..20: mol_type = other DNA
gaactctgagcattctacct

SEQ ID NO: 54432 - DNA, 20 bp, synthetic construct
  misc_feature 1..20: note = chemically synthesized
  source 1..20: mol_type = other DNA
tacctcattgctttggtgca

SEQ ID NO: 54433 - DNA, 20 bp, synthetic construct
  misc_feature 1..20: note = chemically synthesized
  source 1..20: mol_type = other DNA
aggtttgtaatatctggtac

SEQ ID NO: 54434 - DNA, 20 bp, synthetic construct
  misc_feature 1..20: note = chemically synthesized
  source 1..20: mol_type = other DNA
gtatttgggggacaaactgc

SEQ ID NO: 54435 - DNA, 20 bp, synthetic construct
  misc_feature 1..20: note = chemically synthesized
  source 1..20: mol_type = other DNA
atagttattcaaaacgtatt

SEQ ID NO: 54436 - DNA, 20 bp, synthetic construct
  misc_feature 1..20: note = chemically synthesized
  source 1..20: mol_type = other DNA
tatttattgattaatcttta

SEQ ID NO: 54437 - DNA, 20 bp, synthetic construct
  misc_feature 1..20: note = chemically synthesized
  source 1..20: mol_type = other DNA
actaaaatgatctcaggaaa

SEQ ID NO: 54438 - DNA, 20 bp, synthetic construct
  misc_feature 1..20: note = chemically synthesized
  source 1..20: mol_type = other DNA
tgtctggaggcagaaaccat

SEQ ID NO: 54439 - DNA, 20 bp, synthetic construct
  misc_feature 1..20: note = chemically synthesized
  source 1..20: mol_type = other DNA
taatgggatcagtgtgtaat

SEQ ID NO: 54440 - DNA, 20 bp, synthetic construct
  misc_feature 1..20: note = chemically synthesized
  source 1..20: mol_type = other DNA
gtgtgtaattcttgtttcgc

SEQ ID NO: 54441 - DNA, 20 bp, synthetic construct
  misc_feature 1..20: note = chemically synthesized
  source 1..20: mol_type = other DNA
actttgaccatcagaggaca

SEQ ID NO: 54442 - DNA, 20 bp, synthetic construct
  misc_feature 1..20: note = chemically synthesized
  source 1..20: mol_type = other DNA
taacaaaattgatcagagtg

SEQ ID NO: 54443 - DNA, 20 bp, synthetic construct
  misc_feature 1..20: note = chemically synthesized
  source 1..20: mol_type = other DNA
aacgtaagtgtcgacaatta

SEQ ID NO: 54444 - DNA, 20 bp, synthetic construct
  misc_feature 1..20: note = chemically synthesized
  source 1..20: mol_type = other DNA
actcagtataacacagacgt

SEQ ID NO: 54445 - DNA, 20 bp, synthetic construct
  misc_feature 1..20: note = chemically synthesized
  source 1..20: mol_type = other DNA
gtaattgtttccaaagcaag

SEQ ID NO: 54446 - DNA, 20 bp, synthetic construct
  misc_feature 1..20: note = chemically synthesized
  source 1..20: mol_type = other DNA
aaaataggtcccctgagaac

SEQ ID NO: 54447 - DNA, 20 bp, synthetic construct
  misc_feature 1..20: note = chemically synthesized
  source 1..20: mol_type = other DNA
tgtaccatacatagggccaa

SEQ ID NO: 54448 - DNA, 20 bp, synthetic construct
  misc_feature 1..20: note = chemically synthesized
  source 1..20: mol_type = other DNA
tagtattagttaattcttct

SEQ ID NO: 54449 - DNA, 20 bp, synthetic construct
  misc_feature 1..20: note = chemically synthesized
  source 1..20: mol_type = other DNA
atattgttcactaagccttt

SEQ ID NO: 54450 - DNA, 20 bp, synthetic construct
  misc_feature 1..20: note = chemically synthesized
  source 1..20: mol_type = other DNA
ttttaaagattaatcaataa

SEQ ID NO: 54451 - DNA, 20 bp, synthetic construct
  misc_feature 1..20: note = chemically synthesized
  source 1..20: mol_type = other DNA
agggccagaatataatctcc

SEQ ID NO: 54452 - DNA, 20 bp, synthetic construct
  misc_feature 1..20: note = chemically synthesized
  source 1..20: mol_type = other DNA
ttttctgaaaattcagtatt

SEQ ID NO: 54453 - DNA, 20 bp, synthetic construct
  misc_feature 1..20: note = chemically synthesized
  source 1..20: mol_type = other DNA
cagtggaacttcattctttt

SEQ ID NO: 54454 - DNA, 20 bp, synthetic construct
  misc_feature 1..20: note = chemically synthesized
  source 1..20: mol_type = other DNA
tgtgatggctgctcccagcc

SEQ ID NO: 54455 - DNA, 20 bp, synthetic construct
  misc_feature 1..20: note = chemically synthesized
  source 1..20: mol_type = other DNA
tactcacttctcctgagcta

SEQ ID NO: 54456 - DNA, 20 bp, synthetic construct
  misc_feature 1..20: note = chemically synthesized
  source 1..20: mol_type = other DNA
tgccaatctgactgcaaacc

SEQ ID NO: 54457 - DNA, 20 bp, synthetic construct
  misc_feature 1..20: note = chemically synthesized
  source 1..20: mol_type = other DNA
tctgactgcaaacctgctga

SEQ ID NO: 54458 - DNA, 22 bp, synthetic construct
  misc_feature 1..22: note = chemically synthesized
  source 1..22: mol_type = other DNA
actaagtcaataatcagaatca

SEQ ID NO: 54459 - DNA, 22 bp, synthetic construct
  misc_feature 1..22: note = chemically synthesized
  source 1..22: mol_type = other DNA
agtcaataatcagaatcagcag

SEQ ID NO: 54460 - DNA, 22 bp, synthetic construct
  misc_feature 1..22: note = chemically synthesized
  source 1..22: mol_type = other DNA
gcagtcagattggcagggataa

SEQ ID NO: 54461 - DNA, 22 bp, synthetic construct
  misc_feature 1..22: note = chemically synthesized
  source 1..22: mol_type = other DNA
cagtcagattggcagggataag

SEQ ID NO: 54462 - DNA, 22 bp, synthetic construct
  misc_feature 1..22: note = chemically synthesized
  source 1..22: mol_type = other DNA
gcagggataagcagcctagctc

SEQ ID NO: 54463 - DNA, 22 bp, synthetic construct
  misc_feature 1..22: note = chemically synthesized
  source 1..22: mol_type = other DNA
gctcaggagaagtgagtataaa

SEQ ID NO: 54464 - DNA, 22 bp, synthetic construct
  misc_feature 1..22: note = chemically synthesized
  source 1..22: mol_type = other DNA
aggagaagtgagtataaaagcc

SEQ ID NO: 54465 - DNA, 22 bp, synthetic construct
  misc_feature 1..22: note = chemically synthesized
  source 1..22: mol_type = other DNA
ggagcagccatcacagaagtcc

SEQ ID NO: 54466 - DNA, 22 bp, synthetic construct
  misc_feature 1..22: note = chemically synthesized
  source 1..22: mol_type = other DNA
attcttggcaggatggcttctc

SEQ ID NO: 54467 - DNA, 22 bp, synthetic construct
  misc_feature 1..22: note = chemically synthesized
  source 1..22: mol_type = other DNA
ttggcaggatggcttctcatcg

SEQ ID NO: 54468 - DNA, 22 bp, synthetic construct
  misc_feature 1..22: note = chemically synthesized
  source 1..22: mol_type = other DNA
ggcaggatggcttctcatcgtc

SEQ ID NO: 54469 - DNA, 22 bp, synthetic construct
  misc_feature 1..22: note = chemically synthesized
  source 1..22: mol_type = other DNA
gcaggatggcttctcatcgtct

SEQ ID NO: 54470 - DNA, 22 bp, synthetic construct
  misc_feature 1..22: note = chemically synthesized
  source 1..22: mol_type = other DNA
ctcatcgtctgctcctcctctg

SEQ ID NO: 54471 - DNA, 22 bp, synthetic construct
  misc_feature 1..22: note = chemically synthesized
  source 1..22: mol_type = other DNA
tcatcgtctgctcctcctctgc

SEQ ID NO: 54472 - DNA, 22 bp, synthetic construct
  misc_feature 1..22: note = chemically synthesized
  source 1..22: mol_type = other DNA
atcgtctgctcctcctctgcct

SEQ ID NO: 54473 - DNA, 22 bp, synthetic construct
  misc_feature 1..22: note = chemically synthesized
  source 1..22: mol_type = other DNA
ctcctcctctgccttgctggac

SEQ ID NO: 54474 - DNA, 22 bp, synthetic construct
  misc_feature 1..22: note = chemically synthesized
  source 1..22: mol_type = other DNA
ctcctctgccttgctggactgg

SEQ ID NO: 54475 - DNA, 22 bp, synthetic construct
  misc_feature 1..22: note = chemically synthesized
  source 1..22: mol_type = other DNA
ctctgccttgctggactggtat

SEQ ID NO: 54476 - DNA, 22 bp, synthetic construct
  misc_feature 1..22: note = chemically synthesized
  source 1..22: mol_type = other DNA
tgccttgctggactggtatttg

SEQ ID NO: 54477 - DNA, 22 bp, synthetic construct
  misc_feature 1..22: note = chemically synthesized
  source 1..22: mol_type = other DNA
ccttgctggactggtatttgtg

SEQ ID NO: 54478 - DNA, 22 bp, synthetic construct
  misc_feature 1..22: note = chemically synthesized
  source 1..22: mol_type = other DNA
gctggactggtatttgtgtctg

SEQ ID NO: 54479 - DNA, 22 bp, synthetic construct
  misc_feature 1..22: note = chemically synthesized
  source 1..22: mol_type = other DNA
ctggactggtatttgtgtctga

SEQ ID NO: 54480 - DNA, 22 bp, synthetic construct
  misc_feature 1..22: note = chemically synthesized
  source 1..22: mol_type = other DNA
gactggtatttgtgtctgaggc

SEQ ID NO: 54481 - DNA, 22 bp, synthetic construct
  misc_feature 1..22: note = chemically synthesized
  source 1..22: mol_type = other DNA
gtatttgtgtctgaggctggcc

SEQ ID NO: 54482 - DNA, 22 bp, synthetic construct
  misc_feature 1..22: note = chemically synthesized
  source 1..22: mol_type = other DNA
gtgtctgaggctggccctacgg

SEQ ID NO: 54483 - DNA, 22 bp, synthetic construct
  misc_feature 1..22: note = chemically synthesized
  source 1..22: mol_type = other DNA
tgtctgaggctggccctacggt

SEQ ID NO: 54484 - DNA, 22 bp, synthetic construct
  misc_feature 1..22: note = chemically synthesized
  source 1..22: mol_type = other DNA
aggctggccctacggtgagtgt

SEQ ID NO: 54485 - DNA, 22 bp, synthetic construct
  misc_feature 1..22: note = chemically synthesized
  source 1..22: mol_type = other DNA
gccctacggtgagtgtttctgt

SEQ ID NO: 54486 - DNA, 22 bp, synthetic construct
  misc_feature 1..22: note = chemically synthesized
  source 1..22: mol_type = other DNA
cggtgagtgtttctgtgacatc

SEQ ID NO: 54487 - DNA, 22 bp, synthetic construct
  misc_feature 1..22: note = chemically synthesized
  source 1..22: mol_type = other DNA
ctgtgacatcccattcctacat

SEQ ID NO: 54488 - DNA, 22 bp, synthetic construct
  misc_feature 1..22: note = chemically synthesized
  source 1..22: mol_type = other DNA
tgtgacatcccattcctacatt

SEQ ID NO: 54489 - DNA, 22 bp, synthetic construct
  misc_feature 1..22: note = chemically synthesized
  source 1..22: mol_type = other DNA
tgacatcccattcctacattta

SEQ ID NO: 54490 - DNA, 22 bp, synthetic construct
  misc_feature 1..22: note = chemically synthesized
  source 1..22: mol_type = other DNA
ctacatttaagattcacgctaa

SEQ ID NO: 54491 - DNA, 22 bp, synthetic construct
  misc_feature 1..22: note = chemically synthesized
  source 1..22: mol_type = other DNA
catttaagattcacgctaaatg

SEQ ID NO: 54492 - DNA, 22 bp, synthetic construct
  misc_feature 1..22: note = chemically synthesized
  source 1..22: mol_type = other DNA
aagattcacgctaaatgaagta

SEQ ID NO: 54493 - DNA, 22 bp, synthetic construct
  misc_feature 1..22: note = chemically synthesized
  source 1..22: mol_type = other DNA
agattcacgctaaatgaagtag

SEQ ID NO: 54494 - DNA, 22 bp, synthetic construct
  misc_feature 1..22: note = chemically synthesized
  source 1..22: mol_type = other DNA
acgctaaatgaagtagaagtga

SEQ ID NO: 54495 - DNA, 22 bp, synthetic construct
  misc_feature 1..22: note = chemically synthesized
  source 1..22: mol_type = other DNA
aatgaagtagaagtgactcctt

SEQ ID NO: 54496 - DNA, 22 bp, synthetic construct
  misc_feature 1..22: note = chemically synthesized
  source 1..22: mol_type = other DNA
cttccagctttgccaaccagct

SEQ ID NO: 54497 - DNA, 22 bp, synthetic construct
  misc_feature 1..22: note = chemically synthesized
  source 1..22: mol_type = other DNA
ccagctttgccaaccagctttt

SEQ ID NO: 54498 - DNA, 22 bp, synthetic construct
  misc_feature 1..22: note = chemically synthesized
  source 1..22: mol_type = other DNA
cagctttgccaaccagctttta

SEQ ID NO: 54499 - DNA, 22 bp, synthetic construct
  misc_feature 1..22: note = chemically synthesized
  source 1..22: mol_type = other DNA
tgccaaccagcttttattacta

SEQ ID NO: 54500 - DNA, 22 bp, synthetic construct
  misc_feature 1..22: note = chemically synthesized
  source 1..22: mol_type = other DNA
gccaaccagcttttattactag

SEQ ID NO: 54501 - DNA, 22 bp, synthetic construct
  misc_feature 1..22: note = chemically synthesized
  source 1..22: mol_type = other DNA
ccaaccagcttttattactagg

SEQ ID NO: 54502 - DNA, 22 bp, synthetic construct
  misc_feature 1..22: note = chemically synthesized
  source 1..22: mol_type = other DNA
ttattactagggcaagggtacc

SEQ ID NO: 54503 - DNA, 22 bp, synthetic construct
  misc_feature 1..22: note = chemically synthesized
  source 1..22: mol_type = other DNA
tattactagggcaagggtaccc

SEQ ID NO: 54504 - DNA, 22 bp, synthetic construct
  misc_feature 1..22: note = chemically synthesized
  source 1..22: mol_type = other DNA
attactagggcaagggtaccca

SEQ ID NO: 54505 - DNA, 22 bp, synthetic construct
  misc_feature 1..22: note = chemically synthesized
  source 1..22: mol_type = other DNA
ttactagggcaagggtacccag

SEQ ID NO: 54506 - DNA, 22 bp, synthetic construct
  misc_feature 1..22: note = chemically synthesized
  source 1..22: mol_type = other DNA
ctagggcaagggtacccagcat

SEQ ID NO: 54507 - DNA, 22 bp, synthetic construct
  misc_feature 1..22: note = chemically synthesized
  source 1..22: mol_type = other DNA
gggcaagggtacccagcatcta

SEQ ID NO: 54508 - DNA, 22 bp, synthetic construct
  misc_feature 1..22: note = chemically synthesized
  source 1..22: mol_type = other DNA
tttttaatataattaattcaaa

SEQ ID NO: 54509 - DNA, 22 bp, synthetic construct
  misc_feature 1..22: note = chemically synthesized
  source 1..22: mol_type = other DNA
ttaatataattaattcaaactt

SEQ ID NO: 54510 - DNA, 22 bp, synthetic construct
  misc_feature 1..22: note = chemically synthesized
  source 1..22: mol_type = other DNA
taatataattaattcaaacttc

SEQ ID NO: 54511 - DNA, 22 bp, synthetic construct
  misc_feature 1..22: note = chemically synthesized
  source 1..22: mol_type = other DNA
aatataattaattcaaacttca

SEQ ID NO: 54512 - DNA, 22 bp, synthetic construct
  misc_feature 1..22: note = chemically synthesized
  source 1..22: mol_type = other DNA
atataattaattcaaacttcaa

SEQ ID NO: 54513 - DNA, 22 bp, synthetic construct
  misc_feature 1..22: note = chemically synthesized
  source 1..22: mol_type = other DNA
attcaaacttcaaaaagaatga

SEQ ID NO: 54514 - DNA, 22 bp, synthetic construct
  misc_feature 1..22: note = chemically synthesized
  source 1..22: mol_type = other DNA
aaacttcaaaaagaatgaagtt

SEQ ID NO: 54515 - DNA, 22 bp, synthetic construct
  misc_feature 1..22: note = chemically synthesized
  source 1..22: mol_type = other DNA
caaaaagaatgaagttccactg

SEQ ID NO: 54516 - DNA, 22 bp, synthetic construct
  misc_feature 1..22: note = chemically synthesized
  source 1..22: mol_type = other DNA
aaaaagaatgaagttccactga

SEQ ID NO: 54517 - DNA, 22 bp, synthetic construct
  misc_feature 1..22: note = chemically synthesized
  source 1..22: mol_type = other DNA
cactgagcttactgagctggga

SEQ ID NO: 54518 - DNA, 22 bp, synthetic construct
  misc_feature 1..22: note = chemically synthesized
  source 1..22: mol_type = other DNA
agcttactgagctgggacttga

SEQ ID NO: 54519 - DNA, 22 bp, synthetic construct
  misc_feature 1..22: note = chemically synthesized
  source 1..22: mol_type = other DNA
actgagctgggacttgaactct

SEQ ID NO: 54520 - DNA, 22 bp, synthetic construct
  misc_feature 1..22: note = chemically synthesized
  source 1..22: mol_type = other DNA
ctgagctgggacttgaactctg

SEQ ID NO: 54521 - DNA, 22 bp, synthetic construct
  misc_feature 1..22: note = chemically synthesized
  source 1..22: mol_type = other DNA
agctgggacttgaactctgagc

SEQ ID NO: 54522 - DNA, 22 bp, synthetic construct
  misc_feature 1..22: note = chemically synthesized
  source 1..22: mol_type = other DNA
ggacttgaactctgagcattct

SEQ ID NO: 54523 - DNA, 22 bp, synthetic construct
  misc_feature 1..22: note = chemically synthesized
  source 1..22: mol_type = other DNA
gaactctgagcattctacctca

SEQ ID NO: 54524 - DNA, 22 bp, synthetic construct
  misc_feature 1..22: note = chemically synthesized
  source 1..22: mol_type = other DNA
aactctgagcattctacctcat

SEQ ID NO: 54525 - DNA, 22 bp, synthetic construct
  misc_feature 1..22: note = chemically synthesized
  source 1..22: mol_type = other DNA
tgagcattctacctcattgctt

SEQ ID NO: 54526 - DNA, 22 bp, synthetic construct
  misc_feature 1..22: note = chemically synthesized
  source 1..22: mol_type = other DNA
agcattctacctcattgctttg

SEQ ID NO: 54527 - DNA, 22 bp, synthetic construct
  misc_feature 1..22: note = chemically synthesized
  source 1..22: mol_type = other DNA
tacctcattgctttggtgcatt

SEQ ID NO: 54528 - DNA, 22 bp, synthetic construct
  misc_feature 1..22: note = chemically synthesized
  source 1..22: mol_type = other DNA
cctcattgctttggtgcattag

SEQ ID NO: 54529 - DNA, 22 bp, synthetic construct
  misc_feature 1..22: note = chemically synthesized
  source 1..22: mol_type = other DNA
attgctttggtgcattaggttt

SEQ ID NO: 54530 - DNA, 22 bp, synthetic construct
  misc_feature 1..22: note = chemically synthesized
  source 1..22: mol_type = other DNA
ctttggtgcattaggtttgtaa

SEQ ID NO: 54531 - DNA, 22 bp, synthetic construct
  misc_feature 1..22: note = chemically synthesized
  source 1..22: mol_type = other DNA
tggtgcattaggtttgtaatat

SEQ ID NO: 54532 - DNA, 22 bp, synthetic construct
  misc_feature 1..22: note = chemically synthesized
  source 1..22: mol_type = other DNA
ggtgcattaggtttgtaatatc

SEQ ID NO: 54533 - DNA, 22 bp, synthetic construct
  misc_feature 1..22: note = chemically synthesized
  source 1..22: mol_type = other DNA
gtgcattaggtttgtaatatct

SEQ ID NO: 54534 - DNA, 22 bp, synthetic construct
  misc_feature 1..22: note = chemically synthesized
  source 1..22: mol_type = other DNA
ggtttgtaatatctggtacctc

SEQ ID NO: 54535 - DNA, 22 bp, synthetic construct
  misc_feature 1..22: note = chemically synthesized
  source 1..22: mol_type = other DNA
gtaatatctggtacctctgttt

SEQ ID NO: 54536 - DNA, 22 bp, synthetic construct
  misc_feature 1..22: note = chemically synthesized
  source 1..22: mol_type = other DNA
taatatctggtacctctgtttc

SEQ ID NO: 54537 - DNA, 22 bp, synthetic construct
  misc_feature 1..22: note = chemically synthesized
  source 1..22: mol_type = other DNA
gtacctctgtttcctcagatag

SEQ ID NO: 54538 - DNA, 22 bp, synthetic construct
  misc_feature 1..22: note = chemically synthesized
  source 1..22: mol_type = other DNA
tgtttcctcagatagatgatag

SEQ ID NO: 54539 - DNA, 22 bp, synthetic construct
  misc_feature 1..22: note = chemically synthesized
  source 1..22: mol_type = other DNA
tttcctcagatagatgatagaa

SEQ ID NO: 54540 - DNA, 22 bp, synthetic construct
  misc_feature 1..22: note = chemically synthesized
  source 1..22: mol_type = other DNA
cctcagatagatgatagaaata

SEQ ID NO: 54541 - DNA, 22 bp, synthetic construct
  misc_feature 1..22: note = chemically synthesized
  source 1..22: mol_type = other DNA
ctcagatagatgatagaaataa

SEQ ID NO: 54542 - DNA, 22 bp, synthetic construct
  misc_feature 1..22: note = chemically synthesized
  source 1..22: mol_type = other DNA
agatagatgatagaaataaaga

SEQ ID NO: 54543 - DNA, 22 bp, synthetic construct
  misc_feature 1..22: note = chemically synthesized
  source 1..22: mol_type = other DNA
aggaagctgttaatactgaatt

SEQ ID NO: 54544 - DNA, 22 bp, synthetic construct
  misc_feature 1..22: note = chemically synthesized
  source 1..22: mol_type = other DNA
ttaatactgaattttcagaaaa

SEQ ID NO: 54545 - DNA, 22 bp, synthetic construct
  misc_feature 1..22: note = chemically synthesized
  source 1..22: mol_type = other DNA
atactgaattttcagaaaagta

SEQ ID NO: 54546 - DNA, 22 bp, synthetic construct
  misc_feature 1..22: note = chemically synthesized
  source 1..22: mol_type = other DNA
aattttcagaaaagtatccctc

SEQ ID NO: 54547 - DNA, 22 bp, synthetic construct
  misc_feature 1..22: note = chemically synthesized
  source 1..22: mol_type = other DNA
tcagaaaagtatccctccataa

SEQ ID NO: 54548 - DNA, 22 bp, synthetic construct
  misc_feature 1..22: note = chemically synthesized
  source 1..22: mol_type = other DNA
cagaaaagtatccctccataaa

SEQ ID NO: 54549 - DNA, 22 bp, synthetic construct
  misc_feature 1..22: note = chemically synthesized
  source 1..22: mol_type = other DNA
agaaaagtatccctccataaaa

SEQ ID NO: 54550 - DNA, 22 bp, synthetic construct
  misc_feature 1..22: note = chemically synthesized
  source 1..22: mol_type = other DNA
cataaaatgtatttgggggaca

SEQ ID NO: 54551 - DNA, 22 bp, synthetic construct
  misc_feature 1..22: note = chemically synthesized
  source 1..22: mol_type = other DNA
gggggacaaactgcaggagatt

SEQ ID NO: 54552 - DNA, 22 bp, synthetic construct
  misc_feature 1..22: note = chemically synthesized
  source 1..22: mol_type = other DNA
ggggacaaactgcaggagatta

SEQ ID NO: 54553 - DNA, 22 bp, synthetic construct
  misc_feature 1..22: note = chemically synthesized
  source 1..22: mol_type = other DNA
caggagattatattctggccct

SEQ ID NO: 54554 - DNA, 22 bp, synthetic construct
  misc_feature 1..22: note = chemically synthesized
  source 1..22: mol_type = other DNA
tattctggccctatagttattc

SEQ ID NO: 54555 - DNA, 22 bp, synthetic construct
  misc_feature 1..22: note = chemically synthesized
  source 1..22: mol_type = other DNA
tggccctatagttattcaaaac

SEQ ID NO: 54556 - DNA, 22 bp, synthetic construct
  misc_feature 1..22: note = chemically synthesized
  source 1..22: mol_type = other DNA
gccctatagttattcaaaacgt

SEQ ID NO: 54557 - DNA, 22 bp, synthetic construct
  misc_feature 1..22: note = chemically synthesized
  source 1..22: mol_type = other DNA
tagttattcaaaacgtatttat

SEQ ID NO: 54558 - DNA, 22 bp, synthetic construct
  misc_feature 1..22: note = chemically synthesized
  source 1..22: mol_type = other DNA
ttcaaaacgtatttattgatta

SEQ ID NO: 54559 - DNA, 22 bp, synthetic construct
  misc_feature 1..22: note = chemically synthesized
  source 1..22: mol_type = other DNA
aaaacgtatttattgattaatc

SEQ ID NO: 54560 - DNA, 22 bp, synthetic construct
  misc_feature 1..22: note = chemically synthesized
  source 1..22: mol_type = other DNA
attgattaatctttaaaaggct

SEQ ID NO: 54561 - DNA, 22 bp, synthetic construct
  misc_feature 1..22: note = chemically synthesized
  source 1..22: mol_type = other DNA
ttgattaatctttaaaaggctt

SEQ ID NO: 54562 - DNA, 22 bp, synthetic construct
  misc_feature 1..22: note = chemically synthesized
  source 1..22: mol_type = other DNA
attaatctttaaaaggcttagt

SEQ ID NO: 54563 - DNA, 22 bp, synthetic construct
  misc_feature 1..22: note = chemically synthesized
  source 1..22: mol_type = other DNA
atctttaaaaggcttagtgaac

SEQ ID NO: 54564 - DNA, 22 bp, synthetic construct
  misc_feature 1..22: note = chemically synthesized
  source 1..22: mol_type = other DNA
taaaaggcttagtgaacaatat

SEQ ID NO: 54565 - DNA, 22 bp, synthetic construct
  misc_feature 1..22: note = chemically synthesized
  source 1..22: mol_type = other DNA
aaaaggcttagtgaacaatatt

SEQ ID NO: 54566 - DNA, 22 bp, synthetic construct
  misc_feature 1..22: note = chemically synthesized
  source 1..22: mol_type = other DNA
aaaggcttagtgaacaatattc

SEQ ID NO: 54567 - DNA, 22 bp, synthetic construct
  misc_feature 1..22: note = chemically synthesized
  source 1..22: mol_type = other DNA
agtgaacaatattctagtcaga

SEQ ID NO: 54568 - DNA, 22 bp, synthetic construct
  misc_feature 1..22: note = chemically synthesized
  source 1..22: mol_type = other DNA
gtgaacaatattctagtcagat

SEQ ID NO: 54569 - DNA, 22 bp, synthetic construct
  misc_feature 1..22: note = chemically synthesized
  source 1..22: mol_type = other DNA
tagtcagatatctaattcttaa

SEQ ID NO: 54570 - DNA, 22 bp, synthetic construct
  misc_feature 1..22: note = chemically synthesized
  source 1..22: mol_type = other DNA
gtcagatatctaattcttaaat

SEQ ID NO: 54571 - DNA, 22 bp, synthetic construct
  misc_feature 1..22: note = chemically synthesized
  source 1..22: mol_type = other DNA
attcttaaatcctctagaagaa

SEQ ID NO: 54572 - DNA, 22 bp, synthetic construct
  misc_feature 1..22: note = chemically synthesized
  source 1..22: mol_type = other DNA
ttaaatcctctagaagaattaa

SEQ ID NO: 54573 - DNA, 22 bp, synthetic construct
  misc_feature 1..22: note = chemically synthesized
  source 1..22: mol_type = other DNA
aaatcctctagaagaattaact

SEQ ID NO: 54574 - DNA, 22 bp, synthetic construct
  misc_feature 1..22: note = chemically synthesized
  source 1..22: mol_type = other DNA
aatcctctagaagaattaacta

SEQ ID NO: 54575 - DNA, 22 bp, synthetic construct
  misc_feature 1..22: note = chemically synthesized
  source 1..22: mol_type = other DNA
tagaagaattaactaatactat

SEQ ID NO: 54576 - DNA, 22 bp, synthetic construct
  misc_feature 1..22: note = chemically synthesized
  source 1..22: mol_type = other DNA
gaagaattaactaatactataa

SEQ ID NO: 54577 - DNA, 22 bp, synthetic construct
  misc_feature 1..22: note = chemically synthesized
  source 1..22: mol_type = other DNA
actaatactataaaatgggtct

SEQ ID NO: 54578 - DNA, 22 bp, synthetic construct
  misc_feature 1..22: note = chemically synthesized
  source 1..22: mol_type = other DNA
atactataaaatgggtctggat

SEQ ID NO: 54579 - DNA, 22 bp, synthetic construct
  misc_feature 1..22: note = chemically synthesized
  source 1..22: mol_type = other DNA
taaaatgggtctggatgtagtt

SEQ ID NO: 54580 - DNA, 22 bp, synthetic construct
  misc_feature 1..22: note = chemically synthesized
  source 1..22: mol_type = other DNA
gatgtagttctgacattatttt

SEQ ID NO: 54581 - DNA, 22 bp, synthetic construct
  misc_feature 1..22: note = chemically synthesized
  source 1..22: mol_type = other DNA
tgacattattttataacaactg

SEQ ID NO: 54582 - DNA, 22 bp, synthetic construct
  misc_feature 1..22: note = chemically synthesized
  source 1..22: mol_type = other DNA
acattattttataacaactggt

SEQ ID NO: 54583 - DNA, 22 bp, synthetic construct
  misc_feature 1..22: note = chemically synthesized
  source 1..22: mol_type = other DNA
ttttataacaactggtaagagg

SEQ ID NO: 54584 - DNA, 22 bp, synthetic construct
  misc_feature 1..22: note = chemically synthesized
  source 1..22: mol_type = other DNA
tataacaactggtaagagggag

SEQ ID NO: 54585 - DNA, 22 bp, synthetic construct
  misc_feature 1..22: note = chemically synthesized
  source 1..22: mol_type = other DNA
ataacaactggtaagagggagt

SEQ ID NO: 54586 - DNA, 22 bp, synthetic construct
  misc_feature 1..22: note = chemically synthesized
  source 1..22: mol_type = other DNA
taacaactggtaagagggagtg

SEQ ID NO: 54587 - DNA, 22 bp, synthetic construct
  misc_feature 1..22: note = chemically synthesized
  source 1..22: mol_type = other DNA
gtaagagggagtgactatagca

SEQ ID NO: 54588 - DNA, 22 bp, synthetic construct
  misc_feature 1..22: note = chemically synthesized
  source 1..22: mol_type = other DNA
tagcaacaactaaaatgatctc

SEQ ID NO: 54589 - DNA, 22 bp, synthetic construct
  misc_feature 1..22: note = chemically synthesized
  source 1..22: mol_type = other DNA
aaatgatctcaggaaaacctgt

SEQ ID NO: 54590 - DNA, 22 bp, synthetic construct
  misc_feature 1..22: note = chemically synthesized
  source 1..22: mol_type = other DNA
aggaaaacctgtttggccctat

SEQ ID NO: 54591 - DNA, 22 bp, synthetic construct
  misc_feature 1..22: note = chemically synthesized
  source 1..22: mol_type = other DNA
tttggccctatgtatggtacat

SEQ ID NO: 54592 - DNA, 22 bp, synthetic construct
  misc_feature 1..22: note = chemically synthesized
  source 1..22: mol_type = other DNA
ggccctatgtatggtacattac

SEQ ID NO: 54593 - DNA, 22 bp, synthetic construct
  misc_feature 1..22: note = chemically synthesized
  source 1..22: mol_type = other DNA
gccctatgtatggtacattaca

SEQ ID NO: 54594 - DNA, 22 bp, synthetic construct
  misc_feature 1..22: note = chemically synthesized
  source 1..22: mol_type = other DNA
tgtatggtacattacatctttt

SEQ ID NO: 54595 - DNA, 22 bp, synthetic construct
  misc_feature 1..22: note = chemically synthesized
  source 1..22: mol_type = other DNA
catcttttcagtaattccactc

SEQ ID NO: 54596 - DNA, 22 bp, synthetic construct
  misc_feature 1..22: note = chemically synthesized
  source 1..22: mol_type = other DNA
ttcagtaattccactcaaatgg

SEQ ID NO: 54597 - DNA, 22 bp, synthetic construct
  misc_feature 1..22: note = chemically synthesized
  source 1..22: mol_type = other DNA
tcagtaattccactcaaatgga

SEQ ID NO: 54598 - DNA, 22 bp, synthetic construct
  misc_feature 1..22: note = chemically synthesized
  source 1..22: mol_type = other DNA
cagtaattccactcaaatggag

SEQ ID NO: 54599 - DNA, 22 bp, synthetic construct
  misc_feature 1..22: note = chemically synthesized
  source 1..22: mol_type = other DNA
agtaattccactcaaatggaga

SEQ ID NO: 54600 - DNA, 22 bp, synthetic construct
  misc_feature 1..22: note = chemically synthesized
  source 1..22: mol_type = other DNA
cactcaaatggagacttttaac

SEQ ID NO: 54601 - DNA, 22 bp, synthetic construct
  misc_feature 1..22: note = chemically synthesized
  source 1..22: mol_type = other DNA
aaatggagacttttaacaaagc

SEQ ID NO: 54602 - DNA, 22 bp, synthetic construct
  misc_feature 1..22: note = chemically synthesized
  source 1..22: mol_type = other DNA
ttaacaaagcaactgttctcag

SEQ ID NO: 54603 - DNA, 22 bp, synthetic construct
  misc_feature 1..22: note = chemically synthesized
  source 1..22: mol_type = other DNA
taacaaagcaactgttctcagg

SEQ ID NO: 54604 - DNA, 22 bp, synthetic construct
  misc_feature 1..22: note = chemically synthesized
  source 1..22: mol_type = other DNA
aacaaagcaactgttctcaggg

SEQ ID NO: 54605 - DNA, 22 bp, synthetic construct
  misc_feature 1..22: note = chemically synthesized
  source 1..22: mol_type = other DNA
acaaagcaactgttctcagggg

SEQ ID NO: 54606 - DNA, 22 bp, synthetic construct
  misc_feature 1..22: note = chemically synthesized
  source 1..22: mol_type = other DNA
ttctcaggggacctattttctc

SEQ ID NO: 54607 - DNA, 22 bp, synthetic construct
  misc_feature 1..22: note = chemically synthesized
  source 1..22: mol_type = other DNA
tcaggggacctattttctccct

SEQ ID NO: 54608 - DNA, 22 bp, synthetic construct
  misc_feature 1..22: note = chemically synthesized
  source 1..22: mol_type = other DNA
aggggacctattttctccctta

SEQ ID NO: 54609 - DNA, 22 bp, synthetic construct
  misc_feature 1..22: note = chemically synthesized
  source 1..22: mol_type = other DNA
ttttctcccttaaaattcatta

SEQ ID NO: 54610 - DNA, 22 bp, synthetic construct
  misc_feature 1..22: note = chemically synthesized
  source 1..22: mol_type = other DNA
tctcccttaaaattcattatac

SEQ ID NO: 54611 - DNA, 22 bp, synthetic construct
  misc_feature 1..22: note = chemically synthesized
  source 1..22: mol_type = other DNA
ctcccttaaaattcattataca

SEQ ID NO: 54612 - DNA, 22 bp, synthetic construct
  misc_feature 1..22: note = chemically synthesized
  source 1..22: mol_type = other DNA
tcccttaaaattcattatacac

SEQ ID NO: 54613 - DNA, 22 bp, synthetic construct
  misc_feature 1..22: note = chemically synthesized
  source 1..22: mol_type = other DNA
ccttaaaattcattatacacat

SEQ ID NO: 54614 - DNA, 22 bp, synthetic construct
  misc_feature 1..22: note = chemically synthesized
  source 1..22: mol_type = other DNA
aaaattcattatacacatccct

SEQ ID NO: 54615 - DNA, 22 bp, synthetic construct
  misc_feature 1..22: note = chemically synthesized
  source 1..22: mol_type = other DNA
aaattcattatacacatccctg

SEQ ID NO: 54616 - DNA, 22 bp, synthetic construct
  misc_feature 1..22: note = chemically synthesized
  source 1..22: mol_type = other DNA
attatacacatccctggttgat

SEQ ID NO: 54617 - DNA, 22 bp, synthetic construct
  misc_feature 1..22: note = chemically synthesized
  source 1..22: mol_type = other DNA
tacacatccctggttgatagca

SEQ ID NO: 54618 - DNA, 22 bp, synthetic construct
  misc_feature 1..22: note = chemically synthesized
  source 1..22: mol_type = other DNA
gttgatagcagtgtgtctggag

SEQ ID NO: 54619 - DNA, 22 bp, synthetic construct
  misc_feature 1..22: note = chemically synthesized
  source 1..22: mol_type = other DNA
atagcagtgtgtctggaggcag

SEQ ID NO: 54620 - DNA, 22 bp, synthetic construct
  misc_feature 1..22: note = chemically synthesized
  source 1..22: mol_type = other DNA
gaggcagaaaccattcttgctt

SEQ ID NO: 54621 - DNA, 22 bp, synthetic construct
  misc_feature 1..22: note = chemically synthesized
  source 1..22: mol_type = other DNA
ttgctttggaaacaattacgtc

SEQ ID NO: 54622 - DNA, 22 bp, synthetic construct
  misc_feature 1..22: note = chemically synthesized
  source 1..22: mol_type = other DNA
gctttggaaacaattacgtctg

SEQ ID NO: 54623 - DNA, 22 bp, synthetic construct
  misc_feature 1..22: note = chemically synthesized
  source 1..22: mol_type = other DNA
ctttggaaacaattacgtctgt

SEQ ID NO: 54624 - DNA, 22 bp, synthetic construct
  misc_feature 1..22: note = chemically synthesized
  source 1..22: mol_type = other DNA
tggaaacaattacgtctgtgtt

SEQ ID NO: 54625 - DNA, 22 bp, synthetic construct
  misc_feature 1..22: note = chemically synthesized
  source 1..22: mol_type = other DNA
ggaaacaattacgtctgtgtta

SEQ ID NO: 54626 - DNA, 22 bp, synthetic construct
  misc_feature 1..22: note = chemically synthesized
  source 1..22: mol_type = other DNA
gaaacaattacgtctgtgttat

SEQ ID NO: 54627 - DNA, 22 bp, synthetic construct
  misc_feature 1..22: note = chemically synthesized
  source 1..22: mol_type = other DNA
cgtctgtgttatactgagtagg

SEQ ID NO: 54628 - DNA, 22 bp, synthetic construct
  misc_feature 1..22: note = chemically synthesized
  source 1..22: mol_type = other DNA
tgttatactgagtagggaagct

SEQ ID NO: 54629 - DNA, 22 bp, synthetic construct
  misc_feature 1..22: note = chemically synthesized
  source 1..22: mol_type = other DNA
tactgagtagggaagctcatta

SEQ ID NO: 54630 - DNA, 22 bp, synthetic construct
  misc_feature 1..22: note = chemically synthesized
  source 1..22: mol_type = other DNA
agtagggaagctcattaattgt

SEQ ID NO: 54631 - DNA, 22 bp, synthetic construct
  misc_feature 1..22: note = chemically synthesized
  source 1..22: mol_type = other DNA
attaattgtcgacacttacgtt

SEQ ID NO: 54632 - DNA, 22 bp, synthetic construct
  misc_feature 1..22: note = chemically synthesized
  source 1..22: mol_type = other DNA
attgtcgacacttacgttcctg

SEQ ID NO: 54633 - DNA, 22 bp, synthetic construct
  misc_feature 1..22: note = chemically synthesized
  source 1..22: mol_type = other DNA
tcgacacttacgttcctgataa

SEQ ID NO: 54634 - DNA, 22 bp, synthetic construct
  misc_feature 1..22: note = chemically synthesized
  source 1..22: mol_type = other DNA
acgttcctgataatgggatcag

SEQ ID NO: 54635 - DNA, 22 bp, synthetic construct
  misc_feature 1..22: note = chemically synthesized
  source 1..22: mol_type = other DNA
cgttcctgataatgggatcagt

SEQ ID NO: 54636 - DNA, 22 bp, synthetic construct
  misc_feature 1..22: note = chemically synthesized
  source 1..22: mol_type = other DNA
ctgataatgggatcagtgtgta

SEQ ID NO: 54637 - DNA, 22 bp, synthetic construct
  misc_feature 1..22: note = chemically synthesized
  source 1..22: mol_type = other DNA
ataatgggatcagtgtgtaatt

SEQ ID NO: 54638 - DNA, 22 bp, synthetic construct
  misc_feature 1..22: note = chemically synthesized
  source 1..22: mol_type = other DNA
ttgtttcgctccagatttctaa

SEQ ID NO: 54639 - DNA, 22 bp, synthetic construct
  misc_feature 1..22: note = chemically synthesized
  source 1..22: mol_type = other DNA
gtttcgctccagatttctaata

SEQ ID NO: 54640 - DNA, 22 bp, synthetic construct
  misc_feature 1..22: note = chemically synthesized
  source 1..22: mol_type = other DNA
tttcgctccagatttctaatac

SEQ ID NO: 54641 - DNA, 22 bp, synthetic construct
  misc_feature 1..22: note = chemically synthesized
  source 1..22: mol_type = other DNA
cgctccagatttctaataccac

SEQ ID NO: 54642 - DNA, 22 bp, synthetic construct
  misc_feature 1..22: note = chemically synthesized
  source 1..22: mol_type = other DNA
gctccagatttctaataccaca

SEQ ID NO: 54643 - DNA, 22 bp, synthetic construct
  misc_feature 1..22: note = chemically synthesized
  source 1..22: mol_type = other DNA
cagatttctaataccacaaaga

SEQ ID NO: 54644 - DNA, 22 bp, synthetic construct
  misc_feature 1..22: note = chemically synthesized
  source 1..22: mol_type = other DNA
ctaataccacaaagaataaatc

SEQ ID NO: 54645 - DNA, 22 bp, synthetic construct
  misc_feature 1..22: note = chemically synthesized
  source 1..22: mol_type = other DNA
taataccacaaagaataaatcc

SEQ ID NO: 54646 - DNA, 22 bp, synthetic construct
  misc_feature 1..22: note = chemically synthesized
  source 1..22: mol_type = other DNA
ataccacaaagaataaatcctt

SEQ ID NO: 54647 - DNA, 22 bp, synthetic construct
  misc_feature 1..22: note = chemically synthesized
  source 1..22: mol_type = other DNA
tcactctgatcaattttgttaa

SEQ ID NO: 54648 - DNA, 22 bp, synthetic construct
  misc_feature 1..22: note = chemically synthesized
  source 1..22: mol_type = other DNA
cactctgatcaattttgttaac

SEQ ID NO: 54649 - DNA, 22 bp, synthetic construct
  misc_feature 1..22: note = chemically synthesized
  source 1..22: mol_type = other DNA
actctgatcaattttgttaact

SEQ ID NO: 54650 - DNA, 22 bp, synthetic construct
  misc_feature 1..22: note = chemically synthesized
  source 1..22: mol_type = other DNA
tgatcaattttgttaacttctc

SEQ ID NO: 54651 - DNA, 22 bp, synthetic construct
  misc_feature 1..22: note = chemically synthesized
  source 1..22: mol_type = other DNA
atcaattttgttaacttctcac

SEQ ID NO: 54652 - DNA, 22 bp, synthetic construct
  misc_feature 1..22: note = chemically synthesized
  source 1..22: mol_type = other DNA
tgttaacttctcacgtgtcttc

SEQ ID NO: 54653 - DNA, 22 bp, synthetic construct
  misc_feature 1..22: note = chemically synthesized
  source 1..22: mol_type = other DNA
gttaacttctcacgtgtcttct

SEQ ID NO: 54654 - DNA, 22 bp, synthetic construct
  misc_feature 1..22: note = chemically synthesized
  source 1..22: mol_type = other DNA
ttaacttctcacgtgtcttctc

SEQ ID NO: 54655 - DNA, 22 bp, synthetic construct
  misc_feature 1..22: note = chemically synthesized
  source 1..22: mol_type = other DNA
acttctcacgtgtcttctctac

SEQ ID NO: 54656 - DNA, 22 bp, synthetic construct
  misc_feature 1..22: note = chemically synthesized
  source 1..22: mol_type = other DNA
ctcacgtgtcttctctacaccc

SEQ ID NO: 54657 - DNA, 22 bp, synthetic construct
  misc_feature 1..22: note = chemically synthesized
  source 1..22: mol_type = other DNA
tcacgtgtcttctctacaccca

SEQ ID NO: 54658 - DNA, 22 bp, synthetic construct
  misc_feature 1..22: note = chemically synthesized
  source 1..22: mol_type = other DNA
acgtgtcttctctacacccagg

SEQ ID NO: 54659 - DNA, 22 bp, synthetic construct
  misc_feature 1..22: note = chemically synthesized
  source 1..22: mol_type = other DNA
ctctacacccagggcaccggtg

SEQ ID NO: 54660 - DNA, 22 bp, synthetic construct
  misc_feature 1..22: note = chemically synthesized
  source 1..22: mol_type = other DNA
tctacacccagggcaccggtga

SEQ ID NO: 54661 - DNA, 22 bp, synthetic construct
  misc_feature 1..22: note = chemically synthesized
  source 1..22: mol_type = other DNA
tacacccagggcaccggtgaat

SEQ ID NO: 54662 - DNA, 22 bp, synthetic construct
  misc_feature 1..22: note = chemically synthesized
  source 1..22: mol_type = other DNA
cacccagggcaccggtgaatcc

SEQ ID NO: 54663 - DNA, 22 bp, synthetic construct
  misc_feature 1..22: note = chemically synthesized
  source 1..22: mol_type = other DNA
tgatggtcaaagttctagatgc

SEQ ID NO: 54664 - DNA, 22 bp, synthetic construct
  misc_feature 1..22: note = chemically synthesized
  source 1..22: mol_type = other DNA
atggtcaaagttctagatgctg

SEQ ID NO: 54665 - DNA, 22 bp, synthetic construct
  misc_feature 1..22: note = chemically synthesized
  source 1..22: mol_type = other DNA
tagatgctgtccgaggcagtcc

SEQ ID NO: 54666 - DNA, 22 bp, synthetic construct
  misc_feature 1..22: note = chemically synthesized
  source 1..22: mol_type = other DNA
gatgctgtccgaggcagtcctg

SEQ ID NO: 54667 - DNA, 22 bp, synthetic construct
  misc_feature 1..22: note = chemically synthesized
  source 1..22: mol_type = other DNA
tccgaggcagtcctgccatcaa

SEQ ID NO: 54668 - DNA, 22 bp, synthetic construct
  misc_feature 1..22: note = chemically synthesized
  source 1..22: mol_type = other DNA
ccatcaatgtggccgtgcatgt

SEQ ID NO: 54669 - DNA, 22 bp, synthetic construct
  misc_feature 1..22: note = chemically synthesized
  source 1..22: mol_type = other DNA
agaaaggctgctgatgacacct

SEQ ID NO: 54670 - DNA, 22 bp, synthetic construct
  misc_feature 1..22: note = chemically synthesized
  source 1..22: mol_type = other DNA
ctgatgacacctgggagccatt

SEQ ID NO: 54671 - DNA, 22 bp, synthetic construct
  misc_feature 1..22: note = chemically synthesized
  source 1..22: mol_type = other DNA
atgacacctgggagccatttgc

SEQ ID NO: 54672 - DNA, 22 bp, synthetic construct
  misc_feature 1..22: note = chemically synthesized
  source 1..22: mol_type = other DNA
ccaggtgtcatcagcagccttt

SEQ ID NO: 54673 - DNA, 22 bp, synthetic construct
  misc_feature 1..22: note = chemically synthesized
  source 1..22: mol_type = other DNA
tctgaacacatgcacggccaca

SEQ ID NO: 54674 - DNA, 22 bp, synthetic construct
  misc_feature 1..22: note = chemically synthesized
  source 1..22: mol_type = other DNA
ctgaacacatgcacggccacat

SEQ ID NO: 54675 - DNA, 22 bp, synthetic construct
  misc_feature 1..22: note = chemically synthesized
  source 1..22: mol_type = other DNA
tgaacacatgcacggccacatt

SEQ ID NO: 54676 - DNA, 22 bp, synthetic construct
  misc_feature 1..22: note = chemically synthesized
  source 1..22: mol_type = other DNA
aacacatgcacggccacattga

SEQ ID NO: 54677 - DNA, 22 bp, synthetic construct
  misc_feature 1..22: note = chemically synthesized
  source 1..22: mol_type = other DNA
atggcaggactgcctcggacag

SEQ ID NO: 54678 - DNA, 22 bp, synthetic construct
  misc_feature 1..22: note = chemically synthesized
  source 1..22: mol_type = other DNA
cctcggacagcatctagaactt

SEQ ID NO: 54679 - DNA, 22 bp, synthetic construct
  misc_feature 1..22: note = chemically synthesized
  source 1..22: mol_type = other DNA
ggacagcatctagaactttgac

SEQ ID NO: 54680 - DNA, 22 bp, synthetic construct
  misc_feature 1..22: note = chemically synthesized
  source 1..22: mol_type = other DNA
gaactttgaccatcagaggaca

SEQ ID NO: 54681 - DNA, 22 bp, synthetic construct
  misc_feature 1..22: note = chemically synthesized
  source 1..22: mol_type = other DNA
tgaccatcagaggacacttgga

SEQ ID NO: 54682 - DNA, 22 bp, synthetic construct
  misc_feature 1..22: note = chemically synthesized
  source 1..22: mol_type = other DNA
gaccatcagaggacacttggat

SEQ ID NO: 54683 - DNA, 22 bp, synthetic construct
  misc_feature 1..22: note = chemically synthesized
  source 1..22: mol_type = other DNA
accatcagaggacacttggatt

SEQ ID NO: 54684 - DNA, 22 bp, synthetic construct
  misc_feature 1..22: note = chemically synthesized
  source 1..22: mol_type = other DNA
ggattcaccggtgccctgggtg

SEQ ID NO: 54685 - DNA, 22 bp, synthetic construct
  misc_feature 1..22: note = chemically synthesized
  source 1..22: mol_type = other DNA
gattcaccggtgccctgggtgt

SEQ ID NO: 54686 - DNA, 22 bp, synthetic construct
  misc_feature 1..22: note = chemically synthesized
  source 1..22: mol_type = other DNA
accggtgccctgggtgtagaga

SEQ ID NO: 54687 - DNA, 22 bp, synthetic construct
  misc_feature 1..22: note = chemically synthesized
  source 1..22: mol_type = other DNA
ggtgtagagaagacacgtgaga

SEQ ID NO: 54688 - DNA, 22 bp, synthetic construct
  misc_feature 1..22: note = chemically synthesized
  source 1..22: mol_type = other DNA
acaaaattgatcagagtgaaag

SEQ ID NO: 54689 - DNA, 22 bp, synthetic construct
  misc_feature 1..22: note = chemically synthesized
  source 1..22: mol_type = other DNA
atcagagtgaaaggatttattc

SEQ ID NO: 54690 - DNA, 22 bp, synthetic construct
  misc_feature 1..22: note = chemically synthesized
  source 1..22: mol_type = other DNA
attctttgtggtattagaaatc

SEQ ID NO: 54691 - DNA, 22 bp, synthetic construct
  misc_feature 1..22: note = chemically synthesized
  source 1..22: mol_type = other DNA
ttctttgtggtattagaaatct

SEQ ID NO: 54692 - DNA, 22 bp, synthetic construct
  misc_feature 1..22: note = chemically synthesized
  source 1..22: mol_type = other DNA
tttgtggtattagaaatctgga

SEQ ID NO: 54693 - DNA, 22 bp, synthetic construct
  misc_feature 1..22: note = chemically synthesized
  source 1..22: mol_type = other DNA
tgtggtattagaaatctggagc

SEQ ID NO: 54694 - DNA, 22 bp, synthetic construct
  misc_feature 1..22: note = chemically synthesized
  source 1..22: mol_type = other DNA
gtggtattagaaatctggagcg

SEQ ID NO: 54695 - DNA, 22 bp, synthetic construct
  misc_feature 1..22: note = chemically synthesized
  source 1..22: mol_type = other DNA
tggtattagaaatctggagcga

SEQ ID NO: 54696 - DNA, 22 bp, synthetic construct
  misc_feature 1..22: note = chemically synthesized
  source 1..22: mol_type = other DNA
gaaatctggagcgaaacaagaa

SEQ ID NO: 54697 - DNA, 22 bp, synthetic construct
  misc_feature 1..22: note = chemically synthesized
  source 1..22: mol_type = other DNA
gagcgaaacaagaattacacac

SEQ ID NO: 54698 - DNA, 22 bp, synthetic construct
  misc_feature 1..22: note = chemically synthesized
  source 1..22: mol_type = other DNA
cacactgatcccattatcagga

SEQ ID NO: 54699 - DNA, 22 bp, synthetic construct
  misc_feature 1..22: note = chemically synthesized
  source 1..22: mol_type = other DNA
atcccattatcaggaacgtaag

SEQ ID NO: 54700 - DNA, 22 bp, synthetic construct
  misc_feature 1..22: note = chemically synthesized
  source 1..22: mol_type = other DNA
tcaggaacgtaagtgtcgacaa

SEQ ID NO: 54701 - DNA, 22 bp, synthetic construct
  misc_feature 1..22: note = chemically synthesized
  source 1..22: mol_type = other DNA
atgagcttccctactcagtata

SEQ ID NO: 54702 - DNA, 22 bp, synthetic construct
  misc_feature 1..22: note = chemically synthesized
  source 1..22: mol_type = other DNA
ccctactcagtataacacagac

SEQ ID NO: 54703 - DNA, 22 bp, synthetic construct
  misc_feature 1..22: note = chemically synthesized
  source 1..22: mol_type = other DNA
cctactcagtataacacagacg

SEQ ID NO: 54704 - DNA, 22 bp, synthetic construct
  misc_feature 1..22: note = chemically synthesized
  source 1..22: mol_type = other DNA
ctcagtataacacagacgtaat

SEQ ID NO: 54705 - DNA, 22 bp, synthetic construct
  misc_feature 1..22: note = chemically synthesized
  source 1..22: mol_type = other DNA
agtataacacagacgtaattgt

SEQ ID NO: 54706 - DNA, 22 bp, synthetic construct
  misc_feature 1..22: note = chemically synthesized
  source 1..22: mol_type = other DNA
tttccaaagcaagaatggtttc

SEQ ID NO: 54707 - DNA, 22 bp, synthetic construct
  misc_feature 1..22: note = chemically synthesized
  source 1..22: mol_type = other DNA
ccaaagcaagaatggtttctgc

SEQ ID NO: 54708 - DNA, 22 bp, synthetic construct
  misc_feature 1..22: note = chemically synthesized
  source 1..22: mol_type = other DNA
caaagcaagaatggtttctgcc

SEQ ID NO: 54709 - DNA, 22 bp, synthetic construct
  misc_feature 1..22: note = chemically synthesized
  source 1..22: mol_type = other DNA
ctgcctccagacacactgctat

SEQ ID NO: 54710 - DNA, 22 bp, synthetic construct
  misc_feature 1..22: note = chemically synthesized
  source 1..22: mol_type = other DNA
tgcctccagacacactgctatc

SEQ ID NO: 54711 - DNA, 22 bp, synthetic construct
  misc_feature 1..22: note = chemically synthesized
  source 1..22: mol_type = other DNA
cctccagacacactgctatcaa

SEQ ID NO: 54712 - DNA, 22 bp, synthetic construct
  misc_feature 1..22: note = chemically synthesized
  source 1..22: mol_type = other DNA
cagacacactgctatcaaccag

SEQ ID NO: 54713 - DNA, 22 bp, synthetic construct
  misc_feature 1..22: note = chemically synthesized
  source 1..22: mol_type = other DNA
ctatcaaccagggatgtgtata

SEQ ID NO: 54714 - DNA, 22 bp, synthetic construct
  misc_feature 1..22: note = chemically synthesized
  source 1..22: mol_type = other DNA
tcaaccagggatgtgtataatg

SEQ ID NO: 54715 - DNA, 22 bp, synthetic construct
  misc_feature 1..22: note = chemically synthesized
  source 1..22: mol_type = other DNA
taagggagaaaataggtcccct

SEQ ID NO: 54716 - DNA, 22 bp, synthetic construct
  misc_feature 1..22: note = chemically synthesized
  source 1..22: mol_type = other DNA
aagggagaaaataggtcccctg

SEQ ID NO: 54717 - DNA, 22 bp, synthetic construct
  misc_feature 1..22: note = chemically synthesized
  source 1..22: mol_type = other DNA
agggagaaaataggtcccctga

SEQ ID NO: 54718 - DNA, 22 bp, synthetic construct
  misc_feature 1..22: note = chemically synthesized
  source 1..22: mol_type = other DNA
agaacagttgctttgttaaaag

SEQ ID NO: 54719 - DNA, 22 bp, synthetic construct
  misc_feature 1..22: note = chemically synthesized
  source 1..22: mol_type = other DNA
ctttgttaaaagtctccatttg

SEQ ID NO: 54720 - DNA, 22 bp, synthetic construct
  misc_feature 1..22: note = chemically synthesized
  source 1..22: mol_type = other DNA
tgttaaaagtctccatttgagt

SEQ ID NO: 54721 - DNA, 22 bp, synthetic construct
  misc_feature 1..22: note = chemically synthesized
  source 1..22: mol_type = other DNA
gttaaaagtctccatttgagtg

SEQ ID NO: 54722 - DNA, 22 bp, synthetic construct
  misc_feature 1..22: note = chemically synthesized
  source 1..22: mol_type = other DNA
ttaaaagtctccatttgagtgg

SEQ ID NO: 54723 - DNA, 22 bp, synthetic construct
  misc_feature 1..22: note = chemically synthesized
  source 1..22: mol_type = other DNA
aaagtctccatttgagtggaat

SEQ ID NO: 54724 - DNA, 22 bp, synthetic construct
  misc_feature 1..22: note = chemically synthesized
  source 1..22: mol_type = other DNA
catttgagtggaattactgaaa

SEQ ID NO: 54725 - DNA, 22 bp, synthetic construct
  misc_feature 1..22: note = chemically synthesized
  source 1..22: mol_type = other DNA
gagtggaattactgaaaagatg

SEQ ID NO: 54726 - DNA, 22 bp, synthetic construct
  misc_feature 1..22: note = chemically synthesized
  source 1..22: mol_type = other DNA
agtggaattactgaaaagatgt

SEQ ID NO: 54727 - DNA, 22 bp, synthetic construct
  misc_feature 1..22: note = chemically synthesized
  source 1..22: mol_type = other DNA
ctgaaaagatgtaatgtaccat

SEQ ID NO: 54728 - DNA, 22 bp, synthetic construct
  misc_feature 1..22: note = chemically synthesized
  source 1..22: mol_type = other DNA
aaaagatgtaatgtaccataca

SEQ ID NO: 54729 - DNA, 22 bp, synthetic construct
  misc_feature 1..22: note = chemically synthesized
  source 1..22: mol_type = other DNA
tcctgagatcattttagttgtt

SEQ ID NO: 54730 - DNA, 22 bp, synthetic construct
  misc_feature 1..22: note = chemically synthesized
  source 1..22: mol_type = other DNA
cctgagatcattttagttgttg

SEQ ID NO: 54731 - DNA, 22 bp, synthetic construct
  misc_feature 1..22: note = chemically synthesized
  source 1..22: mol_type = other DNA
ctgagatcattttagttgttgc

SEQ ID NO: 54732 - DNA, 22 bp, synthetic construct
  misc_feature 1..22: note = chemically synthesized
  source 1..22: mol_type = other DNA
agatcattttagttgttgctat

SEQ ID NO: 54733 - DNA, 22 bp, synthetic construct
  misc_feature 1..22: note = chemically synthesized
  source 1..22: mol_type = other DNA
tagttgttgctatagtcactcc

SEQ ID NO: 54734 - DNA, 22 bp, synthetic construct
  misc_feature 1..22: note = chemically synthesized
  source 1..22: mol_type = other DNA
agttgttgctatagtcactccc

SEQ ID NO: 54735 - DNA, 22 bp, synthetic construct
  misc_feature 1..22: note = chemically synthesized
  source 1..22: mol_type = other DNA
gttgttgctatagtcactccct

SEQ ID NO: 54736 - DNA, 22 bp, synthetic construct
  misc_feature 1..22: note = chemically synthesized
  source 1..22: mol_type = other DNA
ttgctatagtcactccctctta

SEQ ID NO: 54737 - DNA, 22 bp, synthetic construct
  misc_feature 1..22: note = chemically synthesized
  source 1..22: mol_type = other DNA
ctatagtcactccctcttacca

SEQ ID NO: 54738 - DNA, 22 bp, synthetic construct
  misc_feature 1..22: note = chemically synthesized
  source 1..22: mol_type = other DNA
tagtcactccctcttaccagtt

SEQ ID NO: 54739 - DNA, 22 bp, synthetic construct
  misc_feature 1..22: note = chemically synthesized
  source 1..22: mol_type = other DNA
cctcttaccagttgttataaaa

SEQ ID NO: 54740 - DNA, 22 bp, synthetic construct
  misc_feature 1..22: note = chemically synthesized
  source 1..22: mol_type = other DNA
ttaccagttgttataaaataat

SEQ ID NO: 54741 - DNA, 22 bp, synthetic construct
  misc_feature 1..22: note = chemically synthesized
  source 1..22: mol_type = other DNA
accagttgttataaaataatgt

SEQ ID NO: 54742 - DNA, 22 bp, synthetic construct
  misc_feature 1..22: note = chemically synthesized
  source 1..22: mol_type = other DNA
ccagttgttataaaataatgtc

SEQ ID NO: 54743 - DNA, 22 bp, synthetic construct
  misc_feature 1..22: note = chemically synthesized
  source 1..22: mol_type = other DNA
ttataaaataatgtcagaacta

SEQ ID NO: 54744 - DNA, 22 bp, synthetic construct
  misc_feature 1..22: note = chemically synthesized
  source 1..22: mol_type = other DNA
taaaataatgtcagaactacat

SEQ ID NO: 54745 - DNA, 22 bp, synthetic construct
  misc_feature 1..22: note = chemically synthesized
  source 1..22: mol_type = other DNA
catccagacccattttatagta

SEQ ID NO: 54746 - DNA, 22 bp, synthetic construct
  misc_feature 1..22: note = chemically synthesized
  source 1..22: mol_type = other DNA
tatagtattagttaattcttct

SEQ ID NO: 54747 - DNA, 22 bp, synthetic construct
  misc_feature 1..22: note = chemically synthesized
  source 1..22: mol_type = other DNA
atagtattagttaattcttcta

SEQ ID NO: 54748 - DNA, 22 bp, synthetic construct
  misc_feature 1..22: note = chemically synthesized
  source 1..22: mol_type = other DNA
tagtattagttaattcttctag

SEQ ID NO: 54749 - DNA, 22 bp, synthetic construct
  misc_feature 1..22: note = chemically synthesized
  source 1..22: mol_type = other DNA
gttaattcttctagaggattta

SEQ ID NO: 54750 - DNA, 22 bp, synthetic construct
  misc_feature 1..22: note = chemically synthesized
  source 1..22: mol_type = other DNA
attcttctagaggatttaagaa

SEQ ID NO: 54751 - DNA, 22 bp, synthetic construct
  misc_feature 1..22: note = chemically synthesized
  source 1..22: mol_type = other DNA
ttctagaggatttaagaattag

SEQ ID NO: 54752 - DNA, 22 bp, synthetic construct
  misc_feature 1..22: note = chemically synthesized
  source 1..22: mol_type = other DNA
ctagaggatttaagaattagat

SEQ ID NO: 54753 - DNA, 22 bp, synthetic construct
  misc_feature 1..22: note = chemically synthesized
  source 1..22: mol_type = other DNA
tagaggatttaagaattagata

SEQ ID NO: 54754 - DNA, 22 bp, synthetic construct
  misc_feature 1..22: note = chemically synthesized
  source 1..22: mol_type = other DNA
gaggatttaagaattagatatc

SEQ ID NO: 54755 - DNA, 22 bp, synthetic construct
  misc_feature 1..22: note = chemically synthesized
  source 1..22: mol_type = other DNA
aagaattagatatctgactaga

SEQ ID NO: 54756 - DNA, 22 bp, synthetic construct
  misc_feature 1..22: note = chemically synthesized
  source 1..22: mol_type = other DNA
agaattagatatctgactagaa

SEQ ID NO: 54757 - DNA, 22 bp, synthetic construct
  misc_feature 1..22: note = chemically synthesized
  source 1..22: mol_type = other DNA
gatatctgactagaatattgtt

SEQ ID NO: 54758 - DNA, 22 bp, synthetic construct
  misc_feature 1..22: note = chemically synthesized
  source 1..22: mol_type = other DNA
actagaatattgttcactaagc

SEQ ID NO: 54759 - DNA, 22 bp, synthetic construct
  misc_feature 1..22: note = chemically synthesized
  source 1..22: mol_type = other DNA
gaatattgttcactaagccttt

SEQ ID NO: 54760 - DNA, 22 bp, synthetic construct
  misc_feature 1..22: note = chemically synthesized
  source 1..22: mol_type = other DNA
ttcactaagccttttaaagatt

SEQ ID NO: 54761 - DNA, 22 bp, synthetic construct
  misc_feature 1..22: note = chemically synthesized
  source 1..22: mol_type = other DNA
actaagccttttaaagattaat

SEQ ID NO: 54762 - DNA, 22 bp, synthetic construct
  misc_feature 1..22: note = chemically synthesized
  source 1..22: mol_type = other DNA
agccttttaaagattaatcaat

SEQ ID NO: 54763 - DNA, 22 bp, synthetic construct
  misc_feature 1..22: note = chemically synthesized
  source 1..22: mol_type = other DNA
ttaaagattaatcaataaatac

SEQ ID NO: 54764 - DNA, 22 bp, synthetic construct
  misc_feature 1..22: note = chemically synthesized
  source 1..22: mol_type = other DNA
taaagattaatcaataaatacg

SEQ ID NO: 54765 - DNA, 22 bp, synthetic construct
  misc_feature 1..22: note = chemically synthesized
  source 1..22: mol_type = other DNA
aaagattaatcaataaatacgt

SEQ ID NO: 54766 - DNA, 22 bp, synthetic construct
  misc_feature 1..22: note = chemically synthesized
  source 1..22: mol_type = other DNA
aagattaatcaataaatacgtt

SEQ ID NO: 54767 - DNA, 22 bp, synthetic construct
  misc_feature 1..22: note = chemically synthesized
  source 1..22: mol_type = other DNA
atcaataaatacgttttgaata

SEQ ID NO: 54768 - DNA, 22 bp, synthetic construct
  misc_feature 1..22: note = chemically synthesized
  source 1..22: mol_type = other DNA
tgaataactatagggccagaat

SEQ ID NO: 54769 - DNA, 22 bp, synthetic construct
  misc_feature 1..22: note = chemically synthesized
  source 1..22: mol_type = other DNA
gaataactatagggccagaata

SEQ ID NO: 54770 - DNA, 22 bp, synthetic construct
  misc_feature 1..22: note = chemically synthesized
  source 1..22: mol_type = other DNA
aataactatagggccagaatat

SEQ ID NO: 54771 - DNA, 22 bp, synthetic construct
  misc_feature 1..22: note = chemically synthesized
  source 1..22: mol_type = other DNA
tagggccagaatataatctcct

SEQ ID NO: 54772 - DNA, 22 bp, synthetic construct
  misc_feature 1..22: note = chemically synthesized
  source 1..22: mol_type = other DNA
ctgcagtttgtcccccaaatac

SEQ ID NO: 54773 - DNA, 22 bp, synthetic construct
  misc_feature 1..22: note = chemically synthesized
  source 1..22: mol_type = other DNA
cagtttgtcccccaaatacatt

SEQ ID NO: 54774 - DNA, 22 bp, synthetic construct
  misc_feature 1..22: note = chemically synthesized
  source 1..22: mol_type = other DNA
gtcccccaaatacattttatgg

SEQ ID NO: 54775 - DNA, 22 bp, synthetic construct
  misc_feature 1..22: note = chemically synthesized
  source 1..22: mol_type = other DNA
tcccccaaatacattttatgga

SEQ ID NO: 54776 - DNA, 22 bp, synthetic construct
  misc_feature 1..22: note = chemically synthesized
  source 1..22: mol_type = other DNA
tatggagggatacttttctgaa

SEQ ID NO: 54777 - DNA, 22 bp, synthetic construct
  misc_feature 1..22: note = chemically synthesized
  source 1..22: mol_type = other DNA
atggagggatacttttctgaaa

SEQ ID NO: 54778 - DNA, 22 bp, synthetic construct
  misc_feature 1..22: note = chemically synthesized
  source 1..22: mol_type = other DNA
tggagggatacttttctgaaaa

SEQ ID NO: 54779 - DNA, 22 bp, synthetic construct
  misc_feature 1..22: note = chemically synthesized
  source 1..22: mol_type = other DNA
ttctgaaaattcagtattaaca

SEQ ID NO: 54780 - DNA, 22 bp, synthetic construct
  misc_feature 1..22: note = chemically synthesized
  source 1..22: mol_type = other DNA
tctgaaaattcagtattaacag

SEQ ID NO: 54781 - DNA, 22 bp, synthetic construct
  misc_feature 1..22: note = chemically synthesized
  source 1..22: mol_type = other DNA
ctgaaaattcagtattaacagc

SEQ ID NO: 54782 - DNA, 22 bp, synthetic construct
  misc_feature 1..22: note = chemically synthesized
  source 1..22: mol_type = other DNA
tgaaaattcagtattaacagct

SEQ ID NO: 54783 - DNA, 22 bp, synthetic construct
  misc_feature 1..22: note = chemically synthesized
  source 1..22: mol_type = other DNA
aaaattcagtattaacagcttc

SEQ ID NO: 54784 - DNA, 22 bp, synthetic construct
  misc_feature 1..22: note = chemically synthesized
  source 1..22: mol_type = other DNA
agtattaacagcttccttaata

SEQ ID NO: 54785 - DNA, 22 bp, synthetic construct
  misc_feature 1..22: note = chemically synthesized
  source 1..22: mol_type = other DNA
acagcttccttaatatcatatc

SEQ ID NO: 54786 - DNA, 22 bp, synthetic construct
  misc_feature 1..22: note = chemically synthesized
  source 1..22: mol_type = other DNA
ccttaatatcatatctttattt

SEQ ID NO: 54787 - DNA, 22 bp, synthetic construct
  misc_feature 1..22: note = chemically synthesized
  source 1..22: mol_type = other DNA
cttaatatcatatctttatttc

SEQ ID NO: 54788 - DNA, 22 bp, synthetic construct
  misc_feature 1..22: note = chemically synthesized
  source 1..22: mol_type = other DNA
aatatcatatctttatttctat

SEQ ID NO: 54789 - DNA, 22 bp, synthetic construct
  misc_feature 1..22: note = chemically synthesized
  source 1..22: mol_type = other DNA
atatcatatctttatttctatc

SEQ ID NO: 54790 - DNA, 22 bp, synthetic construct
  misc_feature 1..22: note = chemically synthesized
  source 1..22: mol_type = other DNA
tatttctatcatctatctgagg

SEQ ID NO: 54791 - DNA, 22 bp, synthetic construct
  misc_feature 1..22: note = chemically synthesized
  source 1..22: mol_type = other DNA
atttctatcatctatctgagga

SEQ ID NO: 54792 - DNA, 22 bp, synthetic construct
  misc_feature 1..22: note = chemically synthesized
  source 1..22: mol_type = other DNA
tttctatcatctatctgaggaa

SEQ ID NO: 54793 - DNA, 22 bp, synthetic construct
  misc_feature 1..22: note = chemically synthesized
  source 1..22: mol_type = other DNA
ctatcatctatctgaggaaaca

SEQ ID NO: 54794 - DNA, 22 bp, synthetic construct
  misc_feature 1..22: note = chemically synthesized
  source 1..22: mol_type = other DNA
tatcatctatctgaggaaacag

SEQ ID NO: 54795 - DNA, 22 bp, synthetic construct
  misc_feature 1..22: note = chemically synthesized
  source 1..22: mol_type = other DNA
tcatctatctgaggaaacagag

SEQ ID NO: 54796 - DNA, 22 bp, synthetic construct
  misc_feature 1..22: note = chemically synthesized
  source 1..22: mol_type = other DNA
tctgaggaaacagaggtaccag

SEQ ID NO: 54797 - DNA, 22 bp, synthetic construct
  misc_feature 1..22: note = chemically synthesized
  source 1..22: mol_type = other DNA
aggaaacagaggtaccagatat

SEQ ID NO: 54798 - DNA, 22 bp, synthetic construct
  misc_feature 1..22: note = chemically synthesized
  source 1..22: mol_type = other DNA
caaacctaatgcaccaaagcaa

SEQ ID NO: 54799 - DNA, 22 bp, synthetic construct
  misc_feature 1..22: note = chemically synthesized
  source 1..22: mol_type = other DNA
atgcaccaaagcaatgaggtag

SEQ ID NO: 54800 - DNA, 22 bp, synthetic construct
  misc_feature 1..22: note = chemically synthesized
  source 1..22: mol_type = other DNA
agagttcaagtcccagctcagt

SEQ ID NO: 54801 - DNA, 22 bp, synthetic construct
  misc_feature 1..22: note = chemically synthesized
  source 1..22: mol_type = other DNA
aagtcccagctcagtaagctca

SEQ ID NO: 54802 - DNA, 22 bp, synthetic construct
  misc_feature 1..22: note = chemically synthesized
  source 1..22: mol_type = other DNA
agtaagctcagtggaacttcat

SEQ ID NO: 54803 - DNA, 22 bp, synthetic construct
  misc_feature 1..22: note = chemically synthesized
  source 1..22: mol_type = other DNA
agtggaacttcattctttttga

SEQ ID NO: 54804 - DNA, 22 bp, synthetic construct
  misc_feature 1..22: note = chemically synthesized
  source 1..22: mol_type = other DNA
cattctttttgaagtttgaatt

SEQ ID NO: 54805 - DNA, 22 bp, synthetic construct
  misc_feature 1..22: note = chemically synthesized
  source 1..22: mol_type = other DNA
attctttttgaagtttgaatta

SEQ ID NO: 54806 - DNA, 22 bp, synthetic construct
  misc_feature 1..22: note = chemically synthesized
  source 1..22: mol_type = other DNA
tttttgaagtttgaattaatta

SEQ ID NO: 54807 - DNA, 22 bp, synthetic construct
  misc_feature 1..22: note = chemically synthesized
  source 1..22: mol_type = other DNA
tttgaagtttgaattaattata

SEQ ID NO: 54808 - DNA, 22 bp, synthetic construct
  misc_feature 1..22: note = chemically synthesized
  source 1..22: mol_type = other DNA
ttgaagtttgaattaattatat

SEQ ID NO: 54809 - DNA, 22 bp, synthetic construct
  misc_feature 1..22: note = chemically synthesized
  source 1..22: mol_type = other DNA
tgaagtttgaattaattatatt

SEQ ID NO: 54810 - DNA, 22 bp, synthetic construct
  misc_feature 1..22: note = chemically synthesized
  source 1..22: mol_type = other DNA
gaagtttgaattaattatatta

SEQ ID NO: 54811 - DNA, 22 bp, synthetic construct
  misc_feature 1..22: note = chemically synthesized
  source 1..22: mol_type = other DNA
aagtttgaattaattatattaa

SEQ ID NO: 54812 - DNA, 22 bp, synthetic construct
  misc_feature 1..22: note = chemically synthesized
  source 1..22: mol_type = other DNA
gaattaattatattaaaaatag

SEQ ID NO: 54813 - DNA, 22 bp, synthetic construct
  misc_feature 1..22: note = chemically synthesized
  source 1..22: mol_type = other DNA
aattaattatattaaaaataga

SEQ ID NO: 54814 - DNA, 22 bp, synthetic construct
  misc_feature 1..22: note = chemically synthesized
  source 1..22: mol_type = other DNA
attatattaaaaatagatgctg

SEQ ID NO: 54815 - DNA, 22 bp, synthetic construct
  misc_feature 1..22: note = chemically synthesized
  source 1..22: mol_type = other DNA
tattaaaaatagatgctgggta

SEQ ID NO: 54816 - DNA, 22 bp, synthetic construct
  misc_feature 1..22: note = chemically synthesized
  source 1..22: mol_type = other DNA
aaaatagatgctgggtaccctt

SEQ ID NO: 54817 - DNA, 22 bp, synthetic construct
  misc_feature 1..22: note = chemically synthesized
  source 1..22: mol_type = other DNA
ggtacccttgccctagtaataa

SEQ ID NO: 54818 - DNA, 22 bp, synthetic construct
  misc_feature 1..22: note = chemically synthesized
  source 1..22: mol_type = other DNA
gccctagtaataaaagctggtt

SEQ ID NO: 54819 - DNA, 22 bp, synthetic construct
  misc_feature 1..22: note = chemically synthesized
  source 1..22: mol_type = other DNA
ccctagtaataaaagctggttg

SEQ ID NO: 54820 - DNA, 22 bp, synthetic construct
  misc_feature 1..22: note = chemically synthesized
  source 1..22: mol_type = other DNA
gtaataaaagctggttggcaaa

SEQ ID NO: 54821 - DNA, 22 bp, synthetic construct
  misc_feature 1..22: note = chemically synthesized
  source 1..22: mol_type = other DNA
gttggcaaagctggaaggagtc

SEQ ID NO: 54822 - DNA, 22 bp, synthetic construct
  misc_feature 1..22: note = chemically synthesized
  source 1..22: mol_type = other DNA
gcaaagctggaaggagtcactt

SEQ ID NO: 54823 - DNA, 22 bp, synthetic construct
  misc_feature 1..22: note = chemically synthesized
  source 1..22: mol_type = other DNA
gaaggagtcacttctacttcat

SEQ ID NO: 54824 - DNA, 22 bp, synthetic construct
  misc_feature 1..22: note = chemically synthesized
  source 1..22: mol_type = other DNA
ctacttcatttagcgtgaatct

SEQ ID NO: 54825 - DNA, 22 bp, synthetic construct
  misc_feature 1..22: note = chemically synthesized
  source 1..22: mol_type = other DNA
tacttcatttagcgtgaatctt

SEQ ID NO: 54826 - DNA, 22 bp, synthetic construct
  misc_feature 1..22: note = chemically synthesized
  source 1..22: mol_type = other DNA
cttcatttagcgtgaatcttaa

SEQ ID NO: 54827 - DNA, 22 bp, synthetic construct
  misc_feature 1..22: note = chemically synthesized
  source 1..22: mol_type = other DNA
catttagcgtgaatcttaaatg

SEQ ID NO: 54828 - DNA, 22 bp, synthetic construct
  misc_feature 1..22: note = chemically synthesized
  source 1..22: mol_type = other DNA
atttagcgtgaatcttaaatgt

SEQ ID NO: 54829 - DNA, 22 bp, synthetic construct
  misc_feature 1..22: note = chemically synthesized
  source 1..22: mol_type = other DNA
agcgtgaatcttaaatgtagga

SEQ ID NO: 54830 - DNA, 22 bp, synthetic construct
  misc_feature 1..22: note = chemically synthesized
  source 1..22: mol_type = other DNA
gcgtgaatcttaaatgtaggaa

SEQ ID NO: 54831 - DNA, 22 bp, synthetic construct
  misc_feature 1..22: note = chemically synthesized
  source 1..22: mol_type = other DNA
aaatgtaggaatgggatgtcac

SEQ ID NO: 54832 - DNA, 22 bp, synthetic construct
  misc_feature 1..22: note = chemically synthesized
  source 1..22: mol_type = other DNA
aatgtaggaatgggatgtcaca

SEQ ID NO: 54833 - DNA, 22 bp, synthetic construct
  misc_feature 1..22: note = chemically synthesized
  source 1..22: mol_type = other DNA
accgtagggccagcctcagaca

SEQ ID NO: 54834 - DNA, 22 bp, synthetic construct
  misc_feature 1..22: note = chemically synthesized
  source 1..22: mol_type = other DNA
agacacaaataccagtccagca

SEQ ID NO: 54835 - DNA, 22 bp, synthetic construct
  misc_feature 1..22: note = chemically synthesized
  source 1..22: mol_type = other DNA
ccaagaatgagtggacttctgt

SEQ ID NO: 54836 - DNA, 22 bp, synthetic construct
  misc_feature 1..22: note = chemically synthesized
  source 1..22: mol_type = other DNA
ctgtgatggctgctcccagcct

SEQ ID NO: 54837 - DNA, 22 bp, synthetic construct
  misc_feature 1..22: note = chemically synthesized
  source 1..22: mol_type = other DNA
tgtgatggctgctcccagcctg

SEQ ID NO: 54838 - DNA, 22 bp, synthetic construct
  misc_feature 1..22: note = chemically synthesized
  source 1..22: mol_type = other DNA
tgatggctgctcccagcctggg

SEQ ID NO: 54839 - DNA, 22 bp, synthetic construct
  misc_feature 1..22: note = chemically synthesized
  source 1..22: mol_type = other DNA
ctcccagcctggggcttttata

SEQ ID NO: 54840 - DNA, 22 bp, synthetic construct
  misc_feature 1..22: note = chemically synthesized
  source 1..22: mol_type = other DNA
ccagcctggggcttttatactc

SEQ ID NO: 54841 - DNA, 22 bp, synthetic construct
  misc_feature 1..22: note = chemically synthesized
  source 1..22: mol_type = other DNA
gggcttttatactcacttctcc

SEQ ID NO: 54842 - DNA, 22 bp, synthetic construct
  misc_feature 1..22: note = chemically synthesized
  source 1..22: mol_type = other DNA
ttatactcacttctcctgagct

SEQ ID NO: 54843 - DNA, 22 bp, synthetic construct
  misc_feature 1..22: note = chemically synthesized
  source 1..22: mol_type = other DNA
tatactcacttctcctgagcta

SEQ ID NO: 54844 - DNA, 22 bp, synthetic construct
  misc_feature 1..22: note = chemically synthesized
  source 1..22: mol_type = other DNA
atactcacttctcctgagctag

SEQ ID NO: 54845 - DNA, 22 bp, synthetic construct
  misc_feature 1..22: note = chemically synthesized
  source 1..22: mol_type = other DNA
tactcacttctcctgagctagg

SEQ ID NO: 54846 - DNA, 22 bp, synthetic construct
  misc_feature 1..22: note = chemically synthesized
  source 1..22: mol_type = other DNA
acttctcctgagctaggctgct

SEQ ID NO: 54847 - DNA, 22 bp, synthetic construct
  misc_feature 1..22: note = chemically synthesized
  source 1..22: mol_type = other DNA
ctcctgagctaggctgcttatc

SEQ ID NO: 54848 - DNA, 22 bp, synthetic construct
  misc_feature 1..22: note = chemically synthesized
  source 1..22: mol_type = other DNA
tcctgagctaggctgcttatcc

SEQ ID NO: 54849 - DNA, 22 bp, synthetic construct
  misc_feature 1..22: note = chemically synthesized
  source 1..22: mol_type = other DNA
ctgagctaggctgcttatccct

SEQ ID NO: 54850 - DNA, 22 bp, synthetic construct
  misc_feature 1..22: note = chemically synthesized
  source 1..22: mol_type = other DNA
agctaggctgcttatccctgcc

SEQ ID NO: 54851 - DNA, 22 bp, synthetic construct
  misc_feature 1..22: note = chemically synthesized
  source 1..22: mol_type = other DNA
ggctgcttatccctgccaatct

SEQ ID NO: 54852 - DNA, 22 bp, synthetic construct
  misc_feature 1..22: note = chemically synthesized
  source 1..22: mol_type = other DNA
cttatccctgccaatctgactg

SEQ ID NO: 54853 - DNA, 22 bp, synthetic construct
  misc_feature 1..22: note = chemically synthesized
  source 1..22: mol_type = other DNA
atccctgccaatctgactgcaa

SEQ ID NO: 54854 - DNA, 22 bp, synthetic construct
  misc_feature 1..22: note = chemically synthesized
  source 1..22: mol_type = other DNA
tccctgccaatctgactgcaaa

SEQ ID NO: 54855 - DNA, 22 bp, synthetic construct
  misc_feature 1..22: note = chemically synthesized
  source 1..22: mol_type = other DNA
ccaatctgactgcaaacctgct

SEQ ID NO: 54856 - DNA, 22 bp, synthetic construct
  misc_feature 1..22: note = chemically synthesized
  source 1..22: mol_type = other DNA
actgcaaacctgctgattctga

SEQ ID NO: 54857 - DNA, 22 bp, synthetic construct
  misc_feature 1..22: note = chemically synthesized
  source 1..22: mol_type = other DNA
caaacctgctgattctgattat

SEQ ID NO: 54858 - DNA, 22 bp, synthetic construct
  misc_feature 1..22: note = chemically synthesized
  source 1..22: mol_type = other DNA
ctgattctgattattgacttag

SEQ ID NO: 54859 - DNA, 22 bp, synthetic construct
  misc_feature 1..22: note = chemically synthesized
  source 1..22: mol_type = other DNA
attctgattattgacttagtca

SEQ ID NO: 54860 - DNA, 20 bp, synthetic construct
  misc_feature 1..20: note = chemically synthesized
  source 1..20: mol_type = other DNA
gcacttcaattgtggaaaat

SEQ ID NO: 54861 - DNA, 20 bp, synthetic construct
  misc_feature 1..20: note = chemically synthesized
  source 1..20: mol_type = other DNA
gaaaatcagctttgacttct

SEQ ID NO: 54862 - DNA, 20 bp, synthetic construct
  misc_feature 1..20: note = chemically synthesized
  source 1..20: mol_type = other DNA
aaatcagctttgacttctga

SEQ ID NO: 54863 - DNA, 20 bp, synthetic construct
  misc_feature 1..20: note = chemically synthesized
  source 1..20: mol_type = other DNA
cttctgagagcaaatgcccc

SEQ ID NO: 54864 - DNA, 20 bp, synthetic construct
  misc_feature 1..20: note = chemically synthesized
  source 1..20: mol_type = other DNA
ctgagagcaaatgcccctgg

SEQ ID NO: 54865 - DNA, 20 bp, synthetic construct
  misc_feature 1..20: note = chemically synthesized
  source 1..20: mol_type = other DNA
caaatgcccctggaagctgt

SEQ ID NO: 54866 - DNA, 20 bp, synthetic construct
  misc_feature 1..20: note = chemically synthesized
  source 1..20: mol_type = other DNA
ccctggaagctgttggccaa

SEQ ID NO: 54867 - DNA, 20 bp, synthetic construct
  misc_feature 1..20: note = chemically synthesized
  source 1..20: mol_type = other DNA
agctgttggccaacagtgcg

SEQ ID NO: 54868 - DNA, 20 bp, synthetic construct
  misc_feature 1..20: note = chemically synthesized
  source 1..20: mol_type = other DNA
gctgttggccaacagtgcgt

SEQ ID NO: 54869 - DNA, 20 bp, synthetic construct
  misc_feature 1..20: note = chemically synthesized
  source 1..20: mol_type = other DNA
ctgttggccaacagtgcgtg

SEQ ID NO: 54870 - DNA, 20 bp, synthetic construct
  misc_feature 1..20: note = chemically synthesized
  source 1..20: mol_type = other DNA
ttggccaacagtgcgtgggg

SEQ ID NO: 54871 - DNA, 20 bp, synthetic construct
  misc_feature 1..20: note = chemically synthesized
  source 1..20: mol_type = other DNA
ggccaacagtgcgtggggtg

SEQ ID NO: 54872 - DNA, 20 bp, synthetic construct
  misc_feature 1..20: note = chemically synthesized
  source 1..20: mol_type = other DNA
gccaacagtgcgtggggtgg

SEQ ID NO: 54873 - DNA, 20 bp, synthetic construct
  misc_feature 1..20: note = chemically synthesized
  source 1..20: mol_type = other DNA
ggtggaggccgtccccttgc

SEQ ID NO: 54874 - DNA, 20 bp, synthetic construct
  misc_feature 1..20: note = chemically synthesized
  source 1..20: mol_type = other DNA
ggccgtccccttgctggctt

SEQ ID NO: 54875 - DNA, 20 bp, synthetic construct
  misc_feature 1..20: note = chemically synthesized
  source 1..20: mol_type = other DNA
ttgctggcttgagcccctat

SEQ ID NO: 54876 - DNA, 20 bp, synthetic construct
  misc_feature 1..20: note = chemically synthesized
  source 1..20: mol_type = other DNA
tgagtctctcctgcgtgact

SEQ ID NO: 54877 - DNA, 20 bp, synthetic construct
  misc_feature 1..20: note = chemically synthesized
  source 1..20: mol_type = other DNA
taccgttccttgctcaccac

SEQ ID NO: 54878 - DNA, 20 bp, synthetic construct
  misc_feature 1..20: note = chemically synthesized
  source 1..20: mol_type = other DNA
tccttgctcaccaccggatc

SEQ ID NO: 54879 - DNA, 20 bp, synthetic construct
  misc_feature 1..20: note = chemically synthesized
  source 1..20: mol_type = other DNA
ccttgctcaccaccggatct

SEQ ID NO: 54880 - DNA, 20 bp, synthetic construct
  misc_feature 1..20: note = chemically synthesized
  source 1..20: mol_type = other DNA
gatctgggcgtatttctgca

SEQ ID NO: 54881 - DNA, 20 bp, synthetic construct
  misc_feature 1..20: note = chemically synthesized
  source 1..20: mol_type = other DNA
atttctgcatggcctgtgct

SEQ ID NO: 54882 - DNA, 20 bp, synthetic construct
  misc_feature 1..20: note = chemically synthesized
  source 1..20: mol_type = other DNA
tgtgctgagcatcttgtaac

SEQ ID NO: 54883 - DNA, 20 bp, synthetic construct
  misc_feature 1..20: note = chemically synthesized
  source 1..20: mol_type = other DNA
ttgtaactagaactttctaa

SEQ ID NO: 54884 - DNA, 20 bp, synthetic construct
  misc_feature 1..20: note = chemically synthesized
  source 1..20: mol_type = other DNA
tgtaactagaactttctaat

SEQ ID NO: 54885 - DNA, 20 bp, synthetic construct
  misc_feature 1..20: note = chemically synthesized
  source 1..20: mol_type = other DNA
gtaactagaactttctaatg

SEQ ID NO: 54886 - DNA, 20 bp, synthetic construct
  misc_feature 1..20: note = chemically synthesized
  source 1..20: mol_type = other DNA
tttctaatggggtttccttg

SEQ ID NO: 54887 - DNA, 20 bp, synthetic construct
  misc_feature 1..20: note = chemically synthesized
  source 1..20: mol_type = other DNA
ttctaatggggtttccttgt

SEQ ID NO: 54888 - DNA, 20 bp, synthetic construct
  misc_feature 1..20: note = chemically synthesized
  source 1..20: mol_type = other DNA
ctaatggggtttccttgtgg

SEQ ID NO: 54889 - DNA, 20 bp, synthetic construct
  misc_feature 1..20: note = chemically synthesized
  source 1..20: mol_type = other DNA
tttccttgtgggagttcctt

SEQ ID NO: 54890 - DNA, 20 bp, synthetic construct
  misc_feature 1..20: note = chemically synthesized
  source 1..20: mol_type = other DNA
gggagttcctttagccttcc

SEQ ID NO: 54891 - DNA, 20 bp, synthetic construct
  misc_feature 1..20: note = chemically synthesized
  source 1..20: mol_type = other DNA
ttagccttcccggtgttttt

SEQ ID NO: 54892 - DNA, 20 bp, synthetic construct
  misc_feature 1..20: note = chemically synthesized
  source 1..20: mol_type = other DNA
tcccggtgtttttcagatct

SEQ ID NO: 54893 - DNA, 20 bp, synthetic construct
  misc_feature 1..20: note = chemically synthesized
  source 1..20: mol_type = other DNA
tcagatcttagtcacccttc

SEQ ID NO: 54894 - DNA, 20 bp, synthetic construct
  misc_feature 1..20: note = chemically synthesized
  source 1..20: mol_type = other DNA
cagatcttagtcacccttcc

SEQ ID NO: 54895 - DNA, 20 bp, synthetic construct
  misc_feature 1..20: note = chemically synthesized
  source 1..20: mol_type = other DNA
gtcacccttccaggcttgcg

SEQ ID NO: 54896 - DNA, 20 bp, synthetic construct
  misc_feature 1..20: note = chemically synthesized
  source 1..20: mol_type = other DNA
acccttccaggcttgcgtag

SEQ ID NO: 54897 - DNA, 20 bp, synthetic construct
  misc_feature 1..20: note = chemically synthesized
  source 1..20: mol_type = other DNA
cccttccaggcttgcgtagt

SEQ ID NO: 54898 - DNA, 20 bp, synthetic construct
  misc_feature 1..20: note = chemically synthesized
  source 1..20: mol_type = other DNA
ccaggcttgcgtagtaggtg

SEQ ID NO: 54899 - DNA, 20 bp, synthetic construct
  misc_feature 1..20: note = chemically synthesized
  source 1..20: mol_type = other DNA
ttgatgcatttcatgaattc

SEQ ID NO: 54900 - DNA, 20 bp, synthetic construct
  misc_feature 1..20: note = chemically synthesized
  source 1..20: mol_type = other DNA
ttcatgaattctggttgttt

SEQ ID NO: 54901 - DNA, 20 bp, synthetic construct
  misc_feature 1..20: note = chemically synthesized
  source 1..20: mol_type = other DNA
tgaattctggttgtttcagt

SEQ ID NO: 54902 - DNA, 20 bp, synthetic construct
  misc_feature 1..20: note = chemically synthesized
  source 1..20: mol_type = other DNA
gaattctggttgtttcagtc

SEQ ID NO: 54903 - DNA, 20 bp, synthetic construct
  misc_feature 1..20: note = chemically synthesized
  source 1..20: mol_type = other DNA
tctggttgtttcagtcagga

SEQ ID NO: 54904 - DNA, 20 bp, synthetic construct
  misc_feature 1..20: note = chemically synthesized
  source 1..20: mol_type = other DNA
ctggttgtttcagtcaggat

SEQ ID NO: 54905 - DNA, 20 bp, synthetic construct
  misc_feature 1..20: note = chemically synthesized
  source 1..20: mol_type = other DNA
ttgtttcagtcaggatgggc

SEQ ID NO: 54906 - DNA, 20 bp, synthetic construct
  misc_feature 1..20: note = chemically synthesized
  source 1..20: mol_type = other DNA
tgtttcagtcaggatgggca

SEQ ID NO: 54907 - DNA, 20 bp, synthetic construct
  misc_feature 1..20: note = chemically synthesized
  source 1..20: mol_type = other DNA
gatgggcaaggattgtgctg

SEQ ID NO: 54908 - DNA, 20 bp, synthetic construct
  misc_feature 1..20: note = chemically synthesized
  source 1..20: mol_type = other DNA
aggattgtgctgcagcaacc

SEQ ID NO: 54909 - DNA, 20 bp, synthetic construct
  misc_feature 1..20: note = chemically synthesized
  source 1..20: mol_type = other DNA
attgtgctgcagcaaccgag

SEQ ID NO: 54910 - DNA, 20 bp, synthetic construct
  misc_feature 1..20: note = chemically synthesized
  source 1..20: mol_type = other DNA
tgcagcaaccgagaagctca

SEQ ID NO: 54911 - DNA, 20 bp, synthetic construct
  misc_feature 1..20: note = chemically synthesized
  source 1..20: mol_type = other DNA
agctcaatgcttcaaccctt

SEQ ID NO: 54912 - DNA, 20 bp, synthetic construct
  misc_feature 1..20: note = chemically synthesized
  source 1..20: mol_type = other DNA
caatgcttcaaccctttaga

SEQ ID NO: 54913 - DNA, 20 bp, synthetic construct
  misc_feature 1..20: note = chemically synthesized
  source 1..20: mol_type = other DNA
aatgcttcaaccctttagaa

SEQ ID NO: 54914 - DNA, 20 bp, synthetic construct
  misc_feature 1..20: note = chemically synthesized
  source 1..20: mol_type = other DNA
atgcttcaaccctttagaaa

SEQ ID NO: 54915 - DNA, 20 bp, synthetic construct
  misc_feature 1..20: note = chemically synthesized
  source 1..20: mol_type = other DNA
cccgctctacttgtcccatg

SEQ ID NO: 54916 - DNA, 20 bp, synthetic construct
  misc_feature 1..20: note = chemically synthesized
  source 1..20: mol_type = other DNA
ccgctctacttgtcccatgt

SEQ ID NO: 54917 - DNA, 20 bp, synthetic construct
  misc_feature 1..20: note = chemically synthesized
  source 1..20: mol_type = other DNA
cttgtcccatgtgggatgaa

SEQ ID NO: 54918 - DNA, 20 bp, synthetic construct
  misc_feature 1..20: note = chemically synthesized
  source 1..20: mol_type = other DNA
tgtcccatgtgggatgaaca

SEQ ID NO: 54919 - DNA, 20 bp, synthetic construct
  misc_feature 1..20: note = chemically synthesized
  source 1..20: mol_type = other DNA
gtcccatgtgggatgaacag

SEQ ID NO: 54920 - DNA, 20 bp, synthetic construct
  misc_feature 1..20: note = chemically synthesized
  source 1..20: mol_type = other DNA
tcccatgtgggatgaacaga

SEQ ID NO: 54921 - DNA, 20 bp, synthetic construct
  misc_feature 1..20: note = chemically synthesized
  source 1..20: mol_type = other DNA
cccatgtgggatgaacagag

SEQ ID NO: 54922 - DNA, 20 bp, synthetic construct
  misc_feature 1..20: note = chemically synthesized
  source 1..20: mol_type = other DNA
cagaggggatctacccaccc

SEQ ID NO: 54923 - DNA, 20 bp, synthetic construct
  misc_feature 1..20: note = chemically synthesized
  source 1..20: mol_type = other DNA
agaggggatctacccaccct

SEQ ID NO: 54924 - DNA, 20 bp, synthetic construct
  misc_feature 1..20: note = chemically synthesized
  source 1..20: mol_type = other DNA
gaggggatctacccaccctg

SEQ ID NO: 54925 - DNA, 20 bp, synthetic construct
  misc_feature 1..20: note = chemically synthesized
  source 1..20: mol_type = other DNA
atctacccaccctggggaca

SEQ ID NO: 54926 - DNA, 20 bp, synthetic construct
  misc_feature 1..20: note = chemically synthesized
  source 1..20: mol_type = other DNA
caccctggggacacagcaac

SEQ ID NO: 54927 - DNA, 20 bp, synthetic construct
  misc_feature 1..20: note = chemically synthesized
  source 1..20: mol_type = other DNA
gggacacagcaaccagactg

SEQ ID NO: 54928 - DNA, 20 bp, synthetic construct
  misc_feature 1..20: note = chemically synthesized
  source 1..20: mol_type = other DNA
ggacacagcaaccagactga

SEQ ID NO: 54929 - DNA, 20 bp, synthetic construct
  misc_feature 1..20: note = chemically synthesized
  source 1..20: mol_type = other DNA
acacagcaaccagactgaag

SEQ ID NO: 54930 - DNA, 20 bp, synthetic construct
  misc_feature 1..20: note = chemically synthesized
  source 1..20: mol_type = other DNA
cacagcaaccagactgaagg

SEQ ID NO: 54931 - DNA, 20 bp, synthetic construct
  misc_feature 1..20: note = chemically synthesized
  source 1..20: mol_type = other DNA
aaccagactgaaggaggttt

SEQ ID NO: 54932 - DNA, 20 bp, synthetic construct
  misc_feature 1..20: note = chemically synthesized
  source 1..20: mol_type = other DNA
agctcctcacttccccgctc

SEQ ID NO: 54933 - DNA, 20 bp, synthetic construct
  misc_feature 1..20: note = chemically synthesized
  source 1..20: mol_type = other DNA
cgctccagaccatctgactc

SEQ ID NO: 54934 - DNA, 20 bp, synthetic construct
  misc_feature 1..20: note = chemically synthesized
  source 1..20: mol_type = other DNA
tcctgatgtcacgatttcaa

SEQ ID NO: 54935 - DNA, 20 bp, synthetic construct
  misc_feature 1..20: note = chemically synthesized
  source 1..20: mol_type = other DNA
gatgtcacgatttcaacagt

SEQ ID NO: 54936 - DNA, 20 bp, synthetic construct
  misc_feature 1..20: note = chemically synthesized
  source 1..20: mol_type = other DNA
agtaagcgtgataccaatga

SEQ ID NO: 54937 - DNA, 20 bp, synthetic construct
  misc_feature 1..20: note = chemically synthesized
  source 1..20: mol_type = other DNA
gtgataccaatgacagtgat

SEQ ID NO: 54938 - DNA, 20 bp, synthetic construct
  misc_feature 1..20: note = chemically synthesized
  source 1..20: mol_type = other DNA
gaaaactcctactgccattg

SEQ ID NO: 54939 - DNA, 20 bp, synthetic construct
  misc_feature 1..20: note = chemically synthesized
  source 1..20: mol_type = other DNA
gccattgaagcgtctgctgt

SEQ ID NO: 54940 - DNA, 20 bp, synthetic construct
  misc_feature 1..20: note = chemically synthesized
  source 1..20: mol_type = other DNA
gtctgctgtcagcatcttcc

SEQ ID NO: 54941 - DNA, 20 bp, synthetic construct
  misc_feature 1..20: note = chemically synthesized
  source 1..20: mol_type = other DNA
ctgtcagcatcttccaagct

SEQ ID NO: 54942 - DNA, 20 bp, synthetic construct
  misc_feature 1..20: note = chemically synthesized
  source 1..20: mol_type = other DNA
atcttccaagcttggataac

SEQ ID NO: 54943 - DNA, 20 bp, synthetic construct
  misc_feature 1..20: note = chemically synthesized
  source 1..20: mol_type = other DNA
ccagcccttctgccctgccc

SEQ ID NO: 54944 - DNA, 20 bp, synthetic construct
  misc_feature 1..20: note = chemically synthesized
  source 1..20: mol_type = other DNA
tgcccaagtgccacccattt

SEQ ID NO: 54945 - DNA, 20 bp, synthetic construct
  misc_feature 1..20: note = chemically synthesized
  source 1..20: mol_type = other DNA
gcccaagtgccacccatttg

SEQ ID NO: 54946 - DNA, 20 bp, synthetic construct
  misc_feature 1..20: note = chemically synthesized
  source 1..20: mol_type = other DNA
agtgccacccatttgaggaa

SEQ ID NO: 54947 - DNA, 20 bp, synthetic construct
  misc_feature 1..20: note = chemically synthesized
  source 1..20: mol_type = other DNA
gtgccacccatttgaggaaa

SEQ ID NO: 54948 - DNA, 20 bp, synthetic construct
  misc_feature 1..20: note = chemically synthesized
  source 1..20: mol_type = other DNA
gaggaaaaggacaaatgaat

SEQ ID NO: 54949 - DNA, 20 bp, synthetic construct
  misc_feature 1..20: note = chemically synthesized
  source 1..20: mol_type = other DNA
ttttgtttgtttgtttctga

SEQ ID NO: 54950 - DNA, 20 bp, synthetic construct
  misc_feature 1..20: note = chemically synthesized
  source 1..20: mol_type = other DNA
ttgtttgtttgtttctgata

SEQ ID NO: 54951 - DNA, 20 bp, synthetic construct
  misc_feature 1..20: note = chemically synthesized
  source 1..20: mol_type = other DNA
gtttctgatagagctgatat

SEQ ID NO: 54952 - DNA, 20 bp, synthetic construct
  misc_feature 1..20: note = chemically synthesized
  source 1..20: mol_type = other DNA
ttctgatagagctgatattg

SEQ ID NO: 54953 - DNA, 20 bp, synthetic construct
  misc_feature 1..20: note = chemically synthesized
  source 1..20: mol_type = other DNA
tctgatagagctgatattgg

SEQ ID NO: 54954 - DNA, 20 bp, synthetic construct
  misc_feature 1..20: note = chemically synthesized
  source 1..20: mol_type = other DNA
ctgatagagctgatattgga

SEQ ID NO: 54955 - DNA, 20 bp, synthetic construct
  misc_feature 1..20: note = chemically synthesized
  source 1..20: mol_type = other DNA
tagagctgatattggagggt

SEQ ID NO: 54956 - DNA, 20 bp, synthetic construct
  misc_feature 1..20: note = chemically synthesized
  source 1..20: mol_type = other DNA
agagctgatattggagggtg

SEQ ID NO: 54957 - DNA, 20 bp, synthetic construct
  misc_feature 1..20: note = chemically synthesized
  source 1..20: mol_type = other DNA
agggtgaggcttatgcctgt

SEQ ID NO: 54958 - DNA, 20 bp, synthetic construct
  misc_feature 1..20: note = chemically synthesized
  source 1..20: mol_type = other DNA
gggtgaggcttatgcctgtt

SEQ ID NO: 54959 - DNA, 20 bp, synthetic construct
  misc_feature 1..20: note = chemically synthesized
  source 1..20: mol_type = other DNA
ggcttatgcctgttgggatt

SEQ ID NO: 54960 - DNA, 20 bp, synthetic construct
  misc_feature 1..20: note = chemically synthesized
  source 1..20: mol_type = other DNA
gcttatgcctgttgggattt

SEQ ID NO: 54961 - DNA, 20 bp, synthetic construct
  misc_feature 1..20: note = chemically synthesized
  source 1..20: mol_type = other DNA
cctgttgggatttgggcttc

SEQ ID NO: 54962 - DNA, 20 bp, synthetic construct
  misc_feature 1..20: note = chemically synthesized
  source 1..20: mol_type = other DNA
tagaaactgacctctcatgc

SEQ ID NO: 54963 - DNA, 20 bp, synthetic construct
  misc_feature 1..20: note = chemically synthesized
  source 1..20: mol_type = other DNA
aactgacctctcatgctggt

SEQ ID NO: 54964 - DNA, 20 bp, synthetic construct
  misc_feature 1..20: note = chemically synthesized
  source 1..20: mol_type = other DNA
ctggtcagcttcaccatctc

SEQ ID NO: 54965 - DNA, 20 bp, synthetic construct
  misc_feature 1..20: note = chemically synthesized
  source 1..20: mol_type = other DNA
atctccagcaatgtgcgact

SEQ ID NO: 54966 - DNA, 20 bp, synthetic construct
  misc_feature 1..20: note = chemically synthesized
  source 1..20: mol_type = other DNA
tctccagcaatgtgcgactt

SEQ ID NO: 54967 - DNA, 20 bp, synthetic construct
  misc_feature 1..20: note = chemically synthesized
  source 1..20: mol_type = other DNA
cagcaatgtgcgacttaggc

SEQ ID NO: 54968 - DNA, 20 bp, synthetic construct
  misc_feature 1..20: note = chemically synthesized
  source 1..20: mol_type = other DNA
agcaatgtgcgacttaggcc

SEQ ID NO: 54969 - DNA, 20 bp, synthetic construct
  misc_feature 1..20: note = chemically synthesized
  source 1..20: mol_type = other DNA
cttaggccaggctccacaac

SEQ ID NO: 54970 - DNA, 20 bp, synthetic construct
  misc_feature 1..20: note = chemically synthesized
  source 1..20: mol_type = other DNA
ttaggccaggctccacaact

SEQ ID NO: 54971 - DNA, 20 bp, synthetic construct
  misc_feature 1..20: note = chemically synthesized
  source 1..20: mol_type = other DNA
gccaggctccacaactaggc

SEQ ID NO: 54972 - DNA, 20 bp, synthetic construct
  misc_feature 1..20: note = chemically synthesized
  source 1..20: mol_type = other DNA
caggctccacaactaggcca

SEQ ID NO: 54973 - DNA, 20 bp, synthetic construct
  misc_feature 1..20: note = chemically synthesized
  source 1..20: mol_type = other DNA
aggctccacaactaggccag

SEQ ID NO: 54974 - DNA, 20 bp, synthetic construct
  misc_feature 1..20: note = chemically synthesized
  source 1..20: mol_type = other DNA
ctccacaactaggccagagg

SEQ ID NO: 54975 - DNA, 20 bp, synthetic construct
  misc_feature 1..20: note = chemically synthesized
  source 1..20: mol_type = other DNA
ctaggccagaggaagatttc

SEQ ID NO: 54976 - DNA, 20 bp, synthetic construct
  misc_feature 1..20: note = chemically synthesized
  source 1..20: mol_type = other DNA
taggccagaggaagatttct

SEQ ID NO: 54977 - DNA, 20 bp, synthetic construct
  misc_feature 1..20: note = chemically synthesized
  source 1..20: mol_type = other DNA
aggaagatttctgggctaca

SEQ ID NO: 54978 - DNA, 20 bp, synthetic construct
  misc_feature 1..20: note = chemically synthesized
  source 1..20: mol_type = other DNA
ggaagatttctgggctacat

SEQ ID NO: 54979 - DNA, 20 bp, synthetic construct
  misc_feature 1..20: note = chemically synthesized
  source 1..20: mol_type = other DNA
atttctgggctacatgggac

SEQ ID NO: 54980 - DNA, 20 bp, synthetic construct
  misc_feature 1..20: note = chemically synthesized
  source 1..20: mol_type = other DNA
tttctgggctacatgggaca

SEQ ID NO: 54981 - DNA, 20 bp, synthetic construct
  misc_feature 1..20: note = chemically synthesized
  source 1..20: mol_type = other DNA
gggctacatgggacaaggac

SEQ ID NO: 54982 - DNA, 20 bp, synthetic construct
  misc_feature 1..20: note = chemically synthesized
  source 1..20: mol_type = other DNA
ggctacatgggacaaggaca

SEQ ID NO: 54983 - DNA, 20 bp, synthetic construct
  misc_feature 1..20: note = chemically synthesized
  source 1..20: mol_type = other DNA
gggacaaggacaaggaactt

SEQ ID NO: 54984 - DNA, 20 bp, synthetic construct
  misc_feature 1..20: note = chemically synthesized
  source 1..20: mol_type = other DNA
gacaaggacaaggaacttta

SEQ ID NO: 54985 - DNA, 20 bp, synthetic construct
  misc_feature 1..20: note = chemically synthesized
  source 1..20: mol_type = other DNA
acaaggaactttagagaaat

SEQ ID NO: 54986 - DNA, 20 bp, synthetic construct
  misc_feature 1..20: note = chemically synthesized
  source 1..20: mol_type = other DNA
caaatttgatttacattttg

SEQ ID NO: 54987 - DNA, 20 bp, synthetic construct
  misc_feature 1..20: note = chemically synthesized
  source 1..20: mol_type = other DNA
ttgatttacattttgcagat

SEQ ID NO: 54988 - DNA, 20 bp, synthetic construct
  misc_feature 1..20: note = chemically synthesized
  source 1..20: mol_type = other DNA
tgatttacattttgcagatg

SEQ ID NO: 54989 - DNA, 20 bp, synthetic construct
  misc_feature 1..20: note = chemically synthesized
  source 1..20: mol_type = other DNA
ttttgcagatgaggaaacta

SEQ ID NO: 54990 - DNA, 20 bp, synthetic construct
  misc_feature 1..20: note = chemically synthesized
  source 1..20: mol_type = other DNA
cagatgaggaaactacggca

SEQ ID NO: 54991 - DNA, 20 bp, synthetic construct
  misc_feature 1..20: note = chemically synthesized
  source 1..20: mol_type = other DNA
gatgaggaaactacggcaca

SEQ ID NO: 54992 - DNA, 20 bp, synthetic construct
  misc_feature 1..20: note = chemically synthesized
  source 1..20: mol_type = other DNA
gaggaaactacggcacagag

SEQ ID NO: 54993 - DNA, 20 bp, synthetic construct
  misc_feature 1..20: note = chemically synthesized
  source 1..20: mol_type = other DNA
aactacggcacagagaagtt

SEQ ID NO: 54994 - DNA, 20 bp, synthetic construct
  misc_feature 1..20: note = chemically synthesized
  source 1..20: mol_type = other DNA
actacggcacagagaagttg

SEQ ID NO: 54995 - DNA, 20 bp, synthetic construct
  misc_feature 1..20: note = chemically synthesized
  source 1..20: mol_type = other DNA
agaagttgaggaacttccct

SEQ ID NO: 54996 - DNA, 20 bp, synthetic construct
  misc_feature 1..20: note = chemically synthesized
  source 1..20: mol_type = other DNA
aagttgaggaacttccctga

SEQ ID NO: 54997 - DNA, 20 bp, synthetic construct
  misc_feature 1..20: note = chemically synthesized
  source 1..20: mol_type = other DNA
ggaacttccctgagagcaca

SEQ ID NO: 54998 - DNA, 20 bp, synthetic construct
  misc_feature 1..20: note = chemically synthesized
  source 1..20: mol_type = other DNA
ccctctcccatatgatacaa

SEQ ID NO: 54999 - DNA, 20 bp, synthetic construct
  misc_feature 1..20: note = chemically synthesized
  source 1..20: mol_type = other DNA
agtgacactcctgcttttcc

SEQ ID NO: 55000 - DNA, 20 bp, synthetic construct
  misc_feature 1..20: note = chemically synthesized
  source 1..20: mol_type = other DNA
tgcttttccgagttgctgcc

SEQ ID NO: 55001 - DNA, 20 bp, synthetic construct
  misc_feature 1..20: note = chemically synthesized
  source 1..20: mol_type = other DNA
gcttttccgagttgctgcct

SEQ ID NO: 55002 - DNA, 20 bp, synthetic construct
  misc_feature 1..20: note = chemically synthesized
  source 1..20: mol_type = other DNA
gttgctgcctgggtccctgc

SEQ ID NO: 55003 - DNA, 20 bp, synthetic construct
  misc_feature 1..20: note = chemically synthesized
  source 1..20: mol_type = other DNA
ttgctgcctgggtccctgct

SEQ ID NO: 55004 - DNA, 20 bp, synthetic construct
  misc_feature 1..20: note = chemically synthesized
  source 1..20: mol_type = other DNA
tgctgcctgggtccctgctg

SEQ ID NO: 55005 - DNA, 20 bp, synthetic construct
  misc_feature 1..20: note = chemically synthesized
  source 1..20: mol_type = other DNA
ctgcctgggtccctgctggg

SEQ ID NO: 55006 - DNA, 20 bp, synthetic construct
  misc_feature 1..20: note = chemically synthesized
  source 1..20: mol_type = other DNA
tgcctgggtccctgctgggg

SEQ ID NO: 55007 - DNA, 20 bp, synthetic construct
  misc_feature 1..20: note = chemically synthesized
  source 1..20: mol_type = other DNA
gcctgggtccctgctgggga

SEQ ID NO: 55008 - DNA, 20 bp, synthetic construct
  misc_feature 1..20: note = chemically synthesized
  source 1..20: mol_type = other DNA
ctgggtccctgctggggagg

SEQ ID NO: 55009 - DNA, 20 bp, synthetic construct
  misc_feature 1..20: note = chemically synthesized
  source 1..20: mol_type = other DNA
gctggggagggagtttgcct

SEQ ID NO: 55010 - DNA, 20 bp, synthetic construct
  misc_feature 1..20: note = chemically synthesized
  source 1..20: mol_type = other DNA
gggagggagtttgcctcagt

SEQ ID NO: 55011 - DNA, 20 bp, synthetic construct
  misc_feature 1..20: note = chemically synthesized
  source 1..20: mol_type = other DNA
gagggagtttgcctcagtga

SEQ ID NO: 55012 - DNA, 20 bp, synthetic construct
  misc_feature 1..20: note = chemically synthesized
  source 1..20: mol_type = other DNA
ctttctctgacttctctact

SEQ ID NO: 55013 - DNA, 20 bp, synthetic construct
  misc_feature 1..20: note = chemically synthesized
  source 1..20: mol_type = other DNA
tttctctgacttctctactc

SEQ ID NO: 55014 - DNA, 20 bp, synthetic construct
  misc_feature 1..20: note = chemically synthesized
  source 1..20: mol_type = other DNA
ttctctgacttctctactca

SEQ ID NO: 55015 - DNA, 20 bp, synthetic construct
  misc_feature 1..20: note = chemically synthesized
  source 1..20: mol_type = other DNA
ggtcattccatttgtccttt

SEQ ID NO: 55016 - DNA, 20 bp, synthetic construct
  misc_feature 1..20: note = chemically synthesized
  source 1..20: mol_type = other DNA
ttgtccttttagaactgacc

SEQ ID NO: 55017 - DNA, 20 bp, synthetic construct
  misc_feature 1..20: note = chemically synthesized
  source 1..20: mol_type = other DNA
tgtccttttagaactgaccc

SEQ ID NO: 55018 - DNA, 20 bp, synthetic construct
  misc_feature 1..20: note = chemically synthesized
  source 1..20: mol_type = other DNA
agaactgacccaggttcctg

SEQ ID NO: 55019 - DNA, 20 bp, synthetic construct
  misc_feature 1..20: note = chemically synthesized
  source 1..20: mol_type = other DNA
actgacccaggttcctgcgg

SEQ ID NO: 55020 - DNA, 20 bp, synthetic construct
  misc_feature 1..20: note = chemically synthesized
  source 1..20: mol_type = other DNA
gttcctgcggaagctgtccc

SEQ ID NO: 55021 - DNA, 20 bp, synthetic construct
  misc_feature 1..20: note = chemically synthesized
  source 1..20: mol_type = other DNA
cggaagctgtccctggttct

SEQ ID NO: 55022 - DNA, 20 bp, synthetic construct
  misc_feature 1..20: note = chemically synthesized
  source 1..20: mol_type = other DNA
gtccctggttctgagtcctg

SEQ ID NO: 55023 - DNA, 20 bp, synthetic construct
  misc_feature 1..20: note = chemically synthesized
  source 1..20: mol_type = other DNA
tgcctgtgaataatccaacc

SEQ ID NO: 55024 - DNA, 20 bp, synthetic construct
  misc_feature 1..20: note = chemically synthesized
  source 1..20: mol_type = other DNA
cctgtgaataatccaaccaa

SEQ ID NO: 55025 - DNA, 20 bp, synthetic construct
  misc_feature 1..20: note = chemically synthesized
  source 1..20: mol_type = other DNA
tccaaccaagagcaacacaa

SEQ ID NO: 55026 - DNA, 20 bp, synthetic construct
  misc_feature 1..20: note = chemically synthesized
  source 1..20: mol_type = other DNA
caagagcaacacaaaagcct

SEQ ID NO: 55027 - DNA, 20 bp, synthetic construct
  misc_feature 1..20: note = chemically synthesized
  source 1..20: mol_type = other DNA
cacaaaagcctcagcctttc

SEQ ID NO: 55028 - DNA, 20 bp, synthetic construct
  misc_feature 1..20: note = chemically synthesized
  source 1..20: mol_type = other DNA
acaaaagcctcagcctttca

SEQ ID NO: 55029 - DNA, 20 bp, synthetic construct
  misc_feature 1..20: note = chemically synthesized
  source 1..20: mol_type = other DNA
aaaagcctcagcctttcaag

SEQ ID NO: 55030 - DNA, 20 bp, synthetic construct
  misc_feature 1..20: note = chemically synthesized
  source 1..20: mol_type = other DNA
tcagcctttcaaggagcact

SEQ ID NO: 55031 - DNA, 20 bp, synthetic construct
  misc_feature 1..20: note = chemically synthesized
  source 1..20: mol_type = other DNA
cagcctttcaaggagcactt

SEQ ID NO: 55032 - DNA, 20 bp, synthetic construct
  misc_feature 1..20: note = chemically synthesized
  source 1..20: mol_type = other DNA
agcctttcaaggagcacttg

SEQ ID NO: 55033 - DNA, 20 bp, synthetic construct
  misc_feature 1..20: note = chemically synthesized
  source 1..20: mol_type = other DNA
aaggagcacttggggtgttt

SEQ ID NO: 55034 - DNA, 20 bp, synthetic construct
  misc_feature 1..20: note = chemically synthesized
  source 1..20: mol_type = other DNA
aggagcacttggggtgtttg

SEQ ID NO: 55035 - DNA, 20 bp, synthetic construct
  misc_feature 1..20: note = chemically synthesized
  source 1..20: mol_type = other DNA
ggggtgtttgaggtcatctg

SEQ ID NO: 55036 - DNA, 20 bp, synthetic construct
  misc_feature 1..20: note = chemically synthesized
  source 1..20: mol_type = other DNA
gggtgtttgaggtcatctgt

SEQ ID NO: 55037 - DNA, 20 bp, synthetic construct
  misc_feature 1..20: note = chemically synthesized
  source 1..20: mol_type = other DNA
tttgaggtcatctgtgggtg

SEQ ID NO: 55038 - DNA, 20 bp, synthetic construct
  misc_feature 1..20: note = chemically synthesized
  source 1..20: mol_type = other DNA
ttgaggtcatctgtgggtgt

SEQ ID NO: 55039 - DNA, 20 bp, synthetic construct
  misc_feature 1..20: note = chemically synthesized
  source 1..20: mol_type = other DNA
ctgactgtttctcatgcctc

SEQ ID NO: 55040 - DNA, 20 bp, synthetic construct
  misc_feature 1..20: note = chemically synthesized
  source 1..20: mol_type = other DNA
ctgtttctcatgcctctgga

SEQ ID NO: 55041 - DNA, 20 bp, synthetic construct
  misc_feature 1..20: note = chemically synthesized
  source 1..20: mol_type = other DNA
tgtttctcatgcctctggaa

SEQ ID NO: 55042 - DNA, 20 bp, synthetic construct
  misc_feature 1..20: note = chemically synthesized
  source 1..20: mol_type = other DNA
tcatgcctctggaaaggtcc

SEQ ID NO: 55043 - DNA, 20 bp, synthetic construct
  misc_feature 1..20: note = chemically synthesized
  source 1..20: mol_type = other DNA
catgcctctggaaaggtcct

SEQ ID NO: 55044 - DNA, 20 bp, synthetic construct
  misc_feature 1..20: note = chemically synthesized
  source 1..20: mol_type = other DNA
acaccctgaccctctccacc

SEQ ID NO: 55045 - DNA, 20 bp, synthetic construct
  misc_feature 1..20: note = chemically synthesized
  source 1..20: mol_type = other DNA
accctctccacccagatcca

SEQ ID NO: 55046 - DNA, 20 bp, synthetic construct
  misc_feature 1..20: note = chemically synthesized
  source 1..20: mol_type = other DNA
ttcactgctccccactgcca

SEQ ID NO: 55047 - DNA, 20 bp, synthetic construct
  misc_feature 1..20: note = chemically synthesized
  source 1..20: mol_type = other DNA
tgctccccactgccatagac

SEQ ID NO: 55048 - DNA, 20 bp, synthetic construct
  misc_feature 1..20: note = chemically synthesized
  source 1..20: mol_type = other DNA
ccatagaccagcattctccc

SEQ ID NO: 55049 - DNA, 20 bp, synthetic construct
  misc_feature 1..20: note = chemically synthesized
  source 1..20: mol_type = other DNA
catagaccagcattctcccc

SEQ ID NO: 55050 - DNA, 20 bp, synthetic construct
  misc_feature 1..20: note = chemically synthesized
  source 1..20: mol_type = other DNA
gaccagcattctccccggga

SEQ ID NO: 55051 - DNA, 20 bp, synthetic construct
  misc_feature 1..20: note = chemically synthesized
  source 1..20: mol_type = other DNA
cattctccccgggatggacc

SEQ ID NO: 55052 - DNA, 20 bp, synthetic construct
  misc_feature 1..20: note = chemically synthesized
  source 1..20: mol_type = other DNA
attctccccgggatggacct

SEQ ID NO: 55053 - DNA, 20 bp, synthetic construct
  misc_feature 1..20: note = chemically synthesized
  source 1..20: mol_type = other DNA
ttctctctatcccccataca

SEQ ID NO: 55054 - DNA, 20 bp, synthetic construct
  misc_feature 1..20: note = chemically synthesized
  source 1..20: mol_type = other DNA
atgtttgcttgtttgttgtt

SEQ ID NO: 55055 - DNA, 20 bp, synthetic construct
  misc_feature 1..20: note = chemically synthesized
  source 1..20: mol_type = other DNA
ttggataaatgcttcccgct

SEQ ID NO: 55056 - DNA, 20 bp, synthetic construct
  misc_feature 1..20: note = chemically synthesized
  source 1..20: mol_type = other DNA
atgcttcccgctcggattta

SEQ ID NO: 55057 - DNA, 20 bp, synthetic construct
  misc_feature 1..20: note = chemically synthesized
  source 1..20: mol_type = other DNA
gcttcccgctcggatttatg

SEQ ID NO: 55058 - DNA, 20 bp, synthetic construct
  misc_feature 1..20: note = chemically synthesized
  source 1..20: mol_type = other DNA
ttcccgctcggatttatgga

SEQ ID NO: 55059 - DNA, 20 bp, synthetic construct
  misc_feature 1..20: note = chemically synthesized
  source 1..20: mol_type = other DNA
tcccgctcggatttatggag

SEQ ID NO: 55060 - DNA, 20 bp, synthetic construct
  misc_feature 1..20: note = chemically synthesized
  source 1..20: mol_type = other DNA
tcggatttatggagaggatc

SEQ ID NO: 55061 - DNA, 20 bp, synthetic construct
  misc_feature 1..20: note = chemically synthesized
  source 1..20: mol_type = other DNA
ggagaggatcaagttgctcc

SEQ ID NO: 55062 - DNA, 20 bp, synthetic construct
  misc_feature 1..20: note = chemically synthesized
  source 1..20: mol_type = other DNA
gagaggatcaagttgctcct

SEQ ID NO: 55063 - DNA, 20 bp, synthetic construct
  misc_feature 1..20: note = chemically synthesized
  source 1..20: mol_type = other DNA
aggatcaagttgctcctggg

SEQ ID NO: 55064 - DNA, 20 bp, synthetic construct
  misc_feature 1..20: note = chemically synthesized
  source 1..20: mol_type = other DNA
ggatcaagttgctcctggga

SEQ ID NO: 55065 - DNA, 20 bp, synthetic construct
  misc_feature 1..20: note = chemically synthesized
  source 1..20: mol_type = other DNA
atcaagttgctcctgggaag

SEQ ID NO: 55066 - DNA, 20 bp, synthetic construct
  misc_feature 1..20: note = chemically synthesized
  source 1..20: mol_type = other DNA
gttgctcctgggaaggagat

SEQ ID NO: 55067 - DNA, 20 bp, synthetic construct
  misc_feature 1..20: note = chemically synthesized
  source 1..20: mol_type = other DNA
aaatctgtatttcctgtttc

SEQ ID NO: 55068 - DNA, 20 bp, synthetic construct
  misc_feature 1..20: note = chemically synthesized
  source 1..20: mol_type = other DNA
gtatttcctgtttctggtgt

SEQ ID NO: 55069 - DNA, 20 bp, synthetic construct
  misc_feature 1..20: note = chemically synthesized
  source 1..20: mol_type = other DNA
atttcctgtttctggtgtga

SEQ ID NO: 55070 - DNA, 20 bp, synthetic construct
  misc_feature 1..20: note = chemically synthesized
  source 1..20: mol_type = other DNA
ctgtttctggtgtgagagcc

SEQ ID NO: 55071 - DNA, 20 bp, synthetic construct
  misc_feature 1..20: note = chemically synthesized
  source 1..20: mol_type = other DNA
tttctggtgtgagagcctgg

SEQ ID NO: 55072 - DNA, 20 bp, synthetic construct
  misc_feature 1..20: note = chemically synthesized
  source 1..20: mol_type = other DNA
actattgtcctcttaacaaa

SEQ ID NO: 55073 - DNA, 20 bp, synthetic construct
  misc_feature 1..20: note = chemically synthesized
  source 1..20: mol_type = other DNA
ctattgtcctcttaacaaat

SEQ ID NO: 55074 - DNA, 20 bp, synthetic construct
  misc_feature 1..20: note = chemically synthesized
  source 1..20: mol_type = other DNA
tattgtcctcttaacaaatg

SEQ ID NO: 55075 - DNA, 20 bp, synthetic construct
  misc_feature 1..20: note = chemically synthesized
  source 1..20: mol_type = other DNA
ctcttaacaaatggggctca

SEQ ID NO: 55076 - DNA, 20 bp, synthetic construct
  misc_feature 1..20: note = chemically synthesized
  source 1..20: mol_type = other DNA
tcttaacaaatggggctcac

SEQ ID NO: 55077 - DNA, 20 bp, synthetic construct
  misc_feature 1..20: note = chemically synthesized
  source 1..20: mol_type = other DNA
cttaacaaatggggctcaca

SEQ ID NO: 55078 - DNA, 20 bp, synthetic construct
  misc_feature 1..20: note = chemically synthesized
  source 1..20: mol_type = other DNA
ctcacagggtgccccctgtc

SEQ ID NO: 55079 - DNA, 20 bp, synthetic construct
  misc_feature 1..20: note = chemically synthesized
  source 1..20: mol_type = other DNA
acagggtgccccctgtccgg

SEQ ID NO: 55080 - DNA, 20 bp, synthetic construct
  misc_feature 1..20: note = chemically synthesized
  source 1..20: mol_type = other DNA
agggtgccccctgtccggca

SEQ ID NO: 55081 - DNA, 20 bp, synthetic construct
  misc_feature 1..20: note = chemically synthesized
  source 1..20: mol_type = other DNA
cagagcttgcacttcaaact

SEQ ID NO: 55082 - DNA, 20 bp, synthetic construct
  misc_feature 1..20: note = chemically synthesized
  source 1..20: mol_type = other DNA
agagcttgcacttcaaacta

SEQ ID NO: 55083 - DNA, 20 bp, synthetic construct
  misc_feature 1..20: note = chemically synthesized
  source 1..20: mol_type = other DNA
aaactaaggcttcctttatt

SEQ ID NO: 55084 - DNA, 20 bp, synthetic construct
  misc_feature 1..20: note = chemically synthesized
  source 1..20: mol_type = other DNA
aactaaggcttcctttattt

SEQ ID NO: 55085 - DNA, 20 bp, synthetic construct
  misc_feature 1..20: note = chemically synthesized
  source 1..20: mol_type = other DNA
ttctctcccctgcaaactcc

SEQ ID NO: 55086 - DNA, 20 bp, synthetic construct
  misc_feature 1..20: note = chemically synthesized
  source 1..20: mol_type = other DNA
tctctcccctgcaaactcct

SEQ ID NO: 55087 - DNA, 20 bp, synthetic construct
  misc_feature 1..20: note = chemically synthesized
  source 1..20: mol_type = other DNA
tcccctgcaaactcctaggc

SEQ ID NO: 55088 - DNA, 20 bp, synthetic construct
  misc_feature 1..20: note = chemically synthesized
  source 1..20: mol_type = other DNA
cccctgcaaactcctaggcg

SEQ ID NO: 55089 - DNA, 20 bp, synthetic construct
  misc_feature 1..20: note = chemically synthesized
  source 1..20: mol_type = other DNA
caaactcctaggcgaggtaa

SEQ ID NO: 55090 - DNA, 20 bp, synthetic construct
  misc_feature 1..20: note = chemically synthesized
  source 1..20: mol_type = other DNA
aaactcctaggcgaggtaaa

SEQ ID NO: 55091 - DNA, 20 bp, synthetic construct
  misc_feature 1..20: note = chemically synthesized
  source 1..20: mol_type = other DNA
tcctaggcgaggtaaaaggt

SEQ ID NO: 55092 - DNA, 20 bp, synthetic construct
  misc_feature 1..20: note = chemically synthesized
  source 1..20: mol_type = other DNA
cctaggcgaggtaaaaggtc

SEQ ID NO: 55093 - DNA, 20 bp, synthetic construct
  misc_feature 1..20: note = chemically synthesized
  source 1..20: mol_type = other DNA
aggtaaaaggtcaggactct

SEQ ID NO: 55094 - DNA, 20 bp, synthetic construct
  misc_feature 1..20: note = chemically synthesized
  source 1..20: mol_type = other DNA
ggtaaaaggtcaggactcta

SEQ ID NO: 55095 - DNA, 20 bp, synthetic construct
  misc_feature 1..20: note = chemically synthesized
  source 1..20: mol_type = other DNA
ggtcaggactctaaggttcc

SEQ ID NO: 55096 - DNA, 20 bp, synthetic construct
  misc_feature 1..20: note = chemically synthesized
  source 1..20: mol_type = other DNA
ggactctaaggttcctggct

SEQ ID NO: 55097 - DNA, 20 bp, synthetic construct
  misc_feature 1..20: note = chemically synthesized
  source 1..20: mol_type = other DNA
tctaaggttcctggctgagc

SEQ ID NO: 55098 - DNA, 20 bp, synthetic construct
  misc_feature 1..20: note = chemically synthesized
  source 1..20: mol_type = other DNA
aaggttcctggctgagctgg

SEQ ID NO: 55099 - DNA, 20 bp, synthetic construct
  misc_feature 1..20: note = chemically synthesized
  source 1..20: mol_type = other DNA
cgtttccctctcatctgttt

SEQ ID NO: 55100 - DNA, 20 bp, synthetic construct
  misc_feature 1..20: note = chemically synthesized
  source 1..20: mol_type = other DNA
tttccctctcatctgtttca

SEQ ID NO: 55101 - DNA, 20 bp, synthetic construct
  misc_feature 1..20: note = chemically synthesized
  source 1..20: mol_type = other DNA
ccctctcatctgtttcagag

SEQ ID NO: 55102 - DNA, 20 bp, synthetic construct
  misc_feature 1..20: note = chemically synthesized
  source 1..20: mol_type = other DNA
cctctcatctgtttcagagc

SEQ ID NO: 55103 - DNA, 20 bp, synthetic construct
  misc_feature 1..20: note = chemically synthesized
  source 1..20: mol_type = other DNA
catctgtttcagagcaggat

SEQ ID NO: 55104 - DNA, 20 bp, synthetic construct
  misc_feature 1..20: note = chemically synthesized
  source 1..20: mol_type = other DNA
atctgtttcagagcaggatg

SEQ ID NO: 55105 - DNA, 20 bp, synthetic construct
  misc_feature 1..20: note = chemically synthesized
  source 1..20: mol_type = other DNA
caggatgaggttcctgcctg

SEQ ID NO: 55106 - DNA, 20 bp, synthetic construct
  misc_feature 1..20: note = chemically synthesized
  source 1..20: mol_type = other DNA
ggatgaggttcctgcctgca

SEQ ID NO: 55107 - DNA, 20 bp, synthetic construct
  misc_feature 1..20: note = chemically synthesized
  source 1..20: mol_type = other DNA
gatgaggttcctgcctgcag

SEQ ID NO: 55108 - DNA, 20 bp, synthetic construct
  misc_feature 1..20: note = chemically synthesized
  source 1..20: mol_type = other DNA
atgaggttcctgcctgcaga

SEQ ID NO: 55109 - DNA, 20 bp, synthetic construct
  misc_feature 1..20: note = chemically synthesized
  source 1..20: mol_type = other DNA
ggttcctgcctgcagaggga

SEQ ID NO: 55110 - DNA, 20 bp, synthetic construct
  misc_feature 1..20: note = chemically synthesized
  source 1..20: mol_type = other DNA
cctgcagagggaaagtgact

SEQ ID NO: 55111 - DNA, 20 bp, synthetic construct
  misc_feature 1..20: note = chemically synthesized
  source 1..20: mol_type = other DNA
ggaaagtgacttggaacacc

SEQ ID NO: 55112 - DNA, 20 bp, synthetic construct
  misc_feature 1..20: note = chemically synthesized
  source 1..20: mol_type = other DNA
gaaagtgacttggaacaccc

SEQ ID NO: 55113 - DNA, 20 bp, synthetic construct
  misc_feature 1..20: note = chemically synthesized
  source 1..20: mol_type = other DNA
aaagtgacttggaacaccca

SEQ ID NO: 55114 - DNA, 20 bp, synthetic construct
  misc_feature 1..20: note = chemically synthesized
  source 1..20: mol_type = other DNA
ggaacacccagggtgccccg

SEQ ID NO: 55115 - DNA, 20 bp, synthetic construct
  misc_feature 1..20: note = chemically synthesized
  source 1..20: mol_type = other DNA
acccagggtgccccgcagct

SEQ ID NO: 55116 - DNA, 20 bp, synthetic construct
  misc_feature 1..20: note = chemically synthesized
  source 1..20: mol_type = other DNA
gtgccccgcagcttggcctt

SEQ ID NO: 55117 - DNA, 20 bp, synthetic construct
  misc_feature 1..20: note = chemically synthesized
  source 1..20: mol_type = other DNA
gcttggccttcagctgatgt

SEQ ID NO: 55118 - DNA, 20 bp, synthetic construct
  misc_feature 1..20: note = chemically synthesized
  source 1..20: mol_type = other DNA
cttggccttcagctgatgtt

SEQ ID NO: 55119 - DNA, 20 bp, synthetic construct
  misc_feature 1..20: note = chemically synthesized
  source 1..20: mol_type = other DNA
ttggccttcagctgatgtta

SEQ ID NO: 55120 - DNA, 20 bp, synthetic construct
  misc_feature 1..20: note = chemically synthesized
  source 1..20: mol_type = other DNA
cttcagctgatgttagggca

SEQ ID NO: 55121 - DNA, 20 bp, synthetic construct
  misc_feature 1..20: note = chemically synthesized
  source 1..20: mol_type = other DNA
cagctgatgttagggcacag

SEQ ID NO: 55122 - DNA, 20 bp, synthetic construct
  misc_feature 1..20: note = chemically synthesized
  source 1..20: mol_type = other DNA
agctgatgttagggcacagc

SEQ ID NO: 55123 - DNA, 20 bp, synthetic construct
  misc_feature 1..20: note = chemically synthesized
  source 1..20: mol_type = other DNA
tagggcacagcaggttgatg

SEQ ID NO: 55124 - DNA, 20 bp, synthetic construct
  misc_feature 1..20: note = chemically synthesized
  source 1..20: mol_type = other DNA
cacagcaggttgatgcagtg

SEQ ID NO: 55125 - DNA, 20 bp, synthetic construct
  misc_feature 1..20: note = chemically synthesized
  source 1..20: mol_type = other DNA
aggttgatgcagtgtggtcc

SEQ ID NO: 55126 - DNA, 20 bp, synthetic construct
  misc_feature 1..20: note = chemically synthesized
  source 1..20: mol_type = other DNA
gttgatgcagtgtggtcctg

SEQ ID NO: 55127 - DNA, 20 bp, synthetic construct
  misc_feature 1..20: note = chemically synthesized
  source 1..20: mol_type = other DNA
ttgatgcagtgtggtcctgg

SEQ ID NO: 55128 - DNA, 20 bp, synthetic construct
  misc_feature 1..20: note = chemically synthesized
  source 1..20: mol_type = other DNA
tgcagtgtggtcctggagga

SEQ ID NO: 55129 - DNA, 20 bp, synthetic construct
  misc_feature 1..20: note = chemically synthesized
  source 1..20: mol_type = other DNA
cagtgtggtcctggaggatg

SEQ ID NO: 55130 - DNA, 20 bp, synthetic construct
  misc_feature 1..20: note = chemically synthesized
  source 1..20: mol_type = other DNA
ttgtttatcgtgatcccata

SEQ ID NO: 55131 - DNA, 20 bp, synthetic construct
  misc_feature 1..20: note = chemically synthesized
  source 1..20: mol_type = other DNA
atcgtgatcccatatggact

SEQ ID NO: 55132 - DNA, 20 bp, synthetic construct
  misc_feature 1..20: note = chemically synthesized
  source 1..20: mol_type = other DNA
tcgtgatcccatatggactg

SEQ ID NO: 55133 - DNA, 20 bp, synthetic construct
  misc_feature 1..20: note = chemically synthesized
  source 1..20: mol_type = other DNA
tgatcccatatggactgagg

SEQ ID NO: 55134 - DNA, 20 bp, synthetic construct
  misc_feature 1..20: note = chemically synthesized
  source 1..20: mol_type = other DNA
actgaggaagtatgtgctgt

SEQ ID NO: 55135 - DNA, 20 bp, synthetic construct
  misc_feature 1..20: note = chemically synthesized
  source 1..20: mol_type = other DNA
ctgaggaagtatgtgctgtt

SEQ ID NO: 55136 - DNA, 20 bp, synthetic construct
  misc_feature 1..20: note = chemically synthesized
  source 1..20: mol_type = other DNA
tgaggaagtatgtgctgttg

SEQ ID NO: 55137 - DNA, 20 bp, synthetic construct
  misc_feature 1..20: note = chemically synthesized
  source 1..20: mol_type = other DNA
gaagtatgtgctgttgggga

SEQ ID NO: 55138 - DNA, 20 bp, synthetic construct
  misc_feature 1..20: note = chemically synthesized
  source 1..20: mol_type = other DNA
tatgtgctgttggggacagc

SEQ ID NO: 55139 - DNA, 20 bp, synthetic construct
  misc_feature 1..20: note = chemically synthesized
  source 1..20: mol_type = other DNA
atgtgctgttggggacagcc

SEQ ID NO: 55140 - DNA, 20 bp, synthetic construct
  misc_feature 1..20: note = chemically synthesized
  source 1..20: mol_type = other DNA
ttggggacagccaggcctaa

SEQ ID NO: 55141 - DNA, 20 bp, synthetic construct
  misc_feature 1..20: note = chemically synthesized
  source 1..20: mol_type = other DNA
gggacagccaggcctaacag

SEQ ID NO: 55142 - DNA, 20 bp, synthetic construct
  misc_feature 1..20: note = chemically synthesized
  source 1..20: mol_type = other DNA
gacagccaggcctaacagtg

SEQ ID NO: 55143 - DNA, 20 bp, synthetic construct
  misc_feature 1..20: note = chemically synthesized
  source 1..20: mol_type = other DNA
agccaggcctaacagtggag

SEQ ID NO: 55144 - DNA, 20 bp, synthetic construct
  misc_feature 1..20: note = chemically synthesized
  source 1..20: mol_type = other DNA
agtggagaagacctgccttc

SEQ ID NO: 55145 - DNA, 20 bp, synthetic construct
  misc_feature 1..20: note = chemically synthesized
  source 1..20: mol_type = other DNA
gtggagaagacctgccttcc

SEQ ID NO: 55146 - DNA, 20 bp, synthetic construct
  misc_feature 1..20: note = chemically synthesized
  source 1..20: mol_type = other DNA
cctgccttccaggcccacac

SEQ ID NO: 55147 - DNA, 20 bp, synthetic construct
  misc_feature 1..20: note = chemically synthesized
  source 1..20: mol_type = other DNA
ccttccaggcccacactgga

SEQ ID NO: 55148 - DNA, 20 bp, synthetic construct
  misc_feature 1..20: note = chemically synthesized
  source 1..20: mol_type = other DNA
ttccaggcccacactggaca

SEQ ID NO: 55149 - DNA, 20 bp, synthetic construct
  misc_feature 1..20: note = chemically synthesized
  source 1..20: mol_type = other DNA
ggacagagcatttgacctgc

SEQ ID NO: 55150 - DNA, 20 bp, synthetic construct
  misc_feature 1..20: note = chemically synthesized
  source 1..20: mol_type = other DNA
gacagagcatttgacctgct

SEQ ID NO: 55151 - DNA, 20 bp, synthetic construct
  misc_feature 1..20: note = chemically synthesized
  source 1..20: mol_type = other DNA
gcatttgacctgctgggcct

SEQ ID NO: 55152 - DNA, 20 bp, synthetic construct
  misc_feature 1..20: note = chemically synthesized
  source 1..20: mol_type = other DNA
gagtttccccatgtgtactt

SEQ ID NO: 55153 - DNA, 20 bp, synthetic construct
  misc_feature 1..20: note = chemically synthesized
  source 1..20: mol_type = other DNA
agtttccccatgtgtacttt

SEQ ID NO: 55154 - DNA, 20 bp, synthetic construct
  misc_feature 1..20: note = chemically synthesized
  source 1..20: mol_type = other DNA
gtttccccatgtgtactttg

SEQ ID NO: 55155 - DNA, 20 bp, synthetic construct
  misc_feature 1..20: note = chemically synthesized
  source 1..20: mol_type = other DNA
atgtgtactttggggataat

SEQ ID NO: 55156 - DNA, 20 bp, synthetic construct
  misc_feature 1..20: note = chemically synthesized
  source 1..20: mol_type = other DNA
actttggggataatgagtcc

SEQ ID NO: 55157 - DNA, 20 bp, synthetic construct
  misc_feature 1..20: note = chemically synthesized
  source 1..20: mol_type = other DNA
ctttggggataatgagtcct

SEQ ID NO: 55158 - DNA, 20 bp, synthetic construct
  misc_feature 1..20: note = chemically synthesized
  source 1..20: mol_type = other DNA
gagtcctaggctgcgtcctg

SEQ ID NO: 55159 - DNA, 20 bp, synthetic construct
  misc_feature 1..20: note = chemically synthesized
  source 1..20: mol_type = other DNA
tgcgtcctgcagaacctgtc

SEQ ID NO: 55160 - DNA, 20 bp, synthetic construct
  misc_feature 1..20: note = chemically synthesized
  source 1..20: mol_type = other DNA
cgtcctgcagaacctgtctg

SEQ ID NO: 55161 - DNA, 20 bp, synthetic construct
  misc_feature 1..20: note = chemically synthesized
  source 1..20: mol_type = other DNA
gtcctgcagaacctgtctgg

SEQ ID NO: 55162 - DNA, 20 bp, synthetic construct
  misc_feature 1..20: note = chemically synthesized
  source 1..20: mol_type = other DNA
acctgtctggaggatcacgt

SEQ ID NO: 55163 - DNA, 20 bp, synthetic construct
  misc_feature 1..20: note = chemically synthesized
  source 1..20: mol_type = other DNA
gtctggaggatcacgttgga

SEQ ID NO: 55164 - DNA, 20 bp, synthetic construct
  misc_feature 1..20: note = chemically synthesized
  source 1..20: mol_type = other DNA
aatacatttttttaaaactc

SEQ ID NO: 55165 - DNA, 20 bp, synthetic construct
  misc_feature 1..20: note = chemically synthesized
  source 1..20: mol_type = other DNA
acatttttttaaaactctgg

SEQ ID NO: 55166 - DNA, 20 bp, synthetic construct
  misc_feature 1..20: note = chemically synthesized
  source 1..20: mol_type = other DNA
ttttaaaactctggaagata

SEQ ID NO: 55167 - DNA, 20 bp, synthetic construct
  misc_feature 1..20: note = chemically synthesized
  source 1..20: mol_type = other DNA
aaactctggaagatacagtg

SEQ ID NO: 55168 - DNA, 20 bp, synthetic construct
  misc_feature 1..20: note = chemically synthesized
  source 1..20: mol_type = other DNA
ctggaagatacagtgaagct

SEQ ID NO: 55169 - DNA, 20 bp, synthetic construct
  misc_feature 1..20: note = chemically synthesized
  source 1..20: mol_type = other DNA
tggaagatacagtgaagctg

SEQ ID NO: 55170 - DNA, 20 bp, synthetic construct
  misc_feature 1..20: note = chemically synthesized
  source 1..20: mol_type = other DNA
acagtgaagctgaggtctta

SEQ ID NO: 55171 - DNA, 20 bp, synthetic construct
  misc_feature 1..20: note = chemically synthesized
  source 1..20: mol_type = other DNA
gtcttatggttgtcccatca

SEQ ID NO: 55172 - DNA, 20 bp, synthetic construct
  misc_feature 1..20: note = chemically synthesized
  source 1..20: mol_type = other DNA
atatttgtcttcctcataat

SEQ ID NO: 55173 - DNA, 20 bp, synthetic construct
  misc_feature 1..20: note = chemically synthesized
  source 1..20: mol_type = other DNA
tatttgtcttcctcataatg

SEQ ID NO: 55174 - DNA, 20 bp, synthetic construct
  misc_feature 1..20: note = chemically synthesized
  source 1..20: mol_type = other DNA
gactgatccctgttgattcc

SEQ ID NO: 55175 - DNA, 20 bp, synthetic construct
  misc_feature 1..20: note = chemically synthesized
  source 1..20: mol_type = other DNA
actgatccctgttgattccc

SEQ ID NO: 55176 - DNA, 20 bp, synthetic construct
  misc_feature 1..20: note = chemically synthesized
  source 1..20: mol_type = other DNA
ctgatccctgttgattccca

SEQ ID NO: 55177 - DNA, 20 bp, synthetic construct
  misc_feature 1..20: note = chemically synthesized
  source 1..20: mol_type = other DNA
tgatccctgttgattcccag

SEQ ID NO: 55178 - DNA, 20 bp, synthetic construct
  misc_feature 1..20: note = chemically synthesized
  source 1..20: mol_type = other DNA
atccctgttgattcccaggg

SEQ ID NO: 55179 - DNA, 20 bp, synthetic construct
  misc_feature 1..20: note = chemically synthesized
  source 1..20: mol_type = other DNA
tgttgattcccaggggagcc

SEQ ID NO: 55180 - DNA, 20 bp, synthetic construct
  misc_feature 1..20: note = chemically synthesized
  source 1..20: mol_type = other DNA
gttgattcccaggggagccc

SEQ ID NO: 55181 - DNA, 20 bp, synthetic construct
  misc_feature 1..20: note = chemically synthesized
  source 1..20: mol_type = other DNA
gggagcccaggaattccctc

SEQ ID NO: 55182 - DNA, 20 bp, synthetic construct
  misc_feature 1..20: note = chemically synthesized
  source 1..20: mol_type = other DNA
ggagcccaggaattccctct

SEQ ID NO: 55183 - DNA, 20 bp, synthetic construct
  misc_feature 1..20: note = chemically synthesized
  source 1..20: mol_type = other DNA
agcccaggaattccctctgg

SEQ ID NO: 55184 - DNA, 20 bp, synthetic construct
  misc_feature 1..20: note = chemically synthesized
  source 1..20: mol_type = other DNA
gcccaggaattccctctggg

SEQ ID NO: 55185 - DNA, 20 bp, synthetic construct
  misc_feature 1..20: note = chemically synthesized
  source 1..20: mol_type = other DNA
ttccctctgggaggttatgc

SEQ ID NO: 55186 - DNA, 20 bp, synthetic construct
  misc_feature 1..20: note = chemically synthesized
  source 1..20: mol_type = other DNA
ggaggttatgctagtttgaa

SEQ ID NO: 55187 - DNA, 20 bp, synthetic construct
  misc_feature 1..20: note = chemically synthesized
  source 1..20: mol_type = other DNA
gaggttatgctagtttgaat

SEQ ID NO: 55188 - DNA, 20 bp, synthetic construct
  misc_feature 1..20: note = chemically synthesized
  source 1..20: mol_type = other DNA
aggttatgctagtttgaatg

SEQ ID NO: 55189 - DNA, 20 bp, synthetic construct
  misc_feature 1..20: note = chemically synthesized
  source 1..20: mol_type = other DNA
gactgtcaactcgtgtgtga

SEQ ID NO: 55190 - DNA, 20 bp, synthetic construct
  misc_feature 1..20: note = chemically synthesized
  source 1..20: mol_type = other DNA
gtgtgacagacaattcttca

SEQ ID NO: 55191 - DNA, 20 bp, synthetic construct
  misc_feature 1..20: note = chemically synthesized
  source 1..20: mol_type = other DNA
aattcttcaaagtaaaacga

SEQ ID NO: 55192 - DNA, 20 bp, synthetic construct
  misc_feature 1..20: note = chemically synthesized
  source 1..20: mol_type = other DNA
aaagtaaaacgatggtgtct

SEQ ID NO: 55193 - DNA, 20 bp, synthetic construct
  misc_feature 1..20: note = chemically synthesized
  source 1..20: mol_type = other DNA
aagtaaaacgatggtgtcta

SEQ ID NO: 55194 - DNA, 20 bp, synthetic construct
  misc_feature 1..20: note = chemically synthesized
  source 1..20: mol_type = other DNA
gtgtctaaggtgaccgccct

SEQ ID NO: 55195 - DNA, 20 bp, synthetic construct
  misc_feature 1..20: note = chemically synthesized
  source 1..20: mol_type = other DNA
tgccacctccttccctgccc

SEQ ID NO: 55196 - DNA, 20 bp, synthetic construct
  misc_feature 1..20: note = chemically synthesized
  source 1..20: mol_type = other DNA
gccacctccttccctgccct

SEQ ID NO: 55197 - DNA, 20 bp, synthetic construct
  misc_feature 1..20: note = chemically synthesized
  source 1..20: mol_type = other DNA
cttccctgccctgggctctc

SEQ ID NO: 55198 - DNA, 20 bp, synthetic construct
  misc_feature 1..20: note = chemically synthesized
  source 1..20: mol_type = other DNA
cctgccctgggctctccaga

SEQ ID NO: 55199 - DNA, 20 bp, synthetic construct
  misc_feature 1..20: note = chemically synthesized
  source 1..20: mol_type = other DNA
cctgttctcctaccaaatgc

SEQ ID NO: 55200 - DNA, 20 bp, synthetic construct
  misc_feature 1..20: note = chemically synthesized
  source 1..20: mol_type = other DNA
ctaccaaatgccagttaaat

SEQ ID NO: 55201 - DNA, 20 bp, synthetic construct
  misc_feature 1..20: note = chemically synthesized
  source 1..20: mol_type = other DNA
accaaatgccagttaaataa

SEQ ID NO: 55202 - DNA, 20 bp, synthetic construct
  misc_feature 1..20: note = chemically synthesized
  source 1..20: mol_type = other DNA
ccaaatgccagttaaataag

SEQ ID NO: 55203 - DNA, 20 bp, synthetic construct
  misc_feature 1..20: note = chemically synthesized
  source 1..20: mol_type = other DNA
aaatgccagttaaataagag

SEQ ID NO: 55204 - DNA, 20 bp, synthetic construct
  misc_feature 1..20: note = chemically synthesized
  source 1..20: mol_type = other DNA
gttaaataagaggagtcctg

SEQ ID NO: 55205 - DNA, 20 bp, synthetic construct
  misc_feature 1..20: note = chemically synthesized
  source 1..20: mol_type = other DNA
ttaaataagaggagtcctgt

SEQ ID NO: 55206 - DNA, 20 bp, synthetic construct
  misc_feature 1..20: note = chemically synthesized
  source 1..20: mol_type = other DNA
aggagtcctgtgggtcgccc

SEQ ID NO: 55207 - DNA, 20 bp, synthetic construct
  misc_feature 1..20: note = chemically synthesized
  source 1..20: mol_type = other DNA
ggagtcctgtgggtcgccca

SEQ ID NO: 55208 - DNA, 20 bp, synthetic construct
  misc_feature 1..20: note = chemically synthesized
  source 1..20: mol_type = other DNA
ctgtgggtcgcccaaggctg

SEQ ID NO: 55209 - DNA, 20 bp, synthetic construct
  misc_feature 1..20: note = chemically synthesized
  source 1..20: mol_type = other DNA
tgtgggtcgcccaaggctgc

SEQ ID NO: 55210 - DNA, 20 bp, synthetic construct
  misc_feature 1..20: note = chemically synthesized
  source 1..20: mol_type = other DNA
ctgcgggctgtgtcaacatc

SEQ ID NO: 55211 - DNA, 20 bp, synthetic construct
  misc_feature 1..20: note = chemically synthesized
  source 1..20: mol_type = other DNA
cgggctgtgtcaacatctgg

SEQ ID NO: 55212 - DNA, 20 bp, synthetic construct
  misc_feature 1..20: note = chemically synthesized
  source 1..20: mol_type = other DNA
tgtgtcaacatctggtggat

SEQ ID NO: 55213 - DNA, 20 bp, synthetic construct
  misc_feature 1..20: note = chemically synthesized
  source 1..20: mol_type = other DNA
gagcttctgctcaccacctt

SEQ ID NO: 55214 - DNA, 20 bp, synthetic construct
  misc_feature 1..20: note = chemically synthesized
  source 1..20: mol_type = other DNA
gctcaatgcctgctccacac

SEQ ID NO: 55215 - DNA, 20 bp, synthetic construct
  misc_feature 1..20: note = chemically synthesized
  source 1..20: mol_type = other DNA
ctcaatgcctgctccacact

SEQ ID NO: 55216 - DNA, 20 bp, synthetic construct
  misc_feature 1..20: note = chemically synthesized
  source 1..20: mol_type = other DNA
tgcctgctccacactgggca

SEQ ID NO: 55217 - DNA, 20 bp, synthetic construct
  misc_feature 1..20: note = chemically synthesized
  source 1..20: mol_type = other DNA
gcctgctccacactgggcac

SEQ ID NO: 55218 - DNA, 20 bp, synthetic construct
  misc_feature 1..20: note = chemically synthesized
  source 1..20: mol_type = other DNA
cctgctccacactgggcaca

SEQ ID NO: 55219 - DNA, 20 bp, synthetic construct
  misc_feature 1..20: note = chemically synthesized
  source 1..20: mol_type = other DNA
cacagggtgtttttctcatg

SEQ ID NO: 55220 - DNA, 20 bp, synthetic construct
  misc_feature 1..20: note = chemically synthesized
  source 1..20: mol_type = other DNA
gtttttctcatgaagtgtgc

SEQ ID NO: 55221 - DNA, 20 bp, synthetic construct
  misc_feature 1..20: note = chemically synthesized
  source 1..20: mol_type = other DNA
tttttctcatgaagtgtgct

SEQ ID NO: 55222 - DNA, 20 bp, synthetic construct
  misc_feature 1..20: note = chemically synthesized
  source 1..20: mol_type = other DNA
tcatgaagtgtgctaggcgt

SEQ ID NO: 55223 - DNA, 20 bp, synthetic construct
  misc_feature 1..20: note = chemically synthesized
  source 1..20: mol_type = other DNA
agtgtgctaggcgtgagctg

SEQ ID NO: 55224 - DNA, 20 bp, synthetic construct
  misc_feature 1..20: note = chemically synthesized
  source 1..20: mol_type = other DNA
gtgtgctaggcgtgagctgt

SEQ ID NO: 55225 - DNA, 20 bp, synthetic construct
  misc_feature 1..20: note = chemically synthesized
  source 1..20: mol_type = other DNA
aggcgtgagctgtgggccac

SEQ ID NO: 55226 - DNA, 20 bp, synthetic construct
  misc_feature 1..20: note = chemically synthesized
  source 1..20: mol_type = other DNA
tgggccaccagcaacccttc

SEQ ID NO: 55227 - DNA, 20 bp, synthetic construct
  misc_feature 1..20: note = chemically synthesized
  source 1..20: mol_type = other DNA
accagcaacccttctggttt

SEQ ID NO: 55228 - DNA, 20 bp, synthetic construct
  misc_feature 1..20: note = chemically synthesized
  source 1..20: mol_type = other DNA
ccagcaacccttctggttta

SEQ ID NO: 55229 - DNA, 20 bp, synthetic construct
  misc_feature 1..20: note = chemically synthesized
  source 1..20: mol_type = other DNA
agcaacccttctggtttaag

SEQ ID NO: 55230 - DNA, 20 bp, synthetic construct
  misc_feature 1..20: note = chemically synthesized
  source 1..20: mol_type = other DNA
gcaacccttctggtttaagg

SEQ ID NO: 55231 - DNA, 20 bp, synthetic construct
  misc_feature 1..20: note = chemically synthesized
  source 1..20: mol_type = other DNA
ttaaggaggaattacctctg

SEQ ID NO: 55232 - DNA, 20 bp, synthetic construct
  misc_feature 1..20: note = chemically synthesized
  source 1..20: mol_type = other DNA
aggaggaattacctctgcag

SEQ ID NO: 55233 - DNA, 20 bp, synthetic construct
  misc_feature 1..20: note = chemically synthesized
  source 1..20: mol_type = other DNA
gaattacctctgcagaagtt

SEQ ID NO: 55234 - DNA, 20 bp, synthetic construct
  misc_feature 1..20: note = chemically synthesized
  source 1..20: mol_type = other DNA
gaagtttagcgtgaccctcg

SEQ ID NO: 55235 - DNA, 20 bp, synthetic construct
  misc_feature 1..20: note = chemically synthesized
  source 1..20: mol_type = other DNA
aagtttagcgtgaccctcga

SEQ ID NO: 55236 - DNA, 20 bp, synthetic construct
  misc_feature 1..20: note = chemically synthesized
  source 1..20: mol_type = other DNA
agtttagcgtgaccctcgaa

SEQ ID NO: 55237 - DNA, 20 bp, synthetic construct
  misc_feature 1..20: note = chemically synthesized
  source 1..20: mol_type = other DNA
gtttagcgtgaccctcgaag

SEQ ID NO: 55238 - DNA, 20 bp, synthetic construct
  misc_feature 1..20: note = chemically synthesized
  source 1..20: mol_type = other DNA
ttagcgtgaccctcgaaggg

SEQ ID NO: 55239 - DNA, 20 bp, synthetic construct
  misc_feature 1..20: note = chemically synthesized
  source 1..20: mol_type = other DNA
agcgtgaccctcgaagggga

SEQ ID NO: 55240 - DNA, 20 bp, synthetic construct
  misc_feature 1..20: note = chemically synthesized
  source 1..20: mol_type = other DNA
gaccctcgaaggggagagtg

SEQ ID NO: 55241 - DNA, 20 bp, synthetic construct
  misc_feature 1..20: note = chemically synthesized
  source 1..20: mol_type = other DNA
ctcgaaggggagagtgtggt

SEQ ID NO: 55242 - DNA, 20 bp, synthetic construct
  misc_feature 1..20: note = chemically synthesized
  source 1..20: mol_type = other DNA
tcgaaggggagagtgtggtg

SEQ ID NO: 55243 - DNA, 20 bp, synthetic construct
  misc_feature 1..20: note = chemically synthesized
  source 1..20: mol_type = other DNA
aaggggagagtgtggtgagg

SEQ ID NO: 55244 - DNA, 20 bp, synthetic construct
  misc_feature 1..20: note = chemically synthesized
  source 1..20: mol_type = other DNA
gagagtgtggtgaggtggta

SEQ ID NO: 55245 - DNA, 20 bp, synthetic construct
  misc_feature 1..20: note = chemically synthesized
  source 1..20: mol_type = other DNA
tgtggtgaggtggtatggtt

SEQ ID NO: 55246 - DNA, 20 bp, synthetic construct
  misc_feature 1..20: note = chemically synthesized
  source 1..20: mol_type = other DNA
tggtgaggtggtatggttca

SEQ ID NO: 55247 - DNA, 20 bp, synthetic construct
  misc_feature 1..20: note = chemically synthesized
  source 1..20: mol_type = other DNA
ggtgaggtggtatggttcag

SEQ ID NO: 55248 - DNA, 20 bp, synthetic construct
  misc_feature 1..20: note = chemically synthesized
  source 1..20: mol_type = other DNA
gtggtatggttcagaggaac

SEQ ID NO: 55249 - DNA, 20 bp, synthetic construct
  misc_feature 1..20: note = chemically synthesized
  source 1..20: mol_type = other DNA
gtatggttcagaggaacaag

SEQ ID NO: 55250 - DNA, 20 bp, synthetic construct
  misc_feature 1..20: note = chemically synthesized
  source 1..20: mol_type = other DNA
agaggaacaagtagcccatc

SEQ ID NO: 55251 - DNA, 20 bp, synthetic construct
  misc_feature 1..20: note = chemically synthesized
  source 1..20: mol_type = other DNA
gaacaagtagcccatcaagc

SEQ ID NO: 55252 - DNA, 20 bp, synthetic construct
  misc_feature 1..20: note = chemically synthesized
  source 1..20: mol_type = other DNA
aagccagctttgccacttat

SEQ ID NO: 55253 - DNA, 20 bp, synthetic construct
  misc_feature 1..20: note = chemically synthesized
  source 1..20: mol_type = other DNA
ttatgagctgtgtgacattg

SEQ ID NO: 55254 - DNA, 20 bp, synthetic construct
  misc_feature 1..20: note = chemically synthesized
  source 1..20: mol_type = other DNA
tatgagctgtgtgacattgt

SEQ ID NO: 55255 - DNA, 20 bp, synthetic construct
  misc_feature 1..20: note = chemically synthesized
  source 1..20: mol_type = other DNA
tgagctgtgtgacattgtgg

SEQ ID NO: 55256 - DNA, 20 bp, synthetic construct
  misc_feature 1..20: note = chemically synthesized
  source 1..20: mol_type = other DNA
tgtgtgacattgtgggagac

SEQ ID NO: 55257 - DNA, 20 bp, synthetic construct
  misc_feature 1..20: note = chemically synthesized
  source 1..20: mol_type = other DNA
gtgacattgtgggagaccag

SEQ ID NO: 55258 - DNA, 20 bp, synthetic construct
  misc_feature 1..20: note = chemically synthesized
  source 1..20: mol_type = other DNA
gggagaccagtagcctctct

SEQ ID NO: 55259 - DNA, 20 bp, synthetic construct
  misc_feature 1..20: note = chemically synthesized
  source 1..20: mol_type = other DNA
ccagtagcctctctgagcct

SEQ ID NO: 55260 - DNA, 20 bp, synthetic construct
  misc_feature 1..20: note = chemically synthesized
  source 1..20: mol_type = other DNA
tctctgagcctcagtttcct

SEQ ID NO: 55261 - DNA, 20 bp, synthetic construct
  misc_feature 1..20: note = chemically synthesized
  source 1..20: mol_type = other DNA
agcctcagtttcctcagatt

SEQ ID NO: 55262 - DNA, 20 bp, synthetic construct
  misc_feature 1..20: note = chemically synthesized
  source 1..20: mol_type = other DNA
cctcagtttcctcagatttg

SEQ ID NO: 55263 - DNA, 20 bp, synthetic construct
  misc_feature 1..20: note = chemically synthesized
  source 1..20: mol_type = other DNA
tttcctcagatttggagttt

SEQ ID NO: 55264 - DNA, 20 bp, synthetic construct
  misc_feature 1..20: note = chemically synthesized
  source 1..20: mol_type = other DNA
tcctcagatttggagtttaa

SEQ ID NO: 55265 - DNA, 20 bp, synthetic construct
  misc_feature 1..20: note = chemically synthesized
  source 1..20: mol_type = other DNA
agatttggagtttaagagca

SEQ ID NO: 55266 - DNA, 20 bp, synthetic construct
  misc_feature 1..20: note = chemically synthesized
  source 1..20: mol_type = other DNA
tttggagtttaagagcacag

SEQ ID NO: 55267 - DNA, 20 bp, synthetic construct
  misc_feature 1..20: note = chemically synthesized
  source 1..20: mol_type = other DNA
gcagatatactcacacatcg

SEQ ID NO: 55268 - DNA, 20 bp, synthetic construct
  misc_feature 1..20: note = chemically synthesized
  source 1..20: mol_type = other DNA
cacacatcgcagtgctgcta

SEQ ID NO: 55269 - DNA, 20 bp, synthetic construct
  misc_feature 1..20: note = chemically synthesized
  source 1..20: mol_type = other DNA
catcgcagtgctgctacagt

SEQ ID NO: 55270 - DNA, 20 bp, synthetic construct
  misc_feature 1..20: note = chemically synthesized
  source 1..20: mol_type = other DNA
tgctgctacagtgagtaaat

SEQ ID NO: 55271 - DNA, 20 bp, synthetic construct
  misc_feature 1..20: note = chemically synthesized
  source 1..20: mol_type = other DNA
tacagtgagtaaatgagaaa

SEQ ID NO: 55272 - DNA, 20 bp, synthetic construct
  misc_feature 1..20: note = chemically synthesized
  source 1..20: mol_type = other DNA
gtgagtaaatgagaaacagc

SEQ ID NO: 55273 - DNA, 20 bp, synthetic construct
  misc_feature 1..20: note = chemically synthesized
  source 1..20: mol_type = other DNA
tgagtaaatgagaaacagcc

SEQ ID NO: 55274 - DNA, 20 bp, synthetic construct
  misc_feature 1..20: note = chemically synthesized
  source 1..20: mol_type = other DNA
gagtaaatgagaaacagcca

SEQ ID NO: 55275 - DNA, 20 bp, synthetic construct
  misc_feature 1..20: note = chemically synthesized
  source 1..20: mol_type = other DNA
agtaaatgagaaacagccag

SEQ ID NO: 55276 - DNA, 20 bp, synthetic construct
  misc_feature 1..20: note = chemically synthesized
  source 1..20: mol_type = other DNA
taaatgagaaacagccaggg

SEQ ID NO: 55277 - DNA, 20 bp, synthetic construct
  misc_feature 1..20: note = chemically synthesized
  source 1..20: mol_type = other DNA
aaatgagaaacagccagggg

SEQ ID NO: 55278 - DNA, 20 bp, synthetic construct
  misc_feature 1..20: note = chemically synthesized
  source 1..20: mol_type = other DNA
cagccaggggaggtacttca

SEQ ID NO: 55279 - DNA, 20 bp, synthetic construct
  misc_feature 1..20: note = chemically synthesized
  source 1..20: mol_type = other DNA
agccaggggaggtacttcat

SEQ ID NO: 55280 - DNA, 20 bp, synthetic construct
  misc_feature 1..20: note = chemically synthesized
  source 1..20: mol_type = other DNA
gccaggggaggtacttcata

SEQ ID NO: 55281 - DNA, 20 bp, synthetic construct
  misc_feature 1..20: note = chemically synthesized
  source 1..20: mol_type = other DNA
tcatagggatgtctgattca

SEQ ID NO: 55282 - DNA, 20 bp, synthetic construct
  misc_feature 1..20: note = chemically synthesized
  source 1..20: mol_type = other DNA
agggatgtctgattcacaga

SEQ ID NO: 55283 - DNA, 20 bp, synthetic construct
  misc_feature 1..20: note = chemically synthesized
  source 1..20: mol_type = other DNA
ctgattcacagaaagctcat

SEQ ID NO: 55284 - DNA, 20 bp, synthetic construct
  misc_feature 1..20: note = chemically synthesized
  source 1..20: mol_type = other DNA
cacagaaagctcataagtgc

SEQ ID NO: 55285 - DNA, 20 bp, synthetic construct
  misc_feature 1..20: note = chemically synthesized
  source 1..20: mol_type = other DNA
gctcataagtgcaagaaatg

SEQ ID NO: 55286 - DNA, 20 bp, synthetic construct
  misc_feature 1..20: note = chemically synthesized
  source 1..20: mol_type = other DNA
ctatttattctctgttctaa

SEQ ID NO: 55287 - DNA, 20 bp, synthetic construct
  misc_feature 1..20: note = chemically synthesized
  source 1..20: mol_type = other DNA
tatttattctctgttctaat

SEQ ID NO: 55288 - DNA, 20 bp, synthetic construct
  misc_feature 1..20: note = chemically synthesized
  source 1..20: mol_type = other DNA
ttgaacatcataccaactca

SEQ ID NO: 55289 - DNA, 20 bp, synthetic construct
  misc_feature 1..20: note = chemically synthesized
  source 1..20: mol_type = other DNA
tgaacatcataccaactcaa

SEQ ID NO: 55290 - DNA, 20 bp, synthetic construct
  misc_feature 1..20: note = chemically synthesized
  source 1..20: mol_type = other DNA
acatcataccaactcaaagg

SEQ ID NO: 55291 - DNA, 20 bp, synthetic construct
  misc_feature 1..20: note = chemically synthesized
  source 1..20: mol_type = other DNA
catcataccaactcaaaggc

SEQ ID NO: 55292 - DNA, 20 bp, synthetic construct
  misc_feature 1..20: note = chemically synthesized
  source 1..20: mol_type = other DNA
aactcaaaggcaggtcttac

SEQ ID NO: 55293 - DNA, 20 bp, synthetic construct
  misc_feature 1..20: note = chemically synthesized
  source 1..20: mol_type = other DNA
caggtcttactagcaatgac

SEQ ID NO: 55294 - DNA, 20 bp, synthetic construct
  misc_feature 1..20: note = chemically synthesized
  source 1..20: mol_type = other DNA
aggtcttactagcaatgact

SEQ ID NO: 55295 - DNA, 20 bp, synthetic construct
  misc_feature 1..20: note = chemically synthesized
  source 1..20: mol_type = other DNA
ggtcttactagcaatgactg

SEQ ID NO: 55296 - DNA, 20 bp, synthetic construct
  misc_feature 1..20: note = chemically synthesized
  source 1..20: mol_type = other DNA
tactagcaatgactggggct

SEQ ID NO: 55297 - DNA, 20 bp, synthetic construct
  misc_feature 1..20: note = chemically synthesized
  source 1..20: mol_type = other DNA
ctagcaatgactggggctca

SEQ ID NO: 55298 - DNA, 20 bp, synthetic construct
  misc_feature 1..20: note = chemically synthesized
  source 1..20: mol_type = other DNA
agcaatgactggggctcaga

SEQ ID NO: 55299 - DNA, 20 bp, synthetic construct
  misc_feature 1..20: note = chemically synthesized
  source 1..20: mol_type = other DNA
gcaatgactggggctcagag

SEQ ID NO: 55300 - DNA, 20 bp, synthetic construct
  misc_feature 1..20: note = chemically synthesized
  source 1..20: mol_type = other DNA
gactggggctcagagaggtt

SEQ ID NO: 55301 - DNA, 20 bp, synthetic construct
  misc_feature 1..20: note = chemically synthesized
  source 1..20: mol_type = other DNA
agaggtttggcgacttcacg

SEQ ID NO: 55302 - DNA, 20 bp, synthetic construct
  misc_feature 1..20: note = chemically synthesized
  source 1..20: mol_type = other DNA
gaggtttggcgacttcacga

SEQ ID NO: 55303 - DNA, 20 bp, synthetic construct
  misc_feature 1..20: note = chemically synthesized
  source 1..20: mol_type = other DNA
gcgacttcacgaaggtcaca

SEQ ID NO: 55304 - DNA, 20 bp, synthetic construct
  misc_feature 1..20: note = chemically synthesized
  source 1..20: mol_type = other DNA
cacgaaggtcacacagctgt

SEQ ID NO: 55305 - DNA, 20 bp, synthetic construct
  misc_feature 1..20: note = chemically synthesized
  source 1..20: mol_type = other DNA
acgaaggtcacacagctgtc

SEQ ID NO: 55306 - DNA, 20 bp, synthetic construct
  misc_feature 1..20: note = chemically synthesized
  source 1..20: mol_type = other DNA
cgaaggtcacacagctgtca

SEQ ID NO: 55307 - DNA, 20 bp, synthetic construct
  misc_feature 1..20: note = chemically synthesized
  source 1..20: mol_type = other DNA
gaaggtcacacagctgtcag

SEQ ID NO: 55308 - DNA, 20 bp, synthetic construct
  misc_feature 1..20: note = chemically synthesized
  source 1..20: mol_type = other DNA
aaggtcacacagctgtcagg

SEQ ID NO: 55309 - DNA, 20 bp, synthetic construct
  misc_feature 1..20: note = chemically synthesized
  source 1..20: mol_type = other DNA
cacacagctgtcagggggaa

SEQ ID NO: 55310 - DNA, 20 bp, synthetic construct
  misc_feature 1..20: note = chemically synthesized
  source 1..20: mol_type = other DNA
cagctgtcagggggaaaagt

SEQ ID NO: 55311 - DNA, 20 bp, synthetic construct
  misc_feature 1..20: note = chemically synthesized
  source 1..20: mol_type = other DNA
cagggggaaaagtcagaact

SEQ ID NO: 55312 - DNA, 20 bp, synthetic construct
  misc_feature 1..20: note = chemically synthesized
  source 1..20: mol_type = other DNA
gaaaagtcagaacttggatc

SEQ ID NO: 55313 - DNA, 20 bp, synthetic construct
  misc_feature 1..20: note = chemically synthesized
  source 1..20: mol_type = other DNA
aaaagtcagaacttggatcc

SEQ ID NO: 55314 - DNA, 20 bp, synthetic construct
  misc_feature 1..20: note = chemically synthesized
  source 1..20: mol_type = other DNA
agaacttggatccaggtctt

SEQ ID NO: 55315 - DNA, 20 bp, synthetic construct
  misc_feature 1..20: note = chemically synthesized
  source 1..20: mol_type = other DNA
gatccaggtcttcagactct

SEQ ID NO: 55316 - DNA, 20 bp, synthetic construct
  misc_feature 1..20: note = chemically synthesized
  source 1..20: mol_type = other DNA
atccaggtcttcagactctc

SEQ ID NO: 55317 - DNA, 20 bp, synthetic construct
  misc_feature 1..20: note = chemically synthesized
  source 1..20: mol_type = other DNA
ggtcttcagactctcaggtc

SEQ ID NO: 55318 - DNA, 20 bp, synthetic construct
  misc_feature 1..20: note = chemically synthesized
  source 1..20: mol_type = other DNA
tctcaggtctggtgtcatcc

SEQ ID NO: 55319 - DNA, 20 bp, synthetic construct
  misc_feature 1..20: note = chemically synthesized
  source 1..20: mol_type = other DNA
ctcaggtctggtgtcatcct

SEQ ID NO: 55320 - DNA, 20 bp, synthetic construct
  misc_feature 1..20: note = chemically synthesized
  source 1..20: mol_type = other DNA
tcaggtctggtgtcatccta

SEQ ID NO: 55321 - DNA, 20 bp, synthetic construct
  misc_feature 1..20: note = chemically synthesized
  source 1..20: mol_type = other DNA
caggtctggtgtcatcctag

SEQ ID NO: 55322 - DNA, 20 bp, synthetic construct
  misc_feature 1..20: note = chemically synthesized
  source 1..20: mol_type = other DNA
aggtctggtgtcatcctagg

SEQ ID NO: 55323 - DNA, 20 bp, synthetic construct
  misc_feature 1..20: note = chemically synthesized
  source 1..20: mol_type = other DNA
tggtgtcatcctagggggct

SEQ ID NO: 55324 - DNA, 20 bp, synthetic construct
  misc_feature 1..20: note = chemically synthesized
  source 1..20: mol_type = other DNA
catcctagggggcttggtga

SEQ ID NO: 55325 - DNA, 20 bp, synthetic construct
  misc_feature 1..20: note = chemically synthesized
  source 1..20: mol_type = other DNA
ccatatctttaatgtatttg

SEQ ID NO: 55326 - DNA, 20 bp, synthetic construct
  misc_feature 1..20: note = chemically synthesized
  source 1..20: mol_type = other DNA
atatctttaatgtatttgtg

SEQ ID NO: 55327 - DNA, 20 bp, synthetic construct
  misc_feature 1..20: note = chemically synthesized
  source 1..20: mol_type = other DNA
atctttaatgtatttgtgga

SEQ ID NO: 55328 - DNA, 20 bp, synthetic construct
  misc_feature 1..20: note = chemically synthesized
  source 1..20: mol_type = other DNA
aatgtatttgtggagagtga

SEQ ID NO: 55329 - DNA, 20 bp, synthetic construct
  misc_feature 1..20: note = chemically synthesized
  source 1..20: mol_type = other DNA
atgtatttgtggagagtgaa

SEQ ID NO: 55330 - DNA, 20 bp, synthetic construct
  misc_feature 1..20: note = chemically synthesized
  source 1..20: mol_type = other DNA
tgtggagagtgaaaggctgt

SEQ ID NO: 55331 - DNA, 20 bp, synthetic construct
  misc_feature 1..20: note = chemically synthesized
  source 1..20: mol_type = other DNA
gagagtgaaaggctgtcagt

SEQ ID NO: 55332 - DNA, 20 bp, synthetic construct
  misc_feature 1..20: note = chemically synthesized
  source 1..20: mol_type = other DNA
gtgaaaggctgtcagtgagt

SEQ ID NO: 55333 - DNA, 20 bp, synthetic construct
  misc_feature 1..20: note = chemically synthesized
  source 1..20: mol_type = other DNA
ggctgtcagtgagtaagctt

SEQ ID NO: 55334 - DNA, 20 bp, synthetic construct
  misc_feature 1..20: note = chemically synthesized
  source 1..20: mol_type = other DNA
ctgtcagtgagtaagcttaa

SEQ ID NO: 55335 - DNA, 20 bp, synthetic construct
  misc_feature 1..20: note = chemically synthesized
  source 1..20: mol_type = other DNA
agtgagtaagcttaagagaa

SEQ ID NO: 55336 - DNA, 20 bp, synthetic construct
  misc_feature 1..20: note = chemically synthesized
  source 1..20: mol_type = other DNA
gtgagtaagcttaagagaac

SEQ ID NO: 55337 - DNA, 20 bp, synthetic construct
  misc_feature 1..20: note = chemically synthesized
  source 1..20: mol_type = other DNA
gagtaagcttaagagaacag

SEQ ID NO: 55338 - DNA, 20 bp, synthetic construct
  misc_feature 1..20: note = chemically synthesized
  source 1..20: mol_type = other DNA
aagagaacaggagacttgtg

SEQ ID NO: 55339 - DNA, 20 bp, synthetic construct
  misc_feature 1..20: note = chemically synthesized
  source 1..20: mol_type = other DNA
agagaacaggagacttgtgt

SEQ ID NO: 55340 - DNA, 20 bp, synthetic construct
  misc_feature 1..20: note = chemically synthesized
  source 1..20: mol_type = other DNA
caggagacttgtgtgggaaa

SEQ ID NO: 55341 - DNA, 20 bp, synthetic construct
  misc_feature 1..20: note = chemically synthesized
  source 1..20: mol_type = other DNA
agacttgtgtgggaaacagt

SEQ ID NO: 55342 - DNA, 20 bp, synthetic construct
  misc_feature 1..20: note = chemically synthesized
  source 1..20: mol_type = other DNA
aacagtcggtatccattgat

SEQ ID NO: 55343 - DNA, 20 bp, synthetic construct
  misc_feature 1..20: note = chemically synthesized
  source 1..20: mol_type = other DNA
attgattagactgaatcatg

SEQ ID NO: 55344 - DNA, 20 bp, synthetic construct
  misc_feature 1..20: note = chemically synthesized
  source 1..20: mol_type = other DNA
gaactatcgaaatcactatt

SEQ ID NO: 55345 - DNA, 20 bp, synthetic construct
  misc_feature 1..20: note = chemically synthesized
  source 1..20: mol_type = other DNA
atgactcaacctcatccttt

SEQ ID NO: 55346 - DNA, 20 bp, synthetic construct
  misc_feature 1..20: note = chemically synthesized
  source 1..20: mol_type = other DNA
ctttaagtacacattcatga

SEQ ID NO: 55347 - DNA, 20 bp, synthetic construct
  misc_feature 1..20: note = chemically synthesized
  source 1..20: mol_type = other DNA
aagtacacattcatgacagt

SEQ ID NO: 55348 - DNA, 20 bp, synthetic construct
  misc_feature 1..20: note = chemically synthesized
  source 1..20: mol_type = other DNA
tacacattcatgacagtgag

SEQ ID NO: 55349 - DNA, 20 bp, synthetic construct
  misc_feature 1..20: note = chemically synthesized
  source 1..20: mol_type = other DNA
cattcatgacagtgagtggt

SEQ ID NO: 55350 - DNA, 20 bp, synthetic construct
  misc_feature 1..20: note = chemically synthesized
  source 1..20: mol_type = other DNA
catgacagtgagtggttaga

SEQ ID NO: 55351 - DNA, 20 bp, synthetic construct
  misc_feature 1..20: note = chemically synthesized
  source 1..20: mol_type = other DNA
agtggttagacagtgattcc

SEQ ID NO: 55352 - DNA, 20 bp, synthetic construct
  misc_feature 1..20: note = chemically synthesized
  source 1..20: mol_type = other DNA
ttagacagtgattcctagat

SEQ ID NO: 55353 - DNA, 20 bp, synthetic construct
  misc_feature 1..20: note = chemically synthesized
  source 1..20: mol_type = other DNA
cagtgattcctagattagtt

SEQ ID NO: 55354 - DNA, 20 bp, synthetic construct
  misc_feature 1..20: note = chemically synthesized
  source 1..20: mol_type = other DNA
agtgattcctagattagttt

SEQ ID NO: 55355 - DNA, 20 bp, synthetic construct
  misc_feature 1..20: note = chemically synthesized
  source 1..20: mol_type = other DNA
attcctagattagtttggga

SEQ ID NO: 55356 - DNA, 20 bp, synthetic construct
  misc_feature 1..20: note = chemically synthesized
  source 1..20: mol_type = other DNA
ttcctagattagtttgggat

SEQ ID NO: 55357 - DNA, 20 bp, synthetic construct
  misc_feature 1..20: note = chemically synthesized
  source 1..20: mol_type = other DNA
tcctagattagtttgggatg

SEQ ID NO: 55358 - DNA, 20 bp, synthetic construct
  misc_feature 1..20: note = chemically synthesized
  source 1..20: mol_type = other DNA
tagattagtttgggatgggg

SEQ ID NO: 55359 - DNA, 20 bp, synthetic construct
  misc_feature 1..20: note = chemically synthesized
  source 1..20: mol_type = other DNA
ggatggggcagtgccttcca

SEQ ID NO: 55360 - DNA, 20 bp, synthetic construct
  misc_feature 1..20: note = chemically synthesized
  source 1..20: mol_type = other DNA
gatggggcagtgccttccat

SEQ ID NO: 55361 - DNA, 20 bp, synthetic construct
  misc_feature 1..20: note = chemically synthesized
  source 1..20: mol_type = other DNA
ggcagtgccttccataggac

SEQ ID NO: 55362 - DNA, 20 bp, synthetic construct
  misc_feature 1..20: note = chemically synthesized
  source 1..20: mol_type = other DNA
gcagtgccttccataggaca

SEQ ID NO: 55363 - DNA, 20 bp, synthetic construct
  misc_feature 1..20: note = chemically synthesized
  source 1..20: mol_type = other DNA
ccataggacaaggccattcc

SEQ ID NO: 55364 - DNA, 20 bp, synthetic construct
  misc_feature 1..20: note = chemically synthesized
  source 1..20: mol_type = other DNA
taggacaaggccattcctgg

SEQ ID NO: 55365 - DNA, 20 bp, synthetic construct
  misc_feature 1..20: note = chemically synthesized
  source 1..20: mol_type = other DNA
ggacaaggccattcctggta

SEQ ID NO: 55366 - DNA, 20 bp, synthetic construct
  misc_feature 1..20: note = chemically synthesized
  source 1..20: mol_type = other DNA
aaggccattcctggtagaga

SEQ ID NO: 55367 - DNA, 20 bp, synthetic construct
  misc_feature 1..20: note = chemically synthesized
  source 1..20: mol_type = other DNA
ggccattcctggtagagacg

SEQ ID NO: 55368 - DNA, 20 bp, synthetic construct
  misc_feature 1..20: note = chemically synthesized
  source 1..20: mol_type = other DNA
gccattcctggtagagacgg

SEQ ID NO: 55369 - DNA, 20 bp, synthetic construct
  misc_feature 1..20: note = chemically synthesized
  source 1..20: mol_type = other DNA
ccattcctggtagagacgga

SEQ ID NO: 55370 - DNA, 20 bp, synthetic construct
  misc_feature 1..20: note = chemically synthesized
  source 1..20: mol_type = other DNA
attcctggtagagacggagg

SEQ ID NO: 55371 - DNA, 20 bp, synthetic construct
  misc_feature 1..20: note = chemically synthesized
  source 1..20: mol_type = other DNA
cctggtagagacggagggag

SEQ ID NO: 55372 - DNA, 20 bp, synthetic construct
  misc_feature 1..20: note = chemically synthesized
  source 1..20: mol_type = other DNA
ctggtagagacggagggagc

SEQ ID NO: 55373 - DNA, 20 bp, synthetic construct
  misc_feature 1..20: note = chemically synthesized
  source 1..20: mol_type = other DNA
ggagggagcaggctgtcctt

SEQ ID NO: 55374 - DNA, 20 bp, synthetic construct
  misc_feature 1..20: note = chemically synthesized
  source 1..20: mol_type = other DNA
ggagcaggctgtccttcagc

SEQ ID NO: 55375 - DNA, 20 bp, synthetic construct
  misc_feature 1..20: note = chemically synthesized
  source 1..20: mol_type = other DNA
gagcaggctgtccttcagct

SEQ ID NO: 55376 - DNA, 20 bp, synthetic construct
  misc_feature 1..20: note = chemically synthesized
  source 1..20: mol_type = other DNA
agcaggctgtccttcagcta

SEQ ID NO: 55377 - DNA, 20 bp, synthetic construct
  misc_feature 1..20: note = chemically synthesized
  source 1..20: mol_type = other DNA
gcaggctgtccttcagctag

SEQ ID NO: 55378 - DNA, 20 bp, synthetic construct
  misc_feature 1..20: note = chemically synthesized
  source 1..20: mol_type = other DNA
ctgtccttcagctaggggcc

SEQ ID NO: 55379 - DNA, 20 bp, synthetic construct
  misc_feature 1..20: note = chemically synthesized
  source 1..20: mol_type = other DNA
tgtccttcagctaggggccc

SEQ ID NO: 55380 - DNA, 20 bp, synthetic construct
  misc_feature 1..20: note = chemically synthesized
  source 1..20: mol_type = other DNA
gtccttcagctaggggccca

SEQ ID NO: 55381 - DNA, 20 bp, synthetic construct
  misc_feature 1..20: note = chemically synthesized
  source 1..20: mol_type = other DNA
tccttcagctaggggcccag

SEQ ID NO: 55382 - DNA, 20 bp, synthetic construct
  misc_feature 1..20: note = chemically synthesized
  source 1..20: mol_type = other DNA
taggggcccaggggacttcc

SEQ ID NO: 55383 - DNA, 20 bp, synthetic construct
  misc_feature 1..20: note = chemically synthesized
  source 1..20: mol_type = other DNA
ttcctggctgctgtgtcctt

SEQ ID NO: 55384 - DNA, 20 bp, synthetic construct
  misc_feature 1..20: note = chemically synthesized
  source 1..20: mol_type = other DNA
ctggctgctgtgtcctttag

SEQ ID NO: 55385 - DNA, 20 bp, synthetic construct
  misc_feature 1..20: note = chemically synthesized
  source 1..20: mol_type = other DNA
tggctgctgtgtcctttagc

SEQ ID NO: 55386 - DNA, 20 bp, synthetic construct
  misc_feature 1..20: note = chemically synthesized
  source 1..20: mol_type = other DNA
ggctgctgtgtcctttagca

SEQ ID NO: 55387 - DNA, 20 bp, synthetic construct
  misc_feature 1..20: note = chemically synthesized
  source 1..20: mol_type = other DNA
tgtgtcctttagcagggcct

SEQ ID NO: 55388 - DNA, 20 bp, synthetic construct
  misc_feature 1..20: note = chemically synthesized
  source 1..20: mol_type = other DNA
tgtcctttagcagggccttg

SEQ ID NO: 55389 - DNA, 20 bp, synthetic construct
  misc_feature 1..20: note = chemically synthesized
  source 1..20: mol_type = other DNA
gtcctttagcagggccttgg

SEQ ID NO: 55390 - DNA, 20 bp, synthetic construct
  misc_feature 1..20: note = chemically synthesized
  source 1..20: mol_type = other DNA
tttagcagggccttggagga

SEQ ID NO: 55391 - DNA, 20 bp, synthetic construct
  misc_feature 1..20: note = chemically synthesized
  source 1..20: mol_type = other DNA
agcagggccttggaggatgg

SEQ ID NO: 55392 - DNA, 20 bp, synthetic construct
  misc_feature 1..20: note = chemically synthesized
  source 1..20: mol_type = other DNA
gcagggccttggaggatgga

SEQ ID NO: 55393 - DNA, 20 bp, synthetic construct
  misc_feature 1..20: note = chemically synthesized
  source 1..20: mol_type = other DNA
ggaggatggaaggactctcc

SEQ ID NO: 55394 - DNA, 20 bp, synthetic construct
  misc_feature 1..20: note = chemically synthesized
  source 1..20: mol_type = other DNA
gactctcctggcccttacca

SEQ ID NO: 55395 - DNA, 20 bp, synthetic construct
  misc_feature 1..20: note = chemically synthesized
  source 1..20: mol_type = other DNA
actctcctggcccttaccac

SEQ ID NO: 55396 - DNA, 20 bp, synthetic construct
  misc_feature 1..20: note = chemically synthesized
  source 1..20: mol_type = other DNA
ctctcctggcccttaccaca

SEQ ID NO: 55397 - DNA, 20 bp, synthetic construct
  misc_feature 1..20: note = chemically synthesized
  source 1..20: mol_type = other DNA
tctcctggcccttaccacag

SEQ ID NO: 55398 - DNA, 20 bp, synthetic construct
  misc_feature 1..20: note = chemically synthesized
  source 1..20: mol_type = other DNA
cccttaccacaggggctatt

SEQ ID NO: 55399 - DNA, 20 bp, synthetic construct
  misc_feature 1..20: note = chemically synthesized
  source 1..20: mol_type = other DNA
ccttaccacaggggctattc

SEQ ID NO: 55400 - DNA, 20 bp, synthetic construct
  misc_feature 1..20: note = chemically synthesized
  source 1..20: mol_type = other DNA
ccacaggggctattcaggaa

SEQ ID NO: 55401 - DNA, 20 bp, synthetic construct
  misc_feature 1..20: note = chemically synthesized
  source 1..20: mol_type = other DNA
tcaggaacagcctcctgccg

SEQ ID NO: 55402 - DNA, 20 bp, synthetic construct
  misc_feature 1..20: note = chemically synthesized
  source 1..20: mol_type = other DNA
acagcctcctgccgtggcac

SEQ ID NO: 55403 - DNA, 20 bp, synthetic construct
  misc_feature 1..20: note = chemically synthesized
  source 1..20: mol_type = other DNA
agcctcctgccgtggcactg

SEQ ID NO: 55404 - DNA, 20 bp, synthetic construct
  misc_feature 1..20: note = chemically synthesized
  source 1..20: mol_type = other DNA
ctgccgtggcactggagctg

SEQ ID NO: 55405 - DNA, 20 bp, synthetic construct
  misc_feature 1..20: note = chemically synthesized
  source 1..20: mol_type = other DNA
ccgtggcactggagctgcgg

SEQ ID NO: 55406 - DNA, 20 bp, synthetic construct
  misc_feature 1..20: note = chemically synthesized
  source 1..20: mol_type = other DNA
ggagctgcggtggccctctg

SEQ ID NO: 55407 - DNA, 20 bp, synthetic construct
  misc_feature 1..20: note = chemically synthesized
  source 1..20: mol_type = other DNA
cggtggccctctgaagactg

SEQ ID NO: 55408 - DNA, 20 bp, synthetic construct
  misc_feature 1..20: note = chemically synthesized
  source 1..20: mol_type = other DNA
ggtggccctctgaagactgc

SEQ ID NO: 55409 - DNA, 20 bp, synthetic construct
  misc_feature 1..20: note = chemically synthesized
  source 1..20: mol_type = other DNA
gtggccctctgaagactgca

SEQ ID NO: 55410 - DNA, 20 bp, synthetic construct
  misc_feature 1..20: note = chemically synthesized
  source 1..20: mol_type = other DNA
ccctctgaagactgcaggga

SEQ ID NO: 55411 - DNA, 20 bp, synthetic construct
  misc_feature 1..20: note = chemically synthesized
  source 1..20: mol_type = other DNA
gaagactgcagggacagcaa

SEQ ID NO: 55412 - DNA, 20 bp, synthetic construct
  misc_feature 1..20: note = chemically synthesized
  source 1..20: mol_type = other DNA
aagactgcagggacagcaac

SEQ ID NO: 55413 - DNA, 20 bp, synthetic construct
  misc_feature 1..20: note = chemically synthesized
  source 1..20: mol_type = other DNA
cagggacagcaacaggcaca

SEQ ID NO: 55414 - DNA, 20 bp, synthetic construct
  misc_feature 1..20: note = chemically synthesized
  source 1..20: mol_type = other DNA
ggacagcaacaggcacaaag

SEQ ID NO: 55415 - DNA, 20 bp, synthetic construct
  misc_feature 1..20: note = chemically synthesized
  source 1..20: mol_type = other DNA
agcaacaggcacaaagaagt

SEQ ID NO: 55416 - DNA, 20 bp, synthetic construct
  misc_feature 1..20: note = chemically synthesized
  source 1..20: mol_type = other DNA
gcaacaggcacaaagaagtc

SEQ ID NO: 55417 - DNA, 20 bp, synthetic construct
  misc_feature 1..20: note = chemically synthesized
  source 1..20: mol_type = other DNA
caaagaagtcaggctgcatg

SEQ ID NO: 55418 - DNA, 20 bp, synthetic construct
  misc_feature 1..20: note = chemically synthesized
  source 1..20: mol_type = other DNA
agtcaggctgcatgtggccc

SEQ ID NO: 55419 - DNA, 20 bp, synthetic construct
  misc_feature 1..20: note = chemically synthesized
  source 1..20: mol_type = other DNA
aggctgcatgtggccccagt

SEQ ID NO: 55420 - DNA, 20 bp, synthetic construct
  misc_feature 1..20: note = chemically synthesized
  source 1..20: mol_type = other DNA
ggctgcatgtggccccagtc

SEQ ID NO: 55421 - DNA, 20 bp, synthetic construct
  misc_feature 1..20: note = chemically synthesized
  source 1..20: mol_type = other DNA
atgtggccccagtcgggact

SEQ ID NO: 55422 - DNA, 20 bp, synthetic construct
  misc_feature 1..20: note = chemically synthesized
  source 1..20: mol_type = other DNA
gtggccccagtcgggactca

SEQ ID NO: 55423 - DNA, 20 bp, synthetic construct
  misc_feature 1..20: note = chemically synthesized
  source 1..20: mol_type = other DNA
tggccccagtcgggactcag

SEQ ID NO: 55424 - DNA, 20 bp, synthetic construct
  misc_feature 1..20: note = chemically synthesized
  source 1..20: mol_type = other DNA
gccccagtcgggactcagag

SEQ ID NO: 55425 - DNA, 20 bp, synthetic construct
  misc_feature 1..20: note = chemically synthesized
  source 1..20: mol_type = other DNA
ccccagtcgggactcagagg

SEQ ID NO: 55426 - DNA, 20 bp, synthetic construct
  misc_feature 1..20: note = chemically synthesized
  source 1..20: mol_type = other DNA
agtcgggactcagaggagga

SEQ ID NO: 55427 - DNA, 20 bp, synthetic construct
  misc_feature 1..20: note = chemically synthesized
  source 1..20: mol_type = other DNA
gtcgggactcagaggaggaa

SEQ ID NO: 55428 - DNA, 20 bp, synthetic construct
  misc_feature 1..20: note = chemically synthesized
  source 1..20: mol_type = other DNA
tcgggactcagaggaggaaa

SEQ ID NO: 55429 - DNA, 20 bp, synthetic construct
  misc_feature 1..20: note = chemically synthesized
  source 1..20: mol_type = other DNA
gggactcagaggaggaaagg

SEQ ID NO: 55430 - DNA, 20 bp, synthetic construct
  misc_feature 1..20: note = chemically synthesized
  source 1..20: mol_type = other DNA
ggactcagaggaggaaaggg

SEQ ID NO: 55431 - DNA, 20 bp, synthetic construct
  misc_feature 1..20: note = chemically synthesized
  source 1..20: mol_type = other DNA
gactcagaggaggaaaggga

SEQ ID NO: 55432 - DNA, 20 bp, synthetic construct
  misc_feature 1..20: note = chemically synthesized
  source 1..20: mol_type = other DNA
actcagaggaggaaagggag

SEQ ID NO: 55433 - DNA, 20 bp, synthetic construct
  misc_feature 1..20: note = chemically synthesized
  source 1..20: mol_type = other DNA
aggaggaaagggaggggttg

SEQ ID NO: 55434 - DNA, 20 bp, synthetic construct
  misc_feature 1..20: note = chemically synthesized
  source 1..20: mol_type = other DNA
ggaggaaagggaggggttgc

SEQ ID NO: 55435 - DNA, 20 bp, synthetic construct
  misc_feature 1..20: note = chemically synthesized
  source 1..20: mol_type = other DNA
gaggaaagggaggggttgcg

SEQ ID NO: 55436 - DNA, 20 bp, synthetic construct
  misc_feature 1..20: note = chemically synthesized
  source 1..20: mol_type = other DNA
aggaaagggaggggttgcgg

SEQ ID NO: 55437 - DNA, 20 bp, synthetic construct
  misc_feature 1..20: note = chemically synthesized
  source 1..20: mol_type = other DNA
ggaggggttgcgggggtcaa

SEQ ID NO: 55438 - DNA, 20 bp, synthetic construct
  misc_feature 1..20: note = chemically synthesized
  source 1..20: mol_type = other DNA
gaggggttgcgggggtcaat

SEQ ID NO: 55439 - DNA, 20 bp, synthetic construct
  misc_feature 1..20: note = chemically synthesized
  source 1..20: mol_type = other DNA
gtgatgtgcttcctctccca

SEQ ID NO: 55440 - DNA, 20 bp, synthetic construct
  misc_feature 1..20: note = chemically synthesized
  source 1..20: mol_type = other DNA
gtgcttcctctcccatagct

SEQ ID NO: 55441 - DNA, 20 bp, synthetic construct
  misc_feature 1..20: note = chemically synthesized
  source 1..20: mol_type = other DNA
tgcttcctctcccatagctg

SEQ ID NO: 55442 - DNA, 20 bp, synthetic construct
  misc_feature 1..20: note = chemically synthesized
  source 1..20: mol_type = other DNA
cttcctctcccatagctgag

SEQ ID NO: 55443 - DNA, 20 bp, synthetic construct
  misc_feature 1..20: note = chemically synthesized
  source 1..20: mol_type = other DNA
tagctgaggagtccttgcaa

SEQ ID NO: 55444 - DNA, 20 bp, synthetic construct
  misc_feature 1..20: note = chemically synthesized
  source 1..20: mol_type = other DNA
gtccttgcaatggccttcct

SEQ ID NO: 55445 - DNA, 20 bp, synthetic construct
  misc_feature 1..20: note = chemically synthesized
  source 1..20: mol_type = other DNA
caatggccttcctgagccat

SEQ ID NO: 55446 - DNA, 20 bp, synthetic construct
  misc_feature 1..20: note = chemically synthesized
  source 1..20: mol_type = other DNA
tggccttcctgagccatcag

SEQ ID NO: 55447 - DNA, 20 bp, synthetic construct
  misc_feature 1..20: note = chemically synthesized
  source 1..20: mol_type = other DNA
ggccttcctgagccatcagc

SEQ ID NO: 55448 - DNA, 20 bp, synthetic construct
  misc_feature 1..20: note = chemically synthesized
  source 1..20: mol_type = other DNA
ctgagccatcagcaggccta

SEQ ID NO: 55449 - DNA, 20 bp, synthetic construct
  misc_feature 1..20: note = chemically synthesized
  source 1..20: mol_type = other DNA
caggcctatggccatgtgac

SEQ ID NO: 55450 - DNA, 20 bp, synthetic construct
  misc_feature 1..20: note = chemically synthesized
  source 1..20: mol_type = other DNA
aggcctatggccatgtgact

SEQ ID NO: 55451 - DNA, 20 bp, synthetic construct
  misc_feature 1..20: note = chemically synthesized
  source 1..20: mol_type = other DNA
ggcctatggccatgtgacta

SEQ ID NO: 55452 - DNA, 20 bp, synthetic construct
  misc_feature 1..20: note = chemically synthesized
  source 1..20: mol_type = other DNA
cctatggccatgtgactagg

SEQ ID NO: 55453 - DNA, 20 bp, synthetic construct
  misc_feature 1..20: note = chemically synthesized
  source 1..20: mol_type = other DNA
ctatggccatgtgactaggg

SEQ ID NO: 55454 - DNA, 20 bp, synthetic construct
  misc_feature 1..20: note = chemically synthesized
  source 1..20: mol_type = other DNA
atggccatgtgactagggag

SEQ ID NO: 55455 - DNA, 20 bp, synthetic construct
  misc_feature 1..20: note = chemically synthesized
  source 1..20: mol_type = other DNA
gccatgtgactagggaggag

SEQ ID NO: 55456 - DNA, 20 bp, synthetic construct
  misc_feature 1..20: note = chemically synthesized
  source 1..20: mol_type = other DNA
ccatgtgactagggaggaga

SEQ ID NO: 55457 - DNA, 20 bp, synthetic construct
  misc_feature 1..20: note = chemically synthesized
  source 1..20: mol_type = other DNA
catgtgactagggaggagaa

SEQ ID NO: 55458 - DNA, 20 bp, synthetic construct
  misc_feature 1..20: note = chemically synthesized
  source 1..20: mol_type = other DNA
actagggaggagaagggata

SEQ ID NO: 55459 - DNA, 20 bp, synthetic construct
  misc_feature 1..20: note = chemically synthesized
  source 1..20: mol_type = other DNA
ctagggaggagaagggatat

SEQ ID NO: 55460 - DNA, 20 bp, synthetic construct
  misc_feature 1..20: note = chemically synthesized
  source 1..20: mol_type = other DNA
tagggaggagaagggatata

SEQ ID NO: 55461 - DNA, 20 bp, synthetic construct
  misc_feature 1..20: note = chemically synthesized
  source 1..20: mol_type = other DNA
ggagaagggatatagggtaa

SEQ ID NO: 55462 - DNA, 20 bp, synthetic construct
  misc_feature 1..20: note = chemically synthesized
  source 1..20: mol_type = other DNA
gatatagggtaatggtcttc

SEQ ID NO: 55463 - DNA, 20 bp, synthetic construct
  misc_feature 1..20: note = chemically synthesized
  source 1..20: mol_type = other DNA
atatagggtaatggtcttct

SEQ ID NO: 55464 - DNA, 20 bp, synthetic construct
  misc_feature 1..20: note = chemically synthesized
  source 1..20: mol_type = other DNA
tatagggtaatggtcttctg

SEQ ID NO: 55465 - DNA, 20 bp, synthetic construct
  misc_feature 1..20: note = chemically synthesized
  source 1..20: mol_type = other DNA
aatggtcttctggggcctgc

SEQ ID NO: 55466 - DNA, 20 bp, synthetic construct
  misc_feature 1..20: note = chemically synthesized
  source 1..20: mol_type = other DNA
atggtcttctggggcctgct

SEQ ID NO: 55467 - DNA, 20 bp, synthetic construct
  misc_feature 1..20: note = chemically synthesized
  source 1..20: mol_type = other DNA
cttctggggcctgctgggcc

SEQ ID NO: 55468 - DNA, 20 bp, synthetic construct
  misc_feature 1..20: note = chemically synthesized
  source 1..20: mol_type = other DNA
ggggcctgctgggcctggtc

SEQ ID NO: 55469 - DNA, 20 bp, synthetic construct
  misc_feature 1..20: note = chemically synthesized
  source 1..20: mol_type = other DNA
tgctgggcctggtcaagtct

SEQ ID NO: 55470 - DNA, 20 bp, synthetic construct
  misc_feature 1..20: note = chemically synthesized
  source 1..20: mol_type = other DNA
gctgggcctggtcaagtctg

SEQ ID NO: 55471 - DNA, 20 bp, synthetic construct
  misc_feature 1..20: note = chemically synthesized
  source 1..20: mol_type = other DNA
tgggcctggtcaagtctgag

SEQ ID NO: 55472 - DNA, 20 bp, synthetic construct
  misc_feature 1..20: note = chemically synthesized
  source 1..20: mol_type = other DNA
gggcctggtcaagtctgagg

SEQ ID NO: 55473 - DNA, 20 bp, synthetic construct
  misc_feature 1..20: note = chemically synthesized
  source 1..20: mol_type = other DNA
gcctggtcaagtctgaggag

SEQ ID NO: 55474 - DNA, 20 bp, synthetic construct
  misc_feature 1..20: note = chemically synthesized
  source 1..20: mol_type = other DNA
ggtcaagtctgaggaggaga

SEQ ID NO: 55475 - DNA, 20 bp, synthetic construct
  misc_feature 1..20: note = chemically synthesized
  source 1..20: mol_type = other DNA
tcaagtctgaggaggagata

SEQ ID NO: 55476 - DNA, 20 bp, synthetic construct
  misc_feature 1..20: note = chemically synthesized
  source 1..20: mol_type = other DNA
aggaggagatagagaaaaca

SEQ ID NO: 55477 - DNA, 20 bp, synthetic construct
  misc_feature 1..20: note = chemically synthesized
  source 1..20: mol_type = other DNA
aggagatagagaaaacaaag

SEQ ID NO: 55478 - DNA, 20 bp, synthetic construct
  misc_feature 1..20: note = chemically synthesized
  source 1..20: mol_type = other DNA
gagatagagaaaacaaagca

SEQ ID NO: 55479 - DNA, 20 bp, synthetic construct
  misc_feature 1..20: note = chemically synthesized
  source 1..20: mol_type = other DNA
cagagaccctcctcttcatc

SEQ ID NO: 55480 - DNA, 20 bp, synthetic construct
  misc_feature 1..20: note = chemically synthesized
  source 1..20: mol_type = other DNA
agagaccctcctcttcatct

SEQ ID NO: 55481 - DNA, 20 bp, synthetic construct
  misc_feature 1..20: note = chemically synthesized
  source 1..20: mol_type = other DNA
gagaccctcctcttcatctg

SEQ ID NO: 55482 - DNA, 20 bp, synthetic construct
  misc_feature 1..20: note = chemically synthesized
  source 1..20: mol_type = other DNA
gaccctcctcttcatctggg

SEQ ID NO: 55483 - DNA, 20 bp, synthetic construct
  misc_feature 1..20: note = chemically synthesized
  source 1..20: mol_type = other DNA
cctcctcttcatctggggag

SEQ ID NO: 55484 - DNA, 20 bp, synthetic construct
  misc_feature 1..20: note = chemically synthesized
  source 1..20: mol_type = other DNA
ctcctcttcatctggggaga

SEQ ID NO: 55485 - DNA, 20 bp, synthetic construct
  misc_feature 1..20: note = chemically synthesized
  source 1..20: mol_type = other DNA
tcctcttcatctggggagaa

SEQ ID NO: 55486 - DNA, 20 bp, synthetic construct
  misc_feature 1..20: note = chemically synthesized
  source 1..20: mol_type = other DNA
agaagggacctgattctaaa

SEQ ID NO: 55487 - DNA, 20 bp, synthetic construct
  misc_feature 1..20: note = chemically synthesized
  source 1..20: mol_type = other DNA
aagggacctgattctaaacg

SEQ ID NO: 55488 - DNA, 20 bp, synthetic construct
  misc_feature 1..20: note = chemically synthesized
  source 1..20: mol_type = other DNA
gattctaaacggagatatgt

SEQ ID NO: 55489 - DNA, 20 bp, synthetic construct
  misc_feature 1..20: note = chemically synthesized
  source 1..20: mol_type = other DNA
attctaaacggagatatgtg

SEQ ID NO: 55490 - DNA, 20 bp, synthetic construct
  misc_feature 1..20: note = chemically synthesized
  source 1..20: mol_type = other DNA
cggagatatgtgaggctttc

SEQ ID NO: 55491 - DNA, 20 bp, synthetic construct
  misc_feature 1..20: note = chemically synthesized
  source 1..20: mol_type = other DNA
ggagatatgtgaggctttct

SEQ ID NO: 55492 - DNA, 20 bp, synthetic construct
  misc_feature 1..20: note = chemically synthesized
  source 1..20: mol_type = other DNA
gagatatgtgaggctttctg

SEQ ID NO: 55493 - DNA, 20 bp, synthetic construct
  misc_feature 1..20: note = chemically synthesized
  source 1..20: mol_type = other DNA
atatgtgaggctttctgggg

SEQ ID NO: 55494 - DNA, 20 bp, synthetic construct
  misc_feature 1..20: note = chemically synthesized
  source 1..20: mol_type = other DNA
gaggctttctggggcagcga

SEQ ID NO: 55495 - DNA, 20 bp, synthetic construct
  misc_feature 1..20: note = chemically synthesized
  source 1..20: mol_type = other DNA
gctttctggggcagcgatgg

SEQ ID NO: 55496 - DNA, 20 bp, synthetic construct
  misc_feature 1..20: note = chemically synthesized
  source 1..20: mol_type = other DNA
ctttctggggcagcgatgga

SEQ ID NO: 55497 - DNA, 20 bp, synthetic construct
  misc_feature 1..20: note = chemically synthesized
  source 1..20: mol_type = other DNA
tggggcagcgatggaaggac

SEQ ID NO: 55498 - DNA, 20 bp, synthetic construct
  misc_feature 1..20: note = chemically synthesized
  source 1..20: mol_type = other DNA
ggggcagcgatggaaggaca

SEQ ID NO: 55499 - DNA, 20 bp, synthetic construct
  misc_feature 1..20: note = chemically synthesized
  source 1..20: mol_type = other DNA
cagcgatggaaggacaagga

SEQ ID NO: 55500 - DNA, 20 bp, synthetic construct
  misc_feature 1..20: note = chemically synthesized
  source 1..20: mol_type = other DNA
atggaaggacaaggacagaa

SEQ ID NO: 55501 - DNA, 20 bp, synthetic construct
  misc_feature 1..20: note = chemically synthesized
  source 1..20: mol_type = other DNA
tggaaggacaaggacagaat

SEQ ID NO: 55502 - DNA, 20 bp, synthetic construct
  misc_feature 1..20: note = chemically synthesized
  source 1..20: mol_type = other DNA
taggtgtccttgttgcccca

SEQ ID NO: 55503 - DNA, 20 bp, synthetic construct
  misc_feature 1..20: note = chemically synthesized
  source 1..20: mol_type = other DNA
ggtgtccttgttgccccatg

SEQ ID NO: 55504 - DNA, 20 bp, synthetic construct
  misc_feature 1..20: note = chemically synthesized
  source 1..20: mol_type = other DNA
ccttgttgccccatggagaa

SEQ ID NO: 55505 - DNA, 20 bp, synthetic construct
  misc_feature 1..20: note = chemically synthesized
  source 1..20: mol_type = other DNA
cttgttgccccatggagaat

SEQ ID NO: 55506 - DNA, 20 bp, synthetic construct
  misc_feature 1..20: note = chemically synthesized
  source 1..20: mol_type = other DNA
gccccatggagaatgggctt

SEQ ID NO: 55507 - DNA, 20 bp, synthetic construct
  misc_feature 1..20: note = chemically synthesized
  source 1..20: mol_type = other DNA
ccccatggagaatgggcttc

SEQ ID NO: 55508 - DNA, 20 bp, synthetic construct
  misc_feature 1..20: note = chemically synthesized
  source 1..20: mol_type = other DNA
catggagaatgggcttcagg

SEQ ID NO: 55509 - DNA, 20 bp, synthetic construct
  misc_feature 1..20: note = chemically synthesized
  source 1..20: mol_type = other DNA
gcttcaggaagaatctgcct

SEQ ID NO: 55510 - DNA, 20 bp, synthetic construct
  misc_feature 1..20: note = chemically synthesized
  source 1..20: mol_type = other DNA
aatctgcctcagtcattttc

SEQ ID NO: 55511 - DNA, 20 bp, synthetic construct
  misc_feature 1..20: note = chemically synthesized
  source 1..20: mol_type = other DNA
ctgcctcagtcattttccag

SEQ ID NO: 55512 - DNA, 20 bp, synthetic construct
  misc_feature 1..20: note = chemically synthesized
  source 1..20: mol_type = other DNA
gtcattttccagaagtgcct

SEQ ID NO: 55513 - DNA, 20 bp, synthetic construct
  misc_feature 1..20: note = chemically synthesized
  source 1..20: mol_type = other DNA
cattttccagaagtgcctga

SEQ ID NO: 55514 - DNA, 20 bp, synthetic construct
  misc_feature 1..20: note = chemically synthesized
  source 1..20: mol_type = other DNA
attttccagaagtgcctgag

SEQ ID NO: 55515 - DNA, 20 bp, synthetic construct
  misc_feature 1..20: note = chemically synthesized
  source 1..20: mol_type = other DNA
ccagaagtgcctgagaggtg

SEQ ID NO: 55516 - DNA, 20 bp, synthetic construct
  misc_feature 1..20: note = chemically synthesized
  source 1..20: mol_type = other DNA
cagaagtgcctgagaggtgc

SEQ ID NO: 55517 - DNA, 20 bp, synthetic construct
  misc_feature 1..20: note = chemically synthesized
  source 1..20: mol_type = other DNA
agaagtgcctgagaggtgca

SEQ ID NO: 55518 - DNA, 20 bp, synthetic construct
  misc_feature 1..20: note = chemically synthesized
  source 1..20: mol_type = other DNA
gcctgagaggtgcagggccc

SEQ ID NO: 55519 - DNA, 20 bp, synthetic construct
  misc_feature 1..20: note = chemically synthesized
  source 1..20: mol_type = other DNA
agaggtgcagggcccgagtc

SEQ ID NO: 55520 - DNA, 20 bp, synthetic construct
  misc_feature 1..20: note = chemically synthesized
  source 1..20: mol_type = other DNA
gtgcagggcccgagtctggt

SEQ ID NO: 55521 - DNA, 20 bp, synthetic construct
  misc_feature 1..20: note = chemically synthesized
  source 1..20: mol_type = other DNA
tgcagggcccgagtctggtt

SEQ ID NO: 55522 - DNA, 20 bp, synthetic construct
  misc_feature 1..20: note = chemically synthesized
  source 1..20: mol_type = other DNA
gcccgagtctggttaggtga

SEQ ID NO: 55523 - DNA, 20 bp, synthetic construct
  misc_feature 1..20: note = chemically synthesized
  source 1..20: mol_type = other DNA
cgagtctggttaggtgacag

SEQ ID NO: 55524 - DNA, 20 bp, synthetic construct
  misc_feature 1..20: note = chemically synthesized
  source 1..20: mol_type = other DNA
gagtctggttaggtgacagc

SEQ ID NO: 55525 - DNA, 20 bp, synthetic construct
  misc_feature 1..20: note = chemically synthesized
  source 1..20: mol_type = other DNA
tggttaggtgacagcgggtc

SEQ ID NO: 55526 - DNA, 20 bp, synthetic construct
  misc_feature 1..20: note = chemically synthesized
  source 1..20: mol_type = other DNA
gttaggtgacagcgggtcaa

SEQ ID NO: 55527 - DNA, 20 bp, synthetic construct
  misc_feature 1..20: note = chemically synthesized
  source 1..20: mol_type = other DNA
ttaggtgacagcgggtcaag

SEQ ID NO: 55528 - DNA, 20 bp, synthetic construct
  misc_feature 1..20: note = chemically synthesized
  source 1..20: mol_type = other DNA
aggtgacagcgggtcaagag

SEQ ID NO: 55529 - DNA, 20 bp, synthetic construct
  misc_feature 1..20: note = chemically synthesized
  source 1..20: mol_type = other DNA
ggtgacagcgggtcaagagg

SEQ ID NO: 55530 - DNA, 20 bp, synthetic construct
  misc_feature 1..20: note = chemically synthesized
  source 1..20: mol_type = other DNA
tcctctctcttgtgttgctg

SEQ ID NO: 55531 - DNA, 20 bp, synthetic construct
  misc_feature 1..20: note = chemically synthesized
  source 1..20: mol_type = other DNA
tgctgcagatgccacaaaac

SEQ ID NO: 55532 - DNA, 20 bp, synthetic construct
  misc_feature 1..20: note = chemically synthesized
  source 1..20: mol_type = other DNA
gctgcagatgccacaaaact

SEQ ID NO: 55533 - DNA, 20 bp, synthetic construct
  misc_feature 1..20: note = chemically synthesized
  source 1..20: mol_type = other DNA
gatgccacaaaactgggcca

SEQ ID NO: 55534 - DNA, 20 bp, synthetic construct
  misc_feature 1..20: note = chemically synthesized
  source 1..20: mol_type = other DNA
aaactgggccacggcacgat

SEQ ID NO: 55535 - DNA, 20 bp, synthetic construct
  misc_feature 1..20: note = chemically synthesized
  source 1..20: mol_type = other DNA
aactgggccacggcacgatc

SEQ ID NO: 55536 - DNA, 20 bp, synthetic construct
  misc_feature 1..20: note = chemically synthesized
  source 1..20: mol_type = other DNA
tgggccacggcacgatcagg

SEQ ID NO: 55537 - DNA, 20 bp, synthetic construct
  misc_feature 1..20: note = chemically synthesized
  source 1..20: mol_type = other DNA
acggcacgatcaggcagttc

SEQ ID NO: 55538 - DNA, 20 bp, synthetic construct
  misc_feature 1..20: note = chemically synthesized
  source 1..20: mol_type = other DNA
cggcacgatcaggcagttct

SEQ ID NO: 55539 - DNA, 20 bp, synthetic construct
  misc_feature 1..20: note = chemically synthesized
  source 1..20: mol_type = other DNA
ggcacgatcaggcagttctg

SEQ ID NO: 55540 - DNA, 20 bp, synthetic construct
  misc_feature 1..20: note = chemically synthesized
  source 1..20: mol_type = other DNA
tcaggcagttctggggcccc

SEQ ID NO: 55541 - DNA, 20 bp, synthetic construct
  misc_feature 1..20: note = chemically synthesized
  source 1..20: mol_type = other DNA
caggcagttctggggccccc

SEQ ID NO: 55542 - DNA, 20 bp, synthetic construct
  misc_feature 1..20: note = chemically synthesized
  source 1..20: mol_type = other DNA
ggcagttctggggcccccag

SEQ ID NO: 55543 - DNA, 20 bp, synthetic construct
  misc_feature 1..20: note = chemically synthesized
  source 1..20: mol_type = other DNA
gcagttctggggcccccagg

SEQ ID NO: 55544 - DNA, 20 bp, synthetic construct
  misc_feature 1..20: note = chemically synthesized
  source 1..20: mol_type = other DNA
cagttctggggcccccagga

SEQ ID NO: 55545 - DNA, 20 bp, synthetic construct
  misc_feature 1..20: note = chemically synthesized
  source 1..20: mol_type = other DNA
ttctggggcccccaggaggg

SEQ ID NO: 55546 - DNA, 20 bp, synthetic construct
  misc_feature 1..20: note = chemically synthesized
  source 1..20: mol_type = other DNA
ggcccccaggagggcagcct

SEQ ID NO: 55547 - DNA, 20 bp, synthetic construct
  misc_feature 1..20: note = chemically synthesized
  source 1..20: mol_type = other DNA
gcccccaggagggcagcctt

SEQ ID NO: 55548 - DNA, 20 bp, synthetic construct
  misc_feature 1..20: note = chemically synthesized
  source 1..20: mol_type = other DNA
cccccaggagggcagccttg

SEQ ID NO: 55549 - DNA, 20 bp, synthetic construct
  misc_feature 1..20: note = chemically synthesized
  source 1..20: mol_type = other DNA
ccaggagggcagccttgggg

SEQ ID NO: 55550 - DNA, 20 bp, synthetic construct
  misc_feature 1..20: note = chemically synthesized
  source 1..20: mol_type = other DNA
caggagggcagccttggggt

SEQ ID NO: 55551 - DNA, 20 bp, synthetic construct
  misc_feature 1..20: note = chemically synthesized
  source 1..20: mol_type = other DNA
gggcagccttggggtgggca

SEQ ID NO: 55552 - DNA, 20 bp, synthetic construct
  misc_feature 1..20: note = chemically synthesized
  source 1..20: mol_type = other DNA
agccttggggtgggcacagc

SEQ ID NO: 55553 - DNA, 20 bp, synthetic construct
  misc_feature 1..20: note = chemically synthesized
  source 1..20: mol_type = other DNA
ggggtgggcacagccagccc

SEQ ID NO: 55554 - DNA, 20 bp, synthetic construct
  misc_feature 1..20: note = chemically synthesized
  source 1..20: mol_type = other DNA
gtgggcacagccagccctgg

SEQ ID NO: 55555 - DNA, 20 bp, synthetic construct
  misc_feature 1..20: note = chemically synthesized
  source 1..20: mol_type = other DNA
tgggcacagccagccctggc

SEQ ID NO: 55556 - DNA, 20 bp, synthetic construct
  misc_feature 1..20: note = chemically synthesized
  source 1..20: mol_type = other DNA
acagccagccctggcaggat

SEQ ID NO: 55557 - DNA, 20 bp, synthetic construct
  misc_feature 1..20: note = chemically synthesized
  source 1..20: mol_type = other DNA
cctggcaggatgagcaactc

SEQ ID NO: 55558 - DNA, 20 bp, synthetic construct
  misc_feature 1..20: note = chemically synthesized
  source 1..20: mol_type = other DNA
ctggcaggatgagcaactct

SEQ ID NO: 55559 - DNA, 20 bp, synthetic construct
  misc_feature 1..20: note = chemically synthesized
  source 1..20: mol_type = other DNA
gcaggatgagcaactctggg

SEQ ID NO: 55560 - DNA, 20 bp, synthetic construct
  misc_feature 1..20: note = chemically synthesized
  source 1..20: mol_type = other DNA
caggatgagcaactctgggt

SEQ ID NO: 55561 - DNA, 20 bp, synthetic construct
  misc_feature 1..20: note = chemically synthesized
  source 1..20: mol_type = other DNA
aggatgagcaactctgggtg

SEQ ID NO: 55562 - DNA, 20 bp, synthetic construct
  misc_feature 1..20: note = chemically synthesized
  source 1..20: mol_type = other DNA
ggatgagcaactctgggtgg

SEQ ID NO: 55563 - DNA, 20 bp, synthetic construct
  misc_feature 1..20: note = chemically synthesized
  source 1..20: mol_type = other DNA
gatgagcaactctgggtggg

SEQ ID NO: 55564 - DNA, 20 bp, synthetic construct
  misc_feature 1..20: note = chemically synthesized
  source 1..20: mol_type = other DNA
atgagcaactctgggtgggg

SEQ ID NO: 55565 - DNA, 20 bp, synthetic construct
  misc_feature 1..20: note = chemically synthesized
  source 1..20: mol_type = other DNA
gagcaactctgggtgggggg

SEQ ID NO: 55566 - DNA, 20 bp, synthetic construct
  misc_feature 1..20: note = chemically synthesized
  source 1..20: mol_type = other DNA
caactctgggtgggggggag

SEQ ID NO: 55567 - DNA, 20 bp, synthetic construct
  misc_feature 1..20: note = chemically synthesized
  source 1..20: mol_type = other DNA
aactctgggtgggggggagt

SEQ ID NO: 55568 - DNA, 20 bp, synthetic construct
  misc_feature 1..20: note = chemically synthesized
  source 1..20: mol_type = other DNA
actctgggtgggggggagtg

SEQ ID NO: 55569 - DNA, 20 bp, synthetic construct
  misc_feature 1..20: note = chemically synthesized
  source 1..20: mol_type = other DNA
ctctgggtgggggggagtgg

SEQ ID NO: 55570 - DNA, 20 bp, synthetic construct
  misc_feature 1..20: note = chemically synthesized
  source 1..20: mol_type = other DNA
ggtgggggggagtgggggat

SEQ ID NO: 55571 - DNA, 20 bp, synthetic construct
  misc_feature 1..20: note = chemically synthesized
  source 1..20: mol_type = other DNA
gggggggagtgggggatgag

SEQ ID NO: 55572 - DNA, 20 bp, synthetic construct
  misc_feature 1..20: note = chemically synthesized
  source 1..20: mol_type = other DNA
ggggggagtgggggatgagc

SEQ ID NO: 55573 - DNA, 20 bp, synthetic construct
  misc_feature 1..20: note = chemically synthesized
  source 1..20: mol_type = other DNA
gggggagtgggggatgagca

SEQ ID NO: 55574 - DNA, 20 bp, synthetic construct
  misc_feature 1..20: note = chemically synthesized
  source 1..20: mol_type = other DNA
ggggagtgggggatgagcag

SEQ ID NO: 55575 - DNA, 20 bp, synthetic construct
  misc_feature 1..20: note = chemically synthesized
  source 1..20: mol_type = other DNA
gggagtgggggatgagcagg

SEQ ID NO: 55576 - DNA, 20 bp, synthetic construct
  misc_feature 1..20: note = chemically synthesized
  source 1..20: mol_type = other DNA
gggatgagcagggggacatg

SEQ ID NO: 55577 - DNA, 20 bp, synthetic construct
  misc_feature 1..20: note = chemically synthesized
  source 1..20: mol_type = other DNA
cagggggacatgaagatgct

SEQ ID NO: 55578 - DNA, 20 bp, synthetic construct
  misc_feature 1..20: note = chemically synthesized
  source 1..20: mol_type = other DNA
ggggacatgaagatgcttgg

SEQ ID NO: 55579 - DNA, 20 bp, synthetic construct
  misc_feature 1..20: note = chemically synthesized
  source 1..20: mol_type = other DNA
ggacatgaagatgcttggtg

SEQ ID NO: 55580 - DNA, 20 bp, synthetic construct
  misc_feature 1..20: note = chemically synthesized
  source 1..20: mol_type = other DNA
tgaagatgcttggtggagcc

SEQ ID NO: 55581 - DNA, 20 bp, synthetic construct
  misc_feature 1..20: note = chemically synthesized
  source 1..20: mol_type = other DNA
gaagatgcttggtggagcct

SEQ ID NO: 55582 - DNA, 20 bp, synthetic construct
  misc_feature 1..20: note = chemically synthesized
  source 1..20: mol_type = other DNA
aagatgcttggtggagcctg

SEQ ID NO: 55583 - DNA, 20 bp, synthetic construct
  misc_feature 1..20: note = chemically synthesized
  source 1..20: mol_type = other DNA
cttggtggagcctggggtca

SEQ ID NO: 55584 - DNA, 20 bp, synthetic construct
  misc_feature 1..20: note = chemically synthesized
  source 1..20: mol_type = other DNA
gtggagcctggggtcatggc

SEQ ID NO: 55585 - DNA, 20 bp, synthetic construct
  misc_feature 1..20: note = chemically synthesized
  source 1..20: mol_type = other DNA
ctggggtcatggctggtatc

SEQ ID NO: 55586 - DNA, 20 bp, synthetic construct
  misc_feature 1..20: note = chemically synthesized
  source 1..20: mol_type = other DNA
cctcccctgtgattccttct

SEQ ID NO: 55587 - DNA, 20 bp, synthetic construct
  misc_feature 1..20: note = chemically synthesized
  source 1..20: mol_type = other DNA
ctcccctgtgattccttctt

SEQ ID NO: 55588 - DNA, 20 bp, synthetic construct
  misc_feature 1..20: note = chemically synthesized
  source 1..20: mol_type = other DNA
tcccctgtgattccttcttg

SEQ ID NO: 55589 - DNA, 20 bp, synthetic construct
  misc_feature 1..20: note = chemically synthesized
  source 1..20: mol_type = other DNA
gattccttcttggggactcc

SEQ ID NO: 55590 - DNA, 20 bp, synthetic construct
  misc_feature 1..20: note = chemically synthesized
  source 1..20: mol_type = other DNA
ccttcttggggactccaaga

SEQ ID NO: 55591 - DNA, 20 bp, synthetic construct
  misc_feature 1..20: note = chemically synthesized
  source 1..20: mol_type = other DNA
cttcttggggactccaagac

SEQ ID NO: 55592 - DNA, 20 bp, synthetic construct
  misc_feature 1..20: note = chemically synthesized
  source 1..20: mol_type = other DNA
tggggactccaagacaggac

SEQ ID NO: 55593 - DNA, 20 bp, synthetic construct
  misc_feature 1..20: note = chemically synthesized
  source 1..20: mol_type = other DNA
ggggactccaagacaggaca

SEQ ID NO: 55594 - DNA, 20 bp, synthetic construct
  misc_feature 1..20: note = chemically synthesized
  source 1..20: mol_type = other DNA
gactccaagacaggacaagg

SEQ ID NO: 55595 - DNA, 20 bp, synthetic construct
  misc_feature 1..20: note = chemically synthesized
  source 1..20: mol_type = other DNA
caagacaggacaaggaagac

SEQ ID NO: 55596 - DNA, 20 bp, synthetic construct
  misc_feature 1..20: note = chemically synthesized
  source 1..20: mol_type = other DNA
agacaggacaaggaagactg

SEQ ID NO: 55597 - DNA, 20 bp, synthetic construct
  misc_feature 1..20: note = chemically synthesized
  source 1..20: mol_type = other DNA
caaggaagactggagccctc

SEQ ID NO: 55598 - DNA, 20 bp, synthetic construct
  misc_feature 1..20: note = chemically synthesized
  source 1..20: mol_type = other DNA
agactggagccctccagaaa

SEQ ID NO: 55599 - DNA, 20 bp, synthetic construct
  misc_feature 1..20: note = chemically synthesized
  source 1..20: mol_type = other DNA
tggagccctccagaaacaga

SEQ ID NO: 55600 - DNA, 20 bp, synthetic construct
  misc_feature 1..20: note = chemically synthesized
  source 1..20: mol_type = other DNA
ggagccctccagaaacagat

SEQ ID NO: 55601 - DNA, 20 bp, synthetic construct
  misc_feature 1..20: note = chemically synthesized
  source 1..20: mol_type = other DNA
cctccagaaacagatgggcc

SEQ ID NO: 55602 - DNA, 20 bp, synthetic construct
  misc_feature 1..20: note = chemically synthesized
  source 1..20: mol_type = other DNA
ctccagaaacagatgggccc

SEQ ID NO: 55603 - DNA, 20 bp, synthetic construct
  misc_feature 1..20: note = chemically synthesized
  source 1..20: mol_type = other DNA
acagatgggcccaggtccgt

SEQ ID NO: 55604 - DNA, 20 bp, synthetic construct
  misc_feature 1..20: note = chemically synthesized
  source 1..20: mol_type = other DNA
tgggcccaggtccgtaagct

SEQ ID NO: 55605 - DNA, 20 bp, synthetic construct
  misc_feature 1..20: note = chemically synthesized
  source 1..20: mol_type = other DNA
gggcccaggtccgtaagctg

SEQ ID NO: 55606 - DNA, 20 bp, synthetic construct
  misc_feature 1..20: note = chemically synthesized
  source 1..20: mol_type = other DNA
aggtccgtaagctgaggatt

SEQ ID NO: 55607 - DNA, 20 bp, synthetic construct
  misc_feature 1..20: note = chemically synthesized
  source 1..20: mol_type = other DNA
gctgaggattcagtcccccc

SEQ ID NO: 55608 - DNA, 20 bp, synthetic construct
  misc_feature 1..20: note = chemically synthesized
  source 1..20: mol_type = other DNA
attcagtcccccctggattc

SEQ ID NO: 55609 - DNA, 20 bp, synthetic construct
  misc_feature 1..20: note = chemically synthesized
  source 1..20: mol_type = other DNA
gtcccccctggattcaagcc

SEQ ID NO: 55610 - DNA, 20 bp, synthetic construct
  misc_feature 1..20: note = chemically synthesized
  source 1..20: mol_type = other DNA
aagcccagcatgtgcctacc

SEQ ID NO: 55611 - DNA, 20 bp, synthetic construct
  misc_feature 1..20: note = chemically synthesized
  source 1..20: mol_type = other DNA
ccagcatgtgcctacccagc

SEQ ID NO: 55612 - DNA, 20 bp, synthetic construct
  misc_feature 1..20: note = chemically synthesized
  source 1..20: mol_type = other DNA
agccagatgctccatgaaca

SEQ ID NO: 55613 - DNA, 20 bp, synthetic construct
  misc_feature 1..20: note = chemically synthesized
  source 1..20: mol_type = other DNA
gatgctccatgaacacagtt

SEQ ID NO: 55614 - DNA, 20 bp, synthetic construct
  misc_feature 1..20: note = chemically synthesized
  source 1..20: mol_type = other DNA
atgctccatgaacacagttc

SEQ ID NO: 55615 - DNA, 20 bp, synthetic construct
  misc_feature 1..20: note = chemically synthesized
  source 1..20: mol_type = other DNA
tgctccatgaacacagttca

SEQ ID NO: 55616 - DNA, 20 bp, synthetic construct
  misc_feature 1..20: note = chemically synthesized
  source 1..20: mol_type = other DNA
gctccatgaacacagttcag

SEQ ID NO: 55617 - DNA, 20 bp, synthetic construct
  misc_feature 1..20: note = chemically synthesized
  source 1..20: mol_type = other DNA
ctccatgaacacagttcagg

SEQ ID NO: 55618 - DNA, 20 bp, synthetic construct
  misc_feature 1..20: note = chemically synthesized
  source 1..20: mol_type = other DNA
aacacagttcagggggcccg

SEQ ID NO: 55619 - DNA, 20 bp, synthetic construct
  misc_feature 1..20: note = chemically synthesized
  source 1..20: mol_type = other DNA
cagttcagggggcccgaaga

SEQ ID NO: 55620 - DNA, 20 bp, synthetic construct
  misc_feature 1..20: note = chemically synthesized
  source 1..20: mol_type = other DNA
ccgaagacagcactgttacc

SEQ ID NO: 55621 - DNA, 20 bp, synthetic construct
  misc_feature 1..20: note = chemically synthesized
  source 1..20: mol_type = other DNA
gaagacagcactgttacctg

SEQ ID NO: 55622 - DNA, 20 bp, synthetic construct
  misc_feature 1..20: note = chemically synthesized
  source 1..20: mol_type = other DNA
tgttacctggagcccacata

SEQ ID NO: 55623 - DNA, 20 bp, synthetic construct
  misc_feature 1..20: note = chemically synthesized
  source 1..20: mol_type = other DNA
ctggagcccacatacagcct

SEQ ID NO: 55624 - DNA, 20 bp, synthetic construct
  misc_feature 1..20: note = chemically synthesized
  source 1..20: mol_type = other DNA
gagcccacatacagcctcag

SEQ ID NO: 55625 - DNA, 20 bp, synthetic construct
  misc_feature 1..20: note = chemically synthesized
  source 1..20: mol_type = other DNA
agcccacatacagcctcagc

SEQ ID NO: 55626 - DNA, 20 bp, synthetic construct
  misc_feature 1..20: note = chemically synthesized
  source 1..20: mol_type = other DNA
acatacagcctcagcaggca

SEQ ID NO: 55627 - DNA, 20 bp, synthetic construct
  misc_feature 1..20: note = chemically synthesized
  source 1..20: mol_type = other DNA
catacagcctcagcaggcaa

SEQ ID NO: 55628 - DNA, 20 bp, synthetic construct
  misc_feature 1..20: note = chemically synthesized
  source 1..20: mol_type = other DNA
atacagcctcagcaggcaaa

SEQ ID NO: 55629 - DNA, 20 bp, synthetic construct
  misc_feature 1..20: note = chemically synthesized
  source 1..20: mol_type = other DNA
acagcctcagcaggcaaagg

SEQ ID NO: 55630 - DNA, 20 bp, synthetic construct
  misc_feature 1..20: note = chemically synthesized
  source 1..20: mol_type = other DNA
tcagcaggcaaagggagact

SEQ ID NO: 55631 - DNA, 20 bp, synthetic construct
  misc_feature 1..20: note = chemically synthesized
  source 1..20: mol_type = other DNA
agcaggcaaagggagactca

SEQ ID NO: 55632 - DNA, 20 bp, synthetic construct
  misc_feature 1..20: note = chemically synthesized
  source 1..20: mol_type = other DNA
agggagactcagagaaaaca

SEQ ID NO: 55633 - DNA, 20 bp, synthetic construct
  misc_feature 1..20: note = chemically synthesized
  source 1..20: mol_type = other DNA
gggagactcagagaaaacat

SEQ ID NO: 55634 - DNA, 20 bp, synthetic construct
  misc_feature 1..20: note = chemically synthesized
  source 1..20: mol_type = other DNA
gagactcagagaaaacatgg

SEQ ID NO: 55635 - DNA, 20 bp, synthetic construct
  misc_feature 1..20: note = chemically synthesized
  source 1..20: mol_type = other DNA
agactcagagaaaacatggg

SEQ ID NO: 55636 - DNA, 20 bp, synthetic construct
  misc_feature 1..20: note = chemically synthesized
  source 1..20: mol_type = other DNA
gactcagagaaaacatggga

SEQ ID NO: 55637 - DNA, 20 bp, synthetic construct
  misc_feature 1..20: note = chemically synthesized
  source 1..20: mol_type = other DNA
gaaaacatgggagggattta

SEQ ID NO: 55638 - DNA, 20 bp, synthetic construct
  misc_feature 1..20: note = chemically synthesized
  source 1..20: mol_type = other DNA
gagggatttacagtcacatg

SEQ ID NO: 55639 - DNA, 20 bp, synthetic construct
  misc_feature 1..20: note = chemically synthesized
  source 1..20: mol_type = other DNA
agggatttacagtcacatgc

SEQ ID NO: 55640 - DNA, 20 bp, synthetic construct
  misc_feature 1..20: note = chemically synthesized
  source 1..20: mol_type = other DNA
gatttacagtcacatgcagg

SEQ ID NO: 55641 - DNA, 20 bp, synthetic construct
  misc_feature 1..20: note = chemically synthesized
  source 1..20: mol_type = other DNA
atttacagtcacatgcaggc

SEQ ID NO: 55642 - DNA, 20 bp, synthetic construct
  misc_feature 1..20: note = chemically synthesized
  source 1..20: mol_type = other DNA
tttacagtcacatgcaggca

SEQ ID NO: 55643 - DNA, 20 bp, synthetic construct
  misc_feature 1..20: note = chemically synthesized
  source 1..20: mol_type = other DNA
agtcacatgcaggcagggac

SEQ ID NO: 55644 - DNA, 20 bp, synthetic construct
  misc_feature 1..20: note = chemically synthesized
  source 1..20: mol_type = other DNA
aacccttctttaatgtcatc

SEQ ID NO: 55645 - DNA, 20 bp, synthetic construct
  misc_feature 1..20: note = chemically synthesized
  source 1..20: mol_type = other DNA
acccttctttaatgtcatcc

SEQ ID NO: 55646 - DNA, 20 bp, synthetic construct
  misc_feature 1..20: note = chemically synthesized
  source 1..20: mol_type = other DNA
cccttctttaatgtcatcca

SEQ ID NO: 55647 - DNA, 20 bp, synthetic construct
  misc_feature 1..20: note = chemically synthesized
  source 1..20: mol_type = other DNA
cttctttaatgtcatccagg

SEQ ID NO: 55648 - DNA, 20 bp, synthetic construct
  misc_feature 1..20: note = chemically synthesized
  source 1..20: mol_type = other DNA
ttctttaatgtcatccaggg

SEQ ID NO: 55649 - DNA, 20 bp, synthetic construct
  misc_feature 1..20: note = chemically synthesized
  source 1..20: mol_type = other DNA
tctttaatgtcatccaggga

SEQ ID NO: 55650 - DNA, 20 bp, synthetic construct
  misc_feature 1..20: note = chemically synthesized
  source 1..20: mol_type = other DNA
ctttaatgtcatccagggag

SEQ ID NO: 55651 - DNA, 20 bp, synthetic construct
  misc_feature 1..20: note = chemically synthesized
  source 1..20: mol_type = other DNA
tttaatgtcatccagggagg

SEQ ID NO: 55652 - DNA, 20 bp, synthetic construct
  misc_feature 1..20: note = chemically synthesized
  source 1..20: mol_type = other DNA
atgtcatccagggagggggc

SEQ ID NO: 55653 - DNA, 20 bp, synthetic construct
  misc_feature 1..20: note = chemically synthesized
  source 1..20: mol_type = other DNA
tgtcatccagggagggggcc

SEQ ID NO: 55654 - DNA, 20 bp, synthetic construct
  misc_feature 1..20: note = chemically synthesized
  source 1..20: mol_type = other DNA
gtcatccagggagggggcca

SEQ ID NO: 55655 - DNA, 20 bp, synthetic construct
  misc_feature 1..20: note = chemically synthesized
  source 1..20: mol_type = other DNA
tccagggagggggccaggga

SEQ ID NO: 55656 - DNA, 20 bp, synthetic construct
  misc_feature 1..20: note = chemically synthesized
  source 1..20: mol_type = other DNA
cagggagggggccagggatg

SEQ ID NO: 55657 - DNA, 20 bp, synthetic construct
  misc_feature 1..20: note = chemically synthesized
  source 1..20: mol_type = other DNA
agggagggggccagggatgg

SEQ ID NO: 55658 - DNA, 20 bp, synthetic construct
  misc_feature 1..20: note = chemically synthesized
  source 1..20: mol_type = other DNA
gggagggggccagggatgga

SEQ ID NO: 55659 - DNA, 20 bp, synthetic construct
  misc_feature 1..20: note = chemically synthesized
  source 1..20: mol_type = other DNA
ggagggggccagggatggag

SEQ ID NO: 55660 - DNA, 20 bp, synthetic construct
  misc_feature 1..20: note = chemically synthesized
  source 1..20: mol_type = other DNA
agggggccagggatggaggg

SEQ ID NO: 55661 - DNA, 20 bp, synthetic construct
  misc_feature 1..20: note = chemically synthesized
  source 1..20: mol_type = other DNA
gggggccagggatggagggg

SEQ ID NO: 55662 - DNA, 20 bp, synthetic construct
  misc_feature 1..20: note = chemically synthesized
  source 1..20: mol_type = other DNA
ggggccagggatggagggga

SEQ ID NO: 55663 - DNA, 20 bp, synthetic construct
  misc_feature 1..20: note = chemically synthesized
  source 1..20: mol_type = other DNA
gggccagggatggaggggag

SEQ ID NO: 55664 - DNA, 20 bp, synthetic construct
  misc_feature 1..20: note = chemically synthesized
  source 1..20: mol_type = other DNA
agggatggaggggaggggtt

SEQ ID NO: 55665 - DNA, 20 bp, synthetic construct
  misc_feature 1..20: note = chemically synthesized
  source 1..20: mol_type = other DNA
gggatggaggggaggggttg

SEQ ID NO: 55666 - DNA, 20 bp, synthetic construct
  misc_feature 1..20: note = chemically synthesized
  source 1..20: mol_type = other DNA
gatggaggggaggggttgag

SEQ ID NO: 55667 - DNA, 20 bp, synthetic construct
  misc_feature 1..20: note = chemically synthesized
  source 1..20: mol_type = other DNA
gaggggaggggttgaggagc

SEQ ID NO: 55668 - DNA, 20 bp, synthetic construct
  misc_feature 1..20: note = chemically synthesized
  source 1..20: mol_type = other DNA
ggggaggggttgaggagcga

SEQ ID NO: 55669 - DNA, 20 bp, synthetic construct
  misc_feature 1..20: note = chemically synthesized
  source 1..20: mol_type = other DNA
gggaggggttgaggagcgag

SEQ ID NO: 55670 - DNA, 20 bp, synthetic construct
  misc_feature 1..20: note = chemically synthesized
  source 1..20: mol_type = other DNA
aggggttgaggagcgagagg

SEQ ID NO: 55671 - DNA, 20 bp, synthetic construct
  misc_feature 1..20: note = chemically synthesized
  source 1..20: mol_type = other DNA
gagcgagaggcagttatttt

SEQ ID NO: 55672 - DNA, 20 bp, synthetic construct
  misc_feature 1..20: note = chemically synthesized
  source 1..20: mol_type = other DNA
agcgagaggcagttattttt

SEQ ID NO: 55673 - DNA, 20 bp, synthetic construct
  misc_feature 1..20: note = chemically synthesized
  source 1..20: mol_type = other DNA
gagaggcagttatttttggg

SEQ ID NO: 55674 - DNA, 20 bp, synthetic construct
  misc_feature 1..20: note = chemically synthesized
  source 1..20: mol_type = other DNA
agaggcagttatttttgggt

SEQ ID NO: 55675 - DNA, 20 bp, synthetic construct
  misc_feature 1..20: note = chemically synthesized
  source 1..20: mol_type = other DNA
gattcaccacttttcccatg

SEQ ID NO: 55676 - DNA, 20 bp, synthetic construct
  misc_feature 1..20: note = chemically synthesized
  source 1..20: mol_type = other DNA
ttcaccacttttcccatgaa

SEQ ID NO: 55677 - DNA, 20 bp, synthetic construct
  misc_feature 1..20: note = chemically synthesized
  source 1..20: mol_type = other DNA
tcaccacttttcccatgaag

SEQ ID NO: 55678 - DNA, 20 bp, synthetic construct
  misc_feature 1..20: note = chemically synthesized
  source 1..20: mol_type = other DNA
caccacttttcccatgaaga

SEQ ID NO: 55679 - DNA, 20 bp, synthetic construct
  misc_feature 1..20: note = chemically synthesized
  source 1..20: mol_type = other DNA
accacttttcccatgaagag

SEQ ID NO: 55680 - DNA, 20 bp, synthetic construct
  misc_feature 1..20: note = chemically synthesized
  source 1..20: mol_type = other DNA
cacttttcccatgaagaggg

SEQ ID NO: 55681 - DNA, 20 bp, synthetic construct
  misc_feature 1..20: note = chemically synthesized
  source 1..20: mol_type = other DNA
tcccatgaagaggggagact

SEQ ID NO: 55682 - DNA, 20 bp, synthetic construct
  misc_feature 1..20: note = chemically synthesized
  source 1..20: mol_type = other DNA
tggtattttgttcaatcatt

SEQ ID NO: 55683 - DNA, 20 bp, synthetic construct
  misc_feature 1..20: note = chemically synthesized
  source 1..20: mol_type = other DNA
tattttgttcaatcattaag

SEQ ID NO: 55684 - DNA, 20 bp, synthetic construct
  misc_feature 1..20: note = chemically synthesized
  source 1..20: mol_type = other DNA
gttcaatcattaagaagaca

SEQ ID NO: 55685 - DNA, 20 bp, synthetic construct
  misc_feature 1..20: note = chemically synthesized
  source 1..20: mol_type = other DNA
ttcaatcattaagaagacaa

SEQ ID NO: 55686 - DNA, 20 bp, synthetic construct
  misc_feature 1..20: note = chemically synthesized
  source 1..20: mol_type = other DNA
tcaatcattaagaagacaaa

SEQ ID NO: 55687 - DNA, 20 bp, synthetic construct
  misc_feature 1..20: note = chemically synthesized
  source 1..20: mol_type = other DNA
gggtttgttgaacttgacct

SEQ ID NO: 55688 - DNA, 20 bp, synthetic construct
  misc_feature 1..20: note = chemically synthesized
  source 1..20: mol_type = other DNA
ggtttgttgaacttgacctc

SEQ ID NO: 55689 - DNA, 20 bp, synthetic construct
  misc_feature 1..20: note = chemically synthesized
  source 1..20: mol_type = other DNA
gtttgttgaacttgacctcg

SEQ ID NO: 55690 - DNA, 20 bp, synthetic construct
  misc_feature 1..20: note = chemically synthesized
  source 1..20: mol_type = other DNA
tttgttgaacttgacctcgg

SEQ ID NO: 55691 - DNA, 20 bp, synthetic construct
  misc_feature 1..20: note = chemically synthesized
  source 1..20: mol_type = other DNA
ttgttgaacttgacctcggg

SEQ ID NO: 55692 - DNA, 20 bp, synthetic construct
  misc_feature 1..20: note = chemically synthesized
  source 1..20: mol_type = other DNA
tgttgaacttgacctcgggg

SEQ ID NO: 55693 - DNA, 20 bp, synthetic construct
  misc_feature 1..20: note = chemically synthesized
  source 1..20: mol_type = other DNA
gaacttgacctcggggggga

SEQ ID NO: 55694 - DNA, 20 bp, synthetic construct
  misc_feature 1..20: note = chemically synthesized
  source 1..20: mol_type = other DNA
gacctcgggggggatagaca

SEQ ID NO: 55695 - DNA, 20 bp, synthetic construct
  misc_feature 1..20: note = chemically synthesized
  source 1..20: mol_type = other DNA
acctcgggggggatagacat

SEQ ID NO: 55696 - DNA, 20 bp, synthetic construct
  misc_feature 1..20: note = chemically synthesized
  source 1..20: mol_type = other DNA
gggggggatagacatgggta

SEQ ID NO: 55697 - DNA, 20 bp, synthetic construct
  misc_feature 1..20: note = chemically synthesized
  source 1..20: mol_type = other DNA
gggtatggcctctaaaaaca

SEQ ID NO: 55698 - DNA, 20 bp, synthetic construct
  misc_feature 1..20: note = chemically synthesized
  source 1..20: mol_type = other DNA
ggcctctaaaaacatggccc

SEQ ID NO: 55699 - DNA, 20 bp, synthetic construct
  misc_feature 1..20: note = chemically synthesized
  source 1..20: mol_type = other DNA
ctctaaaaacatggccccag

SEQ ID NO: 55700 - DNA, 20 bp, synthetic construct
  misc_feature 1..20: note = chemically synthesized
  source 1..20: mol_type = other DNA
aaacatggccccagcagctt

SEQ ID NO: 55701 - DNA, 20 bp, synthetic construct
  misc_feature 1..20: note = chemically synthesized
  source 1..20: mol_type = other DNA
ttcagtccctttctcgtcga

SEQ ID NO: 55702 - DNA, 20 bp, synthetic construct
  misc_feature 1..20: note = chemically synthesized
  source 1..20: mol_type = other DNA
gtccctttctcgtcgatggt

SEQ ID NO: 55703 - DNA, 20 bp, synthetic construct
  misc_feature 1..20: note = chemically synthesized
  source 1..20: mol_type = other DNA
tttctcgtcgatggtcagca

SEQ ID NO: 55704 - DNA, 20 bp, synthetic construct
  misc_feature 1..20: note = chemically synthesized
  source 1..20: mol_type = other DNA
ggtcagcacagccttatgca

SEQ ID NO: 55705 - DNA, 20 bp, synthetic construct
  misc_feature 1..20: note = chemically synthesized
  source 1..20: mol_type = other DNA
gcacagccttatgcacggcc

SEQ ID NO: 55706 - DNA, 20 bp, synthetic construct
  misc_feature 1..20: note = chemically synthesized
  source 1..20: mol_type = other DNA
acagccttatgcacggcctg

SEQ ID NO: 55707 - DNA, 20 bp, synthetic construct
  misc_feature 1..20: note = chemically synthesized
  source 1..20: mol_type = other DNA
cagccttatgcacggcctgg

SEQ ID NO: 55708 - DNA, 20 bp, synthetic construct
  misc_feature 1..20: note = chemically synthesized
  source 1..20: mol_type = other DNA
agccttatgcacggcctgga

SEQ ID NO: 55709 - DNA, 20 bp, synthetic construct
  misc_feature 1..20: note = chemically synthesized
  source 1..20: mol_type = other DNA
gccttatgcacggcctggag

SEQ ID NO: 55710 - DNA, 20 bp, synthetic construct
  misc_feature 1..20: note = chemically synthesized
  source 1..20: mol_type = other DNA
cttatgcacggcctggaggg

SEQ ID NO: 55711 - DNA, 20 bp, synthetic construct
  misc_feature 1..20: note = chemically synthesized
  source 1..20: mol_type = other DNA
tatgcacggcctggagggga

SEQ ID NO: 55712 - DNA, 20 bp, synthetic construct
  misc_feature 1..20: note = chemically synthesized
  source 1..20: mol_type = other DNA
gcacggcctggaggggagag

SEQ ID NO: 55713 - DNA, 20 bp, synthetic construct
  misc_feature 1..20: note = chemically synthesized
  source 1..20: mol_type = other DNA
cggcctggaggggagagaag

SEQ ID NO: 55714 - DNA, 20 bp, synthetic construct
  misc_feature 1..20: note = chemically synthesized
  source 1..20: mol_type = other DNA
gcctggaggggagagaagca

SEQ ID NO: 55715 - DNA, 20 bp, synthetic construct
  misc_feature 1..20: note = chemically synthesized
  source 1..20: mol_type = other DNA
gagaagcagagacacgttgt

SEQ ID NO: 55716 - DNA, 20 bp, synthetic construct
  misc_feature 1..20: note = chemically synthesized
  source 1..20: mol_type = other DNA
agaagcagagacacgttgta

SEQ ID NO: 55717 - DNA, 20 bp, synthetic construct
  misc_feature 1..20: note = chemically synthesized
  source 1..20: mol_type = other DNA
acacgttgtaaggctgatcc

SEQ ID NO: 55718 - DNA, 20 bp, synthetic construct
  misc_feature 1..20: note = chemically synthesized
  source 1..20: mol_type = other DNA
cacgttgtaaggctgatccc

SEQ ID NO: 55719 - DNA, 20 bp, synthetic construct
  misc_feature 1..20: note = chemically synthesized
  source 1..20: mol_type = other DNA
taaggctgatcccaggcctc

SEQ ID NO: 55720 - DNA, 20 bp, synthetic construct
  misc_feature 1..20: note = chemically synthesized
  source 1..20: mol_type = other DNA
gctgatcccaggcctcgagc

SEQ ID NO: 55721 - DNA, 20 bp, synthetic construct
  misc_feature 1..20: note = chemically synthesized
  source 1..20: mol_type = other DNA
ctgatcccaggcctcgagca

SEQ ID NO: 55722 - DNA, 20 bp, synthetic construct
  misc_feature 1..20: note = chemically synthesized
  source 1..20: mol_type = other DNA
ggcctcgagcaaggctcacg

SEQ ID NO: 55723 - DNA, 20 bp, synthetic construct
  misc_feature 1..20: note = chemically synthesized
  source 1..20: mol_type = other DNA
aggctcacgtggacacctcc

SEQ ID NO: 55724 - DNA, 20 bp, synthetic construct
  misc_feature 1..20: note = chemically synthesized
  source 1..20: mol_type = other DNA
ggctcacgtggacacctccc

SEQ ID NO: 55725 - DNA, 20 bp, synthetic construct
  misc_feature 1..20: note = chemically synthesized
  source 1..20: mol_type = other DNA
tcacgtggacacctcccagg

SEQ ID NO: 55726 - DNA, 20 bp, synthetic construct
  misc_feature 1..20: note = chemically synthesized
  source 1..20: mol_type = other DNA
caggaagcgctcactccccc

SEQ ID NO: 55727 - DNA, 20 bp, synthetic construct
  misc_feature 1..20: note = chemically synthesized
  source 1..20: mol_type = other DNA
aagcgctcactccccctgga

SEQ ID NO: 55728 - DNA, 20 bp, synthetic construct
  misc_feature 1..20: note = chemically synthesized
  source 1..20: mol_type = other DNA
tcactccccctggacggccc

SEQ ID NO: 55729 - DNA, 20 bp, synthetic construct
  misc_feature 1..20: note = chemically synthesized
  source 1..20: mol_type = other DNA
tcctctccctccctgtcaca

SEQ ID NO: 55730 - DNA, 20 bp, synthetic construct
  misc_feature 1..20: note = chemically synthesized
  source 1..20: mol_type = other DNA
cctctccctccctgtcacat

SEQ ID NO: 55731 - DNA, 20 bp, synthetic construct
  misc_feature 1..20: note = chemically synthesized
  source 1..20: mol_type = other DNA
cataggccttgctcctcctc

SEQ ID NO: 55732 - DNA, 20 bp, synthetic construct
  misc_feature 1..20: note = chemically synthesized
  source 1..20: mol_type = other DNA
ataggccttgctcctcctca

SEQ ID NO: 55733 - DNA, 20 bp, synthetic construct
  misc_feature 1..20: note = chemically synthesized
  source 1..20: mol_type = other DNA
cttgctcctcctcaaggctt

SEQ ID NO: 55734 - DNA, 20 bp, synthetic construct
  misc_feature 1..20: note = chemically synthesized
  source 1..20: mol_type = other DNA
ctcctcaaggctttggctga

SEQ ID NO: 55735 - DNA, 20 bp, synthetic construct
  misc_feature 1..20: note = chemically synthesized
  source 1..20: mol_type = other DNA
tcctcaaggctttggctgat

SEQ ID NO: 55736 - DNA, 20 bp, synthetic construct
  misc_feature 1..20: note = chemically synthesized
  source 1..20: mol_type = other DNA
cctcaaggctttggctgatg

SEQ ID NO: 55737 - DNA, 20 bp, synthetic construct
  misc_feature 1..20: note = chemically synthesized
  source 1..20: mol_type = other DNA
aaggctttggctgatggggc

SEQ ID NO: 55738 - DNA, 20 bp, synthetic construct
  misc_feature 1..20: note = chemically synthesized
  source 1..20: mol_type = other DNA
cctctgtccatcttcctgac

SEQ ID NO: 55739 - DNA, 20 bp, synthetic construct
  misc_feature 1..20: note = chemically synthesized
  source 1..20: mol_type = other DNA
caagcgcctctccccctgct

SEQ ID NO: 55740 - DNA, 20 bp, synthetic construct
  misc_feature 1..20: note = chemically synthesized
  source 1..20: mol_type = other DNA
aagcgcctctccccctgctc

SEQ ID NO: 55741 - DNA, 20 bp, synthetic construct
  misc_feature 1..20: note = chemically synthesized
  source 1..20: mol_type = other DNA
gctcaggtgcacccacaact

SEQ ID NO: 55742 - DNA, 20 bp, synthetic construct
  misc_feature 1..20: note = chemically synthesized
  source 1..20: mol_type = other DNA
ggtgcacccacaactcagaa

SEQ ID NO: 55743 - DNA, 20 bp, synthetic construct
  misc_feature 1..20: note = chemically synthesized
  source 1..20: mol_type = other DNA
gtgcacccacaactcagaac

SEQ ID NO: 55744 - DNA, 20 bp, synthetic construct
  misc_feature 1..20: note = chemically synthesized
  source 1..20: mol_type = other DNA
tgcacccacaactcagaaca

SEQ ID NO: 55745 - DNA, 20 bp, synthetic construct
  misc_feature 1..20: note = chemically synthesized
  source 1..20: mol_type = other DNA
acccacaactcagaacaggg

SEQ ID NO: 55746 - DNA, 20 bp, synthetic construct
  misc_feature 1..20: note = chemically synthesized
  source 1..20: mol_type = other DNA
ccacaactcagaacagggaa

SEQ ID NO: 55747 - DNA, 20 bp, synthetic construct
  misc_feature 1..20: note = chemically synthesized
  source 1..20: mol_type = other DNA
cgtcactccacgtctgcctc

SEQ ID NO: 55748 - DNA, 20 bp, synthetic construct
  misc_feature 1..20: note = chemically synthesized
  source 1..20: mol_type = other DNA
gtcactccacgtctgcctcc

SEQ ID NO: 55749 - DNA, 20 bp, synthetic construct
  misc_feature 1..20: note = chemically synthesized
  source 1..20: mol_type = other DNA
tcactccacgtctgcctcca

SEQ ID NO: 55750 - DNA, 20 bp, synthetic construct
  misc_feature 1..20: note = chemically synthesized
  source 1..20: mol_type = other DNA
ctccagggctctctcctttc

SEQ ID NO: 55751 - DNA, 20 bp, synthetic construct
  misc_feature 1..20: note = chemically synthesized
  source 1..20: mol_type = other DNA
gctctctcctttctagtaca

SEQ ID NO: 55752 - DNA, 20 bp, synthetic construct
  misc_feature 1..20: note = chemically synthesized
  source 1..20: mol_type = other DNA
cctttctagtacacggcttg

SEQ ID NO: 55753 - DNA, 20 bp, synthetic construct
  misc_feature 1..20: note = chemically synthesized
  source 1..20: mol_type = other DNA
tacacggcttgaagctcctt

SEQ ID NO: 55754 - DNA, 20 bp, synthetic construct
  misc_feature 1..20: note = chemically synthesized
  source 1..20: mol_type = other DNA
acacggcttgaagctccttg

SEQ ID NO: 55755 - DNA, 20 bp, synthetic construct
  misc_feature 1..20: note = chemically synthesized
  source 1..20: mol_type = other DNA
cttgaagctccttgaggaca

SEQ ID NO: 55756 - DNA, 20 bp, synthetic construct
  misc_feature 1..20: note = chemically synthesized
  source 1..20: mol_type = other DNA
ctccttgaggacacggaccc

SEQ ID NO: 55757 - DNA, 20 bp, synthetic construct
  misc_feature 1..20: note = chemically synthesized
  source 1..20: mol_type = other DNA
cttgaggacacggaccctgg

SEQ ID NO: 55758 - DNA, 20 bp, synthetic construct
  misc_feature 1..20: note = chemically synthesized
  source 1..20: mol_type = other DNA
gaccctggcagtgaccttca

SEQ ID NO: 55759 - DNA, 20 bp, synthetic construct
  misc_feature 1..20: note = chemically synthesized
  source 1..20: mol_type = other DNA
gcagtgaccttcacagtgcc

SEQ ID NO: 55760 - DNA, 20 bp, synthetic construct
  misc_feature 1..20: note = chemically synthesized
  source 1..20: mol_type = other DNA
cttcacagtgcccagacccc

SEQ ID NO: 55761 - DNA, 20 bp, synthetic construct
  misc_feature 1..20: note = chemically synthesized
  source 1..20: mol_type = other DNA
gcccagaccccaagataatg

SEQ ID NO: 55762 - DNA, 20 bp, synthetic construct
  misc_feature 1..20: note = chemically synthesized
  source 1..20: mol_type = other DNA
caagataatgcagccattca

SEQ ID NO: 55763 - DNA, 20 bp, synthetic construct
  misc_feature 1..20: note = chemically synthesized
  source 1..20: mol_type = other DNA
tgcagccattcatggaactg

SEQ ID NO: 55764 - DNA, 20 bp, synthetic construct
  misc_feature 1..20: note = chemically synthesized
  source 1..20: mol_type = other DNA
atggaactgcagttgttcat

SEQ ID NO: 55765 - DNA, 20 bp, synthetic construct
  misc_feature 1..20: note = chemically synthesized
  source 1..20: mol_type = other DNA
agttgttcattggtcgcctt

SEQ ID NO: 55766 - DNA, 20 bp, synthetic construct
  misc_feature 1..20: note = chemically synthesized
  source 1..20: mol_type = other DNA
cgcctttagttttccaaaat

SEQ ID NO: 55767 - DNA, 20 bp, synthetic construct
  misc_feature 1..20: note = chemically synthesized
  source 1..20: mol_type = other DNA
tccaaaataagtgtcatctt

SEQ ID NO: 55768 - DNA, 20 bp, synthetic construct
  misc_feature 1..20: note = chemically synthesized
  source 1..20: mol_type = other DNA
gctgaaatcattcattaatt

SEQ ID NO: 55769 - DNA, 20 bp, synthetic construct
  misc_feature 1..20: note = chemically synthesized
  source 1..20: mol_type = other DNA
aattcagacaccaaatctca

SEQ ID NO: 55770 - DNA, 20 bp, synthetic construct
  misc_feature 1..20: note = chemically synthesized
  source 1..20: mol_type = other DNA
acaccaaatctcacagatcg

SEQ ID NO: 55771 - DNA, 20 bp, synthetic construct
  misc_feature 1..20: note = chemically synthesized
  source 1..20: mol_type = other DNA
caccaaatctcacagatcga

SEQ ID NO: 55772 - DNA, 20 bp, synthetic construct
  misc_feature 1..20: note = chemically synthesized
  source 1..20: mol_type = other DNA
ccaaatctcacagatcgaag

SEQ ID NO: 55773 - DNA, 20 bp, synthetic construct
  misc_feature 1..20: note = chemically synthesized
  source 1..20: mol_type = other DNA
atctcacagatcgaaggagt

SEQ ID NO: 55774 - DNA, 20 bp, synthetic construct
  misc_feature 1..20: note = chemically synthesized
  source 1..20: mol_type = other DNA
gaaattcctttgaaacaact

SEQ ID NO: 55775 - DNA, 20 bp, synthetic construct
  misc_feature 1..20: note = chemically synthesized
  source 1..20: mol_type = other DNA
tagcccaaacctttctgtgt

SEQ ID NO: 55776 - DNA, 20 bp, synthetic construct
  misc_feature 1..20: note = chemically synthesized
  source 1..20: mol_type = other DNA
caaacctttctgtgtcagta

SEQ ID NO: 55777 - DNA, 20 bp, synthetic construct
  misc_feature 1..20: note = chemically synthesized
  source 1..20: mol_type = other DNA
tgtgtcagtatggataaatc

SEQ ID NO: 55778 - DNA, 20 bp, synthetic construct
  misc_feature 1..20: note = chemically synthesized
  source 1..20: mol_type = other DNA
gtgtcagtatggataaatca

SEQ ID NO: 55779 - DNA, 20 bp, synthetic construct
  misc_feature 1..20: note = chemically synthesized
  source 1..20: mol_type = other DNA
ataaatcaaggcccaatgtc

SEQ ID NO: 55780 - DNA, 20 bp, synthetic construct
  misc_feature 1..20: note = chemically synthesized
  source 1..20: mol_type = other DNA
aatcaaggcccaatgtctag

SEQ ID NO: 55781 - DNA, 20 bp, synthetic construct
  misc_feature 1..20: note = chemically synthesized
  source 1..20: mol_type = other DNA
atcaaggcccaatgtctaga

SEQ ID NO: 55782 - DNA, 20 bp, synthetic construct
  misc_feature 1..20: note = chemically synthesized
  source 1..20: mol_type = other DNA
gcccaatgtctagaaggtct

SEQ ID NO: 55783 - DNA, 20 bp, synthetic construct
  misc_feature 1..20: note = chemically synthesized
  source 1..20: mol_type = other DNA
cccaatgtctagaaggtctt

SEQ ID NO: 55784 - DNA, 20 bp, synthetic construct
  misc_feature 1..20: note = chemically synthesized
  source 1..20: mol_type = other DNA
tgtctagaaggtcttgggca

SEQ ID NO: 55785 - DNA, 20 bp, synthetic construct
  misc_feature 1..20: note = chemically synthesized
  source 1..20: mol_type = other DNA
tcttgggcaaagttgaaatt

SEQ ID NO: 55786 - DNA, 20 bp, synthetic construct
  misc_feature 1..20: note = chemically synthesized
  source 1..20: mol_type = other DNA
cttgggcaaagttgaaattc

SEQ ID NO: 55787 - DNA, 20 bp, synthetic construct
  misc_feature 1..20: note = chemically synthesized
  source 1..20: mol_type = other DNA
ttgggcaaagttgaaattca

SEQ ID NO: 55788 - DNA, 20 bp, synthetic construct
  misc_feature 1..20: note = chemically synthesized
  source 1..20: mol_type = other DNA
gcaaagttgaaattcagggt

SEQ ID NO: 55789 - DNA, 20 bp, synthetic construct
  misc_feature 1..20: note = chemically synthesized
  source 1..20: mol_type = other DNA
agggtcagtgacacaacctc

SEQ ID NO: 55790 - DNA, 20 bp, synthetic construct
  misc_feature 1..20: note = chemically synthesized
  source 1..20: mol_type = other DNA
gggtcagtgacacaacctca

SEQ ID NO: 55791 - DNA, 20 bp, synthetic construct
  misc_feature 1..20: note = chemically synthesized
  source 1..20: mol_type = other DNA
ggtcagtgacacaacctcaa

SEQ ID NO: 55792 - DNA, 20 bp, synthetic construct
  misc_feature 1..20: note = chemically synthesized
  source 1..20: mol_type = other DNA
tcagtgacacaacctcaagg

SEQ ID NO: 55793 - DNA, 20 bp, synthetic construct
  misc_feature 1..20: note = chemically synthesized
  source 1..20: mol_type = other DNA
cagtgacacaacctcaaggg

SEQ ID NO: 55794 - DNA, 20 bp, synthetic construct
  misc_feature 1..20: note = chemically synthesized
  source 1..20: mol_type = other DNA
aacctcaagggaggccccga

SEQ ID NO: 55795 - DNA, 20 bp, synthetic construct
  misc_feature 1..20: note = chemically synthesized
  source 1..20: mol_type = other DNA
aagggaggccccgaaagtgc

SEQ ID NO: 55796 - DNA, 20 bp, synthetic construct
  misc_feature 1..20: note = chemically synthesized
  source 1..20: mol_type = other DNA
ccccgaaagtgccagctgca

SEQ ID NO: 55797 - DNA, 20 bp, synthetic construct
  misc_feature 1..20: note = chemically synthesized
  source 1..20: mol_type = other DNA
cgaaagtgccagctgcacag

SEQ ID NO: 55798 - DNA, 20 bp, synthetic construct
  misc_feature 1..20: note = chemically synthesized
  source 1..20: mol_type = other DNA
ctgcacagcagtcccctgcc

SEQ ID NO: 55799 - DNA, 20 bp, synthetic construct
  misc_feature 1..20: note = chemically synthesized
  source 1..20: mol_type = other DNA
tgtttgaccacgtcccgtgt

SEQ ID NO: 55800 - DNA, 20 bp, synthetic construct
  misc_feature 1..20: note = chemically synthesized
  source 1..20: mol_type = other DNA
cgtcccgtgtcagtgaatca

SEQ ID NO: 55801 - DNA, 20 bp, synthetic construct
  misc_feature 1..20: note = chemically synthesized
  source 1..20: mol_type = other DNA
gtcccgtgtcagtgaatcac

SEQ ID NO: 55802 - DNA, 20 bp, synthetic construct
  misc_feature 1..20: note = chemically synthesized
  source 1..20: mol_type = other DNA
cagtgaatcacgggcatctt

SEQ ID NO: 55803 - DNA, 20 bp, synthetic construct
  misc_feature 1..20: note = chemically synthesized
  source 1..20: mol_type = other DNA
agtgaatcacgggcatcttc

SEQ ID NO: 55804 - DNA, 20 bp, synthetic construct
  misc_feature 1..20: note = chemically synthesized
  source 1..20: mol_type = other DNA
tgaatcacgggcatcttcag

SEQ ID NO: 55805 - DNA, 20 bp, synthetic construct
  misc_feature 1..20: note = chemically synthesized
  source 1..20: mol_type = other DNA
cacgggcatcttcaggagct

SEQ ID NO: 55806 - DNA, 20 bp, synthetic construct
  misc_feature 1..20: note = chemically synthesized
  source 1..20: mol_type = other DNA
gcatcttcaggagctcagcc

SEQ ID NO: 55807 - DNA, 20 bp, synthetic construct
  misc_feature 1..20: note = chemically synthesized
  source 1..20: mol_type = other DNA
catcttcaggagctcagcct

SEQ ID NO: 55808 - DNA, 20 bp, synthetic construct
  misc_feature 1..20: note = chemically synthesized
  source 1..20: mol_type = other DNA
gggtcttcatttgtttccct

SEQ ID NO: 55809 - DNA, 20 bp, synthetic construct
  misc_feature 1..20: note = chemically synthesized
  source 1..20: mol_type = other DNA
gtttccctcggccccttcct

SEQ ID NO: 55810 - DNA, 20 bp, synthetic construct
  misc_feature 1..20: note = chemically synthesized
  source 1..20: mol_type = other DNA
ctcggccccttcctcagcct

SEQ ID NO: 55811 - DNA, 20 bp, synthetic construct
  misc_feature 1..20: note = chemically synthesized
  source 1..20: mol_type = other DNA
tcggccccttcctcagcctc

SEQ ID NO: 55812 - DNA, 20 bp, synthetic construct
  misc_feature 1..20: note = chemically synthesized
  source 1..20: mol_type = other DNA
ccccttcctcagcctcagga

SEQ ID NO: 55813 - DNA, 20 bp, synthetic construct
  misc_feature 1..20: note = chemically synthesized
  source 1..20: mol_type = other DNA
ccttcctcagcctcaggaca

SEQ ID NO: 55814 - DNA, 20 bp, synthetic construct
  misc_feature 1..20: note = chemically synthesized
  source 1..20: mol_type = other DNA
tcagcctcaggacagagctg

SEQ ID NO: 55815 - DNA, 20 bp, synthetic construct
  misc_feature 1..20: note = chemically synthesized
  source 1..20: mol_type = other DNA
cccccacacattcttcccta

SEQ ID NO: 55816 - DNA, 20 bp, synthetic construct
  misc_feature 1..20: note = chemically synthesized
  source 1..20: mol_type = other DNA
acattcttccctacagatac

SEQ ID NO: 55817 - DNA, 20 bp, synthetic construct
  misc_feature 1..20: note = chemically synthesized
  source 1..20: mol_type = other DNA
cattcttccctacagatacc

SEQ ID NO: 55818 - DNA, 20 bp, synthetic construct
  misc_feature 1..20: note = chemically synthesized
  source 1..20: mol_type = other DNA
attcttccctacagatacca

SEQ ID NO: 55819 - DNA, 20 bp, synthetic construct
  misc_feature 1..20: note = chemically synthesized
  source 1..20: mol_type = other DNA
tacagataccagggtgcaac

SEQ ID NO: 55820 - DNA, 20 bp, synthetic construct
  misc_feature 1..20: note = chemically synthesized
  source 1..20: mol_type = other DNA
acagataccagggtgcaaca

SEQ ID NO: 55821 - DNA, 20 bp, synthetic construct
  misc_feature 1..20: note = chemically synthesized
  source 1..20: mol_type = other DNA
ccagggtgcaacaaggtcgt

SEQ ID NO: 55822 - DNA, 20 bp, synthetic construct
  misc_feature 1..20: note = chemically synthesized
  source 1..20: mol_type = other DNA
cagggtgcaacaaggtcgtc

SEQ ID NO: 55823 - DNA, 20 bp, synthetic construct
  misc_feature 1..20: note = chemically synthesized
  source 1..20: mol_type = other DNA
agggtgcaacaaggtcgtca

SEQ ID NO: 55824 - DNA, 20 bp, synthetic construct
  misc_feature 1..20: note = chemically synthesized
  source 1..20: mol_type = other DNA
tcgtcagggtgatctcacct

SEQ ID NO: 55825 - DNA, 20 bp, synthetic construct
  misc_feature 1..20: note = chemically synthesized
  source 1..20: mol_type = other DNA
gtcagggtgatctcaccttg

SEQ ID NO: 55826 - DNA, 20 bp, synthetic construct
  misc_feature 1..20: note = chemically synthesized
  source 1..20: mol_type = other DNA
cagggtgatctcaccttgga

SEQ ID NO: 55827 - DNA, 20 bp, synthetic construct
  misc_feature 1..20: note = chemically synthesized
  source 1..20: mol_type = other DNA
gatctcaccttggagagctt

SEQ ID NO: 55828 - DNA, 20 bp, synthetic construct
  misc_feature 1..20: note = chemically synthesized
  source 1..20: mol_type = other DNA
atctcaccttggagagcttc

SEQ ID NO: 55829 - DNA, 20 bp, synthetic construct
  misc_feature 1..20: note = chemically synthesized
  source 1..20: mol_type = other DNA
tctcaccttggagagcttca

SEQ ID NO: 55830 - DNA, 20 bp, synthetic construct
  misc_feature 1..20: note = chemically synthesized
  source 1..20: mol_type = other DNA
ctcaccttggagagcttcag

SEQ ID NO: 55831 - DNA, 20 bp, synthetic construct
  misc_feature 1..20: note = chemically synthesized
  source 1..20: mol_type = other DNA
gggtgcctcctctgtgaccc

SEQ ID NO: 55832 - DNA, 20 bp, synthetic construct
  misc_feature 1..20: note = chemically synthesized
  source 1..20: mol_type = other DNA
gtgcctcctctgtgaccccg

SEQ ID NO: 55833 - DNA, 20 bp, synthetic construct
  misc_feature 1..20: note = chemically synthesized
  source 1..20: mol_type = other DNA
gcctcctctgtgaccccgga

SEQ ID NO: 55834 - DNA, 20 bp, synthetic construct
  misc_feature 1..20: note = chemically synthesized
  source 1..20: mol_type = other DNA
cctcctctgtgaccccggag

SEQ ID NO: 55835 - DNA, 20 bp, synthetic construct
  misc_feature 1..20: note = chemically synthesized
  source 1..20: mol_type = other DNA
ctctgtgaccccggagaggt

SEQ ID NO: 55836 - DNA, 20 bp, synthetic construct
  misc_feature 1..20: note = chemically synthesized
  source 1..20: mol_type = other DNA
agaggtcagccccattgctg

SEQ ID NO: 55837 - DNA, 20 bp, synthetic construct
  misc_feature 1..20: note = chemically synthesized
  source 1..20: mol_type = other DNA
agccccattgctgaagacct

SEQ ID NO: 55838 - DNA, 20 bp, synthetic construct
  misc_feature 1..20: note = chemically synthesized
  source 1..20: mol_type = other DNA
ctgaagaccttagtgatgcc

SEQ ID NO: 55839 - DNA, 20 bp, synthetic construct
  misc_feature 1..20: note = chemically synthesized
  source 1..20: mol_type = other DNA
ttagtgatgcccagttgacc

SEQ ID NO: 55840 - DNA, 20 bp, synthetic construct
  misc_feature 1..20: note = chemically synthesized
  source 1..20: mol_type = other DNA
tagtgatgcccagttgaccc

SEQ ID NO: 55841 - DNA, 20 bp, synthetic construct
  misc_feature 1..20: note = chemically synthesized
  source 1..20: mol_type = other DNA
agttgacccaggacgctctt

SEQ ID NO: 55842 - DNA, 20 bp, synthetic construct
  misc_feature 1..20: note = chemically synthesized
  source 1..20: mol_type = other DNA
ccaggacgctcttcagatca

SEQ ID NO: 55843 - DNA, 20 bp, synthetic construct
  misc_feature 1..20: note = chemically synthesized
  source 1..20: mol_type = other DNA
caggacgctcttcagatcat

SEQ ID NO: 55844 - DNA, 20 bp, synthetic construct
  misc_feature 1..20: note = chemically synthesized
  source 1..20: mol_type = other DNA
gctcttcagatcataggttc

SEQ ID NO: 55845 - DNA, 20 bp, synthetic construct
  misc_feature 1..20: note = chemically synthesized
  source 1..20: mol_type = other DNA
cagatcataggttccagtaa

SEQ ID NO: 55846 - DNA, 20 bp, synthetic construct
  misc_feature 1..20: note = chemically synthesized
  source 1..20: mol_type = other DNA
tcataggttccagtaatgga

SEQ ID NO: 55847 - DNA, 20 bp, synthetic construct
  misc_feature 1..20: note = chemically synthesized
  source 1..20: mol_type = other DNA
ggttccagtaatggacagtt

SEQ ID NO: 55848 - DNA, 20 bp, synthetic construct
  misc_feature 1..20: note = chemically synthesized
  source 1..20: mol_type = other DNA
gttccagtaatggacagttt

SEQ ID NO: 55849 - DNA, 20 bp, synthetic construct
  misc_feature 1..20: note = chemically synthesized
  source 1..20: mol_type = other DNA
tggacagtttgggtaaatgt

SEQ ID NO: 55850 - DNA, 20 bp, synthetic construct
  misc_feature 1..20: note = chemically synthesized
  source 1..20: mol_type = other DNA
cagtttgggtaaatgtaagc

SEQ ID NO: 55851 - DNA, 20 bp, synthetic construct
  misc_feature 1..20: note = chemically synthesized
  source 1..20: mol_type = other DNA
tttgggtaaatgtaagctgg

SEQ ID NO: 55852 - DNA, 20 bp, synthetic construct
  misc_feature 1..20: note = chemically synthesized
  source 1..20: mol_type = other DNA
aagctggcagacctgtcgtg

SEQ ID NO: 55853 - DNA, 20 bp, synthetic construct
  misc_feature 1..20: note = chemically synthesized
  source 1..20: mol_type = other DNA
ggcagacctgtcgtgcagaa

SEQ ID NO: 55854 - DNA, 20 bp, synthetic construct
  misc_feature 1..20: note = chemically synthesized
  source 1..20: mol_type = other DNA
gtcgtgcagaaaagaaattc

SEQ ID NO: 55855 - DNA, 20 bp, synthetic construct
  misc_feature 1..20: note = chemically synthesized
  source 1..20: mol_type = other DNA
tcgtgcagaaaagaaattca

SEQ ID NO: 55856 - DNA, 20 bp, synthetic construct
  misc_feature 1..20: note = chemically synthesized
  source 1..20: mol_type = other DNA
cagaaaagaaattcaaggca

SEQ ID NO: 55857 - DNA, 20 bp, synthetic construct
  misc_feature 1..20: note = chemically synthesized
  source 1..20: mol_type = other DNA
aagaaattcaaggcatggca

SEQ ID NO: 55858 - DNA, 20 bp, synthetic construct
  misc_feature 1..20: note = chemically synthesized
  source 1..20: mol_type = other DNA
cagcattcctcttgttcttc

SEQ ID NO: 55859 - DNA, 20 bp, synthetic construct
  misc_feature 1..20: note = chemically synthesized
  source 1..20: mol_type = other DNA
agcattcctcttgttcttct

SEQ ID NO: 55860 - DNA, 20 bp, synthetic construct
  misc_feature 1..20: note = chemically synthesized
  source 1..20: mol_type = other DNA
tgttcttctgggacccacca

SEQ ID NO: 55861 - DNA, 20 bp, synthetic construct
  misc_feature 1..20: note = chemically synthesized
  source 1..20: mol_type = other DNA
tctgggacccaccacagtgc

SEQ ID NO: 55862 - DNA, 20 bp, synthetic construct
  misc_feature 1..20: note = chemically synthesized
  source 1..20: mol_type = other DNA
ctgtgtcctccacccacact

SEQ ID NO: 55863 - DNA, 20 bp, synthetic construct
  misc_feature 1..20: note = chemically synthesized
  source 1..20: mol_type = other DNA
gtcctccacccacactaaga

SEQ ID NO: 55864 - DNA, 20 bp, synthetic construct
  misc_feature 1..20: note = chemically synthesized
  source 1..20: mol_type = other DNA
tcctccacccacactaagat

SEQ ID NO: 55865 - DNA, 20 bp, synthetic construct
  misc_feature 1..20: note = chemically synthesized
  source 1..20: mol_type = other DNA
cccacactaagatgggaact

SEQ ID NO: 55866 - DNA, 20 bp, synthetic construct
  misc_feature 1..20: note = chemically synthesized
  source 1..20: mol_type = other DNA
ctaagatgggaactcggctt

SEQ ID NO: 55867 - DNA, 20 bp, synthetic construct
  misc_feature 1..20: note = chemically synthesized
  source 1..20: mol_type = other DNA
gctttggtttgttctacttt

SEQ ID NO: 55868 - DNA, 20 bp, synthetic construct
  misc_feature 1..20: note = chemically synthesized
  source 1..20: mol_type = other DNA
acttttagctcttctacatt

SEQ ID NO: 55869 - DNA, 20 bp, synthetic construct
  misc_feature 1..20: note = chemically synthesized
  source 1..20: mol_type = other DNA
agctcttctacattgagtca

SEQ ID NO: 55870 - DNA, 20 bp, synthetic construct
  misc_feature 1..20: note = chemically synthesized
  source 1..20: mol_type = other DNA
taacatcgaatgaatcacaa

SEQ ID NO: 55871 - DNA, 20 bp, synthetic construct
  misc_feature 1..20: note = chemically synthesized
  source 1..20: mol_type = other DNA
tgccacctcctctgatattc

SEQ ID NO: 55872 - DNA, 20 bp, synthetic construct
  misc_feature 1..20: note = chemically synthesized
  source 1..20: mol_type = other DNA
gccacctcctctgatattct

SEQ ID NO: 55873 - DNA, 20 bp, synthetic construct
  misc_feature 1..20: note = chemically synthesized
  source 1..20: mol_type = other DNA
ctctgatattctaggtgtcc

SEQ ID NO: 55874 - DNA, 20 bp, synthetic construct
  misc_feature 1..20: note = chemically synthesized
  source 1..20: mol_type = other DNA
tgatattctaggtgtcctgg

SEQ ID NO: 55875 - DNA, 20 bp, synthetic construct
  misc_feature 1..20: note = chemically synthesized
  source 1..20: mol_type = other DNA
gcctgtctcatcttgccctg

SEQ ID NO: 55876 - DNA, 20 bp, synthetic construct
  misc_feature 1..20: note = chemically synthesized
  source 1..20: mol_type = other DNA
ctcatcttgccctgtagtgt

SEQ ID NO: 55877 - DNA, 20 bp, synthetic construct
  misc_feature 1..20: note = chemically synthesized
  source 1..20: mol_type = other DNA
tcatcttgccctgtagtgtt

SEQ ID NO: 55878 - DNA, 20 bp, synthetic construct
  misc_feature 1..20: note = chemically synthesized
  source 1..20: mol_type = other DNA
ccctgtagtgttgggtcacc

SEQ ID NO: 55879 - DNA, 20 bp, synthetic construct
  misc_feature 1..20: note = chemically synthesized
  source 1..20: mol_type = other DNA
gtgttgggtcacctggcccc

SEQ ID NO: 55880 - DNA, 20 bp, synthetic construct
  misc_feature 1..20: note = chemically synthesized
  source 1..20: mol_type = other DNA
cccccagcctgtaacatccc

SEQ ID NO: 55881 - DNA, 20 bp, synthetic construct
  misc_feature 1..20: note = chemically synthesized
  source 1..20: mol_type = other DNA
ccccagcctgtaacatcccc

SEQ ID NO: 55882 - DNA, 20 bp, synthetic construct
  misc_feature 1..20: note = chemically synthesized
  source 1..20: mol_type = other DNA
cccagcctgtaacatcccca

SEQ ID NO: 55883 - DNA, 20 bp, synthetic construct
  misc_feature 1..20: note = chemically synthesized
  source 1..20: mol_type = other DNA
catccccagggccctacacc

SEQ ID NO: 55884 - DNA, 20 bp, synthetic construct
  misc_feature 1..20: note = chemically synthesized
  source 1..20: mol_type = other DNA
tccccagggccctacaccca

SEQ ID NO: 55885 - DNA, 20 bp, synthetic construct
  misc_feature 1..20: note = chemically synthesized
  source 1..20: mol_type = other DNA
gccctacacccagagaaaca

SEQ ID NO: 55886 - DNA, 20 bp, synthetic construct
  misc_feature 1..20: note = chemically synthesized
  source 1..20: mol_type = other DNA
ccctacacccagagaaacac

SEQ ID NO: 55887 - DNA, 20 bp, synthetic construct
  misc_feature 1..20: note = chemically synthesized
  source 1..20: mol_type = other DNA
cctacacccagagaaacacg

SEQ ID NO: 55888 - DNA, 20 bp, synthetic construct
  misc_feature 1..20: note = chemically synthesized
  source 1..20: mol_type = other DNA
cacccagagaaacacggggc

SEQ ID NO: 55889 - DNA, 20 bp, synthetic construct
  misc_feature 1..20: note = chemically synthesized
  source 1..20: mol_type = other DNA
ccagagaaacacggggctgg

SEQ ID NO: 55890 - DNA, 20 bp, synthetic construct
  misc_feature 1..20: note = chemically synthesized
  source 1..20: mol_type = other DNA
gagaaacacggggctggtgg

SEQ ID NO: 55891 - DNA, 20 bp, synthetic construct
  misc_feature 1..20: note = chemically synthesized
  source 1..20: mol_type = other DNA
acggggctggtggcagtgcc

SEQ ID NO: 55892 - DNA, 20 bp, synthetic construct
  misc_feature 1..20: note = chemically synthesized
  source 1..20: mol_type = other DNA
agtgcccagtgacaaccgtt

SEQ ID NO: 55893 - DNA, 20 bp, synthetic construct
  misc_feature 1..20: note = chemically synthesized
  source 1..20: mol_type = other DNA
gcccagtgacaaccgtttag

SEQ ID NO: 55894 - DNA, 20 bp, synthetic construct
  misc_feature 1..20: note = chemically synthesized
  source 1..20: mol_type = other DNA
gtgacaaccgtttagtggat

SEQ ID NO: 55895 - DNA, 20 bp, synthetic construct
  misc_feature 1..20: note = chemically synthesized
  source 1..20: mol_type = other DNA
gacaaccgtttagtggataa

SEQ ID NO: 55896 - DNA, 20 bp, synthetic construct
  misc_feature 1..20: note = chemically synthesized
  source 1..20: mol_type = other DNA
aaccgtttagtggataagag

SEQ ID NO: 55897 - DNA, 20 bp, synthetic construct
  misc_feature 1..20: note = chemically synthesized
  source 1..20: mol_type = other DNA
ccgtttagtggataagagaa

SEQ ID NO: 55898 - DNA, 20 bp, synthetic construct
  misc_feature 1..20: note = chemically synthesized
  source 1..20: mol_type = other DNA
taagagaagagtgaccacac

SEQ ID NO: 55899 - DNA, 20 bp, synthetic construct
  misc_feature 1..20: note = chemically synthesized
  source 1..20: mol_type = other DNA
aagagaagagtgaccacacc

SEQ ID NO: 55900 - DNA, 20 bp, synthetic construct
  misc_feature 1..20: note = chemically synthesized
  source 1..20: mol_type = other DNA
aagagtgaccacaccaggct

SEQ ID NO: 55901 - DNA, 20 bp, synthetic construct
  misc_feature 1..20: note = chemically synthesized
  source 1..20: mol_type = other DNA
ccaggctgagtgctcctctc

SEQ ID NO: 55902 - DNA, 20 bp, synthetic construct
  misc_feature 1..20: note = chemically synthesized
  source 1..20: mol_type = other DNA
tgctcctctctggttttcca

SEQ ID NO: 55903 - DNA, 20 bp, synthetic construct
  misc_feature 1..20: note = chemically synthesized
  source 1..20: mol_type = other DNA
gctcctctctggttttccat

SEQ ID NO: 55904 - DNA, 20 bp, synthetic construct
  misc_feature 1..20: note = chemically synthesized
  source 1..20: mol_type = other DNA
ctcctctctggttttccatg

SEQ ID NO: 55905 - DNA, 20 bp, synthetic construct
  misc_feature 1..20: note = chemically synthesized
  source 1..20: mol_type = other DNA
cctctctggttttccatggg

SEQ ID NO: 55906 - DNA, 20 bp, synthetic construct
  misc_feature 1..20: note = chemically synthesized
  source 1..20: mol_type = other DNA
tggggagacaatgccaccct

SEQ ID NO: 55907 - DNA, 20 bp, synthetic construct
  misc_feature 1..20: note = chemically synthesized
  source 1..20: mol_type = other DNA
ggagacaatgccaccctgag

SEQ ID NO: 55908 - DNA, 20 bp, synthetic construct
  misc_feature 1..20: note = chemically synthesized
  source 1..20: mol_type = other DNA
gagacaatgccaccctgagc

SEQ ID NO: 55909 - DNA, 20 bp, synthetic construct
  misc_feature 1..20: note = chemically synthesized
  source 1..20: mol_type = other DNA
agacaatgccaccctgagca

SEQ ID NO: 55910 - DNA, 20 bp, synthetic construct
  misc_feature 1..20: note = chemically synthesized
  source 1..20: mol_type = other DNA
atgccaccctgagcagggtc

SEQ ID NO: 55911 - DNA, 20 bp, synthetic construct
  misc_feature 1..20: note = chemically synthesized
  source 1..20: mol_type = other DNA
ccctgagcagggtctggtgt

SEQ ID NO: 55912 - DNA, 20 bp, synthetic construct
  misc_feature 1..20: note = chemically synthesized
  source 1..20: mol_type = other DNA
tgagcagggtctggtgtgag

SEQ ID NO: 55913 - DNA, 20 bp, synthetic construct
  misc_feature 1..20: note = chemically synthesized
  source 1..20: mol_type = other DNA
gagcagggtctggtgtgagc

SEQ ID NO: 55914 - DNA, 20 bp, synthetic construct
  misc_feature 1..20: note = chemically synthesized
  source 1..20: mol_type = other DNA
cagggtctggtgtgagcggg

SEQ ID NO: 55915 - DNA, 20 bp, synthetic construct
  misc_feature 1..20: note = chemically synthesized
  source 1..20: mol_type = other DNA
tctggtgtgagcgggcagct

SEQ ID NO: 55916 - DNA, 20 bp, synthetic construct
  misc_feature 1..20: note = chemically synthesized
  source 1..20: mol_type = other DNA
gtgagcgggcagcttggctc

SEQ ID NO: 55917 - DNA, 20 bp, synthetic construct
  misc_feature 1..20: note = chemically synthesized
  source 1..20: mol_type = other DNA
tgagcgggcagcttggctct

SEQ ID NO: 55918 - DNA, 20 bp, synthetic construct
  misc_feature 1..20: note = chemically synthesized
  source 1..20: mol_type = other DNA
tctctgatccgttaccctct

SEQ ID NO: 55919 - DNA, 20 bp, synthetic construct
  misc_feature 1..20: note = chemically synthesized
  source 1..20: mol_type = other DNA
ctttgttctttctcaacccc

SEQ ID NO: 55920 - DNA, 20 bp, synthetic construct
  misc_feature 1..20: note = chemically synthesized
  source 1..20: mol_type = other DNA
ttgttctttctcaacccctg

SEQ ID NO: 55921 - DNA, 20 bp, synthetic construct
  misc_feature 1..20: note = chemically synthesized
  source 1..20: mol_type = other DNA
ttctttctcaacccctggag

SEQ ID NO: 55922 - DNA, 20 bp, synthetic construct
  misc_feature 1..20: note = chemically synthesized
  source 1..20: mol_type = other DNA
ctttctcaacccctggagca

SEQ ID NO: 55923 - DNA, 20 bp, synthetic construct
  misc_feature 1..20: note = chemically synthesized
  source 1..20: mol_type = other DNA
aacccctggagcagagacct

SEQ ID NO: 55924 - DNA, 20 bp, synthetic construct
  misc_feature 1..20: note = chemically synthesized
  source 1..20: mol_type = other DNA
acccctggagcagagacctc

SEQ ID NO: 55925 - DNA, 20 bp, synthetic construct
  misc_feature 1..20: note = chemically synthesized
  source 1..20: mol_type = other DNA
ccctggagcagagacctcag

SEQ ID NO: 55926 - DNA, 20 bp, synthetic construct
  misc_feature 1..20: note = chemically synthesized
  source 1..20: mol_type = other DNA
cctggagcagagacctcagg

SEQ ID NO: 55927 - DNA, 20 bp, synthetic construct
  misc_feature 1..20: note = chemically synthesized
  source 1..20: mol_type = other DNA
gcagagacctcaggaggtgc

SEQ ID NO: 55928 - DNA, 20 bp, synthetic construct
  misc_feature 1..20: note = chemically synthesized
  source 1..20: mol_type = other DNA
gacctcaggaggtgctggca

SEQ ID NO: 55929 - DNA, 20 bp, synthetic construct
  misc_feature 1..20: note = chemically synthesized
  source 1..20: mol_type = other DNA
caggaggtgctggcatggaa

SEQ ID NO: 55930 - DNA, 20 bp, synthetic construct
  misc_feature 1..20: note = chemically synthesized
  source 1..20: mol_type = other DNA
ggaggtgctggcatggaaca

SEQ ID NO: 55931 - DNA, 20 bp, synthetic construct
  misc_feature 1..20: note = chemically synthesized
  source 1..20: mol_type = other DNA
ggcatggaacagagaaattc

SEQ ID NO: 55932 - DNA, 20 bp, synthetic construct
  misc_feature 1..20: note = chemically synthesized
  source 1..20: mol_type = other DNA
caccttttgtattttcatct

SEQ ID NO: 55933 - DNA, 20 bp, synthetic construct
  misc_feature 1..20: note = chemically synthesized
  source 1..20: mol_type = other DNA
gtattttcatcttggtttta

SEQ ID NO: 55934 - DNA, 20 bp, synthetic construct
  misc_feature 1..20: note = chemically synthesized
  source 1..20: mol_type = other DNA
ttacagtgtacaaaacgaac

SEQ ID NO: 55935 - DNA, 20 bp, synthetic construct
  misc_feature 1..20: note = chemically synthesized
  source 1..20: mol_type = other DNA
gtgtacaaaacgaactagat

SEQ ID NO: 55936 - DNA, 20 bp, synthetic construct
  misc_feature 1..20: note = chemically synthesized
  source 1..20: mol_type = other DNA
tacaaaacgaactagatcag

SEQ ID NO: 55937 - DNA, 20 bp, synthetic construct
  misc_feature 1..20: note = chemically synthesized
  source 1..20: mol_type = other DNA
acaaaacgaactagatcagc

SEQ ID NO: 55938 - DNA, 20 bp, synthetic construct
  misc_feature 1..20: note = chemically synthesized
  source 1..20: mol_type = other DNA
caaaacgaactagatcagca

SEQ ID NO: 55939 - DNA, 20 bp, synthetic construct
  misc_feature 1..20: note = chemically synthesized
  source 1..20: mol_type = other DNA
cgaactagatcagcagggca

SEQ ID NO: 55940 - DNA, 20 bp, synthetic construct
  misc_feature 1..20: note = chemically synthesized
  source 1..20: mol_type = other DNA
gaactagatcagcagggcat

SEQ ID NO: 55941 - DNA, 20 bp, synthetic construct
  misc_feature 1..20: note = chemically synthesized
  source 1..20: mol_type = other DNA
cacacacatacactaatgtg

SEQ ID NO: 55942 - DNA, 20 bp, synthetic construct
  misc_feature 1..20: note = chemically synthesized
  source 1..20: mol_type = other DNA
ctaatgtgtggctcatgttt

SEQ ID NO: 55943 - DNA, 20 bp, synthetic construct
  misc_feature 1..20: note = chemically synthesized
  source 1..20: mol_type = other DNA
tgtttaagtatcacttacta

SEQ ID NO: 55944 - DNA, 20 bp, synthetic construct
  misc_feature 1..20: note = chemically synthesized
  source 1..20: mol_type = other DNA
gtttaagtatcacttactac

SEQ ID NO: 55945 - DNA, 20 bp, synthetic construct
  misc_feature 1..20: note = chemically synthesized
  source 1..20: mol_type = other DNA
ctacaggacacccaatctaa

SEQ ID NO: 55946 - DNA, 20 bp, synthetic construct
  misc_feature 1..20: note = chemically synthesized
  source 1..20: mol_type = other DNA
ccaatctaacagcaccgata

SEQ ID NO: 55947 - DNA, 20 bp, synthetic construct
  misc_feature 1..20: note = chemically synthesized
  source 1..20: mol_type = other DNA
taacagcaccgataaagtga

SEQ ID NO: 55948 - DNA, 20 bp, synthetic construct
  misc_feature 1..20: note = chemically synthesized
  source 1..20: mol_type = other DNA
acagcaccgataaagtgaca

SEQ ID NO: 55949 - DNA, 20 bp, synthetic construct
  misc_feature 1..20: note = chemically synthesized
  source 1..20: mol_type = other DNA
ataaagtgacagagaaacgc

SEQ ID NO: 55950 - DNA, 20 bp, synthetic construct
  misc_feature 1..20: note = chemically synthesized
  source 1..20: mol_type = other DNA
acgcaagccttctgcgaaca

SEQ ID NO: 55951 - DNA, 20 bp, synthetic construct
  misc_feature 1..20: note = chemically synthesized
  source 1..20: mol_type = other DNA
agccttctgcgaacatggcc

SEQ ID NO: 55952 - DNA, 20 bp, synthetic construct
  misc_feature 1..20: note = chemically synthesized
  source 1..20: mol_type = other DNA
aattccgaaccttgcttttc

SEQ ID NO: 55953 - DNA, 20 bp, synthetic construct
  misc_feature 1..20: note = chemically synthesized
  source 1..20: mol_type = other DNA
attccgaaccttgcttttct

SEQ ID NO: 55954 - DNA, 20 bp, synthetic construct
  misc_feature 1..20: note = chemically synthesized
  source 1..20: mol_type = other DNA
cttttctgggccttgccaca

SEQ ID NO: 55955 - DNA, 20 bp, synthetic construct
  misc_feature 1..20: note = chemically synthesized
  source 1..20: mol_type = other DNA
ttttctgggccttgccacac

SEQ ID NO: 55956 - DNA, 20 bp, synthetic construct
  misc_feature 1..20: note = chemically synthesized
  source 1..20: mol_type = other DNA
aggctcttcccccgtccccc

SEQ ID NO: 55957 - DNA, 20 bp, synthetic construct
  misc_feature 1..20: note = chemically synthesized
  source 1..20: mol_type = other DNA
ggctcttcccccgtcccccc

SEQ ID NO: 55958 - DNA, 20 bp, synthetic construct
  misc_feature 1..20: note = chemically synthesized
  source 1..20: mol_type = other DNA
gctcttcccccgtcccccca

SEQ ID NO: 55959 - DNA, 20 bp, synthetic construct
  misc_feature 1..20: note = chemically synthesized
  source 1..20: mol_type = other DNA
cactccactgctgcctttgc

SEQ ID NO: 55960 - DNA, 20 bp, synthetic construct
  misc_feature 1..20: note = chemically synthesized
  source 1..20: mol_type = other DNA
actccactgctgcctttgcc

SEQ ID NO: 55961 - DNA, 20 bp, synthetic construct
  misc_feature 1..20: note = chemically synthesized
  source 1..20: mol_type = other DNA
ccactgctgcctttgccagg

SEQ ID NO: 55962 - DNA, 20 bp, synthetic construct
  misc_feature 1..20: note = chemically synthesized
  source 1..20: mol_type = other DNA
gaagcccatctgttcctttt

SEQ ID NO: 55963 - DNA, 20 bp, synthetic construct
  misc_feature 1..20: note = chemically synthesized
  source 1..20: mol_type = other DNA
ctgttcctttttggttctgc

SEQ ID NO: 55964 - DNA, 20 bp, synthetic construct
  misc_feature 1..20: note = chemically synthesized
  source 1..20: mol_type = other DNA
tttggttctgccagaacgtg

SEQ ID NO: 55965 - DNA, 20 bp, synthetic construct
  misc_feature 1..20: note = chemically synthesized
  source 1..20: mol_type = other DNA
ggttctgccagaacgtgtgg

SEQ ID NO: 55966 - DNA, 20 bp, synthetic construct
  misc_feature 1..20: note = chemically synthesized
  source 1..20: mol_type = other DNA
tggtgctgctgtccctgccc

SEQ ID NO: 55967 - DNA, 20 bp, synthetic construct
  misc_feature 1..20: note = chemically synthesized
  source 1..20: mol_type = other DNA
ggtgctgctgtccctgccct

SEQ ID NO: 55968 - DNA, 20 bp, synthetic construct
  misc_feature 1..20: note = chemically synthesized
  source 1..20: mol_type = other DNA
gctgtccctgccctgggcac

SEQ ID NO: 55969 - DNA, 20 bp, synthetic construct
  misc_feature 1..20: note = chemically synthesized
  source 1..20: mol_type = other DNA
ctgccctgggcactggatat

SEQ ID NO: 55970 - DNA, 20 bp, synthetic construct
  misc_feature 1..20: note = chemically synthesized
  source 1..20: mol_type = other DNA
tgccctgggcactggatatt

SEQ ID NO: 55971 - DNA, 20 bp, synthetic construct
  misc_feature 1..20: note = chemically synthesized
  source 1..20: mol_type = other DNA
cctgggcactggatattggg

SEQ ID NO: 55972 - DNA, 20 bp, synthetic construct
  misc_feature 1..20: note = chemically synthesized
  source 1..20: mol_type = other DNA
ctgggcactggatattggga

SEQ ID NO: 55973 - DNA, 20 bp, synthetic construct
  misc_feature 1..20: note = chemically synthesized
  source 1..20: mol_type = other DNA
tgggcactggatattgggaa

SEQ ID NO: 55974 - DNA, 20 bp, synthetic construct
  misc_feature 1..20: note = chemically synthesized
  source 1..20: mol_type = other DNA
cactggatattgggaaggga

SEQ ID NO: 55975 - DNA, 20 bp, synthetic construct
  misc_feature 1..20: note = chemically synthesized
  source 1..20: mol_type = other DNA
ggaagggacagtgtccacac

SEQ ID NO: 55976 - DNA, 20 bp, synthetic construct
  misc_feature 1..20: note = chemically synthesized
  source 1..20: mol_type = other DNA
aagggacagtgtccacactg

SEQ ID NO: 55977 - DNA, 20 bp, synthetic construct
  misc_feature 1..20: note = chemically synthesized
  source 1..20: mol_type = other DNA
ggacagtgtccacactggag

SEQ ID NO: 55978 - DNA, 20 bp, synthetic construct
  misc_feature 1..20: note = chemically synthesized
  source 1..20: mol_type = other DNA
gacagtgtccacactggagt

SEQ ID NO: 55979 - DNA, 20 bp, synthetic construct
  misc_feature 1..20: note = chemically synthesized
  source 1..20: mol_type = other DNA
agtgtccacactggagtggg

SEQ ID NO: 55980 - DNA, 20 bp, synthetic construct
  misc_feature 1..20: note = chemically synthesized
  source 1..20: mol_type = other DNA
acactggagtgggaagtccc

SEQ ID NO: 55981 - DNA, 20 bp, synthetic construct
  misc_feature 1..20: note = chemically synthesized
  source 1..20: mol_type = other DNA
cactggagtgggaagtcccc

SEQ ID NO: 55982 - DNA, 20 bp, synthetic construct
  misc_feature 1..20: note = chemically synthesized
  source 1..20: mol_type = other DNA
actggagtgggaagtcccca

SEQ ID NO: 55983 - DNA, 20 bp, synthetic construct
  misc_feature 1..20: note = chemically synthesized
  source 1..20: mol_type = other DNA
agtgggaagtccccagggac

SEQ ID NO: 55984 - DNA, 20 bp, synthetic construct
  misc_feature 1..20: note = chemically synthesized
  source 1..20: mol_type = other DNA
gacctttacctcctcacccc

SEQ ID NO: 55985 - DNA, 20 bp, synthetic construct
  misc_feature 1..20: note = chemically synthesized
  source 1..20: mol_type = other DNA
acctttacctcctcacccct

SEQ ID NO: 55986 - DNA, 20 bp, synthetic construct
  misc_feature 1..20: note = chemically synthesized
  source 1..20: mol_type = other DNA
cctgggtactgtcctcctca

SEQ ID NO: 55987 - DNA, 20 bp, synthetic construct
  misc_feature 1..20: note = chemically synthesized
  source 1..20: mol_type = other DNA
tgggtactgtcctcctcatg

SEQ ID NO: 55988 - DNA, 20 bp, synthetic construct
  misc_feature 1..20: note = chemically synthesized
  source 1..20: mol_type = other DNA
actgtcctcctcatggagca

SEQ ID NO: 55989 - DNA, 20 bp, synthetic construct
  misc_feature 1..20: note = chemically synthesized
  source 1..20: mol_type = other DNA
tcctcctcatggagcatgga

SEQ ID NO: 55990 - DNA, 20 bp, synthetic construct
  misc_feature 1..20: note = chemically synthesized
  source 1..20: mol_type = other DNA
tggatggcgctgcctgaact

SEQ ID NO: 55991 - DNA, 20 bp, synthetic construct
  misc_feature 1..20: note = chemically synthesized
  source 1..20: mol_type = other DNA
atggcgctgcctgaactcag

SEQ ID NO: 55992 - DNA, 20 bp, synthetic construct
  misc_feature 1..20: note = chemically synthesized
  source 1..20: mol_type = other DNA
gcgctgcctgaactcagtgg

SEQ ID NO: 55993 - DNA, 20 bp, synthetic construct
  misc_feature 1..20: note = chemically synthesized
  source 1..20: mol_type = other DNA
actcagtggtggcctcattc

SEQ ID NO: 55994 - DNA, 20 bp, synthetic construct
  misc_feature 1..20: note = chemically synthesized
  source 1..20: mol_type = other DNA
cagtggtggcctcattctgg

SEQ ID NO: 55995 - DNA, 20 bp, synthetic construct
  misc_feature 1..20: note = chemically synthesized
  source 1..20: mol_type = other DNA
gtggcctcattctggaagcc

SEQ ID NO: 55996 - DNA, 20 bp, synthetic construct
  misc_feature 1..20: note = chemically synthesized
  source 1..20: mol_type = other DNA
ttctggaagccaagtttata

SEQ ID NO: 55997 - DNA, 20 bp, synthetic construct
  misc_feature 1..20: note = chemically synthesized
  source 1..20: mol_type = other DNA
ctggaagccaagtttataca

SEQ ID NO: 55998 - DNA, 20 bp, synthetic construct
  misc_feature 1..20: note = chemically synthesized
  source 1..20: mol_type = other DNA
gaagccaagtttatacagag

SEQ ID NO: 55999 - DNA, 20 bp, synthetic construct
  misc_feature 1..20: note = chemically synthesized
  source 1..20: mol_type = other DNA
gccaagtttatacagagtag

SEQ ID NO: 56000 - DNA, 20 bp, synthetic construct
  misc_feature 1..20: note = chemically synthesized
  source 1..20: mol_type = other DNA
tatacagagtagcagtgacc

SEQ ID NO: 56001 - DNA, 20 bp, synthetic construct
  misc_feature 1..20: note = chemically synthesized
  source 1..20: mol_type = other DNA
atacagagtagcagtgaccc

SEQ ID NO: 56002 - DNA, 20 bp, synthetic construct
  misc_feature 1..20: note = chemically synthesized
  source 1..20: mol_type = other DNA
tacagagtagcagtgaccca

SEQ ID NO: 56003 - DNA, 20 bp, synthetic construct
  misc_feature 1..20: note = chemically synthesized
  source 1..20: mol_type = other DNA
gtagcagtgacccagggatg

SEQ ID NO: 56004 - DNA, 20 bp, synthetic construct
  misc_feature 1..20: note = chemically synthesized
  source 1..20: mol_type = other DNA
tagcagtgacccagggatgt

SEQ ID NO: 56005 - DNA, 20 bp, synthetic construct
  misc_feature 1..20: note = chemically synthesized
  source 1..20: mol_type = other DNA
agcagtgacccagggatgtg

SEQ ID NO: 56006 - DNA, 20 bp, synthetic construct
  misc_feature 1..20: note = chemically synthesized
  source 1..20: mol_type = other DNA
gatgtggggttcaccctcct

SEQ ID NO: 56007 - DNA, 20 bp, synthetic construct
  misc_feature 1..20: note = chemically synthesized
  source 1..20: mol_type = other DNA
gttcaccctcctcagccctc

SEQ ID NO: 56008 - DNA, 20 bp, synthetic construct
  misc_feature 1..20: note = chemically synthesized
  source 1..20: mol_type = other DNA
accctcctcagccctctggc

SEQ ID NO: 56009 - DNA, 20 bp, synthetic construct
  misc_feature 1..20: note = chemically synthesized
  source 1..20: mol_type = other DNA
agccctctggccagtcctga

SEQ ID NO: 56010 - DNA, 20 bp, synthetic construct
  misc_feature 1..20: note = chemically synthesized
  source 1..20: mol_type = other DNA
gccctctggccagtcctgat

SEQ ID NO: 56011 - DNA, 20 bp, synthetic construct
  misc_feature 1..20: note = chemically synthesized
  source 1..20: mol_type = other DNA
tggccagtcctgatgggcct

SEQ ID NO: 56012 - DNA, 20 bp, synthetic construct
  misc_feature 1..20: note = chemically synthesized
  source 1..20: mol_type = other DNA
gatgggcctcagtcccaaca

SEQ ID NO: 56013 - DNA, 20 bp, synthetic construct
  misc_feature 1..20: note = chemically synthesized
  source 1..20: mol_type = other DNA
gcctcagtcccaacatggct

SEQ ID NO: 56014 - DNA, 20 bp, synthetic construct
  misc_feature 1..20: note = chemically synthesized
  source 1..20: mol_type = other DNA
ctcagtcccaacatggctaa

SEQ ID NO: 56015 - DNA, 20 bp, synthetic construct
  misc_feature 1..20: note = chemically synthesized
  source 1..20: mol_type = other DNA
tcagtcccaacatggctaag

SEQ ID NO: 56016 - DNA, 20 bp, synthetic construct
  misc_feature 1..20: note = chemically synthesized
  source 1..20: mol_type = other DNA
cccaacatggctaagaggtg

SEQ ID NO: 56017 - DNA, 20 bp, synthetic construct
  misc_feature 1..20: note = chemically synthesized
  source 1..20: mol_type = other DNA
ccaacatggctaagaggtgt

SEQ ID NO: 56018 - DNA, 20 bp, synthetic construct
  misc_feature 1..20: note = chemically synthesized
  source 1..20: mol_type = other DNA
acatggctaagaggtgtggg

SEQ ID NO: 56019 - DNA, 20 bp, synthetic construct
  misc_feature 1..20: note = chemically synthesized
  source 1..20: mol_type = other DNA
aagaggtgtgggcagcttct

SEQ ID NO: 56020 - DNA, 20 bp, synthetic construct
  misc_feature 1..20: note = chemically synthesized
  source 1..20: mol_type = other DNA
ggcagcttcttggtcaccct

SEQ ID NO: 56021 - DNA, 20 bp, synthetic construct
  misc_feature 1..20: note = chemically synthesized
  source 1..20: mol_type = other DNA
gcagcttcttggtcaccctc

SEQ ID NO: 56022 - DNA, 20 bp, synthetic construct
  misc_feature 1..20: note = chemically synthesized
  source 1..20: mol_type = other DNA
cttcttggtcaccctcaggt

SEQ ID NO: 56023 - DNA, 20 bp, synthetic construct
  misc_feature 1..20: note = chemically synthesized
  source 1..20: mol_type = other DNA
ttcttggtcaccctcaggtt

SEQ ID NO: 56024 - DNA, 20 bp, synthetic construct
  misc_feature 1..20: note = chemically synthesized
  source 1..20: mol_type = other DNA
tcttggtcaccctcaggttg

SEQ ID NO: 56025 - DNA, 20 bp, synthetic construct
  misc_feature 1..20: note = chemically synthesized
  source 1..20: mol_type = other DNA
caccttctgtcttcattttc

SEQ ID NO: 56026 - DNA, 20 bp, synthetic construct
  misc_feature 1..20: note = chemically synthesized
  source 1..20: mol_type = other DNA
accttctgtcttcattttcc

SEQ ID NO: 56027 - DNA, 20 bp, synthetic construct
  misc_feature 1..20: note = chemically synthesized
  source 1..20: mol_type = other DNA
gtcttcattttccaggaact

SEQ ID NO: 56028 - DNA, 20 bp, synthetic construct
  misc_feature 1..20: note = chemically synthesized
  source 1..20: mol_type = other DNA
ggaacttggtgatgatatcg

SEQ ID NO: 56029 - DNA, 20 bp, synthetic construct
  misc_feature 1..20: note = chemically synthesized
  source 1..20: mol_type = other DNA
gaacttggtgatgatatcgt

SEQ ID NO: 56030 - DNA, 20 bp, synthetic construct
  misc_feature 1..20: note = chemically synthesized
  source 1..20: mol_type = other DNA
ttggtgatgatatcgtgggt

SEQ ID NO: 56031 - DNA, 20 bp, synthetic construct
  misc_feature 1..20: note = chemically synthesized
  source 1..20: mol_type = other DNA
tcgtgggtgagttcattttc

SEQ ID NO: 56032 - DNA, 20 bp, synthetic construct
  misc_feature 1..20: note = chemically synthesized
  source 1..20: mol_type = other DNA
cgtgggtgagttcattttcc

SEQ ID NO: 56033 - DNA, 20 bp, synthetic construct
  misc_feature 1..20: note = chemically synthesized
  source 1..20: mol_type = other DNA
agttcattttccaggtgctg

SEQ ID NO: 56034 - DNA, 20 bp, synthetic construct
  misc_feature 1..20: note = chemically synthesized
  source 1..20: mol_type = other DNA
gtgctgtagtttcccctcat

SEQ ID NO: 56035 - DNA, 20 bp, synthetic construct
  misc_feature 1..20: note = chemically synthesized
  source 1..20: mol_type = other DNA
tgctgtagtttcccctcatc

SEQ ID NO: 56036 - DNA, 20 bp, synthetic construct
  misc_feature 1..20: note = chemically synthesized
  source 1..20: mol_type = other DNA
tgtagtttcccctcatcagg

SEQ ID NO: 56037 - DNA, 20 bp, synthetic construct
  misc_feature 1..20: note = chemically synthesized
  source 1..20: mol_type = other DNA
gtagtttcccctcatcaggc

SEQ ID NO: 56038 - DNA, 20 bp, synthetic construct
  misc_feature 1..20: note = chemically synthesized
  source 1..20: mol_type = other DNA
gtttcccctcatcaggcagg

SEQ ID NO: 56039 - DNA, 20 bp, synthetic construct
  misc_feature 1..20: note = chemically synthesized
  source 1..20: mol_type = other DNA
tcccctcatcaggcaggaag

SEQ ID NO: 56040 - DNA, 20 bp, synthetic construct
  misc_feature 1..20: note = chemically synthesized
  source 1..20: mol_type = other DNA
ctcatcaggcaggaagaaga

SEQ ID NO: 56041 - DNA, 20 bp, synthetic construct
  misc_feature 1..20: note = chemically synthesized
  source 1..20: mol_type = other DNA
atcaggcaggaagaagatgg

SEQ ID NO: 56042 - DNA, 20 bp, synthetic construct
  misc_feature 1..20: note = chemically synthesized
  source 1..20: mol_type = other DNA
aggcaggaagaagatggcgg

SEQ ID NO: 56043 - DNA, 20 bp, synthetic construct
  misc_feature 1..20: note = chemically synthesized
  source 1..20: mol_type = other DNA
aagatggcggtggcattgcc

SEQ ID NO: 56044 - DNA, 20 bp, synthetic construct
  misc_feature 1..20: note = chemically synthesized
  source 1..20: mol_type = other DNA
agatggcggtggcattgccc

SEQ ID NO: 56045 - DNA, 20 bp, synthetic construct
  misc_feature 1..20: note = chemically synthesized
  source 1..20: mol_type = other DNA
gcattgcccaggtatttcat

SEQ ID NO: 56046 - DNA, 20 bp, synthetic construct
  misc_feature 1..20: note = chemically synthesized
  source 1..20: mol_type = other DNA
ttgcccaggtatttcatcag

SEQ ID NO: 56047 - DNA, 20 bp, synthetic construct
  misc_feature 1..20: note = chemically synthesized
  source 1..20: mol_type = other DNA
ggtatttcatcagcagcacc

SEQ ID NO: 56048 - DNA, 20 bp, synthetic construct
  misc_feature 1..20: note = chemically synthesized
  source 1..20: mol_type = other DNA
tttcatcagcagcacccagc

SEQ ID NO: 56049 - DNA, 20 bp, synthetic construct
  misc_feature 1..20: note = chemically synthesized
  source 1..20: mol_type = other DNA
atcagcagcacccagctgga

SEQ ID NO: 56050 - DNA, 20 bp, synthetic construct
  misc_feature 1..20: note = chemically synthesized
  source 1..20: mol_type = other DNA
cccagctggacagcttctta

SEQ ID NO: 56051 - DNA, 20 bp, synthetic construct
  misc_feature 1..20: note = chemically synthesized
  source 1..20: mol_type = other DNA
tggacagcttcttacagtgc

SEQ ID NO: 56052 - DNA, 20 bp, synthetic construct
  misc_feature 1..20: note = chemically synthesized
  source 1..20: mol_type = other DNA
catgcctaaacgcttcatca

SEQ ID NO: 56053 - DNA, 20 bp, synthetic construct
  misc_feature 1..20: note = chemically synthesized
  source 1..20: mol_type = other DNA
atgcctaaacgcttcatcat

SEQ ID NO: 56054 - DNA, 20 bp, synthetic construct
  misc_feature 1..20: note = chemically synthesized
  source 1..20: mol_type = other DNA
cttcatcataggcaccttca

SEQ ID NO: 56055 - DNA, 20 bp, synthetic construct
  misc_feature 1..20: note = chemically synthesized
  source 1..20: mol_type = other DNA
catcataggcaccttcacgg

SEQ ID NO: 56056 - DNA, 20 bp, synthetic construct
  misc_feature 1..20: note = chemically synthesized
  source 1..20: mol_type = other DNA
gcaccttcacggtggtcacc

SEQ ID NO: 56057 - DNA, 20 bp, synthetic construct
  misc_feature 1..20: note = chemically synthesized
  source 1..20: mol_type = other DNA
cggtggtcacctggtccacg

SEQ ID NO: 56058 - DNA, 20 bp, synthetic construct
  misc_feature 1..20: note = chemically synthesized
  source 1..20: mol_type = other DNA
tggtcacctggtccacgtgg

SEQ ID NO: 56059 - DNA, 20 bp, synthetic construct
  misc_feature 1..20: note = chemically synthesized
  source 1..20: mol_type = other DNA
cacgtggaagtcctcttcct

SEQ ID NO: 56060 - DNA, 20 bp, synthetic construct
  misc_feature 1..20: note = chemically synthesized
  source 1..20: mol_type = other DNA
cctcggtgtccttgacttca

SEQ ID NO: 56061 - DNA, 20 bp, synthetic construct
  misc_feature 1..20: note = chemically synthesized
  source 1..20: mol_type = other DNA
ctcggtgtccttgacttcaa

SEQ ID NO: 56062 - DNA, 20 bp, synthetic construct
  misc_feature 1..20: note = chemically synthesized
  source 1..20: mol_type = other DNA
tcggtgtccttgacttcaaa

SEQ ID NO: 56063 - DNA, 20 bp, synthetic construct
  misc_feature 1..20: note = chemically synthesized
  source 1..20: mol_type = other DNA
aagggtctctcccatttgcc

SEQ ID NO: 56064 - DNA, 20 bp, synthetic construct
  misc_feature 1..20: note = chemically synthesized
  source 1..20: mol_type = other DNA
gggtctctcccatttgcctg

SEQ ID NO: 56065 - DNA, 20 bp, synthetic construct
  misc_feature 1..20: note = chemically synthesized
  source 1..20: mol_type = other DNA
gtctctcccatttgcctgga

SEQ ID NO: 56066 - DNA, 20 bp, synthetic construct
  misc_feature 1..20: note = chemically synthesized
  source 1..20: mol_type = other DNA
ctctcccatttgcctggaga

SEQ ID NO: 56067 - DNA, 20 bp, synthetic construct
  misc_feature 1..20: note = chemically synthesized
  source 1..20: mol_type = other DNA
tctcccatttgcctggagag

SEQ ID NO: 56068 - DNA, 20 bp, synthetic construct
  misc_feature 1..20: note = chemically synthesized
  source 1..20: mol_type = other DNA
ctcccatttgcctggagaga

SEQ ID NO: 56069 - DNA, 20 bp, synthetic construct
  misc_feature 1..20: note = chemically synthesized
  source 1..20: mol_type = other DNA
tcccatttgcctggagagag

SEQ ID NO: 56070 - DNA, 20 bp, synthetic construct
  misc_feature 1..20: note = chemically synthesized
  source 1..20: mol_type = other DNA
catttgcctggagagagggg

SEQ ID NO: 56071 - DNA, 20 bp, synthetic construct
  misc_feature 1..20: note = chemically synthesized
  source 1..20: mol_type = other DNA
atttgcctggagagagggga

SEQ ID NO: 56072 - DNA, 20 bp, synthetic construct
  misc_feature 1..20: note = chemically synthesized
  source 1..20: mol_type = other DNA
tgcctggagagaggggaagg

SEQ ID NO: 56073 - DNA, 20 bp, synthetic construct
  misc_feature 1..20: note = chemically synthesized
  source 1..20: mol_type = other DNA
gcctggagagaggggaaggt

SEQ ID NO: 56074 - DNA, 20 bp, synthetic construct
  misc_feature 1..20: note = chemically synthesized
  source 1..20: mol_type = other DNA
gaggggaaggtgggcatcac

SEQ ID NO: 56075 - DNA, 20 bp, synthetic construct
  misc_feature 1..20: note = chemically synthesized
  source 1..20: mol_type = other DNA
aggggaaggtgggcatcacc

SEQ ID NO: 56076 - DNA, 20 bp, synthetic construct
  misc_feature 1..20: note = chemically synthesized
  source 1..20: mol_type = other DNA
ggggaaggtgggcatcacca

SEQ ID NO: 56077 - DNA, 20 bp, synthetic construct
  misc_feature 1..20: note = chemically synthesized
  source 1..20: mol_type = other DNA
gggaaggtgggcatcaccag

SEQ ID NO: 56078 - DNA, 20 bp, synthetic construct
  misc_feature 1..20: note = chemically synthesized
  source 1..20: mol_type = other DNA
aggtgggcatcaccaggggt

SEQ ID NO: 56079 - DNA, 20 bp, synthetic construct
  misc_feature 1..20: note = chemically synthesized
  source 1..20: mol_type = other DNA
ggcatcaccaggggtgagtg

SEQ ID NO: 56080 - DNA, 20 bp, synthetic construct
  misc_feature 1..20: note = chemically synthesized
  source 1..20: mol_type = other DNA
gcatcaccaggggtgagtga

SEQ ID NO: 56081 - DNA, 20 bp, synthetic construct
  misc_feature 1..20: note = chemically synthesized
  source 1..20: mol_type = other DNA
accaggggtgagtgaaggtt

SEQ ID NO: 56082 - DNA, 20 bp, synthetic construct
  misc_feature 1..20: note = chemically synthesized
  source 1..20: mol_type = other DNA
aggggtgagtgaaggtttgg

SEQ ID NO: 56083 - DNA, 20 bp, synthetic construct
  misc_feature 1..20: note = chemically synthesized
  source 1..20: mol_type = other DNA
gggtgagtgaaggtttggaa

SEQ ID NO: 56084 - DNA, 20 bp, synthetic construct
  misc_feature 1..20: note = chemically synthesized
  source 1..20: mol_type = other DNA
agtgaaggtttggaagagtg

SEQ ID NO: 56085 - DNA, 20 bp, synthetic construct
  misc_feature 1..20: note = chemically synthesized
  source 1..20: mol_type = other DNA
gaaggtttggaagagtgtag

SEQ ID NO: 56086 - DNA, 20 bp, synthetic construct
  misc_feature 1..20: note = chemically synthesized
  source 1..20: mol_type = other DNA
tggaagagtgtagcagaata

SEQ ID NO: 56087 - DNA, 20 bp, synthetic construct
  misc_feature 1..20: note = chemically synthesized
  source 1..20: mol_type = other DNA
tagcagaataaagaaaccat

SEQ ID NO: 56088 - DNA, 20 bp, synthetic construct
  misc_feature 1..20: note = chemically synthesized
  source 1..20: mol_type = other DNA
aaaccatgagtcccctccct

SEQ ID NO: 56089 - DNA, 20 bp, synthetic construct
  misc_feature 1..20: note = chemically synthesized
  source 1..20: mol_type = other DNA
ccatgagtcccctccctgag

SEQ ID NO: 56090 - DNA, 20 bp, synthetic construct
  misc_feature 1..20: note = chemically synthesized
  source 1..20: mol_type = other DNA
tcccctccctgagaagccct

SEQ ID NO: 56091 - DNA, 20 bp, synthetic construct
  misc_feature 1..20: note = chemically synthesized
  source 1..20: mol_type = other DNA
cttgacgacacacatccctc

SEQ ID NO: 56092 - DNA, 20 bp, synthetic construct
  misc_feature 1..20: note = chemically synthesized
  source 1..20: mol_type = other DNA
ttgacgacacacatccctcg

SEQ ID NO: 56093 - DNA, 20 bp, synthetic construct
  misc_feature 1..20: note = chemically synthesized
  source 1..20: mol_type = other DNA
gacacacatccctcgaggct

SEQ ID NO: 56094 - DNA, 20 bp, synthetic construct
  misc_feature 1..20: note = chemically synthesized
  source 1..20: mol_type = other DNA
ctcagcttcatcatctgtaa

SEQ ID NO: 56095 - DNA, 20 bp, synthetic construct
  misc_feature 1..20: note = chemically synthesized
  source 1..20: mol_type = other DNA
tcagcttcatcatctgtaaa

SEQ ID NO: 56096 - DNA, 20 bp, synthetic construct
  misc_feature 1..20: note = chemically synthesized
  source 1..20: mol_type = other DNA
ggtgctgaaactgaccatcc

SEQ ID NO: 56097 - DNA, 20 bp, synthetic construct
  misc_feature 1..20: note = chemically synthesized
  source 1..20: mol_type = other DNA
gaccatccaagctgccgaaa

SEQ ID NO: 56098 - DNA, 20 bp, synthetic construct
  misc_feature 1..20: note = chemically synthesized
  source 1..20: mol_type = other DNA
agctgccgaaaaagattgtg

SEQ ID NO: 56099 - DNA, 20 bp, synthetic construct
  misc_feature 1..20: note = chemically synthesized
  source 1..20: mol_type = other DNA
gctgccgaaaaagattgtgt

SEQ ID NO: 56100 - DNA, 20 bp, synthetic construct
  misc_feature 1..20: note = chemically synthesized
  source 1..20: mol_type = other DNA
ctgccgaaaaagattgtgtg

SEQ ID NO: 56101 - DNA, 20 bp, synthetic construct
  misc_feature 1..20: note = chemically synthesized
  source 1..20: mol_type = other DNA
gtgtggggataattcaaaac

SEQ ID NO: 56102 - DNA, 20 bp, synthetic construct
  misc_feature 1..20: note = chemically synthesized
  source 1..20: mol_type = other DNA
gtggggataattcaaaacta

SEQ ID NO: 56103 - DNA, 20 bp, synthetic construct
  misc_feature 1..20: note = chemically synthesized
  source 1..20: mol_type = other DNA
tggggataattcaaaactag

SEQ ID NO: 56104 - DNA, 20 bp, synthetic construct
  misc_feature 1..20: note = chemically synthesized
  source 1..20: mol_type = other DNA
ggataattcaaaactagagg

SEQ ID NO: 56105 - DNA, 20 bp, synthetic construct
  misc_feature 1..20: note = chemically synthesized
  source 1..20: mol_type = other DNA
ttcaaaactagaggaagatg

SEQ ID NO: 56106 - DNA, 20 bp, synthetic construct
  misc_feature 1..20: note = chemically synthesized
  source 1..20: mol_type = other DNA
gatgcagaatttctacatcg

SEQ ID NO: 56107 - DNA, 20 bp, synthetic construct
  misc_feature 1..20: note = chemically synthesized
  source 1..20: mol_type = other DNA
tttctacatcgtggcgatgt

SEQ ID NO: 56108 - DNA, 20 bp, synthetic construct
  misc_feature 1..20: note = chemically synthesized
  source 1..20: mol_type = other DNA
ttctacatcgtggcgatgtc

SEQ ID NO: 56109 - DNA, 20 bp, synthetic construct
  misc_feature 1..20: note = chemically synthesized
  source 1..20: mol_type = other DNA
catcgtggcgatgtcaggct

SEQ ID NO: 56110 - DNA, 20 bp, synthetic construct
  misc_feature 1..20: note = chemically synthesized
  source 1..20: mol_type = other DNA
tcgtggcgatgtcaggctaa

SEQ ID NO: 56111 - DNA, 20 bp, synthetic construct
  misc_feature 1..20: note = chemically synthesized
  source 1..20: mol_type = other DNA
caggctaagagatgccatcg

SEQ ID NO: 56112 - DNA, 20 bp, synthetic construct
  misc_feature 1..20: note = chemically synthesized
  source 1..20: mol_type = other DNA
tcgtggctgtgcatttttat

SEQ ID NO: 56113 - DNA, 20 bp, synthetic construct
  misc_feature 1..20: note = chemically synthesized
  source 1..20: mol_type = other DNA
ttggaatcatatgtttattt

SEQ ID NO: 56114 - DNA, 20 bp, synthetic construct
  misc_feature 1..20: note = chemically synthesized
  source 1..20: mol_type = other DNA
tggaatcatatgtttatttg

SEQ ID NO: 56115 - DNA, 20 bp, synthetic construct
  misc_feature 1..20: note = chemically synthesized
  source 1..20: mol_type = other DNA
ggaatcatatgtttatttga

SEQ ID NO: 56116 - DNA, 20 bp, synthetic construct
  misc_feature 1..20: note = chemically synthesized
  source 1..20: mol_type = other DNA
atgtttatttgagggtgtct

SEQ ID NO: 56117 - DNA, 20 bp, synthetic construct
  misc_feature 1..20: note = chemically synthesized
  source 1..20: mol_type = other DNA
ggatattacaaataaaatgt

SEQ ID NO: 56118 - DNA, 20 bp, synthetic construct
  misc_feature 1..20: note = chemically synthesized
  source 1..20: mol_type = other DNA
atattacaaataaaatgttg

SEQ ID NO: 56119 - DNA, 20 bp, synthetic construct
  misc_feature 1..20: note = chemically synthesized
  source 1..20: mol_type = other DNA
caaataaaatgttggagcat

SEQ ID NO: 56120 - DNA, 20 bp, synthetic construct
  misc_feature 1..20: note = chemically synthesized
  source 1..20: mol_type = other DNA
aaataaaatgttggagcatc

SEQ ID NO: 56121 - DNA, 20 bp, synthetic construct
  misc_feature 1..20: note = chemically synthesized
  source 1..20: mol_type = other DNA
gttggagcatcaggcatatt

SEQ ID NO: 56122 - DNA, 20 bp, synthetic construct
  misc_feature 1..20: note = chemically synthesized
  source 1..20: mol_type = other DNA
atatttggtaccttctgtct

SEQ ID NO: 56123 - DNA, 20 bp, synthetic construct
  misc_feature 1..20: note = chemically synthesized
  source 1..20: mol_type = other DNA
tatttggtaccttctgtcta

SEQ ID NO: 56124 - DNA, 20 bp, synthetic construct
  misc_feature 1..20: note = chemically synthesized
  source 1..20: mol_type = other DNA
gctccctgccccttgttaat

SEQ ID NO: 56125 - DNA, 20 bp, synthetic construct
  misc_feature 1..20: note = chemically synthesized
  source 1..20: mol_type = other DNA
ccctgccccttgttaattgg

SEQ ID NO: 56126 - DNA, 20 bp, synthetic construct
  misc_feature 1..20: note = chemically synthesized
  source 1..20: mol_type = other DNA
ccccttgttaattggcagct

SEQ ID NO: 56127 - DNA, 20 bp, synthetic construct
  misc_feature 1..20: note = chemically synthesized
  source 1..20: mol_type = other DNA
tggcagctcagttattcatc

SEQ ID NO: 56128 - DNA, 20 bp, synthetic construct
  misc_feature 1..20: note = chemically synthesized
  source 1..20: mol_type = other DNA
ggcagctcagttattcatcc

SEQ ID NO: 56129 - DNA, 20 bp, synthetic construct
  misc_feature 1..20: note = chemically synthesized
  source 1..20: mol_type = other DNA
gcagctcagttattcatcca

SEQ ID NO: 56130 - DNA, 20 bp, synthetic construct
  misc_feature 1..20: note = chemically synthesized
  source 1..20: mol_type = other DNA
acattctgcttactattcct

SEQ ID NO: 56131 - DNA, 20 bp, synthetic construct
  misc_feature 1..20: note = chemically synthesized
  source 1..20: mol_type = other DNA
attctgcttactattcctga

SEQ ID NO: 56132 - DNA, 20 bp, synthetic construct
  misc_feature 1..20: note = chemically synthesized
  source 1..20: mol_type = other DNA
tgagagctttcctcatcctc

SEQ ID NO: 56133 - DNA, 20 bp, synthetic construct
  misc_feature 1..20: note = chemically synthesized
  source 1..20: mol_type = other DNA
gctttcctcatcctctagat

SEQ ID NO: 56134 - DNA, 20 bp, synthetic construct
  misc_feature 1..20: note = chemically synthesized
  source 1..20: mol_type = other DNA
ttcctcatcctctagattgg

SEQ ID NO: 56135 - DNA, 20 bp, synthetic construct
  misc_feature 1..20: note = chemically synthesized
  source 1..20: mol_type = other DNA
tcctcatcctctagattggc

SEQ ID NO: 56136 - DNA, 20 bp, synthetic construct
  misc_feature 1..20: note = chemically synthesized
  source 1..20: mol_type = other DNA
cctcatcctctagattggca

SEQ ID NO: 56137 - DNA, 20 bp, synthetic construct
  misc_feature 1..20: note = chemically synthesized
  source 1..20: mol_type = other DNA
ctcatcctctagattggcag

SEQ ID NO: 56138 - DNA, 20 bp, synthetic construct
  misc_feature 1..20: note = chemically synthesized
  source 1..20: mol_type = other DNA
ctagattggcaggggaaatg

SEQ ID NO: 56139 - DNA, 20 bp, synthetic construct
  misc_feature 1..20: note = chemically synthesized
  source 1..20: mol_type = other DNA
caggggaaatgcagatgcct

SEQ ID NO: 56140 - DNA, 20 bp, synthetic construct
  misc_feature 1..20: note = chemically synthesized
  source 1..20: mol_type = other DNA
gggaaatgcagatgcctgag

SEQ ID NO: 56141 - DNA, 20 bp, synthetic construct
  misc_feature 1..20: note = chemically synthesized
  source 1..20: mol_type = other DNA
cctcccctctgccataccaa

SEQ ID NO: 56142 - DNA, 20 bp, synthetic construct
  misc_feature 1..20: note = chemically synthesized
  source 1..20: mol_type = other DNA
tcccctctgccataccaaca

SEQ ID NO: 56143 - DNA, 20 bp, synthetic construct
  misc_feature 1..20: note = chemically synthesized
  source 1..20: mol_type = other DNA
accaacagagcttcaccatc

SEQ ID NO: 56144 - DNA, 20 bp, synthetic construct
  misc_feature 1..20: note = chemically synthesized
  source 1..20: mol_type = other DNA
ccaacagagcttcaccatcg

SEQ ID NO: 56145 - DNA, 20 bp, synthetic construct
  misc_feature 1..20: note = chemically synthesized
  source 1..20: mol_type = other DNA
agcttcaccatcgaggcatg

SEQ ID NO: 56146 - DNA, 20 bp, synthetic construct
  misc_feature 1..20: note = chemically synthesized
  source 1..20: mol_type = other DNA
cttcaccatcgaggcatgca

SEQ ID NO: 56147 - DNA, 20 bp, synthetic construct
  misc_feature 1..20: note = chemically synthesized
  source 1..20: mol_type = other DNA
caccatcgaggcatgcagag

SEQ ID NO: 56148 - DNA, 20 bp, synthetic construct
  misc_feature 1..20: note = chemically synthesized
  source 1..20: mol_type = other DNA
atcgaggcatgcagagtgga

SEQ ID NO: 56149 - DNA, 20 bp, synthetic construct
  misc_feature 1..20: note = chemically synthesized
  source 1..20: mol_type = other DNA
tcgaggcatgcagagtggac

SEQ ID NO: 56150 - DNA, 20 bp, synthetic construct
  misc_feature 1..20: note = chemically synthesized
  source 1..20: mol_type = other DNA
cgaggcatgcagagtggaca

SEQ ID NO: 56151 - DNA, 20 bp, synthetic construct
  misc_feature 1..20: note = chemically synthesized
  source 1..20: mol_type = other DNA
gaggcatgcagagtggacag

SEQ ID NO: 56152 - DNA, 20 bp, synthetic construct
  misc_feature 1..20: note = chemically synthesized
  source 1..20: mol_type = other DNA
tgcagagtggacaggggcct

SEQ ID NO: 56153 - DNA, 20 bp, synthetic construct
  misc_feature 1..20: note = chemically synthesized
  source 1..20: mol_type = other DNA
gcagagtggacaggggcctc

SEQ ID NO: 56154 - DNA, 20 bp, synthetic construct
  misc_feature 1..20: note = chemically synthesized
  source 1..20: mol_type = other DNA
cagagtggacaggggcctca

SEQ ID NO: 56155 - DNA, 20 bp, synthetic construct
  misc_feature 1..20: note = chemically synthesized
  source 1..20: mol_type = other DNA
gcctcagggacccctgatcc

SEQ ID NO: 56156 - DNA, 20 bp, synthetic construct
  misc_feature 1..20: note = chemically synthesized
  source 1..20: mol_type = other DNA
cctgatcccagctttctcat

SEQ ID NO: 56157 - DNA, 20 bp, synthetic construct
  misc_feature 1..20: note = chemically synthesized
  source 1..20: mol_type = other DNA
atcccagctttctcattgga

SEQ ID NO: 56158 - DNA, 20 bp, synthetic construct
  misc_feature 1..20: note = chemically synthesized
  source 1..20: mol_type = other DNA
ccagctttctcattggacag

SEQ ID NO: 56159 - DNA, 20 bp, synthetic construct
  misc_feature 1..20: note = chemically synthesized
  source 1..20: mol_type = other DNA
cagctttctcattggacaga

SEQ ID NO: 56160 - DNA, 20 bp, synthetic construct
  misc_feature 1..20: note = chemically synthesized
  source 1..20: mol_type = other DNA
gctttctcattggacagaag

SEQ ID NO: 56161 - DNA, 20 bp, synthetic construct
  misc_feature 1..20: note = chemically synthesized
  source 1..20: mol_type = other DNA
ctttctcattggacagaagg

SEQ ID NO: 56162 - DNA, 20 bp, synthetic construct
  misc_feature 1..20: note = chemically synthesized
  source 1..20: mol_type = other DNA
ttctcattggacagaaggag

SEQ ID NO: 56163 - DNA, 20 bp, synthetic construct
  misc_feature 1..20: note = chemically synthesized
  source 1..20: mol_type = other DNA
attggacagaaggaggagac

SEQ ID NO: 56164 - DNA, 20 bp, synthetic construct
  misc_feature 1..20: note = chemically synthesized
  source 1..20: mol_type = other DNA
ttggacagaaggaggagact

SEQ ID NO: 56165 - DNA, 20 bp, synthetic construct
  misc_feature 1..20: note = chemically synthesized
  source 1..20: mol_type = other DNA
tggacagaaggaggagactg

SEQ ID NO: 56166 - DNA, 20 bp, synthetic construct
  misc_feature 1..20: note = chemically synthesized
  source 1..20: mol_type = other DNA
cagaaggaggagactggggc

SEQ ID NO: 56167 - DNA, 20 bp, synthetic construct
  misc_feature 1..20: note = chemically synthesized
  source 1..20: mol_type = other DNA
gaaggaggagactggggctg

SEQ ID NO: 56168 - DNA, 20 bp, synthetic construct
  misc_feature 1..20: note = chemically synthesized
  source 1..20: mol_type = other DNA
aggaggagactggggctgga

SEQ ID NO: 56169 - DNA, 20 bp, synthetic construct
  misc_feature 1..20: note = chemically synthesized
  source 1..20: mol_type = other DNA
ggaggagactggggctggag

SEQ ID NO: 56170 - DNA, 20 bp, synthetic construct
  misc_feature 1..20: note = chemically synthesized
  source 1..20: mol_type = other DNA
gaggagactggggctggaga

SEQ ID NO: 56171 - DNA, 20 bp, synthetic construct
  misc_feature 1..20: note = chemically synthesized
  source 1..20: mol_type = other DNA
actggggctggagagggacc

SEQ ID NO: 56172 - DNA, 20 bp, synthetic construct
  misc_feature 1..20: note = chemically synthesized
  source 1..20: mol_type = other DNA
ctggggctggagagggacct

SEQ ID NO: 56173 - DNA, 20 bp, synthetic construct
  misc_feature 1..20: note = chemically synthesized
  source 1..20: mol_type = other DNA
gagggacctgggcccccact

SEQ ID NO: 56174 - DNA, 20 bp, synthetic construct
  misc_feature 1..20: note = chemically synthesized
  source 1..20: mol_type = other DNA
agggacctgggcccccacta

SEQ ID NO: 56175 - DNA, 20 bp, synthetic construct
  misc_feature 1..20: note = chemically synthesized
  source 1..20: mol_type = other DNA
ctgggcccccactaaggcca

SEQ ID NO: 56176 - DNA, 20 bp, synthetic construct
  misc_feature 1..20: note = chemically synthesized
  source 1..20: mol_type = other DNA
ggcccccactaaggccacag

SEQ ID NO: 56177 - DNA, 20 bp, synthetic construct
  misc_feature 1..20: note = chemically synthesized
  source 1..20: mol_type = other DNA
cccccactaaggccacagca

SEQ ID NO: 56178 - DNA, 20 bp, synthetic construct
  misc_feature 1..20: note = chemically synthesized
  source 1..20: mol_type = other DNA
cactaaggccacagcagagc

SEQ ID NO: 56179 - DNA, 20 bp, synthetic construct
  misc_feature 1..20: note = chemically synthesized
  source 1..20: mol_type = other DNA
actaaggccacagcagagcc

SEQ ID NO: 56180 - DNA, 20 bp, synthetic construct
  misc_feature 1..20: note = chemically synthesized
  source 1..20: mol_type = other DNA
ccacagcagagccaggactt

SEQ ID NO: 56181 - DNA, 20 bp, synthetic construct
  misc_feature 1..20: note = chemically synthesized
  source 1..20: mol_type = other DNA
gactttagctgtgctgactg

SEQ ID NO: 56182 - DNA, 20 bp, synthetic construct
  misc_feature 1..20: note = chemically synthesized
  source 1..20: mol_type = other DNA
tagctgtgctgactgcagcc

SEQ ID NO: 56183 - DNA, 20 bp, synthetic construct
  misc_feature 1..20: note = chemically synthesized
  source 1..20: mol_type = other DNA
ccactgccctcctttgcctc

SEQ ID NO: 56184 - DNA, 20 bp, synthetic construct
  misc_feature 1..20: note = chemically synthesized
  source 1..20: mol_type = other DNA
actgccctcctttgcctcaa

SEQ ID NO: 56185 - DNA, 20 bp, synthetic construct
  misc_feature 1..20: note = chemically synthesized
  source 1..20: mol_type = other DNA
ccctcctttgcctcaagagc

SEQ ID NO: 56186 - DNA, 20 bp, synthetic construct
  misc_feature 1..20: note = chemically synthesized
  source 1..20: mol_type = other DNA
cctcctttgcctcaagagca

SEQ ID NO: 56187 - DNA, 20 bp, synthetic construct
  misc_feature 1..20: note = chemically synthesized
  source 1..20: mol_type = other DNA
ctcctttgcctcaagagcaa

SEQ ID NO: 56188 - DNA, 20 bp, synthetic construct
  misc_feature 1..20: note = chemically synthesized
  source 1..20: mol_type = other DNA
cctttgcctcaagagcaagg

SEQ ID NO: 56189 - DNA, 20 bp, synthetic construct
  misc_feature 1..20: note = chemically synthesized
  source 1..20: mol_type = other DNA
cctcaagagcaagggagcct

SEQ ID NO: 56190 - DNA, 20 bp, synthetic construct
  misc_feature 1..20: note = chemically synthesized
  source 1..20: mol_type = other DNA
tcaagagcaagggagcctca

SEQ ID NO: 56191 - DNA, 20 bp, synthetic construct
  misc_feature 1..20: note = chemically synthesized
  source 1..20: mol_type = other DNA
agagcaagggagcctcagag

SEQ ID NO: 56192 - DNA, 20 bp, synthetic construct
  misc_feature 1..20: note = chemically synthesized
  source 1..20: mol_type = other DNA
agcaagggagcctcagagtg

SEQ ID NO: 56193 - DNA, 20 bp, synthetic construct
  misc_feature 1..20: note = chemically synthesized
  source 1..20: mol_type = other DNA
gcaagggagcctcagagtgg

SEQ ID NO: 56194 - DNA, 20 bp, synthetic construct
  misc_feature 1..20: note = chemically synthesized
  source 1..20: mol_type = other DNA
agggagcctcagagtggagg

SEQ ID NO: 56195 - DNA, 20 bp, synthetic construct
  misc_feature 1..20: note = chemically synthesized
  source 1..20: mol_type = other DNA
gagcctcagagtggaggaag

SEQ ID NO: 56196 - DNA, 20 bp, synthetic construct
  misc_feature 1..20: note = chemically synthesized
  source 1..20: mol_type = other DNA
agagtggaggaagcagcccc

SEQ ID NO: 56197 - DNA, 20 bp, synthetic construct
  misc_feature 1..20: note = chemically synthesized
  source 1..20: mol_type = other DNA
cctcccctatgctgttttcc

SEQ ID NO: 56198 - DNA, 20 bp, synthetic construct
  misc_feature 1..20: note = chemically synthesized
  source 1..20: mol_type = other DNA
ctcccctatgctgttttcct

SEQ ID NO: 56199 - DNA, 20 bp, synthetic construct
  misc_feature 1..20: note = chemically synthesized
  source 1..20: mol_type = other DNA
cctatgctgttttcctggga

SEQ ID NO: 56200 - DNA, 20 bp, synthetic construct
  misc_feature 1..20: note = chemically synthesized
  source 1..20: mol_type = other DNA
atgctgttttcctgggacag

SEQ ID NO: 56201 - DNA, 20 bp, synthetic construct
  misc_feature 1..20: note = chemically synthesized
  source 1..20: mol_type = other DNA
tgctgttttcctgggacagt

SEQ ID NO: 56202 - DNA, 20 bp, synthetic construct
  misc_feature 1..20: note = chemically synthesized
  source 1..20: mol_type = other DNA
ctgttttcctgggacagtgg

SEQ ID NO: 56203 - DNA, 20 bp, synthetic construct
  misc_feature 1..20: note = chemically synthesized
  source 1..20: mol_type = other DNA
tttcctgggacagtgggagc

SEQ ID NO: 56204 - DNA, 20 bp, synthetic construct
  misc_feature 1..20: note = chemically synthesized
  source 1..20: mol_type = other DNA
tgggacagtgggagctggct

SEQ ID NO: 56205 - DNA, 20 bp, synthetic construct
  misc_feature 1..20: note = chemically synthesized
  source 1..20: mol_type = other DNA
ggagctggcttagaatgccc

SEQ ID NO: 56206 - DNA, 20 bp, synthetic construct
  misc_feature 1..20: note = chemically synthesized
  source 1..20: mol_type = other DNA
gagctggcttagaatgccct

SEQ ID NO: 56207 - DNA, 20 bp, synthetic construct
  misc_feature 1..20: note = chemically synthesized
  source 1..20: mol_type = other DNA
agctggcttagaatgccctg

SEQ ID NO: 56208 - DNA, 20 bp, synthetic construct
  misc_feature 1..20: note = chemically synthesized
  source 1..20: mol_type = other DNA
ttagaatgccctggggcccc

SEQ ID NO: 56209 - DNA, 20 bp, synthetic construct
  misc_feature 1..20: note = chemically synthesized
  source 1..20: mol_type = other DNA
tagaatgccctggggccccc

SEQ ID NO: 56210 - DNA, 20 bp, synthetic construct
  misc_feature 1..20: note = chemically synthesized
  source 1..20: mol_type = other DNA
ccctggggcccccaggaccc

SEQ ID NO: 56211 - DNA, 20 bp, synthetic construct
  misc_feature 1..20: note = chemically synthesized
  source 1..20: mol_type = other DNA
accctggcattttaacccct

SEQ ID NO: 56212 - DNA, 20 bp, synthetic construct
  misc_feature 1..20: note = chemically synthesized
  source 1..20: mol_type = other DNA
ccctggcattttaacccctc

SEQ ID NO: 56213 - DNA, 20 bp, synthetic construct
  misc_feature 1..20: note = chemically synthesized
  source 1..20: mol_type = other DNA
cctggcattttaacccctca

SEQ ID NO: 56214 - DNA, 20 bp, synthetic construct
  misc_feature 1..20: note = chemically synthesized
  source 1..20: mol_type = other DNA
ctggcattttaacccctcag

SEQ ID NO: 56215 - DNA, 20 bp, synthetic construct
  misc_feature 1..20: note = chemically synthesized
  source 1..20: mol_type = other DNA
gcattttaacccctcagggg

SEQ ID NO: 56216 - DNA, 20 bp, synthetic construct
  misc_feature 1..20: note = chemically synthesized
  source 1..20: mol_type = other DNA
cattttaacccctcaggggc

SEQ ID NO: 56217 - DNA, 20 bp, synthetic construct
  misc_feature 1..20: note = chemically synthesized
  source 1..20: mol_type = other DNA
tttaacccctcaggggcagg

SEQ ID NO: 56218 - DNA, 20 bp, synthetic construct
  misc_feature 1..20: note = chemically synthesized
  source 1..20: mol_type = other DNA
ttaacccctcaggggcagga

SEQ ID NO: 56219 - DNA, 20 bp, synthetic construct
  misc_feature 1..20: note = chemically synthesized
  source 1..20: mol_type = other DNA
acccctcaggggcaggaagg

SEQ ID NO: 56220 - DNA, 20 bp, synthetic construct
  misc_feature 1..20: note = chemically synthesized
  source 1..20: mol_type = other DNA
caggggcaggaaggcagcct

SEQ ID NO: 56221 - DNA, 20 bp, synthetic construct
  misc_feature 1..20: note = chemically synthesized
  source 1..20: mol_type = other DNA
caggaaggcagcctgagata

SEQ ID NO: 56222 - DNA, 20 bp, synthetic construct
  misc_feature 1..20: note = chemically synthesized
  source 1..20: mol_type = other DNA
gaaggcagcctgagatacag

SEQ ID NO: 56223 - DNA, 20 bp, synthetic construct
  misc_feature 1..20: note = chemically synthesized
  source 1..20: mol_type = other DNA
aggcagcctgagatacagaa

SEQ ID NO: 56224 - DNA, 20 bp, synthetic construct
  misc_feature 1..20: note = chemically synthesized
  source 1..20: mol_type = other DNA
tatgccacacaccatcccca

SEQ ID NO: 56225 - DNA, 20 bp, synthetic construct
  misc_feature 1..20: note = chemically synthesized
  source 1..20: mol_type = other DNA
ttaatcctaaaaaaacctga

SEQ ID NO: 56226 - DNA, 20 bp, synthetic construct
  misc_feature 1..20: note = chemically synthesized
  source 1..20: mol_type = other DNA
tcctaaaaaaacctgacagc

SEQ ID NO: 56227 - DNA, 20 bp, synthetic construct
  misc_feature 1..20: note = chemically synthesized
  source 1..20: mol_type = other DNA
aaaaaacctgacagcaagaa

SEQ ID NO: 56228 - DNA, 20 bp, synthetic construct
  misc_feature 1..20: note = chemically synthesized
  source 1..20: mol_type = other DNA
aatggtattttgtccatgct

SEQ ID NO: 56229 - DNA, 20 bp, synthetic construct
  misc_feature 1..20: note = chemically synthesized
  source 1..20: mol_type = other DNA
tattttgtccatgctaagat

SEQ ID NO: 56230 - DNA, 20 bp, synthetic construct
  misc_feature 1..20: note = chemically synthesized
  source 1..20: mol_type = other DNA
tccatgctaagatgagaaat

SEQ ID NO: 56231 - DNA, 20 bp, synthetic construct
  misc_feature 1..20: note = chemically synthesized
  source 1..20: mol_type = other DNA
gatgagaaattagcacctca

SEQ ID NO: 56232 - DNA, 20 bp, synthetic construct
  misc_feature 1..20: note = chemically synthesized
  source 1..20: mol_type = other DNA
tgagaaattagcacctcaaa

SEQ ID NO: 56233 - DNA, 20 bp, synthetic construct
  misc_feature 1..20: note = chemically synthesized
  source 1..20: mol_type = other DNA
gagaaattagcacctcaaag

SEQ ID NO: 56234 - DNA, 20 bp, synthetic construct
  misc_feature 1..20: note = chemically synthesized
  source 1..20: mol_type = other DNA
aaattagcacctcaaagagg

SEQ ID NO: 56235 - DNA, 20 bp, synthetic construct
  misc_feature 1..20: note = chemically synthesized
  source 1..20: mol_type = other DNA
gaatgcattgtttttgtcaa

SEQ ID NO: 56236 - DNA, 20 bp, synthetic construct
  misc_feature 1..20: note = chemically synthesized
  source 1..20: mol_type = other DNA
ttgtcaaaagctaattgtgt

SEQ ID NO: 56237 - DNA, 20 bp, synthetic construct
  misc_feature 1..20: note = chemically synthesized
  source 1..20: mol_type = other DNA
gtcaaaagctaattgtgtta

SEQ ID NO: 56238 - DNA, 20 bp, synthetic construct
  misc_feature 1..20: note = chemically synthesized
  source 1..20: mol_type = other DNA
tcaaaagctaattgtgttag

SEQ ID NO: 56239 - DNA, 20 bp, synthetic construct
  misc_feature 1..20: note = chemically synthesized
  source 1..20: mol_type = other DNA
aaagctaattgtgttagagg

SEQ ID NO: 56240 - DNA, 20 bp, synthetic construct
  misc_feature 1..20: note = chemically synthesized
  source 1..20: mol_type = other DNA
aagctaattgtgttagaggc

SEQ ID NO: 56241 - DNA, 20 bp, synthetic construct
  misc_feature 1..20: note = chemically synthesized
  source 1..20: mol_type = other DNA
ttagaggcaggatttgaacc

SEQ ID NO: 56242 - DNA, 20 bp, synthetic construct
  misc_feature 1..20: note = chemically synthesized
  source 1..20: mol_type = other DNA
tagaggcaggatttgaaccc

SEQ ID NO: 56243 - DNA, 20 bp, synthetic construct
  misc_feature 1..20: note = chemically synthesized
  source 1..20: mol_type = other DNA
ggatttgaacccaggtcttt

SEQ ID NO: 56244 - DNA, 20 bp, synthetic construct
  misc_feature 1..20: note = chemically synthesized
  source 1..20: mol_type = other DNA
tgcaaaactgatactgattc

SEQ ID NO: 56245 - DNA, 20 bp, synthetic construct
  misc_feature 1..20: note = chemically synthesized
  source 1..20: mol_type = other DNA
gcaaaactgatactgattct

SEQ ID NO: 56246 - DNA, 20 bp, synthetic construct
  misc_feature 1..20: note = chemically synthesized
  source 1..20: mol_type = other DNA
tgatactgattctgggacac

SEQ ID NO: 56247 - DNA, 20 bp, synthetic construct
  misc_feature 1..20: note = chemically synthesized
  source 1..20: mol_type = other DNA
atactgattctgggacacta

SEQ ID NO: 56248 - DNA, 20 bp, synthetic construct
  misc_feature 1..20: note = chemically synthesized
  source 1..20: mol_type = other DNA
tgggacactagagtcgtgta

SEQ ID NO: 56249 - DNA, 20 bp, synthetic construct
  misc_feature 1..20: note = chemically synthesized
  source 1..20: mol_type = other DNA
catgaaactatccctttatg

SEQ ID NO: 56250 - DNA, 20 bp, synthetic construct
  misc_feature 1..20: note = chemically synthesized
  source 1..20: mol_type = other DNA
gtgtattacaatttgttcta

SEQ ID NO: 56251 - DNA, 20 bp, synthetic construct
  misc_feature 1..20: note = chemically synthesized
  source 1..20: mol_type = other DNA
acaatttgttctatagttct

SEQ ID NO: 56252 - DNA, 20 bp, synthetic construct
  misc_feature 1..20: note = chemically synthesized
  source 1..20: mol_type = other DNA
cattatatattctacatata

SEQ ID NO: 56253 - DNA, 20 bp, synthetic construct
  misc_feature 1..20: note = chemically synthesized
  source 1..20: mol_type = other DNA
tctacatatacagtatacac

SEQ ID NO: 56254 - DNA, 20 bp, synthetic construct
  misc_feature 1..20: note = chemically synthesized
  source 1..20: mol_type = other DNA
ctacatatacagtatacaca

SEQ ID NO: 56255 - DNA, 20 bp, synthetic construct
  misc_feature 1..20: note = chemically synthesized
  source 1..20: mol_type = other DNA
cagtatacacaaggacatta

SEQ ID NO: 56256 - DNA, 20 bp, synthetic construct
  misc_feature 1..20: note = chemically synthesized
  source 1..20: mol_type = other DNA
agtatacacaaggacattaa

SEQ ID NO: 56257 - DNA, 20 bp, synthetic construct
  misc_feature 1..20: note = chemically synthesized
  source 1..20: mol_type = other DNA
aggacattaaaggctctgaa

SEQ ID NO: 56258 - DNA, 20 bp, synthetic construct
  misc_feature 1..20: note = chemically synthesized
  source 1..20: mol_type = other DNA
aaaggctctgaaaagttctg

SEQ ID NO: 56259 - DNA, 20 bp, synthetic construct
  misc_feature 1..20: note = chemically synthesized
  source 1..20: mol_type = other DNA
aggctctgaaaagttctgca

SEQ ID NO: 56260 - DNA, 20 bp, synthetic construct
  misc_feature 1..20: note = chemically synthesized
  source 1..20: mol_type = other DNA
gaaaagttctgcagagctgt

SEQ ID NO: 56261 - DNA, 20 bp, synthetic construct
  misc_feature 1..20: note = chemically synthesized
  source 1..20: mol_type = other DNA
aagttctgcagagctgtcag

SEQ ID NO: 56262 - DNA, 20 bp, synthetic construct
  misc_feature 1..20: note = chemically synthesized
  source 1..20: mol_type = other DNA
agagctgtcagtagttttga

SEQ ID NO: 56263 - DNA, 20 bp, synthetic construct
  misc_feature 1..20: note = chemically synthesized
  source 1..20: mol_type = other DNA
ttcctcaaattactcaatga

SEQ ID NO: 56264 - DNA, 20 bp, synthetic construct
  misc_feature 1..20: note = chemically synthesized
  source 1..20: mol_type = other DNA
ctcaatgatggaaaacattt

SEQ ID NO: 56265 - DNA, 20 bp, synthetic construct
  misc_feature 1..20: note = chemically synthesized
  source 1..20: mol_type = other DNA
aacattttagtgtttgtgtg

SEQ ID NO: 56266 - DNA, 20 bp, synthetic construct
  misc_feature 1..20: note = chemically synthesized
  source 1..20: mol_type = other DNA
tgtttgtgtgtagaaaactg

SEQ ID NO: 56267 - DNA, 20 bp, synthetic construct
  misc_feature 1..20: note = chemically synthesized
  source 1..20: mol_type = other DNA
actgaagaatccacgctgaa

SEQ ID NO: 56268 - DNA, 20 bp, synthetic construct
  misc_feature 1..20: note = chemically synthesized
  source 1..20: mol_type = other DNA
cacgctgaaaagcattgcta

SEQ ID NO: 56269 - DNA, 20 bp, synthetic construct
  misc_feature 1..20: note = chemically synthesized
  source 1..20: mol_type = other DNA
atggcccataatgcattgcc

SEQ ID NO: 56270 - DNA, 20 bp, synthetic construct
  misc_feature 1..20: note = chemically synthesized
  source 1..20: mol_type = other DNA
tggcccataatgcattgcca

SEQ ID NO: 56271 - DNA, 20 bp, synthetic construct
  misc_feature 1..20: note = chemically synthesized
  source 1..20: mol_type = other DNA
gcccataatgcattgccaag

SEQ ID NO: 56272 - DNA, 20 bp, synthetic construct
  misc_feature 1..20: note = chemically synthesized
  source 1..20: mol_type = other DNA
ccataatgcattgccaagga

SEQ ID NO: 56273 - DNA, 20 bp, synthetic construct
  misc_feature 1..20: note = chemically synthesized
  source 1..20: mol_type = other DNA
tgcattgccaaggagagttc

SEQ ID NO: 56274 - DNA, 20 bp, synthetic construct
  misc_feature 1..20: note = chemically synthesized
  source 1..20: mol_type = other DNA
aaggagagttcaagaactga

SEQ ID NO: 56275 - DNA, 20 bp, synthetic construct
  misc_feature 1..20: note = chemically synthesized
  source 1..20: mol_type = other DNA
agttcaagaactgatggttt

SEQ ID NO: 56276 - DNA, 20 bp, synthetic construct
  misc_feature 1..20: note = chemically synthesized
  source 1..20: mol_type = other DNA
aatatttttgcttgtttcta

SEQ ID NO: 56277 - DNA, 20 bp, synthetic construct
  misc_feature 1..20: note = chemically synthesized
  source 1..20: mol_type = other DNA
atatttttgcttgtttctat

SEQ ID NO: 56278 - DNA, 20 bp, synthetic construct
  misc_feature 1..20: note = chemically synthesized
  source 1..20: mol_type = other DNA
tttgcttgtttctatgggaa

SEQ ID NO: 56279 - DNA, 20 bp, synthetic construct
  misc_feature 1..20: note = chemically synthesized
  source 1..20: mol_type = other DNA
ttgtttctatgggaacagct

SEQ ID NO: 56280 - DNA, 20 bp, synthetic construct
  misc_feature 1..20: note = chemically synthesized
  source 1..20: mol_type = other DNA
tgtttctatgggaacagctc

SEQ ID NO: 56281 - DNA, 20 bp, synthetic construct
  misc_feature 1..20: note = chemically synthesized
  source 1..20: mol_type = other DNA
tctatgggaacagctcaggc

SEQ ID NO: 56282 - DNA, 20 bp, synthetic construct
  misc_feature 1..20: note = chemically synthesized
  source 1..20: mol_type = other DNA
gggaacagctcaggctggtt

SEQ ID NO: 56283 - DNA, 20 bp, synthetic construct
  misc_feature 1..20: note = chemically synthesized
  source 1..20: mol_type = other DNA
gttgagcaaccttaccttta

SEQ ID NO: 56284 - DNA, 20 bp, synthetic construct
  misc_feature 1..20: note = chemically synthesized
  source 1..20: mol_type = other DNA
gagcaaccttacctttaaag

SEQ ID NO: 56285 - DNA, 20 bp, synthetic construct
  misc_feature 1..20: note = chemically synthesized
  source 1..20: mol_type = other DNA
ttaaagaagatgtaattcac

SEQ ID NO: 56286 - DNA, 20 bp, synthetic construct
  misc_feature 1..20: note = chemically synthesized
  source 1..20: mol_type = other DNA
aaagaagatgtaattcacca

SEQ ID NO: 56287 - DNA, 20 bp, synthetic construct
  misc_feature 1..20: note = chemically synthesized
  source 1..20: mol_type = other DNA
gcaaaaactgtgtctctgtc

SEQ ID NO: 56288 - DNA, 20 bp, synthetic construct
  misc_feature 1..20: note = chemically synthesized
  source 1..20: mol_type = other DNA
caaatccacaattttccctt

SEQ ID NO: 56289 - DNA, 20 bp, synthetic construct
  misc_feature 1..20: note = chemically synthesized
  source 1..20: mol_type = other DNA
gtaatcgttgatctgtttct

SEQ ID NO: 56290 - DNA, 20 bp, synthetic construct
  misc_feature 1..20: note = chemically synthesized
  source 1..20: mol_type = other DNA
gatctgtttcttggcctctt

SEQ ID NO: 56291 - DNA, 20 bp, synthetic construct
  misc_feature 1..20: note = chemically synthesized
  source 1..20: mol_type = other DNA
tggcctcttcggtgtccccg

SEQ ID NO: 56292 - DNA, 20 bp, synthetic construct
  misc_feature 1..20: note = chemically synthesized
  source 1..20: mol_type = other DNA
ttcggtgtccccgaagttga

SEQ ID NO: 56293 - DNA, 20 bp, synthetic construct
  misc_feature 1..20: note = chemically synthesized
  source 1..20: mol_type = other DNA
tgtccccgaagttgacagtg

SEQ ID NO: 56294 - DNA, 20 bp, synthetic construct
  misc_feature 1..20: note = chemically synthesized
  source 1..20: mol_type = other DNA
gtccccgaagttgacagtga

SEQ ID NO: 56295 - DNA, 20 bp, synthetic construct
  misc_feature 1..20: note = chemically synthesized
  source 1..20: mol_type = other DNA
agttgacagtgaaggcttct

SEQ ID NO: 56296 - DNA, 20 bp, synthetic construct
  misc_feature 1..20: note = chemically synthesized
  source 1..20: mol_type = other DNA
tgacagtgaaggcttctgag

SEQ ID NO: 56297 - DNA, 20 bp, synthetic construct
  misc_feature 1..20: note = chemically synthesized
  source 1..20: mol_type = other DNA
tcctccaaaaacttatccac

SEQ ID NO: 56298 - DNA, 20 bp, synthetic construct
  misc_feature 1..20: note = chemically synthesized
  source 1..20: mol_type = other DNA
aaaaacttatccactagctt

SEQ ID NO: 56299 - DNA, 20 bp, synthetic construct
  misc_feature 1..20: note = chemically synthesized
  source 1..20: mol_type = other DNA
aaaacttatccactagcttc

SEQ ID NO: 56300 - DNA, 20 bp, synthetic construct
  misc_feature 1..20: note = chemically synthesized
  source 1..20: mol_type = other DNA
actagcttcaggccctcgct

SEQ ID NO: 56301 - DNA, 20 bp, synthetic construct
  misc_feature 1..20: note = chemically synthesized
  source 1..20: mol_type = other DNA
ctagcttcaggccctcgctg

SEQ ID NO: 56302 - DNA, 20 bp, synthetic construct
  misc_feature 1..20: note = chemically synthesized
  source 1..20: mol_type = other DNA
ttcaggccctcgctgaggaa

SEQ ID NO: 56303 - DNA, 20 bp, synthetic construct
  misc_feature 1..20: note = chemically synthesized
  source 1..20: mol_type = other DNA
tcaggccctcgctgaggaac

SEQ ID NO: 56304 - DNA, 20 bp, synthetic construct
  misc_feature 1..20: note = chemically synthesized
  source 1..20: mol_type = other DNA
gctgaggaacaggccattgc

SEQ ID NO: 56305 - DNA, 20 bp, synthetic construct
  misc_feature 1..20: note = chemically synthesized
  source 1..20: mol_type = other DNA
gaggaacaggccattgccgg

SEQ ID NO: 56306 - DNA, 20 bp, synthetic construct
  misc_feature 1..20: note = chemically synthesized
  source 1..20: mol_type = other DNA
aacaggccattgccggtggt

SEQ ID NO: 56307 - DNA, 20 bp, synthetic construct
  misc_feature 1..20: note = chemically synthesized
  source 1..20: mol_type = other DNA
ggccattgccggtggtcagc

SEQ ID NO: 56308 - DNA, 20 bp, synthetic construct
  misc_feature 1..20: note = chemically synthesized
  source 1..20: mol_type = other DNA
ccattgccggtggtcagctg

SEQ ID NO: 56309 - DNA, 20 bp, synthetic construct
  misc_feature 1..20: note = chemically synthesized
  source 1..20: mol_type = other DNA
tgccggtggtcagctggagc

SEQ ID NO: 56310 - DNA, 20 bp, synthetic construct
  misc_feature 1..20: note = chemically synthesized
  source 1..20: mol_type = other DNA
gtcagctggagctggctgtc

SEQ ID NO: 56311 - DNA, 20 bp, synthetic construct
  misc_feature 1..20: note = chemically synthesized
  source 1..20: mol_type = other DNA
gctggagctggctgtctggc

SEQ ID NO: 56312 - DNA, 20 bp, synthetic construct
  misc_feature 1..20: note = chemically synthesized
  source 1..20: mol_type = other DNA
agctggctgtctggctggtt

SEQ ID NO: 56313 - DNA, 20 bp, synthetic construct
  misc_feature 1..20: note = chemically synthesized
  source 1..20: mol_type = other DNA
gctggctgtctggctggttg

SEQ ID NO: 56314 - DNA, 20 bp, synthetic construct
  misc_feature 1..20: note = chemically synthesized
  source 1..20: mol_type = other DNA
ctggctgtctggctggttga

SEQ ID NO: 56315 - DNA, 20 bp, synthetic construct
  misc_feature 1..20: note = chemically synthesized
  source 1..20: mol_type = other DNA
tgtctggctggttgagggta

SEQ ID NO: 56316 - DNA, 20 bp, synthetic construct
  misc_feature 1..20: note = chemically synthesized
  source 1..20: mol_type = other DNA
tctggctggttgagggtacg

SEQ ID NO: 56317 - DNA, 20 bp, synthetic construct
  misc_feature 1..20: note = chemically synthesized
  source 1..20: mol_type = other DNA
ctggctggttgagggtacgg

SEQ ID NO: 56318 - DNA, 20 bp, synthetic construct
  misc_feature 1..20: note = chemically synthesized
  source 1..20: mol_type = other DNA
ggctggttgagggtacggag

SEQ ID NO: 56319 - DNA, 20 bp, synthetic construct
  misc_feature 1..20: note = chemically synthesized
  source 1..20: mol_type = other DNA
tgagggtacggaggagttcc

SEQ ID NO: 56320 - DNA, 20 bp, synthetic construct
  misc_feature 1..20: note = chemically synthesized
  source 1..20: mol_type = other DNA
gggtacggaggagttcctgg

SEQ ID NO: 56321 - DNA, 20 bp, synthetic construct
  misc_feature 1..20: note = chemically synthesized
  source 1..20: mol_type = other DNA
ggagttcctggaagccttca

SEQ ID NO: 56322 - DNA, 20 bp, synthetic construct
  misc_feature 1..20: note = chemically synthesized
  source 1..20: mol_type = other DNA
ctggaagccttcatggatct

SEQ ID NO: 56323 - DNA, 20 bp, synthetic construct
  misc_feature 1..20: note = chemically synthesized
  source 1..20: mol_type = other DNA
ccttcatggatctgagcctc

SEQ ID NO: 56324 - DNA, 20 bp, synthetic construct
  misc_feature 1..20: note = chemically synthesized
  source 1..20: mol_type = other DNA
tgagcctccggaatctccgt

SEQ ID NO: 56325 - DNA, 20 bp, synthetic construct
  misc_feature 1..20: note = chemically synthesized
  source 1..20: mol_type = other DNA
gagcctccggaatctccgtg

SEQ ID NO: 56326 - DNA, 20 bp, synthetic construct
  misc_feature 1..20: note = chemically synthesized
  source 1..20: mol_type = other DNA
atctccgtgaggttgaaatt

SEQ ID NO: 56327 - DNA, 20 bp, synthetic construct
  misc_feature 1..20: note = chemically synthesized
  source 1..20: mol_type = other DNA
tctccgtgaggttgaaattc

SEQ ID NO: 56328 - DNA, 20 bp, synthetic construct
  misc_feature 1..20: note = chemically synthesized
  source 1..20: mol_type = other DNA
aggttgaaattcaggccctc

SEQ ID NO: 56329 - DNA, 20 bp, synthetic construct
  misc_feature 1..20: note = chemically synthesized
  source 1..20: mol_type = other DNA
ggttgaaattcaggccctcc

SEQ ID NO: 56330 - DNA, 20 bp, synthetic construct
  misc_feature 1..20: note = chemically synthesized
  source 1..20: mol_type = other DNA
gccctccaggatttcatcgt

SEQ ID NO: 56331 - DNA, 20 bp, synthetic construct
  misc_feature 1..20: note = chemically synthesized
  source 1..20: mol_type = other DNA
caggatttcatcgtgagtgt

SEQ ID NO: 56332 - DNA, 20 bp, synthetic construct
  misc_feature 1..20: note = chemically synthesized
  source 1..20: mol_type = other DNA
ttcatcgtgagtgtcagcct

SEQ ID NO: 56333 - DNA, 20 bp, synthetic construct
  misc_feature 1..20: note = chemically synthesized
  source 1..20: mol_type = other DNA
tgagtgtcagccttggtccc

SEQ ID NO: 56334 - DNA, 20 bp, synthetic construct
  misc_feature 1..20: note = chemically synthesized
  source 1..20: mol_type = other DNA
gagtgtcagccttggtcccc

SEQ ID NO: 56335 - DNA, 20 bp, synthetic construct
  misc_feature 1..20: note = chemically synthesized
  source 1..20: mol_type = other DNA
agtgtcagccttggtcccca

SEQ ID NO: 56336 - DNA, 20 bp, synthetic construct
  misc_feature 1..20: note = chemically synthesized
  source 1..20: mol_type = other DNA
tgtcagccttggtccccagg

SEQ ID NO: 56337 - DNA, 20 bp, synthetic construct
  misc_feature 1..20: note = chemically synthesized
  source 1..20: mol_type = other DNA
tcagccttggtccccaggga

SEQ ID NO: 56338 - DNA, 20 bp, synthetic construct
  misc_feature 1..20: note = chemically synthesized
  source 1..20: mol_type = other DNA
tccccagggagagcattgca

SEQ ID NO: 56339 - DNA, 20 bp, synthetic construct
  misc_feature 1..20: note = chemically synthesized
  source 1..20: mol_type = other DNA
ccccagggagagcattgcaa

SEQ ID NO: 56340 - DNA, 20 bp, synthetic construct
  misc_feature 1..20: note = chemically synthesized
  source 1..20: mol_type = other DNA
ggagagcattgcaaaggctg

SEQ ID NO: 56341 - DNA, 20 bp, synthetic construct
  misc_feature 1..20: note = chemically synthesized
  source 1..20: mol_type = other DNA
aaggctgtagcgatgctcac

SEQ ID NO: 56342 - DNA, 20 bp, synthetic construct
  misc_feature 1..20: note = chemically synthesized
  source 1..20: mol_type = other DNA
aggctgtagcgatgctcact

SEQ ID NO: 56343 - DNA, 20 bp, synthetic construct
  misc_feature 1..20: note = chemically synthesized
  source 1..20: mol_type = other DNA
ggctgtagcgatgctcactg

SEQ ID NO: 56344 - DNA, 20 bp, synthetic construct
  misc_feature 1..20: note = chemically synthesized
  source 1..20: mol_type = other DNA
ctgtagcgatgctcactggg

SEQ ID NO: 56345 - DNA, 20 bp, synthetic construct
  misc_feature 1..20: note = chemically synthesized
  source 1..20: mol_type = other DNA
tagcgatgctcactggggag

SEQ ID NO: 56346 - DNA, 20 bp, synthetic construct
  misc_feature 1..20: note = chemically synthesized
  source 1..20: mol_type = other DNA
cgatgctcactggggagaag

SEQ ID NO: 56347 - DNA, 20 bp, synthetic construct
  misc_feature 1..20: note = chemically synthesized
  source 1..20: mol_type = other DNA
cactggggagaagaagatat

SEQ ID NO: 56348 - DNA, 20 bp, synthetic construct
  misc_feature 1..20: note = chemically synthesized
  source 1..20: mol_type = other DNA
gaagaagatattggtgctgt

SEQ ID NO: 56349 - DNA, 20 bp, synthetic construct
  misc_feature 1..20: note = chemically synthesized
  source 1..20: mol_type = other DNA
agatattggtgctgttggac

SEQ ID NO: 56350 - DNA, 20 bp, synthetic construct
  misc_feature 1..20: note = chemically synthesized
  source 1..20: mol_type = other DNA
gtgctgttggactggtgtgc

SEQ ID NO: 56351 - DNA, 20 bp, synthetic construct
  misc_feature 1..20: note = chemically synthesized
  source 1..20: mol_type = other DNA
tgttggactggtgtgccagc

SEQ ID NO: 56352 - DNA, 20 bp, synthetic construct
  misc_feature 1..20: note = chemically synthesized
  source 1..20: mol_type = other DNA
tggactggtgtgccagctgg

SEQ ID NO: 56353 - DNA, 20 bp, synthetic construct
  misc_feature 1..20: note = chemically synthesized
  source 1..20: mol_type = other DNA
tggtgtgccagctggcggta

SEQ ID NO: 56354 - DNA, 20 bp, synthetic construct
  misc_feature 1..20: note = chemically synthesized
  source 1..20: mol_type = other DNA
ggtgtgccagctggcggtat

SEQ ID NO: 56355 - DNA, 20 bp, synthetic construct
  misc_feature 1..20: note = chemically synthesized
  source 1..20: mol_type = other DNA
ccagctggcggtataggctg

SEQ ID NO: 56356 - DNA, 20 bp, synthetic construct
  misc_feature 1..20: note = chemically synthesized
  source 1..20: mol_type = other DNA
cagctggcggtataggctga

SEQ ID NO: 56357 - DNA, 20 bp, synthetic construct
  misc_feature 1..20: note = chemically synthesized
  source 1..20: mol_type = other DNA
gtataggctgaaggcgaact

SEQ ID NO: 56358 - DNA, 20 bp, synthetic construct
  misc_feature 1..20: note = chemically synthesized
  source 1..20: mol_type = other DNA
aggctgaaggcgaactcagc

SEQ ID NO: 56359 - DNA, 20 bp, synthetic construct
  misc_feature 1..20: note = chemically synthesized
  source 1..20: mol_type = other DNA
ggctgaaggcgaactcagcc

SEQ ID NO: 56360 - DNA, 20 bp, synthetic construct
  misc_feature 1..20: note = chemically synthesized
  source 1..20: mol_type = other DNA
gaaggcgaactcagccaggt

SEQ ID NO: 56361 - DNA, 20 bp, synthetic construct
  misc_feature 1..20: note = chemically synthesized
  source 1..20: mol_type = other DNA
aaggcgaactcagccaggtt

SEQ ID NO: 56362 - DNA, 20 bp, synthetic construct
  misc_feature 1..20: note = chemically synthesized
  source 1..20: mol_type = other DNA
aggcgaactcagccaggttg

SEQ ID NO: 56363 - DNA, 20 bp, synthetic construct
  misc_feature 1..20: note = chemically synthesized
  source 1..20: mol_type = other DNA
ggcgaactcagccaggttgg

SEQ ID NO: 56364 - DNA, 20 bp, synthetic construct
  misc_feature 1..20: note = chemically synthesized
  source 1..20: mol_type = other DNA
ggttgggggtgatcttgttg

SEQ ID NO: 56365 - DNA, 20 bp, synthetic construct
  misc_feature 1..20: note = chemically synthesized
  source 1..20: mol_type = other DNA
gttgggggtgatcttgttga

SEQ ID NO: 56366 - DNA, 20 bp, synthetic construct
  misc_feature 1..20: note = chemically synthesized
  source 1..20: mol_type = other DNA
ggggtgatcttgttgaaggt

SEQ ID NO: 56367 - DNA, 20 bp, synthetic construct
  misc_feature 1..20: note = chemically synthesized
  source 1..20: mol_type = other DNA
gggtgatcttgttgaaggtt

SEQ ID NO: 56368 - DNA, 20 bp, synthetic construct
  misc_feature 1..20: note = chemically synthesized
  source 1..20: mol_type = other DNA
aggttgggtgatcctgatca

SEQ ID NO: 56369 - DNA, 20 bp, synthetic construct
  misc_feature 1..20: note = chemically synthesized
  source 1..20: mol_type = other DNA
ttgggtgatcctgatcatgg

SEQ ID NO: 56370 - DNA, 20 bp, synthetic construct
  misc_feature 1..20: note = chemically synthesized
  source 1..20: mol_type = other DNA
tgggtgatcctgatcatggt

SEQ ID NO: 56371 - DNA, 20 bp, synthetic construct
  misc_feature 1..20: note = chemically synthesized
  source 1..20: mol_type = other DNA
ggtgggatgtatctgtcttc

SEQ ID NO: 56372 - DNA, 20 bp, synthetic construct
  misc_feature 1..20: note = chemically synthesized
  source 1..20: mol_type = other DNA
gtgggatgtatctgtcttct

SEQ ID NO: 56373 - DNA, 20 bp, synthetic construct
  misc_feature 1..20: note = chemically synthesized
  source 1..20: mol_type = other DNA
ggatgtatctgtcttctggg

SEQ ID NO: 56374 - DNA, 20 bp, synthetic construct
  misc_feature 1..20: note = chemically synthesized
  source 1..20: mol_type = other DNA
tcttctgggcagcatctccc

SEQ ID NO: 56375 - DNA, 20 bp, synthetic construct
  misc_feature 1..20: note = chemically synthesized
  source 1..20: mol_type = other DNA
cttctgggcagcatctccct

SEQ ID NO: 56376 - DNA, 20 bp, synthetic construct
  misc_feature 1..20: note = chemically synthesized
  source 1..20: mol_type = other DNA
ttctgggcagcatctccctg

SEQ ID NO: 56377 - DNA, 20 bp, synthetic construct
  misc_feature 1..20: note = chemically synthesized
  source 1..20: mol_type = other DNA
agcatctccctggggatcct

SEQ ID NO: 56378 - DNA, 20 bp, synthetic construct
  misc_feature 1..20: note = chemically synthesized
  source 1..20: mol_type = other DNA
tctccctggggatcctcagc

SEQ ID NO: 56379 - DNA, 20 bp, synthetic construct
  misc_feature 1..20: note = chemically synthesized
  source 1..20: mol_type = other DNA
ctccctggggatcctcagcc

SEQ ID NO: 56380 - DNA, 20 bp, synthetic construct
  misc_feature 1..20: note = chemically synthesized
  source 1..20: mol_type = other DNA
tccctggggatcctcagcca

SEQ ID NO: 56381 - DNA, 20 bp, synthetic construct
  misc_feature 1..20: note = chemically synthesized
  source 1..20: mol_type = other DNA
cctggggatcctcagccagg

SEQ ID NO: 56382 - DNA, 20 bp, synthetic construct
  misc_feature 1..20: note = chemically synthesized
  source 1..20: mol_type = other DNA
gggatcctcagccagggaga

SEQ ID NO: 56383 - DNA, 20 bp, synthetic construct
  misc_feature 1..20: note = chemically synthesized
  source 1..20: mol_type = other DNA
ggatcctcagccagggagac

SEQ ID NO: 56384 - DNA, 20 bp, synthetic construct
  misc_feature 1..20: note = chemically synthesized
  source 1..20: mol_type = other DNA
gatcctcagccagggagaca

SEQ ID NO: 56385 - DNA, 20 bp, synthetic construct
  misc_feature 1..20: note = chemically synthesized
  source 1..20: mol_type = other DNA
tcagccagggagacagggac

SEQ ID NO: 56386 - DNA, 20 bp, synthetic construct
  misc_feature 1..20: note = chemically synthesized
  source 1..20: mol_type = other DNA
cagccagggagacagggacc

SEQ ID NO: 56387 - DNA, 20 bp, synthetic construct
  misc_feature 1..20: note = chemically synthesized
  source 1..20: mol_type = other DNA
ccagggagacagggaccagg

SEQ ID NO: 56388 - DNA, 20 bp, synthetic construct
  misc_feature 1..20: note = chemically synthesized
  source 1..20: mol_type = other DNA
gagacagggaccaggcagca

SEQ ID NO: 56389 - DNA, 20 bp, synthetic construct
  misc_feature 1..20: note = chemically synthesized
  source 1..20: mol_type = other DNA
agacagggaccaggcagcac

SEQ ID NO: 56390 - DNA, 20 bp, synthetic construct
  misc_feature 1..20: note = chemically synthesized
  source 1..20: mol_type = other DNA
accaggcagcacaggcctgc

SEQ ID NO: 56391 - DNA, 20 bp, synthetic construct
  misc_feature 1..20: note = chemically synthesized
  source 1..20: mol_type = other DNA
aggcagcacaggcctgccag

SEQ ID NO: 56392 - DNA, 20 bp, synthetic construct
  misc_feature 1..20: note = chemically synthesized
  source 1..20: mol_type = other DNA
ggcagcacaggcctgccagc

SEQ ID NO: 56393 - DNA, 20 bp, synthetic construct
  misc_feature 1..20: note = chemically synthesized
  source 1..20: mol_type = other DNA
cagcacaggcctgccagcag

SEQ ID NO: 56394 - DNA, 20 bp, synthetic construct
  misc_feature 1..20: note = chemically synthesized
  source 1..20: mol_type = other DNA
agcacaggcctgccagcagg

SEQ ID NO: 56395 - DNA, 20 bp, synthetic construct
  misc_feature 1..20: note = chemically synthesized
  source 1..20: mol_type = other DNA
ccagcaggaggatgccccac

SEQ ID NO: 56396 - DNA, 20 bp, synthetic construct
  misc_feature 1..20: note = chemically synthesized
  source 1..20: mol_type = other DNA
caggaggatgccccacgaga

SEQ ID NO: 56397 - DNA, 20 bp, synthetic construct
  misc_feature 1..20: note = chemically synthesized
  source 1..20: mol_type = other DNA
gaggatgccccacgagacag

SEQ ID NO: 56398 - DNA, 20 bp, synthetic construct
  misc_feature 1..20: note = chemically synthesized
  source 1..20: mol_type = other DNA
atgccccacgagacagaaga

SEQ ID NO: 56399 - DNA, 20 bp, synthetic construct
  misc_feature 1..20: note = chemically synthesized
  source 1..20: mol_type = other DNA
agaagacggcattgtcctgc

SEQ ID NO: 56400 - DNA, 20 bp, synthetic construct
  misc_feature 1..20: note = chemically synthesized
  source 1..20: mol_type = other DNA
gacggcattgtcctgcaaga

SEQ ID NO: 56401 - DNA, 20 bp, synthetic construct
  misc_feature 1..20: note = chemically synthesized
  source 1..20: mol_type = other DNA
cggcattgtcctgcaagaca

SEQ ID NO: 56402 - DNA, 20 bp, synthetic construct
  misc_feature 1..20: note = chemically synthesized
  source 1..20: mol_type = other DNA
attgtcctgcaagacagaga

SEQ ID NO: 56403 - DNA, 20 bp, synthetic construct
  misc_feature 1..20: note = chemically synthesized
  source 1..20: mol_type = other DNA
ttgtcctgcaagacagagat

SEQ ID NO: 56404 - DNA, 20 bp, synthetic construct
  misc_feature 1..20: note = chemically synthesized
  source 1..20: mol_type = other DNA
tgtcctgcaagacagagatg

SEQ ID NO: 56405 - DNA, 20 bp, synthetic construct
  misc_feature 1..20: note = chemically synthesized
  source 1..20: mol_type = other DNA
gtcctgcaagacagagatgg

SEQ ID NO: 56406 - DNA, 20 bp, synthetic construct
  misc_feature 1..20: note = chemically synthesized
  source 1..20: mol_type = other DNA
tcctgcaagacagagatggg

SEQ ID NO: 56407 - DNA, 20 bp, synthetic construct
  misc_feature 1..20: note = chemically synthesized
  source 1..20: mol_type = other DNA
cctgcaagacagagatgggg

SEQ ID NO: 56408 - DNA, 20 bp, synthetic construct
  misc_feature 1..20: note = chemically synthesized
  source 1..20: mol_type = other DNA
caagacagagatgggggggc

SEQ ID NO: 56409 - DNA, 20 bp, synthetic construct
  misc_feature 1..20: note = chemically synthesized
  source 1..20: mol_type = other DNA
aagacagagatgggggggcc

SEQ ID NO: 56410 - DNA, 20 bp, synthetic construct
  misc_feature 1..20: note = chemically synthesized
  source 1..20: mol_type = other DNA
agatgggggggccaggcccc

SEQ ID NO: 56411 - DNA, 20 bp, synthetic construct
  misc_feature 1..20: note = chemically synthesized
  source 1..20: mol_type = other DNA
ggggggccaggccccgagtc

SEQ ID NO: 56412 - DNA, 20 bp, synthetic construct
  misc_feature 1..20: note = chemically synthesized
  source 1..20: mol_type = other DNA
gggggccaggccccgagtca

SEQ ID NO: 56413 - DNA, 20 bp, synthetic construct
  misc_feature 1..20: note = chemically synthesized
  source 1..20: mol_type = other DNA
tcaaggcacatgatgactcc

SEQ ID NO: 56414 - DNA, 20 bp, synthetic construct
  misc_feature 1..20: note = chemically synthesized
  source 1..20: mol_type = other DNA
acatgatgactcccagtgat

SEQ ID NO: 56415 - DNA, 20 bp, synthetic construct
  misc_feature 1..20: note = chemically synthesized
  source 1..20: mol_type = other DNA
catgatgactcccagtgatc

SEQ ID NO: 56416 - DNA, 20 bp, synthetic construct
  misc_feature 1..20: note = chemically synthesized
  source 1..20: mol_type = other DNA
atgatgactcccagtgatca

SEQ ID NO: 56417 - DNA, 20 bp, synthetic construct
  misc_feature 1..20: note = chemically synthesized
  source 1..20: mol_type = other DNA
gatcagggattgacaccacg

SEQ ID NO: 56418 - DNA, 20 bp, synthetic construct
  misc_feature 1..20: note = chemically synthesized
  source 1..20: mol_type = other DNA
cagggattgacaccacgtgg

SEQ ID NO: 56419 - DNA, 20 bp, synthetic construct
  misc_feature 1..20: note = chemically synthesized
  source 1..20: mol_type = other DNA
tgacaccacgtggaagtgcc

SEQ ID NO: 56420 - DNA, 20 bp, synthetic construct
  misc_feature 1..20: note = chemically synthesized
  source 1..20: mol_type = other DNA
gacaccacgtggaagtgcct

SEQ ID NO: 56421 - DNA, 20 bp, synthetic construct
  misc_feature 1..20: note = chemically synthesized
  source 1..20: mol_type = other DNA
acaccacgtggaagtgccta

SEQ ID NO: 56422 - DNA, 20 bp, synthetic construct
  misc_feature 1..20: note = chemically synthesized
  source 1..20: mol_type = other DNA
gtgcctagggattattaaac

SEQ ID NO: 56423 - DNA, 20 bp, synthetic construct
  misc_feature 1..20: note = chemically synthesized
  source 1..20: mol_type = other DNA
ttattaaaccagcctgtgcc

SEQ ID NO: 56424 - DNA, 20 bp, synthetic construct
  misc_feature 1..20: note = chemically synthesized
  source 1..20: mol_type = other DNA
tgccaagtacttgccgacat

SEQ ID NO: 56425 - DNA, 20 bp, synthetic construct
  misc_feature 1..20: note = chemically synthesized
  source 1..20: mol_type = other DNA
gccgacatcagtaacactga

SEQ ID NO: 56426 - DNA, 20 bp, synthetic construct
  misc_feature 1..20: note = chemically synthesized
  source 1..20: mol_type = other DNA
atcagtaacactgaaagaat

SEQ ID NO: 56427 - DNA, 20 bp, synthetic construct
  misc_feature 1..20: note = chemically synthesized
  source 1..20: mol_type = other DNA
agtaacactgaaagaatcag

SEQ ID NO: 56428 - DNA, 20 bp, synthetic construct
  misc_feature 1..20: note = chemically synthesized
  source 1..20: mol_type = other DNA
cactgaaagaatcagaagaa

SEQ ID NO: 56429 - DNA, 20 bp, synthetic construct
  misc_feature 1..20: note = chemically synthesized
  source 1..20: mol_type = other DNA
gaagaatagcaaaatgtacg

SEQ ID NO: 56430 - DNA, 20 bp, synthetic construct
  misc_feature 1..20: note = chemically synthesized
  source 1..20: mol_type = other DNA
cgtagtgcttaccatatgcc

SEQ ID NO: 56431 - DNA, 20 bp, synthetic construct
  misc_feature 1..20: note = chemically synthesized
  source 1..20: mol_type = other DNA
ctttcttgtaacaatcccgt

SEQ ID NO: 56432 - DNA, 20 bp, synthetic construct
  misc_feature 1..20: note = chemically synthesized
  source 1..20: mol_type = other DNA
tttcttgtaacaatcccgtg

SEQ ID NO: 56433 - DNA, 20 bp, synthetic construct
  misc_feature 1..20: note = chemically synthesized
  source 1..20: mol_type = other DNA
atgctaatatccttctttta

SEQ ID NO: 56434 - DNA, 20 bp, synthetic construct
  misc_feature 1..20: note = chemically synthesized
  source 1..20: mol_type = other DNA
atatccttcttttacagatg

SEQ ID NO: 56435 - DNA, 20 bp, synthetic construct
  misc_feature 1..20: note = chemically synthesized
  source 1..20: mol_type = other DNA
ttttacagatgaagaaacca

SEQ ID NO: 56436 - DNA, 20 bp, synthetic construct
  misc_feature 1..20: note = chemically synthesized
  source 1..20: mol_type = other DNA
acagatgaagaaaccaaagc

SEQ ID NO: 56437 - DNA, 20 bp, synthetic construct
  misc_feature 1..20: note = chemically synthesized
  source 1..20: mol_type = other DNA
agatgaagaaaccaaagcca

SEQ ID NO: 56438 - DNA, 20 bp, synthetic construct
  misc_feature 1..20: note = chemically synthesized
  source 1..20: mol_type = other DNA
atgaagaaaccaaagccaga

SEQ ID NO: 56439 - DNA, 20 bp, synthetic construct
  misc_feature 1..20: note = chemically synthesized
  source 1..20: mol_type = other DNA
gaaaccaaagccagagagat

SEQ ID NO: 56440 - DNA, 20 bp, synthetic construct
  misc_feature 1..20: note = chemically synthesized
  source 1..20: mol_type = other DNA
aaaccaaagccagagagatt

SEQ ID NO: 56441 - DNA, 20 bp, synthetic construct
  misc_feature 1..20: note = chemically synthesized
  source 1..20: mol_type = other DNA
caaagccagagagattaggt

SEQ ID NO: 56442 - DNA, 20 bp, synthetic construct
  misc_feature 1..20: note = chemically synthesized
  source 1..20: mol_type = other DNA
gtcagctattcaatgtcact

SEQ ID NO: 56443 - DNA, 20 bp, synthetic construct
  misc_feature 1..20: note = chemically synthesized
  source 1..20: mol_type = other DNA
tcagctattcaatgtcactg

SEQ ID NO: 56444 - DNA, 20 bp, synthetic construct
  misc_feature 1..20: note = chemically synthesized
  source 1..20: mol_type = other DNA
gctattcaatgtcactgagg

SEQ ID NO: 56445 - DNA, 20 bp, synthetic construct
  misc_feature 1..20: note = chemically synthesized
  source 1..20: mol_type = other DNA
attcaatgtcactgaggaag

SEQ ID NO: 56446 - DNA, 20 bp, synthetic construct
  misc_feature 1..20: note = chemically synthesized
  source 1..20: mol_type = other DNA
caatgtcactgaggaagtag

SEQ ID NO: 56447 - DNA, 20 bp, synthetic construct
  misc_feature 1..20: note = chemically synthesized
  source 1..20: mol_type = other DNA
cactgaggaagtagcagaac

SEQ ID NO: 56448 - DNA, 20 bp, synthetic construct
  misc_feature 1..20: note = chemically synthesized
  source 1..20: mol_type = other DNA
cagaaccagaatcctacatc

SEQ ID NO: 56449 - DNA, 20 bp, synthetic construct
  misc_feature 1..20: note = chemically synthesized
  source 1..20: mol_type = other DNA
agaaccagaatcctacatct

SEQ ID NO: 56450 - DNA, 20 bp, synthetic construct
  misc_feature 1..20: note = chemically synthesized
  source 1..20: mol_type = other DNA
ctacatctaggtcctgcacc

SEQ ID NO: 56451 - DNA, 20 bp, synthetic construct
  misc_feature 1..20: note = chemically synthesized
  source 1..20: mol_type = other DNA
tacatctaggtcctgcaccc

SEQ ID NO: 56452 - DNA, 20 bp, synthetic construct
  misc_feature 1..20: note = chemically synthesized
  source 1..20: mol_type = other DNA
taggtcctgcacccaggctc

SEQ ID NO: 56453 - DNA, 20 bp, synthetic construct
  misc_feature 1..20: note = chemically synthesized
  source 1..20: mol_type = other DNA
tcctgcacccaggctctgga

SEQ ID NO: 56454 - DNA, 20 bp, synthetic construct
  misc_feature 1..20: note = chemically synthesized
  source 1..20: mol_type = other DNA
cttacatctgcaatgaccct

SEQ ID NO: 56455 - DNA, 20 bp, synthetic construct
  misc_feature 1..20: note = chemically synthesized
  source 1..20: mol_type = other DNA
caatgaccctaagatgcaaa

SEQ ID NO: 56456 - DNA, 20 bp, synthetic construct
  misc_feature 1..20: note = chemically synthesized
  source 1..20: mol_type = other DNA
accctaagatgcaaatggta

SEQ ID NO: 56457 - DNA, 20 bp, synthetic construct
  misc_feature 1..20: note = chemically synthesized
  source 1..20: mol_type = other DNA
gtacagccattgttttacaa

SEQ ID NO: 56458 - DNA, 20 bp, synthetic construct
  misc_feature 1..20: note = chemically synthesized
  source 1..20: mol_type = other DNA
cagccattgttttacaaaag

SEQ ID NO: 56459 - DNA, 20 bp, synthetic construct
  misc_feature 1..20: note = chemically synthesized
  source 1..20: mol_type = other DNA
gttttacaaaagaagaaaat

SEQ ID NO: 56460 - DNA, 20 bp, synthetic construct
  misc_feature 1..20: note = chemically synthesized
  source 1..20: mol_type = other DNA
ttttacaaaagaagaaaatg

SEQ ID NO: 56461 - DNA, 20 bp, synthetic construct
  misc_feature 1..20: note = chemically synthesized
  source 1..20: mol_type = other DNA
aaaagaagaaaatgaggcac

SEQ ID NO: 56462 - DNA, 20 bp, synthetic construct
  misc_feature 1..20: note = chemically synthesized
  source 1..20: mol_type = other DNA
agaagaaaatgaggcacaag

SEQ ID NO: 56463 - DNA, 20 bp, synthetic construct
  misc_feature 1..20: note = chemically synthesized
  source 1..20: mol_type = other DNA
aagaaaatgaggcacaagaa

SEQ ID NO: 56464 - DNA, 20 bp, synthetic construct
  misc_feature 1..20: note = chemically synthesized
  source 1..20: mol_type = other DNA
agaaaatgaggcacaagaag

SEQ ID NO: 56465 - DNA, 20 bp, synthetic construct
  misc_feature 1..20: note = chemically synthesized
  source 1..20: mol_type = other DNA
atgaggcacaagaagaggaa

SEQ ID NO: 56466 - DNA, 20 bp, synthetic construct
  misc_feature 1..20: note = chemically synthesized
  source 1..20: mol_type = other DNA
tgaggcacaagaagaggaat

SEQ ID NO: 56467 - DNA, 20 bp, synthetic construct
  misc_feature 1..20: note = chemically synthesized
  source 1..20: mol_type = other DNA
tgggcctgcccacgattatc

SEQ ID NO: 56468 - DNA, 20 bp, synthetic construct
  misc_feature 1..20: note = chemically synthesized
  source 1..20: mol_type = other DNA
gggcctgcccacgattatcc

SEQ ID NO: 56469 - DNA, 20 bp, synthetic construct
  misc_feature 1..20: note = chemically synthesized
  source 1..20: mol_type = other DNA
gcccacgattatccaggaat

SEQ ID NO: 56470 - DNA, 20 bp, synthetic construct
  misc_feature 1..20: note = chemically synthesized
  source 1..20: mol_type = other DNA
cccacgattatccaggaatc

SEQ ID NO: 56471 - DNA, 20 bp, synthetic construct
  misc_feature 1..20: note = chemically synthesized
  source 1..20: mol_type = other DNA
cgattatccaggaatcgggc

SEQ ID NO: 56472 - DNA, 20 bp, synthetic construct
  misc_feature 1..20: note = chemically synthesized
  source 1..20: mol_type = other DNA
atccaggaatcgggccagat

SEQ ID NO: 56473 - DNA, 20 bp, synthetic construct
  misc_feature 1..20: note = chemically synthesized
  source 1..20: mol_type = other DNA
aatcgggccagatcagaatc

SEQ ID NO: 56474 - DNA, 20 bp, synthetic construct
  misc_feature 1..20: note = chemically synthesized
  source 1..20: mol_type = other DNA
tcagaatcaagaatcatgtc

SEQ ID NO: 56475 - DNA, 20 bp, synthetic construct
  misc_feature 1..20: note = chemically synthesized
  source 1..20: mol_type = other DNA
aatcaagaatcatgtcaagc

SEQ ID NO: 56476 - DNA, 20 bp, synthetic construct
  misc_feature 1..20: note = chemically synthesized
  source 1..20: mol_type = other DNA
caagaatcatgtcaagctgg

SEQ ID NO: 56477 - DNA, 20 bp, synthetic construct
  misc_feature 1..20: note = chemically synthesized
  source 1..20: mol_type = other DNA
catgtcaagctggaagccct

SEQ ID NO: 56478 - DNA, 20 bp, synthetic construct
  misc_feature 1..20: note = chemically synthesized
  source 1..20: mol_type = other DNA
tgtcaagctggaagcccttg

SEQ ID NO: 56479 - DNA, 20 bp, synthetic construct
  misc_feature 1..20: note = chemically synthesized
  source 1..20: mol_type = other DNA
gtcaagctggaagcccttgg

SEQ ID NO: 56480 - DNA, 20 bp, synthetic construct
  misc_feature 1..20: note = chemically synthesized
  source 1..20: mol_type = other DNA
tcaagctggaagcccttgga

SEQ ID NO: 56481 - DNA, 20 bp, synthetic construct
  misc_feature 1..20: note = chemically synthesized
  source 1..20: mol_type = other DNA
ttctatctaatcccactatt

SEQ ID NO: 56482 - DNA, 20 bp, synthetic construct
  misc_feature 1..20: note = chemically synthesized
  source 1..20: mol_type = other DNA
tatctaatcccactatttag

SEQ ID NO: 56483 - DNA, 20 bp, synthetic construct
  misc_feature 1..20: note = chemically synthesized
  source 1..20: mol_type = other DNA
taatcccactatttagtggc

SEQ ID NO: 56484 - DNA, 20 bp, synthetic construct
  misc_feature 1..20: note = chemically synthesized
  source 1..20: mol_type = other DNA
aatcccactatttagtggcc

SEQ ID NO: 56485 - DNA, 20 bp, synthetic construct
  misc_feature 1..20: note = chemically synthesized
  source 1..20: mol_type = other DNA
atcccactatttagtggcca

SEQ ID NO: 56486 - DNA, 20 bp, synthetic construct
  misc_feature 1..20: note = chemically synthesized
  source 1..20: mol_type = other DNA
tggccagggaaactgctgca

SEQ ID NO: 56487 - DNA, 20 bp, synthetic construct
  misc_feature 1..20: note = chemically synthesized
  source 1..20: mol_type = other DNA
ccagggaaactgctgcacag

SEQ ID NO: 56488 - DNA, 20 bp, synthetic construct
  misc_feature 1..20: note = chemically synthesized
  source 1..20: mol_type = other DNA
cagggaaactgctgcacaga

SEQ ID NO: 56489 - DNA, 20 bp, synthetic construct
  misc_feature 1..20: note = chemically synthesized
  source 1..20: mol_type = other DNA
agggaaactgctgcacagaa

SEQ ID NO: 56490 - DNA, 20 bp, synthetic construct
  misc_feature 1..20: note = chemically synthesized
  source 1..20: mol_type = other DNA
gggaaatgcatcttgcacaa

SEQ ID NO: 56491 - DNA, 20 bp, synthetic construct
  misc_feature 1..20: note = chemically synthesized
  source 1..20: mol_type = other DNA
tgcatcttgcacaatggcaa

SEQ ID NO: 56492 - DNA, 20 bp, synthetic construct
  misc_feature 1..20: note = chemically synthesized
  source 1..20: mol_type = other DNA
tcttgcacaatggcaacagc

SEQ ID NO: 56493 - DNA, 20 bp, synthetic construct
  misc_feature 1..20: note = chemically synthesized
  source 1..20: mol_type = other DNA
ttgcacaatggcaacagcta

SEQ ID NO: 56494 - DNA, 20 bp, synthetic construct
  misc_feature 1..20: note = chemically synthesized
  source 1..20: mol_type = other DNA
gcacaatggcaacagctaga

SEQ ID NO: 56495 - DNA, 20 bp, synthetic construct
  misc_feature 1..20: note = chemically synthesized
  source 1..20: mol_type = other DNA
atggcaacagctagagagca

SEQ ID NO: 56496 - DNA, 20 bp, synthetic construct
  misc_feature 1..20: note = chemically synthesized
  source 1..20: mol_type = other DNA
ggcaacagctagagagcatg

SEQ ID NO: 56497 - DNA, 20 bp, synthetic construct
  misc_feature 1..20: note = chemically synthesized
  source 1..20: mol_type = other DNA
gcaacagctagagagcatgg

SEQ ID NO: 56498 - DNA, 20 bp, synthetic construct
  misc_feature 1..20: note = chemically synthesized
  source 1..20: mol_type = other DNA
caacagctagagagcatgga

SEQ ID NO: 56499 - DNA, 20 bp, synthetic construct
  misc_feature 1..20: note = chemically synthesized
  source 1..20: mol_type = other DNA
aacagctagagagcatggag

SEQ ID NO: 56500 - DNA, 20 bp, synthetic construct
  misc_feature 1..20: note = chemically synthesized
  source 1..20: mol_type = other DNA
ggggctgtgattaaacctcc

SEQ ID NO: 56501 - DNA, 20 bp, synthetic construct
  misc_feature 1..20: note = chemically synthesized
  source 1..20: mol_type = other DNA
gggctgtgattaaacctcct

SEQ ID NO: 56502 - DNA, 20 bp, synthetic construct
  misc_feature 1..20: note = chemically synthesized
  source 1..20: mol_type = other DNA
gctgtgattaaacctcctgg

SEQ ID NO: 56503 - DNA, 20 bp, synthetic construct
  misc_feature 1..20: note = chemically synthesized
  source 1..20: mol_type = other DNA
tgttcccacccaacactcac

SEQ ID NO: 56504 - DNA, 20 bp, synthetic construct
  misc_feature 1..20: note = chemically synthesized
  source 1..20: mol_type = other DNA
gttcccacccaacactcaca

SEQ ID NO: 56505 - DNA, 20 bp, synthetic construct
  misc_feature 1..20: note = chemically synthesized
  source 1..20: mol_type = other DNA
ccaacactcacaaggatcct

SEQ ID NO: 56506 - DNA, 20 bp, synthetic construct
  misc_feature 1..20: note = chemically synthesized
  source 1..20: mol_type = other DNA
tcacaaggatcctcagccct

SEQ ID NO: 56507 - DNA, 20 bp, synthetic construct
  misc_feature 1..20: note = chemically synthesized
  source 1..20: mol_type = other DNA
cacaaggatcctcagccctt

SEQ ID NO: 56508 - DNA, 20 bp, synthetic construct
  misc_feature 1..20: note = chemically synthesized
  source 1..20: mol_type = other DNA
acaaggatcctcagccctta

SEQ ID NO: 56509 - DNA, 20 bp, synthetic construct
  misc_feature 1..20: note = chemically synthesized
  source 1..20: mol_type = other DNA
gcccttagggtttttttccc

SEQ ID NO: 56510 - DNA, 20 bp, synthetic construct
  misc_feature 1..20: note = chemically synthesized
  source 1..20: mol_type = other DNA
ccttagggtttttttcccaa

SEQ ID NO: 56511 - DNA, 20 bp, synthetic construct
  misc_feature 1..20: note = chemically synthesized
  source 1..20: mol_type = other DNA
agggtttttttcccaagaga

SEQ ID NO: 56512 - DNA, 20 bp, synthetic construct
  misc_feature 1..20: note = chemically synthesized
  source 1..20: mol_type = other DNA
gggtttttttcccaagagac

SEQ ID NO: 56513 - DNA, 20 bp, synthetic construct
  misc_feature 1..20: note = chemically synthesized
  source 1..20: mol_type = other DNA
ggtttttttcccaagagacg

SEQ ID NO: 56514 - DNA, 20 bp, synthetic construct
  misc_feature 1..20: note = chemically synthesized
  source 1..20: mol_type = other DNA
gctgtccccacaatgctctg

SEQ ID NO: 56515 - DNA, 20 bp, synthetic construct
  misc_feature 1..20: note = chemically synthesized
  source 1..20: mol_type = other DNA
cccacaatgctctgtggtcc

SEQ ID NO: 56516 - DNA, 20 bp, synthetic construct
  misc_feature 1..20: note = chemically synthesized
  source 1..20: mol_type = other DNA
tgctctgtggtcccagacac

SEQ ID NO: 56517 - DNA, 20 bp, synthetic construct
  misc_feature 1..20: note = chemically synthesized
  source 1..20: mol_type = other DNA
tgtggtcccagacacaagaa

SEQ ID NO: 56518 - DNA, 20 bp, synthetic construct
  misc_feature 1..20: note = chemically synthesized
  source 1..20: mol_type = other DNA
gtggtcccagacacaagaat

SEQ ID NO: 56519 - DNA, 20 bp, synthetic construct
  misc_feature 1..20: note = chemically synthesized
  source 1..20: mol_type = other DNA
agaataggctgatgctcctg

SEQ ID NO: 56520 - DNA, 20 bp, synthetic construct
  misc_feature 1..20: note = chemically synthesized
  source 1..20: mol_type = other DNA
taggctgatgctcctgcagt

SEQ ID NO: 56521 - DNA, 20 bp, synthetic construct
  misc_feature 1..20: note = chemically synthesized
  source 1..20: mol_type = other DNA
cagtcagcttacctgccgtc

SEQ ID NO: 56522 - DNA, 20 bp, synthetic construct
  misc_feature 1..20: note = chemically synthesized
  source 1..20: mol_type = other DNA
agtcagcttacctgccgtct

SEQ ID NO: 56523 - DNA, 20 bp, synthetic construct
  misc_feature 1..20: note = chemically synthesized
  source 1..20: mol_type = other DNA
cctgccgtctgggtcactaa

SEQ ID NO: 56524 - DNA, 20 bp, synthetic construct
  misc_feature 1..20: note = chemically synthesized
  source 1..20: mol_type = other DNA
ctgggtcactaatggtgtcc

SEQ ID NO: 56525 - DNA, 20 bp, synthetic construct
  misc_feature 1..20: note = chemically synthesized
  source 1..20: mol_type = other DNA
cactaatggtgtcccagttc

SEQ ID NO: 56526 - DNA, 20 bp, synthetic construct
  misc_feature 1..20: note = chemically synthesized
  source 1..20: mol_type = other DNA
actaatggtgtcccagttct

SEQ ID NO: 56527 - DNA, 20 bp, synthetic construct
  misc_feature 1..20: note = chemically synthesized
  source 1..20: mol_type = other DNA
cagttctgggctcttgctgt

SEQ ID NO: 56528 - DNA, 20 bp, synthetic construct
  misc_feature 1..20: note = chemically synthesized
  source 1..20: mol_type = other DNA
agttctgggctcttgctgtc

SEQ ID NO: 56529 - DNA, 20 bp, synthetic construct
  misc_feature 1..20: note = chemically synthesized
  source 1..20: mol_type = other DNA
gttctgggctcttgctgtca

SEQ ID NO: 56530 - DNA, 20 bp, synthetic construct
  misc_feature 1..20: note = chemically synthesized
  source 1..20: mol_type = other DNA
ttctgggctcttgctgtcag

SEQ ID NO: 56531 - DNA, 20 bp, synthetic construct
  misc_feature 1..20: note = chemically synthesized
  source 1..20: mol_type = other DNA
gctcttgctgtcaggggctt

SEQ ID NO: 56532 - DNA, 20 bp, synthetic construct
  misc_feature 1..20: note = chemically synthesized
  source 1..20: mol_type = other DNA
tcttgctgtcaggggcttta

SEQ ID NO: 56533 - DNA, 20 bp, synthetic construct
  misc_feature 1..20: note = chemically synthesized
  source 1..20: mol_type = other DNA
agacgctcatctctccttga

SEQ ID NO: 56534 - DNA, 20 bp, synthetic construct
  misc_feature 1..20: note = chemically synthesized
  source 1..20: mol_type = other DNA
cgctcatctctccttgaaag

SEQ ID NO: 56535 - DNA, 20 bp, synthetic construct
  misc_feature 1..20: note = chemically synthesized
  source 1..20: mol_type = other DNA
gctcatctctccttgaaagc

SEQ ID NO: 56536 - DNA, 20 bp, synthetic construct
  misc_feature 1..20: note = chemically synthesized
  source 1..20: mol_type = other DNA
ctcatctctccttgaaagca

SEQ ID NO: 56537 - DNA, 20 bp, synthetic construct
  misc_feature 1..20: note = chemically synthesized
  source 1..20: mol_type = other DNA
tcatctctccttgaaagcag

SEQ ID NO: 56538 - DNA, 20 bp, synthetic construct
  misc_feature 1..20: note = chemically synthesized
  source 1..20: mol_type = other DNA
caggggtttgtgctgcttta

SEQ ID NO: 56539 - DNA, 20 bp, synthetic construct
  misc_feature 1..20: note = chemically synthesized
  source 1..20: mol_type = other DNA
gggtttgtgctgctttaaag

SEQ ID NO: 56540 - DNA, 20 bp, synthetic construct
  misc_feature 1..20: note = chemically synthesized
  source 1..20: mol_type = other DNA
ttgtgctgctttaaagtaga

SEQ ID NO: 56541 - DNA, 20 bp, synthetic construct
  misc_feature 1..20: note = chemically synthesized
  source 1..20: mol_type = other DNA
gtgctgctttaaagtagatg

SEQ ID NO: 56542 - DNA, 20 bp, synthetic construct
  misc_feature 1..20: note = chemically synthesized
  source 1..20: mol_type = other DNA
tgctgctttaaagtagatgg

SEQ ID NO: 56543 - DNA, 20 bp, synthetic construct
  misc_feature 1..20: note = chemically synthesized
  source 1..20: mol_type = other DNA
ctgctttaaagtagatggag

SEQ ID NO: 56544 - DNA, 20 bp, synthetic construct
  misc_feature 1..20: note = chemically synthesized
  source 1..20: mol_type = other DNA
tgctttaaagtagatggagg

SEQ ID NO: 56545 - DNA, 20 bp, synthetic construct
  misc_feature 1..20: note = chemically synthesized
  source 1..20: mol_type = other DNA
tttaaagtagatggaggagg

SEQ ID NO: 56546 - DNA, 20 bp, synthetic construct
  misc_feature 1..20: note = chemically synthesized
  source 1..20: mol_type = other DNA
ttaaagtagatggaggaggt

SEQ ID NO: 56547 - DNA, 20 bp, synthetic construct
  misc_feature 1..20: note = chemically synthesized
  source 1..20: mol_type = other DNA
aagtagatggaggaggtggg

SEQ ID NO: 56548 - DNA, 20 bp, synthetic construct
  misc_feature 1..20: note = chemically synthesized
  source 1..20: mol_type = other DNA
tggaggaggtgggaagtgaa

SEQ ID NO: 56549 - DNA, 20 bp, synthetic construct
  misc_feature 1..20: note = chemically synthesized
  source 1..20: mol_type = other DNA
aaagacacctcttttaactt

SEQ ID NO: 56550 - DNA, 20 bp, synthetic construct
  misc_feature 1..20: note = chemically synthesized
  source 1..20: mol_type = other DNA
acacctcttttaacttcaga

SEQ ID NO: 56551 - DNA, 20 bp, synthetic construct
  misc_feature 1..20: note = chemically synthesized
  source 1..20: mol_type = other DNA
cttttaacttcagatagacc

SEQ ID NO: 56552 - DNA, 20 bp, synthetic construct
  misc_feature 1..20: note = chemically synthesized
  source 1..20: mol_type = other DNA
ttttaacttcagatagacct

SEQ ID NO: 56553 - DNA, 20 bp, synthetic construct
  misc_feature 1..20: note = chemically synthesized
  source 1..20: mol_type = other DNA
aatctgactctgtcactttc

SEQ ID NO: 56554 - DNA, 20 bp, synthetic construct
  misc_feature 1..20: note = chemically synthesized
  source 1..20: mol_type = other DNA
atctgactctgtcactttcc

SEQ ID NO: 56555 - DNA, 20 bp, synthetic construct
  misc_feature 1..20: note = chemically synthesized
  source 1..20: mol_type = other DNA
ctgtcactttccaggtgtat

SEQ ID NO: 56556 - DNA, 20 bp, synthetic construct
  misc_feature 1..20: note = chemically synthesized
  source 1..20: mol_type = other DNA
cactttccaggtgtatgagc

SEQ ID NO: 56557 - DNA, 20 bp, synthetic construct
  misc_feature 1..20: note = chemically synthesized
  source 1..20: mol_type = other DNA
actttccaggtgtatgagcc

SEQ ID NO: 56558 - DNA, 20 bp, synthetic construct
  misc_feature 1..20: note = chemically synthesized
  source 1..20: mol_type = other DNA
ccaggtgtatgagccaggac

SEQ ID NO: 56559 - DNA, 20 bp, synthetic construct
  misc_feature 1..20: note = chemically synthesized
  source 1..20: mol_type = other DNA
ggacaagtcattcatctccc

SEQ ID NO: 56560 - DNA, 20 bp, synthetic construct
  misc_feature 1..20: note = chemically synthesized
  source 1..20: mol_type = other DNA
ctcattttgcctcatacata

SEQ ID NO: 56561 - DNA, 20 bp, synthetic construct
  misc_feature 1..20: note = chemically synthesized
  source 1..20: mol_type = other DNA
ataaagtgatgtttatgtat

SEQ ID NO: 56562 - DNA, 20 bp, synthetic construct
  misc_feature 1..20: note = chemically synthesized
  source 1..20: mol_type = other DNA
gatgtttatgtatgagaatt

SEQ ID NO: 56563 - DNA, 20 bp, synthetic construct
  misc_feature 1..20: note = chemically synthesized
  source 1..20: mol_type = other DNA
gtatgagaatttagtgaaat

SEQ ID NO: 56564 - DNA, 20 bp, synthetic construct
  misc_feature 1..20: note = chemically synthesized
  source 1..20: mol_type = other DNA
aacaccaaaccttacatcaa

SEQ ID NO: 56565 - DNA, 20 bp, synthetic construct
  misc_feature 1..20: note = chemically synthesized
  source 1..20: mol_type = other DNA
acaccaaaccttacatcaaa

SEQ ID NO: 56566 - DNA, 20 bp, synthetic construct
  misc_feature 1..20: note = chemically synthesized
  source 1..20: mol_type = other DNA
accttacatcaaaaggatct

SEQ ID NO: 56567 - DNA, 20 bp, synthetic construct
  misc_feature 1..20: note = chemically synthesized
  source 1..20: mol_type = other DNA
cttacatcaaaaggatctga

SEQ ID NO: 56568 - DNA, 20 bp, synthetic construct
  misc_feature 1..20: note = chemically synthesized
  source 1..20: mol_type = other DNA
ttacatcaaaaggatctgag

SEQ ID NO: 56569 - DNA, 20 bp, synthetic construct
  misc_feature 1..20: note = chemically synthesized
  source 1..20: mol_type = other DNA
tacatcaaaaggatctgaga

SEQ ID NO: 56570 - DNA, 20 bp, synthetic construct
  misc_feature 1..20: note = chemically synthesized
  source 1..20: mol_type = other DNA
tctgagagggcaactctttt

SEQ ID NO: 56571 - DNA, 20 bp, synthetic construct
  misc_feature 1..20: note = chemically synthesized
  source 1..20: mol_type = other DNA
ctgagagggcaactcttttg

SEQ ID NO: 56572 - DNA, 20 bp, synthetic construct
  misc_feature 1..20: note = chemically synthesized
  source 1..20: mol_type = other DNA
tgagagggcaactcttttga

SEQ ID NO: 56573 - DNA, 20 bp, synthetic construct
  misc_feature 1..20: note = chemically synthesized
  source 1..20: mol_type = other DNA
agagggcaactcttttgagg

SEQ ID NO: 56574 - DNA, 20 bp, synthetic construct
  misc_feature 1..20: note = chemically synthesized
  source 1..20: mol_type = other DNA
gagggcaactcttttgaggg

SEQ ID NO: 56575 - DNA, 20 bp, synthetic construct
  misc_feature 1..20: note = chemically synthesized
  source 1..20: mol_type = other DNA
agggcaactcttttgaggga

SEQ ID NO: 56576 - DNA, 20 bp, synthetic construct
  misc_feature 1..20: note = chemically synthesized
  source 1..20: mol_type = other DNA
gggcaactcttttgagggag

SEQ ID NO: 56577 - DNA, 20 bp, synthetic construct
  misc_feature 1..20: note = chemically synthesized
  source 1..20: mol_type = other DNA
aactcttttgagggaggggt

SEQ ID NO: 56578 - DNA, 20 bp, synthetic construct
  misc_feature 1..20: note = chemically synthesized
  source 1..20: mol_type = other DNA
tcttttgagggaggggttgg

SEQ ID NO: 56579 - DNA, 20 bp, synthetic construct
  misc_feature 1..20: note = chemically synthesized
  source 1..20: mol_type = other DNA
cttttgagggaggggttggc

SEQ ID NO: 56580 - DNA, 20 bp, synthetic construct
  misc_feature 1..20: note = chemically synthesized
  source 1..20: mol_type = other DNA
tggcaggtgttgcaaattca

SEQ ID NO: 56581 - DNA, 20 bp, synthetic construct
  misc_feature 1..20: note = chemically synthesized
  source 1..20: mol_type = other DNA
ggcaggtgttgcaaattcaa

SEQ ID NO: 56582 - DNA, 20 bp, synthetic construct
  misc_feature 1..20: note = chemically synthesized
  source 1..20: mol_type = other DNA
tgttgcaaattcaaaggctt

SEQ ID NO: 56583 - DNA, 20 bp, synthetic construct
  misc_feature 1..20: note = chemically synthesized
  source 1..20: mol_type = other DNA
gttgcaaattcaaaggcttc

SEQ ID NO: 56584 - DNA, 20 bp, synthetic construct
  misc_feature 1..20: note = chemically synthesized
  source 1..20: mol_type = other DNA
aattcaaaggcttcaggtga

SEQ ID NO: 56585 - DNA, 20 bp, synthetic construct
  misc_feature 1..20: note = chemically synthesized
  source 1..20: mol_type = other DNA
attcaaaggcttcaggtgat

SEQ ID NO: 56586 - DNA, 20 bp, synthetic construct
  misc_feature 1..20: note = chemically synthesized
  source 1..20: mol_type = other DNA
aaaggcttcaggtgataggc

SEQ ID NO: 56587 - DNA, 20 bp, synthetic construct
  misc_feature 1..20: note = chemically synthesized
  source 1..20: mol_type = other DNA
gcttcaggtgataggccagt

SEQ ID NO: 56588 - DNA, 20 bp, synthetic construct
  misc_feature 1..20: note = chemically synthesized
  source 1..20: mol_type = other DNA
cttcaggtgataggccagtg

SEQ ID NO: 56589 - DNA, 20 bp, synthetic construct
  misc_feature 1..20: note = chemically synthesized
  source 1..20: mol_type = other DNA
aggaatacatgtttcatacc

SEQ ID NO: 56590 - DNA, 20 bp, synthetic construct
  misc_feature 1..20: note = chemically synthesized
  source 1..20: mol_type = other DNA
ggaatacatgtttcataccc

SEQ ID NO: 56591 - DNA, 20 bp, synthetic construct
  misc_feature 1..20: note = chemically synthesized
  source 1..20: mol_type = other DNA
gaatacatgtttcatacccg

SEQ ID NO: 56592 - DNA, 20 bp, synthetic construct
  misc_feature 1..20: note = chemically synthesized
  source 1..20: mol_type = other DNA
catgtttcatacccggggct

SEQ ID NO: 56593 - DNA, 20 bp, synthetic construct
  misc_feature 1..20: note = chemically synthesized
  source 1..20: mol_type = other DNA
catacccggggctgagacaa

SEQ ID NO: 56594 - DNA, 20 bp, synthetic construct
  misc_feature 1..20: note = chemically synthesized
  source 1..20: mol_type = other DNA
atacccggggctgagacaat

SEQ ID NO: 56595 - DNA, 20 bp, synthetic construct
  misc_feature 1..20: note = chemically synthesized
  source 1..20: mol_type = other DNA
tacccggggctgagacaata

SEQ ID NO: 56596 - DNA, 20 bp, synthetic construct
  misc_feature 1..20: note = chemically synthesized
  source 1..20: mol_type = other DNA
cccggggctgagacaatagg

SEQ ID NO: 56597 - DNA, 20 bp, synthetic construct
  misc_feature 1..20: note = chemically synthesized
  source 1..20: mol_type = other DNA
ggggctgagacaatagggag

SEQ ID NO: 56598 - DNA, 20 bp, synthetic construct
  misc_feature 1..20: note = chemically synthesized
  source 1..20: mol_type = other DNA
gctgagacaatagggagtgg

SEQ ID NO: 56599 - DNA, 20 bp, synthetic construct
  misc_feature 1..20: note = chemically synthesized
  source 1..20: mol_type = other DNA
ctgagacaatagggagtggt

SEQ ID NO: 56600 - DNA, 20 bp, synthetic construct
  misc_feature 1..20: note = chemically synthesized
  source 1..20: mol_type = other DNA
tgagacaatagggagtggtg

SEQ ID NO: 56601 - DNA, 20 bp, synthetic construct
  misc_feature 1..20: note = chemically synthesized
  source 1..20: mol_type = other DNA
atagggagtggtggggcctg

SEQ ID NO: 56602 - DNA, 20 bp, synthetic construct
  misc_feature 1..20: note = chemically synthesized
  source 1..20: mol_type = other DNA
ggtggggcctgtggctgaac

SEQ ID NO: 56603 - DNA, 20 bp, synthetic construct
  misc_feature 1..20: note = chemically synthesized
  source 1..20: mol_type = other DNA
gggcctgtggctgaaccagc

SEQ ID NO: 56604 - DNA, 20 bp, synthetic construct
  misc_feature 1..20: note = chemically synthesized
  source 1..20: mol_type = other DNA
gcctgtggctgaaccagcga

SEQ ID NO: 56605 - DNA, 20 bp, synthetic construct
  misc_feature 1..20: note = chemically synthesized
  source 1..20: mol_type = other DNA
tgtggctgaaccagcgagag

SEQ ID NO: 56606 - DNA, 20 bp, synthetic construct
  misc_feature 1..20: note = chemically synthesized
  source 1..20: mol_type = other DNA
gtggctgaaccagcgagagc

SEQ ID NO: 56607 - DNA, 20 bp, synthetic construct
  misc_feature 1..20: note = chemically synthesized
  source 1..20: mol_type = other DNA
cagcgagagcaggctctgcc

SEQ ID NO: 56608 - DNA, 20 bp, synthetic construct
  misc_feature 1..20: note = chemically synthesized
  source 1..20: mol_type = other DNA
gagcaggctctgccgagcaa

SEQ ID NO: 56609 - DNA, 20 bp, synthetic construct
  misc_feature 1..20: note = chemically synthesized
  source 1..20: mol_type = other DNA
gctctgccgagcaatggtca

SEQ ID NO: 56610 - DNA, 20 bp, synthetic construct
  misc_feature 1..20: note = chemically synthesized
  source 1..20: mol_type = other DNA
gtcaaagtcaacgtcatcca

SEQ ID NO: 56611 - DNA, 20 bp, synthetic construct
  misc_feature 1..20: note = chemically synthesized
  source 1..20: mol_type = other DNA
caacgtcatccacagcaaca

SEQ ID NO: 56612 - DNA, 20 bp, synthetic construct
  misc_feature 1..20: note = chemically synthesized
  source 1..20: mol_type = other DNA
acagaacctgccctgcccca

SEQ ID NO: 56613 - DNA, 20 bp, synthetic construct
  misc_feature 1..20: note = chemically synthesized
  source 1..20: mol_type = other DNA
ccacagtgatccttctactc

SEQ ID NO: 56614 - DNA, 20 bp, synthetic construct
  misc_feature 1..20: note = chemically synthesized
  source 1..20: mol_type = other DNA
ccttctactccagatatgcc

SEQ ID NO: 56615 - DNA, 20 bp, synthetic construct
  misc_feature 1..20: note = chemically synthesized
  source 1..20: mol_type = other DNA
cttctactccagatatgccc

SEQ ID NO: 56616 - DNA, 20 bp, synthetic construct
  misc_feature 1..20: note = chemically synthesized
  source 1..20: mol_type = other DNA
ctccagatatgcccaggctt

SEQ ID NO: 56617 - DNA, 20 bp, synthetic construct
  misc_feature 1..20: note = chemically synthesized
  source 1..20: mol_type = other DNA
atgcccaggcttcggaccac

SEQ ID NO: 56618 - DNA, 20 bp, synthetic construct
  misc_feature 1..20: note = chemically synthesized
  source 1..20: mol_type = other DNA
ggcttcggaccaccagcctg

SEQ ID NO: 56619 - DNA, 20 bp, synthetic construct
  misc_feature 1..20: note = chemically synthesized
  source 1..20: mol_type = other DNA
accaccagcctgcagccccc

SEQ ID NO: 56620 - DNA, 20 bp, synthetic construct
  misc_feature 1..20: note = chemically synthesized
  source 1..20: mol_type = other DNA
ccaccagcctgcagccccct

SEQ ID NO: 56621 - DNA, 20 bp, synthetic construct
  misc_feature 1..20: note = chemically synthesized
  source 1..20: mol_type = other DNA
ccagcctgcagccccctagg

SEQ ID NO: 56622 - DNA, 20 bp, synthetic construct
  misc_feature 1..20: note = chemically synthesized
  source 1..20: mol_type = other DNA
ggtagaacctgccgtcttca

SEQ ID NO: 56623 - DNA, 20 bp, synthetic construct
  misc_feature 1..20: note = chemically synthesized
  source 1..20: mol_type = other DNA
gaacctgccgtcttcacaga

SEQ ID NO: 56624 - DNA, 20 bp, synthetic construct
  misc_feature 1..20: note = chemically synthesized
  source 1..20: mol_type = other DNA
aacctgccgtcttcacagat

SEQ ID NO: 56625 - DNA, 20 bp, synthetic construct
  misc_feature 1..20: note = chemically synthesized
  source 1..20: mol_type = other DNA
tcttcacagatgggaaaact

SEQ ID NO: 56626 - DNA, 20 bp, synthetic construct
  misc_feature 1..20: note = chemically synthesized
  source 1..20: mol_type = other DNA
cttcacagatgggaaaactg

SEQ ID NO: 56627 - DNA, 20 bp, synthetic construct
  misc_feature 1..20: note = chemically synthesized
  source 1..20: mol_type = other DNA
agatgggaaaactgaggtcc

SEQ ID NO: 56628 - DNA, 20 bp, synthetic construct
  misc_feature 1..20: note = chemically synthesized
  source 1..20: mol_type = other DNA
ggaaaactgaggtcctagct

SEQ ID NO: 56629 - DNA, 20 bp, synthetic construct
  misc_feature 1..20: note = chemically synthesized
  source 1..20: mol_type = other DNA
gaaaactgaggtcctagctg

SEQ ID NO: 56630 - DNA, 20 bp, synthetic construct
  misc_feature 1..20: note = chemically synthesized
  source 1..20: mol_type = other DNA
aaactgaggtcctagctgag

SEQ ID NO: 56631 - DNA, 20 bp, synthetic construct
  misc_feature 1..20: note = chemically synthesized
  source 1..20: mol_type = other DNA
ctagctgaggagaatatgcc

SEQ ID NO: 56632 - DNA, 20 bp, synthetic construct
  misc_feature 1..20: note = chemically synthesized
  source 1..20: mol_type = other DNA
gctgaggagaatatgcccgg

SEQ ID NO: 56633 - DNA, 20 bp, synthetic construct
  misc_feature 1..20: note = chemically synthesized
  source 1..20: mol_type = other DNA
gcagccacattgttaactac

SEQ ID NO: 56634 - DNA, 20 bp, synthetic construct
  misc_feature 1..20: note = chemically synthesized
  source 1..20: mol_type = other DNA
catcatcttaacaaaataca

SEQ ID NO: 56635 - DNA, 20 bp, synthetic construct
  misc_feature 1..20: note = chemically synthesized
  source 1..20: mol_type = other DNA
cttaacaaaatacaaagaaa

SEQ ID NO: 56636 - DNA, 20 bp, synthetic construct
  misc_feature 1..20: note = chemically synthesized
  source 1..20: mol_type = other DNA
ttaacaaaatacaaagaaaa

SEQ ID NO: 56637 - DNA, 20 bp, synthetic construct
  misc_feature 1..20: note = chemically synthesized
  source 1..20: mol_type = other DNA
gaaaaaggtgtccttgaatt

SEQ ID NO: 56638 - DNA, 20 bp, synthetic construct
  misc_feature 1..20: note = chemically synthesized
  source 1..20: mol_type = other DNA
aaaaaggtgtccttgaattt

SEQ ID NO: 56639 - DNA, 20 bp, synthetic construct
  misc_feature 1..20: note = chemically synthesized
  source 1..20: mol_type = other DNA
gaatttgggaaatgaaaaac

SEQ ID NO: 56640 - DNA, 20 bp, synthetic construct
  misc_feature 1..20: note = chemically synthesized
  source 1..20: mol_type = other DNA
atttgggaaatgaaaaactg

SEQ ID NO: 56641 - DNA, 20 bp, synthetic construct
  misc_feature 1..20: note = chemically synthesized
  source 1..20: mol_type = other DNA
aatgaaaaactggagaaaaa

SEQ ID NO: 56642 - DNA, 20 bp, synthetic construct
  misc_feature 1..20: note = chemically synthesized
  source 1..20: mol_type = other DNA
aaaaactggagaaaaaaagc

SEQ ID NO: 56643 - DNA, 20 bp, synthetic construct
  misc_feature 1..20: note = chemically synthesized
  source 1..20: mol_type = other DNA
agctggaaataacaaatatt

SEQ ID NO: 56644 - DNA, 20 bp, synthetic construct
  misc_feature 1..20: note = chemically synthesized
  source 1..20: mol_type = other DNA
ttgagattcttcaaccccct

SEQ ID NO: 56645 - DNA, 20 bp, synthetic construct
  misc_feature 1..20: note = chemically synthesized
  source 1..20: mol_type = other DNA
caacccccttggacttttaa

SEQ ID NO: 56646 - DNA, 20 bp, synthetic construct
  misc_feature 1..20: note = chemically synthesized
  source 1..20: mol_type = other DNA
ttaaaagtttccttccaata

SEQ ID NO: 56647 - DNA, 20 bp, synthetic construct
  misc_feature 1..20: note = chemically synthesized
  source 1..20: mol_type = other DNA
ttccaataaagcaacaaatg

SEQ ID NO: 56648 - DNA, 20 bp, synthetic construct
  misc_feature 1..20: note = chemically synthesized
  source 1..20: mol_type = other DNA
aaagcaacaaatgaagtgca

SEQ ID NO: 56649 - DNA, 20 bp, synthetic construct
  misc_feature 1..20: note = chemically synthesized
  source 1..20: mol_type = other DNA
caacaaatgaagtgcaaagc

SEQ ID NO: 56650 - DNA, 20 bp, synthetic construct
  misc_feature 1..20: note = chemically synthesized
  source 1..20: mol_type = other DNA
tctctccaccacctttctcc

SEQ ID NO: 56651 - DNA, 20 bp, synthetic construct
  misc_feature 1..20: note = chemically synthesized
  source 1..20: mol_type = other DNA
ctcctggccctcgtgcctct

SEQ ID NO: 56652 - DNA, 20 bp, synthetic construct
  misc_feature 1..20: note = chemically synthesized
  source 1..20: mol_type = other DNA
gtgcctctaagtaatccaaa

SEQ ID NO: 56653 - DNA, 20 bp, synthetic construct
  misc_feature 1..20: note = chemically synthesized
  source 1..20: mol_type = other DNA
tctaagtaatccaaatggaa

SEQ ID NO: 56654 - DNA, 20 bp, synthetic construct
  misc_feature 1..20: note = chemically synthesized
  source 1..20: mol_type = other DNA
tacatgtttgtatttttctt

SEQ ID NO: 56655 - DNA, 20 bp, synthetic construct
  misc_feature 1..20: note = chemically synthesized
  source 1..20: mol_type = other DNA
tgtttgtatttttcttcagc

SEQ ID NO: 56656 - DNA, 20 bp, synthetic construct
  misc_feature 1..20: note = chemically synthesized
  source 1..20: mol_type = other DNA
tgtatttttcttcagctagc

SEQ ID NO: 56657 - DNA, 20 bp, synthetic construct
  misc_feature 1..20: note = chemically synthesized
  source 1..20: mol_type = other DNA
cttcagctagctagtgttgt

SEQ ID NO: 56658 - DNA, 20 bp, synthetic construct
  misc_feature 1..20: note = chemically synthesized
  source 1..20: mol_type = other DNA
agctagtgttgttagaacta

SEQ ID NO: 56659 - DNA, 20 bp, synthetic construct
  misc_feature 1..20: note = chemically synthesized
  source 1..20: mol_type = other DNA
agtgttgttagaactaaaga

SEQ ID NO: 56660 - DNA, 20 bp, synthetic construct
  misc_feature 1..20: note = chemically synthesized
  source 1..20: mol_type = other DNA
actaaagacggtgctaaaat

SEQ ID NO: 56661 - DNA, 20 bp, synthetic construct
  misc_feature 1..20: note = chemically synthesized
  source 1..20: mol_type = other DNA
cttcccaactgaactttgtg

SEQ ID NO: 56662 - DNA, 20 bp, synthetic construct
  misc_feature 1..20: note = chemically synthesized
  source 1..20: mol_type = other DNA
gaactttgtgcagtccttca

SEQ ID NO: 56663 - DNA, 20 bp, synthetic construct
  misc_feature 1..20: note = chemically synthesized
  source 1..20: mol_type = other DNA
gtgcagtccttcatggctta

SEQ ID NO: 56664 - DNA, 20 bp, synthetic construct
  misc_feature 1..20: note = chemically synthesized
  source 1..20: mol_type = other DNA
tggaaattcccccatcatta

SEQ ID NO: 56665 - DNA, 20 bp, synthetic construct
  misc_feature 1..20: note = chemically synthesized
  source 1..20: mol_type = other DNA
ggaaattcccccatcattac

SEQ ID NO: 56666 - DNA, 20 bp, synthetic construct
  misc_feature 1..20: note = chemically synthesized
  source 1..20: mol_type = other DNA
gaaattcccccatcattaca

SEQ ID NO: 56667 - DNA, 20 bp, synthetic construct
  misc_feature 1..20: note = chemically synthesized
  source 1..20: mol_type = other DNA
tcccccatcattacagggct

SEQ ID NO: 56668 - DNA, 20 bp, synthetic construct
  misc_feature 1..20: note = chemically synthesized
  source 1..20: mol_type = other DNA
cccatcattacagggctcag

SEQ ID NO: 56669 - DNA, 20 bp, synthetic construct
  misc_feature 1..20: note = chemically synthesized
  source 1..20: mol_type = other DNA
tcattacagggctcagtggt

SEQ ID NO: 56670 - DNA, 20 bp, synthetic construct
  misc_feature 1..20: note = chemically synthesized
  source 1..20: mol_type = other DNA
cattacagggctcagtggtc

SEQ ID NO: 56671 - DNA, 20 bp, synthetic construct
  misc_feature 1..20: note = chemically synthesized
  source 1..20: mol_type = other DNA
ttacagggctcagtggtcag

SEQ ID NO: 56672 - DNA, 20 bp, synthetic construct
  misc_feature 1..20: note = chemically synthesized
  source 1..20: mol_type = other DNA
tacagggctcagtggtcagg

SEQ ID NO: 56673 - DNA, 20 bp, synthetic construct
  misc_feature 1..20: note = chemically synthesized
  source 1..20: mol_type = other DNA
acagggctcagtggtcagga

SEQ ID NO: 56674 - DNA, 20 bp, synthetic construct
  misc_feature 1..20: note = chemically synthesized
  source 1..20: mol_type = other DNA
agggctcagtggtcaggagg

SEQ ID NO: 56675 - DNA, 20 bp, synthetic construct
  misc_feature 1..20: note = chemically synthesized
  source 1..20: mol_type = other DNA
ctcagtggtcaggagggagt

SEQ ID NO: 56676 - DNA, 20 bp, synthetic construct
  misc_feature 1..20: note = chemically synthesized
  source 1..20: mol_type = other DNA
tcagtggtcaggagggagtt

SEQ ID NO: 56677 - DNA, 20 bp, synthetic construct
  misc_feature 1..20: note = chemically synthesized
  source 1..20: mol_type = other DNA
aggagggagttgggcctctg

SEQ ID NO: 56678 - DNA, 20 bp, synthetic construct
  misc_feature 1..20: note = chemically synthesized
  source 1..20: mol_type = other DNA
ggagggagttgggcctctgc

SEQ ID NO: 56679 - DNA, 20 bp, synthetic construct
  misc_feature 1..20: note = chemically synthesized
  source 1..20: mol_type = other DNA
gagggagttgggcctctgca

SEQ ID NO: 56680 - DNA, 20 bp, synthetic construct
  misc_feature 1..20: note = chemically synthesized
  source 1..20: mol_type = other DNA
ggagttgggcctctgcaggg

SEQ ID NO: 56681 - DNA, 20 bp, synthetic construct
  misc_feature 1..20: note = chemically synthesized
  source 1..20: mol_type = other DNA
gagttgggcctctgcagggt

SEQ ID NO: 56682 - DNA, 20 bp, synthetic construct
  misc_feature 1..20: note = chemically synthesized
  source 1..20: mol_type = other DNA
agttgggcctctgcagggtg

SEQ ID NO: 56683 - DNA, 20 bp, synthetic construct
  misc_feature 1..20: note = chemically synthesized
  source 1..20: mol_type = other DNA
gtggggacactaaatatgct

SEQ ID NO: 56684 - DNA, 20 bp, synthetic construct
  misc_feature 1..20: note = chemically synthesized
  source 1..20: mol_type = other DNA
gggacactaaatatgctgag

SEQ ID NO: 56685 - DNA, 20 bp, synthetic construct
  misc_feature 1..20: note = chemically synthesized
  source 1..20: mol_type = other DNA
ctaaatatgctgagtggcct

SEQ ID NO: 56686 - DNA, 20 bp, synthetic construct
  misc_feature 1..20: note = chemically synthesized
  source 1..20: mol_type = other DNA
taaatatgctgagtggcctc

SEQ ID NO: 56687 - DNA, 20 bp, synthetic construct
  misc_feature 1..20: note = chemically synthesized
  source 1..20: mol_type = other DNA
aaatatgctgagtggcctca

SEQ ID NO: 56688 - DNA, 20 bp, synthetic construct
  misc_feature 1..20: note = chemically synthesized
  source 1..20: mol_type = other DNA
atgctgagtggcctcagggc

SEQ ID NO: 56689 - DNA, 20 bp, synthetic construct
  misc_feature 1..20: note = chemically synthesized
  source 1..20: mol_type = other DNA
gctgagtggcctcagggcca

SEQ ID NO: 56690 - DNA, 20 bp, synthetic construct
  misc_feature 1..20: note = chemically synthesized
  source 1..20: mol_type = other DNA
ctgagtggcctcagggccag

SEQ ID NO: 56691 - DNA, 20 bp, synthetic construct
  misc_feature 1..20: note = chemically synthesized
  source 1..20: mol_type = other DNA
ggcctcagggccagaggttg

SEQ ID NO: 56692 - DNA, 20 bp, synthetic construct
  misc_feature 1..20: note = chemically synthesized
  source 1..20: mol_type = other DNA
gggccagaggttgtggcttc

SEQ ID NO: 56693 - DNA, 20 bp, synthetic construct
  misc_feature 1..20: note = chemically synthesized
  source 1..20: mol_type = other DNA
gaggttgtggcttctagccc

SEQ ID NO: 56694 - DNA, 20 bp, synthetic construct
  misc_feature 1..20: note = chemically synthesized
  source 1..20: mol_type = other DNA
gttgtggcttctagccctgg

SEQ ID NO: 56695 - DNA, 20 bp, synthetic construct
  misc_feature 1..20: note = chemically synthesized
  source 1..20: mol_type = other DNA
ttgtggcttctagccctggc

SEQ ID NO: 56696 - DNA, 20 bp, synthetic construct
  misc_feature 1..20: note = chemically synthesized
  source 1..20: mol_type = other DNA
tgtggcttctagccctggca

SEQ ID NO: 56697 - DNA, 20 bp, synthetic construct
  misc_feature 1..20: note = chemically synthesized
  source 1..20: mol_type = other DNA
cagggccatcactatccact

SEQ ID NO: 56698 - DNA, 20 bp, synthetic construct
  misc_feature 1..20: note = chemically synthesized
  source 1..20: mol_type = other DNA
atcactatccacttggcctt

SEQ ID NO: 56699 - DNA, 20 bp, synthetic construct
  misc_feature 1..20: note = chemically synthesized
  source 1..20: mol_type = other DNA
ctatccacttggcctttagc

SEQ ID NO: 56700 - DNA, 20 bp, synthetic construct
  misc_feature 1..20: note = chemically synthesized
  source 1..20: mol_type = other DNA
ggcctttagcaagaatcctc

SEQ ID NO: 56701 - DNA, 20 bp, synthetic construct
  misc_feature 1..20: note = chemically synthesized
  source 1..20: mol_type = other DNA
tagcaagaatcctctggtcc

SEQ ID NO: 56702 - DNA, 20 bp, synthetic construct
  misc_feature 1..20: note = chemically synthesized
  source 1..20: mol_type = other DNA
agcaagaatcctctggtcct

SEQ ID NO: 56703 - DNA, 20 bp, synthetic construct
  misc_feature 1..20: note = chemically synthesized
  source 1..20: mol_type = other DNA
gcaagaatcctctggtcctg

SEQ ID NO: 56704 - DNA, 20 bp, synthetic construct
  misc_feature 1..20: note = chemically synthesized
  source 1..20: mol_type = other DNA
tcctggggcctcactctccc

SEQ ID NO: 56705 - DNA, 20 bp, synthetic construct
  misc_feature 1..20: note = chemically synthesized
  source 1..20: mol_type = other DNA
tcactctccccagttgtgca

SEQ ID NO: 56706 - DNA, 20 bp, synthetic construct
  misc_feature 1..20: note = chemically synthesized
  source 1..20: mol_type = other DNA
ctctccccagttgtgcaaag

SEQ ID NO: 56707 - DNA, 20 bp, synthetic construct
  misc_feature 1..20: note = chemically synthesized
  source 1..20: mol_type = other DNA
tctccccagttgtgcaaagt

SEQ ID NO: 56708 - DNA, 20 bp, synthetic construct
  misc_feature 1..20: note = chemically synthesized
  source 1..20: mol_type = other DNA
ctccccagttgtgcaaagtg

SEQ ID NO: 56709 - DNA, 20 bp, synthetic construct
  misc_feature 1..20: note = chemically synthesized
  source 1..20: mol_type = other DNA
ccagttgtgcaaagtggggc

SEQ ID NO: 56710 - DNA, 20 bp, synthetic construct
  misc_feature 1..20: note = chemically synthesized
  source 1..20: mol_type = other DNA
cagttgtgcaaagtggggct

SEQ ID NO: 56711 - DNA, 20 bp, synthetic construct
  misc_feature 1..20: note = chemically synthesized
  source 1..20: mol_type = other DNA
gttgtgcaaagtggggctgg

SEQ ID NO: 56712 - DNA, 20 bp, synthetic construct
  misc_feature 1..20: note = chemically synthesized
  source 1..20: mol_type = other DNA
gtgcaaagtggggctgggag

SEQ ID NO: 56713 - DNA, 20 bp, synthetic construct
  misc_feature 1..20: note = chemically synthesized
  source 1..20: mol_type = other DNA
gggctgggagaagacttcac

SEQ ID NO: 56714 - DNA, 20 bp, synthetic construct
  misc_feature 1..20: note = chemically synthesized
  source 1..20: mol_type = other DNA
ggctgggagaagacttcact

SEQ ID NO: 56715 - DNA, 20 bp, synthetic construct
  misc_feature 1..20: note = chemically synthesized
  source 1..20: mol_type = other DNA
gctgggagaagacttcactg

SEQ ID NO: 56716 - DNA, 20 bp, synthetic construct
  misc_feature 1..20: note = chemically synthesized
  source 1..20: mol_type = other DNA
gggccctctgtacactaaca

SEQ ID NO: 56717 - DNA, 20 bp, synthetic construct
  misc_feature 1..20: note = chemically synthesized
  source 1..20: mol_type = other DNA
ggccctctgtacactaacat

SEQ ID NO: 56718 - DNA, 20 bp, synthetic construct
  misc_feature 1..20: note = chemically synthesized
  source 1..20: mol_type = other DNA
tgtacactaacataggtttt

SEQ ID NO: 56719 - DNA, 20 bp, synthetic construct
  misc_feature 1..20: note = chemically synthesized
  source 1..20: mol_type = other DNA
gtacactaacataggttttt

SEQ ID NO: 56720 - DNA, 20 bp, synthetic construct
  misc_feature 1..20: note = chemically synthesized
  source 1..20: mol_type = other DNA
taggtttttgggtttttttt

SEQ ID NO: 56721 - DNA, 20 bp, synthetic construct
  misc_feature 1..20: note = chemically synthesized
  source 1..20: mol_type = other DNA
tttttgggttttttttgaga

SEQ ID NO: 56722 - DNA, 20 bp, synthetic construct
  misc_feature 1..20: note = chemically synthesized
  source 1..20: mol_type = other DNA
tttgggttttttttgagaca

SEQ ID NO: 56723 - DNA, 20 bp, synthetic construct
  misc_feature 1..20: note = chemically synthesized
  source 1..20: mol_type = other DNA
cagagtctcgctttatctgc

SEQ ID NO: 56724 - DNA, 20 bp, synthetic construct
  misc_feature 1..20: note = chemically synthesized
  source 1..20: mol_type = other DNA
agagtctcgctttatctgcc

SEQ ID NO: 56725 - DNA, 20 bp, synthetic construct
  misc_feature 1..20: note = chemically synthesized
  source 1..20: mol_type = other DNA
gagtctcgctttatctgcca

SEQ ID NO: 56726 - DNA, 20 bp, synthetic construct
  misc_feature 1..20: note = chemically synthesized
  source 1..20: mol_type = other DNA
tctcgctttatctgccaggg

SEQ ID NO: 56727 - DNA, 20 bp, synthetic construct
  misc_feature 1..20: note = chemically synthesized
  source 1..20: mol_type = other DNA
tcgctttatctgccagggtg

SEQ ID NO: 56728 - DNA, 20 bp, synthetic construct
  misc_feature 1..20: note = chemically synthesized
  source 1..20: mol_type = other DNA
ttatctgccagggtggagtg

SEQ ID NO: 56729 - DNA, 20 bp, synthetic construct
  misc_feature 1..20: note = chemically synthesized
  source 1..20: mol_type = other DNA
tctgccagggtggagtgcag

SEQ ID NO: 56730 - DNA, 20 bp, synthetic construct
  misc_feature 1..20: note = chemically synthesized
  source 1..20: mol_type = other DNA
ggagtgcagtggcgtgatct

SEQ ID NO: 56731 - DNA, 20 bp, synthetic construct
  misc_feature 1..20: note = chemically synthesized
  source 1..20: mol_type = other DNA
tcactgaaacctccacctcc

SEQ ID NO: 56732 - DNA, 20 bp, synthetic construct
  misc_feature 1..20: note = chemically synthesized
  source 1..20: mol_type = other DNA
cactgaaacctccacctccc

SEQ ID NO: 56733 - DNA, 20 bp, synthetic construct
  misc_feature 1..20: note = chemically synthesized
  source 1..20: mol_type = other DNA
aacctccacctcccgggttc

SEQ ID NO: 56734 - DNA, 20 bp, synthetic construct
  misc_feature 1..20: note = chemically synthesized
  source 1..20: mol_type = other DNA
ttcaagaaattcttctgtct

SEQ ID NO: 56735 - DNA, 20 bp, synthetic construct
  misc_feature 1..20: note = chemically synthesized
  source 1..20: mol_type = other DNA
ttctgtctcagcttcccaaa

SEQ ID NO: 56736 - DNA, 20 bp, synthetic construct
  misc_feature 1..20: note = chemically synthesized
  source 1..20: mol_type = other DNA
gtctcagcttcccaaatagc

SEQ ID NO: 56737 - DNA, 20 bp, synthetic construct
  misc_feature 1..20: note = chemically synthesized
  source 1..20: mol_type = other DNA
tctcagcttcccaaatagct

SEQ ID NO: 56738 - DNA, 20 bp, synthetic construct
  misc_feature 1..20: note = chemically synthesized
  source 1..20: mol_type = other DNA
ttcccaaatagctgggatta

SEQ ID NO: 56739 - DNA, 20 bp, synthetic construct
  misc_feature 1..20: note = chemically synthesized
  source 1..20: mol_type = other DNA
tcccaaatagctgggattac

SEQ ID NO: 56740 - DNA, 20 bp, synthetic construct
  misc_feature 1..20: note = chemically synthesized
  source 1..20: mol_type = other DNA
caggcgtgtgccaccacgcc

SEQ ID NO: 56741 - DNA, 20 bp, synthetic construct
  misc_feature 1..20: note = chemically synthesized
  source 1..20: mol_type = other DNA
ctggctaatttttgtatttt

SEQ ID NO: 56742 - DNA, 20 bp, synthetic construct
  misc_feature 1..20: note = chemically synthesized
  source 1..20: mol_type = other DNA
gctaatttttgtatttttag

SEQ ID NO: 56743 - DNA, 20 bp, synthetic construct
  misc_feature 1..20: note = chemically synthesized
  source 1..20: mol_type = other DNA
taatttttgtatttttagta

SEQ ID NO: 56744 - DNA, 20 bp, synthetic construct
  misc_feature 1..20: note = chemically synthesized
  source 1..20: mol_type = other DNA
tttgtatttttagtagagct

SEQ ID NO: 56745 - DNA, 20 bp, synthetic construct
  misc_feature 1..20: note = chemically synthesized
  source 1..20: mol_type = other DNA
ttgtatttttagtagagctg

SEQ ID NO: 56746 - DNA, 20 bp, synthetic construct
  misc_feature 1..20: note = chemically synthesized
  source 1..20: mol_type = other DNA
gagctgaggtttcaccgtgt

SEQ ID NO: 56747 - DNA, 20 bp, synthetic construct
  misc_feature 1..20: note = chemically synthesized
  source 1..20: mol_type = other DNA
tgaggtttcaccgtgttggc

SEQ ID NO: 56748 - DNA, 20 bp, synthetic construct
  misc_feature 1..20: note = chemically synthesized
  source 1..20: mol_type = other DNA
gaggtttcaccgtgttggcc

SEQ ID NO: 56749 - DNA, 20 bp, synthetic construct
  misc_feature 1..20: note = chemically synthesized
  source 1..20: mol_type = other DNA
gtttcaccgtgttggccagg

SEQ ID NO: 56750 - DNA, 20 bp, synthetic construct
  misc_feature 1..20: note = chemically synthesized
  source 1..20: mol_type = other DNA
tttcaccgtgttggccaggc

SEQ ID NO: 56751 - DNA, 20 bp, synthetic construct
  misc_feature 1..20: note = chemically synthesized
  source 1..20: mol_type = other DNA
acctcttgatccgcctgcct

SEQ ID NO: 56752 - DNA, 20 bp, synthetic construct
  misc_feature 1..20: note = chemically synthesized
  source 1..20: mol_type = other DNA
ccgcctgccttggcctccca

SEQ ID NO: 56753 - DNA, 20 bp, synthetic construct
  misc_feature 1..20: note = chemically synthesized
  source 1..20: mol_type = other DNA
gccttggcctcccaaagtgc

SEQ ID NO: 56754 - DNA, 20 bp, synthetic construct
  misc_feature 1..20: note = chemically synthesized
  source 1..20: mol_type = other DNA
ccttggcctcccaaagtgct

SEQ ID NO: 56755 - DNA, 20 bp, synthetic construct
  misc_feature 1..20: note = chemically synthesized
  source 1..20: mol_type = other DNA
cttggcctcccaaagtgctg

SEQ ID NO: 56756 - DNA, 20 bp, synthetic construct
  misc_feature 1..20: note = chemically synthesized
  source 1..20: mol_type = other DNA
ctcccaaagtgctggggtta

SEQ ID NO: 56757 - DNA, 20 bp, synthetic construct
  misc_feature 1..20: note = chemically synthesized
  source 1..20: mol_type = other DNA
tcccaaagtgctggggttac

SEQ ID NO: 56758 - DNA, 20 bp, synthetic construct
  misc_feature 1..20: note = chemically synthesized
  source 1..20: mol_type = other DNA
aaagtgctggggttacaggc

SEQ ID NO: 56759 - DNA, 20 bp, synthetic construct
  misc_feature 1..20: note = chemically synthesized
  source 1..20: mol_type = other DNA
agtgctggggttacaggcga

SEQ ID NO: 56760 - DNA, 20 bp, synthetic construct
  misc_feature 1..20: note = chemically synthesized
  source 1..20: mol_type = other DNA
caggcgagagcccctgcacc

SEQ ID NO: 56761 - DNA, 20 bp, synthetic construct
  misc_feature 1..20: note = chemically synthesized
  source 1..20: mol_type = other DNA
cgagagcccctgcacccagc

SEQ ID NO: 56762 - DNA, 20 bp, synthetic construct
  misc_feature 1..20: note = chemically synthesized
  source 1..20: mol_type = other DNA
gagagcccctgcacccagcc

SEQ ID NO: 56763 - DNA, 20 bp, synthetic construct
  misc_feature 1..20: note = chemically synthesized
  source 1..20: mol_type = other DNA
ctgcacccagccaggattct

SEQ ID NO: 56764 - DNA, 20 bp, synthetic construct
  misc_feature 1..20: note = chemically synthesized
  source 1..20: mol_type = other DNA
acccagccaggattcttggt

SEQ ID NO: 56765 - DNA, 20 bp, synthetic construct
  misc_feature 1..20: note = chemically synthesized
  source 1..20: mol_type = other DNA
gccaggattcttggttagaa

SEQ ID NO: 56766 - DNA, 20 bp, synthetic construct
  misc_feature 1..20: note = chemically synthesized
  source 1..20: mol_type = other DNA
ttcttggttagaatggcatc

SEQ ID NO: 56767 - DNA, 20 bp, synthetic construct
  misc_feature 1..20: note = chemically synthesized
  source 1..20: mol_type = other DNA
tcttggttagaatggcatct

SEQ ID NO: 56768 - DNA, 20 bp, synthetic construct
  misc_feature 1..20: note = chemically synthesized
  source 1..20: mol_type = other DNA
aatggcatctgggttcaatg

SEQ ID NO: 56769 - DNA, 20 bp, synthetic construct
  misc_feature 1..20: note = chemically synthesized
  source 1..20: mol_type = other DNA
ctgggttcaatgtagcaaaa

SEQ ID NO: 56770 - DNA, 20 bp, synthetic construct
  misc_feature 1..20: note = chemically synthesized
  source 1..20: mol_type = other DNA
gttcaatgtagcaaaacaga

SEQ ID NO: 56771 - DNA, 20 bp, synthetic construct
  misc_feature 1..20: note = chemically synthesized
  source 1..20: mol_type = other DNA
tcaatgtagcaaaacagatg

SEQ ID NO: 56772 - DNA, 20 bp, synthetic construct
  misc_feature 1..20: note = chemically synthesized
  source 1..20: mol_type = other DNA
aaacagatggagaattccca

SEQ ID NO: 56773 - DNA, 20 bp, synthetic construct
  misc_feature 1..20: note = chemically synthesized
  source 1..20: mol_type = other DNA
agatggagaattcccatggc

SEQ ID NO: 56774 - DNA, 20 bp, synthetic construct
  misc_feature 1..20: note = chemically synthesized
  source 1..20: mol_type = other DNA
gatggagaattcccatggct

SEQ ID NO: 56775 - DNA, 20 bp, synthetic construct
  misc_feature 1..20: note = chemically synthesized
  source 1..20: mol_type = other DNA
gaattcccatggctaggcat

SEQ ID NO: 56776 - DNA, 20 bp, synthetic construct
  misc_feature 1..20: note = chemically synthesized
  source 1..20: mol_type = other DNA
tcccatggctaggcatgaga

SEQ ID NO: 56777 - DNA, 20 bp, synthetic construct
  misc_feature 1..20: note = chemically synthesized
  source 1..20: mol_type = other DNA
cccatggctaggcatgagac

SEQ ID NO: 56778 - DNA, 20 bp, synthetic construct
  misc_feature 1..20: note = chemically synthesized
  source 1..20: mol_type = other DNA
gcatgagacaggtgccctcc

SEQ ID NO: 56779 - DNA, 20 bp, synthetic construct
  misc_feature 1..20: note = chemically synthesized
  source 1..20: mol_type = other DNA
gagacaggtgccctcctaga

SEQ ID NO: 56780 - DNA, 20 bp, synthetic construct
  misc_feature 1..20: note = chemically synthesized
  source 1..20: mol_type = other DNA
agacaggtgccctcctagac

SEQ ID NO: 56781 - DNA, 20 bp, synthetic construct
  misc_feature 1..20: note = chemically synthesized
  source 1..20: mol_type = other DNA
gacaggtgccctcctagaca

SEQ ID NO: 56782 - DNA, 20 bp, synthetic construct
  misc_feature 1..20: note = chemically synthesized
  source 1..20: mol_type = other DNA
acaggtgccctcctagacag

SEQ ID NO: 56783 - DNA, 20 bp, synthetic construct
  misc_feature 1..20: note = chemically synthesized
  source 1..20: mol_type = other DNA
cctcctagacaggggaattc

SEQ ID NO: 56784 - DNA, 20 bp, synthetic construct
  misc_feature 1..20: note = chemically synthesized
  source 1..20: mol_type = other DNA
ctcctagacaggggaattct

SEQ ID NO: 56785 - DNA, 20 bp, synthetic construct
  misc_feature 1..20: note = chemically synthesized
  source 1..20: mol_type = other DNA
acaggggaattctgggctca

SEQ ID NO: 56786 - DNA, 20 bp, synthetic construct
  misc_feature 1..20: note = chemically synthesized
  source 1..20: mol_type = other DNA
caggggaattctgggctcaa

SEQ ID NO: 56787 - DNA, 20 bp, synthetic construct
  misc_feature 1..20: note = chemically synthesized
  source 1..20: mol_type = other DNA
ggggaattctgggctcaaag

SEQ ID NO: 56788 - DNA, 20 bp, synthetic construct
  misc_feature 1..20: note = chemically synthesized
  source 1..20: mol_type = other DNA
gggaattctgggctcaaagg

SEQ ID NO: 56789 - DNA, 20 bp, synthetic construct
  misc_feature 1..20: note = chemically synthesized
  source 1..20: mol_type = other DNA
aattctgggctcaaaggagg

SEQ ID NO: 56790 - DNA, 20 bp, synthetic construct
  misc_feature 1..20: note = chemically synthesized
  source 1..20: mol_type = other DNA
ttctgggctcaaaggaggtg

SEQ ID NO: 56791 - DNA, 20 bp, synthetic construct
  misc_feature 1..20: note = chemically synthesized
  source 1..20: mol_type = other DNA
ctgggctcaaaggaggtgga

SEQ ID NO: 56792 - DNA, 20 bp, synthetic construct
  misc_feature 1..20: note = chemically synthesized
  source 1..20: mol_type = other DNA
tgggctcaaaggaggtggag

SEQ ID NO: 56793 - DNA, 20 bp, synthetic construct
  misc_feature 1..20: note = chemically synthesized
  source 1..20: mol_type = other DNA
ctcaaaggaggtggagaggc

SEQ ID NO: 56794 - DNA, 20 bp, synthetic construct
  misc_feature 1..20: note = chemically synthesized
  source 1..20: mol_type = other DNA
aggaggtggagaggctggtg

SEQ ID NO: 56795 - DNA, 20 bp, synthetic construct
  misc_feature 1..20: note = chemically synthesized
  source 1..20: mol_type = other DNA
ggaggtggagaggctggtgc

SEQ ID NO: 56796 - DNA, 20 bp, synthetic construct
  misc_feature 1..20: note = chemically synthesized
  source 1..20: mol_type = other DNA
gaggtggagaggctggtgca

SEQ ID NO: 56797 - DNA, 20 bp, synthetic construct
  misc_feature 1..20: note = chemically synthesized
  source 1..20: mol_type = other DNA
ggtggagaggctggtgcagg

SEQ ID NO: 56798 - DNA, 20 bp, synthetic construct
  misc_feature 1..20: note = chemically synthesized
  source 1..20: mol_type = other DNA
gtggagaggctggtgcaggg

SEQ ID NO: 56799 - DNA, 20 bp, synthetic construct
  misc_feature 1..20: note = chemically synthesized
  source 1..20: mol_type = other DNA
tggagaggctggtgcaggga

SEQ ID NO: 56800 - DNA, 20 bp, synthetic construct
  misc_feature 1..20: note = chemically synthesized
  source 1..20: mol_type = other DNA
agaggctggtgcagggaggg

SEQ ID NO: 56801 - DNA, 20 bp, synthetic construct
  misc_feature 1..20: note = chemically synthesized
  source 1..20: mol_type = other DNA
gctggtgcagggagggtggc

SEQ ID NO: 56802 - DNA, 20 bp, synthetic construct
  misc_feature 1..20: note = chemically synthesized
  source 1..20: mol_type = other DNA
ctggtgcagggagggtggcg

SEQ ID NO: 56803 - DNA, 20 bp, synthetic construct
  misc_feature 1..20: note = chemically synthesized
  source 1..20: mol_type = other DNA
tggtgcagggagggtggcga

SEQ ID NO: 56804 - DNA, 20 bp, synthetic construct
  misc_feature 1..20: note = chemically synthesized
  source 1..20: mol_type = other DNA
ggtgcagggagggtggcgag

SEQ ID NO: 56805 - DNA, 20 bp, synthetic construct
  misc_feature 1..20: note = chemically synthesized
  source 1..20: mol_type = other DNA
gtgcagggagggtggcgagg

SEQ ID NO: 56806 - DNA, 20 bp, synthetic construct
  misc_feature 1..20: note = chemically synthesized
  source 1..20: mol_type = other DNA
ggagggtggcgagggggtga

SEQ ID NO: 56807 - DNA, 20 bp, synthetic construct
  misc_feature 1..20: note = chemically synthesized
  source 1..20: mol_type = other DNA
ggtggcgagggggtgacagc

SEQ ID NO: 56808 - DNA, 20 bp, synthetic construct
  misc_feature 1..20: note = chemically synthesized
  source 1..20: mol_type = other DNA
gtggcgagggggtgacagct

SEQ ID NO: 56809 - DNA, 20 bp, synthetic construct
  misc_feature 1..20: note = chemically synthesized
  source 1..20: mol_type = other DNA
ggcgagggggtgacagctgg

SEQ ID NO: 56810 - DNA, 20 bp, synthetic construct
  misc_feature 1..20: note = chemically synthesized
  source 1..20: mol_type = other DNA
gcgagggggtgacagctggg

SEQ ID NO: 56811 - DNA, 20 bp, synthetic construct
  misc_feature 1..20: note = chemically synthesized
  source 1..20: mol_type = other DNA
gagggggtgacagctgggag

SEQ ID NO: 56812 - DNA, 20 bp, synthetic construct
  misc_feature 1..20: note = chemically synthesized
  source 1..20: mol_type = other DNA
ccacacccatccatctttcc

SEQ ID NO: 56813 - DNA, 20 bp, synthetic construct
  misc_feature 1..20: note = chemically synthesized
  source 1..20: mol_type = other DNA
tggtgtcacatcacctactc

SEQ ID NO: 56814 - DNA, 20 bp, synthetic construct
  misc_feature 1..20: note = chemically synthesized
  source 1..20: mol_type = other DNA
actctggtttcctcctttca

SEQ ID NO: 56815 - DNA, 20 bp, synthetic construct
  misc_feature 1..20: note = chemically synthesized
  source 1..20: mol_type = other DNA
ggtttcctcctttcacagtg

SEQ ID NO: 56816 - DNA, 20 bp, synthetic construct
  misc_feature 1..20: note = chemically synthesized
  source 1..20: mol_type = other DNA
tttcctcctttcacagtgaa

SEQ ID NO: 56817 - DNA, 20 bp, synthetic construct
  misc_feature 1..20: note = chemically synthesized
  source 1..20: mol_type = other DNA
ctttcacagtgaagagtttg

SEQ ID NO: 56818 - DNA, 20 bp, synthetic construct
  misc_feature 1..20: note = chemically synthesized
  source 1..20: mol_type = other DNA
acagtgaagagtttgaagcc

SEQ ID NO: 56819 - DNA, 20 bp, synthetic construct
  misc_feature 1..20: note = chemically synthesized
  source 1..20: mol_type = other DNA
agtgaagagtttgaagccca

SEQ ID NO: 56820 - DNA, 20 bp, synthetic construct
  misc_feature 1..20: note = chemically synthesized
  source 1..20: mol_type = other DNA
tgaagagtttgaagcccaga

SEQ ID NO: 56821 - DNA, 20 bp, synthetic construct
  misc_feature 1..20: note = chemically synthesized
  source 1..20: mol_type = other DNA
gaagagtttgaagcccagag

SEQ ID NO: 56822 - DNA, 20 bp, synthetic construct
  misc_feature 1..20: note = chemically synthesized
  source 1..20: mol_type = other DNA
aagagtttgaagcccagaga

SEQ ID NO: 56823 - DNA, 20 bp, synthetic construct
  misc_feature 1..20: note = chemically synthesized
  source 1..20: mol_type = other DNA
gtttgaagcccagagagggt

SEQ ID NO: 56824 - DNA, 20 bp, synthetic construct
  misc_feature 1..20: note = chemically synthesized
  source 1..20: mol_type = other DNA
tttgaagcccagagagggtc

SEQ ID NO: 56825 - DNA, 20 bp, synthetic construct
  misc_feature 1..20: note = chemically synthesized
  source 1..20: mol_type = other DNA
ttgaagcccagagagggtca

SEQ ID NO: 56826 - DNA, 20 bp, synthetic construct
  misc_feature 1..20: note = chemically synthesized
  source 1..20: mol_type = other DNA
gagagggtcagggccttgtt

SEQ ID NO: 56827 - DNA, 20 bp, synthetic construct
  misc_feature 1..20: note = chemically synthesized
  source 1..20: mol_type = other DNA
agagggtcagggccttgttg

SEQ ID NO: 56828 - DNA, 20 bp, synthetic construct
  misc_feature 1..20: note = chemically synthesized
  source 1..20: mol_type = other DNA
agggccttgttgaggctata

SEQ ID NO: 56829 - DNA, 20 bp, synthetic construct
  misc_feature 1..20: note = chemically synthesized
  source 1..20: mol_type = other DNA
ccttgttgaggctatacagc

SEQ ID NO: 56830 - DNA, 20 bp, synthetic construct
  misc_feature 1..20: note = chemically synthesized
  source 1..20: mol_type = other DNA
gttgaggctatacagcaagt

SEQ ID NO: 56831 - DNA, 20 bp, synthetic construct
  misc_feature 1..20: note = chemically synthesized
  source 1..20: mol_type = other DNA
tatacagcaagtcagtgaca

SEQ ID NO: 56832 - DNA, 20 bp, synthetic construct
  misc_feature 1..20: note = chemically synthesized
  source 1..20: mol_type = other DNA
cagcaagtcagtgacaaagc

SEQ ID NO: 56833 - DNA, 20 bp, synthetic construct
  misc_feature 1..20: note = chemically synthesized
  source 1..20: mol_type = other DNA
gtcagtgacaaagctggaac

SEQ ID NO: 56834 - DNA, 20 bp, synthetic construct
  misc_feature 1..20: note = chemically synthesized
  source 1..20: mol_type = other DNA
gacaaagctggaacaagtct

SEQ ID NO: 56835 - DNA, 20 bp, synthetic construct
  misc_feature 1..20: note = chemically synthesized
  source 1..20: mol_type = other DNA
ggaacaagtcttggctttcc

SEQ ID NO: 56836 - DNA, 20 bp, synthetic construct
  misc_feature 1..20: note = chemically synthesized
  source 1..20: mol_type = other DNA
gtcttggctttcccagcact

SEQ ID NO: 56837 - DNA, 20 bp, synthetic construct
  misc_feature 1..20: note = chemically synthesized
  source 1..20: mol_type = other DNA
cagcactcagatcatgaact

SEQ ID NO: 56838 - DNA, 20 bp, synthetic construct
  misc_feature 1..20: note = chemically synthesized
  source 1..20: mol_type = other DNA
actcagatcatgaactgaga

SEQ ID NO: 56839 - DNA, 20 bp, synthetic construct
  misc_feature 1..20: note = chemically synthesized
  source 1..20: mol_type = other DNA
aactgagacagctgtgtcct

SEQ ID NO: 56840 - DNA, 20 bp, synthetic construct
  misc_feature 1..20: note = chemically synthesized
  source 1..20: mol_type = other DNA
acagctgtgtcctcagatct

SEQ ID NO: 56841 - DNA, 20 bp, synthetic construct
  misc_feature 1..20: note = chemically synthesized
  source 1..20: mol_type = other DNA
agatctcagatgatgaatgt

SEQ ID NO: 56842 - DNA, 20 bp, synthetic construct
  misc_feature 1..20: note = chemically synthesized
  source 1..20: mol_type = other DNA
cagatgatgaatgtcagaat

SEQ ID NO: 56843 - DNA, 20 bp, synthetic construct
  misc_feature 1..20: note = chemically synthesized
  source 1..20: mol_type = other DNA
agatgatgaatgtcagaatt

SEQ ID NO: 56844 - DNA, 20 bp, synthetic construct
  misc_feature 1..20: note = chemically synthesized
  source 1..20: mol_type = other DNA
tcagaattgggctgtgacat

SEQ ID NO: 56845 - DNA, 20 bp, synthetic construct
  misc_feature 1..20: note = chemically synthesized
  source 1..20: mol_type = other DNA
tgggctgtgacattggtctc

SEQ ID NO: 56846 - DNA, 20 bp, synthetic construct
  misc_feature 1..20: note = chemically synthesized
  source 1..20: mol_type = other DNA
attggtctcaagcatcatgt

SEQ ID NO: 56847 - DNA, 20 bp, synthetic construct
  misc_feature 1..20: note = chemically synthesized
  source 1..20: mol_type = other DNA
ttggtctcaagcatcatgtt

SEQ ID NO: 56848 - DNA, 20 bp, synthetic construct
  misc_feature 1..20: note = chemically synthesized
  source 1..20: mol_type = other DNA
ttgggttcattatgcctccc

SEQ ID NO: 56849 - DNA, 20 bp, synthetic construct
  misc_feature 1..20: note = chemically synthesized
  source 1..20: mol_type = other DNA
caagctgttccttataacat

SEQ ID NO: 56850 - DNA, 20 bp, synthetic construct
  misc_feature 1..20: note = chemically synthesized
  source 1..20: mol_type = other DNA
aagctgttccttataacatc

SEQ ID NO: 56851 - DNA, 20 bp, synthetic construct
  misc_feature 1..20: note = chemically synthesized
  source 1..20: mol_type = other DNA
ctccaaaacctgctctctcc

SEQ ID NO: 56852 - DNA, 20 bp, synthetic construct
  misc_feature 1..20: note = chemically synthesized
  source 1..20: mol_type = other DNA
ctctctcctggcccttctat

SEQ ID NO: 56853 - DNA, 20 bp, synthetic construct
  misc_feature 1..20: note = chemically synthesized
  source 1..20: mol_type = other DNA
ctctcctggcccttctatca

SEQ ID NO: 56854 - DNA, 20 bp, synthetic construct
  misc_feature 1..20: note = chemically synthesized
  source 1..20: mol_type = other DNA
tctcctggcccttctatcag

SEQ ID NO: 56855 - DNA, 20 bp, synthetic construct
  misc_feature 1..20: note = chemically synthesized
  source 1..20: mol_type = other DNA
cctggcccttctatcagagg

SEQ ID NO: 56856 - DNA, 20 bp, synthetic construct
  misc_feature 1..20: note = chemically synthesized
  source 1..20: mol_type = other DNA
gcagcaccctgcactcctaa

SEQ ID NO: 56857 - DNA, 20 bp, synthetic construct
  misc_feature 1..20: note = chemically synthesized
  source 1..20: mol_type = other DNA
caccctgcactcctaaaagc

SEQ ID NO: 56858 - DNA, 20 bp, synthetic construct
  misc_feature 1..20: note = chemically synthesized
  source 1..20: mol_type = other DNA
cactcctaaaagctagtgcc

SEQ ID NO: 56859 - DNA, 20 bp, synthetic construct
  misc_feature 1..20: note = chemically synthesized
  source 1..20: mol_type = other DNA
actcctaaaagctagtgcct

SEQ ID NO: 56860 - DNA, 20 bp, synthetic construct
  misc_feature 1..20: note = chemically synthesized
  source 1..20: mol_type = other DNA
tcctaaaagctagtgcctgg

SEQ ID NO: 56861 - DNA, 20 bp, synthetic construct
  misc_feature 1..20: note = chemically synthesized
  source 1..20: mol_type = other DNA
cctaaaagctagtgcctggg

SEQ ID NO: 56862 - DNA, 20 bp, synthetic construct
  misc_feature 1..20: note = chemically synthesized
  source 1..20: mol_type = other DNA
ctaaaagctagtgcctggga

SEQ ID NO: 56863 - DNA, 20 bp, synthetic construct
  misc_feature 1..20: note = chemically synthesized
  source 1..20: mol_type = other DNA
ctagtgcctgggagggcgac

SEQ ID NO: 56864 - DNA, 20 bp, synthetic construct
  misc_feature 1..20: note = chemically synthesized
  source 1..20: mol_type = other DNA
agtgcctgggagggcgactg

SEQ ID NO: 56865 - DNA, 20 bp, synthetic construct
  misc_feature 1..20: note = chemically synthesized
  source 1..20: mol_type = other DNA
tgcctgggagggcgactgga

SEQ ID NO: 56866 - DNA, 20 bp, synthetic construct
  misc_feature 1..20: note = chemically synthesized
  source 1..20: mol_type = other DNA
gcctgggagggcgactggag

SEQ ID NO: 56867 - DNA, 20 bp, synthetic construct
  misc_feature 1..20: note = chemically synthesized
  source 1..20: mol_type = other DNA
ctgggagggcgactggagag

SEQ ID NO: 56868 - DNA, 20 bp, synthetic construct
  misc_feature 1..20: note = chemically synthesized
  source 1..20: mol_type = other DNA
gagggcgactggagaggaga

SEQ ID NO: 56869 - DNA, 20 bp, synthetic construct
  misc_feature 1..20: note = chemically synthesized
  source 1..20: mol_type = other DNA
gagaggagaaagtcgccatc

SEQ ID NO: 56870 - DNA, 20 bp, synthetic construct
  misc_feature 1..20: note = chemically synthesized
  source 1..20: mol_type = other DNA
gagaaagtcgccatctggcc

SEQ ID NO: 56871 - DNA, 20 bp, synthetic construct
  misc_feature 1..20: note = chemically synthesized
  source 1..20: mol_type = other DNA
ccatctggccaagtacccca

SEQ ID NO: 56872 - DNA, 20 bp, synthetic construct
  misc_feature 1..20: note = chemically synthesized
  source 1..20: mol_type = other DNA
gccaagtaccccatggtgta

SEQ ID NO: 56873 - DNA, 20 bp, synthetic construct
  misc_feature 1..20: note = chemically synthesized
  source 1..20: mol_type = other DNA
ccccatggtgtacggacact

SEQ ID NO: 56874 - DNA, 20 bp, synthetic construct
  misc_feature 1..20: note = chemically synthesized
  source 1..20: mol_type = other DNA
cccatggtgtacggacactg

SEQ ID NO: 56875 - DNA, 20 bp, synthetic construct
  misc_feature 1..20: note = chemically synthesized
  source 1..20: mol_type = other DNA
ggtgtacggacactgaggcc

SEQ ID NO: 56876 - DNA, 20 bp, synthetic construct
  misc_feature 1..20: note = chemically synthesized
  source 1..20: mol_type = other DNA
gaggccaagctttaaaccaa

SEQ ID NO: 56877 - DNA, 20 bp, synthetic construct
  misc_feature 1..20: note = chemically synthesized
  source 1..20: mol_type = other DNA
agctttaaaccaaaagaatg

SEQ ID NO: 56878 - DNA, 20 bp, synthetic construct
  misc_feature 1..20: note = chemically synthesized
  source 1..20: mol_type = other DNA
gctttaaaccaaaagaatga

SEQ ID NO: 56879 - DNA, 20 bp, synthetic construct
  misc_feature 1..20: note = chemically synthesized
  source 1..20: mol_type = other DNA
ccaaaagaatgaaggcttca

SEQ ID NO: 56880 - DNA, 20 bp, synthetic construct
  misc_feature 1..20: note = chemically synthesized
  source 1..20: mol_type = other DNA
aggcttcatggtgacatttc

SEQ ID NO: 56881 - DNA, 20 bp, synthetic construct
  misc_feature 1..20: note = chemically synthesized
  source 1..20: mol_type = other DNA
ggcttcatggtgacatttct

SEQ ID NO: 56882 - DNA, 20 bp, synthetic construct
  misc_feature 1..20: note = chemically synthesized
  source 1..20: mol_type = other DNA
catggtgacatttctgggat

SEQ ID NO: 56883 - DNA, 20 bp, synthetic construct
  misc_feature 1..20: note = chemically synthesized
  source 1..20: mol_type = other DNA
atggtgacatttctgggatc

SEQ ID NO: 56884 - DNA, 20 bp, synthetic construct
  misc_feature 1..20: note = chemically synthesized
  source 1..20: mol_type = other DNA
tggtgacatttctgggatcg

SEQ ID NO: 56885 - DNA, 20 bp, synthetic construct
  misc_feature 1..20: note = chemically synthesized
  source 1..20: mol_type = other DNA
tgacatttctgggatcgggg

SEQ ID NO: 56886 - DNA, 20 bp, synthetic construct
  misc_feature 1..20: note = chemically synthesized
  source 1..20: mol_type = other DNA
gacatttctgggatcggggc

SEQ ID NO: 56887 - DNA, 20 bp, synthetic construct
  misc_feature 1..20: note = chemically synthesized
  source 1..20: mol_type = other DNA
atttctgggatcggggcagg

SEQ ID NO: 56888 - DNA, 20 bp, synthetic construct
  misc_feature 1..20: note = chemically synthesized
  source 1..20: mol_type = other DNA
tttctgggatcggggcaggt

SEQ ID NO: 56889 - DNA, 20 bp, synthetic construct
  misc_feature 1..20: note = chemically synthesized
  source 1..20: mol_type = other DNA
tctgggatcggggcaggtgg

SEQ ID NO: 56890 - DNA, 20 bp, synthetic construct
  misc_feature 1..20: note = chemically synthesized
  source 1..20: mol_type = other DNA
gcaggtgggagcactctttg

SEQ ID NO: 56891 - DNA, 20 bp, synthetic construct
  misc_feature 1..20: note = chemically synthesized
  source 1..20: mol_type = other DNA
caggtgggagcactctttgc

SEQ ID NO: 56892 - DNA, 20 bp, synthetic construct
  misc_feature 1..20: note = chemically synthesized
  source 1..20: mol_type = other DNA
aggtgggagcactctttgcg

SEQ ID NO: 56893 - DNA, 20 bp, synthetic construct
  misc_feature 1..20: note = chemically synthesized
  source 1..20: mol_type = other DNA
gggagcactctttgcggggc

SEQ ID NO: 56894 - DNA, 20 bp, synthetic construct
  misc_feature 1..20: note = chemically synthesized
  source 1..20: mol_type = other DNA
ggagcactctttgcggggcc

SEQ ID NO: 56895 - DNA, 20 bp, synthetic construct
  misc_feature 1..20: note = chemically synthesized
  source 1..20: mol_type = other DNA
gagcactctttgcggggcca

SEQ ID NO: 56896 - DNA, 20 bp, synthetic construct
  misc_feature 1..20: note = chemically synthesized
  source 1..20: mol_type = other DNA
actctttgcggggccaggga

SEQ ID NO: 56897 - DNA, 20 bp, synthetic construct
  misc_feature 1..20: note = chemically synthesized
  source 1..20: mol_type = other DNA
ctctttgcggggccagggac

SEQ ID NO: 56898 - DNA, 20 bp, synthetic construct
  misc_feature 1..20: note = chemically synthesized
  source 1..20: mol_type = other DNA
tctttgcggggccagggaca

SEQ ID NO: 56899 - DNA, 20 bp, synthetic construct
  misc_feature 1..20: note = chemically synthesized
  source 1..20: mol_type = other DNA
ttgcggggccagggacaggg

SEQ ID NO: 56900 - DNA, 20 bp, synthetic construct
  misc_feature 1..20: note = chemically synthesized
  source 1..20: mol_type = other DNA
ggggccagggacagggaagc

SEQ ID NO: 56901 - DNA, 20 bp, synthetic construct
  misc_feature 1..20: note = chemically synthesized
  source 1..20: mol_type = other DNA
aatctcacaccatttctacc

SEQ ID NO: 56902 - DNA, 20 bp, synthetic construct
  misc_feature 1..20: note = chemically synthesized
  source 1..20: mol_type = other DNA
atctcacaccatttctaccc

SEQ ID NO: 56903 - DNA, 20 bp, synthetic construct
  misc_feature 1..20: note = chemically synthesized
  source 1..20: mol_type = other DNA
ctcacaccatttctacccgg

SEQ ID NO: 56904 - DNA, 20 bp, synthetic construct
  misc_feature 1..20: note = chemically synthesized
  source 1..20: mol_type = other DNA
tctacccgggagcataaaat

SEQ ID NO: 56905 - DNA, 20 bp, synthetic construct
  misc_feature 1..20: note = chemically synthesized
  source 1..20: mol_type = other DNA
ctacccgggagcataaaata

SEQ ID NO: 56906 - DNA, 20 bp, synthetic construct
  misc_feature 1..20: note = chemically synthesized
  source 1..20: mol_type = other DNA
tacccgggagcataaaataa

SEQ ID NO: 56907 - DNA, 20 bp, synthetic construct
  misc_feature 1..20: note = chemically synthesized
  source 1..20: mol_type = other DNA
ggagcataaaataagggacc

SEQ ID NO: 56908 - DNA, 20 bp, synthetic construct
  misc_feature 1..20: note = chemically synthesized
  source 1..20: mol_type = other DNA
agcataaaataagggaccaa

SEQ ID NO: 56909 - DNA, 20 bp, synthetic construct
  misc_feature 1..20: note = chemically synthesized
  source 1..20: mol_type = other DNA
ataagggaccaagagcaacc

SEQ ID NO: 56910 - DNA, 20 bp, synthetic construct
  misc_feature 1..20: note = chemically synthesized
  source 1..20: mol_type = other DNA
agggaccaagagcaacccgg

SEQ ID NO: 56911 - DNA, 20 bp, synthetic construct
  misc_feature 1..20: note = chemically synthesized
  source 1..20: mol_type = other DNA
gggaccaagagcaacccggc

SEQ ID NO: 56912 - DNA, 20 bp, synthetic construct
  misc_feature 1..20: note = chemically synthesized
  source 1..20: mol_type = other DNA
ggaccaagagcaacccggca

SEQ ID NO: 56913 - DNA, 20 bp, synthetic construct
  misc_feature 1..20: note = chemically synthesized
  source 1..20: mol_type = other DNA
aagagcaacccggcagggtg

SEQ ID NO: 56914 - DNA, 20 bp, synthetic construct
  misc_feature 1..20: note = chemically synthesized
  source 1..20: mol_type = other DNA
agagcaacccggcagggtgc

SEQ ID NO: 56915 - DNA, 20 bp, synthetic construct
  misc_feature 1..20: note = chemically synthesized
  source 1..20: mol_type = other DNA
gagcaacccggcagggtgca

SEQ ID NO: 56916 - DNA, 20 bp, synthetic construct
  misc_feature 1..20: note = chemically synthesized
  source 1..20: mol_type = other DNA
caacccggcagggtgcaggg

SEQ ID NO: 56917 - DNA, 20 bp, synthetic construct
  misc_feature 1..20: note = chemically synthesized
  source 1..20: mol_type = other DNA
acccggcagggtgcagggaa

SEQ ID NO: 56918 - DNA, 20 bp, synthetic construct
  misc_feature 1..20: note = chemically synthesized
  source 1..20: mol_type = other DNA
agggaagagaatctcgccta

SEQ ID NO: 56919 - DNA, 20 bp, synthetic construct
  misc_feature 1..20: note = chemically synthesized
  source 1..20: mol_type = other DNA
ggtcaaacaacctgttgaac

SEQ ID NO: 56920 - DNA, 20 bp, synthetic construct
  misc_feature 1..20: note = chemically synthesized
  source 1..20: mol_type = other DNA
gtcaaacaacctgttgaact

SEQ ID NO: 56921 - DNA, 20 bp, synthetic construct
  misc_feature 1..20: note = chemically synthesized
  source 1..20: mol_type = other DNA
actgggcaataaataaaccc

SEQ ID NO: 56922 - DNA, 20 bp, synthetic construct
  misc_feature 1..20: note = chemically synthesized
  source 1..20: mol_type = other DNA
taaataaacccaagtgtgac

SEQ ID NO: 56923 - DNA, 20 bp, synthetic construct
  misc_feature 1..20: note = chemically synthesized
  source 1..20: mol_type = other DNA
aaataaacccaagtgtgacc

SEQ ID NO: 56924 - DNA, 20 bp, synthetic construct
  misc_feature 1..20: note = chemically synthesized
  source 1..20: mol_type = other DNA
gaccaggccctgtcacttac

SEQ ID NO: 56925 - DNA, 20 bp, synthetic construct
  misc_feature 1..20: note = chemically synthesized
  source 1..20: mol_type = other DNA
caggccctgtcacttactgg

SEQ ID NO: 56926 - DNA, 20 bp, synthetic construct
  misc_feature 1..20: note = chemically synthesized
  source 1..20: mol_type = other DNA
aggccctgtcacttactggc

SEQ ID NO: 56927 - DNA, 20 bp, synthetic construct
  misc_feature 1..20: note = chemically synthesized
  source 1..20: mol_type = other DNA
ggccctgtcacttactggca

SEQ ID NO: 56928 - DNA, 20 bp, synthetic construct
  misc_feature 1..20: note = chemically synthesized
  source 1..20: mol_type = other DNA
gccctgtcacttactggcag

SEQ ID NO: 56929 - DNA, 20 bp, synthetic construct
  misc_feature 1..20: note = chemically synthesized
  source 1..20: mol_type = other DNA
ccctgtcacttactggcagg

SEQ ID NO: 56930 - DNA, 20 bp, synthetic construct
  misc_feature 1..20: note = chemically synthesized
  source 1..20: mol_type = other DNA
tcacttactggcagggggcc

SEQ ID NO: 56931 - DNA, 20 bp, synthetic construct
  misc_feature 1..20: note = chemically synthesized
  source 1..20: mol_type = other DNA
cacttactggcagggggcct

SEQ ID NO: 56932 - DNA, 20 bp, synthetic construct
  misc_feature 1..20: note = chemically synthesized
  source 1..20: mol_type = other DNA
acttactggcagggggcctg

SEQ ID NO: 56933 - DNA, 20 bp, synthetic construct
  misc_feature 1..20: note = chemically synthesized
  source 1..20: mol_type = other DNA
gtaaatgacttcacttcttt

SEQ ID NO: 56934 - DNA, 20 bp, synthetic construct
  misc_feature 1..20: note = chemically synthesized
  source 1..20: mol_type = other DNA
gacttcacttctttgagcac

SEQ ID NO: 56935 - DNA, 20 bp, synthetic construct
  misc_feature 1..20: note = chemically synthesized
  source 1..20: mol_type = other DNA
ttctttgagcactagcttca

SEQ ID NO: 56936 - DNA, 20 bp, synthetic construct
  misc_feature 1..20: note = chemically synthesized
  source 1..20: mol_type = other DNA
ctagcttcatagctgtacaa

SEQ ID NO: 56937 - DNA, 20 bp, synthetic construct
  misc_feature 1..20: note = chemically synthesized
  source 1..20: mol_type = other DNA
agcttcatagctgtacaatg

SEQ ID NO: 56938 - DNA, 20 bp, synthetic construct
  misc_feature 1..20: note = chemically synthesized
  source 1..20: mol_type = other DNA
catagctgtacaatggagaa

SEQ ID NO: 56939 - DNA, 20 bp, synthetic construct
  misc_feature 1..20: note = chemically synthesized
  source 1..20: mol_type = other DNA
caatggagaaaagaatcctt

SEQ ID NO: 56940 - DNA, 20 bp, synthetic construct
  misc_feature 1..20: note = chemically synthesized
  source 1..20: mol_type = other DNA
ggagaaaagaatcctttgga

SEQ ID NO: 56941 - DNA, 20 bp, synthetic construct
  misc_feature 1..20: note = chemically synthesized
  source 1..20: mol_type = other DNA
gagaaaagaatcctttggac

SEQ ID NO: 56942 - DNA, 20 bp, synthetic construct
  misc_feature 1..20: note = chemically synthesized
  source 1..20: mol_type = other DNA
agaaaagaatcctttggaca

SEQ ID NO: 56943 - DNA, 20 bp, synthetic construct
  misc_feature 1..20: note = chemically synthesized
  source 1..20: mol_type = other DNA
agaatcctttggacagggat

SEQ ID NO: 56944 - DNA, 20 bp, synthetic construct
  misc_feature 1..20: note = chemically synthesized
  source 1..20: mol_type = other DNA
gaatcctttggacagggatg

SEQ ID NO: 56945 - DNA, 20 bp, synthetic construct
  misc_feature 1..20: note = chemically synthesized
  source 1..20: mol_type = other DNA
gaataactgacgtaatgcat

SEQ ID NO: 56946 - DNA, 20 bp, synthetic construct
  misc_feature 1..20: note = chemically synthesized
  source 1..20: mol_type = other DNA
taactgacgtaatgcatgag

SEQ ID NO: 56947 - DNA, 20 bp, synthetic construct
  misc_feature 1..20: note = chemically synthesized
  source 1..20: mol_type = other DNA
aactgacgtaatgcatgagt

SEQ ID NO: 56948 - DNA, 20 bp, synthetic construct
  misc_feature 1..20: note = chemically synthesized
  source 1..20: mol_type = other DNA
cgtaatgcatgagtgggcac

SEQ ID NO: 56949 - DNA, 20 bp, synthetic construct
  misc_feature 1..20: note = chemically synthesized
  source 1..20: mol_type = other DNA
gtaatgcatgagtgggcacc

SEQ ID NO: 56950 - DNA, 20 bp, synthetic construct
  misc_feature 1..20: note = chemically synthesized
  source 1..20: mol_type = other DNA
tgcatgagtgggcaccaggt

SEQ ID NO: 56951 - DNA, 20 bp, synthetic construct
  misc_feature 1..20: note = chemically synthesized
  source 1..20: mol_type = other DNA
gcatgagtgggcaccaggtg

SEQ ID NO: 56952 - DNA, 20 bp, synthetic construct
  misc_feature 1..20: note = chemically synthesized
  source 1..20: mol_type = other DNA
tgagtgggcaccaggtgagg

SEQ ID NO: 56953 - DNA, 20 bp, synthetic construct
  misc_feature 1..20: note = chemically synthesized
  source 1..20: mol_type = other DNA
gccctccctgtacctgcaca

SEQ ID NO: 56954 - DNA, 20 bp, synthetic construct
  misc_feature 1..20: note = chemically synthesized
  source 1..20: mol_type = other DNA
ccctccctgtacctgcacac

SEQ ID NO: 56955 - DNA, 20 bp, synthetic construct
  misc_feature 1..20: note = chemically synthesized
  source 1..20: mol_type = other DNA
cctgtacctgcacacaggtt

SEQ ID NO: 56956 - DNA, 20 bp, synthetic construct
  misc_feature 1..20: note = chemically synthesized
  source 1..20: mol_type = other DNA
cacaggttgagctcctgccc

SEQ ID NO: 56957 - DNA, 20 bp, synthetic construct
  misc_feature 1..20: note = chemically synthesized
  source 1..20: mol_type = other DNA
caggttgagctcctgcccga

SEQ ID NO: 56958 - DNA, 20 bp, synthetic construct
  misc_feature 1..20: note = chemically synthesized
  source 1..20: mol_type = other DNA
ttgagctcctgcccgagaga

SEQ ID NO: 56959 - DNA, 20 bp, synthetic construct
  misc_feature 1..20: note = chemically synthesized
  source 1..20: mol_type = other DNA
agctcctgcccgagagatgg

SEQ ID NO: 56960 - DNA, 20 bp, synthetic construct
  misc_feature 1..20: note = chemically synthesized
  source 1..20: mol_type = other DNA
agagatggtagatttcttcc

SEQ ID NO: 56961 - DNA, 20 bp, synthetic construct
  misc_feature 1..20: note = chemically synthesized
  source 1..20: mol_type = other DNA
agatggtagatttcttcccg

SEQ ID NO: 56962 - DNA, 20 bp, synthetic construct
  misc_feature 1..20: note = chemically synthesized
  source 1..20: mol_type = other DNA
atggtagatttcttcccgga

SEQ ID NO: 56963 - DNA, 20 bp, synthetic construct
  misc_feature 1..20: note = chemically synthesized
  source 1..20: mol_type = other DNA
ggagagcctgctgcactccc

SEQ ID NO: 56964 - DNA, 20 bp, synthetic construct
  misc_feature 1..20: note = chemically synthesized
  source 1..20: mol_type = other DNA
gagagcctgctgcactcccc

SEQ ID NO: 56965 - DNA, 20 bp, synthetic construct
  misc_feature 1..20: note = chemically synthesized
  source 1..20: mol_type = other DNA
tgcactccccaggaccattt

SEQ ID NO: 56966 - DNA, 20 bp, synthetic construct
  misc_feature 1..20: note = chemically synthesized
  source 1..20: mol_type = other DNA
actccccaggaccatttcag

SEQ ID NO: 56967 - DNA, 20 bp, synthetic construct
  misc_feature 1..20: note = chemically synthesized
  source 1..20: mol_type = other DNA
ctccccaggaccatttcagc

SEQ ID NO: 56968 - DNA, 20 bp, synthetic construct
  misc_feature 1..20: note = chemically synthesized
  source 1..20: mol_type = other DNA
cccaggaccatttcagcagg

SEQ ID NO: 56969 - DNA, 20 bp, synthetic construct
  misc_feature 1..20: note = chemically synthesized
  source 1..20: mol_type = other DNA
ccaggaccatttcagcagga

SEQ ID NO: 56970 - DNA, 20 bp, synthetic construct
  misc_feature 1..20: note = chemically synthesized
  source 1..20: mol_type = other DNA
caggaccatttcagcaggaa

SEQ ID NO: 56971 - DNA, 20 bp, synthetic construct
  misc_feature 1..20: note = chemically synthesized
  source 1..20: mol_type = other DNA
aggaccatttcagcaggaag

SEQ ID NO: 56972 - DNA, 20 bp, synthetic construct
  misc_feature 1..20: note = chemically synthesized
  source 1..20: mol_type = other DNA
agcaggaaggggctcctgct

SEQ ID NO: 56973 - DNA, 20 bp, synthetic construct
  misc_feature 1..20: note = chemically synthesized
  source 1..20: mol_type = other DNA
aggaaggggctcctgctcag

SEQ ID NO: 56974 - DNA, 20 bp, synthetic construct
  misc_feature 1..20: note = chemically synthesized
  source 1..20: mol_type = other DNA
ggctcctgctcagcagtgaa

SEQ ID NO: 56975 - DNA, 20 bp, synthetic construct
  misc_feature 1..20: note = chemically synthesized
  source 1..20: mol_type = other DNA
ctcagcagtgaacagcatct

SEQ ID NO: 56976 - DNA, 20 bp, synthetic construct
  misc_feature 1..20: note = chemically synthesized
  source 1..20: mol_type = other DNA
cagtgaacagcatctgagtt

SEQ ID NO: 56977 - DNA, 20 bp, synthetic construct
  misc_feature 1..20: note = chemically synthesized
  source 1..20: mol_type = other DNA
tccaactgtttactgcctgc

SEQ ID NO: 56978 - DNA, 20 bp, synthetic construct
  misc_feature 1..20: note = chemically synthesized
  source 1..20: mol_type = other DNA
cagctgcctaaccctatgct

SEQ ID NO: 56979 - DNA, 20 bp, synthetic construct
  misc_feature 1..20: note = chemically synthesized
  source 1..20: mol_type = other DNA
accctatgctaagcaaacat

SEQ ID NO: 56980 - DNA, 20 bp, synthetic construct
  misc_feature 1..20: note = chemically synthesized
  source 1..20: mol_type = other DNA
tgctaagcaaacatcagcct

SEQ ID NO: 56981 - DNA, 20 bp, synthetic construct
  misc_feature 1..20: note = chemically synthesized
  source 1..20: mol_type = other DNA
ttgccacacttactaacacc

SEQ ID NO: 56982 - DNA, 20 bp, synthetic construct
  misc_feature 1..20: note = chemically synthesized
  source 1..20: mol_type = other DNA
tactaacacctggtgtttta

SEQ ID NO: 56983 - DNA, 20 bp, synthetic construct
  misc_feature 1..20: note = chemically synthesized
  source 1..20: mol_type = other DNA
actaacacctggtgttttac

SEQ ID NO: 56984 - DNA, 20 bp, synthetic construct
  misc_feature 1..20: note = chemically synthesized
  source 1..20: mol_type = other DNA
tatcatctaatctgtcctca

SEQ ID NO: 56985 - DNA, 20 bp, synthetic construct
  misc_feature 1..20: note = chemically synthesized
  source 1..20: mol_type = other DNA
gtcctcaaagcttaccctat

SEQ ID NO: 56986 - DNA, 20 bp, synthetic construct
  misc_feature 1..20: note = chemically synthesized
  source 1..20: mol_type = other DNA
tcctcaaagcttaccctata

SEQ ID NO: 56987 - DNA, 20 bp, synthetic construct
  misc_feature 1..20: note = chemically synthesized
  source 1..20: mol_type = other DNA
ccctataaggtgcaaattat

SEQ ID NO: 56988 - DNA, 20 bp, synthetic construct
  misc_feature 1..20: note = chemically synthesized
  source 1..20: mol_type = other DNA
aaattattagccctatttta

SEQ ID NO: 56989 - DNA, 20 bp, synthetic construct
  misc_feature 1..20: note = chemically synthesized
  source 1..20: mol_type = other DNA
tattagccctattttataga

SEQ ID NO: 56990 - DNA, 20 bp, synthetic construct
  misc_feature 1..20: note = chemically synthesized
  source 1..20: mol_type = other DNA
attttatagatagaaaaatt

SEQ ID NO: 56991 - DNA, 20 bp, synthetic construct
  misc_feature 1..20: note = chemically synthesized
  source 1..20: mol_type = other DNA
gatagaaaaattgagcccca

SEQ ID NO: 56992 - DNA, 20 bp, synthetic construct
  misc_feature 1..20: note = chemically synthesized
  source 1..20: mol_type = other DNA
tagaaaaattgagccccaaa

SEQ ID NO: 56993 - DNA, 20 bp, synthetic construct
  misc_feature 1..20: note = chemically synthesized
  source 1..20: mol_type = other DNA
aaataactcactaaaaatca

SEQ ID NO: 56994 - DNA, 20 bp, synthetic construct
  misc_feature 1..20: note = chemically synthesized
  source 1..20: mol_type = other DNA
ataactcactaaaaatcaca

SEQ ID NO: 56995 - DNA, 20 bp, synthetic construct
  misc_feature 1..20: note = chemically synthesized
  source 1..20: mol_type = other DNA
agctacttgcttacaaaact

SEQ ID NO: 56996 - DNA, 20 bp, synthetic construct
  misc_feature 1..20: note = chemically synthesized
  source 1..20: mol_type = other DNA
gtaatcctaaatgttttgtc

SEQ ID NO: 56997 - DNA, 20 bp, synthetic construct
  misc_feature 1..20: note = chemically synthesized
  source 1..20: mol_type = other DNA
taatcctaaatgttttgtct

SEQ ID NO: 56998 - DNA, 20 bp, synthetic construct
  misc_feature 1..20: note = chemically synthesized
  source 1..20: mol_type = other DNA
atgttttgtctgggattaaa

SEQ ID NO: 56999 - DNA, 20 bp, synthetic construct
  misc_feature 1..20: note = chemically synthesized
  source 1..20: mol_type = other DNA
ttgaatcatctctgtgtaca

SEQ ID NO: 57000 - DNA, 20 bp, synthetic construct
  misc_feature 1..20: note = chemically synthesized
  source 1..20: mol_type = other DNA
catctctgtgtacaaagctg

SEQ ID NO: 57001 - DNA, 20 bp, synthetic construct
  misc_feature 1..20: note = chemically synthesized
  source 1..20: mol_type = other DNA
tctgtgtacaaagctgaagc

SEQ ID NO: 57002 - DNA, 20 bp, synthetic construct
  misc_feature 1..20: note = chemically synthesized
  source 1..20: mol_type = other DNA
gtgtacaaagctgaagccag

SEQ ID NO: 57003 - DNA, 20 bp, synthetic construct
  misc_feature 1..20: note = chemically synthesized
  source 1..20: mol_type = other DNA
tgaagccagaagtcttgaat

SEQ ID NO: 57004 - DNA, 20 bp, synthetic construct
  misc_feature 1..20: note = chemically synthesized
  source 1..20: mol_type = other DNA
agtcttgaatcagaaaactt

SEQ ID NO: 57005 - DNA, 20 bp, synthetic construct
  misc_feature 1..20: note = chemically synthesized
  source 1..20: mol_type = other DNA
tcttgaatcagaaaacttca

SEQ ID NO: 57006 - DNA, 20 bp, synthetic construct
  misc_feature 1..20: note = chemically synthesized
  source 1..20: mol_type = other DNA
cttgaatcagaaaacttcag

SEQ ID NO: 57007 - DNA, 20 bp, synthetic construct
  misc_feature 1..20: note = chemically synthesized
  source 1..20: mol_type = other DNA
gaatcagaaaacttcagagg

SEQ ID NO: 57008 - DNA, 20 bp, synthetic construct
  misc_feature 1..20: note = chemically synthesized
  source 1..20: mol_type = other DNA
agaaaacttcagaggcagcc

SEQ ID NO: 57009 - DNA, 20 bp, synthetic construct
  misc_feature 1..20: note = chemically synthesized
  source 1..20: mol_type = other DNA
agaggcagcctggctaaatg

SEQ ID NO: 57010 - DNA, 20 bp, synthetic construct
  misc_feature 1..20: note = chemically synthesized
  source 1..20: mol_type = other DNA
aggcagcctggctaaatgaa

SEQ ID NO: 57011 - DNA, 20 bp, synthetic construct
  misc_feature 1..20: note = chemically synthesized
  source 1..20: mol_type = other DNA
ggcagcctggctaaatgaag

SEQ ID NO: 57012 - DNA, 20 bp, synthetic construct
  misc_feature 1..20: note = chemically synthesized
  source 1..20: mol_type = other DNA
gcagcctggctaaatgaaga

SEQ ID NO: 57013 - DNA, 20 bp, synthetic construct
  misc_feature 1..20: note = chemically synthesized
  source 1..20: mol_type = other DNA
cagcctggctaaatgaagag

SEQ ID NO: 57014 - DNA, 20 bp, synthetic construct
  misc_feature 1..20: note = chemically synthesized
  source 1..20: mol_type = other DNA
gcctggctaaatgaagaggg

SEQ ID NO: 57015 - DNA, 20 bp, synthetic construct
  misc_feature 1..20: note = chemically synthesized
  source 1..20: mol_type = other DNA
ctaaatgaagaggggagcat

SEQ ID NO: 57016 - DNA, 20 bp, synthetic construct
  misc_feature 1..20: note = chemically synthesized
  source 1..20: mol_type = other DNA
aagaggggagcatcagtctg

SEQ ID NO: 57017 - DNA, 20 bp, synthetic construct
  misc_feature 1..20: note = chemically synthesized
  source 1..20: mol_type = other DNA
tcagtctgtggctaaaatta

SEQ ID NO: 57018 - DNA, 20 bp, synthetic construct
  misc_feature 1..20: note = chemically synthesized
  source 1..20: mol_type = other DNA
cagtctgtggctaaaattaa

SEQ ID NO: 57019 - DNA, 20 bp, synthetic construct
  misc_feature 1..20: note = chemically synthesized
  source 1..20: mol_type = other DNA
tggctaaaattaaaggctct

SEQ ID NO: 57020 - DNA, 20 bp, synthetic construct
  misc_feature 1..20: note = chemically synthesized
  source 1..20: mol_type = other DNA
ggctaaaattaaaggctctg

SEQ ID NO: 57021 - DNA, 20 bp, synthetic construct
  misc_feature 1..20: note = chemically synthesized
  source 1..20: mol_type = other DNA
aaaattaaaggctctgaggc

SEQ ID NO: 57022 - DNA, 20 bp, synthetic construct
  misc_feature 1..20: note = chemically synthesized
  source 1..20: mol_type = other DNA
gctccacgtcaacttgctat

SEQ ID NO: 57023 - DNA, 20 bp, synthetic construct
  misc_feature 1..20: note = chemically synthesized
  source 1..20: mol_type = other DNA
tgctattagctgtgtgacct

SEQ ID NO: 57024 - DNA, 20 bp, synthetic construct
  misc_feature 1..20: note = chemically synthesized
  source 1..20: mol_type = other DNA
ttagctgtgtgaccttggac

SEQ ID NO: 57025 - DNA, 20 bp, synthetic construct
  misc_feature 1..20: note = chemically synthesized
  source 1..20: mol_type = other DNA
tacttaacctctctgaacct

SEQ ID NO: 57026 - DNA, 20 bp, synthetic construct
  misc_feature 1..20: note = chemically synthesized
  source 1..20: mol_type = other DNA
ctctctgaacctcagtttcc

SEQ ID NO: 57027 - DNA, 20 bp, synthetic construct
  misc_feature 1..20: note = chemically synthesized
  source 1..20: mol_type = other DNA
ctctgaacctcagtttcctg

SEQ ID NO: 57028 - DNA, 20 bp, synthetic construct
  misc_feature 1..20: note = chemically synthesized
  source 1..20: mol_type = other DNA
aacctcagtttcctggagat

SEQ ID NO: 57029 - DNA, 20 bp, synthetic construct
  misc_feature 1..20: note = chemically synthesized
  source 1..20: mol_type = other DNA
tcagtttcctggagatgaga

SEQ ID NO: 57030 - DNA, 20 bp, synthetic construct
  misc_feature 1..20: note = chemically synthesized
  source 1..20: mol_type = other DNA
cagtttcctggagatgagaa

SEQ ID NO: 57031 - DNA, 20 bp, synthetic construct
  misc_feature 1..20: note = chemically synthesized
  source 1..20: mol_type = other DNA
tttcctggagatgagaaagg

SEQ ID NO: 57032 - DNA, 20 bp, synthetic construct
  misc_feature 1..20: note = chemically synthesized
  source 1..20: mol_type = other DNA
gagaaaggtggactttgtca

SEQ ID NO: 57033 - DNA, 20 bp, synthetic construct
  misc_feature 1..20: note = chemically synthesized
  source 1..20: mol_type = other DNA
gaaaggtggactttgtcata

SEQ ID NO: 57034 - DNA, 20 bp, synthetic construct
  misc_feature 1..20: note = chemically synthesized
  source 1..20: mol_type = other DNA
ttaaatacacataaaatgcc

SEQ ID NO: 57035 - DNA, 20 bp, synthetic construct
  misc_feature 1..20: note = chemically synthesized
  source 1..20: mol_type = other DNA
aatacacataaaatgccaag

SEQ ID NO: 57036 - DNA, 20 bp, synthetic construct
  misc_feature 1..20: note = chemically synthesized
  source 1..20: mol_type = other DNA
gccaagaagtgcctgctgcg

SEQ ID NO: 57037 - DNA, 20 bp, synthetic construct
  misc_feature 1..20: note = chemically synthesized
  source 1..20: mol_type = other DNA
agaagtgcctgctgcgcagc

SEQ ID NO: 57038 - DNA, 20 bp, synthetic construct
  misc_feature 1..20: note = chemically synthesized
  source 1..20: mol_type = other DNA
ctgctgcgcagcaagttctc

SEQ ID NO: 57039 - DNA, 20 bp, synthetic construct
  misc_feature 1..20: note = chemically synthesized
  source 1..20: mol_type = other DNA
cagcaagttctcgagaatac

SEQ ID NO: 57040 - DNA, 20 bp, synthetic construct
  misc_feature 1..20: note = chemically synthesized
  source 1..20: mol_type = other DNA
agttcttgctgctattgctg

SEQ ID NO: 57041 - DNA, 20 bp, synthetic construct
  misc_feature 1..20: note = chemically synthesized
  source 1..20: mol_type = other DNA
gttcttgctgctattgctgc

SEQ ID NO: 57042 - DNA, 20 bp, synthetic construct
  misc_feature 1..20: note = chemically synthesized
  source 1..20: mol_type = other DNA
tgctattgctgcaggtcttt

SEQ ID NO: 57043 - DNA, 20 bp, synthetic construct
  misc_feature 1..20: note = chemically synthesized
  source 1..20: mol_type = other DNA
ctattgctgcaggtctttta

SEQ ID NO: 57044 - DNA, 20 bp, synthetic construct
  misc_feature 1..20: note = chemically synthesized
  source 1..20: mol_type = other DNA
tattgctgcaggtcttttag

SEQ ID NO: 57045 - DNA, 20 bp, synthetic construct
  misc_feature 1..20: note = chemically synthesized
  source 1..20: mol_type = other DNA
ggtcttttagaggcgttcta

SEQ ID NO: 57046 - DNA, 20 bp, synthetic construct
  misc_feature 1..20: note = chemically synthesized
  source 1..20: mol_type = other DNA
gtcttttagaggcgttctat

SEQ ID NO: 57047 - DNA, 20 bp, synthetic construct
  misc_feature 1..20: note = chemically synthesized
  source 1..20: mol_type = other DNA
agaggcgttctataggaaac

SEQ ID NO: 57048 - DNA, 20 bp, synthetic construct
  misc_feature 1..20: note = chemically synthesized
  source 1..20: mol_type = other DNA
ctataggaaactggccacct

SEQ ID NO: 57049 - DNA, 20 bp, synthetic construct
  misc_feature 1..20: note = chemically synthesized
  source 1..20: mol_type = other DNA
gaaactggccaccttggcct

SEQ ID NO: 57050 - DNA, 20 bp, synthetic construct
  misc_feature 1..20: note = chemically synthesized
  source 1..20: mol_type = other DNA
tttgacctgtctccaaaact

SEQ ID NO: 57051 - DNA, 20 bp, synthetic construct
  misc_feature 1..20: note = chemically synthesized
  source 1..20: mol_type = other DNA
cctgtctccaaaactcagtg

SEQ ID NO: 57052 - DNA, 20 bp, synthetic construct
  misc_feature 1..20: note = chemically synthesized
  source 1..20: mol_type = other DNA
ctgtctccaaaactcagtgc

SEQ ID NO: 57053 - DNA, 20 bp, synthetic construct
  misc_feature 1..20: note = chemically synthesized
  source 1..20: mol_type = other DNA
attaaatccttccaacactt

SEQ ID NO: 57054 - DNA, 20 bp, synthetic construct
  misc_feature 1..20: note = chemically synthesized
  source 1..20: mol_type = other DNA
taaatccttccaacacttca

SEQ ID NO: 57055 - DNA, 20 bp, synthetic construct
  misc_feature 1..20: note = chemically synthesized
  source 1..20: mol_type = other DNA
cttccaacacttcagagatc

SEQ ID NO: 57056 - DNA, 20 bp, synthetic construct
  misc_feature 1..20: note = chemically synthesized
  source 1..20: mol_type = other DNA
ttccaacacttcagagatca

SEQ ID NO: 57057 - DNA, 20 bp, synthetic construct
  misc_feature 1..20: note = chemically synthesized
  source 1..20: mol_type = other DNA
aacacttcagagatcaaggt

SEQ ID NO: 57058 - DNA, 20 bp, synthetic construct
  misc_feature 1..20: note = chemically synthesized
  source 1..20: mol_type = other DNA
acacttcagagatcaaggtc

SEQ ID NO: 57059 - DNA, 20 bp, synthetic construct
  misc_feature 1..20: note = chemically synthesized
  source 1..20: mol_type = other DNA
cttcagagatcaaggtcggg

SEQ ID NO: 57060 - DNA, 20 bp, synthetic construct
  misc_feature 1..20: note = chemically synthesized
  source 1..20: mol_type = other DNA
ttcagagatcaaggtcgggt

SEQ ID NO: 57061 - DNA, 20 bp, synthetic construct
  misc_feature 1..20: note = chemically synthesized
  source 1..20: mol_type = other DNA
tcagagatcaaggtcgggtg

SEQ ID NO: 57062 - DNA, 20 bp, synthetic construct
  misc_feature 1..20: note = chemically synthesized
  source 1..20: mol_type = other DNA
agatcaaggtcgggtggggt

SEQ ID NO: 57063 - DNA, 20 bp, synthetic construct
  misc_feature 1..20: note = chemically synthesized
  source 1..20: mol_type = other DNA
gatcaaggtcgggtggggtg

SEQ ID NO: 57064 - DNA, 20 bp, synthetic construct
  misc_feature 1..20: note = chemically synthesized
  source 1..20: mol_type = other DNA
atcaaggtcgggtggggtga

SEQ ID NO: 57065 - DNA, 20 bp, synthetic construct
  misc_feature 1..20: note = chemically synthesized
  source 1..20: mol_type = other DNA
tcaaggtcgggtggggtgag

SEQ ID NO: 57066 - DNA, 20 bp, synthetic construct
  misc_feature 1..20: note = chemically synthesized
  source 1..20: mol_type = other DNA
aaggtcgggtggggtgaggg

SEQ ID NO: 57067 - DNA, 20 bp, synthetic construct
  misc_feature 1..20: note = chemically synthesized
  source 1..20: mol_type = other DNA
aggtcgggtggggtgagggg

SEQ ID NO: 57068 - DNA, 20 bp, synthetic construct
  misc_feature 1..20: note = chemically synthesized
  source 1..20: mol_type = other DNA
ggtcgggtggggtgagggga

SEQ ID NO: 57069 - DNA, 20 bp, synthetic construct
  misc_feature 1..20: note = chemically synthesized
  source 1..20: mol_type = other DNA
gtcgggtggggtgaggggag

SEQ ID NO: 57070 - DNA, 20 bp, synthetic construct
  misc_feature 1..20: note = chemically synthesized
  source 1..20: mol_type = other DNA
ggtggggtgaggggagggga

SEQ ID NO: 57071 - DNA, 20 bp, synthetic construct
  misc_feature 1..20: note = chemically synthesized
  source 1..20: mol_type = other DNA
ggggtgaggggaggggacag

SEQ ID NO: 57072 - DNA, 20 bp, synthetic construct
  misc_feature 1..20: note = chemically synthesized
  source 1..20: mol_type = other DNA
aggggaggggacagaagtca

SEQ ID NO: 57073 - DNA, 20 bp, synthetic construct
  misc_feature 1..20: note = chemically synthesized
  source 1..20: mol_type = other DNA
ggggaggggacagaagtcaa

SEQ ID NO: 57074 - DNA, 20 bp, synthetic construct
  misc_feature 1..20: note = chemically synthesized
  source 1..20: mol_type = other DNA
aaggttatcatgttttgccc

SEQ ID NO: 57075 - DNA, 20 bp, synthetic construct
  misc_feature 1..20: note = chemically synthesized
  source 1..20: mol_type = other DNA
ggttatcatgttttgcccaa

SEQ ID NO: 57076 - DNA, 20 bp, synthetic construct
  misc_feature 1..20: note = chemically synthesized
  source 1..20: mol_type = other DNA
tcatgttttgcccaagagaa

SEQ ID NO: 57077 - DNA, 20 bp, synthetic construct
  misc_feature 1..20: note = chemically synthesized
  source 1..20: mol_type = other DNA
atgttttgcccaagagaaca

SEQ ID NO: 57078 - DNA, 20 bp, synthetic construct
  misc_feature 1..20: note = chemically synthesized
  source 1..20: mol_type = other DNA
gttttgcccaagagaacaga

SEQ ID NO: 57079 - DNA, 20 bp, synthetic construct
  misc_feature 1..20: note = chemically synthesized
  source 1..20: mol_type = other DNA
ttttgcccaagagaacagag

SEQ ID NO: 57080 - DNA, 20 bp, synthetic construct
  misc_feature 1..20: note = chemically synthesized
  source 1..20: mol_type = other DNA
cccaagagaacagagaggtt

SEQ ID NO: 57081 - DNA, 20 bp, synthetic construct
  misc_feature 1..20: note = chemically synthesized
  source 1..20: mol_type = other DNA
agaggttgagcaactgtctg

SEQ ID NO: 57082 - DNA, 20 bp, synthetic construct
  misc_feature 1..20: note = chemically synthesized
  source 1..20: mol_type = other DNA
agcaactgtctgaagtcacc

SEQ ID NO: 57083 - DNA, 20 bp, synthetic construct
  misc_feature 1..20: note = chemically synthesized
  source 1..20: mol_type = other DNA
tgtctgaagtcaccgagcat

SEQ ID NO: 57084 - DNA, 20 bp, synthetic construct
  misc_feature 1..20: note = chemically synthesized
  source 1..20: mol_type = other DNA
tctgaagtcaccgagcatca

SEQ ID NO: 57085 - DNA, 20 bp, synthetic construct
  misc_feature 1..20: note = chemically synthesized
  source 1..20: mol_type = other DNA
tgaagtcaccgagcatcaga

SEQ ID NO: 57086 - DNA, 20 bp, synthetic construct
  misc_feature 1..20: note = chemically synthesized
  source 1..20: mol_type = other DNA
gaagtcaccgagcatcagag

SEQ ID NO: 57087 - DNA, 20 bp, synthetic construct
  misc_feature 1..20: note = chemically synthesized
  source 1..20: mol_type = other DNA
ccgagcatcagagaggcctc

SEQ ID NO: 57088 - DNA, 20 bp, synthetic construct
  misc_feature 1..20: note = chemically synthesized
  source 1..20: mol_type = other DNA
catcagagaggcctcaagtc

SEQ ID NO: 57089 - DNA, 20 bp, synthetic construct
  misc_feature 1..20: note = chemically synthesized
  source 1..20: mol_type = other DNA
gagaggcctcaagtccagcc

SEQ ID NO: 57090 - DNA, 20 bp, synthetic construct
  misc_feature 1..20: note = chemically synthesized
  source 1..20: mol_type = other DNA
agaggcctcaagtccagccc

SEQ ID NO: 57091 - DNA, 20 bp, synthetic construct
  misc_feature 1..20: note = chemically synthesized
  source 1..20: mol_type = other DNA
caggtttcctgttccccatc

SEQ ID NO: 57092 - DNA, 20 bp, synthetic construct
  misc_feature 1..20: note = chemically synthesized
  source 1..20: mol_type = other DNA
ctgttccccatccagcgcct

SEQ ID NO: 57093 - DNA, 20 bp, synthetic construct
  misc_feature 1..20: note = chemically synthesized
  source 1..20: mol_type = other DNA
ccatccagcgcctgagaccc

SEQ ID NO: 57094 - DNA, 20 bp, synthetic construct
  misc_feature 1..20: note = chemically synthesized
  source 1..20: mol_type = other DNA
atccagcgcctgagacccaa

SEQ ID NO: 57095 - DNA, 20 bp, synthetic construct
  misc_feature 1..20: note = chemically synthesized
  source 1..20: mol_type = other DNA
cgcctgagacccaagagaaa

SEQ ID NO: 57096 - DNA, 20 bp, synthetic construct
  misc_feature 1..20: note = chemically synthesized
  source 1..20: mol_type = other DNA
cccaagagaaacagtgacac

SEQ ID NO: 57097 - DNA, 20 bp, synthetic construct
  misc_feature 1..20: note = chemically synthesized
  source 1..20: mol_type = other DNA
ccaagagaaacagtgacact

SEQ ID NO: 57098 - DNA, 20 bp, synthetic construct
  misc_feature 1..20: note = chemically synthesized
  source 1..20: mol_type = other DNA
caagagaaacagtgacacta

SEQ ID NO: 57099 - DNA, 20 bp, synthetic construct
  misc_feature 1..20: note = chemically synthesized
  source 1..20: mol_type = other DNA
agaaacagtgacactagggc

SEQ ID NO: 57100 - DNA, 20 bp, synthetic construct
  misc_feature 1..20: note = chemically synthesized
  source 1..20: mol_type = other DNA
gaaacagtgacactagggcc

SEQ ID NO: 57101 - DNA, 20 bp, synthetic construct
  misc_feature 1..20: note = chemically synthesized
  source 1..20: mol_type = other DNA
gtgacactagggccaggttc

SEQ ID NO: 57102 - DNA, 20 bp, synthetic construct
  misc_feature 1..20: note = chemically synthesized
  source 1..20: mol_type = other DNA
gacactagggccaggttcaa

SEQ ID NO: 57103 - DNA, 20 bp, synthetic construct
  misc_feature 1..20: note = chemically synthesized
  source 1..20: mol_type = other DNA
tagggccaggttcaagagtt

SEQ ID NO: 57104 - DNA, 20 bp, synthetic construct
  misc_feature 1..20: note = chemically synthesized
  source 1..20: mol_type = other DNA
agggccaggttcaagagttt

SEQ ID NO: 57105 - DNA, 20 bp, synthetic construct
  misc_feature 1..20: note = chemically synthesized
  source 1..20: mol_type = other DNA
gggccaggttcaagagtttg

SEQ ID NO: 57106 - DNA, 20 bp, synthetic construct
  misc_feature 1..20: note = chemically synthesized
  source 1..20: mol_type = other DNA
aggttcaagagtttggggac

SEQ ID NO: 57107 - DNA, 20 bp, synthetic construct
  misc_feature 1..20: note = chemically synthesized
  source 1..20: mol_type = other DNA
gttcaagagtttggggactg

SEQ ID NO: 57108 - DNA, 20 bp, synthetic construct
  misc_feature 1..20: note = chemically synthesized
  source 1..20: mol_type = other DNA
aagagtttggggactggagc

SEQ ID NO: 57109 - DNA, 20 bp, synthetic construct
  misc_feature 1..20: note = chemically synthesized
  source 1..20: mol_type = other DNA
agagtttggggactggagcc

SEQ ID NO: 57110 - DNA, 20 bp, synthetic construct
  misc_feature 1..20: note = chemically synthesized
  source 1..20: mol_type = other DNA
gggactggagccaggtgcct

SEQ ID NO: 57111 - DNA, 20 bp, synthetic construct
  misc_feature 1..20: note = chemically synthesized
  source 1..20: mol_type = other DNA
aggtgcctgagcccgaatta

SEQ ID NO: 57112 - DNA, 20 bp, synthetic construct
  misc_feature 1..20: note = chemically synthesized
  source 1..20: mol_type = other DNA
gcctgagcccgaattatgga

SEQ ID NO: 57113 - DNA, 20 bp, synthetic construct
  misc_feature 1..20: note = chemically synthesized
  source 1..20: mol_type = other DNA
attatggatggtgtgtgatt

SEQ ID NO: 57114 - DNA, 20 bp, synthetic construct
  misc_feature 1..20: note = chemically synthesized
  source 1..20: mol_type = other DNA
ttatggatggtgtgtgattt

SEQ ID NO: 57115 - DNA, 20 bp, synthetic construct
  misc_feature 1..20: note = chemically synthesized
  source 1..20: mol_type = other DNA
tatggatggtgtgtgatttg

SEQ ID NO: 57116 - DNA, 20 bp, synthetic construct
  misc_feature 1..20: note = chemically synthesized
  source 1..20: mol_type = other DNA
gatggtgtgtgatttggggc

SEQ ID NO: 57117 - DNA, 20 bp, synthetic construct
  misc_feature 1..20: note = chemically synthesized
  source 1..20: mol_type = other DNA
catcttcctcatctgtaaaa

SEQ ID NO: 57118 - DNA, 20 bp, synthetic construct
  misc_feature 1..20: note = chemically synthesized
  source 1..20: mol_type = other DNA
atcttcctcatctgtaaaat

SEQ ID NO: 57119 - DNA, 20 bp, synthetic construct
  misc_feature 1..20: note = chemically synthesized
  source 1..20: mol_type = other DNA
ctgtaaaatgggaatcacac

SEQ ID NO: 57120 - DNA, 20 bp, synthetic construct
  misc_feature 1..20: note = chemically synthesized
  source 1..20: mol_type = other DNA
aatcacactagtaactgcct

SEQ ID NO: 57121 - DNA, 20 bp, synthetic construct
  misc_feature 1..20: note = chemically synthesized
  source 1..20: mol_type = other DNA
tcacactagtaactgccttg

SEQ ID NO: 57122 - DNA, 20 bp, synthetic construct
  misc_feature 1..20: note = chemically synthesized
  source 1..20: mol_type = other DNA
cacactagtaactgccttgg

SEQ ID NO: 57123 - DNA, 20 bp, synthetic construct
  misc_feature 1..20: note = chemically synthesized
  source 1..20: mol_type = other DNA
acactagtaactgccttgga

SEQ ID NO: 57124 - DNA, 20 bp, synthetic construct
  misc_feature 1..20: note = chemically synthesized
  source 1..20: mol_type = other DNA
taactgccttggagggttat

SEQ ID NO: 57125 - DNA, 20 bp, synthetic construct
  misc_feature 1..20: note = chemically synthesized
  source 1..20: mol_type = other DNA
aactgccttggagggttatg

SEQ ID NO: 57126 - DNA, 20 bp, synthetic construct
  misc_feature 1..20: note = chemically synthesized
  source 1..20: mol_type = other DNA
atgaggcttaatcacgcact

SEQ ID NO: 57127 - DNA, 20 bp, synthetic construct
  misc_feature 1..20: note = chemically synthesized
  source 1..20: mol_type = other DNA
gcttaatcacgcactgagct

SEQ ID NO: 57128 - DNA, 20 bp, synthetic construct
  misc_feature 1..20: note = chemically synthesized
  source 1..20: mol_type = other DNA
tcacgcactgagcttagccg

SEQ ID NO: 57129 - DNA, 20 bp, synthetic construct
  misc_feature 1..20: note = chemically synthesized
  source 1..20: mol_type = other DNA
cactgagcttagccgtggcc

SEQ ID NO: 57130 - DNA, 20 bp, synthetic construct
  misc_feature 1..20: note = chemically synthesized
  source 1..20: mol_type = other DNA
agcttagccgtggcctggtg

SEQ ID NO: 57131 - DNA, 20 bp, synthetic construct
  misc_feature 1..20: note = chemically synthesized
  source 1..20: mol_type = other DNA
cttagccgtggcctggtgca

SEQ ID NO: 57132 - DNA, 20 bp, synthetic construct
  misc_feature 1..20: note = chemically synthesized
  source 1..20: mol_type = other DNA
cctggtgcagagcgattatt

SEQ ID NO: 57133 - DNA, 20 bp, synthetic construct
  misc_feature 1..20: note = chemically synthesized
  source 1..20: mol_type = other DNA
ctggtgcagagcgattattc

SEQ ID NO: 57134 - DNA, 20 bp, synthetic construct
  misc_feature 1..20: note = chemically synthesized
  source 1..20: mol_type = other DNA
gagcgattattcaggaatgc

SEQ ID NO: 57135 - DNA, 20 bp, synthetic construct
  misc_feature 1..20: note = chemically synthesized
  source 1..20: mol_type = other DNA
ttattcaggaatgccagctt

SEQ ID NO: 57136 - DNA, 20 bp, synthetic construct
  misc_feature 1..20: note = chemically synthesized
  source 1..20: mol_type = other DNA
aggaatgccagcttgagccc

SEQ ID NO: 57137 - DNA, 20 bp, synthetic construct
  misc_feature 1..20: note = chemically synthesized
  source 1..20: mol_type = other DNA
ggaatgccagcttgagccct

SEQ ID NO: 57138 - DNA, 20 bp, synthetic construct
  misc_feature 1..20: note = chemically synthesized
  source 1..20: mol_type = other DNA
ccagcttgagccctgggtga

SEQ ID NO: 57139 - DNA, 20 bp, synthetic construct
  misc_feature 1..20: note = chemically synthesized
  source 1..20: mol_type = other DNA
ctgggtgacagtgcccctca

SEQ ID NO: 57140 - DNA, 20 bp, synthetic construct
  misc_feature 1..20: note = chemically synthesized
  source 1..20: mol_type = other DNA
cacagcttcctgtcctccac

SEQ ID NO: 57141 - DNA, 20 bp, synthetic construct
  misc_feature 1..20: note = chemically synthesized
  source 1..20: mol_type = other DNA
acagcttcctgtcctccact

SEQ ID NO: 57142 - DNA, 20 bp, synthetic construct
  misc_feature 1..20: note = chemically synthesized
  source 1..20: mol_type = other DNA
cttcctgtcctccactggga

SEQ ID NO: 57143 - DNA, 20 bp, synthetic construct
  misc_feature 1..20: note = chemically synthesized
  source 1..20: mol_type = other DNA
ttcctgtcctccactgggac

SEQ ID NO: 57144 - DNA, 20 bp, synthetic construct
  misc_feature 1..20: note = chemically synthesized
  source 1..20: mol_type = other DNA
cctgtcctccactgggacag

SEQ ID NO: 57145 - DNA, 20 bp, synthetic construct
  misc_feature 1..20: note = chemically synthesized
  source 1..20: mol_type = other DNA
ctgtcctccactgggacagg

SEQ ID NO: 57146 - DNA, 20 bp, synthetic construct
  misc_feature 1..20: note = chemically synthesized
  source 1..20: mol_type = other DNA
tgtcctccactgggacagga

SEQ ID NO: 57147 - DNA, 20 bp, synthetic construct
  misc_feature 1..20: note = chemically synthesized
  source 1..20: mol_type = other DNA
tccactgggacaggagggcc

SEQ ID NO: 57148 - DNA, 20 bp, synthetic construct
  misc_feature 1..20: note = chemically synthesized
  source 1..20: mol_type = other DNA
cactgggacaggagggccca

SEQ ID NO: 57149 - DNA, 20 bp, synthetic construct
  misc_feature 1..20: note = chemically synthesized
  source 1..20: mol_type = other DNA
actgggacaggagggcccag

SEQ ID NO: 57150 - DNA, 20 bp, synthetic construct
  misc_feature 1..20: note = chemically synthesized
  source 1..20: mol_type = other DNA
caggagggcccagaggtcca

SEQ ID NO: 57151 - DNA, 20 bp, synthetic construct
  misc_feature 1..20: note = chemically synthesized
  source 1..20: mol_type = other DNA
gcccagaggtccacggtgca

SEQ ID NO: 57152 - DNA, 20 bp, synthetic construct
  misc_feature 1..20: note = chemically synthesized
  source 1..20: mol_type = other DNA
cccagaggtccacggtgcat

SEQ ID NO: 57153 - DNA, 20 bp, synthetic construct
  misc_feature 1..20: note = chemically synthesized
  source 1..20: mol_type = other DNA
ccagaggtccacggtgcatg

SEQ ID NO: 57154 - DNA, 20 bp, synthetic construct
  misc_feature 1..20: note = chemically synthesized
  source 1..20: mol_type = other DNA
agaggtccacggtgcatggg

SEQ ID NO: 57155 - DNA, 20 bp, synthetic construct
  misc_feature 1..20: note = chemically synthesized
  source 1..20: mol_type = other DNA
gaggtccacggtgcatgggg

SEQ ID NO: 57156 - DNA, 20 bp, synthetic construct
  misc_feature 1..20: note = chemically synthesized
  source 1..20: mol_type = other DNA
ggggaggcccattttgatgt

SEQ ID NO: 57157 - DNA, 20 bp, synthetic construct
  misc_feature 1..20: note = chemically synthesized
  source 1..20: mol_type = other DNA
gggaggcccattttgatgta

SEQ ID NO: 57158 - DNA, 20 bp, synthetic construct
  misc_feature 1..20: note = chemically synthesized
  source 1..20: mol_type = other DNA
gcccattttgatgtaaggct

SEQ ID NO: 57159 - DNA, 20 bp, synthetic construct
  misc_feature 1..20: note = chemically synthesized
  source 1..20: mol_type = other DNA
cccattttgatgtaaggctg

SEQ ID NO: 57160 - DNA, 20 bp, synthetic construct
  misc_feature 1..20: note = chemically synthesized
  source 1..20: mol_type = other DNA
tttgatgtaaggctgaggcc

SEQ ID NO: 57161 - DNA, 20 bp, synthetic construct
  misc_feature 1..20: note = chemically synthesized
  source 1..20: mol_type = other DNA
tgtaaggctgaggcctggca

SEQ ID NO: 57162 - DNA, 20 bp, synthetic construct
  misc_feature 1..20: note = chemically synthesized
  source 1..20: mol_type = other DNA
gtaaggctgaggcctggcac

SEQ ID NO: 57163 - DNA, 20 bp, synthetic construct
  misc_feature 1..20: note = chemically synthesized
  source 1..20: mol_type = other DNA
gcctggcacaggtctgttcc

SEQ ID NO: 57164 - DNA, 20 bp, synthetic construct
  misc_feature 1..20: note = chemically synthesized
  source 1..20: mol_type = other DNA
ggtctgttcctggtcatatc

SEQ ID NO: 57165 - DNA, 20 bp, synthetic construct
  misc_feature 1..20: note = chemically synthesized
  source 1..20: mol_type = other DNA
tctgttcctggtcatatctg

SEQ ID NO: 57166 - DNA, 20 bp, synthetic construct
  misc_feature 1..20: note = chemically synthesized
  source 1..20: mol_type = other DNA
ctgttcctggtcatatctgg

SEQ ID NO: 57167 - DNA, 20 bp, synthetic construct
  misc_feature 1..20: note = chemically synthesized
  source 1..20: mol_type = other DNA
tgttcctggtcatatctgga

SEQ ID NO: 57168 - DNA, 20 bp, synthetic construct
  misc_feature 1..20: note = chemically synthesized
  source 1..20: mol_type = other DNA
gttcctggtcatatctggag

SEQ ID NO: 57169 - DNA, 20 bp, synthetic construct
  misc_feature 1..20: note = chemically synthesized
  source 1..20: mol_type = other DNA
ctggtcatatctggagggga

SEQ ID NO: 57170 - DNA, 20 bp, synthetic construct
  misc_feature 1..20: note = chemically synthesized
  source 1..20: mol_type = other DNA
ggtcatatctggaggggatg

SEQ ID NO: 57171 - DNA, 20 bp, synthetic construct
  misc_feature 1..20: note = chemically synthesized
  source 1..20: mol_type = other DNA
ctggaggggatggagaatgt

SEQ ID NO: 57172 - DNA, 20 bp, synthetic construct
  misc_feature 1..20: note = chemically synthesized
  source 1..20: mol_type = other DNA
aggggatggagaatgtgagc

SEQ ID NO: 57173 - DNA, 20 bp, synthetic construct
  misc_feature 1..20: note = chemically synthesized
  source 1..20: mol_type = other DNA
cgttcctccccacccctctc

SEQ ID NO: 57174 - DNA, 20 bp, synthetic construct
  misc_feature 1..20: note = chemically synthesized
  source 1..20: mol_type = other DNA
gaccttaacctcctcatcta

SEQ ID NO: 57175 - DNA, 20 bp, synthetic construct
  misc_feature 1..20: note = chemically synthesized
  source 1..20: mol_type = other DNA
cttaacctcctcatctatag

SEQ ID NO: 57176 - DNA, 20 bp, synthetic construct
  misc_feature 1..20: note = chemically synthesized
  source 1..20: mol_type = other DNA
ttaacctcctcatctataga

SEQ ID NO: 57177 - DNA, 20 bp, synthetic construct
  misc_feature 1..20: note = chemically synthesized
  source 1..20: mol_type = other DNA
taacctcctcatctatagaa

SEQ ID NO: 57178 - DNA, 20 bp, synthetic construct
  misc_feature 1..20: note = chemically synthesized
  source 1..20: mol_type = other DNA
aacctcctcatctatagaag

SEQ ID NO: 57179 - DNA, 20 bp, synthetic construct
  misc_feature 1..20: note = chemically synthesized
  source 1..20: mol_type = other DNA
cctcctcatctatagaaggg

SEQ ID NO: 57180 - DNA, 20 bp, synthetic construct
  misc_feature 1..20: note = chemically synthesized
  source 1..20: mol_type = other DNA
ctcatctatagaaggggaga

SEQ ID NO: 57181 - DNA, 20 bp, synthetic construct
  misc_feature 1..20: note = chemically synthesized
  source 1..20: mol_type = other DNA
ggggagaaagatgcatgccc

SEQ ID NO: 57182 - DNA, 20 bp, synthetic construct
  misc_feature 1..20: note = chemically synthesized
  source 1..20: mol_type = other DNA
gagaaagatgcatgcccaag

SEQ ID NO: 57183 - DNA, 20 bp, synthetic construct
  misc_feature 1..20: note = chemically synthesized
  source 1..20: mol_type = other DNA
aaagatgcatgcccaagcag

SEQ ID NO: 57184 - DNA, 20 bp, synthetic construct
  misc_feature 1..20: note = chemically synthesized
  source 1..20: mol_type = other DNA
aagatgcatgcccaagcagt

SEQ ID NO: 57185 - DNA, 20 bp, synthetic construct
  misc_feature 1..20: note = chemically synthesized
  source 1..20: mol_type = other DNA
gatgcatgcccaagcagtag

SEQ ID NO: 57186 - DNA, 20 bp, synthetic construct
  misc_feature 1..20: note = chemically synthesized
  source 1..20: mol_type = other DNA
tgcatgcccaagcagtagga

SEQ ID NO: 57187 - DNA, 20 bp, synthetic construct
  misc_feature 1..20: note = chemically synthesized
  source 1..20: mol_type = other DNA
gcatgcccaagcagtaggag

SEQ ID NO: 57188 - DNA, 20 bp, synthetic construct
  misc_feature 1..20: note = chemically synthesized
  source 1..20: mol_type = other DNA
tgcccaagcagtaggagagg

SEQ ID NO: 57189 - DNA, 20 bp, synthetic construct
  misc_feature 1..20: note = chemically synthesized
  source 1..20: mol_type = other DNA
caagcagtaggagaggtggt

SEQ ID NO: 57190 - DNA, 20 bp, synthetic construct
  misc_feature 1..20: note = chemically synthesized
  source 1..20: mol_type = other DNA
aagcagtaggagaggtggtg

SEQ ID NO: 57191 - DNA, 20 bp, synthetic construct
  misc_feature 1..20: note = chemically synthesized
  source 1..20: mol_type = other DNA
aggagaggtggtgaggctta

SEQ ID NO: 57192 - DNA, 20 bp, synthetic construct
  misc_feature 1..20: note = chemically synthesized
  source 1..20: mol_type = other DNA
ggagaggtggtgaggcttat

SEQ ID NO: 57193 - DNA, 20 bp, synthetic construct
  misc_feature 1..20: note = chemically synthesized
  source 1..20: mol_type = other DNA
agaggtggtgaggcttatag

SEQ ID NO: 57194 - DNA, 20 bp, synthetic construct
  misc_feature 1..20: note = chemically synthesized
  source 1..20: mol_type = other DNA
gtgaggcttataggagacaa

SEQ ID NO: 57195 - DNA, 20 bp, synthetic construct
  misc_feature 1..20: note = chemically synthesized
  source 1..20: mol_type = other DNA
ggcttataggagacaacaga

SEQ ID NO: 57196 - DNA, 20 bp, synthetic construct
  misc_feature 1..20: note = chemically synthesized
  source 1..20: mol_type = other DNA
gcttataggagacaacagac

SEQ ID NO: 57197 - DNA, 20 bp, synthetic construct
  misc_feature 1..20: note = chemically synthesized
  source 1..20: mol_type = other DNA
ttataggagacaacagacag

SEQ ID NO: 57198 - DNA, 20 bp, synthetic construct
  misc_feature 1..20: note = chemically synthesized
  source 1..20: mol_type = other DNA
caacagacaggagcccccga

SEQ ID NO: 57199 - DNA, 20 bp, synthetic construct
  misc_feature 1..20: note = chemically synthesized
  source 1..20: mol_type = other DNA
agacaggagcccccgacaga

SEQ ID NO: 57200 - DNA, 20 bp, synthetic construct
  misc_feature 1..20: note = chemically synthesized
  source 1..20: mol_type = other DNA
acaggagcccccgacagaca

SEQ ID NO: 57201 - DNA, 20 bp, synthetic construct
  misc_feature 1..20: note = chemically synthesized
  source 1..20: mol_type = other DNA
caggagcccccgacagacag

SEQ ID NO: 57202 - DNA, 20 bp, synthetic construct
  misc_feature 1..20: note = chemically synthesized
  source 1..20: mol_type = other DNA
ggagcccccgacagacagag

SEQ ID NO: 57203 - DNA, 20 bp, synthetic construct
  misc_feature 1..20: note = chemically synthesized
  source 1..20: mol_type = other DNA
agacagaggagctgtgcaaa

SEQ ID NO: 57204 - DNA, 20 bp, synthetic construct
  misc_feature 1..20: note = chemically synthesized
  source 1..20: mol_type = other DNA
agaggagctgtgcaaacaga

SEQ ID NO: 57205 - DNA, 20 bp, synthetic construct
  misc_feature 1..20: note = chemically synthesized
  source 1..20: mol_type = other DNA
gctgtgcaaacagaaagaaa

SEQ ID NO: 57206 - DNA, 20 bp, synthetic construct
  misc_feature 1..20: note = chemically synthesized
  source 1..20: mol_type = other DNA
ttgttgctgttgctgtatct

SEQ ID NO: 57207 - DNA, 20 bp, synthetic construct
  misc_feature 1..20: note = chemically synthesized
  source 1..20: mol_type = other DNA
tgctgttgctgtatcttggc

SEQ ID NO: 57208 - DNA, 20 bp, synthetic construct
  misc_feature 1..20: note = chemically synthesized
  source 1..20: mol_type = other DNA
ttggctggtgtcccccatcc

SEQ ID NO: 57209 - DNA, 20 bp, synthetic construct
  misc_feature 1..20: note = chemically synthesized
  source 1..20: mol_type = other DNA
tggctggtgtcccccatcct

SEQ ID NO: 57210 - DNA, 20 bp, synthetic construct
  misc_feature 1..20: note = chemically synthesized
  source 1..20: mol_type = other DNA
ggctggtgtcccccatcctg

SEQ ID NO: 57211 - DNA, 20 bp, synthetic construct
  misc_feature 1..20: note = chemically synthesized
  source 1..20: mol_type = other DNA
tgtcccccatcctggggtgc

SEQ ID NO: 57212 - DNA, 20 bp, synthetic construct
  misc_feature 1..20: note = chemically synthesized
  source 1..20: mol_type = other DNA
gtcccccatcctggggtgcc

SEQ ID NO: 57213 - DNA, 20 bp, synthetic construct
  misc_feature 1..20: note = chemically synthesized
  source 1..20: mol_type = other DNA
atcctggggtgccaggactg

SEQ ID NO: 57214 - DNA, 20 bp, synthetic construct
  misc_feature 1..20: note = chemically synthesized
  source 1..20: mol_type = other DNA
gggtgccaggactgcagacc

SEQ ID NO: 57215 - DNA, 20 bp, synthetic construct
  misc_feature 1..20: note = chemically synthesized
  source 1..20: mol_type = other DNA
ccctcatccacttctgctta

SEQ ID NO: 57216 - DNA, 20 bp, synthetic construct
  misc_feature 1..20: note = chemically synthesized
  source 1..20: mol_type = other DNA
cctcatccacttctgcttac

SEQ ID NO: 57217 - DNA, 20 bp, synthetic construct
  misc_feature 1..20: note = chemically synthesized
  source 1..20: mol_type = other DNA
ccacttctgcttacaggaac

SEQ ID NO: 57218 - DNA, 20 bp, synthetic construct
  misc_feature 1..20: note = chemically synthesized
  source 1..20: mol_type = other DNA
acaggaaccagtgtatccac

SEQ ID NO: 57219 - DNA, 20 bp, synthetic construct
  misc_feature 1..20: note = chemically synthesized
  source 1..20: mol_type = other DNA
caggaaccagtgtatccacc

SEQ ID NO: 57220 - DNA, 20 bp, synthetic construct
  misc_feature 1..20: note = chemically synthesized
  source 1..20: mol_type = other DNA
ggaaccagtgtatccaccag

SEQ ID NO: 57221 - DNA, 20 bp, synthetic construct
  misc_feature 1..20: note = chemically synthesized
  source 1..20: mol_type = other DNA
gaaccagtgtatccaccagg

SEQ ID NO: 57222 - DNA, 20 bp, synthetic construct
  misc_feature 1..20: note = chemically synthesized
  source 1..20: mol_type = other DNA
tgtatccaccaggaggtacc

SEQ ID NO: 57223 - DNA, 20 bp, synthetic construct
  misc_feature 1..20: note = chemically synthesized
  source 1..20: mol_type = other DNA
gtatccaccaggaggtaccg

SEQ ID NO: 57224 - DNA, 20 bp, synthetic construct
  misc_feature 1..20: note = chemically synthesized
  source 1..20: mol_type = other DNA
tatccaccaggaggtaccga

SEQ ID NO: 57225 - DNA, 20 bp, synthetic construct
  misc_feature 1..20: note = chemically synthesized
  source 1..20: mol_type = other DNA
atccaccaggaggtaccgag

SEQ ID NO: 57226 - DNA, 20 bp, synthetic construct
  misc_feature 1..20: note = chemically synthesized
  source 1..20: mol_type = other DNA
tccaccaggaggtaccgagg

SEQ ID NO: 57227 - DNA, 20 bp, synthetic construct
  misc_feature 1..20: note = chemically synthesized
  source 1..20: mol_type = other DNA
ccaccaggaggtaccgaggg

SEQ ID NO: 57228 - DNA, 20 bp, synthetic construct
  misc_feature 1..20: note = chemically synthesized
  source 1..20: mol_type = other DNA
aggaggtaccgaggggggac

SEQ ID NO: 57229 - DNA, 20 bp, synthetic construct
  misc_feature 1..20: note = chemically synthesized
  source 1..20: mol_type = other DNA
ggaggtaccgaggggggacc

SEQ ID NO: 57230 - DNA, 20 bp, synthetic construct
  misc_feature 1..20: note = chemically synthesized
  source 1..20: mol_type = other DNA
ggtaccgaggggggaccggg

SEQ ID NO: 57231 - DNA, 20 bp, synthetic construct
  misc_feature 1..20: note = chemically synthesized
  source 1..20: mol_type = other DNA
gtaccgaggggggaccgggc

SEQ ID NO: 57232 - DNA, 20 bp, synthetic construct
  misc_feature 1..20: note = chemically synthesized
  source 1..20: mol_type = other DNA
gaggggggaccgggcaggac

SEQ ID NO: 57233 - DNA, 20 bp, synthetic construct
  misc_feature 1..20: note = chemically synthesized
  source 1..20: mol_type = other DNA
aggggggaccgggcaggact

SEQ ID NO: 57234 - DNA, 20 bp, synthetic construct
  misc_feature 1..20: note = chemically synthesized
  source 1..20: mol_type = other DNA
gaccgggcaggactgggaaa

SEQ ID NO: 57235 - DNA, 20 bp, synthetic construct
  misc_feature 1..20: note = chemically synthesized
  source 1..20: mol_type = other DNA
accgggcaggactgggaaac

SEQ ID NO: 57236 - DNA, 20 bp, synthetic construct
  misc_feature 1..20: note = chemically synthesized
  source 1..20: mol_type = other DNA
gaaacaggacacaaccctca

SEQ ID NO: 57237 - DNA, 20 bp, synthetic construct
  misc_feature 1..20: note = chemically synthesized
  source 1..20: mol_type = other DNA
ggctgctgttattatgaaaa

SEQ ID NO: 57238 - DNA, 20 bp, synthetic construct
  misc_feature 1..20: note = chemically synthesized
  source 1..20: mol_type = other DNA
gctgctgttattatgaaaat

SEQ ID NO: 57239 - DNA, 20 bp, synthetic construct
  misc_feature 1..20: note = chemically synthesized
  source 1..20: mol_type = other DNA
tgctgttattatgaaaatag

SEQ ID NO: 57240 - DNA, 20 bp, synthetic construct
  misc_feature 1..20: note = chemically synthesized
  source 1..20: mol_type = other DNA
ttattatgaaaataggagct

SEQ ID NO: 57241 - DNA, 20 bp, synthetic construct
  misc_feature 1..20: note = chemically synthesized
  source 1..20: mol_type = other DNA
tgaaaataggagctcagctg

SEQ ID NO: 57242 - DNA, 20 bp, synthetic construct
  misc_feature 1..20: note = chemically synthesized
  source 1..20: mol_type = other DNA
tctccatctgccctgcacct

SEQ ID NO: 57243 - DNA, 20 bp, synthetic construct
  misc_feature 1..20: note = chemically synthesized
  source 1..20: mol_type = other DNA
ccatctgccctgcacctcag

SEQ ID NO: 57244 - DNA, 20 bp, synthetic construct
  misc_feature 1..20: note = chemically synthesized
  source 1..20: mol_type = other DNA
catctgccctgcacctcagc

SEQ ID NO: 57245 - DNA, 20 bp, synthetic construct
  misc_feature 1..20: note = chemically synthesized
  source 1..20: mol_type = other DNA
ctgccctgcacctcagcagg

SEQ ID NO: 57246 - DNA, 20 bp, synthetic construct
  misc_feature 1..20: note = chemically synthesized
  source 1..20: mol_type = other DNA
ccacaacccccctcctgccc

SEQ ID NO: 57247 - DNA, 20 bp, synthetic construct
  misc_feature 1..20: note = chemically synthesized
  source 1..20: mol_type = other DNA
ccccagacctgctgcctgcc

SEQ ID NO: 57248 - DNA, 20 bp, synthetic construct
  misc_feature 1..20: note = chemically synthesized
  source 1..20: mol_type = other DNA
cccagacctgctgcctgcct

SEQ ID NO: 57249 - DNA, 20 bp, synthetic construct
  misc_feature 1..20: note = chemically synthesized
  source 1..20: mol_type = other DNA
cctgctgcctgcctgggcca

SEQ ID NO: 57250 - DNA, 20 bp, synthetic construct
  misc_feature 1..20: note = chemically synthesized
  source 1..20: mol_type = other DNA
ctgctgcctgcctgggccat

SEQ ID NO: 57251 - DNA, 20 bp, synthetic construct
  misc_feature 1..20: note = chemically synthesized
  source 1..20: mol_type = other DNA
tgctgcctgcctgggccatg

SEQ ID NO: 57252 - DNA, 20 bp, synthetic construct
  misc_feature 1..20: note = chemically synthesized
  source 1..20: mol_type = other DNA
ctgcctgcctgggccatggg

SEQ ID NO: 57253 - DNA, 20 bp, synthetic construct
  misc_feature 1..20: note = chemically synthesized
  source 1..20: mol_type = other DNA
tgcctgggccatggggagct

SEQ ID NO: 57254 - DNA, 20 bp, synthetic construct
  misc_feature 1..20: note = chemically synthesized
  source 1..20: mol_type = other DNA
ctgggccatggggagctcag

SEQ ID NO: 57255 - DNA, 20 bp, synthetic construct
  misc_feature 1..20: note = chemically synthesized
  source 1..20: mol_type = other DNA
ggggagctcagaagcctctc

SEQ ID NO: 57256 - DNA, 20 bp, synthetic construct
  misc_feature 1..20: note = chemically synthesized
  source 1..20: mol_type = other DNA
agcctctccagaacctctcg

SEQ ID NO: 57257 - DNA, 20 bp, synthetic construct
  misc_feature 1..20: note = chemically synthesized
  source 1..20: mol_type = other DNA
tccagaacctctcgcagtga

SEQ ID NO: 57258 - DNA, 20 bp, synthetic construct
  misc_feature 1..20: note = chemically synthesized
  source 1..20: mol_type = other DNA
ccagaacctctcgcagtgaa

SEQ ID NO: 57259 - DNA, 20 bp, synthetic construct
  misc_feature 1..20: note = chemically synthesized
  source 1..20: mol_type = other DNA
atacttacgattcactgtcc

SEQ ID NO: 57260 - DNA, 20 bp, synthetic construct
  misc_feature 1..20: note = chemically synthesized
  source 1..20: mol_type = other DNA
tacttacgattcactgtccc

SEQ ID NO: 57261 - DNA, 20 bp, synthetic construct
  misc_feature 1..20: note = chemically synthesized
  source 1..20: mol_type = other DNA
tacgattcactgtcccaggt

SEQ ID NO: 57262 - DNA, 20 bp, synthetic construct
  misc_feature 1..20: note = chemically synthesized
  source 1..20: mol_type = other DNA
gattcactgtcccaggtcag

SEQ ID NO: 57263 - DNA, 20 bp, synthetic construct
  misc_feature 1..20: note = chemically synthesized
  source 1..20: mol_type = other DNA
tcactgtcccaggtcagtgg

SEQ ID NO: 57264 - DNA, 20 bp, synthetic construct
  misc_feature 1..20: note = chemically synthesized
  source 1..20: mol_type = other DNA
caggtcagtggtggtgcctg

SEQ ID NO: 57265 - DNA, 20 bp, synthetic construct
  misc_feature 1..20: note = chemically synthesized
  source 1..20: mol_type = other DNA
cagtggtggtgcctgaagct

SEQ ID NO: 57266 - DNA, 20 bp, synthetic construct
  misc_feature 1..20: note = chemically synthesized
  source 1..20: mol_type = other DNA
agtggtggtgcctgaagctg

SEQ ID NO: 57267 - DNA, 20 bp, synthetic construct
  misc_feature 1..20: note = chemically synthesized
  source 1..20: mol_type = other DNA
tggtggtgcctgaagctgag

SEQ ID NO: 57268 - DNA, 20 bp, synthetic construct
  misc_feature 1..20: note = chemically synthesized
  source 1..20: mol_type = other DNA
ggtgcctgaagctgaggaga

SEQ ID NO: 57269 - DNA, 20 bp, synthetic construct
  misc_feature 1..20: note = chemically synthesized
  source 1..20: mol_type = other DNA
gtgcctgaagctgaggagac

SEQ ID NO: 57270 - DNA, 20 bp, synthetic construct
  misc_feature 1..20: note = chemically synthesized
  source 1..20: mol_type = other DNA
tgcctgaagctgaggagaca

SEQ ID NO: 57271 - DNA, 20 bp, synthetic construct
  misc_feature 1..20: note = chemically synthesized
  source 1..20: mol_type = other DNA
ccctgtcctcgtccgtattt

SEQ ID NO: 57272 - DNA, 20 bp, synthetic construct
  misc_feature 1..20: note = chemically synthesized
  source 1..20: mol_type = other DNA
tgtcctcgtccgtatttaag

SEQ ID NO: 57273 - DNA, 20 bp, synthetic construct
  misc_feature 1..20: note = chemically synthesized
  source 1..20: mol_type = other DNA
cctcgtccgtatttaagcag

SEQ ID NO: 57274 - DNA, 20 bp, synthetic construct
  misc_feature 1..20: note = chemically synthesized
  source 1..20: mol_type = other DNA
ccgtatttaagcagtggatc

SEQ ID NO: 57275 - DNA, 20 bp, synthetic construct
  misc_feature 1..20: note = chemically synthesized
  source 1..20: mol_type = other DNA
gtatttaagcagtggatcca

SEQ ID NO: 57276 - DNA, 20 bp, synthetic construct
  misc_feature 1..20: note = chemically synthesized
  source 1..20: mol_type = other DNA
tatttaagcagtggatccag

SEQ ID NO: 57277 - DNA, 20 bp, synthetic construct
  misc_feature 1..20: note = chemically synthesized
  source 1..20: mol_type = other DNA
atttaagcagtggatccaga

SEQ ID NO: 57278 - DNA, 20 bp, synthetic construct
  misc_feature 1..20: note = chemically synthesized
  source 1..20: mol_type = other DNA
tttaagcagtggatccagag

SEQ ID NO: 57279 - DNA, 20 bp, synthetic construct
  misc_feature 1..20: note = chemically synthesized
  source 1..20: mol_type = other DNA
cagtggatccagaggggcaa

SEQ ID NO: 57280 - DNA, 20 bp, synthetic construct
  misc_feature 1..20: note = chemically synthesized
  source 1..20: mol_type = other DNA
agtggatccagaggggcaac

SEQ ID NO: 57281 - DNA, 20 bp, synthetic construct
  misc_feature 1..20: note = chemically synthesized
  source 1..20: mol_type = other DNA
gtggatccagaggggcaacg

SEQ ID NO: 57282 - DNA, 20 bp, synthetic construct
  misc_feature 1..20: note = chemically synthesized
  source 1..20: mol_type = other DNA
tggatccagaggggcaacgg

SEQ ID NO: 57283 - DNA, 20 bp, synthetic construct
  misc_feature 1..20: note = chemically synthesized
  source 1..20: mol_type = other DNA
gatccagaggggcaacgggg

SEQ ID NO: 57284 - DNA, 20 bp, synthetic construct
  misc_feature 1..20: note = chemically synthesized
  source 1..20: mol_type = other DNA
atccagaggggcaacggggg

SEQ ID NO: 57285 - DNA, 20 bp, synthetic construct
  misc_feature 1..20: note = chemically synthesized
  source 1..20: mol_type = other DNA
ggggcaacgggggaggctgc

SEQ ID NO: 57286 - DNA, 20 bp, synthetic construct
  misc_feature 1..20: note = chemically synthesized
  source 1..20: mol_type = other DNA
gctgctggtgaatattaacc

SEQ ID NO: 57287 - DNA, 20 bp, synthetic construct
  misc_feature 1..20: note = chemically synthesized
  source 1..20: mol_type = other DNA
ctgctggtgaatattaacca

SEQ ID NO: 57288 - DNA, 20 bp, synthetic construct
  misc_feature 1..20: note = chemically synthesized
  source 1..20: mol_type = other DNA
aatattaaccaaggtcaccc

SEQ ID NO: 57289 - DNA, 20 bp, synthetic construct
  misc_feature 1..20: note = chemically synthesized
  source 1..20: mol_type = other DNA
accaaggtcaccccagttat

SEQ ID NO: 57290 - DNA, 20 bp, synthetic construct
  misc_feature 1..20: note = chemically synthesized
  source 1..20: mol_type = other DNA
caaggtcaccccagttatcg

SEQ ID NO: 57291 - DNA, 20 bp, synthetic construct
  misc_feature 1..20: note = chemically synthesized
  source 1..20: mol_type = other DNA
aaggtcaccccagttatcgg

SEQ ID NO: 57292 - DNA, 20 bp, synthetic construct
  misc_feature 1..20: note = chemically synthesized
  source 1..20: mol_type = other DNA
ggtcaccccagttatcggag

SEQ ID NO: 57293 - DNA, 20 bp, synthetic construct
  misc_feature 1..20: note = chemically synthesized
  source 1..20: mol_type = other DNA
ccagttatcggaggagcaaa

SEQ ID NO: 57294 - DNA, 20 bp, synthetic construct
  misc_feature 1..20: note = chemically synthesized
  source 1..20: mol_type = other DNA
cagttatcggaggagcaaac

SEQ ID NO: 57295 - DNA, 20 bp, synthetic construct
  misc_feature 1..20: note = chemically synthesized
  source 1..20: mol_type = other DNA
agttatcggaggagcaaaca

SEQ ID NO: 57296 - DNA, 20 bp, synthetic construct
  misc_feature 1..20: note = chemically synthesized
  source 1..20: mol_type = other DNA
gttatcggaggagcaaacag

SEQ ID NO: 57297 - DNA, 20 bp, synthetic construct
  misc_feature 1..20: note = chemically synthesized
  source 1..20: mol_type = other DNA
cggaggagcaaacaggggct

SEQ ID NO: 57298 - DNA, 20 bp, synthetic construct
  misc_feature 1..20: note = chemically synthesized
  source 1..20: mol_type = other DNA
caaacaggggctaagtccac

SEQ ID NO: 57299 - DNA, 20 bp, synthetic construct
  misc_feature 1..20: note = chemically synthesized
  source 1..20: mol_type = other DNA
caggggctaagtccactggc

SEQ ID NO: 57300 - DNA, 20 bp, synthetic construct
  misc_feature 1..20: note = chemically synthesized
  source 1..20: mol_type = other DNA
aggggctaagtccactggct

SEQ ID NO: 57301 - DNA, 20 bp, synthetic construct
  misc_feature 1..20: note = chemically synthesized
  source 1..20: mol_type = other DNA
aagtccactggctgggatct

SEQ ID NO: 57302 - DNA, 20 bp, synthetic construct
  misc_feature 1..20: note = chemically synthesized
  source 1..20: mol_type = other DNA
agtcgcccgcctacgctgcc

SEQ ID NO: 57303 - DNA, 20 bp, synthetic construct
  misc_feature 1..20: note = chemically synthesized
  source 1..20: mol_type = other DNA
cgctgcccggacgctttgcc

SEQ ID NO: 57304 - DNA, 20 bp, synthetic construct
  misc_feature 1..20: note = chemically synthesized
  source 1..20: mol_type = other DNA
gctgcccggacgctttgcct

SEQ ID NO: 57305 - DNA, 20 bp, synthetic construct
  misc_feature 1..20: note = chemically synthesized
  source 1..20: mol_type = other DNA
gcccggacgctttgcctggg

SEQ ID NO: 57306 - DNA, 20 bp, synthetic construct
  misc_feature 1..20: note = chemically synthesized
  source 1..20: mol_type = other DNA
cgctttgcctgggcagtgta

SEQ ID NO: 57307 - DNA, 20 bp, synthetic construct
  misc_feature 1..20: note = chemically synthesized
  source 1..20: mol_type = other DNA
gcttccactgcacttaccga

SEQ ID NO: 57308 - DNA, 20 bp, synthetic construct
  misc_feature 1..20: note = chemically synthesized
  source 1..20: mol_type = other DNA
cttccactgcacttaccgaa

SEQ ID NO: 57309 - DNA, 20 bp, synthetic construct
  misc_feature 1..20: note = chemically synthesized
  source 1..20: mol_type = other DNA
tccactgcacttaccgaaag

SEQ ID NO: 57310 - DNA, 20 bp, synthetic construct
  misc_feature 1..20: note = chemically synthesized
  source 1..20: mol_type = other DNA
ccgaaaggagtcattgtacc

SEQ ID NO: 57311 - DNA, 20 bp, synthetic construct
  misc_feature 1..20: note = chemically synthesized
  source 1..20: mol_type = other DNA
aggagtcattgtacctggct

SEQ ID NO: 57312 - DNA, 20 bp, synthetic construct
  misc_feature 1..20: note = chemically synthesized
  source 1..20: mol_type = other DNA
tgtacctggctcagaaacca

SEQ ID NO: 57313 - DNA, 20 bp, synthetic construct
  misc_feature 1..20: note = chemically synthesized
  source 1..20: mol_type = other DNA
aaccacagcgtcctgtgtcc

SEQ ID NO: 57314 - DNA, 20 bp, synthetic construct
  misc_feature 1..20: note = chemically synthesized
  source 1..20: mol_type = other DNA
accacagcgtcctgtgtcca

SEQ ID NO: 57315 - DNA, 20 bp, synthetic construct
  misc_feature 1..20: note = chemically synthesized
  source 1..20: mol_type = other DNA
acagcgtcctgtgtccaagg

SEQ ID NO: 57316 - DNA, 20 bp, synthetic construct
  misc_feature 1..20: note = chemically synthesized
  source 1..20: mol_type = other DNA
agcgtcctgtgtccaaggtg

SEQ ID NO: 57317 - DNA, 20 bp, synthetic construct
  misc_feature 1..20: note = chemically synthesized
  source 1..20: mol_type = other DNA
gcgtcctgtgtccaaggtgg

SEQ ID NO: 57318 - DNA, 20 bp, synthetic construct
  misc_feature 1..20: note = chemically synthesized
  source 1..20: mol_type = other DNA
cgtcctgtgtccaaggtgga

SEQ ID NO: 57319 - DNA, 20 bp, synthetic construct
  misc_feature 1..20: note = chemically synthesized
  source 1..20: mol_type = other DNA
gtcctgtgtccaaggtggag

SEQ ID NO: 57320 - DNA, 20 bp, synthetic construct
  misc_feature 1..20: note = chemically synthesized
  source 1..20: mol_type = other DNA
tcctgtgtccaaggtggagg

SEQ ID NO: 57321 - DNA, 20 bp, synthetic construct
  misc_feature 1..20: note = chemically synthesized
  source 1..20: mol_type = other DNA
tgtgtccaaggtggaggggg

SEQ ID NO: 57322 - DNA, 20 bp, synthetic construct
  misc_feature 1..20: note = chemically synthesized
  source 1..20: mol_type = other DNA
caaggtggagggggtggcgt

SEQ ID NO: 57323 - DNA, 20 bp, synthetic construct
  misc_feature 1..20: note = chemically synthesized
  source 1..20: mol_type = other DNA
gtggagggggtggcgtgagt

SEQ ID NO: 57324 - DNA, 20 bp, synthetic construct
  misc_feature 1..20: note = chemically synthesized
  source 1..20: mol_type = other DNA
agggggtggcgtgagtcaga

SEQ ID NO: 57325 - DNA, 20 bp, synthetic construct
  misc_feature 1..20: note = chemically synthesized
  source 1..20: mol_type = other DNA
ggcgtgagtcagacagtctc

SEQ ID NO: 57326 - DNA, 20 bp, synthetic construct
  misc_feature 1..20: note = chemically synthesized
  source 1..20: mol_type = other DNA
gcgtgagtcagacagtctct

SEQ ID NO: 57327 - DNA, 20 bp, synthetic construct
  misc_feature 1..20: note = chemically synthesized
  source 1..20: mol_type = other DNA
gtgagtcagacagtctctgg

SEQ ID NO: 57328 - DNA, 20 bp, synthetic construct
  misc_feature 1..20: note = chemically synthesized
  source 1..20: mol_type = other DNA
gagtcagacagtctctggga

SEQ ID NO: 57329 - DNA, 20 bp, synthetic construct
  misc_feature 1..20: note = chemically synthesized
  source 1..20: mol_type = other DNA
gtctctgggagagtaccact

SEQ ID NO: 57330 - DNA, 20 bp, synthetic construct
  misc_feature 1..20: note = chemically synthesized
  source 1..20: mol_type = other DNA
ctgggagagtaccacttagc

SEQ ID NO: 57331 - DNA, 20 bp, synthetic construct
  misc_feature 1..20: note = chemically synthesized
  source 1..20: mol_type = other DNA
ctggccctctgctctcactg

SEQ ID NO: 57332 - DNA, 20 bp, synthetic construct
  misc_feature 1..20: note = chemically synthesized
  source 1..20: mol_type = other DNA
tgctctcactgcagaatcct

SEQ ID NO: 57333 - DNA, 20 bp, synthetic construct
  misc_feature 1..20: note = chemically synthesized
  source 1..20: mol_type = other DNA
tctcactgcagaatccttag

SEQ ID NO: 57334 - DNA, 20 bp, synthetic construct
  misc_feature 1..20: note = chemically synthesized
  source 1..20: mol_type = other DNA
atccttagtggctgttccac

SEQ ID NO: 57335 - DNA, 20 bp, synthetic construct
  misc_feature 1..20: note = chemically synthesized
  source 1..20: mol_type = other DNA
cttagtggctgttccactgg

SEQ ID NO: 57336 - DNA, 20 bp, synthetic construct
  misc_feature 1..20: note = chemically synthesized
  source 1..20: mol_type = other DNA
gtggctgttccactggtagc

SEQ ID NO: 57337 - DNA, 20 bp, synthetic construct
  misc_feature 1..20: note = chemically synthesized
  source 1..20: mol_type = other DNA
agcaagatctaccatttact

SEQ ID NO: 57338 - DNA, 20 bp, synthetic construct
  misc_feature 1..20: note = chemically synthesized
  source 1..20: mol_type = other DNA
ccccaaaatgcctgatgctg

SEQ ID NO: 57339 - DNA, 20 bp, synthetic construct
  misc_feature 1..20: note = chemically synthesized
  source 1..20: mol_type = other DNA
ctgaagacttactgccgccc

SEQ ID NO: 57340 - DNA, 20 bp, synthetic construct
  misc_feature 1..20: note = chemically synthesized
  source 1..20: mol_type = other DNA
tgaagacttactgccgccct

SEQ ID NO: 57341 - DNA, 20 bp, synthetic construct
  misc_feature 1..20: note = chemically synthesized
  source 1..20: mol_type = other DNA
aagacttactgccgccctgg

SEQ ID NO: 57342 - DNA, 20 bp, synthetic construct
  misc_feature 1..20: note = chemically synthesized
  source 1..20: mol_type = other DNA
ttactgccgccctgggagat

SEQ ID NO: 57343 - DNA, 20 bp, synthetic construct
  misc_feature 1..20: note = chemically synthesized
  source 1..20: mol_type = other DNA
actgccgccctgggagatca

SEQ ID NO: 57344 - DNA, 20 bp, synthetic construct
  misc_feature 1..20: note = chemically synthesized
  source 1..20: mol_type = other DNA
gccgccctgggagatcagag

SEQ ID NO: 57345 - DNA, 20 bp, synthetic construct
  misc_feature 1..20: note = chemically synthesized
  source 1..20: mol_type = other DNA
ccgccctgggagatcagagt

SEQ ID NO: 57346 - DNA, 20 bp, synthetic construct
  misc_feature 1..20: note = chemically synthesized
  source 1..20: mol_type = other DNA
cctgggagatcagagtgggt

SEQ ID NO: 57347 - DNA, 20 bp, synthetic construct
  misc_feature 1..20: note = chemically synthesized
  source 1..20: mol_type = other DNA
tgggagatcagagtgggtta

SEQ ID NO: 57348 - DNA, 20 bp, synthetic construct
  misc_feature 1..20: note = chemically synthesized
  source 1..20: mol_type = other DNA
gtgggttagagcccatttga

SEQ ID NO: 57349 - DNA, 20 bp, synthetic construct
  misc_feature 1..20: note = chemically synthesized
  source 1..20: mol_type = other DNA
ttagagcccatttgacagat

SEQ ID NO: 57350 - DNA, 20 bp, synthetic construct
  misc_feature 1..20: note = chemically synthesized
  source 1..20: mol_type = other DNA
tagagcccatttgacagatg

SEQ ID NO: 57351 - DNA, 20 bp, synthetic construct
  misc_feature 1..20: note = chemically synthesized
  source 1..20: mol_type = other DNA
ccatttgacagatgaggaaa

SEQ ID NO: 57352 - DNA, 20 bp, synthetic construct
  misc_feature 1..20: note = chemically synthesized
  source 1..20: mol_type = other DNA
catttgacagatgaggaaac

SEQ ID NO: 57353 - DNA, 20 bp, synthetic construct
  misc_feature 1..20: note = chemically synthesized
  source 1..20: mol_type = other DNA
gacagatgaggaaacaggct

SEQ ID NO: 57354 - DNA, 20 bp, synthetic construct
  misc_feature 1..20: note = chemically synthesized
  source 1..20: mol_type = other DNA
cagatgaggaaacaggctca

SEQ ID NO: 57355 - DNA, 20 bp, synthetic construct
  misc_feature 1..20: note = chemically synthesized
  source 1..20: mol_type = other DNA
atgaggaaacaggctcagag

SEQ ID NO: 57356 - DNA, 20 bp, synthetic construct
  misc_feature 1..20: note = chemically synthesized
  source 1..20: mol_type = other DNA
gaggaaacaggctcagagcg

SEQ ID NO: 57357 - DNA, 20 bp, synthetic construct
  misc_feature 1..20: note = chemically synthesized
  source 1..20: mol_type = other DNA
ggaaacaggctcagagcgga

SEQ ID NO: 57358 - DNA, 20 bp, synthetic construct
  misc_feature 1..20: note = chemically synthesized
  source 1..20: mol_type = other DNA
gcggagagaccgctcatcca

SEQ ID NO: 57359 - DNA, 20 bp, synthetic construct
  misc_feature 1..20: note = chemically synthesized
  source 1..20: mol_type = other DNA
accgctcatccaaagttacc

SEQ ID NO: 57360 - DNA, 20 bp, synthetic construct
  misc_feature 1..20: note = chemically synthesized
  source 1..20: mol_type = other DNA
ctcatccaaagttacccagt

SEQ ID NO: 57361 - DNA, 20 bp, synthetic construct
  misc_feature 1..20: note = chemically synthesized
  source 1..20: mol_type = other DNA
caaagttacccagtcagcct

SEQ ID NO: 57362 - DNA, 20 bp, synthetic construct
  misc_feature 1..20: note = chemically synthesized
  source 1..20: mol_type = other DNA
agacacaaacaccctcttga

SEQ ID NO: 57363 - DNA, 20 bp, synthetic construct
  misc_feature 1..20: note = chemically synthesized
  source 1..20: mol_type = other DNA
caccctcttgatggtcccga

SEQ ID NO: 57364 - DNA, 20 bp, synthetic construct
  misc_feature 1..20: note = chemically synthesized
  source 1..20: mol_type = other DNA
tgatggtcccgatggaaaaa

SEQ ID NO: 57365 - DNA, 20 bp, synthetic construct
  misc_feature 1..20: note = chemically synthesized
  source 1..20: mol_type = other DNA
atggtcccgatggaaaaatg

SEQ ID NO: 57366 - DNA, 20 bp, synthetic construct
  misc_feature 1..20: note = chemically synthesized
  source 1..20: mol_type = other DNA
tggaaaaatggagcatgact

SEQ ID NO: 57367 - DNA, 20 bp, synthetic construct
  misc_feature 1..20: note = chemically synthesized
  source 1..20: mol_type = other DNA
ggaaaaatggagcatgactg

SEQ ID NO: 57368 - DNA, 20 bp, synthetic construct
  misc_feature 1..20: note = chemically synthesized
  source 1..20: mol_type = other DNA
aaaatggagcatgactgagg

SEQ ID NO: 57369 - DNA, 20 bp, synthetic construct
  misc_feature 1..20: note = chemically synthesized
  source 1..20: mol_type = other DNA
actgaggcagacacaaccgt

SEQ ID NO: 57370 - DNA, 20 bp, synthetic construct
  misc_feature 1..20: note = chemically synthesized
  source 1..20: mol_type = other DNA
ctgaggcagacacaaccgtc

SEQ ID NO: 57371 - DNA, 20 bp, synthetic construct
  misc_feature 1..20: note = chemically synthesized
  source 1..20: mol_type = other DNA
ggcagacacaaccgtcaggc

SEQ ID NO: 57372 - DNA, 20 bp, synthetic construct
  misc_feature 1..20: note = chemically synthesized
  source 1..20: mol_type = other DNA
acacaaccgtcaggctggca

SEQ ID NO: 57373 - DNA, 20 bp, synthetic construct
  misc_feature 1..20: note = chemically synthesized
  source 1..20: mol_type = other DNA
cacaaccgtcaggctggcat

SEQ ID NO: 57374 - DNA, 20 bp, synthetic construct
  misc_feature 1..20: note = chemically synthesized
  source 1..20: mol_type = other DNA
acaaccgtcaggctggcatg

SEQ ID NO: 57375 - DNA, 20 bp, synthetic construct
  misc_feature 1..20: note = chemically synthesized
  source 1..20: mol_type = other DNA
caaccgtcaggctggcatgg

SEQ ID NO: 57376 - DNA, 20 bp, synthetic construct
  misc_feature 1..20: note = chemically synthesized
  source 1..20: mol_type = other DNA
aaccgtcaggctggcatggg

SEQ ID NO: 57377 - DNA, 20 bp, synthetic construct
  misc_feature 1..20: note = chemically synthesized
  source 1..20: mol_type = other DNA
aggctggcatggggggccgt

SEQ ID NO: 57378 - DNA, 20 bp, synthetic construct
  misc_feature 1..20: note = chemically synthesized
  source 1..20: mol_type = other DNA
tggcatggggggccgtgaga

SEQ ID NO: 57379 - DNA, 20 bp, synthetic construct
  misc_feature 1..20: note = chemically synthesized
  source 1..20: mol_type = other DNA
ggcatggggggccgtgagac

SEQ ID NO: 57380 - DNA, 20 bp, synthetic construct
  misc_feature 1..20: note = chemically synthesized
  source 1..20: mol_type = other DNA
gcatggggggccgtgagaca

SEQ ID NO: 57381 - DNA, 20 bp, synthetic construct
  misc_feature 1..20: note = chemically synthesized
  source 1..20: mol_type = other DNA
tggggggccgtgagacaggg

SEQ ID NO: 57382 - DNA, 20 bp, synthetic construct
  misc_feature 1..20: note = chemically synthesized
  source 1..20: mol_type = other DNA
gggggccgtgagacagggta

SEQ ID NO: 57383 - DNA, 20 bp, synthetic construct
  misc_feature 1..20: note = chemically synthesized
  source 1..20: mol_type = other DNA
ggggccgtgagacagggtag

SEQ ID NO: 57384 - DNA, 20 bp, synthetic construct
  misc_feature 1..20: note = chemically synthesized
  source 1..20: mol_type = other DNA
gccgtgagacagggtagagg

SEQ ID NO: 57385 - DNA, 20 bp, synthetic construct
  misc_feature 1..20: note = chemically synthesized
  source 1..20: mol_type = other DNA
ccgtgagacagggtagaggt

SEQ ID NO: 57386 - DNA, 20 bp, synthetic construct
  misc_feature 1..20: note = chemically synthesized
  source 1..20: mol_type = other DNA
cgtgagacagggtagaggtg

SEQ ID NO: 57387 - DNA, 20 bp, synthetic construct
  misc_feature 1..20: note = chemically synthesized
  source 1..20: mol_type = other DNA
gagacagggtagaggtgggg

SEQ ID NO: 57388 - DNA, 20 bp, synthetic construct
  misc_feature 1..20: note = chemically synthesized
  source 1..20: mol_type = other DNA
ggtggggaagcacatctgta

SEQ ID NO: 57389 - DNA, 20 bp, synthetic construct
  misc_feature 1..20: note = chemically synthesized
  source 1..20: mol_type = other DNA
ggggaagcacatctgtaaag

SEQ ID NO: 57390 - DNA, 20 bp, synthetic construct
  misc_feature 1..20: note = chemically synthesized
  source 1..20: mol_type = other DNA
ggaagcacatctgtaaagaa

SEQ ID NO: 57391 - DNA, 20 bp, synthetic construct
  misc_feature 1..20: note = chemically synthesized
  source 1..20: mol_type = other DNA
aaagaagagctgtgctgcct

SEQ ID NO: 57392 - DNA, 20 bp, synthetic construct
  misc_feature 1..20: note = chemically synthesized
  source 1..20: mol_type = other DNA
aagaagagctgtgctgcctc

SEQ ID NO: 57393 - DNA, 20 bp, synthetic construct
  misc_feature 1..20: note = chemically synthesized
  source 1..20: mol_type = other DNA
aagagctgtgctgcctcagg

SEQ ID NO: 57394 - DNA, 20 bp, synthetic construct
  misc_feature 1..20: note = chemically synthesized
  source 1..20: mol_type = other DNA
agagctgtgctgcctcaggc

SEQ ID NO: 57395 - DNA, 20 bp, synthetic construct
  misc_feature 1..20: note = chemically synthesized
  source 1..20: mol_type = other DNA
gccgcttcacctctctgaac

SEQ ID NO: 57396 - DNA, 20 bp, synthetic construct
  misc_feature 1..20: note = chemically synthesized
  source 1..20: mol_type = other DNA
ccgcttcacctctctgaacc

SEQ ID NO: 57397 - DNA, 20 bp, synthetic construct
  misc_feature 1..20: note = chemically synthesized
  source 1..20: mol_type = other DNA
actgtttcacctgcatccca

SEQ ID NO: 57398 - DNA, 20 bp, synthetic construct
  misc_feature 1..20: note = chemically synthesized
  source 1..20: mol_type = other DNA
tgtttcacctgcatcccaaa

SEQ ID NO: 57399 - DNA, 20 bp, synthetic construct
  misc_feature 1..20: note = chemically synthesized
  source 1..20: mol_type = other DNA
tcacctgcatcccaaagagt

SEQ ID NO: 57400 - DNA, 20 bp, synthetic construct
  misc_feature 1..20: note = chemically synthesized
  source 1..20: mol_type = other DNA
cctgcatcccaaagagttgg

SEQ ID NO: 57401 - DNA, 20 bp, synthetic construct
  misc_feature 1..20: note = chemically synthesized
  source 1..20: mol_type = other DNA
gagttggaagtttcattccc

SEQ ID NO: 57402 - DNA, 20 bp, synthetic construct
  misc_feature 1..20: note = chemically synthesized
  source 1..20: mol_type = other DNA
cattcccaagcatgcttgtg

SEQ ID NO: 57403 - DNA, 20 bp, synthetic construct
  misc_feature 1..20: note = chemically synthesized
  source 1..20: mol_type = other DNA
agcatgcttgtgaagtgcct

SEQ ID NO: 57404 - DNA, 20 bp, synthetic construct
  misc_feature 1..20: note = chemically synthesized
  source 1..20: mol_type = other DNA
gcatgcttgtgaagtgcctc

SEQ ID NO: 57405 - DNA, 20 bp, synthetic construct
  misc_feature 1..20: note = chemically synthesized
  source 1..20: mol_type = other DNA
cttgtgaagtgcctcgggtg

SEQ ID NO: 57406 - DNA, 20 bp, synthetic construct
  misc_feature 1..20: note = chemically synthesized
  source 1..20: mol_type = other DNA
agtgcctcgggtgaagtgcc

SEQ ID NO: 57407 - DNA, 20 bp, synthetic construct
  misc_feature 1..20: note = chemically synthesized
  source 1..20: mol_type = other DNA
cgggtgaagtgcctggcaca

SEQ ID NO: 57408 - DNA, 20 bp, synthetic construct
  misc_feature 1..20: note = chemically synthesized
  source 1..20: mol_type = other DNA
gtgaagtgcctggcacacag

SEQ ID NO: 57409 - DNA, 20 bp, synthetic construct
  misc_feature 1..20: note = chemically synthesized
  source 1..20: mol_type = other DNA
tgaagtgcctggcacacagt

SEQ ID NO: 57410 - DNA, 20 bp, synthetic construct
  misc_feature 1..20: note = chemically synthesized
  source 1..20: mol_type = other DNA
cacacagtaggctctttatg

SEQ ID NO: 57411 - DNA, 20 bp, synthetic construct
  misc_feature 1..20: note = chemically synthesized
  source 1..20: mol_type = other DNA
acacagtaggctctttatgt

SEQ ID NO: 57412 - DNA, 20 bp, synthetic construct
  misc_feature 1..20: note = chemically synthesized
  source 1..20: mol_type = other DNA
gctctttatgtgggtctgca

SEQ ID NO: 57413 - DNA, 20 bp, synthetic construct
  misc_feature 1..20: note = chemically synthesized
  source 1..20: mol_type = other DNA
ggtctgcacagccctctgct

SEQ ID NO: 57414 - DNA, 20 bp, synthetic construct
  misc_feature 1..20: note = chemically synthesized
  source 1..20: mol_type = other DNA
cctctgcttagtctgccccc

SEQ ID NO: 57415 - DNA, 20 bp, synthetic construct
  misc_feature 1..20: note = chemically synthesized
  source 1..20: mol_type = other DNA
ctctgcttagtctgcccccc

SEQ ID NO: 57416 - DNA, 20 bp, synthetic construct
  misc_feature 1..20: note = chemically synthesized
  source 1..20: mol_type = other DNA
agtctgccccccaggctgct

SEQ ID NO: 57417 - DNA, 20 bp, synthetic construct
  misc_feature 1..20: note = chemically synthesized
  source 1..20: mol_type = other DNA
tctgccccccaggctgctca

SEQ ID NO: 57418 - DNA, 20 bp, synthetic construct
  misc_feature 1..20: note = chemically synthesized
  source 1..20: mol_type = other DNA
gccccccaggctgctcagag

SEQ ID NO: 57419 - DNA, 20 bp, synthetic construct
  misc_feature 1..20: note = chemically synthesized
  source 1..20: mol_type = other DNA
ccccccaggctgctcagagc

SEQ ID NO: 57420 - DNA, 20 bp, synthetic construct
  misc_feature 1..20: note = chemically synthesized
  source 1..20: mol_type = other DNA
ccccaggctgctcagagcag

SEQ ID NO: 57421 - DNA, 20 bp, synthetic construct
  misc_feature 1..20: note = chemically synthesized
  source 1..20: mol_type = other DNA
cccaggctgctcagagcagg

SEQ ID NO: 57422 - DNA, 20 bp, synthetic construct
  misc_feature 1..20: note = chemically synthesized
  source 1..20: mol_type = other DNA
caggctgctcagagcaggag

SEQ ID NO: 57423 - DNA, 20 bp, synthetic construct
  misc_feature 1..20: note = chemically synthesized
  source 1..20: mol_type = other DNA
aggctgctcagagcaggagg

SEQ ID NO: 57424 - DNA, 20 bp, synthetic construct
  misc_feature 1..20: note = chemically synthesized
  source 1..20: mol_type = other DNA
ggaggaggttcaattttgac

SEQ ID NO: 57425 - DNA, 20 bp, synthetic construct
  misc_feature 1..20: note = chemically synthesized
  source 1..20: mol_type = other DNA
ggttcaattttgaccagcct

SEQ ID NO: 57426 - DNA, 20 bp, synthetic construct
  misc_feature 1..20: note = chemically synthesized
  source 1..20: mol_type = other DNA
gttcaattttgaccagcctc

SEQ ID NO: 57427 - DNA, 20 bp, synthetic construct
  misc_feature 1..20: note = chemically synthesized
  source 1..20: mol_type = other DNA
cctgtttctgtttttgctcc

SEQ ID NO: 57428 - DNA, 20 bp, synthetic construct
  misc_feature 1..20: note = chemically synthesized
  source 1..20: mol_type = other DNA
tgtttttgctcctggaaaac

SEQ ID NO: 57429 - DNA, 20 bp, synthetic construct
  misc_feature 1..20: note = chemically synthesized
  source 1..20: mol_type = other DNA
aaaccagtgtgatccgtata

SEQ ID NO: 57430 - DNA, 20 bp, synthetic construct
  misc_feature 1..20: note = chemically synthesized
  source 1..20: mol_type = other DNA
agtgtgatccgtatacagct

SEQ ID NO: 57431 - DNA, 20 bp, synthetic construct
  misc_feature 1..20: note = chemically synthesized
  source 1..20: mol_type = other DNA
tgtgatccgtatacagcttg

SEQ ID NO: 57432 - DNA, 20 bp, synthetic construct
  misc_feature 1..20: note = chemically synthesized
  source 1..20: mol_type = other DNA
tatacagcttggagtttctt

SEQ ID NO: 57433 - DNA, 20 bp, synthetic construct
  misc_feature 1..20: note = chemically synthesized
  source 1..20: mol_type = other DNA
ttggagtttctttggataca

SEQ ID NO: 57434 - DNA, 20 bp, synthetic construct
  misc_feature 1..20: note = chemically synthesized
  source 1..20: mol_type = other DNA
tggatacatggcccccactc

SEQ ID NO: 57435 - DNA, 20 bp, synthetic construct
  misc_feature 1..20: note = chemically synthesized
  source 1..20: mol_type = other DNA
ggatacatggcccccactct

SEQ ID NO: 57436 - DNA, 20 bp, synthetic construct
  misc_feature 1..20: note = chemically synthesized
  source 1..20: mol_type = other DNA
gatacatggcccccactctg

SEQ ID NO: 57437 - DNA, 20 bp, synthetic construct
  misc_feature 1..20: note = chemically synthesized
  source 1..20: mol_type = other DNA
ggcccccactctggggttgt

SEQ ID NO: 57438 - DNA, 20 bp, synthetic construct
  misc_feature 1..20: note = chemically synthesized
  source 1..20: mol_type = other DNA
cccccactctggggttgttg

SEQ ID NO: 57439 - DNA, 20 bp, synthetic construct
  misc_feature 1..20: note = chemically synthesized
  source 1..20: mol_type = other DNA
ccccactctggggttgttgg

SEQ ID NO: 57440 - DNA, 20 bp, synthetic construct
  misc_feature 1..20: note = chemically synthesized
  source 1..20: mol_type = other DNA
ctggggttgttggaggcctt

SEQ ID NO: 57441 - DNA, 20 bp, synthetic construct
  misc_feature 1..20: note = chemically synthesized
  source 1..20: mol_type = other DNA
ggggttgttggaggcctttg

SEQ ID NO: 57442 - DNA, 20 bp, synthetic construct
  misc_feature 1..20: note = chemically synthesized
  source 1..20: mol_type = other DNA
tggaggcctttggagactgc

SEQ ID NO: 57443 - DNA, 20 bp, synthetic construct
  misc_feature 1..20: note = chemically synthesized
  source 1..20: mol_type = other DNA
ggaggcctttggagactgct

SEQ ID NO: 57444 - DNA, 20 bp, synthetic construct
  misc_feature 1..20: note = chemically synthesized
  source 1..20: mol_type = other DNA
gaggcctttggagactgctg

SEQ ID NO: 57445 - DNA, 20 bp, synthetic construct
  misc_feature 1..20: note = chemically synthesized
  source 1..20: mol_type = other DNA
aggcctttggagactgctgg

SEQ ID NO: 57446 - DNA, 20 bp, synthetic construct
  misc_feature 1..20: note = chemically synthesized
  source 1..20: mol_type = other DNA
cctttggagactgctggggg

SEQ ID NO: 57447 - DNA, 20 bp, synthetic construct
  misc_feature 1..20: note = chemically synthesized
  source 1..20: mol_type = other DNA
tttggagactgctgggggtg

SEQ ID NO: 57448 - DNA, 20 bp, synthetic construct
  misc_feature 1..20: note = chemically synthesized
  source 1..20: mol_type = other DNA
ttggagactgctgggggtgg

SEQ ID NO: 57449 - DNA, 20 bp, synthetic construct
  misc_feature 1..20: note = chemically synthesized
  source 1..20: mol_type = other DNA
tggagactgctgggggtgga

SEQ ID NO: 57450 - DNA, 20 bp, synthetic construct
  misc_feature 1..20: note = chemically synthesized
  source 1..20: mol_type = other DNA
ggagactgctgggggtggag

SEQ ID NO: 57451 - DNA, 20 bp, synthetic construct
  misc_feature 1..20: note = chemically synthesized
  source 1..20: mol_type = other DNA
agactgctgggggtggaggg

SEQ ID NO: 57452 - DNA, 20 bp, synthetic construct
  misc_feature 1..20: note = chemically synthesized
  source 1..20: mol_type = other DNA
gactgctgggggtggagggg

SEQ ID NO: 57453 - DNA, 20 bp, synthetic construct
  misc_feature 1..20: note = chemically synthesized
  source 1..20: mol_type = other DNA
actgctgggggtggagggga

SEQ ID NO: 57454 - DNA, 20 bp, synthetic construct
  misc_feature 1..20: note = chemically synthesized
  source 1..20: mol_type = other DNA
ctgctgggggtggaggggag

SEQ ID NO: 57455 - DNA, 20 bp, synthetic construct
  misc_feature 1..20: note = chemically synthesized
  source 1..20: mol_type = other DNA
gctgggggtggaggggaggg

SEQ ID NO: 57456 - DNA, 20 bp, synthetic construct
  misc_feature 1..20: note = chemically synthesized
  source 1..20: mol_type = other DNA
ctgggggtggaggggagggg

SEQ ID NO: 57457 - DNA, 20 bp, synthetic construct
  misc_feature 1..20: note = chemically synthesized
  source 1..20: mol_type = other DNA
ggtggaggggaggggaggta

SEQ ID NO: 57458 - DNA, 20 bp, synthetic construct
  misc_feature 1..20: note = chemically synthesized
  source 1..20: mol_type = other DNA
gtggaggggaggggaggtac

SEQ ID NO: 57459 - DNA, 20 bp, synthetic construct
  misc_feature 1..20: note = chemically synthesized
  source 1..20: mol_type = other DNA
tggaggggaggggaggtaca

SEQ ID NO: 57460 - DNA, 20 bp, synthetic construct
  misc_feature 1..20: note = chemically synthesized
  source 1..20: mol_type = other DNA
gggaggggaggtacagggtt

SEQ ID NO: 57461 - DNA, 20 bp, synthetic construct
  misc_feature 1..20: note = chemically synthesized
  source 1..20: mol_type = other DNA
ggaggggaggtacagggttg

SEQ ID NO: 57462 - DNA, 20 bp, synthetic construct
  misc_feature 1..20: note = chemically synthesized
  source 1..20: mol_type = other DNA
gggaggtacagggttgaggc

SEQ ID NO: 57463 - DNA, 20 bp, synthetic construct
  misc_feature 1..20: note = chemically synthesized
  source 1..20: mol_type = other DNA
aggtacagggttgaggctag

SEQ ID NO: 57464 - DNA, 20 bp, synthetic construct
  misc_feature 1..20: note = chemically synthesized
  source 1..20: mol_type = other DNA
ggtacagggttgaggctagt

SEQ ID NO: 57465 - DNA, 20 bp, synthetic construct
  misc_feature 1..20: note = chemically synthesized
  source 1..20: mol_type = other DNA
gtacagggttgaggctagtg

SEQ ID NO: 57466 - DNA, 20 bp, synthetic construct
  misc_feature 1..20: note = chemically synthesized
  source 1..20: mol_type = other DNA
cttgattgcaatccctttaa

SEQ ID NO: 57467 - DNA, 20 bp, synthetic construct
  misc_feature 1..20: note = chemically synthesized
  source 1..20: mol_type = other DNA
atccctttaaaagcctaaat

SEQ ID NO: 57468 - DNA, 20 bp, synthetic construct
  misc_feature 1..20: note = chemically synthesized
  source 1..20: mol_type = other DNA
gtgcaacccgcaaacctgct

SEQ ID NO: 57469 - DNA, 20 bp, synthetic construct
  misc_feature 1..20: note = chemically synthesized
  source 1..20: mol_type = other DNA
tgcaacccgcaaacctgctt

SEQ ID NO: 57470 - DNA, 20 bp, synthetic construct
  misc_feature 1..20: note = chemically synthesized
  source 1..20: mol_type = other DNA
caacccgcaaacctgcttgg

SEQ ID NO: 57471 - DNA, 20 bp, synthetic construct
  misc_feature 1..20: note = chemically synthesized
  source 1..20: mol_type = other DNA
ccgcaaacctgcttgggagc

SEQ ID NO: 57472 - DNA, 20 bp, synthetic construct
  misc_feature 1..20: note = chemically synthesized
  source 1..20: mol_type = other DNA
gggagctggcgtacgtgccg

SEQ ID NO: 57473 - DNA, 20 bp, synthetic construct
  misc_feature 1..20: note = chemically synthesized
  source 1..20: mol_type = other DNA
gtacgtgccgtagatacttg

SEQ ID NO: 57474 - DNA, 20 bp, synthetic construct
  misc_feature 1..20: note = chemically synthesized
  source 1..20: mol_type = other DNA
acgtgccgtagatacttgca

SEQ ID NO: 57475 - DNA, 20 bp, synthetic construct
  misc_feature 1..20: note = chemically synthesized
  source 1..20: mol_type = other DNA
gtagatacttgcagagtgaa

SEQ ID NO: 57476 - DNA, 20 bp, synthetic construct
  misc_feature 1..20: note = chemically synthesized
  source 1..20: mol_type = other DNA
tacttgcagagtgaatggat

SEQ ID NO: 57477 - DNA, 20 bp, synthetic construct
  misc_feature 1..20: note = chemically synthesized
  source 1..20: mol_type = other DNA
ttgccccttctgtcattcac

SEQ ID NO: 57478 - DNA, 20 bp, synthetic construct
  misc_feature 1..20: note = chemically synthesized
  source 1..20: mol_type = other DNA
tcccatttatgcctccacct

SEQ ID NO: 57479 - DNA, 20 bp, synthetic construct
  misc_feature 1..20: note = chemically synthesized
  source 1..20: mol_type = other DNA
cccatttatgcctccacctt

SEQ ID NO: 57480 - DNA, 20 bp, synthetic construct
  misc_feature 1..20: note = chemically synthesized
  source 1..20: mol_type = other DNA
ccatttatgcctccaccttg

SEQ ID NO: 57481 - DNA, 20 bp, synthetic construct
  misc_feature 1..20: note = chemically synthesized
  source 1..20: mol_type = other DNA
cctccaccttggggctctac

SEQ ID NO: 57482 - DNA, 20 bp, synthetic construct
  misc_feature 1..20: note = chemically synthesized
  source 1..20: mol_type = other DNA
ctccaccttggggctctacc

SEQ ID NO: 57483 - DNA, 20 bp, synthetic construct
  misc_feature 1..20: note = chemically synthesized
  source 1..20: mol_type = other DNA
accttggggctctaccaggc

SEQ ID NO: 57484 - DNA, 20 bp, synthetic construct
  misc_feature 1..20: note = chemically synthesized
  source 1..20: mol_type = other DNA
tctaccaggcgagtgaccca

SEQ ID NO: 57485 - DNA, 20 bp, synthetic construct
  misc_feature 1..20: note = chemically synthesized
  source 1..20: mol_type = other DNA
ctaccaggcgagtgacccac

SEQ ID NO: 57486 - DNA, 20 bp, synthetic construct
  misc_feature 1..20: note = chemically synthesized
  source 1..20: mol_type = other DNA
gagtgacccacaggatcctc

SEQ ID NO: 57487 - DNA, 20 bp, synthetic construct
  misc_feature 1..20: note = chemically synthesized
  source 1..20: mol_type = other DNA
gatcctccagcacacacatt

SEQ ID NO: 57488 - DNA, 20 bp, synthetic construct
  misc_feature 1..20: note = chemically synthesized
  source 1..20: mol_type = other DNA
tccagcacacacattcagac

SEQ ID NO: 57489 - DNA, 20 bp, synthetic construct
  misc_feature 1..20: note = chemically synthesized
  source 1..20: mol_type = other DNA
ccagcacacacattcagacc

SEQ ID NO: 57490 - DNA, 20 bp, synthetic construct
  misc_feature 1..20: note = chemically synthesized
  source 1..20: mol_type = other DNA
cagcacacacattcagacca

SEQ ID NO: 57491 - DNA, 20 bp, synthetic construct
  misc_feature 1..20: note = chemically synthesized
  source 1..20: mol_type = other DNA
agaccagggaacccacttac

SEQ ID NO: 57492 - DNA, 20 bp, synthetic construct
  misc_feature 1..20: note = chemically synthesized
  source 1..20: mol_type = other DNA
ggaacccacttactggctgt

SEQ ID NO: 57493 - DNA, 20 bp, synthetic construct
  misc_feature 1..20: note = chemically synthesized
  source 1..20: mol_type = other DNA
gaacccacttactggctgtg

SEQ ID NO: 57494 - DNA, 20 bp, synthetic construct
  misc_feature 1..20: note = chemically synthesized
  source 1..20: mol_type = other DNA
acttactggctgtgaggcct

SEQ ID NO: 57495 - DNA, 20 bp, synthetic construct
  misc_feature 1..20: note = chemically synthesized
  source 1..20: mol_type = other DNA
cttactggctgtgaggcctc

SEQ ID NO: 57496 - DNA, 20 bp, synthetic construct
  misc_feature 1..20: note = chemically synthesized
  source 1..20: mol_type = other DNA
ctggctgtgaggcctcaggt

SEQ ID NO: 57497 - DNA, 20 bp, synthetic construct
  misc_feature 1..20: note = chemically synthesized
  source 1..20: mol_type = other DNA
gtgagttgtttaaccgctcc

SEQ ID NO: 57498 - DNA, 20 bp, synthetic construct
  misc_feature 1..20: note = chemically synthesized
  source 1..20: mol_type = other DNA
caatttccctatctgtaaaa

SEQ ID NO: 57499 - DNA, 20 bp, synthetic construct
  misc_feature 1..20: note = chemically synthesized
  source 1..20: mol_type = other DNA
aatttccctatctgtaaaat

SEQ ID NO: 57500 - DNA, 20 bp, synthetic construct
  misc_feature 1..20: note = chemically synthesized
  source 1..20: mol_type = other DNA
atttccctatctgtaaaatg

SEQ ID NO: 57501 - DNA, 20 bp, synthetic construct
  misc_feature 1..20: note = chemically synthesized
  source 1..20: mol_type = other DNA
ccctatctgtaaaatgggga

SEQ ID NO: 57502 - DNA, 20 bp, synthetic construct
  misc_feature 1..20: note = chemically synthesized
  source 1..20: mol_type = other DNA
ctgtaaaatggggatggtga

SEQ ID NO: 57503 - DNA, 20 bp, synthetic construct
  misc_feature 1..20: note = chemically synthesized
  source 1..20: mol_type = other DNA
gtgacggtatgtaccttgtt

SEQ ID NO: 57504 - DNA, 20 bp, synthetic construct
  misc_feature 1..20: note = chemically synthesized
  source 1..20: mol_type = other DNA
gtaccttgttgagctgctgt

SEQ ID NO: 57505 - DNA, 20 bp, synthetic construct
  misc_feature 1..20: note = chemically synthesized
  source 1..20: mol_type = other DNA
taccttgttgagctgctgtg

SEQ ID NO: 57506 - DNA, 20 bp, synthetic construct
  misc_feature 1..20: note = chemically synthesized
  source 1..20: mol_type = other DNA
ctgtgaggattaaaatgcaa

SEQ ID NO: 57507 - DNA, 20 bp, synthetic construct
  misc_feature 1..20: note = chemically synthesized
  source 1..20: mol_type = other DNA
ggattaaaatgcaacagttc

SEQ ID NO: 57508 - DNA, 20 bp, synthetic construct
  misc_feature 1..20: note = chemically synthesized
  source 1..20: mol_type = other DNA
gattaaaatgcaacagttca

SEQ ID NO: 57509 - DNA, 20 bp, synthetic construct
  misc_feature 1..20: note = chemically synthesized
  source 1..20: mol_type = other DNA
aaaatgcaacagttcaagga

SEQ ID NO: 57510 - DNA, 20 bp, synthetic construct
  misc_feature 1..20: note = chemically synthesized
  source 1..20: mol_type = other DNA
gcaacagttcaaggaaagct

SEQ ID NO: 57511 - DNA, 20 bp, synthetic construct
  misc_feature 1..20: note = chemically synthesized
  source 1..20: mol_type = other DNA
aacagttcaaggaaagctca

SEQ ID NO: 57512 - DNA, 20 bp, synthetic construct
  misc_feature 1..20: note = chemically synthesized
  source 1..20: mol_type = other DNA
gttcaaggaaagctcagaga

SEQ ID NO: 57513 - DNA, 20 bp, synthetic construct
  misc_feature 1..20: note = chemically synthesized
  source 1..20: mol_type = other DNA
ttcaaggaaagctcagagac

SEQ ID NO: 57514 - DNA, 20 bp, synthetic construct
  misc_feature 1..20: note = chemically synthesized
  source 1..20: mol_type = other DNA
gaaagctcagagacgggtac

SEQ ID NO: 57515 - DNA, 20 bp, synthetic construct
  misc_feature 1..20: note = chemically synthesized
  source 1..20: mol_type = other DNA
aaagctcagagacgggtact

SEQ ID NO: 57516 - DNA, 20 bp, synthetic construct
  misc_feature 1..20: note = chemically synthesized
  source 1..20: mol_type = other DNA
agacgggtactgggtgtgcc

SEQ ID NO: 57517 - DNA, 20 bp, synthetic construct
  misc_feature 1..20: note = chemically synthesized
  source 1..20: mol_type = other DNA
gggtactgggtgtgcccaga

SEQ ID NO: 57518 - DNA, 20 bp, synthetic construct
  misc_feature 1..20: note = chemically synthesized
  source 1..20: mol_type = other DNA
ctgccctccctcccccgtgt

SEQ ID NO: 57519 - DNA, 20 bp, synthetic construct
  misc_feature 1..20: note = chemically synthesized
  source 1..20: mol_type = other DNA
tgccctccctcccccgtgtc

SEQ ID NO: 57520 - DNA, 20 bp, synthetic construct
  misc_feature 1..20: note = chemically synthesized
  source 1..20: mol_type = other DNA
gccctccctcccccgtgtca

SEQ ID NO: 57521 - DNA, 20 bp, synthetic construct
  misc_feature 1..20: note = chemically synthesized
  source 1..20: mol_type = other DNA
ccctccctcccccgtgtcag

SEQ ID NO: 57522 - DNA, 20 bp, synthetic construct
  misc_feature 1..20: note = chemically synthesized
  source 1..20: mol_type = other DNA
ccctcccccgtgtcaggggc

SEQ ID NO: 57523 - DNA, 20 bp, synthetic construct
  misc_feature 1..20: note = chemically synthesized
  source 1..20: mol_type = other DNA
gtgtcaggggctggtgtcac

SEQ ID NO: 57524 - DNA, 20 bp, synthetic construct
  misc_feature 1..20: note = chemically synthesized
  source 1..20: mol_type = other DNA
tgtcaggggctggtgtcact

SEQ ID NO: 57525 - DNA, 20 bp, synthetic construct
  misc_feature 1..20: note = chemically synthesized
  source 1..20: mol_type = other DNA
gtcaggggctggtgtcactg

SEQ ID NO: 57526 - DNA, 20 bp, synthetic construct
  misc_feature 1..20: note = chemically synthesized
  source 1..20: mol_type = other DNA
aggggctggtgtcactgggg

SEQ ID NO: 57527 - DNA, 20 bp, synthetic construct
  misc_feature 1..20: note = chemically synthesized
  source 1..20: mol_type = other DNA
ggggctggtgtcactggggt

SEQ ID NO: 57528 - DNA, 20 bp, synthetic construct
  misc_feature 1..20: note = chemically synthesized
  source 1..20: mol_type = other DNA
gggctggtgtcactggggtg

SEQ ID NO: 57529 - DNA, 20 bp, synthetic construct
  misc_feature 1..20: note = chemically synthesized
  source 1..20: mol_type = other DNA
ctggtgtcactggggtgggg

SEQ ID NO: 57530 - DNA, 20 bp, synthetic construct
  misc_feature 1..20: note = chemically synthesized
  source 1..20: mol_type = other DNA
tggtgtcactggggtggggt

SEQ ID NO: 57531 - DNA, 20 bp, synthetic construct
  misc_feature 1..20: note = chemically synthesized
  source 1..20: mol_type = other DNA
ggtggggtgggccacacttg

SEQ ID NO: 57532 - DNA, 20 bp, synthetic construct
  misc_feature 1..20: note = chemically synthesized
  source 1..20: mol_type = other DNA
tggggtgggccacacttgaa

SEQ ID NO: 57533 - DNA, 20 bp, synthetic construct
  misc_feature 1..20: note = chemically synthesized
  source 1..20: mol_type = other DNA
acacttgaagagctttcctc

SEQ ID NO: 57534 - DNA, 20 bp, synthetic construct
  misc_feature 1..20: note = chemically synthesized
  source 1..20: mol_type = other DNA
cacttgaagagctttcctcc

SEQ ID NO: 57535 - DNA, 20 bp, synthetic construct
  misc_feature 1..20: note = chemically synthesized
  source 1..20: mol_type = other DNA
ttgaagagctttcctccagg

SEQ ID NO: 57536 - DNA, 20 bp, synthetic construct
  misc_feature 1..20: note = chemically synthesized
  source 1..20: mol_type = other DNA
cctccaggcagtctctcatt

SEQ ID NO: 57537 - DNA, 20 bp, synthetic construct
  misc_feature 1..20: note = chemically synthesized
  source 1..20: mol_type = other DNA
tctcattcagttaccctgtg

SEQ ID NO: 57538 - DNA, 20 bp, synthetic construct
  misc_feature 1..20: note = chemically synthesized
  source 1..20: mol_type = other DNA
ctcattcagttaccctgtga

SEQ ID NO: 57539 - DNA, 20 bp, synthetic construct
  misc_feature 1..20: note = chemically synthesized
  source 1..20: mol_type = other DNA
tcattcagttaccctgtgaa

SEQ ID NO: 57540 - DNA, 20 bp, synthetic construct
  misc_feature 1..20: note = chemically synthesized
  source 1..20: mol_type = other DNA
attcagttaccctgtgaagg

SEQ ID NO: 57541 - DNA, 20 bp, synthetic construct
  misc_feature 1..20: note = chemically synthesized
  source 1..20: mol_type = other DNA
cagttaccctgtgaagggag

SEQ ID NO: 57542 - DNA, 20 bp, synthetic construct
  misc_feature 1..20: note = chemically synthesized
  source 1..20: mol_type = other DNA
agttaccctgtgaagggagt

SEQ ID NO: 57543 - DNA, 20 bp, synthetic construct
  misc_feature 1..20: note = chemically synthesized
  source 1..20: mol_type = other DNA
agtaggtaccaccctccttt

SEQ ID NO: 57544 - DNA, 20 bp, synthetic construct
  misc_feature 1..20: note = chemically synthesized
  source 1..20: mol_type = other DNA
gtaggtaccaccctcctttc

SEQ ID NO: 57545 - DNA, 20 bp, synthetic construct
  misc_feature 1..20: note = chemically synthesized
  source 1..20: mol_type = other DNA
ggtaccaccctcctttcagg

SEQ ID NO: 57546 - DNA, 20 bp, synthetic construct
  misc_feature 1..20: note = chemically synthesized
  source 1..20: mol_type = other DNA
accaccctcctttcaggcag

SEQ ID NO: 57547 - DNA, 20 bp, synthetic construct
  misc_feature 1..20: note = chemically synthesized
  source 1..20: mol_type = other DNA
ccaccctcctttcaggcagc

SEQ ID NO: 57548 - DNA, 20 bp, synthetic construct
  misc_feature 1..20: note = chemically synthesized
  source 1..20: mol_type = other DNA
ctttcaggcagcgggaaact

SEQ ID NO: 57549 - DNA, 20 bp, synthetic construct
  misc_feature 1..20: note = chemically synthesized
  source 1..20: mol_type = other DNA
aggcagcgggaaactgagct

SEQ ID NO: 57550 - DNA, 20 bp, synthetic construct
  misc_feature 1..20: note = chemically synthesized
  source 1..20: mol_type = other DNA
actcccctccccttctctct

SEQ ID NO: 57551 - DNA, 20 bp, synthetic construct
  misc_feature 1..20: note = chemically synthesized
  source 1..20: mol_type = other DNA
tctctgagctcccttccctg

SEQ ID NO: 57552 - DNA, 20 bp, synthetic construct
  misc_feature 1..20: note = chemically synthesized
  source 1..20: mol_type = other DNA
ttccctgcagctccatcccc

SEQ ID NO: 57553 - DNA, 20 bp, synthetic construct
  misc_feature 1..20: note = chemically synthesized
  source 1..20: mol_type = other DNA
gcagctccatcccctggctt

SEQ ID NO: 57554 - DNA, 20 bp, synthetic construct
  misc_feature 1..20: note = chemically synthesized
  source 1..20: mol_type = other DNA
cagctccatcccctggcttc

SEQ ID NO: 57555 - DNA, 20 bp, synthetic construct
  misc_feature 1..20: note = chemically synthesized
  source 1..20: mol_type = other DNA
agctccatcccctggcttca

SEQ ID NO: 57556 - DNA, 20 bp, synthetic construct
  misc_feature 1..20: note = chemically synthesized
  source 1..20: mol_type = other DNA
agggcccctgtccttcccct

SEQ ID NO: 57557 - DNA, 20 bp, synthetic construct
  misc_feature 1..20: note = chemically synthesized
  source 1..20: mol_type = other DNA
cccctgtccttcccctgagc

SEQ ID NO: 57558 - DNA, 20 bp, synthetic construct
  misc_feature 1..20: note = chemically synthesized
  source 1..20: mol_type = other DNA
cttcccctgagctggctgaa

SEQ ID NO: 57559 - DNA, 20 bp, synthetic construct
  misc_feature 1..20: note = chemically synthesized
  source 1..20: mol_type = other DNA
cgctgctctacatccactca

SEQ ID NO: 57560 - DNA, 20 bp, synthetic construct
  misc_feature 1..20: note = chemically synthesized
  source 1..20: mol_type = other DNA
tctacatccactcacagctc

SEQ ID NO: 57561 - DNA, 20 bp, synthetic construct
  misc_feature 1..20: note = chemically synthesized
  source 1..20: mol_type = other DNA
tccactcacagctccagcac

SEQ ID NO: 57562 - DNA, 20 bp, synthetic construct
  misc_feature 1..20: note = chemically synthesized
  source 1..20: mol_type = other DNA
ccactcacagctccagcact

SEQ ID NO: 57563 - DNA, 20 bp, synthetic construct
  misc_feature 1..20: note = chemically synthesized
  source 1..20: mol_type = other DNA
acagctccagcactgggctg

SEQ ID NO: 57564 - DNA, 20 bp, synthetic construct
  misc_feature 1..20: note = chemically synthesized
  source 1..20: mol_type = other DNA
tccagcactgggctgtggtt

SEQ ID NO: 57565 - DNA, 20 bp, synthetic construct
  misc_feature 1..20: note = chemically synthesized
  source 1..20: mol_type = other DNA
ccagcactgggctgtggttg

SEQ ID NO: 57566 - DNA, 20 bp, synthetic construct
  misc_feature 1..20: note = chemically synthesized
  source 1..20: mol_type = other DNA
tggttgaggtcgcctgccct

SEQ ID NO: 57567 - DNA, 20 bp, synthetic construct
  misc_feature 1..20: note = chemically synthesized
  source 1..20: mol_type = other DNA
ttgaggtcgcctgccctcgg

SEQ ID NO: 57568 - DNA, 20 bp, synthetic construct
  misc_feature 1..20: note = chemically synthesized
  source 1..20: mol_type = other DNA
cgcctgccctcggtagctcc

SEQ ID NO: 57569 - DNA, 20 bp, synthetic construct
  misc_feature 1..20: note = chemically synthesized
  source 1..20: mol_type = other DNA
gcctgccctcggtagctcct

SEQ ID NO: 57570 - DNA, 20 bp, synthetic construct
  misc_feature 1..20: note = chemically synthesized
  source 1..20: mol_type = other DNA
tgggcatttcttcccctctc

SEQ ID NO: 57571 - DNA, 20 bp, synthetic construct
  misc_feature 1..20: note = chemically synthesized
  source 1..20: mol_type = other DNA
gggcatttcttcccctctct

SEQ ID NO: 57572 - DNA, 20 bp, synthetic construct
  misc_feature 1..20: note = chemically synthesized
  source 1..20: mol_type = other DNA
tgcacaatgacccccactct

SEQ ID NO: 57573 - DNA, 20 bp, synthetic construct
  misc_feature 1..20: note = chemically synthesized
  source 1..20: mol_type = other DNA
cctgctgtccctcccacctg

SEQ ID NO: 57574 - DNA, 20 bp, synthetic construct
  misc_feature 1..20: note = chemically synthesized
  source 1..20: mol_type = other DNA
tccctcccacctgtggaact

SEQ ID NO: 57575 - DNA, 20 bp, synthetic construct
  misc_feature 1..20: note = chemically synthesized
  source 1..20: mol_type = other DNA
tcccacctgtggaactgagt

SEQ ID NO: 57576 - DNA, 20 bp, synthetic construct
  misc_feature 1..20: note = chemically synthesized
  source 1..20: mol_type = other DNA
cacctgtggaactgagtgag

SEQ ID NO: 57577 - DNA, 20 bp, synthetic construct
  misc_feature 1..20: note = chemically synthesized
  source 1..20: mol_type = other DNA
ctgtggaactgagtgagcag

SEQ ID NO: 57578 - DNA, 20 bp, synthetic construct
  misc_feature 1..20: note = chemically synthesized
  source 1..20: mol_type = other DNA
tggaactgagtgagcagcag

SEQ ID NO: 57579 - DNA, 20 bp, synthetic construct
  misc_feature 1..20: note = chemically synthesized
  source 1..20: mol_type = other DNA
ccacctttcctgctctcctc

SEQ ID NO: 57580 - DNA, 20 bp, synthetic construct
  misc_feature 1..20: note = chemically synthesized
  source 1..20: mol_type = other DNA
gctctcctcaagctctcctc

SEQ ID NO: 57581 - DNA, 20 bp, synthetic construct
  misc_feature 1..20: note = chemically synthesized
  source 1..20: mol_type = other DNA
tcctcaagctctgtctcttc

SEQ ID NO: 57582 - DNA, 20 bp, synthetic construct
  misc_feature 1..20: note = chemically synthesized
  source 1..20: mol_type = other DNA
tcaagctctgtctcttctgg

SEQ ID NO: 57583 - DNA, 20 bp, synthetic construct
  misc_feature 1..20: note = chemically synthesized
  source 1..20: mol_type = other DNA
caagctctgtctcttctggc

SEQ ID NO: 57584 - DNA, 20 bp, synthetic construct
  misc_feature 1..20: note = chemically synthesized
  source 1..20: mol_type = other DNA
tctgtctcttctggcaggca

SEQ ID NO: 57585 - DNA, 20 bp, synthetic construct
  misc_feature 1..20: note = chemically synthesized
  source 1..20: mol_type = other DNA
ctgtctcttctggcaggcac

SEQ ID NO: 57586 - DNA, 20 bp, synthetic construct
  misc_feature 1..20: note = chemically synthesized
  source 1..20: mol_type = other DNA
gtctcttctggcaggcacag

SEQ ID NO: 57587 - DNA, 20 bp, synthetic construct
  misc_feature 1..20: note = chemically synthesized
  source 1..20: mol_type = other DNA
ctcttctggcaggcacagga

SEQ ID NO: 57588 - DNA, 20 bp, synthetic construct
  misc_feature 1..20: note = chemically synthesized
  source 1..20: mol_type = other DNA
ttctggcaggcacaggagag

SEQ ID NO: 57589 - DNA, 20 bp, synthetic construct
  misc_feature 1..20: note = chemically synthesized
  source 1..20: mol_type = other DNA
aggcacaggagagtggcctg

SEQ ID NO: 57590 - DNA, 20 bp, synthetic construct
  misc_feature 1..20: note = chemically synthesized
  source 1..20: mol_type = other DNA
ggcacaggagagtggcctga

SEQ ID NO: 57591 - DNA, 20 bp, synthetic construct
  misc_feature 1..20: note = chemically synthesized
  source 1..20: mol_type = other DNA
caggagagtggcctgaaggc

SEQ ID NO: 57592 - DNA, 20 bp, synthetic construct
  misc_feature 1..20: note = chemically synthesized
  source 1..20: mol_type = other DNA
gagagtggcctgaaggctgg

SEQ ID NO: 57593 - DNA, 20 bp, synthetic construct
  misc_feature 1..20: note = chemically synthesized
  source 1..20: mol_type = other DNA
agagtggcctgaaggctggc

SEQ ID NO: 57594 - DNA, 20 bp, synthetic construct
  misc_feature 1..20: note = chemically synthesized
  source 1..20: mol_type = other DNA
agtggcctgaaggctggcag

SEQ ID NO: 57595 - DNA, 20 bp, synthetic construct
  misc_feature 1..20: note = chemically synthesized
  source 1..20: mol_type = other DNA
gtggcctgaaggctggcagg

SEQ ID NO: 57596 - DNA, 20 bp, synthetic construct
  misc_feature 1..20: note = chemically synthesized
  source 1..20: mol_type = other DNA
aggttgccgcccctccaacc

SEQ ID NO: 57597 - DNA, 20 bp, synthetic construct
  misc_feature 1..20: note = chemically synthesized
  source 1..20: mol_type = other DNA
cccctccaacctggaattcc

SEQ ID NO: 57598 - DNA, 20 bp, synthetic construct
  misc_feature 1..20: note = chemically synthesized
  source 1..20: mol_type = other DNA
ctccaacctggaattcctgg

SEQ ID NO: 57599 - DNA, 20 bp, synthetic construct
  misc_feature 1..20: note = chemically synthesized
  source 1..20: mol_type = other DNA
caacctggaattcctggcag

SEQ ID NO: 57600 - DNA, 20 bp, synthetic construct
  misc_feature 1..20: note = chemically synthesized
  source 1..20: mol_type = other DNA
cctggaattcctggcagcag

SEQ ID NO: 57601 - DNA, 20 bp, synthetic construct
  misc_feature 1..20: note = chemically synthesized
  source 1..20: mol_type = other DNA
ggaattcctggcagcagcag

SEQ ID NO: 57602 - DNA, 20 bp, synthetic construct
  misc_feature 1..20: note = chemically synthesized
  source 1..20: mol_type = other DNA
ttcctggcagcagcagcggc

SEQ ID NO: 57603 - DNA, 20 bp, synthetic construct
  misc_feature 1..20: note = chemically synthesized
  source 1..20: mol_type = other DNA
tcctggcagcagcagcggct

SEQ ID NO: 57604 - DNA, 20 bp, synthetic construct
  misc_feature 1..20: note = chemically synthesized
  source 1..20: mol_type = other DNA
agcagcggctaggccttcct

SEQ ID NO: 57605 - DNA, 20 bp, synthetic construct
  misc_feature 1..20: note = chemically synthesized
  source 1..20: mol_type = other DNA
cagcggctaggccttcctcg

SEQ ID NO: 57606 - DNA, 20 bp, synthetic construct
  misc_feature 1..20: note = chemically synthesized
  source 1..20: mol_type = other DNA
agcggctaggccttcctcgg

SEQ ID NO: 57607 - DNA, 20 bp, synthetic construct
  misc_feature 1..20: note = chemically synthesized
  source 1..20: mol_type = other DNA
cccgaccccctcctccttct

SEQ ID NO: 57608 - DNA, 20 bp, synthetic construct
  misc_feature 1..20: note = chemically synthesized
  source 1..20: mol_type = other DNA
ccccctcctccttcttggtt

SEQ ID NO: 57609 - DNA, 20 bp, synthetic construct
  misc_feature 1..20: note = chemically synthesized
  source 1..20: mol_type = other DNA
tcctccttcttggttcagct

SEQ ID NO: 57610 - DNA, 20 bp, synthetic construct
  misc_feature 1..20: note = chemically synthesized
  source 1..20: mol_type = other DNA
cctccttcttggttcagctc

SEQ ID NO: 57611 - DNA, 20 bp, synthetic construct
  misc_feature 1..20: note = chemically synthesized
  source 1..20: mol_type = other DNA
ttggttcagctcaggactct

SEQ ID NO: 57612 - DNA, 20 bp, synthetic construct
  misc_feature 1..20: note = chemically synthesized
  source 1..20: mol_type = other DNA
tggttcagctcaggactctg

SEQ ID NO: 57613 - DNA, 20 bp, synthetic construct
  misc_feature 1..20: note = chemically synthesized
  source 1..20: mol_type = other DNA
ggttcagctcaggactctga

SEQ ID NO: 57614 - DNA, 20 bp, synthetic construct
  misc_feature 1..20: note = chemically synthesized
  source 1..20: mol_type = other DNA
ggactctgagggttgctgcg

SEQ ID NO: 57615 - DNA, 20 bp, synthetic construct
  misc_feature 1..20: note = chemically synthesized
  source 1..20: mol_type = other DNA
actctgagggttgctgcgtg

SEQ ID NO: 57616 - DNA, 20 bp, synthetic construct
  misc_feature 1..20: note = chemically synthesized
  source 1..20: mol_type = other DNA
ctctgagggttgctgcgtgg

SEQ ID NO: 57617 - DNA, 20 bp, synthetic construct
  misc_feature 1..20: note = chemically synthesized
  source 1..20: mol_type = other DNA
tgagggttgctgcgtggagg

SEQ ID NO: 57618 - DNA, 20 bp, synthetic construct
  misc_feature 1..20: note = chemically synthesized
  source 1..20: mol_type = other DNA
cgtggaggcagtgcatgccc

SEQ ID NO: 57619 - DNA, 20 bp, synthetic construct
  misc_feature 1..20: note = chemically synthesized
  source 1..20: mol_type = other DNA
gtggaggcagtgcatgccct

SEQ ID NO: 57620 - DNA, 20 bp, synthetic construct
  misc_feature 1..20: note = chemically synthesized
  source 1..20: mol_type = other DNA
ggcagtgcatgccctgggca

SEQ ID NO: 57621 - DNA, 20 bp, synthetic construct
  misc_feature 1..20: note = chemically synthesized
  source 1..20: mol_type = other DNA
catgccctgggcacagtgcc

SEQ ID NO: 57622 - DNA, 20 bp, synthetic construct
  misc_feature 1..20: note = chemically synthesized
  source 1..20: mol_type = other DNA
gtgcccagttcctgcccacc

SEQ ID NO: 57623 - DNA, 20 bp, synthetic construct
  misc_feature 1..20: note = chemically synthesized
  source 1..20: mol_type = other DNA
tgcccagttcctgcccaccc

SEQ ID NO: 57624 - DNA, 20 bp, synthetic construct
  misc_feature 1..20: note = chemically synthesized
  source 1..20: mol_type = other DNA
ccagttcctgcccacccagg

SEQ ID NO: 57625 - DNA, 20 bp, synthetic construct
  misc_feature 1..20: note = chemically synthesized
  source 1..20: mol_type = other DNA
gttcctgcccacccaggaag

SEQ ID NO: 57626 - DNA, 20 bp, synthetic construct
  misc_feature 1..20: note = chemically synthesized
  source 1..20: mol_type = other DNA
cccacccaggaagtagactt

SEQ ID NO: 57627 - DNA, 20 bp, synthetic construct
  misc_feature 1..20: note = chemically synthesized
  source 1..20: mol_type = other DNA
ccacccaggaagtagacttc

SEQ ID NO: 57628 - DNA, 20 bp, synthetic construct
  misc_feature 1..20: note = chemically synthesized
  source 1..20: mol_type = other DNA
cccaggaagtagacttcggg

SEQ ID NO: 57629 - DNA, 20 bp, synthetic construct
  misc_feature 1..20: note = chemically synthesized
  source 1..20: mol_type = other DNA
caggaagtagacttcgggtg

SEQ ID NO: 57630 - DNA, 20 bp, synthetic construct
  misc_feature 1..20: note = chemically synthesized
  source 1..20: mol_type = other DNA
aggaagtagacttcgggtgg

SEQ ID NO: 57631 - DNA, 20 bp, synthetic construct
  misc_feature 1..20: note = chemically synthesized
  source 1..20: mol_type = other DNA
aagtagacttcgggtggagg

SEQ ID NO: 57632 - DNA, 20 bp, synthetic construct
  misc_feature 1..20: note = chemically synthesized
  source 1..20: mol_type = other DNA
tagacttcgggtggaggcag

SEQ ID NO: 57633 - DNA, 20 bp, synthetic construct
  misc_feature 1..20: note = chemically synthesized
  source 1..20: mol_type = other DNA
agacttcgggtggaggcagt

SEQ ID NO: 57634 - DNA, 20 bp, synthetic construct
  misc_feature 1..20: note = chemically synthesized
  source 1..20: mol_type = other DNA
ttcgggtggaggcagtaggc

SEQ ID NO: 57635 - DNA, 20 bp, synthetic construct
  misc_feature 1..20: note = chemically synthesized
  source 1..20: mol_type = other DNA
tcgggtggaggcagtaggct

SEQ ID NO: 57636 - DNA, 20 bp, synthetic construct
  misc_feature 1..20: note = chemically synthesized
  source 1..20: mol_type = other DNA
cgggtggaggcagtaggctg

SEQ ID NO: 57637 - DNA, 20 bp, synthetic construct
  misc_feature 1..20: note = chemically synthesized
  source 1..20: mol_type = other DNA
ggtggaggcagtaggctggg

SEQ ID NO: 57638 - DNA, 20 bp, synthetic construct
  misc_feature 1..20: note = chemically synthesized
  source 1..20: mol_type = other DNA
gtggaggcagtaggctgggg

SEQ ID NO: 57639 - DNA, 20 bp, synthetic construct
  misc_feature 1..20: note = chemically synthesized
  source 1..20: mol_type = other DNA
tggaggcagtaggctgggga

SEQ ID NO: 57640 - DNA, 20 bp, synthetic construct
  misc_feature 1..20: note = chemically synthesized
  source 1..20: mol_type = other DNA
ggaggcagtaggctggggag

SEQ ID NO: 57641 - DNA, 20 bp, synthetic construct
  misc_feature 1..20: note = chemically synthesized
  source 1..20: mol_type = other DNA
ggcagtaggctggggagggg

SEQ ID NO: 57642 - DNA, 20 bp, synthetic construct
  misc_feature 1..20: note = chemically synthesized
  source 1..20: mol_type = other DNA
gcagtaggctggggaggggc

SEQ ID NO: 57643 - DNA, 20 bp, synthetic construct
  misc_feature 1..20: note = chemically synthesized
  source 1..20: mol_type = other DNA
cagtaggctggggaggggcg

SEQ ID NO: 57644 - DNA, 20 bp, synthetic construct
  misc_feature 1..20: note = chemically synthesized
  source 1..20: mol_type = other DNA
gtaggctggggaggggcggg

SEQ ID NO: 57645 - DNA, 20 bp, synthetic construct
  misc_feature 1..20: note = chemically synthesized
  source 1..20: mol_type = other DNA
ctggggaggggcggggagct

SEQ ID NO: 57646 - DNA, 20 bp, synthetic construct
  misc_feature 1..20: note = chemically synthesized
  source 1..20: mol_type = other DNA
ggaggggcggggagcttgga

SEQ ID NO: 57647 - DNA, 20 bp, synthetic construct
  misc_feature 1..20: note = chemically synthesized
  source 1..20: mol_type = other DNA
gaggggcggggagcttggac

SEQ ID NO: 57648 - DNA, 20 bp, synthetic construct
  misc_feature 1..20: note = chemically synthesized
  source 1..20: mol_type = other DNA
gggcggggagcttggacagg

SEQ ID NO: 57649 - DNA, 20 bp, synthetic construct
  misc_feature 1..20: note = chemically synthesized
  source 1..20: mol_type = other DNA
ggcggggagcttggacagga

SEQ ID NO: 57650 - DNA, 20 bp, synthetic construct
  misc_feature 1..20: note = chemically synthesized
  source 1..20: mol_type = other DNA
cggggagcttggacaggaag

SEQ ID NO: 57651 - DNA, 20 bp, synthetic construct
  misc_feature 1..20: note = chemically synthesized
  source 1..20: mol_type = other DNA
aaggagccttgctcattgcc

SEQ ID NO: 57652 - DNA, 20 bp, synthetic construct
  misc_feature 1..20: note = chemically synthesized
  source 1..20: mol_type = other DNA
gagccttgctcattgcccgg

SEQ ID NO: 57653 - DNA, 20 bp, synthetic construct
  misc_feature 1..20: note = chemically synthesized
  source 1..20: mol_type = other DNA
gctcattgcccggcagacac

SEQ ID NO: 57654 - DNA, 20 bp, synthetic construct
  misc_feature 1..20: note = chemically synthesized
  source 1..20: mol_type = other DNA
ttgcccggcagacacaagac

SEQ ID NO: 57655 - DNA, 20 bp, synthetic construct
  misc_feature 1..20: note = chemically synthesized
  source 1..20: mol_type = other DNA
tgcccggcagacacaagact

SEQ ID NO: 57656 - DNA, 20 bp, synthetic construct
  misc_feature 1..20: note = chemically synthesized
  source 1..20: mol_type = other DNA
agactgggccctcataaact

SEQ ID NO: 57657 - DNA, 20 bp, synthetic construct
  misc_feature 1..20: note = chemically synthesized
  source 1..20: mol_type = other DNA
tgggccctcataaactcaga

SEQ ID NO: 57658 - DNA, 20 bp, synthetic construct
  misc_feature 1..20: note = chemically synthesized
  source 1..20: mol_type = other DNA
cctcataaactcagacagcc

SEQ ID NO: 57659 - DNA, 20 bp, synthetic construct
  misc_feature 1..20: note = chemically synthesized
  source 1..20: mol_type = other DNA
acctgttgtacctgcccttt

SEQ ID NO: 57660 - DNA, 20 bp, synthetic construct
  misc_feature 1..20: note = chemically synthesized
  source 1..20: mol_type = other DNA
gccctttcagctctgtgacc

SEQ ID NO: 57661 - DNA, 20 bp, synthetic construct
  misc_feature 1..20: note = chemically synthesized
  source 1..20: mol_type = other DNA
ccctttcagctctgtgaccc

SEQ ID NO: 57662 - DNA, 20 bp, synthetic construct
  misc_feature 1..20: note = chemically synthesized
  source 1..20: mol_type = other DNA
tcagctctgtgacccgggac

SEQ ID NO: 57663 - DNA, 20 bp, synthetic construct
  misc_feature 1..20: note = chemically synthesized
  source 1..20: mol_type = other DNA
acaagtcaccctctcccttt

SEQ ID NO: 57664 - DNA, 20 bp, synthetic construct
  misc_feature 1..20: note = chemically synthesized
  source 1..20: mol_type = other DNA
ctctccctttgagttgccgc

SEQ ID NO: 57665 - DNA, 20 bp, synthetic construct
  misc_feature 1..20: note = chemically synthesized
  source 1..20: mol_type = other DNA
ctccctttgagttgccgcaa

SEQ ID NO: 57666 - DNA, 20 bp, synthetic construct
  misc_feature 1..20: note = chemically synthesized
  source 1..20: mol_type = other DNA
tccctttgagttgccgcaag

SEQ ID NO: 57667 - DNA, 20 bp, synthetic construct
  misc_feature 1..20: note = chemically synthesized
  source 1..20: mol_type = other DNA
ttgagttgccgcaagaggta

SEQ ID NO: 57668 - DNA, 20 bp, synthetic construct
  misc_feature 1..20: note = chemically synthesized
  source 1..20: mol_type = other DNA
agaggtacagtcacactgcc

SEQ ID NO: 57669 - DNA, 20 bp, synthetic construct
  misc_feature 1..20: note = chemically synthesized
  source 1..20: mol_type = other DNA
aggtacagtcacactgccca

SEQ ID NO: 57670 - DNA, 20 bp, synthetic construct
  misc_feature 1..20: note = chemically synthesized
  source 1..20: mol_type = other DNA
ggtacagtcacactgcccag

SEQ ID NO: 57671 - DNA, 20 bp, synthetic construct
  misc_feature 1..20: note = chemically synthesized
  source 1..20: mol_type = other DNA
cacactgcccagaggattac

SEQ ID NO: 57672 - DNA, 20 bp, synthetic construct
  misc_feature 1..20: note = chemically synthesized
  source 1..20: mol_type = other DNA
cagaggattactagaaatga

SEQ ID NO: 57673 - DNA, 20 bp, synthetic construct
  misc_feature 1..20: note = chemically synthesized
  source 1..20: mol_type = other DNA
agaggattactagaaatgac

SEQ ID NO: 57674 - DNA, 20 bp, synthetic construct
  misc_feature 1..20: note = chemically synthesized
  source 1..20: mol_type = other DNA
aatgacaggcctcgccctcc

SEQ ID NO: 57675 - DNA, 20 bp, synthetic construct
  misc_feature 1..20: note = chemically synthesized
  source 1..20: mol_type = other DNA
caggcctcgccctcctggca

SEQ ID NO: 57676 - DNA, 20 bp, synthetic construct
  misc_feature 1..20: note = chemically synthesized
  source 1..20: mol_type = other DNA
tcgccctcctggcacagacc

SEQ ID NO: 57677 - DNA, 20 bp, synthetic construct
  misc_feature 1..20: note = chemically synthesized
  source 1..20: mol_type = other DNA
acagacctggcaccaataac

SEQ ID NO: 57678 - DNA, 20 bp, synthetic construct
  misc_feature 1..20: note = chemically synthesized
  source 1..20: mol_type = other DNA
gacctggcaccaataactgg

SEQ ID NO: 57679 - DNA, 20 bp, synthetic construct
  misc_feature 1..20: note = chemically synthesized
  source 1..20: mol_type = other DNA
acctggcaccaataactggc

SEQ ID NO: 57680 - DNA, 20 bp, synthetic construct
  misc_feature 1..20: note = chemically synthesized
  source 1..20: mol_type = other DNA
accaataactggcaggtttc

SEQ ID NO: 57681 - DNA, 20 bp, synthetic construct
  misc_feature 1..20: note = chemically synthesized
  source 1..20: mol_type = other DNA
ccaataactggcaggtttct

SEQ ID NO: 57682 - DNA, 20 bp, synthetic construct
  misc_feature 1..20: note = chemically synthesized
  source 1..20: mol_type = other DNA
caataactggcaggtttctg

SEQ ID NO: 57683 - DNA, 20 bp, synthetic construct
  misc_feature 1..20: note = chemically synthesized
  source 1..20: mol_type = other DNA
aactggcaggtttctggggc

SEQ ID NO: 57684 - DNA, 20 bp, synthetic construct
  misc_feature 1..20: note = chemically synthesized
  source 1..20: mol_type = other DNA
caggtttctggggccagctg

SEQ ID NO: 57685 - DNA, 20 bp, synthetic construct
  misc_feature 1..20: note = chemically synthesized
  source 1..20: mol_type = other DNA
ggtttctggggccagctgca

SEQ ID NO: 57686 - DNA, 20 bp, synthetic construct
  misc_feature 1..20: note = chemically synthesized
  source 1..20: mol_type = other DNA
gtttctggggccagctgcag

SEQ ID NO: 57687 - DNA, 20 bp, synthetic construct
  misc_feature 1..20: note = chemically synthesized
  source 1..20: mol_type = other DNA
tttctggggccagctgcaga

SEQ ID NO: 57688 - DNA, 20 bp, synthetic construct
  misc_feature 1..20: note = chemically synthesized
  source 1..20: mol_type = other DNA
ctggggccagctgcagaggg

SEQ ID NO: 57689 - DNA, 20 bp, synthetic construct
  misc_feature 1..20: note = chemically synthesized
  source 1..20: mol_type = other DNA
ggggccagctgcagagggaa

SEQ ID NO: 57690 - DNA, 20 bp, synthetic construct
  misc_feature 1..20: note = chemically synthesized
  source 1..20: mol_type = other DNA
gggccagctgcagagggaag

SEQ ID NO: 57691 - DNA, 20 bp, synthetic construct
  misc_feature 1..20: note = chemically synthesized
  source 1..20: mol_type = other DNA
gctgcagagggaagaggact

SEQ ID NO: 57692 - DNA, 20 bp, synthetic construct
  misc_feature 1..20: note = chemically synthesized
  source 1..20: mol_type = other DNA
tgagccacctatgaaatgcc

SEQ ID NO: 57693 - DNA, 20 bp, synthetic construct
  misc_feature 1..20: note = chemically synthesized
  source 1..20: mol_type = other DNA
gccacctatgaaatgcccag

SEQ ID NO: 57694 - DNA, 20 bp, synthetic construct
  misc_feature 1..20: note = chemically synthesized
  source 1..20: mol_type = other DNA
ccacctatgaaatgcccagt

SEQ ID NO: 57695 - DNA, 20 bp, synthetic construct
  misc_feature 1..20: note = chemically synthesized
  source 1..20: mol_type = other DNA
cctatgaaatgcccagtggg

SEQ ID NO: 57696 - DNA, 20 bp, synthetic construct
  misc_feature 1..20: note = chemically synthesized
  source 1..20: mol_type = other DNA
atgcccagtgggcagcccca

SEQ ID NO: 57697 - DNA, 20 bp, synthetic construct
  misc_feature 1..20: note = chemically synthesized
  source 1..20: mol_type = other DNA
ccagtgggcagccccacagt

SEQ ID NO: 57698 - DNA, 20 bp, synthetic construct
  misc_feature 1..20: note = chemically synthesized
  source 1..20: mol_type = other DNA
cagtgggcagccccacagtt

SEQ ID NO: 57699 - DNA, 20 bp, synthetic construct
  misc_feature 1..20: note = chemically synthesized
  source 1..20: mol_type = other DNA
tgggcagccccacagttggg

SEQ ID NO: 57700 - DNA, 20 bp, synthetic construct
  misc_feature 1..20: note = chemically synthesized
  source 1..20: mol_type = other DNA
gggcagccccacagttgggc

SEQ ID NO: 57701 - DNA, 20 bp, synthetic construct
  misc_feature 1..20: note = chemically synthesized
  source 1..20: mol_type = other DNA
ttgggcaggtctgtgtgcac

SEQ ID NO: 57702 - DNA, 20 bp, synthetic construct
  misc_feature 1..20: note = chemically synthesized
  source 1..20: mol_type = other DNA
tgggcaggtctgtgtgcact

SEQ ID NO: 57703 - DNA, 20 bp, synthetic construct
  misc_feature 1..20: note = chemically synthesized
  source 1..20: mol_type = other DNA
gggcaggtctgtgtgcactg

SEQ ID NO: 57704 - DNA, 20 bp, synthetic construct
  misc_feature 1..20: note = chemically synthesized
  source 1..20: mol_type = other DNA
gcaggtctgtgtgcactggg

SEQ ID NO: 57705 - DNA, 20 bp, synthetic construct
  misc_feature 1..20: note = chemically synthesized
  source 1..20: mol_type = other DNA
caggtctgtgtgcactgggg

SEQ ID NO: 57706 - DNA, 20 bp, synthetic construct
  misc_feature 1..20: note = chemically synthesized
  source 1..20: mol_type = other DNA
cactggggaggtgtgtgtca

SEQ ID NO: 57707 - DNA, 20 bp, synthetic construct
  misc_feature 1..20: note = chemically synthesized
  source 1..20: mol_type = other DNA
actggggaggtgtgtgtcat

SEQ ID NO: 57708 - DNA, 20 bp, synthetic construct
  misc_feature 1..20: note = chemically synthesized
  source 1..20: mol_type = other DNA
gaggtgtgtgtcataggacc

SEQ ID NO: 57709 - DNA, 20 bp, synthetic construct
  misc_feature 1..20: note = chemically synthesized
  source 1..20: mol_type = other DNA
tgtgtgtcataggacctggc

SEQ ID NO: 57710 - DNA, 20 bp, synthetic construct
  misc_feature 1..20: note = chemically synthesized
  source 1..20: mol_type = other DNA
gtgtgtcataggacctggct

SEQ ID NO: 57711 - DNA, 20 bp, synthetic construct
  misc_feature 1..20: note = chemically synthesized
  source 1..20: mol_type = other DNA
tcataggacctggctgggtg

SEQ ID NO: 57712 - DNA, 20 bp, synthetic construct
  misc_feature 1..20: note = chemically synthesized
  source 1..20: mol_type = other DNA
taggacctggctgggtgcag

SEQ ID NO: 57713 - DNA, 20 bp, synthetic construct
  misc_feature 1..20: note = chemically synthesized
  source 1..20: mol_type = other DNA
aggacctggctgggtgcaga

SEQ ID NO: 57714 - DNA, 20 bp, synthetic construct
  misc_feature 1..20: note = chemically synthesized
  source 1..20: mol_type = other DNA
ggacctggctgggtgcagaa

SEQ ID NO: 57715 - DNA, 20 bp, synthetic construct
  misc_feature 1..20: note = chemically synthesized
  source 1..20: mol_type = other DNA
gctgggtgcagaagggattg

SEQ ID NO: 57716 - DNA, 20 bp, synthetic construct
  misc_feature 1..20: note = chemically synthesized
  source 1..20: mol_type = other DNA
gggtgcagaagggattgcag

SEQ ID NO: 57717 - DNA, 20 bp, synthetic construct
  misc_feature 1..20: note = chemically synthesized
  source 1..20: mol_type = other DNA
ggtgcagaagggattgcagt

SEQ ID NO: 57718 - DNA, 20 bp, synthetic construct
  misc_feature 1..20: note = chemically synthesized
  source 1..20: mol_type = other DNA
gtgcagaagggattgcagtg

SEQ ID NO: 57719 - DNA, 20 bp, synthetic construct
  misc_feature 1..20: note = chemically synthesized
  source 1..20: mol_type = other DNA
gcagaagggattgcagtggg

SEQ ID NO: 57720 - DNA, 20 bp, synthetic construct
  misc_feature 1..20: note = chemically synthesized
  source 1..20: mol_type = other DNA
aagggattgcagtggggagc

SEQ ID NO: 57721 - DNA, 20 bp, synthetic construct
  misc_feature 1..20: note = chemically synthesized
  source 1..20: mol_type = other DNA
agggattgcagtggggagct

SEQ ID NO: 57722 - DNA, 20 bp, synthetic construct
  misc_feature 1..20: note = chemically synthesized
  source 1..20: mol_type = other DNA
gggattgcagtggggagctg

SEQ ID NO: 57723 - DNA, 20 bp, synthetic construct
  misc_feature 1..20: note = chemically synthesized
  source 1..20: mol_type = other DNA
cagtggggagctggggcttt

SEQ ID NO: 57724 - DNA, 20 bp, synthetic construct
  misc_feature 1..20: note = chemically synthesized
  source 1..20: mol_type = other DNA
gtggggagctggggcttttg

SEQ ID NO: 57725 - DNA, 20 bp, synthetic construct
  misc_feature 1..20: note = chemically synthesized
  source 1..20: mol_type = other DNA
tggggagctggggcttttgg

SEQ ID NO: 57726 - DNA, 20 bp, synthetic construct
  misc_feature 1..20: note = chemically synthesized
  source 1..20: mol_type = other DNA
gggagctggggcttttggag

SEQ ID NO: 57727 - DNA, 20 bp, synthetic construct
  misc_feature 1..20: note = chemically synthesized
  source 1..20: mol_type = other DNA
ggagctggggcttttggagg

SEQ ID NO: 57728 - DNA, 20 bp, synthetic construct
  misc_feature 1..20: note = chemically synthesized
  source 1..20: mol_type = other DNA
gggcttttggaggaggaatg

SEQ ID NO: 57729 - DNA, 20 bp, synthetic construct
  misc_feature 1..20: note = chemically synthesized
  source 1..20: mol_type = other DNA
ttttggaggaggaatgaaga

SEQ ID NO: 57730 - DNA, 20 bp, synthetic construct
  misc_feature 1..20: note = chemically synthesized
  source 1..20: mol_type = other DNA
gaggaggaatgaagaaagca

SEQ ID NO: 57731 - DNA, 20 bp, synthetic construct
  misc_feature 1..20: note = chemically synthesized
  source 1..20: mol_type = other DNA
aggaggaatgaagaaagcat

SEQ ID NO: 57732 - DNA, 20 bp, synthetic construct
  misc_feature 1..20: note = chemically synthesized
  source 1..20: mol_type = other DNA
aggaatgaagaaagcatggg

SEQ ID NO: 57733 - DNA, 20 bp, synthetic construct
  misc_feature 1..20: note = chemically synthesized
  source 1..20: mol_type = other DNA
ggaatgaagaaagcatgggt

SEQ ID NO: 57734 - DNA, 20 bp, synthetic construct
  misc_feature 1..20: note = chemically synthesized
  source 1..20: mol_type = other DNA
aatgaagaaagcatgggtgg

SEQ ID NO: 57735 - DNA, 20 bp, synthetic construct
  misc_feature 1..20: note = chemically synthesized
  source 1..20: mol_type = other DNA
gaagaaagcatgggtgggag

SEQ ID NO: 57736 - DNA, 20 bp, synthetic construct
  misc_feature 1..20: note = chemically synthesized
  source 1..20: mol_type = other DNA
aagaaagcatgggtgggagc

SEQ ID NO: 57737 - DNA, 20 bp, synthetic construct
  misc_feature 1..20: note = chemically synthesized
  source 1..20: mol_type = other DNA
aagcatgggtgggagcaggt

SEQ ID NO: 57738 - DNA, 20 bp, synthetic construct
  misc_feature 1..20: note = chemically synthesized
  source 1..20: mol_type = other DNA
agcatgggtgggagcaggtg

SEQ ID NO: 57739 - DNA, 20 bp, synthetic construct
  misc_feature 1..20: note = chemically synthesized
  source 1..20: mol_type = other DNA
tgggtgggagcaggtgaggc

SEQ ID NO: 57740 - DNA, 20 bp, synthetic construct
  misc_feature 1..20: note = chemically synthesized
  source 1..20: mol_type = other DNA
tgggagcaggtgaggcaagt

SEQ ID NO: 57741 - DNA, 20 bp, synthetic construct
  misc_feature 1..20: note = chemically synthesized
  source 1..20: mol_type = other DNA
gggagcaggtgaggcaagta

SEQ ID NO: 57742 - DNA, 20 bp, synthetic construct
  misc_feature 1..20: note = chemically synthesized
  source 1..20: mol_type = other DNA
ggagcaggtgaggcaagtaa

SEQ ID NO: 57743 - DNA, 20 bp, synthetic construct
  misc_feature 1..20: note = chemically synthesized
  source 1..20: mol_type = other DNA
gagcaggtgaggcaagtaag

SEQ ID NO: 57744 - DNA, 20 bp, synthetic construct
  misc_feature 1..20: note = chemically synthesized
  source 1..20: mol_type = other DNA
ggtgaggcaagtaaggggct

SEQ ID NO: 57745 - DNA, 20 bp, synthetic construct
  misc_feature 1..20: note = chemically synthesized
  source 1..20: mol_type = other DNA
caagtaaggggctcagaatt

SEQ ID NO: 57746 - DNA, 20 bp, synthetic construct
  misc_feature 1..20: note = chemically synthesized
  source 1..20: mol_type = other DNA
aagtaaggggctcagaattt

SEQ ID NO: 57747 - DNA, 20 bp, synthetic construct
  misc_feature 1..20: note = chemically synthesized
  source 1..20: mol_type = other DNA
agtaaggggctcagaatttg

SEQ ID NO: 57748 - DNA, 20 bp, synthetic construct
  misc_feature 1..20: note = chemically synthesized
  source 1..20: mol_type = other DNA
aatttggggtcctgctcttt

SEQ ID NO: 57749 - DNA, 20 bp, synthetic construct
  misc_feature 1..20: note = chemically synthesized
  source 1..20: mol_type = other DNA
ttggggtcctgctcttttgg

SEQ ID NO: 57750 - DNA, 20 bp, synthetic construct
  misc_feature 1..20: note = chemically synthesized
  source 1..20: mol_type = other DNA
tggggtcctgctcttttggc

SEQ ID NO: 57751 - DNA, 20 bp, synthetic construct
  misc_feature 1..20: note = chemically synthesized
  source 1..20: mol_type = other DNA
ggggtcctgctcttttggca

SEQ ID NO: 57752 - DNA, 20 bp, synthetic construct
  misc_feature 1..20: note = chemically synthesized
  source 1..20: mol_type = other DNA
ctgctcttttggcagggctc

SEQ ID NO: 57753 - DNA, 20 bp, synthetic construct
  misc_feature 1..20: note = chemically synthesized
  source 1..20: mol_type = other DNA
tgctcttttggcagggctct

SEQ ID NO: 57754 - DNA, 20 bp, synthetic construct
  misc_feature 1..20: note = chemically synthesized
  source 1..20: mol_type = other DNA
ttttggcagggctctaggct

SEQ ID NO: 57755 - DNA, 20 bp, synthetic construct
  misc_feature 1..20: note = chemically synthesized
  source 1..20: mol_type = other DNA
gctcagcccccgccctgctc

SEQ ID NO: 57756 - DNA, 20 bp, synthetic construct
  misc_feature 1..20: note = chemically synthesized
  source 1..20: mol_type = other DNA
cctgctctggacatccatcc

SEQ ID NO: 57757 - DNA, 20 bp, synthetic construct
  misc_feature 1..20: note = chemically synthesized
  source 1..20: mol_type = other DNA
ctgctctggacatccatcct

SEQ ID NO: 57758 - DNA, 20 bp, synthetic construct
  misc_feature 1..20: note = chemically synthesized
  source 1..20: mol_type = other DNA
gctctggacatccatcctgg

SEQ ID NO: 57759 - DNA, 20 bp, synthetic construct
  misc_feature 1..20: note = chemically synthesized
  source 1..20: mol_type = other DNA
ctctggacatccatcctggg

SEQ ID NO: 57760 - DNA, 20 bp, synthetic construct
  misc_feature 1..20: note = chemically synthesized
  source 1..20: mol_type = other DNA
tggacatccatcctgggagg

SEQ ID NO: 57761 - DNA, 20 bp, synthetic construct
  misc_feature 1..20: note = chemically synthesized
  source 1..20: mol_type = other DNA
ggacatccatcctgggagga

SEQ ID NO: 57762 - DNA, 20 bp, synthetic construct
  misc_feature 1..20: note = chemically synthesized
  source 1..20: mol_type = other DNA
gacatccatcctgggaggaa

SEQ ID NO: 57763 - DNA, 20 bp, synthetic construct
  misc_feature 1..20: note = chemically synthesized
  source 1..20: mol_type = other DNA
tccatcctgggaggaagggc

SEQ ID NO: 57764 - DNA, 20 bp, synthetic construct
  misc_feature 1..20: note = chemically synthesized
  source 1..20: mol_type = other DNA
ccatcctgggaggaagggct

SEQ ID NO: 57765 - DNA, 20 bp, synthetic construct
  misc_feature 1..20: note = chemically synthesized
  source 1..20: mol_type = other DNA
gaggaagggctaggataatc

SEQ ID NO: 57766 - DNA, 20 bp, synthetic construct
  misc_feature 1..20: note = chemically synthesized
  source 1..20: mol_type = other DNA
gataatctggaaaaacgcac

SEQ ID NO: 57767 - DNA, 20 bp, synthetic construct
  misc_feature 1..20: note = chemically synthesized
  source 1..20: mol_type = other DNA
ataatctggaaaaacgcacc

SEQ ID NO: 57768 - DNA, 20 bp, synthetic construct
  misc_feature 1..20: note = chemically synthesized
  source 1..20: mol_type = other DNA
aacgcaccaggacaaaatcc

SEQ ID NO: 57769 - DNA, 20 bp, synthetic construct
  misc_feature 1..20: note = chemically synthesized
  source 1..20: mol_type = other DNA
acgcaccaggacaaaatccc

SEQ ID NO: 57770 - DNA, 20 bp, synthetic construct
  misc_feature 1..20: note = chemically synthesized
  source 1..20: mol_type = other DNA
cgcaccaggacaaaatcccg

SEQ ID NO: 57771 - DNA, 20 bp, synthetic construct
  misc_feature 1..20: note = chemically synthesized
  source 1..20: mol_type = other DNA
gcaccaggacaaaatcccgg

SEQ ID NO: 57772 - DNA, 20 bp, synthetic construct
  misc_feature 1..20: note = chemically synthesized
  source 1..20: mol_type = other DNA
ggacaaaatcccgggggttg

SEQ ID NO: 57773 - DNA, 20 bp, synthetic construct
  misc_feature 1..20: note = chemically synthesized
  source 1..20: mol_type = other DNA
caaaatcccgggggttgtgg

SEQ ID NO: 57774 - DNA, 20 bp, synthetic construct
  misc_feature 1..20: note = chemically synthesized
  source 1..20: mol_type = other DNA
aaaatcccgggggttgtggt

SEQ ID NO: 57775 - DNA, 20 bp, synthetic construct
  misc_feature 1..20: note = chemically synthesized
  source 1..20: mol_type = other DNA
aatcccgggggttgtggtgg

SEQ ID NO: 57776 - DNA, 20 bp, synthetic construct
  misc_feature 1..20: note = chemically synthesized
  source 1..20: mol_type = other DNA
atcccgggggttgtggtggg

SEQ ID NO: 57777 - DNA, 20 bp, synthetic construct
  misc_feature 1..20: note = chemically synthesized
  source 1..20: mol_type = other DNA
tcccgggggttgtggtggga

SEQ ID NO: 57778 - DNA, 20 bp, synthetic construct
  misc_feature 1..20: note = chemically synthesized
  source 1..20: mol_type = other DNA
cccgggggttgtggtgggag

SEQ ID NO: 57779 - DNA, 20 bp, synthetic construct
  misc_feature 1..20: note = chemically synthesized
  source 1..20: mol_type = other DNA
gggggttgtggtgggagggg

SEQ ID NO: 57780 - DNA, 20 bp, synthetic construct
  misc_feature 1..20: note = chemically synthesized
  source 1..20: mol_type = other DNA
ggggttgtggtgggaggggt

SEQ ID NO: 57781 - DNA, 20 bp, synthetic construct
  misc_feature 1..20: note = chemically synthesized
  source 1..20: mol_type = other DNA
ggttgtggtgggaggggtgg

SEQ ID NO: 57782 - DNA, 20 bp, synthetic construct
  misc_feature 1..20: note = chemically synthesized
  source 1..20: mol_type = other DNA
gtgggaggggtgggagtact

SEQ ID NO: 57783 - DNA, 20 bp, synthetic construct
  misc_feature 1..20: note = chemically synthesized
  source 1..20: mol_type = other DNA
ggaggggtgggagtactcag

SEQ ID NO: 57784 - DNA, 20 bp, synthetic construct
  misc_feature 1..20: note = chemically synthesized
  source 1..20: mol_type = other DNA
agtactcagtggccattcac

SEQ ID NO: 57785 - DNA, 20 bp, synthetic construct
  misc_feature 1..20: note = chemically synthesized
  source 1..20: mol_type = other DNA
gtactcagtggccattcaca

SEQ ID NO: 57786 - DNA, 20 bp, synthetic construct
  misc_feature 1..20: note = chemically synthesized
  source 1..20: mol_type = other DNA
tcacaaggatactgtgcccc

SEQ ID NO: 57787 - DNA, 20 bp, synthetic construct
  misc_feature 1..20: note = chemically synthesized
  source 1..20: mol_type = other DNA
cacaaggatactgtgccccc

SEQ ID NO: 57788 - DNA, 20 bp, synthetic construct
  misc_feature 1..20: note = chemically synthesized
  source 1..20: mol_type = other DNA
tactgtgcccccaggaaccc

SEQ ID NO: 57789 - DNA, 20 bp, synthetic construct
  misc_feature 1..20: note = chemically synthesized
  source 1..20: mol_type = other DNA
actgtgcccccaggaacccc

SEQ ID NO: 57790 - DNA, 20 bp, synthetic construct
  misc_feature 1..20: note = chemically synthesized
  source 1..20: mol_type = other DNA
ccccaggaaccccaggacat

SEQ ID NO: 57791 - DNA, 20 bp, synthetic construct
  misc_feature 1..20: note = chemically synthesized
  source 1..20: mol_type = other DNA
cccaggaaccccaggacatg

SEQ ID NO: 57792 - DNA, 20 bp, synthetic construct
  misc_feature 1..20: note = chemically synthesized
  source 1..20: mol_type = other DNA
ccaggaaccccaggacatga

SEQ ID NO: 57793 - DNA, 20 bp, synthetic construct
  misc_feature 1..20: note = chemically synthesized
  source 1..20: mol_type = other DNA
caggaaccccaggacatgag

SEQ ID NO: 57794 - DNA, 20 bp, synthetic construct
  misc_feature 1..20: note = chemically synthesized
  source 1..20: mol_type = other DNA
aggaaccccaggacatgagg

SEQ ID NO: 57795 - DNA, 20 bp, synthetic construct
  misc_feature 1..20: note = chemically synthesized
  source 1..20: mol_type = other DNA
accccaggacatgaggggga

SEQ ID NO: 57796 - DNA, 20 bp, synthetic construct
  misc_feature 1..20: note = chemically synthesized
  source 1..20: mol_type = other DNA
gggggaaagtcttgtccacc

SEQ ID NO: 57797 - DNA, 20 bp, synthetic construct
  misc_feature 1..20: note = chemically synthesized
  source 1..20: mol_type = other DNA
acttccacaattgtctattg

SEQ ID NO: 57798 - DNA, 20 bp, synthetic construct
  misc_feature 1..20: note = chemically synthesized
  source 1..20: mol_type = other DNA
caattgtctattgcagcatc

SEQ ID NO: 57799 - DNA, 20 bp, synthetic construct
  misc_feature 1..20: note = chemically synthesized
  source 1..20: mol_type = other DNA
aattgtctattgcagcatct

SEQ ID NO: 57800 - DNA, 20 bp, synthetic construct
  misc_feature 1..20: note = chemically synthesized
  source 1..20: mol_type = other DNA
agcatctgggctgatccccc

SEQ ID NO: 57801 - DNA, 20 bp, synthetic construct
  misc_feature 1..20: note = chemically synthesized
  source 1..20: mol_type = other DNA
catctgggctgatcccccca

SEQ ID NO: 57802 - DNA, 20 bp, synthetic construct
  misc_feature 1..20: note = chemically synthesized
  source 1..20: mol_type = other DNA
atctgggctgatccccccag

SEQ ID NO: 57803 - DNA, 20 bp, synthetic construct
  misc_feature 1..20: note = chemically synthesized
  source 1..20: mol_type = other DNA
cccccagaggaaatgcatca

SEQ ID NO: 57804 - DNA, 20 bp, synthetic construct
  misc_feature 1..20: note = chemically synthesized
  source 1..20: mol_type = other DNA
ccccagaggaaatgcatcat

SEQ ID NO: 57805 - DNA, 20 bp, synthetic construct
  misc_feature 1..20: note = chemically synthesized
  source 1..20: mol_type = other DNA
cagaggaaatgcatcatggg

SEQ ID NO: 57806 - DNA, 20 bp, synthetic construct
  misc_feature 1..20: note = chemically synthesized
  source 1..20: mol_type = other DNA
gcatcatgggaagatcctgt

SEQ ID NO: 57807 - DNA, 20 bp, synthetic construct
  misc_feature 1..20: note = chemically synthesized
  source 1..20: mol_type = other DNA
catgggaagatcctgtgagc

SEQ ID NO: 57808 - DNA, 20 bp, synthetic construct
  misc_feature 1..20: note = chemically synthesized
  source 1..20: mol_type = other DNA
agatcctgtgagctggtcat

SEQ ID NO: 57809 - DNA, 20 bp, synthetic construct
  misc_feature 1..20: note = chemically synthesized
  source 1..20: mol_type = other DNA
cctgtgagctggtcatgagt

SEQ ID NO: 57810 - DNA, 20 bp, synthetic construct
  misc_feature 1..20: note = chemically synthesized
  source 1..20: mol_type = other DNA
ctgtgagctggtcatgagta

SEQ ID NO: 57811 - DNA, 20 bp, synthetic construct
  misc_feature 1..20: note = chemically synthesized
  source 1..20: mol_type = other DNA
tgtgagctggtcatgagtaa

SEQ ID NO: 57812 - DNA, 20 bp, synthetic construct
  misc_feature 1..20: note = chemically synthesized
  source 1..20: mol_type = other DNA
gtgagctggtcatgagtaag

SEQ ID NO: 57813 - DNA, 20 bp, synthetic construct
  misc_feature 1..20: note = chemically synthesized
  source 1..20: mol_type = other DNA
ggtcatgagtaaggggcatc

SEQ ID NO: 57814 - DNA, 20 bp, synthetic construct
  misc_feature 1..20: note = chemically synthesized
  source 1..20: mol_type = other DNA
gtcatgagtaaggggcatct

SEQ ID NO: 57815 - DNA, 20 bp, synthetic construct
  misc_feature 1..20: note = chemically synthesized
  source 1..20: mol_type = other DNA
tcatgagtaaggggcatctg

SEQ ID NO: 57816 - DNA, 20 bp, synthetic construct
  misc_feature 1..20: note = chemically synthesized
  source 1..20: mol_type = other DNA
catgagtaaggggcatctgg

SEQ ID NO: 57817 - DNA, 20 bp, synthetic construct
  misc_feature 1..20: note = chemically synthesized
  source 1..20: mol_type = other DNA
tgagtaaggggcatctgggg

SEQ ID NO: 57818 - DNA, 20 bp, synthetic construct
  misc_feature 1..20: note = chemically synthesized
  source 1..20: mol_type = other DNA
gagtaaggggcatctggggg

SEQ ID NO: 57819 - DNA, 20 bp, synthetic construct
  misc_feature 1..20: note = chemically synthesized
  source 1..20: mol_type = other DNA
ggggaggccctgccccacca

SEQ ID NO: 57820 - DNA, 20 bp, synthetic construct
  misc_feature 1..20: note = chemically synthesized
  source 1..20: mol_type = other DNA
gggaggccctgccccaccac

SEQ ID NO: 57821 - DNA, 20 bp, synthetic construct
  misc_feature 1..20: note = chemically synthesized
  source 1..20: mol_type = other DNA
ggaggccctgccccaccaca

SEQ ID NO: 57822 - DNA, 20 bp, synthetic construct
  misc_feature 1..20: note = chemically synthesized
  source 1..20: mol_type = other DNA
ccccaccacagggccctgcc

SEQ ID NO: 57823 - DNA, 20 bp, synthetic construct
  misc_feature 1..20: note = chemically synthesized
  source 1..20: mol_type = other DNA
ccaccacagggccctgcctg

SEQ ID NO: 57824 - DNA, 20 bp, synthetic construct
  misc_feature 1..20: note = chemically synthesized
  source 1..20: mol_type = other DNA
cacagggccctgcctggaga

SEQ ID NO: 57825 - DNA, 20 bp, synthetic construct
  misc_feature 1..20: note = chemically synthesized
  source 1..20: mol_type = other DNA
acagggccctgcctggagat

SEQ ID NO: 57826 - DNA, 20 bp, synthetic construct
  misc_feature 1..20: note = chemically synthesized
  source 1..20: mol_type = other DNA
agggccctgcctggagatgg

SEQ ID NO: 57827 - DNA, 20 bp, synthetic construct
  misc_feature 1..20: note = chemically synthesized
  source 1..20: mol_type = other DNA
gcctggagatgggagcctcg

SEQ ID NO: 57828 - DNA, 20 bp, synthetic construct
  misc_feature 1..20: note = chemically synthesized
  source 1..20: mol_type = other DNA
gagatgggagcctcgtggta

SEQ ID NO: 57829 - DNA, 20 bp, synthetic construct
  misc_feature 1..20: note = chemically synthesized
  source 1..20: mol_type = other DNA
agatgggagcctcgtggtat

SEQ ID NO: 57830 - DNA, 20 bp, synthetic construct
  misc_feature 1..20: note = chemically synthesized
  source 1..20: mol_type = other DNA
gggagcctcgtggtatgggc

SEQ ID NO: 57831 - DNA, 20 bp, synthetic construct
  misc_feature 1..20: note = chemically synthesized
  source 1..20: mol_type = other DNA
gcctcgtggtatgggctgga

SEQ ID NO: 57832 - DNA, 20 bp, synthetic construct
  misc_feature 1..20: note = chemically synthesized
  source 1..20: mol_type = other DNA
cctcgtggtatgggctggat

SEQ ID NO: 57833 - DNA, 20 bp, synthetic construct
  misc_feature 1..20: note = chemically synthesized
  source 1..20: mol_type = other DNA
ctcgtggtatgggctggata

SEQ ID NO: 57834 - DNA, 20 bp, synthetic construct
  misc_feature 1..20: note = chemically synthesized
  source 1..20: mol_type = other DNA
tatgggctggatagggatgt

SEQ ID NO: 57835 - DNA, 20 bp, synthetic construct
  misc_feature 1..20: note = chemically synthesized
  source 1..20: mol_type = other DNA
tgggctggatagggatgtga

SEQ ID NO: 57836 - DNA, 20 bp, synthetic construct
  misc_feature 1..20: note = chemically synthesized
  source 1..20: mol_type = other DNA
tggatagggatgtgagagtc

SEQ ID NO: 57837 - DNA, 20 bp, synthetic construct
  misc_feature 1..20: note = chemically synthesized
  source 1..20: mol_type = other DNA
gggatgtgagagtcgagatt

SEQ ID NO: 57838 - DNA, 20 bp, synthetic construct
  misc_feature 1..20: note = chemically synthesized
  source 1..20: mol_type = other DNA
ggatgtgagagtcgagattt

SEQ ID NO: 57839 - DNA, 20 bp, synthetic construct
  misc_feature 1..20: note = chemically synthesized
  source 1..20: mol_type = other DNA
gatgtgagagtcgagatttg

SEQ ID NO: 57840 - DNA, 20 bp, synthetic construct
  misc_feature 1..20: note = chemically synthesized
  source 1..20: mol_type = other DNA
gagtcgagatttggggtctg

SEQ ID NO: 57841 - DNA, 20 bp, synthetic construct
  misc_feature 1..20: note = chemically synthesized
  source 1..20: mol_type = other DNA
cgagatttggggtctgcagc

SEQ ID NO: 57842 - DNA, 20 bp, synthetic construct
  misc_feature 1..20: note = chemically synthesized
  source 1..20: mol_type = other DNA
gagatttggggtctgcagca

SEQ ID NO: 57843 - DNA, 20 bp, synthetic construct
  misc_feature 1..20: note = chemically synthesized
  source 1..20: mol_type = other DNA
tggggtctgcagcaaggaat

SEQ ID NO: 57844 - DNA, 20 bp, synthetic construct
  misc_feature 1..20: note = chemically synthesized
  source 1..20: mol_type = other DNA
ggggtctgcagcaaggaatc

SEQ ID NO: 57845 - DNA, 20 bp, synthetic construct
  misc_feature 1..20: note = chemically synthesized
  source 1..20: mol_type = other DNA
tctgcagcaaggaatcgggt

SEQ ID NO: 57846 - DNA, 20 bp, synthetic construct
  misc_feature 1..20: note = chemically synthesized
  source 1..20: mol_type = other DNA
ctgcagcaaggaatcgggta

SEQ ID NO: 57847 - DNA, 20 bp, synthetic construct
  misc_feature 1..20: note = chemically synthesized
  source 1..20: mol_type = other DNA
tgcagcaaggaatcgggtaa

SEQ ID NO: 57848 - DNA, 20 bp, synthetic construct
  misc_feature 1..20: note = chemically synthesized
  source 1..20: mol_type = other DNA
gcagcaaggaatcgggtaag

SEQ ID NO: 57849 - DNA, 20 bp, synthetic construct
  misc_feature 1..20: note = chemically synthesized
  source 1..20: mol_type = other DNA
cagcaaggaatcgggtaagg

SEQ ID NO: 57850 - DNA, 20 bp, synthetic construct
  misc_feature 1..20: note = chemically synthesized
  source 1..20: mol_type = other DNA
aaggaatcgggtaagggggt

SEQ ID NO: 57851 - DNA, 20 bp, synthetic construct
  misc_feature 1..20: note = chemically synthesized
  source 1..20: mol_type = other DNA
aggaatcgggtaagggggtg

SEQ ID NO: 57852 - DNA, 20 bp, synthetic construct
  misc_feature 1..20: note = chemically synthesized
  source 1..20: mol_type = other DNA
ggtaagggggtgaggtgtgc

SEQ ID NO: 57853 - DNA, 20 bp, synthetic construct
  misc_feature 1..20: note = chemically synthesized
  source 1..20: mol_type = other DNA
aagggggtgaggtgtgccag

SEQ ID NO: 57854 - DNA, 20 bp, synthetic construct
  misc_feature 1..20: note = chemically synthesized
  source 1..20: mol_type = other DNA
gtgaggtgtgccagtggccc

SEQ ID NO: 57855 - DNA, 20 bp, synthetic construct
  misc_feature 1..20: note = chemically synthesized
  source 1..20: mol_type = other DNA
tgaggtgtgccagtggccct

SEQ ID NO: 57856 - DNA, 20 bp, synthetic construct
  misc_feature 1..20: note = chemically synthesized
  source 1..20: mol_type = other DNA
tgtgccagtggccctgggcc

SEQ ID NO: 57857 - DNA, 20 bp, synthetic construct
  misc_feature 1..20: note = chemically synthesized
  source 1..20: mol_type = other DNA
ggccctgggccaagtaaatc

SEQ ID NO: 57858 - DNA, 20 bp, synthetic construct
  misc_feature 1..20: note = chemically synthesized
  source 1..20: mol_type = other DNA
gggccaagtaaatcaagact

SEQ ID NO: 57859 - DNA, 20 bp, synthetic construct
  misc_feature 1..20: note = chemically synthesized
  source 1..20: mol_type = other DNA
ccaagtaaatcaagactgag

SEQ ID NO: 57860 - DNA, 20 bp, synthetic construct
  misc_feature 1..20: note = chemically synthesized
  source 1..20: mol_type = other DNA
gtaaatcaagactgagtggc

SEQ ID NO: 57861 - DNA, 20 bp, synthetic construct
  misc_feature 1..20: note = chemically synthesized
  source 1..20: mol_type = other DNA
atcaagactgagtggctggt

SEQ ID NO: 57862 - DNA, 20 bp, synthetic construct
  misc_feature 1..20: note = chemically synthesized
  source 1..20: mol_type = other DNA
tcaagactgagtggctggtc

SEQ ID NO: 57863 - DNA, 20 bp, synthetic construct
  misc_feature 1..20: note = chemically synthesized
  source 1..20: mol_type = other DNA
aagactgagtggctggtcag

SEQ ID NO: 57864 - DNA, 20 bp, synthetic construct
  misc_feature 1..20: note = chemically synthesized
  source 1..20: mol_type = other DNA
gtggctggtcaggagaacaa

SEQ ID NO: 57865 - DNA, 20 bp, synthetic construct
  misc_feature 1..20: note = chemically synthesized
  source 1..20: mol_type = other DNA
gctggtcaggagaacaacag

SEQ ID NO: 57866 - DNA, 20 bp, synthetic construct
  misc_feature 1..20: note = chemically synthesized
  source 1..20: mol_type = other DNA
gagaacaacagtggacttca

SEQ ID NO: 57867 - DNA, 20 bp, synthetic construct
  misc_feature 1..20: note = chemically synthesized
  source 1..20: mol_type = other DNA
agaacaacagtggacttcat

SEQ ID NO: 57868 - DNA, 20 bp, synthetic construct
  misc_feature 1..20: note = chemically synthesized
  source 1..20: mol_type = other DNA
aacaacagtggacttcatgg

SEQ ID NO: 57869 - DNA, 20 bp, synthetic construct
  misc_feature 1..20: note = chemically synthesized
  source 1..20: mol_type = other DNA
ttcatgggagctgaactcat

SEQ ID NO: 57870 - DNA, 20 bp, synthetic construct
  misc_feature 1..20: note = chemically synthesized
  source 1..20: mol_type = other DNA
gggagctgaactcattggca

SEQ ID NO: 57871 - DNA, 20 bp, synthetic construct
  misc_feature 1..20: note = chemically synthesized
  source 1..20: mol_type = other DNA
actcattggcaaagtgcccc

SEQ ID NO: 57872 - DNA, 20 bp, synthetic construct
  misc_feature 1..20: note = chemically synthesized
  source 1..20: mol_type = other DNA
tcattggcaaagtgcccccg

SEQ ID NO: 57873 - DNA, 20 bp, synthetic construct
  misc_feature 1..20: note = chemically synthesized
  source 1..20: mol_type = other DNA
attggcaaagtgcccccgga

SEQ ID NO: 57874 - DNA, 20 bp, synthetic construct
  misc_feature 1..20: note = chemically synthesized
  source 1..20: mol_type = other DNA
aaagtgcccccggagagtgc

SEQ ID NO: 57875 - DNA, 20 bp, synthetic construct
  misc_feature 1..20: note = chemically synthesized
  source 1..20: mol_type = other DNA
tcactatgcaccctccttcc

SEQ ID NO: 57876 - DNA, 20 bp, synthetic construct
  misc_feature 1..20: note = chemically synthesized
  source 1..20: mol_type = other DNA
cactatgcaccctccttccc

SEQ ID NO: 57877 - DNA, 20 bp, synthetic construct
  misc_feature 1..20: note = chemically synthesized
  source 1..20: mol_type = other DNA
gcaccctccttcccaggcac

SEQ ID NO: 57878 - DNA, 20 bp, synthetic construct
  misc_feature 1..20: note = chemically synthesized
  source 1..20: mol_type = other DNA
aggcaccagcttccttcttt

SEQ ID NO: 57879 - DNA, 20 bp, synthetic construct
  misc_feature 1..20: note = chemically synthesized
  source 1..20: mol_type = other DNA
gcaccagcttccttctttga

SEQ ID NO: 57880 - DNA, 20 bp, synthetic construct
  misc_feature 1..20: note = chemically synthesized
  source 1..20: mol_type = other DNA
cagcttccttctttgagagt

SEQ ID NO: 57881 - DNA, 20 bp, synthetic construct
  misc_feature 1..20: note = chemically synthesized
  source 1..20: mol_type = other DNA
tccttctttgagagtcagtg

SEQ ID NO: 57882 - DNA, 20 bp, synthetic construct
  misc_feature 1..20: note = chemically synthesized
  source 1..20: mol_type = other DNA
ccttctttgagagtcagtgc

SEQ ID NO: 57883 - DNA, 20 bp, synthetic construct
  misc_feature 1..20: note = chemically synthesized
  source 1..20: mol_type = other DNA
tgagagtcagtgcaggtcac

SEQ ID NO: 57884 - DNA, 20 bp, synthetic construct
  misc_feature 1..20: note = chemically synthesized
  source 1..20: mol_type = other DNA
gtcagtgcaggtcactggtt

SEQ ID NO: 57885 - DNA, 20 bp, synthetic construct
  misc_feature 1..20: note = chemically synthesized
  source 1..20: mol_type = other DNA
tcagtgcaggtcactggtta

SEQ ID NO: 57886 - DNA, 20 bp, synthetic construct
  misc_feature 1..20: note = chemically synthesized
  source 1..20: mol_type = other DNA
gcaggtcactggttaaggcg

SEQ ID NO: 57887 - DNA, 20 bp, synthetic construct
  misc_feature 1..20: note = chemically synthesized
  source 1..20: mol_type = other DNA
caggtcactggttaaggcgt

SEQ ID NO: 57888 - DNA, 20 bp, synthetic construct
  misc_feature 1..20: note = chemically synthesized
  source 1..20: mol_type = other DNA
cactggttaaggcgtgggtt

SEQ ID NO: 57889 - DNA, 20 bp, synthetic construct
  misc_feature 1..20: note = chemically synthesized
  source 1..20: mol_type = other DNA
actggttaaggcgtgggttc

SEQ ID NO: 57890 - DNA, 20 bp, synthetic construct
  misc_feature 1..20: note = chemically synthesized
  source 1..20: mol_type = other DNA
tgggttcgggatctaatatc

SEQ ID NO: 57891 - DNA, 20 bp, synthetic construct
  misc_feature 1..20: note = chemically synthesized
  source 1..20: mol_type = other DNA
gggttcgggatctaatatct

SEQ ID NO: 57892 - DNA, 20 bp, synthetic construct
  misc_feature 1..20: note = chemically synthesized
  source 1..20: mol_type = other DNA
ggttcgggatctaatatctg

SEQ ID NO: 57893 - DNA, 20 bp, synthetic construct
  misc_feature 1..20: note = chemically synthesized
  source 1..20: mol_type = other DNA
gggatctaatatctggggcc

SEQ ID NO: 57894 - DNA, 20 bp, synthetic construct
  misc_feature 1..20: note = chemically synthesized
  source 1..20: mol_type = other DNA
taatatctggggccaagcct

SEQ ID NO: 57895 - DNA, 20 bp, synthetic construct
  misc_feature 1..20: note = chemically synthesized
  source 1..20: mol_type = other DNA
agctccatcgctctttttgt

SEQ ID NO: 57896 - DNA, 20 bp, synthetic construct
  misc_feature 1..20: note = chemically synthesized
  source 1..20: mol_type = other DNA
tcgctctttttgtgagctct

SEQ ID NO: 57897 - DNA, 20 bp, synthetic construct
  misc_feature 1..20: note = chemically synthesized
  source 1..20: mol_type = other DNA
ctttttgtgagctcttagac

SEQ ID NO: 57898 - DNA, 20 bp, synthetic construct
  misc_feature 1..20: note = chemically synthesized
  source 1..20: mol_type = other DNA
cacttaacctctctgtgcct

SEQ ID NO: 57899 - DNA, 20 bp, synthetic construct
  misc_feature 1..20: note = chemically synthesized
  source 1..20: mol_type = other DNA
gcctcggtttcctcatctgt

SEQ ID NO: 57900 - DNA, 20 bp, synthetic construct
  misc_feature 1..20: note = chemically synthesized
  source 1..20: mol_type = other DNA
cggtttcctcatctgtgaga

SEQ ID NO: 57901 - DNA, 20 bp, synthetic construct
  misc_feature 1..20: note = chemically synthesized
  source 1..20: mol_type = other DNA
ggtttcctcatctgtgagat

SEQ ID NO: 57902 - DNA, 20 bp, synthetic construct
  misc_feature 1..20: note = chemically synthesized
  source 1..20: mol_type = other DNA
ttcctcatctgtgagatagg

SEQ ID NO: 57903 - DNA, 20 bp, synthetic construct
  misc_feature 1..20: note = chemically synthesized
  source 1..20: mol_type = other DNA
ctgtgagataggaagactct

SEQ ID NO: 57904 - DNA, 20 bp, synthetic construct
  misc_feature 1..20: note = chemically synthesized
  source 1..20: mol_type = other DNA
tgagataggaagactctaag

SEQ ID NO: 57905 - DNA, 20 bp, synthetic construct
  misc_feature 1..20: note = chemically synthesized
  source 1..20: mol_type = other DNA
agataggaagactctaagaa

SEQ ID NO: 57906 - DNA, 20 bp, synthetic construct
  misc_feature 1..20: note = chemically synthesized
  source 1..20: mol_type = other DNA
ctaagaagagtcacttccat

SEQ ID NO: 57907 - DNA, 20 bp, synthetic construct
  misc_feature 1..20: note = chemically synthesized
  source 1..20: mol_type = other DNA
taagaagagtcacttccatc

SEQ ID NO: 57908 - DNA, 20 bp, synthetic construct
  misc_feature 1..20: note = chemically synthesized
  source 1..20: mol_type = other DNA
tcacttccatcaggactgtg

SEQ ID NO: 57909 - DNA, 20 bp, synthetic construct
  misc_feature 1..20: note = chemically synthesized
  source 1..20: mol_type = other DNA
caggactgtgaagatcgaat

SEQ ID NO: 57910 - DNA, 20 bp, synthetic construct
  misc_feature 1..20: note = chemically synthesized
  source 1..20: mol_type = other DNA
cgaatgagataataacattt

SEQ ID NO: 57911 - DNA, 20 bp, synthetic construct
  misc_feature 1..20: note = chemically synthesized
  source 1..20: mol_type = other DNA
ataataacatttaagcactt

SEQ ID NO: 57912 - DNA, 20 bp, synthetic construct
  misc_feature 1..20: note = chemically synthesized
  source 1..20: mol_type = other DNA
taataacatttaagcacttc

SEQ ID NO: 57913 - DNA, 20 bp, synthetic construct
  misc_feature 1..20: note = chemically synthesized
  source 1..20: mol_type = other DNA
taacatttaagcacttcggg

SEQ ID NO: 57914 - DNA, 20 bp, synthetic construct
  misc_feature 1..20: note = chemically synthesized
  source 1..20: mol_type = other DNA
taagcacttcgggcagcctc

SEQ ID NO: 57915 - DNA, 20 bp, synthetic construct
  misc_feature 1..20: note = chemically synthesized
  source 1..20: mol_type = other DNA
gggcagcctctggcatgtga

SEQ ID NO: 57916 - DNA, 20 bp, synthetic construct
  misc_feature 1..20: note = chemically synthesized
  source 1..20: mol_type = other DNA
ggcagcctctggcatgtgat

SEQ ID NO: 57917 - DNA, 20 bp, synthetic construct
  misc_feature 1..20: note = chemically synthesized
  source 1..20: mol_type = other DNA
tctggcatgtgatgggcccc

SEQ ID NO: 57918 - DNA, 20 bp, synthetic construct
  misc_feature 1..20: note = chemically synthesized
  source 1..20: mol_type = other DNA
caagtcaatgctaaccacca

SEQ ID NO: 57919 - DNA, 20 bp, synthetic construct
  misc_feature 1..20: note = chemically synthesized
  source 1..20: mol_type = other DNA
aagtcaatgctaaccaccaa

SEQ ID NO: 57920 - DNA, 20 bp, synthetic construct
  misc_feature 1..20: note = chemically synthesized
  source 1..20: mol_type = other DNA
ccaccaaaggccatgacctt

SEQ ID NO: 57921 - DNA, 20 bp, synthetic construct
  misc_feature 1..20: note = chemically synthesized
  source 1..20: mol_type = other DNA
caccaaaggccatgaccttt

SEQ ID NO: 57922 - DNA, 20 bp, synthetic construct
  misc_feature 1..20: note = chemically synthesized
  source 1..20: mol_type = other DNA
accaaaggccatgacctttg

SEQ ID NO: 57923 - DNA, 20 bp, synthetic construct
  misc_feature 1..20: note = chemically synthesized
  source 1..20: mol_type = other DNA
tgacctttggggatgtgtcc

SEQ ID NO: 57924 - DNA, 20 bp, synthetic construct
  misc_feature 1..20: note = chemically synthesized
  source 1..20: mol_type = other DNA
cctggctctgaaaaaccata

SEQ ID NO: 57925 - DNA, 20 bp, synthetic construct
  misc_feature 1..20: note = chemically synthesized
  source 1..20: mol_type = other DNA
gctctgaaaaaccatataga

SEQ ID NO: 57926 - DNA, 20 bp, synthetic construct
  misc_feature 1..20: note = chemically synthesized
  source 1..20: mol_type = other DNA
ctctgaaaaaccatatagat

SEQ ID NO: 57927 - DNA, 20 bp, synthetic construct
  misc_feature 1..20: note = chemically synthesized
  source 1..20: mol_type = other DNA
aaaaccatatagatgggtct

SEQ ID NO: 57928 - DNA, 20 bp, synthetic construct
  misc_feature 1..20: note = chemically synthesized
  source 1..20: mol_type = other DNA
aaaccatatagatgggtctc

SEQ ID NO: 57929 - DNA, 20 bp, synthetic construct
  misc_feature 1..20: note = chemically synthesized
  source 1..20: mol_type = other DNA
aaccatatagatgggtctca

SEQ ID NO: 57930 - DNA, 20 bp, synthetic construct
  misc_feature 1..20: note = chemically synthesized
  source 1..20: mol_type = other DNA
accatatagatgggtctcag

SEQ ID NO: 57931 - DNA, 20 bp, synthetic construct
  misc_feature 1..20: note = chemically synthesized
  source 1..20: mol_type = other DNA
tagatgggtctcaggggtct

SEQ ID NO: 57932 - DNA, 20 bp, synthetic construct
  misc_feature 1..20: note = chemically synthesized
  source 1..20: mol_type = other DNA
atgggtctcaggggtctaag

SEQ ID NO: 57933 - DNA, 20 bp, synthetic construct
  misc_feature 1..20: note = chemically synthesized
  source 1..20: mol_type = other DNA
tgggtctcaggggtctaagt

SEQ ID NO: 57934 - DNA, 20 bp, synthetic construct
  misc_feature 1..20: note = chemically synthesized
  source 1..20: mol_type = other DNA
gggtctcaggggtctaagtg

SEQ ID NO: 57935 - DNA, 20 bp, synthetic construct
  misc_feature 1..20: note = chemically synthesized
  source 1..20: mol_type = other DNA
ggtctcaggggtctaagtgg

SEQ ID NO: 57936 - DNA, 20 bp, synthetic construct
  misc_feature 1..20: note = chemically synthesized
  source 1..20: mol_type = other DNA
gggggaacaactgctgcgtt

SEQ ID NO: 57937 - DNA, 20 bp, synthetic construct
  misc_feature 1..20: note = chemically synthesized
  source 1..20: mol_type = other DNA
acaactgctgcgtttggccc

SEQ ID NO: 57938 - DNA, 20 bp, synthetic construct
  misc_feature 1..20: note = chemically synthesized
  source 1..20: mol_type = other DNA
gctgcgtttggccccagatt

SEQ ID NO: 57939 - DNA, 20 bp, synthetic construct
  misc_feature 1..20: note = chemically synthesized
  source 1..20: mol_type = other DNA
ctgcgtttggccccagattt

SEQ ID NO: 57940 - DNA, 20 bp, synthetic construct
  misc_feature 1..20: note = chemically synthesized
  source 1..20: mol_type = other DNA
tgcgtttggccccagatttg

SEQ ID NO: 57941 - DNA, 20 bp, synthetic construct
  misc_feature 1..20: note = chemically synthesized
  source 1..20: mol_type = other DNA
cgtttggccccagatttggg

SEQ ID NO: 57942 - DNA, 20 bp, synthetic construct
  misc_feature 1..20: note = chemically synthesized
  source 1..20: mol_type = other DNA
ttggccccagatttggggag

SEQ ID NO: 57943 - DNA, 20 bp, synthetic construct
  misc_feature 1..20: note = chemically synthesized
  source 1..20: mol_type = other DNA
ggggagcagcacctgttgtt

SEQ ID NO: 57944 - DNA, 20 bp, synthetic construct
  misc_feature 1..20: note = chemically synthesized
  source 1..20: mol_type = other DNA
gggagcagcacctgttgttg

SEQ ID NO: 57945 - DNA, 20 bp, synthetic construct
  misc_feature 1..20: note = chemically synthesized
  source 1..20: mol_type = other DNA
ggagcagcacctgttgttga

SEQ ID NO: 57946 - DNA, 20 bp, synthetic construct
  misc_feature 1..20: note = chemically synthesized
  source 1..20: mol_type = other DNA
gttgttgagggacacctcct

SEQ ID NO: 57947 - DNA, 20 bp, synthetic construct
  misc_feature 1..20: note = chemically synthesized
  source 1..20: mol_type = other DNA
attcaaacttccattttttc

SEQ ID NO: 57948 - DNA, 20 bp, synthetic construct
  misc_feature 1..20: note = chemically synthesized
  source 1..20: mol_type = other DNA
aacttccattttttccagaa

SEQ ID NO: 57949 - DNA, 20 bp, synthetic construct
  misc_feature 1..20: note = chemically synthesized
  source 1..20: mol_type = other DNA
acttccattttttccagaaa

SEQ ID NO: 57950 - DNA, 20 bp, synthetic construct
  misc_feature 1..20: note = chemically synthesized
  source 1..20: mol_type = other DNA
aaggctgtcaatcccctctt

SEQ ID NO: 57951 - DNA, 20 bp, synthetic construct
  misc_feature 1..20: note = chemically synthesized
  source 1..20: mol_type = other DNA
aggctgtcaatcccctcttt

SEQ ID NO: 57952 - DNA, 20 bp, synthetic construct
  misc_feature 1..20: note = chemically synthesized
  source 1..20: mol_type = other DNA
ggctgtcaatcccctcttta

SEQ ID NO: 57953 - DNA, 20 bp, synthetic construct
  misc_feature 1..20: note = chemically synthesized
  source 1..20: mol_type = other DNA
gctgtcaatcccctctttag

SEQ ID NO: 57954 - DNA, 20 bp, synthetic construct
  misc_feature 1..20: note = chemically synthesized
  source 1..20: mol_type = other DNA
tttaggggccgtgctcattt

SEQ ID NO: 57955 - DNA, 20 bp, synthetic construct
  misc_feature 1..20: note = chemically synthesized
  source 1..20: mol_type = other DNA
gtgctcattttggctttccg

SEQ ID NO: 57956 - DNA, 20 bp, synthetic construct
  misc_feature 1..20: note = chemically synthesized
  source 1..20: mol_type = other DNA
tgctcattttggctttccga

SEQ ID NO: 57957 - DNA, 20 bp, synthetic construct
  misc_feature 1..20: note = chemically synthesized
  source 1..20: mol_type = other DNA
attttggctttccgaaggtg

SEQ ID NO: 57958 - DNA, 20 bp, synthetic construct
  misc_feature 1..20: note = chemically synthesized
  source 1..20: mol_type = other DNA
ttttggctttccgaaggtga

SEQ ID NO: 57959 - DNA, 20 bp, synthetic construct
  misc_feature 1..20: note = chemically synthesized
  source 1..20: mol_type = other DNA
tttggctttccgaaggtgaa

SEQ ID NO: 57960 - DNA, 20 bp, synthetic construct
  misc_feature 1..20: note = chemically synthesized
  source 1..20: mol_type = other DNA
gctttccgaaggtgaagggc

SEQ ID NO: 57961 - DNA, 20 bp, synthetic construct
  misc_feature 1..20: note = chemically synthesized
  source 1..20: mol_type = other DNA
ctttccgaaggtgaagggcc

SEQ ID NO: 57962 - DNA, 20 bp, synthetic construct
  misc_feature 1..20: note = chemically synthesized
  source 1..20: mol_type = other DNA
ggtgaagggccaggtgcctt

SEQ ID NO: 57963 - DNA, 20 bp, synthetic construct
  misc_feature 1..20: note = chemically synthesized
  source 1..20: mol_type = other DNA
ggtgccttcagcatctttct

SEQ ID NO: 57964 - DNA, 20 bp, synthetic construct
  misc_feature 1..20: note = chemically synthesized
  source 1..20: mol_type = other DNA
ttctgagcacctgtgacatg

SEQ ID NO: 57965 - DNA, 20 bp, synthetic construct
  misc_feature 1..20: note = chemically synthesized
  source 1..20: mol_type = other DNA
ctgagcacctgtgacatgca

SEQ ID NO: 57966 - DNA, 20 bp, synthetic construct
  misc_feature 1..20: note = chemically synthesized
  source 1..20: mol_type = other DNA
tgagcacctgtgacatgcag

SEQ ID NO: 57967 - DNA, 20 bp, synthetic construct
  misc_feature 1..20: note = chemically synthesized
  source 1..20: mol_type = other DNA
cctgtgacatgcagaggatg

SEQ ID NO: 57968 - DNA, 20 bp, synthetic construct
  misc_feature 1..20: note = chemically synthesized
  source 1..20: mol_type = other DNA
ctgtgacatgcagaggatgt

SEQ ID NO: 57969 - DNA, 20 bp, synthetic construct
  misc_feature 1..20: note = chemically synthesized
  source 1..20: mol_type = other DNA
tgtgacatgcagaggatgtg

SEQ ID NO: 57970 - DNA, 20 bp, synthetic construct
  misc_feature 1..20: note = chemically synthesized
  source 1..20: mol_type = other DNA
cagaggatgtggggtgactg

SEQ ID NO: 57971 - DNA, 20 bp, synthetic construct
  misc_feature 1..20: note = chemically synthesized
  source 1..20: mol_type = other DNA
ggatgtggggtgactgcagc

SEQ ID NO: 57972 - DNA, 20 bp, synthetic construct
  misc_feature 1..20: note = chemically synthesized
  source 1..20: mol_type = other DNA
gatgtggggtgactgcagct

SEQ ID NO: 57973 - DNA, 20 bp, synthetic construct
  misc_feature 1..20: note = chemically synthesized
  source 1..20: mol_type = other DNA
gtggggtgactgcagctagg

SEQ ID NO: 57974 - DNA, 20 bp, synthetic construct
  misc_feature 1..20: note = chemically synthesized
  source 1..20: mol_type = other DNA
tgactgcagctaggtggact

SEQ ID NO: 57975 - DNA, 20 bp, synthetic construct
  misc_feature 1..20: note = chemically synthesized
  source 1..20: mol_type = other DNA
cagctaggtggacttggatc

SEQ ID NO: 57976 - DNA, 20 bp, synthetic construct
  misc_feature 1..20: note = chemically synthesized
  source 1..20: mol_type = other DNA
agctaggtggacttggatcc

SEQ ID NO: 57977 - DNA, 20 bp, synthetic construct
  misc_feature 1..20: note = chemically synthesized
  source 1..20: mol_type = other DNA
gctaggtggacttggatccg

SEQ ID NO: 57978 - DNA, 20 bp, synthetic construct
  misc_feature 1..20: note = chemically synthesized
  source 1..20: mol_type = other DNA
ctaggtggacttggatccgg

SEQ ID NO: 57979 - DNA, 20 bp, synthetic construct
  misc_feature 1..20: note = chemically synthesized
  source 1..20: mol_type = other DNA
aggtggacttggatccgggg

SEQ ID NO: 57980 - DNA, 20 bp, synthetic construct
  misc_feature 1..20: note = chemically synthesized
  source 1..20: mol_type = other DNA
ggtggacttggatccggggg

SEQ ID NO: 57981 - DNA, 20 bp, synthetic construct
  misc_feature 1..20: note = chemically synthesized
  source 1..20: mol_type = other DNA
ttggatccgggggaggccct

SEQ ID NO: 57982 - DNA, 20 bp, synthetic construct
  misc_feature 1..20: note = chemically synthesized
  source 1..20: mol_type = other DNA
ggggaggccctcagttctct

SEQ ID NO: 57983 - DNA, 20 bp, synthetic construct
  misc_feature 1..20: note = chemically synthesized
  source 1..20: mol_type = other DNA
gccctcagttctctgagcct

SEQ ID NO: 57984 - DNA, 20 bp, synthetic construct
  misc_feature 1..20: note = chemically synthesized
  source 1..20: mol_type = other DNA
tggtttcctcatctataaaa

SEQ ID NO: 57985 - DNA, 20 bp, synthetic construct
  misc_feature 1..20: note = chemically synthesized
  source 1..20: mol_type = other DNA
ggtttcctcatctataaaat

SEQ ID NO: 57986 - DNA, 20 bp, synthetic construct
  misc_feature 1..20: note = chemically synthesized
  source 1..20: mol_type = other DNA
gtttcctcatctataaaata

SEQ ID NO: 57987 - DNA, 20 bp, synthetic construct
  misc_feature 1..20: note = chemically synthesized
  source 1..20: mol_type = other DNA
catctataaaatagggataa

SEQ ID NO: 57988 - DNA, 20 bp, synthetic construct
  misc_feature 1..20: note = chemically synthesized
  source 1..20: mol_type = other DNA
ataaaagtttctttcccaca

SEQ ID NO: 57989 - DNA, 20 bp, synthetic construct
  misc_feature 1..20: note = chemically synthesized
  source 1..20: mol_type = other DNA
ctttcccacatagctcttct

SEQ ID NO: 57990 - DNA, 20 bp, synthetic construct
  misc_feature 1..20: note = chemically synthesized
  source 1..20: mol_type = other DNA
tttcccacatagctcttctg

SEQ ID NO: 57991 - DNA, 20 bp, synthetic construct
  misc_feature 1..20: note = chemically synthesized
  source 1..20: mol_type = other DNA
cacatagctcttctgaggct

SEQ ID NO: 57992 - DNA, 20 bp, synthetic construct
  misc_feature 1..20: note = chemically synthesized
  source 1..20: mol_type = other DNA
agctcttctgaggcttagat

SEQ ID NO: 57993 - DNA, 20 bp, synthetic construct
  misc_feature 1..20: note = chemically synthesized
  source 1..20: mol_type = other DNA
gctcttctgaggcttagatg

SEQ ID NO: 57994 - DNA, 20 bp, synthetic construct
  misc_feature 1..20: note = chemically synthesized
  source 1..20: mol_type = other DNA
aggcttagatgaggcgatgc

SEQ ID NO: 57995 - DNA, 20 bp, synthetic construct
  misc_feature 1..20: note = chemically synthesized
  source 1..20: mol_type = other DNA
cttagatgaggcgatgctgg

SEQ ID NO: 57996 - DNA, 20 bp, synthetic construct
  misc_feature 1..20: note = chemically synthesized
  source 1..20: mol_type = other DNA
ttagatgaggcgatgctggt

SEQ ID NO: 57997 - DNA, 20 bp, synthetic construct
  misc_feature 1..20: note = chemically synthesized
  source 1..20: mol_type = other DNA
tagatgaggcgatgctggtg

SEQ ID NO: 57998 - DNA, 20 bp, synthetic construct
  misc_feature 1..20: note = chemically synthesized
  source 1..20: mol_type = other DNA
tgctggtggggtgtttaaca

SEQ ID NO: 57999 - DNA, 20 bp, synthetic construct
  misc_feature 1..20: note = chemically synthesized
  source 1..20: mol_type = other DNA
ctggtggggtgtttaacaca

SEQ ID NO: 58000 - DNA, 20 bp, synthetic construct
  misc_feature 1..20: note = chemically synthesized
  source 1..20: mol_type = other DNA
tgtttaacacagagctctgt

SEQ ID NO: 58001 - DNA, 20 bp, synthetic construct
  misc_feature 1..20: note = chemically synthesized
  source 1..20: mol_type = other DNA
acagagctctgttagcataa

SEQ ID NO: 58002 - DNA, 20 bp, synthetic construct
  misc_feature 1..20: note = chemically synthesized
  source 1..20: mol_type = other DNA
actcatttaatgaatgaatg

SEQ ID NO: 58003 - DNA, 20 bp, synthetic construct
  misc_feature 1..20: note = chemically synthesized
  source 1..20: mol_type = other DNA
caccattttttcacctcctc

SEQ ID NO: 58004 - DNA, 20 bp, synthetic construct
  misc_feature 1..20: note = chemically synthesized
  source 1..20: mol_type = other DNA
cctccagtcacctttcaaat

SEQ ID NO: 58005 - DNA, 20 bp, synthetic construct
  misc_feature 1..20: note = chemically synthesized
  source 1..20: mol_type = other DNA
ttagccaacttgcaaaaccc

SEQ ID NO: 58006 - DNA, 20 bp, synthetic construct
  misc_feature 1..20: note = chemically synthesized
  source 1..20: mol_type = other DNA
gccaacttgcaaaaccccag

SEQ ID NO: 58007 - DNA, 20 bp, synthetic construct
  misc_feature 1..20: note = chemically synthesized
  source 1..20: mol_type = other DNA
ccttctgtgtgtaatctcct

SEQ ID NO: 58008 - DNA, 20 bp, synthetic construct
  misc_feature 1..20: note = chemically synthesized
  source 1..20: mol_type = other DNA
ctgagccacttcctgtgtgt

SEQ ID NO: 58009 - DNA, 20 bp, synthetic construct
  misc_feature 1..20: note = chemically synthesized
  source 1..20: mol_type = other DNA
tgagccacttcctgtgtgtt

SEQ ID NO: 58010 - DNA, 20 bp, synthetic construct
  misc_feature 1..20: note = chemically synthesized
  source 1..20: mol_type = other DNA
gagccacttcctgtgtgttg

SEQ ID NO: 58011 - DNA, 20 bp, synthetic construct
  misc_feature 1..20: note = chemically synthesized
  source 1..20: mol_type = other DNA
gccacttcctgtgtgttggg

SEQ ID NO: 58012 - DNA, 20 bp, synthetic construct
  misc_feature 1..20: note = chemically synthesized
  source 1..20: mol_type = other DNA
ccacttcctgtgtgttgggg

SEQ ID NO: 58013 - DNA, 20 bp, synthetic construct
  misc_feature 1..20: note = chemically synthesized
  source 1..20: mol_type = other DNA
cacttcctgtgtgttgggga

SEQ ID NO: 58014 - DNA, 20 bp, synthetic construct
  misc_feature 1..20: note = chemically synthesized
  source 1..20: mol_type = other DNA
acttcctgtgtgttggggag

SEQ ID NO: 58015 - DNA, 20 bp, synthetic construct
  misc_feature 1..20: note = chemically synthesized
  source 1..20: mol_type = other DNA
ttcctgtgtgttggggaggg

SEQ ID NO: 58016 - DNA, 20 bp, synthetic construct
  misc_feature 1..20: note = chemically synthesized
  source 1..20: mol_type = other DNA
tcctgtgtgttggggagggg

SEQ ID NO: 58017 - DNA, 20 bp, synthetic construct
  misc_feature 1..20: note = chemically synthesized
  source 1..20: mol_type = other DNA
cctgtgtgttggggagggga

SEQ ID NO: 58018 - DNA, 20 bp, synthetic construct
  misc_feature 1..20: note = chemically synthesized
  source 1..20: mol_type = other DNA
ctgtgtgttggggaggggag

SEQ ID NO: 58019 - DNA, 20 bp, synthetic construct
  misc_feature 1..20: note = chemically synthesized
  source 1..20: mol_type = other DNA
tgtgtgttggggaggggagg

SEQ ID NO: 58020 - DNA, 20 bp, synthetic construct
  misc_feature 1..20: note = chemically synthesized
  source 1..20: mol_type = other DNA
gtgtgttggggaggggaggg

SEQ ID NO: 58021 - DNA, 20 bp, synthetic construct
  misc_feature 1..20: note = chemically synthesized
  source 1..20: mol_type = other DNA
ggggggatttctgcattttc

SEQ ID NO: 58022 - DNA, 20 bp, synthetic construct
  misc_feature 1..20: note = chemically synthesized
  source 1..20: mol_type = other DNA
ctgcattttctggaactatg

SEQ ID NO: 58023 - DNA, 20 bp, synthetic construct
  misc_feature 1..20: note = chemically synthesized
  source 1..20: mol_type = other DNA
ggaactatgtggcctactca

SEQ ID NO: 58024 - DNA, 20 bp, synthetic construct
  misc_feature 1..20: note = chemically synthesized
  source 1..20: mol_type = other DNA
ttcttttttttttttttttt

SEQ ID NO: 58025 - DNA, 20 bp, synthetic construct
  misc_feature 1..20: note = chemically synthesized
  source 1..20: mol_type = other DNA
ttttttttttttttttgaga

SEQ ID NO: 58026 - DNA, 20 bp, synthetic construct
  misc_feature 1..20: note = chemically synthesized
  source 1..20: mol_type = other DNA
ttttttttttttttgagaca

SEQ ID NO: 58027 - DNA, 20 bp, synthetic construct
  misc_feature 1..20: note = chemically synthesized
  source 1..20: mol_type = other DNA
ttttgagacagagtctcact

SEQ ID NO: 58028 - DNA, 20 bp, synthetic construct
  misc_feature 1..20: note = chemically synthesized
  source 1..20: mol_type = other DNA
cagagtctcactcagtcacc

SEQ ID NO: 58029 - DNA, 20 bp, synthetic construct
  misc_feature 1..20: note = chemically synthesized
  source 1..20: mol_type = other DNA
agagtctcactcagtcaccc

SEQ ID NO: 58030 - DNA, 20 bp, synthetic construct
  misc_feature 1..20: note = chemically synthesized
  source 1..20: mol_type = other DNA
tctcactcagtcacccaggc

SEQ ID NO: 58031 - DNA, 20 bp, synthetic construct
  misc_feature 1..20: note = chemically synthesized
  source 1..20: mol_type = other DNA
tcactcagtcacccaggctg

SEQ ID NO: 58032 - DNA, 20 bp, synthetic construct
  misc_feature 1..20: note = chemically synthesized
  source 1..20: mol_type = other DNA
cagtcacccaggctggagta

SEQ ID NO: 58033 - DNA, 20 bp, synthetic construct
  misc_feature 1..20: note = chemically synthesized
  source 1..20: mol_type = other DNA
tcacccaggctggagtacag

SEQ ID NO: 58034 - DNA, 20 bp, synthetic construct
  misc_feature 1..20: note = chemically synthesized
  source 1..20: mol_type = other DNA
ggagtacagtggcgcaatct

SEQ ID NO: 58035 - DNA, 20 bp, synthetic construct
  misc_feature 1..20: note = chemically synthesized
  source 1..20: mol_type = other DNA
aaactccacctctcgaattc

SEQ ID NO: 58036 - DNA, 20 bp, synthetic construct
  misc_feature 1..20: note = chemically synthesized
  source 1..20: mol_type = other DNA
ctctcgaattctggaattac

SEQ ID NO: 58037 - DNA, 20 bp, synthetic construct
  misc_feature 1..20: note = chemically synthesized
  source 1..20: mol_type = other DNA
tacgagcgattctcgtgcct

SEQ ID NO: 58038 - DNA, 20 bp, synthetic construct
  misc_feature 1..20: note = chemically synthesized
  source 1..20: mol_type = other DNA
gattctcgtgcctcagcctc

SEQ ID NO: 58039 - DNA, 20 bp, synthetic construct
  misc_feature 1..20: note = chemically synthesized
  source 1..20: mol_type = other DNA
ttctcgtgcctcagcctcca

SEQ ID NO: 58040 - DNA, 20 bp, synthetic construct
  misc_feature 1..20: note = chemically synthesized
  source 1..20: mol_type = other DNA
tcgtgcctcagcctccagag

SEQ ID NO: 58041 - DNA, 20 bp, synthetic construct
  misc_feature 1..20: note = chemically synthesized
  source 1..20: mol_type = other DNA
gcctcagcctccagagtagc

SEQ ID NO: 58042 - DNA, 20 bp, synthetic construct
  misc_feature 1..20: note = chemically synthesized
  source 1..20: mol_type = other DNA
ctccagagtagctggcatta

SEQ ID NO: 58043 - DNA, 20 bp, synthetic construct
  misc_feature 1..20: note = chemically synthesized
  source 1..20: mol_type = other DNA
tccagagtagctggcattac

SEQ ID NO: 58044 - DNA, 20 bp, synthetic construct
  misc_feature 1..20: note = chemically synthesized
  source 1..20: mol_type = other DNA
caggcatgtgctaccaattc

SEQ ID NO: 58045 - DNA, 20 bp, synthetic construct
  misc_feature 1..20: note = chemically synthesized
  source 1..20: mol_type = other DNA
ccagttaatttttgtatttt

SEQ ID NO: 58046 - DNA, 20 bp, synthetic construct
  misc_feature 1..20: note = chemically synthesized
  source 1..20: mol_type = other DNA
gttaatttttgtatttttag

SEQ ID NO: 58047 - DNA, 20 bp, synthetic construct
  misc_feature 1..20: note = chemically synthesized
  source 1..20: mol_type = other DNA
ttttgtatttttagtagtga

SEQ ID NO: 58048 - DNA, 20 bp, synthetic construct
  misc_feature 1..20: note = chemically synthesized
  source 1..20: mol_type = other DNA
tttgtatttttagtagtgac

SEQ ID NO: 58049 - DNA, 20 bp, synthetic construct
  misc_feature 1..20: note = chemically synthesized
  source 1..20: mol_type = other DNA
ttgtatttttagtagtgaca

SEQ ID NO: 58050 - DNA, 20 bp, synthetic construct
  misc_feature 1..20: note = chemically synthesized
  source 1..20: mol_type = other DNA
gtgacagggtttcaccatgt

SEQ ID NO: 58051 - DNA, 20 bp, synthetic construct
  misc_feature 1..20: note = chemically synthesized
  source 1..20: mol_type = other DNA
cagggtttcaccatgttggc

SEQ ID NO: 58052 - DNA, 20 bp, synthetic construct
  misc_feature 1..20: note = chemically synthesized
  source 1..20: mol_type = other DNA
agggtttcaccatgttggcc

SEQ ID NO: 58053 - DNA, 20 bp, synthetic construct
  misc_feature 1..20: note = chemically synthesized
  source 1..20: mol_type = other DNA
tttcaccatgttggccaggc

SEQ ID NO: 58054 - DNA, 20 bp, synthetic construct
  misc_feature 1..20: note = chemically synthesized
  source 1..20: mol_type = other DNA
ccaggctggtctcaaactcc

SEQ ID NO: 58055 - DNA, 20 bp, synthetic construct
  misc_feature 1..20: note = chemically synthesized
  source 1..20: mol_type = other DNA
ggtctcaaactcctggcctc

SEQ ID NO: 58056 - DNA, 20 bp, synthetic construct
  misc_feature 1..20: note = chemically synthesized
  source 1..20: mol_type = other DNA
ctcaagttatctgcccgcct

SEQ ID NO: 58057 - DNA, 20 bp, synthetic construct
  misc_feature 1..20: note = chemically synthesized
  source 1..20: mol_type = other DNA
ctgcccgcctcggcctccca

SEQ ID NO: 58058 - DNA, 20 bp, synthetic construct
  misc_feature 1..20: note = chemically synthesized
  source 1..20: mol_type = other DNA
gcctcggcctcccaaagtgc

SEQ ID NO: 58059 - DNA, 20 bp, synthetic construct
  misc_feature 1..20: note = chemically synthesized
  source 1..20: mol_type = other DNA
ctcccaaagtgctggaatta

SEQ ID NO: 58060 - DNA, 20 bp, synthetic construct
  misc_feature 1..20: note = chemically synthesized
  source 1..20: mol_type = other DNA
tcccaaagtgctggaattac

SEQ ID NO: 58061 - DNA, 20 bp, synthetic construct
  misc_feature 1..20: note = chemically synthesized
  source 1..20: mol_type = other DNA
agtgctggaattacaggtgt

SEQ ID NO: 58062 - DNA, 20 bp, synthetic construct
  misc_feature 1..20: note = chemically synthesized
  source 1..20: mol_type = other DNA
caggtgtgagccactgtgcc

SEQ ID NO: 58063 - DNA, 20 bp, synthetic construct
  misc_feature 1..20: note = chemically synthesized
  source 1..20: mol_type = other DNA
ctttactctttatccttact

SEQ ID NO: 58064 - DNA, 20 bp, synthetic construct
  misc_feature 1..20: note = chemically synthesized
  source 1..20: mol_type = other DNA
actctttatccttactcaga

SEQ ID NO: 58065 - DNA, 20 bp, synthetic construct
  misc_feature 1..20: note = chemically synthesized
  source 1..20: mol_type = other DNA
tctttatccttactcagaca

SEQ ID NO: 58066 - DNA, 20 bp, synthetic construct
  misc_feature 1..20: note = chemically synthesized
  source 1..20: mol_type = other DNA
ttactcagacagagaaaaat

SEQ ID NO: 58067 - DNA, 20 bp, synthetic construct
  misc_feature 1..20: note = chemically synthesized
  source 1..20: mol_type = other DNA
tactcagacagagaaaaata

SEQ ID NO: 58068 - DNA, 20 bp, synthetic construct
  misc_feature 1..20: note = chemically synthesized
  source 1..20: mol_type = other DNA
agacagagaaaaataaggca

SEQ ID NO: 58069 - DNA, 20 bp, synthetic construct
  misc_feature 1..20: note = chemically synthesized
  source 1..20: mol_type = other DNA
aaggcaaagctatacattat

SEQ ID NO: 58070 - DNA, 20 bp, synthetic construct
  misc_feature 1..20: note = chemically synthesized
  source 1..20: mol_type = other DNA
aggcaaagctatacattata

SEQ ID NO: 58071 - DNA, 20 bp, synthetic construct
  misc_feature 1..20: note = chemically synthesized
  source 1..20: mol_type = other DNA
ggcaaagctatacattataa

SEQ ID NO: 58072 - DNA, 20 bp, synthetic construct
  misc_feature 1..20: note = chemically synthesized
  source 1..20: mol_type = other DNA
gcaaagctatacattataag

SEQ ID NO: 58073 - DNA, 20 bp, synthetic construct
  misc_feature 1..20: note = chemically synthesized
  source 1..20: mol_type = other DNA
atacattataaggggcaaca

SEQ ID NO: 58074 - DNA, 20 bp, synthetic construct
  misc_feature 1..20: note = chemically synthesized
  source 1..20: mol_type = other DNA
ataaggggcaacatagttaa

SEQ ID NO: 58075 - DNA, 20 bp, synthetic construct
  misc_feature 1..20: note = chemically synthesized
  source 1..20: mol_type = other DNA
aggggcaacatagttaaaag

SEQ ID NO: 58076 - DNA, 20 bp, synthetic construct
  misc_feature 1..20: note = chemically synthesized
  source 1..20: mol_type = other DNA
ggggcaacatagttaaaaga

SEQ ID NO: 58077 - DNA, 20 bp, synthetic construct
  misc_feature 1..20: note = chemically synthesized
  source 1..20: mol_type = other DNA
aaggaataaaaatgcatcta

SEQ ID NO: 58078 - DNA, 20 bp, synthetic construct
  misc_feature 1..20: note = chemically synthesized
  source 1..20: mol_type = other DNA
ctaaaactcatgttttattg

SEQ ID NO: 58079 - DNA, 20 bp, synthetic construct
  misc_feature 1..20: note = chemically synthesized
  source 1..20: mol_type = other DNA
tattttaactttactctttt

SEQ ID NO: 58080 - DNA, 20 bp, synthetic construct
  misc_feature 1..20: note = chemically synthesized
  source 1..20: mol_type = other DNA
attttaactttactcttttg

SEQ ID NO: 58081 - DNA, 20 bp, synthetic construct
  misc_feature 1..20: note = chemically synthesized
  source 1..20: mol_type = other DNA
actttactcttttgaggtta

SEQ ID NO: 58082 - DNA, 20 bp, synthetic construct
  misc_feature 1..20: note = chemically synthesized
  source 1..20: mol_type = other DNA
ctttactcttttgaggttat

SEQ ID NO: 58083 - DNA, 20 bp, synthetic construct
  misc_feature 1..20: note = chemically synthesized
  source 1..20: mol_type = other DNA
tttgaggttatgggccttga

SEQ ID NO: 58084 - DNA, 20 bp, synthetic construct
  misc_feature 1..20: note = chemically synthesized
  source 1..20: mol_type = other DNA
atgggccttgatggtcatta

SEQ ID NO: 58085 - DNA, 20 bp, synthetic construct
  misc_feature 1..20: note = chemically synthesized
  source 1..20: mol_type = other DNA
ccttgatggtcattacggat

SEQ ID NO: 58086 - DNA, 20 bp, synthetic construct
  misc_feature 1..20: note = chemically synthesized
  source 1..20: mol_type = other DNA
tgatggtcattacggattgg

SEQ ID NO: 58087 - DNA, 20 bp, synthetic construct
  misc_feature 1..20: note = chemically synthesized
  source 1..20: mol_type = other DNA
attacggattggaagctttt

SEQ ID NO: 58088 - DNA, 20 bp, synthetic construct
  misc_feature 1..20: note = chemically synthesized
  source 1..20: mol_type = other DNA
tacggattggaagcttttaa

SEQ ID NO: 58089 - DNA, 20 bp, synthetic construct
  misc_feature 1..20: note = chemically synthesized
  source 1..20: mol_type = other DNA
ctataattatgatttgattt

SEQ ID NO: 58090 - DNA, 20 bp, synthetic construct
  misc_feature 1..20: note = chemically synthesized
  source 1..20: mol_type = other DNA
aattatgatttgattttaga

SEQ ID NO: 58091 - DNA, 20 bp, synthetic construct
  misc_feature 1..20: note = chemically synthesized
  source 1..20: mol_type = other DNA
atggtcaacttgtcgcattt

SEQ ID NO: 58092 - DNA, 20 bp, synthetic construct
  misc_feature 1..20: note = chemically synthesized
  source 1..20: mol_type = other DNA
acttgtcgcattttggtcaa

SEQ ID NO: 58093 - DNA, 20 bp, synthetic construct
  misc_feature 1..20: note = chemically synthesized
  source 1..20: mol_type = other DNA
cttgtcgcattttggtcaat

SEQ ID NO: 58094 - DNA, 20 bp, synthetic construct
  misc_feature 1..20: note = chemically synthesized
  source 1..20: mol_type = other DNA
tggtcaataggaaccctttt

SEQ ID NO: 58095 - DNA, 20 bp, synthetic construct
  misc_feature 1..20: note = chemically synthesized
  source 1..20: mol_type = other DNA
gacaatctctgctgatgttt

SEQ ID NO: 58096 - DNA, 20 bp, synthetic construct
  misc_feature 1..20: note = chemically synthesized
  source 1..20: mol_type = other DNA
agcaacacacacttgctttc

SEQ ID NO: 58097 - DNA, 20 bp, synthetic construct
  misc_feature 1..20: note = chemically synthesized
  source 1..20: mol_type = other DNA
acacacacttgctttctggc

SEQ ID NO: 58098 - DNA, 20 bp, synthetic construct
  misc_feature 1..20: note = chemically synthesized
  source 1..20: mol_type = other DNA
cacacacttgctttctggca

SEQ ID NO: 58099 - DNA, 20 bp, synthetic construct
  misc_feature 1..20: note = chemically synthesized
  source 1..20: mol_type = other DNA
aggccaccatgttcatgttc

SEQ ID NO: 58100 - DNA, 20 bp, synthetic construct
  misc_feature 1..20: note = chemically synthesized
  source 1..20: mol_type = other DNA
ggccaccatgttcatgttcc

SEQ ID NO: 58101 - DNA, 20 bp, synthetic construct
  misc_feature 1..20: note = chemically synthesized
  source 1..20: mol_type = other DNA
tcttcattttctcttgcccc

SEQ ID NO: 58102 - DNA, 20 bp, synthetic construct
  misc_feature 1..20: note = chemically synthesized
  source 1..20: mol_type = other DNA
ttttctcttgccccaagaca

SEQ ID NO: 58103 - DNA, 20 bp, synthetic construct
  misc_feature 1..20: note = chemically synthesized
  source 1..20: mol_type = other DNA
cttgccccaagacatggcac

SEQ ID NO: 58104 - DNA, 20 bp, synthetic construct
  misc_feature 1..20: note = chemically synthesized
  source 1..20: mol_type = other DNA
ttgccccaagacatggcact

SEQ ID NO: 58105 - DNA, 20 bp, synthetic construct
  misc_feature 1..20: note = chemically synthesized
  source 1..20: mol_type = other DNA
tgccccaagacatggcactg

SEQ ID NO: 58106 - DNA, 20 bp, synthetic construct
  misc_feature 1..20: note = chemically synthesized
  source 1..20: mol_type = other DNA
tggcactggggtatcttccc

SEQ ID NO: 58107 - DNA, 20 bp, synthetic construct
  misc_feature 1..20: note = chemically synthesized
  source 1..20: mol_type = other DNA
ggcactggggtatcttccct

SEQ ID NO: 58108 - DNA, 20 bp, synthetic construct
  misc_feature 1..20: note = chemically synthesized
  source 1..20: mol_type = other DNA
cactggggtatcttccctgg

SEQ ID NO: 58109 - DNA, 20 bp, synthetic construct
  misc_feature 1..20: note = chemically synthesized
  source 1..20: mol_type = other DNA
ctggggtatcttccctggga

SEQ ID NO: 58110 - DNA, 20 bp, synthetic construct
  misc_feature 1..20: note = chemically synthesized
  source 1..20: mol_type = other DNA
ggtatcttccctgggagaga

SEQ ID NO: 58111 - DNA, 20 bp, synthetic construct
  misc_feature 1..20: note = chemically synthesized
  source 1..20: mol_type = other DNA
tcttccctgggagagaaagc

SEQ ID NO: 58112 - DNA, 20 bp, synthetic construct
  misc_feature 1..20: note = chemically synthesized
  source 1..20: mol_type = other DNA
tgggagagaaagcaagcacg

SEQ ID NO: 58113 - DNA, 20 bp, synthetic construct
  misc_feature 1..20: note = chemically synthesized
  source 1..20: mol_type = other DNA
agaaagcaagcacgcagtga

SEQ ID NO: 58114 - DNA, 20 bp, synthetic construct
  misc_feature 1..20: note = chemically synthesized
  source 1..20: mol_type = other DNA
aaagcaagcacgcagtgaca

SEQ ID NO: 58115 - DNA, 20 bp, synthetic construct
  misc_feature 1..20: note = chemically synthesized
  source 1..20: mol_type = other DNA
aagcaagcacgcagtgacag

SEQ ID NO: 58116 - DNA, 20 bp, synthetic construct
  misc_feature 1..20: note = chemically synthesized
  source 1..20: mol_type = other DNA
acgcagtgacagaggccttc

SEQ ID NO: 58117 - DNA, 20 bp, synthetic construct
  misc_feature 1..20: note = chemically synthesized
  source 1..20: mol_type = other DNA
cgcagtgacagaggccttct

SEQ ID NO: 58118 - DNA, 20 bp, synthetic construct
  misc_feature 1..20: note = chemically synthesized
  source 1..20: mol_type = other DNA
cagaggccttctgggaacca

SEQ ID NO: 58119 - DNA, 20 bp, synthetic construct
  misc_feature 1..20: note = chemically synthesized
  source 1..20: mol_type = other DNA
agaggccttctgggaaccac

SEQ ID NO: 58120 - DNA, 20 bp, synthetic construct
  misc_feature 1..20: note = chemically synthesized
  source 1..20: mol_type = other DNA
ggccttctgggaaccacagg

SEQ ID NO: 58121 - DNA, 20 bp, synthetic construct
  misc_feature 1..20: note = chemically synthesized
  source 1..20: mol_type = other DNA
gccttctgggaaccacaggc

SEQ ID NO: 58122 - DNA, 20 bp, synthetic construct
  misc_feature 1..20: note = chemically synthesized
  source 1..20: mol_type = other DNA
ccttctgggaaccacaggca

SEQ ID NO: 58123 - DNA, 20 bp, synthetic construct
  misc_feature 1..20: note = chemically synthesized
  source 1..20: mol_type = other DNA
tgggaaccacaggcagggct

SEQ ID NO: 58124 - DNA, 20 bp, synthetic construct
  misc_feature 1..20: note = chemically synthesized
  source 1..20: mol_type = other DNA
acaggcagggctgagcgtgc

SEQ ID NO: 58125 - DNA, 20 bp, synthetic construct
  misc_feature 1..20: note = chemically synthesized
  source 1..20: mol_type = other DNA
gtgcaagactcacccttgcg

SEQ ID NO: 58126 - DNA, 20 bp, synthetic construct
  misc_feature 1..20: note = chemically synthesized
  source 1..20: mol_type = other DNA
tgcaagactcacccttgcgt

SEQ ID NO: 58127 - DNA, 20 bp, synthetic construct
  misc_feature 1..20: note = chemically synthesized
  source 1..20: mol_type = other DNA
gcaagactcacccttgcgtg

SEQ ID NO: 58128 - DNA, 20 bp, synthetic construct
  misc_feature 1..20: note = chemically synthesized
  source 1..20: mol_type = other DNA
tcacccttgcgtggggacta

SEQ ID NO: 58129 - DNA, 20 bp, synthetic construct
  misc_feature 1..20: note = chemically synthesized
  source 1..20: mol_type = other DNA
cacccttgcgtggggactat

SEQ ID NO: 58130 - DNA, 20 bp, synthetic construct
  misc_feature 1..20: note = chemically synthesized
  source 1..20: mol_type = other DNA
cccttgcgtggggactatgg

SEQ ID NO: 58131 - DNA, 20 bp, synthetic construct
  misc_feature 1..20: note = chemically synthesized
  source 1..20: mol_type = other DNA
cgtggggactatgggagacc

SEQ ID NO: 58132 - DNA, 20 bp, synthetic construct
  misc_feature 1..20: note = chemically synthesized
  source 1..20: mol_type = other DNA
ggggactatgggagacccag

SEQ ID NO: 58133 - DNA, 20 bp, synthetic construct
  misc_feature 1..20: note = chemically synthesized
  source 1..20: mol_type = other DNA
gggactatgggagacccagc

SEQ ID NO: 58134 - DNA, 20 bp, synthetic construct
  misc_feature 1..20: note = chemically synthesized
  source 1..20: mol_type = other DNA
tgggagacccagcaggactt

SEQ ID NO: 58135 - DNA, 20 bp, synthetic construct
  misc_feature 1..20: note = chemically synthesized
  source 1..20: mol_type = other DNA
gggagacccagcaggacttg

SEQ ID NO: 58136 - DNA, 20 bp, synthetic construct
  misc_feature 1..20: note = chemically synthesized
  source 1..20: mol_type = other DNA
ggagacccagcaggacttga

SEQ ID NO: 58137 - DNA, 20 bp, synthetic construct
  misc_feature 1..20: note = chemically synthesized
  source 1..20: mol_type = other DNA
ggacttgagggcttattatt

SEQ ID NO: 58138 - DNA, 20 bp, synthetic construct
  misc_feature 1..20: note = chemically synthesized
  source 1..20: mol_type = other DNA
tcagaaatacatgccctgcg

SEQ ID NO: 58139 - DNA, 20 bp, synthetic construct
  misc_feature 1..20: note = chemically synthesized
  source 1..20: mol_type = other DNA
cagaaatacatgccctgcgt

SEQ ID NO: 58140 - DNA, 20 bp, synthetic construct
  misc_feature 1..20: note = chemically synthesized
  source 1..20: mol_type = other DNA
aaatacatgccctgcgtggg

SEQ ID NO: 58141 - DNA, 20 bp, synthetic construct
  misc_feature 1..20: note = chemically synthesized
  source 1..20: mol_type = other DNA
catgccctgcgtgggtggct

SEQ ID NO: 58142 - DNA, 20 bp, synthetic construct
  misc_feature 1..20: note = chemically synthesized
  source 1..20: mol_type = other DNA
tgcgtgggtggcttagataa

SEQ ID NO: 58143 - DNA, 20 bp, synthetic construct
  misc_feature 1..20: note = chemically synthesized
  source 1..20: mol_type = other DNA
cgtgggtggcttagataaca

SEQ ID NO: 58144 - DNA, 20 bp, synthetic construct
  misc_feature 1..20: note = chemically synthesized
  source 1..20: mol_type = other DNA
tgggtggcttagataacaga

SEQ ID NO: 58145 - DNA, 20 bp, synthetic construct
  misc_feature 1..20: note = chemically synthesized
  source 1..20: mol_type = other DNA
gcttagataacagagagcaa

SEQ ID NO: 58146 - DNA, 20 bp, synthetic construct
  misc_feature 1..20: note = chemically synthesized
  source 1..20: mol_type = other DNA
cttagataacagagagcaat

SEQ ID NO: 58147 - DNA, 20 bp, synthetic construct
  misc_feature 1..20: note = chemically synthesized
  source 1..20: mol_type = other DNA
ttagataacagagagcaata

SEQ ID NO: 58148 - DNA, 20 bp, synthetic construct
  misc_feature 1..20: note = chemically synthesized
  source 1..20: mol_type = other DNA
cctattgctctctgttatct

SEQ ID NO: 58149 - DNA, 20 bp, synthetic construct
  misc_feature 1..20: note = chemically synthesized
  source 1..20: mol_type = other DNA
tgttatctaagccacccacg

SEQ ID NO: 58150 - DNA, 20 bp, synthetic construct
  misc_feature 1..20: note = chemically synthesized
  source 1..20: mol_type = other DNA
gttatctaagccacccacgc

SEQ ID NO: 58151 - DNA, 20 bp, synthetic construct
  misc_feature 1..20: note = chemically synthesized
  source 1..20: mol_type = other DNA
ttatctaagccacccacgca

SEQ ID NO: 58152 - DNA, 20 bp, synthetic construct
  misc_feature 1..20: note = chemically synthesized
  source 1..20: mol_type = other DNA
ggcatgtatttctgaataat

SEQ ID NO: 58153 - DNA, 20 bp, synthetic construct
  misc_feature 1..20: note = chemically synthesized
  source 1..20: mol_type = other DNA
tttctgaataataagccctc

SEQ ID NO: 58154 - DNA, 20 bp, synthetic construct
  misc_feature 1..20: note = chemically synthesized
  source 1..20: mol_type = other DNA
aataagccctcaagtcctgc

SEQ ID NO: 58155 - DNA, 20 bp, synthetic construct
  misc_feature 1..20: note = chemically synthesized
  source 1..20: mol_type = other DNA
ataagccctcaagtcctgct

SEQ ID NO: 58156 - DNA, 20 bp, synthetic construct
  misc_feature 1..20: note = chemically synthesized
  source 1..20: mol_type = other DNA
aagtcctgctgggtctccca

SEQ ID NO: 58157 - DNA, 20 bp, synthetic construct
  misc_feature 1..20: note = chemically synthesized
  source 1..20: mol_type = other DNA
gtctcccatagtccccacgc

SEQ ID NO: 58158 - DNA, 20 bp, synthetic construct
  misc_feature 1..20: note = chemically synthesized
  source 1..20: mol_type = other DNA
tctcccatagtccccacgca

SEQ ID NO: 58159 - DNA, 20 bp, synthetic construct
  misc_feature 1..20: note = chemically synthesized
  source 1..20: mol_type = other DNA
ctcccatagtccccacgcaa

SEQ ID NO: 58160 - DNA, 20 bp, synthetic construct
  misc_feature 1..20: note = chemically synthesized
  source 1..20: mol_type = other DNA
catagtccccacgcaagggt

SEQ ID NO: 58161 - DNA, 20 bp, synthetic construct
  misc_feature 1..20: note = chemically synthesized
  source 1..20: mol_type = other DNA
aagggtgagtcttgcacgct

SEQ ID NO: 58162 - DNA, 20 bp, synthetic construct
  misc_feature 1..20: note = chemically synthesized
  source 1..20: mol_type = other DNA
tgcacgctcagccctgcctg

SEQ ID NO: 58163 - DNA, 20 bp, synthetic construct
  misc_feature 1..20: note = chemically synthesized
  source 1..20: mol_type = other DNA
tcagccctgcctgtggttcc

SEQ ID NO: 58164 - DNA, 20 bp, synthetic construct
  misc_feature 1..20: note = chemically synthesized
  source 1..20: mol_type = other DNA
gccctgcctgtggttcccag

SEQ ID NO: 58165 - DNA, 20 bp, synthetic construct
  misc_feature 1..20: note = chemically synthesized
  source 1..20: mol_type = other DNA
ccctgcctgtggttcccaga

SEQ ID NO: 58166 - DNA, 20 bp, synthetic construct
  misc_feature 1..20: note = chemically synthesized
  source 1..20: mol_type = other DNA
tgcgtgcttgctttctctcc

SEQ ID NO: 58167 - DNA, 20 bp, synthetic construct
  misc_feature 1..20: note = chemically synthesized
  source 1..20: mol_type = other DNA
gcgtgcttgctttctctccc

SEQ ID NO: 58168 - DNA, 20 bp, synthetic construct
  misc_feature 1..20: note = chemically synthesized
  source 1..20: mol_type = other DNA
cgtgcttgctttctctccca

SEQ ID NO: 58169 - DNA, 20 bp, synthetic construct
  misc_feature 1..20: note = chemically synthesized
  source 1..20: mol_type = other DNA
gcttgctttctctcccaggg

SEQ ID NO: 58170 - DNA, 20 bp, synthetic construct
  misc_feature 1..20: note = chemically synthesized
  source 1..20: mol_type = other DNA
ctctcccagggaagataccc

SEQ ID NO: 58171 - DNA, 20 bp, synthetic construct
  misc_feature 1..20: note = chemically synthesized
  source 1..20: mol_type = other DNA
gataccccagtgccatgtct

SEQ ID NO: 58172 - DNA, 20 bp, synthetic construct
  misc_feature 1..20: note = chemically synthesized
  source 1..20: mol_type = other DNA
ataccccagtgccatgtctt

SEQ ID NO: 58173 - DNA, 20 bp, synthetic construct
  misc_feature 1..20: note = chemically synthesized
  source 1..20: mol_type = other DNA
taccccagtgccatgtcttg

SEQ ID NO: 58174 - DNA, 20 bp, synthetic construct
  misc_feature 1..20: note = chemically synthesized
  source 1..20: mol_type = other DNA
ccagtgccatgtcttggggc

SEQ ID NO: 58175 - DNA, 20 bp, synthetic construct
  misc_feature 1..20: note = chemically synthesized
  source 1..20: mol_type = other DNA
agtgccatgtcttggggcaa

SEQ ID NO: 58176 - DNA, 20 bp, synthetic construct
  misc_feature 1..20: note = chemically synthesized
  source 1..20: mol_type = other DNA
tcttggggcaagagaaaatg

SEQ ID NO: 58177 - DNA, 20 bp, synthetic construct
  misc_feature 1..20: note = chemically synthesized
  source 1..20: mol_type = other DNA
ggggcaagagaaaatgaaga

SEQ ID NO: 58178 - DNA, 20 bp, synthetic construct
  misc_feature 1..20: note = chemically synthesized
  source 1..20: mol_type = other DNA
agagaaaatgaagacagacc

SEQ ID NO: 58179 - DNA, 20 bp, synthetic construct
  misc_feature 1..20: note = chemically synthesized
  source 1..20: mol_type = other DNA
acagacctggaacatgaaca

SEQ ID NO: 58180 - DNA, 20 bp, synthetic construct
  misc_feature 1..20: note = chemically synthesized
  source 1..20: mol_type = other DNA
gacctggaacatgaacatgg

SEQ ID NO: 58181 - DNA, 20 bp, synthetic construct
  misc_feature 1..20: note = chemically synthesized
  source 1..20: mol_type = other DNA
catgaacatggtggccttgc

SEQ ID NO: 58182 - DNA, 20 bp, synthetic construct
  misc_feature 1..20: note = chemically synthesized
  source 1..20: mol_type = other DNA
aacatggtggccttgccaga

SEQ ID NO: 58183 - DNA, 20 bp, synthetic construct
  misc_feature 1..20: note = chemically synthesized
  source 1..20: mol_type = other DNA
tggtggccttgccagaaagc

SEQ ID NO: 58184 - DNA, 20 bp, synthetic construct
  misc_feature 1..20: note = chemically synthesized
  source 1..20: mol_type = other DNA
agtgtgtgttgctgaaacat

SEQ ID NO: 58185 - DNA, 20 bp, synthetic construct
  misc_feature 1..20: note = chemically synthesized
  source 1..20: mol_type = other DNA
gtgtgttgctgaaacatcag

SEQ ID NO: 58186 - DNA, 20 bp, synthetic construct
  misc_feature 1..20: note = chemically synthesized
  source 1..20: mol_type = other DNA
gtgttgctgaaacatcagca

SEQ ID NO: 58187 - DNA, 20 bp, synthetic construct
  misc_feature 1..20: note = chemically synthesized
  source 1..20: mol_type = other DNA
aacatcagcagagattgtca

SEQ ID NO: 58188 - DNA, 20 bp, synthetic construct
  misc_feature 1..20: note = chemically synthesized
  source 1..20: mol_type = other DNA
acatcagcagagattgtcaa

SEQ ID NO: 58189 - DNA, 20 bp, synthetic construct
  misc_feature 1..20: note = chemically synthesized
  source 1..20: mol_type = other DNA
catcagcagagattgtcaaa

SEQ ID NO: 58190 - DNA, 20 bp, synthetic construct
  misc_feature 1..20: note = chemically synthesized
  source 1..20: mol_type = other DNA
cagagattgtcaaagggata

SEQ ID NO: 58191 - DNA, 20 bp, synthetic construct
  misc_feature 1..20: note = chemically synthesized
  source 1..20: mol_type = other DNA
gagattgtcaaagggataaa

SEQ ID NO: 58192 - DNA, 20 bp, synthetic construct
  misc_feature 1..20: note = chemically synthesized
  source 1..20: mol_type = other DNA
gggataaagagataacttaa

SEQ ID NO: 58193 - DNA, 20 bp, synthetic construct
  misc_feature 1..20: note = chemically synthesized
  source 1..20: mol_type = other DNA
ggataaagagataacttaaa

SEQ ID NO: 58194 - DNA, 20 bp, synthetic construct
  misc_feature 1..20: note = chemically synthesized
  source 1..20: mol_type = other DNA
gataaagagataacttaaaa

SEQ ID NO: 58195 - DNA, 20 bp, synthetic construct
  misc_feature 1..20: note = chemically synthesized
  source 1..20: mol_type = other DNA
cctattgaccaaaatgcgac

SEQ ID NO: 58196 - DNA, 20 bp, synthetic construct
  misc_feature 1..20: note = chemically synthesized
  source 1..20: mol_type = other DNA
ctaaaatcaaatcataatta

SEQ ID NO: 58197 - DNA, 20 bp, synthetic construct
  misc_feature 1..20: note = chemically synthesized
  source 1..20: mol_type = other DNA
aaatcataattatagttcaa

SEQ ID NO: 58198 - DNA, 20 bp, synthetic construct
  misc_feature 1..20: note = chemically synthesized
  source 1..20: mol_type = other DNA
aatcataattatagttcaat

SEQ ID NO: 58199 - DNA, 20 bp, synthetic construct
  misc_feature 1..20: note = chemically synthesized
  source 1..20: mol_type = other DNA
atagttcaataggacacatt

SEQ ID NO: 58200 - DNA, 20 bp, synthetic construct
  misc_feature 1..20: note = chemically synthesized
  source 1..20: mol_type = other DNA
ggacacattgagtctcttaa

SEQ ID NO: 58201 - DNA, 20 bp, synthetic construct
  misc_feature 1..20: note = chemically synthesized
  source 1..20: mol_type = other DNA
tccaatccgtaatgaccatc

SEQ ID NO: 58202 - DNA, 20 bp, synthetic construct
  misc_feature 1..20: note = chemically synthesized
  source 1..20: mol_type = other DNA
ccaatccgtaatgaccatca

SEQ ID NO: 58203 - DNA, 20 bp, synthetic construct
  misc_feature 1..20: note = chemically synthesized
  source 1..20: mol_type = other DNA
atcaaggcccataacctcaa

SEQ ID NO: 58204 - DNA, 20 bp, synthetic construct
  misc_feature 1..20: note = chemically synthesized
  source 1..20: mol_type = other DNA
caaggcccataacctcaaaa

SEQ ID NO: 58205 - DNA, 20 bp, synthetic construct
  misc_feature 1..20: note = chemically synthesized
  source 1..20: mol_type = other DNA
cccataacctcaaaagagta

SEQ ID NO: 58206 - DNA, 20 bp, synthetic construct
  misc_feature 1..20: note = chemically synthesized
  source 1..20: mol_type = other DNA
aaaagagtaaagttaaaata

SEQ ID NO: 58207 - DNA, 20 bp, synthetic construct
  misc_feature 1..20: note = chemically synthesized
  source 1..20: mol_type = other DNA
agtaaagttaaaataaagtt

SEQ ID NO: 58208 - DNA, 20 bp, synthetic construct
  misc_feature 1..20: note = chemically synthesized
  source 1..20: mol_type = other DNA
agttaaaataaagttcagaa

SEQ ID NO: 58209 - DNA, 20 bp, synthetic construct
  misc_feature 1..20: note = chemically synthesized
  source 1..20: mol_type = other DNA
gttaaaataaagttcagaaa

SEQ ID NO: 58210 - DNA, 20 bp, synthetic construct
  misc_feature 1..20: note = chemically synthesized
  source 1..20: mol_type = other DNA
aaataaagttcagaaaaggt

SEQ ID NO: 58211 - DNA, 20 bp, synthetic construct
  misc_feature 1..20: note = chemically synthesized
  source 1..20: mol_type = other DNA
ggttagctgcaataaaacat

SEQ ID NO: 58212 - DNA, 20 bp, synthetic construct
  misc_feature 1..20: note = chemically synthesized
  source 1..20: mol_type = other DNA
ctgcaataaaacatgagttt

SEQ ID NO: 58213 - DNA, 20 bp, synthetic construct
  misc_feature 1..20: note = chemically synthesized
  source 1..20: mol_type = other DNA
tgagttttagtaattttaac

SEQ ID NO: 58214 - DNA, 20 bp, synthetic construct
  misc_feature 1..20: note = chemically synthesized
  source 1..20: mol_type = other DNA
gttttagtaattttaacaag

SEQ ID NO: 58215 - DNA, 20 bp, synthetic construct
  misc_feature 1..20: note = chemically synthesized
  source 1..20: mol_type = other DNA
ttttagtaattttaacaaga

SEQ ID NO: 58216 - DNA, 20 bp, synthetic construct
  misc_feature 1..20: note = chemically synthesized
  source 1..20: mol_type = other DNA
tttagtaattttaacaagaa

SEQ ID NO: 58217 - DNA, 20 bp, synthetic construct
  misc_feature 1..20: note = chemically synthesized
  source 1..20: mol_type = other DNA
ttagtaattttaacaagaag

SEQ ID NO: 58218 - DNA, 20 bp, synthetic construct
  misc_feature 1..20: note = chemically synthesized
  source 1..20: mol_type = other DNA
attttaacaagaaggggatg

SEQ ID NO: 58219 - DNA, 20 bp, synthetic construct
  misc_feature 1..20: note = chemically synthesized
  source 1..20: mol_type = other DNA
acaagaaggggatgaagcta

SEQ ID NO: 58220 - DNA, 20 bp, synthetic construct
  misc_feature 1..20: note = chemically synthesized
  source 1..20: mol_type = other DNA
atgttgccccttataatgta

SEQ ID NO: 58221 - DNA, 20 bp, synthetic construct
  misc_feature 1..20: note = chemically synthesized
  source 1..20: mol_type = other DNA
tgccttatttttctctgtct

SEQ ID NO: 58222 - DNA, 20 bp, synthetic construct
  misc_feature 1..20: note = chemically synthesized
  source 1..20: mol_type = other DNA
ttatttttctctgtctgagt

SEQ ID NO: 58223 - DNA, 20 bp, synthetic construct
  misc_feature 1..20: note = chemically synthesized
  source 1..20: mol_type = other DNA
tatttttctctgtctgagta

SEQ ID NO: 58224 - DNA, 20 bp, synthetic construct
  misc_feature 1..20: note = chemically synthesized
  source 1..20: mol_type = other DNA
tctctgtctgagtaaggata

SEQ ID NO: 58225 - DNA, 20 bp, synthetic construct
  misc_feature 1..20: note = chemically synthesized
  source 1..20: mol_type = other DNA
tctgtctgagtaaggataaa

SEQ ID NO: 58226 - DNA, 20 bp, synthetic construct
  misc_feature 1..20: note = chemically synthesized
  source 1..20: mol_type = other DNA
ctgagtaaggataaagagta

SEQ ID NO: 58227 - DNA, 20 bp, synthetic construct
  misc_feature 1..20: note = chemically synthesized
  source 1..20: mol_type = other DNA
tgagtaaggataaagagtaa

SEQ ID NO: 58228 - DNA, 20 bp, synthetic construct
  misc_feature 1..20: note = chemically synthesized
  source 1..20: mol_type = other DNA
taaggataaagagtaaaggc

SEQ ID NO: 58229 - DNA, 20 bp, synthetic construct
  misc_feature 1..20: note = chemically synthesized
  source 1..20: mol_type = other DNA
aaggataaagagtaaaggcc

SEQ ID NO: 58230 - DNA, 20 bp, synthetic construct
  misc_feature 1..20: note = chemically synthesized
  source 1..20: mol_type = other DNA
taaagagtaaaggccaggca

SEQ ID NO: 58231 - DNA, 20 bp, synthetic construct
  misc_feature 1..20: note = chemically synthesized
  source 1..20: mol_type = other DNA
agagtaaaggccaggcacag

SEQ ID NO: 58232 - DNA, 20 bp, synthetic construct
  misc_feature 1..20: note = chemically synthesized
  source 1..20: mol_type = other DNA
gtggctcacacctgtaattc

SEQ ID NO: 58233 - DNA, 20 bp, synthetic construct
  misc_feature 1..20: note = chemically synthesized
  source 1..20: mol_type = other DNA
cacctgtaattccagcactt

SEQ ID NO: 58234 - DNA, 20 bp, synthetic construct
  misc_feature 1..20: note = chemically synthesized
  source 1..20: mol_type = other DNA
acctgtaattccagcacttt

SEQ ID NO: 58235 - DNA, 20 bp, synthetic construct
  misc_feature 1..20: note = chemically synthesized
  source 1..20: mol_type = other DNA
ctgtaattccagcactttgg

SEQ ID NO: 58236 - DNA, 20 bp, synthetic construct
  misc_feature 1..20: note = chemically synthesized
  source 1..20: mol_type = other DNA
tgtaattccagcactttggg

SEQ ID NO: 58237 - DNA, 20 bp, synthetic construct
  misc_feature 1..20: note = chemically synthesized
  source 1..20: mol_type = other DNA
ttccagcactttgggaggcc

SEQ ID NO: 58238 - DNA, 20 bp, synthetic construct
  misc_feature 1..20: note = chemically synthesized
  source 1..20: mol_type = other DNA
tccagcactttgggaggccg

SEQ ID NO: 58239 - DNA, 20 bp, synthetic construct
  misc_feature 1..20: note = chemically synthesized
  source 1..20: mol_type = other DNA
agcactttgggaggccgagg

SEQ ID NO: 58240 - DNA, 20 bp, synthetic construct
  misc_feature 1..20: note = chemically synthesized
  source 1..20: mol_type = other DNA
gcactttgggaggccgaggc

SEQ ID NO: 58241 - DNA, 20 bp, synthetic construct
  misc_feature 1..20: note = chemically synthesized
  source 1..20: mol_type = other DNA
ctttgggaggccgaggcggg

SEQ ID NO: 58242 - DNA, 20 bp, synthetic construct
  misc_feature 1..20: note = chemically synthesized
  source 1..20: mol_type = other DNA
ccgaggcgggcagataactt

SEQ ID NO: 58243 - DNA, 20 bp, synthetic construct
  misc_feature 1..20: note = chemically synthesized
  source 1..20: mol_type = other DNA
cgaggcgggcagataacttg

SEQ ID NO: 58244 - DNA, 20 bp, synthetic construct
  misc_feature 1..20: note = chemically synthesized
  source 1..20: mol_type = other DNA
gcgggcagataacttgaggc

SEQ ID NO: 58245 - DNA, 20 bp, synthetic construct
  misc_feature 1..20: note = chemically synthesized
  source 1..20: mol_type = other DNA
cgggcagataacttgaggcc

SEQ ID NO: 58246 - DNA, 20 bp, synthetic construct
  misc_feature 1..20: note = chemically synthesized
  source 1..20: mol_type = other DNA
ggcagataacttgaggccag

SEQ ID NO: 58247 - DNA, 20 bp, synthetic construct
  misc_feature 1..20: note = chemically synthesized
  source 1..20: mol_type = other DNA
taacttgaggccaggagttt

SEQ ID NO: 58248 - DNA, 20 bp, synthetic construct
  misc_feature 1..20: note = chemically synthesized
  source 1..20: mol_type = other DNA
tgaggccaggagtttgagac

SEQ ID NO: 58249 - DNA, 20 bp, synthetic construct
  misc_feature 1..20: note = chemically synthesized
  source 1..20: mol_type = other DNA
ccaggagtttgagaccagcc

SEQ ID NO: 58250 - DNA, 20 bp, synthetic construct
  misc_feature 1..20: note = chemically synthesized
  source 1..20: mol_type = other DNA
tgagaccagcctggccaaca

SEQ ID NO: 58251 - DNA, 20 bp, synthetic construct
  misc_feature 1..20: note = chemically synthesized
  source 1..20: mol_type = other DNA
ctaaaaatacaaaaattaac

SEQ ID NO: 58252 - DNA, 20 bp, synthetic construct
  misc_feature 1..20: note = chemically synthesized
  source 1..20: mol_type = other DNA
atacaaaaattaactggaat

SEQ ID NO: 58253 - DNA, 20 bp, synthetic construct
  misc_feature 1..20: note = chemically synthesized
  source 1..20: mol_type = other DNA
caaaaattaactggaattgg

SEQ ID NO: 58254 - DNA, 20 bp, synthetic construct
  misc_feature 1..20: note = chemically synthesized
  source 1..20: mol_type = other DNA
gtagcacatgcctgtaatgc

SEQ ID NO: 58255 - DNA, 20 bp, synthetic construct
  misc_feature 1..20: note = chemically synthesized
  source 1..20: mol_type = other DNA
gcctgtaatgccagctactc

SEQ ID NO: 58256 - DNA, 20 bp, synthetic construct
  misc_feature 1..20: note = chemically synthesized
  source 1..20: mol_type = other DNA
ctgtaatgccagctactctg

SEQ ID NO: 58257 - DNA, 20 bp, synthetic construct
  misc_feature 1..20: note = chemically synthesized
  source 1..20: mol_type = other DNA
tgtaatgccagctactctgg

SEQ ID NO: 58258 - DNA, 20 bp, synthetic construct
  misc_feature 1..20: note = chemically synthesized
  source 1..20: mol_type = other DNA
tgccagctactctggaggct

SEQ ID NO: 58259 - DNA, 20 bp, synthetic construct
  misc_feature 1..20: note = chemically synthesized
  source 1..20: mol_type = other DNA
gccagctactctggaggctg

SEQ ID NO: 58260 - DNA, 20 bp, synthetic construct
  misc_feature 1..20: note = chemically synthesized
  source 1..20: mol_type = other DNA
tactctggaggctgaggcac

SEQ ID NO: 58261 - DNA, 20 bp, synthetic construct
  misc_feature 1..20: note = chemically synthesized
  source 1..20: mol_type = other DNA
acgagaatcgctcgtaattc

SEQ ID NO: 58262 - DNA, 20 bp, synthetic construct
  misc_feature 1..20: note = chemically synthesized
  source 1..20: mol_type = other DNA
cgctcgtaattccagaattc

SEQ ID NO: 58263 - DNA, 20 bp, synthetic construct
  misc_feature 1..20: note = chemically synthesized
  source 1..20: mol_type = other DNA
ctcgtaattccagaattcga

SEQ ID NO: 58264 - DNA, 20 bp, synthetic construct
  misc_feature 1..20: note = chemically synthesized
  source 1..20: mol_type = other DNA
tcgtaattccagaattcgag

SEQ ID NO: 58265 - DNA, 20 bp, synthetic construct
  misc_feature 1..20: note = chemically synthesized
  source 1..20: mol_type = other DNA
taattccagaattcgagagg

SEQ ID NO: 58266 - DNA, 20 bp, synthetic construct
  misc_feature 1..20: note = chemically synthesized
  source 1..20: mol_type = other DNA
attccagaattcgagaggtg

SEQ ID NO: 58267 - DNA, 20 bp, synthetic construct
  misc_feature 1..20: note = chemically synthesized
  source 1..20: mol_type = other DNA
aattcgagaggtggagtttg

SEQ ID NO: 58268 - DNA, 20 bp, synthetic construct
  misc_feature 1..20: note = chemically synthesized
  source 1..20: mol_type = other DNA
cgagaggtggagtttgcagt

SEQ ID NO: 58269 - DNA, 20 bp, synthetic construct
  misc_feature 1..20: note = chemically synthesized
  source 1..20: mol_type = other DNA
ggtggagtttgcagtaagcc

SEQ ID NO: 58270 - DNA, 20 bp, synthetic construct
  misc_feature 1..20: note = chemically synthesized
  source 1..20: mol_type = other DNA
aagattgcgccactgtactc

SEQ ID NO: 58271 - DNA, 20 bp, synthetic construct
  misc_feature 1..20: note = chemically synthesized
  source 1..20: mol_type = other DNA
tgcgccactgtactccagcc

SEQ ID NO: 58272 - DNA, 20 bp, synthetic construct
  misc_feature 1..20: note = chemically synthesized
  source 1..20: mol_type = other DNA
gcgccactgtactccagcct

SEQ ID NO: 58273 - DNA, 20 bp, synthetic construct
  misc_feature 1..20: note = chemically synthesized
  source 1..20: mol_type = other DNA
gtactccagcctgggtgact

SEQ ID NO: 58274 - DNA, 20 bp, synthetic construct
  misc_feature 1..20: note = chemically synthesized
  source 1..20: mol_type = other DNA
tccagcctgggtgactgagt

SEQ ID NO: 58275 - DNA, 20 bp, synthetic construct
  misc_feature 1..20: note = chemically synthesized
  source 1..20: mol_type = other DNA
gtctcaaaaaaaaaaaaaaa

SEQ ID NO: 58276 - DNA, 20 bp, synthetic construct
  misc_feature 1..20: note = chemically synthesized
  source 1..20: mol_type = other DNA
tcaaaaaaaaaaaaaaaaag

SEQ ID NO: 58277 - DNA, 20 bp, synthetic construct
  misc_feature 1..20: note = chemically synthesized
  source 1..20: mol_type = other DNA
aaaaaaaaaaaaaaaagaag

SEQ ID NO: 58278 - DNA, 20 bp, synthetic construct
  misc_feature 1..20: note = chemically synthesized
  source 1..20: mol_type = other DNA
aaaaaaaaagaagaagctgt

SEQ ID NO: 58279 - DNA, 20 bp, synthetic construct
  misc_feature 1..20: note = chemically synthesized
  source 1..20: mol_type = other DNA
aaaaaagaagaagctgtgag

SEQ ID NO: 58280 - DNA, 20 bp, synthetic construct
  misc_feature 1..20: note = chemically synthesized
  source 1..20: mol_type = other DNA
aaaaagaagaagctgtgagt

SEQ ID NO: 58281 - DNA, 20 bp, synthetic construct
  misc_feature 1..20: note = chemically synthesized
  source 1..20: mol_type = other DNA
gaagctgtgagtaggccaca

SEQ ID NO: 58282 - DNA, 20 bp, synthetic construct
  misc_feature 1..20: note = chemically synthesized
  source 1..20: mol_type = other DNA
gtgagtaggccacatagttc

SEQ ID NO: 58283 - DNA, 20 bp, synthetic construct
  misc_feature 1..20: note = chemically synthesized
  source 1..20: mol_type = other DNA
ccacatagttccagaaaatg

SEQ ID NO: 58284 - DNA, 20 bp, synthetic construct
  misc_feature 1..20: note = chemically synthesized
  source 1..20: mol_type = other DNA
cccctcccctccccaacaca

SEQ ID NO: 58285 - DNA, 20 bp, synthetic construct
  misc_feature 1..20: note = chemically synthesized
  source 1..20: mol_type = other DNA
ccctcccctccccaacacac

SEQ ID NO: 58286 - DNA, 20 bp, synthetic construct
  misc_feature 1..20: note = chemically synthesized
  source 1..20: mol_type = other DNA
tcccctccccaacacacagg

SEQ ID NO: 58287 - DNA, 20 bp, synthetic construct
  misc_feature 1..20: note = chemically synthesized
  source 1..20: mol_type = other DNA
cctccccaacacacaggaag

SEQ ID NO: 58288 - DNA, 20 bp, synthetic construct
  misc_feature 1..20: note = chemically synthesized
  source 1..20: mol_type = other DNA
ccaacacacaggaagtggct

SEQ ID NO: 58289 - DNA, 20 bp, synthetic construct
  misc_feature 1..20: note = chemically synthesized
  source 1..20: mol_type = other DNA
caacacacaggaagtggctc

SEQ ID NO: 58290 - DNA, 20 bp, synthetic construct
  misc_feature 1..20: note = chemically synthesized
  source 1..20: mol_type = other DNA
acacacaggaagtggctcag

SEQ ID NO: 58291 - DNA, 20 bp, synthetic construct
  misc_feature 1..20: note = chemically synthesized
  source 1..20: mol_type = other DNA
gtggctcaggagattacaca

SEQ ID NO: 58292 - DNA, 20 bp, synthetic construct
  misc_feature 1..20: note = chemically synthesized
  source 1..20: mol_type = other DNA
gctcaggagattacacacag

SEQ ID NO: 58293 - DNA, 20 bp, synthetic construct
  misc_feature 1..20: note = chemically synthesized
  source 1..20: mol_type = other DNA
ctcaggagattacacacaga

SEQ ID NO: 58294 - DNA, 20 bp, synthetic construct
  misc_feature 1..20: note = chemically synthesized
  source 1..20: mol_type = other DNA
ggagattacacacagaagga

SEQ ID NO: 58295 - DNA, 20 bp, synthetic construct
  misc_feature 1..20: note = chemically synthesized
  source 1..20: mol_type = other DNA
cagaaggaaagtgtgtctgc

SEQ ID NO: 58296 - DNA, 20 bp, synthetic construct
  misc_feature 1..20: note = chemically synthesized
  source 1..20: mol_type = other DNA
agaaggaaagtgtgtctgct

SEQ ID NO: 58297 - DNA, 20 bp, synthetic construct
  misc_feature 1..20: note = chemically synthesized
  source 1..20: mol_type = other DNA
gaaggaaagtgtgtctgctg

SEQ ID NO: 58298 - DNA, 20 bp, synthetic construct
  misc_feature 1..20: note = chemically synthesized
  source 1..20: mol_type = other DNA
tgtgtctgctggggttttgc

SEQ ID NO: 58299 - DNA, 20 bp, synthetic construct
  misc_feature 1..20: note = chemically synthesized
  source 1..20: mol_type = other DNA
tctgctggggttttgcaagt

SEQ ID NO: 58300 - DNA, 20 bp, synthetic construct
  misc_feature 1..20: note = chemically synthesized
  source 1..20: mol_type = other DNA
ttgcaagttggctaatttga

SEQ ID NO: 58301 - DNA, 20 bp, synthetic construct
  misc_feature 1..20: note = chemically synthesized
  source 1..20: mol_type = other DNA
tgcaagttggctaatttgaa

SEQ ID NO: 58302 - DNA, 20 bp, synthetic construct
  misc_feature 1..20: note = chemically synthesized
  source 1..20: mol_type = other DNA
tggctaatttgaaaggtgac

SEQ ID NO: 58303 - DNA, 20 bp, synthetic construct
  misc_feature 1..20: note = chemically synthesized
  source 1..20: mol_type = other DNA
gctaatttgaaaggtgactg

SEQ ID NO: 58304 - DNA, 20 bp, synthetic construct
  misc_feature 1..20: note = chemically synthesized
  source 1..20: mol_type = other DNA
ctaatttgaaaggtgactgg

SEQ ID NO: 58305 - DNA, 20 bp, synthetic construct
  misc_feature 1..20: note = chemically synthesized
  source 1..20: mol_type = other DNA
aatttgaaaggtgactggag

SEQ ID NO: 58306 - DNA, 20 bp, synthetic construct
  misc_feature 1..20: note = chemically synthesized
  source 1..20: mol_type = other DNA
atttgaaaggtgactggagg

SEQ ID NO: 58307 - DNA, 20 bp, synthetic construct
  misc_feature 1..20: note = chemically synthesized
  source 1..20: mol_type = other DNA
gactggaggaggtgaaaaaa

SEQ ID NO: 58308 - DNA, 20 bp, synthetic construct
  misc_feature 1..20: note = chemically synthesized
  source 1..20: mol_type = other DNA
acttcattcattcattaaat

SEQ ID NO: 58309 - DNA, 20 bp, synthetic construct
  misc_feature 1..20: note = chemically synthesized
  source 1..20: mol_type = other DNA
tcattcattaaatgagttat

SEQ ID NO: 58310 - DNA, 20 bp, synthetic construct
  misc_feature 1..20: note = chemically synthesized
  source 1..20: mol_type = other DNA
ttcattaaatgagttataag

SEQ ID NO: 58311 - DNA, 20 bp, synthetic construct
  misc_feature 1..20: note = chemically synthesized
  source 1..20: mol_type = other DNA
ttaaatgagttataagaaga

SEQ ID NO: 58312 - DNA, 20 bp, synthetic construct
  misc_feature 1..20: note = chemically synthesized
  source 1..20: mol_type = other DNA
agttataagaagacagacac

SEQ ID NO: 58313 - DNA, 20 bp, synthetic construct
  misc_feature 1..20: note = chemically synthesized
  source 1..20: mol_type = other DNA
acaagtgtccattatgctaa

SEQ ID NO: 58314 - DNA, 20 bp, synthetic construct
  misc_feature 1..20: note = chemically synthesized
  source 1..20: mol_type = other DNA
aagtgtccattatgctaaca

SEQ ID NO: 58315 - DNA, 20 bp, synthetic construct
  misc_feature 1..20: note = chemically synthesized
  source 1..20: mol_type = other DNA
ctctgtgttaaacaccccac

SEQ ID NO: 58316 - DNA, 20 bp, synthetic construct
  misc_feature 1..20: note = chemically synthesized
  source 1..20: mol_type = other DNA
ccaccagcatcgcctcatct

SEQ ID NO: 58317 - DNA, 20 bp, synthetic construct
  misc_feature 1..20: note = chemically synthesized
  source 1..20: mol_type = other DNA
gcatcgcctcatctaagcct

SEQ ID NO: 58318 - DNA, 20 bp, synthetic construct
  misc_feature 1..20: note = chemically synthesized
  source 1..20: mol_type = other DNA
tcgcctcatctaagcctcag

SEQ ID NO: 58319 - DNA, 20 bp, synthetic construct
  misc_feature 1..20: note = chemically synthesized
  source 1..20: mol_type = other DNA
gcctcatctaagcctcagaa

SEQ ID NO: 58320 - DNA, 20 bp, synthetic construct
  misc_feature 1..20: note = chemically synthesized
  source 1..20: mol_type = other DNA
taagcctcagaagagctatg

SEQ ID NO: 58321 - DNA, 20 bp, synthetic construct
  misc_feature 1..20: note = chemically synthesized
  source 1..20: mol_type = other DNA
aagcctcagaagagctatgt

SEQ ID NO: 58322 - DNA, 20 bp, synthetic construct
  misc_feature 1..20: note = chemically synthesized
  source 1..20: mol_type = other DNA
ctcagaagagctatgtggga

SEQ ID NO: 58323 - DNA, 20 bp, synthetic construct
  misc_feature 1..20: note = chemically synthesized
  source 1..20: mol_type = other DNA
aaacttttatccctatttta

SEQ ID NO: 58324 - DNA, 20 bp, synthetic construct
  misc_feature 1..20: note = chemically synthesized
  source 1..20: mol_type = other DNA
tttatccctattttatagat

SEQ ID NO: 58325 - DNA, 20 bp, synthetic construct
  misc_feature 1..20: note = chemically synthesized
  source 1..20: mol_type = other DNA
ttatccctattttatagatg

SEQ ID NO: 58326 - DNA, 20 bp, synthetic construct
  misc_feature 1..20: note = chemically synthesized
  source 1..20: mol_type = other DNA
attttatagatgaggaaacc

SEQ ID NO: 58327 - DNA, 20 bp, synthetic construct
  misc_feature 1..20: note = chemically synthesized
  source 1..20: mol_type = other DNA
ttttatagatgaggaaacca

SEQ ID NO: 58328 - DNA, 20 bp, synthetic construct
  misc_feature 1..20: note = chemically synthesized
  source 1..20: mol_type = other DNA
tagatgaggaaaccaaggct

SEQ ID NO: 58329 - DNA, 20 bp, synthetic construct
  misc_feature 1..20: note = chemically synthesized
  source 1..20: mol_type = other DNA
gatgaggaaaccaaggctca

SEQ ID NO: 58330 - DNA, 20 bp, synthetic construct
  misc_feature 1..20: note = chemically synthesized
  source 1..20: mol_type = other DNA
aaaccaaggctcagagaact

SEQ ID NO: 58331 - DNA, 20 bp, synthetic construct
  misc_feature 1..20: note = chemically synthesized
  source 1..20: mol_type = other DNA
aaccaaggctcagagaactg

SEQ ID NO: 58332 - DNA, 20 bp, synthetic construct
  misc_feature 1..20: note = chemically synthesized
  source 1..20: mol_type = other DNA
accaaggctcagagaactga

SEQ ID NO: 58333 - DNA, 20 bp, synthetic construct
  misc_feature 1..20: note = chemically synthesized
  source 1..20: mol_type = other DNA
agagaactgagggcctcccc

SEQ ID NO: 58334 - DNA, 20 bp, synthetic construct
  misc_feature 1..20: note = chemically synthesized
  source 1..20: mol_type = other DNA
tgagggcctcccccggatcc

SEQ ID NO: 58335 - DNA, 20 bp, synthetic construct
  misc_feature 1..20: note = chemically synthesized
  source 1..20: mol_type = other DNA
cccccggatccaagtccacc

SEQ ID NO: 58336 - DNA, 20 bp, synthetic construct
  misc_feature 1..20: note = chemically synthesized
  source 1..20: mol_type = other DNA
gatccaagtccacctagctg

SEQ ID NO: 58337 - DNA, 20 bp, synthetic construct
  misc_feature 1..20: note = chemically synthesized
  source 1..20: mol_type = other DNA
cccacatcctctgcatgtca

SEQ ID NO: 58338 - DNA, 20 bp, synthetic construct
  misc_feature 1..20: note = chemically synthesized
  source 1..20: mol_type = other DNA
ccacatcctctgcatgtcac

SEQ ID NO: 58339 - DNA, 20 bp, synthetic construct
  misc_feature 1..20: note = chemically synthesized
  source 1..20: mol_type = other DNA
ctctgcatgtcacaggtgct

SEQ ID NO: 58340 - DNA, 20 bp, synthetic construct
  misc_feature 1..20: note = chemically synthesized
  source 1..20: mol_type = other DNA
gcatgtcacaggtgctcaga

SEQ ID NO: 58341 - DNA, 20 bp, synthetic construct
  misc_feature 1..20: note = chemically synthesized
  source 1..20: mol_type = other DNA
aggtgctcagaaagatgctg

SEQ ID NO: 58342 - DNA, 20 bp, synthetic construct
  misc_feature 1..20: note = chemically synthesized
  source 1..20: mol_type = other DNA
ggtgctcagaaagatgctga

SEQ ID NO: 58343 - DNA, 20 bp, synthetic construct
  misc_feature 1..20: note = chemically synthesized
  source 1..20: mol_type = other DNA
agaaagatgctgaaggcacc

SEQ ID NO: 58344 - DNA, 20 bp, synthetic construct
  misc_feature 1..20: note = chemically synthesized
  source 1..20: mol_type = other DNA
ggcacctggcccttcacctt

SEQ ID NO: 58345 - DNA, 20 bp, synthetic construct
  misc_feature 1..20: note = chemically synthesized
  source 1..20: mol_type = other DNA
cctggcccttcaccttcgga

SEQ ID NO: 58346 - DNA, 20 bp, synthetic construct
  misc_feature 1..20: note = chemically synthesized
  source 1..20: mol_type = other DNA
caccttcggaaagccaaaat

SEQ ID NO: 58347 - DNA, 20 bp, synthetic construct
  misc_feature 1..20: note = chemically synthesized
  source 1..20: mol_type = other DNA
tcggaaagccaaaatgagca

SEQ ID NO: 58348 - DNA, 20 bp, synthetic construct
  misc_feature 1..20: note = chemically synthesized
  source 1..20: mol_type = other DNA
caaaatgagcacggccccta

SEQ ID NO: 58349 - DNA, 20 bp, synthetic construct
  misc_feature 1..20: note = chemically synthesized
  source 1..20: mol_type = other DNA
aaatgagcacggcccctaaa

SEQ ID NO: 58350 - DNA, 20 bp, synthetic construct
  misc_feature 1..20: note = chemically synthesized
  source 1..20: mol_type = other DNA
aatgagcacggcccctaaag

SEQ ID NO: 58351 - DNA, 20 bp, synthetic construct
  misc_feature 1..20: note = chemically synthesized
  source 1..20: mol_type = other DNA
atgagcacggcccctaaaga

SEQ ID NO: 58352 - DNA, 20 bp, synthetic construct
  misc_feature 1..20: note = chemically synthesized
  source 1..20: mol_type = other DNA
tgagcacggcccctaaagag

SEQ ID NO: 58353 - DNA, 20 bp, synthetic construct
  misc_feature 1..20: note = chemically synthesized
  source 1..20: mol_type = other DNA
gcccctaaagaggggattga

SEQ ID NO: 58354 - DNA, 20 bp, synthetic construct
  misc_feature 1..20: note = chemically synthesized
  source 1..20: mol_type = other DNA
aggggattgacagccttttc

SEQ ID NO: 58355 - DNA, 20 bp, synthetic construct
  misc_feature 1..20: note = chemically synthesized
  source 1..20: mol_type = other DNA
acagccttttctggaaaaaa

SEQ ID NO: 58356 - DNA, 20 bp, synthetic construct
  misc_feature 1..20: note = chemically synthesized
  source 1..20: mol_type = other DNA
gccttttctggaaaaaatgg

SEQ ID NO: 58357 - DNA, 20 bp, synthetic construct
  misc_feature 1..20: note = chemically synthesized
  source 1..20: mol_type = other DNA
aaaaatggaagtttgaatct

SEQ ID NO: 58358 - DNA, 20 bp, synthetic construct
  misc_feature 1..20: note = chemically synthesized
  source 1..20: mol_type = other DNA
aaaatggaagtttgaatctg

SEQ ID NO: 58359 - DNA, 20 bp, synthetic construct
  misc_feature 1..20: note = chemically synthesized
  source 1..20: mol_type = other DNA
aatggaagtttgaatctgag

SEQ ID NO: 58360 - DNA, 20 bp, synthetic construct
  misc_feature 1..20: note = chemically synthesized
  source 1..20: mol_type = other DNA
atggaagtttgaatctgagg

SEQ ID NO: 58361 - DNA, 20 bp, synthetic construct
  misc_feature 1..20: note = chemically synthesized
  source 1..20: mol_type = other DNA
gaggaggtgtccctcaacaa

SEQ ID NO: 58362 - DNA, 20 bp, synthetic construct
  misc_feature 1..20: note = chemically synthesized
  source 1..20: mol_type = other DNA
aggaggtgtccctcaacaac

SEQ ID NO: 58363 - DNA, 20 bp, synthetic construct
  misc_feature 1..20: note = chemically synthesized
  source 1..20: mol_type = other DNA
caggtgctgctccccaaatc

SEQ ID NO: 58364 - DNA, 20 bp, synthetic construct
  misc_feature 1..20: note = chemically synthesized
  source 1..20: mol_type = other DNA
aggtgctgctccccaaatct

SEQ ID NO: 58365 - DNA, 20 bp, synthetic construct
  misc_feature 1..20: note = chemically synthesized
  source 1..20: mol_type = other DNA
ggtgctgctccccaaatctg

SEQ ID NO: 58366 - DNA, 20 bp, synthetic construct
  misc_feature 1..20: note = chemically synthesized
  source 1..20: mol_type = other DNA
cccaaatctggggccaaacg

SEQ ID NO: 58367 - DNA, 20 bp, synthetic construct
  misc_feature 1..20: note = chemically synthesized
  source 1..20: mol_type = other DNA
aaatctggggccaaacgcag

SEQ ID NO: 58368 - DNA, 20 bp, synthetic construct
  misc_feature 1..20: note = chemically synthesized
  source 1..20: mol_type = other DNA
gcagcagttgttcccccact

SEQ ID NO: 58369 - DNA, 20 bp, synthetic construct
  misc_feature 1..20: note = chemically synthesized
  source 1..20: mol_type = other DNA
gttcccccacttagacccct

SEQ ID NO: 58370 - DNA, 20 bp, synthetic construct
  misc_feature 1..20: note = chemically synthesized
  source 1..20: mol_type = other DNA
acccctgagacccatctata

SEQ ID NO: 58371 - DNA, 20 bp, synthetic construct
  misc_feature 1..20: note = chemically synthesized
  source 1..20: mol_type = other DNA
gacccatctatatggttttt

SEQ ID NO: 58372 - DNA, 20 bp, synthetic construct
  misc_feature 1..20: note = chemically synthesized
  source 1..20: mol_type = other DNA
cccatctatatggtttttca

SEQ ID NO: 58373 - DNA, 20 bp, synthetic construct
  misc_feature 1..20: note = chemically synthesized
  source 1..20: mol_type = other DNA
tctatatggtttttcagagc

SEQ ID NO: 58374 - DNA, 20 bp, synthetic construct
  misc_feature 1..20: note = chemically synthesized
  source 1..20: mol_type = other DNA
ctatatggtttttcagagcc

SEQ ID NO: 58375 - DNA, 20 bp, synthetic construct
  misc_feature 1..20: note = chemically synthesized
  source 1..20: mol_type = other DNA
agagccaggacacatcccca

SEQ ID NO: 58376 - DNA, 20 bp, synthetic construct
  misc_feature 1..20: note = chemically synthesized
  source 1..20: mol_type = other DNA
gagccaggacacatccccaa

SEQ ID NO: 58377 - DNA, 20 bp, synthetic construct
  misc_feature 1..20: note = chemically synthesized
  source 1..20: mol_type = other DNA
ggacacatccccaaaggtca

SEQ ID NO: 58378 - DNA, 20 bp, synthetic construct
  misc_feature 1..20: note = chemically synthesized
  source 1..20: mol_type = other DNA
tccccaaaggtcatggcctt

SEQ ID NO: 58379 - DNA, 20 bp, synthetic construct
  misc_feature 1..20: note = chemically synthesized
  source 1..20: mol_type = other DNA
ccaaaggtcatggcctttgg

SEQ ID NO: 58380 - DNA, 20 bp, synthetic construct
  misc_feature 1..20: note = chemically synthesized
  source 1..20: mol_type = other DNA
aggtcatggcctttggtggt

SEQ ID NO: 58381 - DNA, 20 bp, synthetic construct
  misc_feature 1..20: note = chemically synthesized
  source 1..20: mol_type = other DNA
tttggtggttagcattgact

SEQ ID NO: 58382 - DNA, 20 bp, synthetic construct
  misc_feature 1..20: note = chemically synthesized
  source 1..20: mol_type = other DNA
ttggtggttagcattgactt

SEQ ID NO: 58383 - DNA, 20 bp, synthetic construct
  misc_feature 1..20: note = chemically synthesized
  source 1..20: mol_type = other DNA
tggtggttagcattgacttg

SEQ ID NO: 58384 - DNA, 20 bp, synthetic construct
  misc_feature 1..20: note = chemically synthesized
  source 1..20: mol_type = other DNA
acttggggcccatcacatgc

SEQ ID NO: 58385 - DNA, 20 bp, synthetic construct
  misc_feature 1..20: note = chemically synthesized
  source 1..20: mol_type = other DNA
ttggggcccatcacatgcca

SEQ ID NO: 58386 - DNA, 20 bp, synthetic construct
  misc_feature 1..20: note = chemically synthesized
  source 1..20: mol_type = other DNA
tggggcccatcacatgccag

SEQ ID NO: 58387 - DNA, 20 bp, synthetic construct
  misc_feature 1..20: note = chemically synthesized
  source 1..20: mol_type = other DNA
cacatgccagaggctgcccg

SEQ ID NO: 58388 - DNA, 20 bp, synthetic construct
  misc_feature 1..20: note = chemically synthesized
  source 1..20: mol_type = other DNA
attatctcattcgatcttca

SEQ ID NO: 58389 - DNA, 20 bp, synthetic construct
  misc_feature 1..20: note = chemically synthesized
  source 1..20: mol_type = other DNA
ttcgatcttcacagtcctga

SEQ ID NO: 58390 - DNA, 20 bp, synthetic construct
  misc_feature 1..20: note = chemically synthesized
  source 1..20: mol_type = other DNA
gatcttcacagtcctgatgg

SEQ ID NO: 58391 - DNA, 20 bp, synthetic construct
  misc_feature 1..20: note = chemically synthesized
  source 1..20: mol_type = other DNA
ctgatggaagtgactcttct

SEQ ID NO: 58392 - DNA, 20 bp, synthetic construct
  misc_feature 1..20: note = chemically synthesized
  source 1..20: mol_type = other DNA
gatggaagtgactcttctta

SEQ ID NO: 58393 - DNA, 20 bp, synthetic construct
  misc_feature 1..20: note = chemically synthesized
  source 1..20: mol_type = other DNA
cttagagtcttcctatctca

SEQ ID NO: 58394 - DNA, 20 bp, synthetic construct
  misc_feature 1..20: note = chemically synthesized
  source 1..20: mol_type = other DNA
agtcttcctatctcacagat

SEQ ID NO: 58395 - DNA, 20 bp, synthetic construct
  misc_feature 1..20: note = chemically synthesized
  source 1..20: mol_type = other DNA
gtcttcctatctcacagatg

SEQ ID NO: 58396 - DNA, 20 bp, synthetic construct
  misc_feature 1..20: note = chemically synthesized
  source 1..20: mol_type = other DNA
atctcacagatgaggaaacc

SEQ ID NO: 58397 - DNA, 20 bp, synthetic construct
  misc_feature 1..20: note = chemically synthesized
  source 1..20: mol_type = other DNA
tctcacagatgaggaaaccg

SEQ ID NO: 58398 - DNA, 20 bp, synthetic construct
  misc_feature 1..20: note = chemically synthesized
  source 1..20: mol_type = other DNA
cagatgaggaaaccgaggca

SEQ ID NO: 58399 - DNA, 20 bp, synthetic construct
  misc_feature 1..20: note = chemically synthesized
  source 1..20: mol_type = other DNA
gatgaggaaaccgaggcaca

SEQ ID NO: 58400 - DNA, 20 bp, synthetic construct
  misc_feature 1..20: note = chemically synthesized
  source 1..20: mol_type = other DNA
tgaggaaaccgaggcacaga

SEQ ID NO: 58401 - DNA, 20 bp, synthetic construct
  misc_feature 1..20: note = chemically synthesized
  source 1..20: mol_type = other DNA
gaggaaaccgaggcacagag

SEQ ID NO: 58402 - DNA, 20 bp, synthetic construct
  misc_feature 1..20: note = chemically synthesized
  source 1..20: mol_type = other DNA
aaccgaggcacagagaggtt

SEQ ID NO: 58403 - DNA, 20 bp, synthetic construct
  misc_feature 1..20: note = chemically synthesized
  source 1..20: mol_type = other DNA
cgaggcacagagaggttaag

SEQ ID NO: 58404 - DNA, 20 bp, synthetic construct
  misc_feature 1..20: note = chemically synthesized
  source 1..20: mol_type = other DNA
agaggttaagtggcttgtct

SEQ ID NO: 58405 - DNA, 20 bp, synthetic construct
  misc_feature 1..20: note = chemically synthesized
  source 1..20: mol_type = other DNA
aggttaagtggcttgtctaa

SEQ ID NO: 58406 - DNA, 20 bp, synthetic construct
  misc_feature 1..20: note = chemically synthesized
  source 1..20: mol_type = other DNA
cttgtctaagagctcacaaa

SEQ ID NO: 58407 - DNA, 20 bp, synthetic construct
  misc_feature 1..20: note = chemically synthesized
  source 1..20: mol_type = other DNA
tgtctaagagctcacaaaaa

SEQ ID NO: 58408 - DNA, 20 bp, synthetic construct
  misc_feature 1..20: note = chemically synthesized
  source 1..20: mol_type = other DNA
agagctcacaaaaagagcga

SEQ ID NO: 58409 - DNA, 20 bp, synthetic construct
  misc_feature 1..20: note = chemically synthesized
  source 1..20: mol_type = other DNA
agctcacaaaaagagcgatg

SEQ ID NO: 58410 - DNA, 20 bp, synthetic construct
  misc_feature 1..20: note = chemically synthesized
  source 1..20: mol_type = other DNA
acaaaaagagcgatggagct

SEQ ID NO: 58411 - DNA, 20 bp, synthetic construct
  misc_feature 1..20: note = chemically synthesized
  source 1..20: mol_type = other DNA
caaaaagagcgatggagcta

SEQ ID NO: 58412 - DNA, 20 bp, synthetic construct
  misc_feature 1..20: note = chemically synthesized
  source 1..20: mol_type = other DNA
agagcgatggagctaaggct

SEQ ID NO: 58413 - DNA, 20 bp, synthetic construct
  misc_feature 1..20: note = chemically synthesized
  source 1..20: mol_type = other DNA
atggagctaaggcttggccc

SEQ ID NO: 58414 - DNA, 20 bp, synthetic construct
  misc_feature 1..20: note = chemically synthesized
  source 1..20: mol_type = other DNA
taaggcttggccccagatat

SEQ ID NO: 58415 - DNA, 20 bp, synthetic construct
  misc_feature 1..20: note = chemically synthesized
  source 1..20: mol_type = other DNA
tcccgaacccacgccttaac

SEQ ID NO: 58416 - DNA, 20 bp, synthetic construct
  misc_feature 1..20: note = chemically synthesized
  source 1..20: mol_type = other DNA
gtgacctgcactgactctca

SEQ ID NO: 58417 - DNA, 20 bp, synthetic construct
  misc_feature 1..20: note = chemically synthesized
  source 1..20: mol_type = other DNA
acctgcactgactctcaaag

SEQ ID NO: 58418 - DNA, 20 bp, synthetic construct
  misc_feature 1..20: note = chemically synthesized
  source 1..20: mol_type = other DNA
cctgcactgactctcaaaga

SEQ ID NO: 58419 - DNA, 20 bp, synthetic construct
  misc_feature 1..20: note = chemically synthesized
  source 1..20: mol_type = other DNA
gcactgactctcaaagaagg

SEQ ID NO: 58420 - DNA, 20 bp, synthetic construct
  misc_feature 1..20: note = chemically synthesized
  source 1..20: mol_type = other DNA
tgactctcaaagaaggaagc

SEQ ID NO: 58421 - DNA, 20 bp, synthetic construct
  misc_feature 1..20: note = chemically synthesized
  source 1..20: mol_type = other DNA
caaagaaggaagctggtgcc

SEQ ID NO: 58422 - DNA, 20 bp, synthetic construct
  misc_feature 1..20: note = chemically synthesized
  source 1..20: mol_type = other DNA
aaagaaggaagctggtgcct

SEQ ID NO: 58423 - DNA, 20 bp, synthetic construct
  misc_feature 1..20: note = chemically synthesized
  source 1..20: mol_type = other DNA
gaaggaagctggtgcctggg

SEQ ID NO: 58424 - DNA, 20 bp, synthetic construct
  misc_feature 1..20: note = chemically synthesized
  source 1..20: mol_type = other DNA
aaggaagctggtgcctggga

SEQ ID NO: 58425 - DNA, 20 bp, synthetic construct
  misc_feature 1..20: note = chemically synthesized
  source 1..20: mol_type = other DNA
ggaagctggtgcctgggaag

SEQ ID NO: 58426 - DNA, 20 bp, synthetic construct
  misc_feature 1..20: note = chemically synthesized
  source 1..20: mol_type = other DNA
gaagctggtgcctgggaagg

SEQ ID NO: 58427 - DNA, 20 bp, synthetic construct
  misc_feature 1..20: note = chemically synthesized
  source 1..20: mol_type = other DNA
aagctggtgcctgggaagga

SEQ ID NO: 58428 - DNA, 20 bp, synthetic construct
  misc_feature 1..20: note = chemically synthesized
  source 1..20: mol_type = other DNA
tgcctgggaaggagggtgca

SEQ ID NO: 58429 - DNA, 20 bp, synthetic construct
  misc_feature 1..20: note = chemically synthesized
  source 1..20: mol_type = other DNA
tgggaaggagggtgcatagt

SEQ ID NO: 58430 - DNA, 20 bp, synthetic construct
  misc_feature 1..20: note = chemically synthesized
  source 1..20: mol_type = other DNA
gggaaggagggtgcatagtg

SEQ ID NO: 58431 - DNA, 20 bp, synthetic construct
  misc_feature 1..20: note = chemically synthesized
  source 1..20: mol_type = other DNA
ggaaggagggtgcatagtga

SEQ ID NO: 58432 - DNA, 20 bp, synthetic construct
  misc_feature 1..20: note = chemically synthesized
  source 1..20: mol_type = other DNA
gtgcatagtgagggtgtgca

SEQ ID NO: 58433 - DNA, 20 bp, synthetic construct
  misc_feature 1..20: note = chemically synthesized
  source 1..20: mol_type = other DNA
tgcatagtgagggtgtgcat

SEQ ID NO: 58434 - DNA, 20 bp, synthetic construct
  misc_feature 1..20: note = chemically synthesized
  source 1..20: mol_type = other DNA
gcatagtgagggtgtgcatg

SEQ ID NO: 58435 - DNA, 20 bp, synthetic construct
  misc_feature 1..20: note = chemically synthesized
  source 1..20: mol_type = other DNA
gcatggggtgtgtgtgtttg

SEQ ID NO: 58436 - DNA, 20 bp, synthetic construct
  misc_feature 1..20: note = chemically synthesized
  source 1..20: mol_type = other DNA
catggggtgtgtgtgtttgt

SEQ ID NO: 58437 - DNA, 20 bp, synthetic construct
  misc_feature 1..20: note = chemically synthesized
  source 1..20: mol_type = other DNA
atggggtgtgtgtgtttgtg

SEQ ID NO: 58438 - DNA, 20 bp, synthetic construct
  misc_feature 1..20: note = chemically synthesized
  source 1..20: mol_type = other DNA
gggtgtgtgtgtttgtgggg

SEQ ID NO: 58439 - DNA, 20 bp, synthetic construct
  misc_feature 1..20: note = chemically synthesized
  source 1..20: mol_type = other DNA
gtgtgtgtttgtggggtggc

SEQ ID NO: 58440 - DNA, 20 bp, synthetic construct
  misc_feature 1..20: note = chemically synthesized
  source 1..20: mol_type = other DNA
gtggggtggccagcactctc

SEQ ID NO: 58441 - DNA, 20 bp, synthetic construct
  misc_feature 1..20: note = chemically synthesized
  source 1..20: mol_type = other DNA
tggggtggccagcactctcc

SEQ ID NO: 58442 - DNA, 20 bp, synthetic construct
  misc_feature 1..20: note = chemically synthesized
  source 1..20: mol_type = other DNA
ggggtggccagcactctccg

SEQ ID NO: 58443 - DNA, 20 bp, synthetic construct
  misc_feature 1..20: note = chemically synthesized
  source 1..20: mol_type = other DNA
gggtggccagcactctccgg

SEQ ID NO: 58444 - DNA, 20 bp, synthetic construct
  misc_feature 1..20: note = chemically synthesized
  source 1..20: mol_type = other DNA
tccgggggcactttgccaat

SEQ ID NO: 58445 - DNA, 20 bp, synthetic construct
  misc_feature 1..20: note = chemically synthesized
  source 1..20: mol_type = other DNA
gggcactttgccaatgagtt

SEQ ID NO: 58446 - DNA, 20 bp, synthetic construct
  misc_feature 1..20: note = chemically synthesized
  source 1..20: mol_type = other DNA
caatgagttcagctcccatg

SEQ ID NO: 58447 - DNA, 20 bp, synthetic construct
  misc_feature 1..20: note = chemically synthesized
  source 1..20: mol_type = other DNA
tccactgttgttctcctgac

SEQ ID NO: 58448 - DNA, 20 bp, synthetic construct
  misc_feature 1..20: note = chemically synthesized
  source 1..20: mol_type = other DNA
tgttctcctgaccagccact

SEQ ID NO: 58449 - DNA, 20 bp, synthetic construct
  misc_feature 1..20: note = chemically synthesized
  source 1..20: mol_type = other DNA
ccactcagtcttgatttact

SEQ ID NO: 58450 - DNA, 20 bp, synthetic construct
  misc_feature 1..20: note = chemically synthesized
  source 1..20: mol_type = other DNA
cagtcttgatttacttggcc

SEQ ID NO: 58451 - DNA, 20 bp, synthetic construct
  misc_feature 1..20: note = chemically synthesized
  source 1..20: mol_type = other DNA
agtcttgatttacttggccc

SEQ ID NO: 58452 - DNA, 20 bp, synthetic construct
  misc_feature 1..20: note = chemically synthesized
  source 1..20: mol_type = other DNA
gtcttgatttacttggccca

SEQ ID NO: 58453 - DNA, 20 bp, synthetic construct
  misc_feature 1..20: note = chemically synthesized
  source 1..20: mol_type = other DNA
tttacttggcccagggccac

SEQ ID NO: 58454 - DNA, 20 bp, synthetic construct
  misc_feature 1..20: note = chemically synthesized
  source 1..20: mol_type = other DNA
ccttacccgattccttgctg

SEQ ID NO: 58455 - DNA, 20 bp, synthetic construct
  misc_feature 1..20: note = chemically synthesized
  source 1..20: mol_type = other DNA
tcgactctcacatccctatc

SEQ ID NO: 58456 - DNA, 20 bp, synthetic construct
  misc_feature 1..20: note = chemically synthesized
  source 1..20: mol_type = other DNA
ccctatccagcccataccac

SEQ ID NO: 58457 - DNA, 20 bp, synthetic construct
  misc_feature 1..20: note = chemically synthesized
  source 1..20: mol_type = other DNA
cctatccagcccataccacg

SEQ ID NO: 58458 - DNA, 20 bp, synthetic construct
  misc_feature 1..20: note = chemically synthesized
  source 1..20: mol_type = other DNA
taccacgaggctcccatctc

SEQ ID NO: 58459 - DNA, 20 bp, synthetic construct
  misc_feature 1..20: note = chemically synthesized
  source 1..20: mol_type = other DNA
accacgaggctcccatctcc

SEQ ID NO: 58460 - DNA, 20 bp, synthetic construct
  misc_feature 1..20: note = chemically synthesized
  source 1..20: mol_type = other DNA
acgaggctcccatctccagg

SEQ ID NO: 58461 - DNA, 20 bp, synthetic construct
  misc_feature 1..20: note = chemically synthesized
  source 1..20: mol_type = other DNA
cgaggctcccatctccaggc

SEQ ID NO: 58462 - DNA, 20 bp, synthetic construct
  misc_feature 1..20: note = chemically synthesized
  source 1..20: mol_type = other DNA
gaggctcccatctccaggca

SEQ ID NO: 58463 - DNA, 20 bp, synthetic construct
  misc_feature 1..20: note = chemically synthesized
  source 1..20: mol_type = other DNA
catctccaggcagggccctg

SEQ ID NO: 58464 - DNA, 20 bp, synthetic construct
  misc_feature 1..20: note = chemically synthesized
  source 1..20: mol_type = other DNA
ctccaggcagggccctgtgg

SEQ ID NO: 58465 - DNA, 20 bp, synthetic construct
  misc_feature 1..20: note = chemically synthesized
  source 1..20: mol_type = other DNA
tccaggcagggccctgtggt

SEQ ID NO: 58466 - DNA, 20 bp, synthetic construct
  misc_feature 1..20: note = chemically synthesized
  source 1..20: mol_type = other DNA
ccaggcagggccctgtggtg

SEQ ID NO: 58467 - DNA, 20 bp, synthetic construct
  misc_feature 1..20: note = chemically synthesized
  source 1..20: mol_type = other DNA
ggcagggccctgtggtgggg

SEQ ID NO: 58468 - DNA, 20 bp, synthetic construct
  misc_feature 1..20: note = chemically synthesized
  source 1..20: mol_type = other DNA
gcagggccctgtggtggggc

SEQ ID NO: 58469 - DNA, 20 bp, synthetic construct
  misc_feature 1..20: note = chemically synthesized
  source 1..20: mol_type = other DNA
cagggccctgtggtggggca

SEQ ID NO: 58470 - DNA, 20 bp, synthetic construct
  misc_feature 1..20: note = chemically synthesized
  source 1..20: mol_type = other DNA
tggtggggcagggcctcccc

SEQ ID NO: 58471 - DNA, 20 bp, synthetic construct
  misc_feature 1..20: note = chemically synthesized
  source 1..20: mol_type = other DNA
agatgccccttactcatgac

SEQ ID NO: 58472 - DNA, 20 bp, synthetic construct
  misc_feature 1..20: note = chemically synthesized
  source 1..20: mol_type = other DNA
ccttactcatgaccagctca

SEQ ID NO: 58473 - DNA, 20 bp, synthetic construct
  misc_feature 1..20: note = chemically synthesized
  source 1..20: mol_type = other DNA
cttactcatgaccagctcac

SEQ ID NO: 58474 - DNA, 20 bp, synthetic construct
  misc_feature 1..20: note = chemically synthesized
  source 1..20: mol_type = other DNA
ttcccatgatgcatttcctc

SEQ ID NO: 58475 - DNA, 20 bp, synthetic construct
  misc_feature 1..20: note = chemically synthesized
  source 1..20: mol_type = other DNA
tcccatgatgcatttcctct

SEQ ID NO: 58476 - DNA, 20 bp, synthetic construct
  misc_feature 1..20: note = chemically synthesized
  source 1..20: mol_type = other DNA
cccatgatgcatttcctctg

SEQ ID NO: 58477 - DNA, 20 bp, synthetic construct
  misc_feature 1..20: note = chemically synthesized
  source 1..20: mol_type = other DNA
ccatgatgcatttcctctgg

SEQ ID NO: 58478 - DNA, 20 bp, synthetic construct
  misc_feature 1..20: note = chemically synthesized
  source 1..20: mol_type = other DNA
catgatgcatttcctctggg

SEQ ID NO: 58479 - DNA, 20 bp, synthetic construct
  misc_feature 1..20: note = chemically synthesized
  source 1..20: mol_type = other DNA
tgcatttcctctggggggat

SEQ ID NO: 58480 - DNA, 20 bp, synthetic construct
  misc_feature 1..20: note = chemically synthesized
  source 1..20: mol_type = other DNA
ttcctctggggggatcagcc

SEQ ID NO: 58481 - DNA, 20 bp, synthetic construct
  misc_feature 1..20: note = chemically synthesized
  source 1..20: mol_type = other DNA
gatcagcccagatgctgcaa

SEQ ID NO: 58482 - DNA, 20 bp, synthetic construct
  misc_feature 1..20: note = chemically synthesized
  source 1..20: mol_type = other DNA
gatgctgcaatagacaattg

SEQ ID NO: 58483 - DNA, 20 bp, synthetic construct
  misc_feature 1..20: note = chemically synthesized
  source 1..20: mol_type = other DNA
gctgcaatagacaattgtgg

SEQ ID NO: 58484 - DNA, 20 bp, synthetic construct
  misc_feature 1..20: note = chemically synthesized
  source 1..20: mol_type = other DNA
tagacaattgtggaagtaac

SEQ ID NO: 58485 - DNA, 20 bp, synthetic construct
  misc_feature 1..20: note = chemically synthesized
  source 1..20: mol_type = other DNA
agacaattgtggaagtaacc

SEQ ID NO: 58486 - DNA, 20 bp, synthetic construct
  misc_feature 1..20: note = chemically synthesized
  source 1..20: mol_type = other DNA
caattgtggaagtaaccagg

SEQ ID NO: 58487 - DNA, 20 bp, synthetic construct
  misc_feature 1..20: note = chemically synthesized
  source 1..20: mol_type = other DNA
gtggaagtaaccaggtggac

SEQ ID NO: 58488 - DNA, 20 bp, synthetic construct
  misc_feature 1..20: note = chemically synthesized
  source 1..20: mol_type = other DNA
agactttccccctcatgtcc

SEQ ID NO: 58489 - DNA, 20 bp, synthetic construct
  misc_feature 1..20: note = chemically synthesized
  source 1..20: mol_type = other DNA
gactttccccctcatgtcct

SEQ ID NO: 58490 - DNA, 20 bp, synthetic construct
  misc_feature 1..20: note = chemically synthesized
  source 1..20: mol_type = other DNA
actttccccctcatgtcctg

SEQ ID NO: 58491 - DNA, 20 bp, synthetic construct
  misc_feature 1..20: note = chemically synthesized
  source 1..20: mol_type = other DNA
ccctcatgtcctggggttcc

SEQ ID NO: 58492 - DNA, 20 bp, synthetic construct
  misc_feature 1..20: note = chemically synthesized
  source 1..20: mol_type = other DNA
cctcatgtcctggggttcct

SEQ ID NO: 58493 - DNA, 20 bp, synthetic construct
  misc_feature 1..20: note = chemically synthesized
  source 1..20: mol_type = other DNA
ctcatgtcctggggttcctg

SEQ ID NO: 58494 - DNA, 20 bp, synthetic construct
  misc_feature 1..20: note = chemically synthesized
  source 1..20: mol_type = other DNA
tcatgtcctggggttcctgg

SEQ ID NO: 58495 - DNA, 20 bp, synthetic construct
  misc_feature 1..20: note = chemically synthesized
  source 1..20: mol_type = other DNA
tcctggggttcctgggggca

SEQ ID NO: 58496 - DNA, 20 bp, synthetic construct
  misc_feature 1..20: note = chemically synthesized
  source 1..20: mol_type = other DNA
gggcacagtatccttgtgaa

SEQ ID NO: 58497 - DNA, 20 bp, synthetic construct
  misc_feature 1..20: note = chemically synthesized
  source 1..20: mol_type = other DNA
tatccttgtgaatggccact

SEQ ID NO: 58498 - DNA, 20 bp, synthetic construct
  misc_feature 1..20: note = chemically synthesized
  source 1..20: mol_type = other DNA
acccctcccaccacaacccc

SEQ ID NO: 58499 - DNA, 20 bp, synthetic construct
  misc_feature 1..20: note = chemically synthesized
  source 1..20: mol_type = other DNA
cccctcccaccacaaccccc

SEQ ID NO: 58500 - DNA, 20 bp, synthetic construct
  misc_feature 1..20: note = chemically synthesized
  source 1..20: mol_type = other DNA
caacccccgggattttgtcc

SEQ ID NO: 58501 - DNA, 20 bp, synthetic construct
  misc_feature 1..20: note = chemically synthesized
  source 1..20: mol_type = other DNA
tttgtcctggtgcgtttttc

SEQ ID NO: 58502 - DNA, 20 bp, synthetic construct
  misc_feature 1..20: note = chemically synthesized
  source 1..20: mol_type = other DNA
tgcgtttttccagattatcc

SEQ ID NO: 58503 - DNA, 20 bp, synthetic construct
  misc_feature 1..20: note = chemically synthesized
  source 1..20: mol_type = other DNA
attatcctagcccttcctcc

SEQ ID NO: 58504 - DNA, 20 bp, synthetic construct
  misc_feature 1..20: note = chemically synthesized
  source 1..20: mol_type = other DNA
ttatcctagcccttcctccc

SEQ ID NO: 58505 - DNA, 20 bp, synthetic construct
  misc_feature 1..20: note = chemically synthesized
  source 1..20: mol_type = other DNA
cctagcccttcctcccagga

SEQ ID NO: 58506 - DNA, 20 bp, synthetic construct
  misc_feature 1..20: note = chemically synthesized
  source 1..20: mol_type = other DNA
ttcctcccaggatggatgtc

SEQ ID NO: 58507 - DNA, 20 bp, synthetic construct
  misc_feature 1..20: note = chemically synthesized
  source 1..20: mol_type = other DNA
cctcccaggatggatgtcca

SEQ ID NO: 58508 - DNA, 20 bp, synthetic construct
  misc_feature 1..20: note = chemically synthesized
  source 1..20: mol_type = other DNA
cccaggatggatgtccagag

SEQ ID NO: 58509 - DNA, 20 bp, synthetic construct
  misc_feature 1..20: note = chemically synthesized
  source 1..20: mol_type = other DNA
ccaggatggatgtccagagc

SEQ ID NO: 58510 - DNA, 20 bp, synthetic construct
  misc_feature 1..20: note = chemically synthesized
  source 1..20: mol_type = other DNA
caggatggatgtccagagca

SEQ ID NO: 58511 - DNA, 20 bp, synthetic construct
  misc_feature 1..20: note = chemically synthesized
  source 1..20: mol_type = other DNA
gatggatgtccagagcaggg

SEQ ID NO: 58512 - DNA, 20 bp, synthetic construct
  misc_feature 1..20: note = chemically synthesized
  source 1..20: mol_type = other DNA
atggatgtccagagcagggc

SEQ ID NO: 58513 - DNA, 20 bp, synthetic construct
  misc_feature 1..20: note = chemically synthesized
  source 1..20: mol_type = other DNA
tggatgtccagagcagggcg

SEQ ID NO: 58514 - DNA, 20 bp, synthetic construct
  misc_feature 1..20: note = chemically synthesized
  source 1..20: mol_type = other DNA
ggatgtccagagcagggcgg

SEQ ID NO: 58515 - DNA, 20 bp, synthetic construct
  misc_feature 1..20: note = chemically synthesized
  source 1..20: mol_type = other DNA
tccagagcagggcgggggct

SEQ ID NO: 58516 - DNA, 20 bp, synthetic construct
  misc_feature 1..20: note = chemically synthesized
  source 1..20: mol_type = other DNA
agcagggcgggggctgagcc

SEQ ID NO: 58517 - DNA, 20 bp, synthetic construct
  misc_feature 1..20: note = chemically synthesized
  source 1..20: mol_type = other DNA
cagggcgggggctgagccta

SEQ ID NO: 58518 - DNA, 20 bp, synthetic construct
  misc_feature 1..20: note = chemically synthesized
  source 1..20: mol_type = other DNA
tgagcctagagccctgccaa

SEQ ID NO: 58519 - DNA, 20 bp, synthetic construct
  misc_feature 1..20: note = chemically synthesized
  source 1..20: mol_type = other DNA
agcctagagccctgccaaaa

SEQ ID NO: 58520 - DNA, 20 bp, synthetic construct
  misc_feature 1..20: note = chemically synthesized
  source 1..20: mol_type = other DNA
ctagagccctgccaaaagag

SEQ ID NO: 58521 - DNA, 20 bp, synthetic construct
  misc_feature 1..20: note = chemically synthesized
  source 1..20: mol_type = other DNA
tagagccctgccaaaagagc

SEQ ID NO: 58522 - DNA, 20 bp, synthetic construct
  misc_feature 1..20: note = chemically synthesized
  source 1..20: mol_type = other DNA
agagcaggaccccaaattct

SEQ ID NO: 58523 - DNA, 20 bp, synthetic construct
  misc_feature 1..20: note = chemically synthesized
  source 1..20: mol_type = other DNA
tttcttcattcctcctccaa

SEQ ID NO: 58524 - DNA, 20 bp, synthetic construct
  misc_feature 1..20: note = chemically synthesized
  source 1..20: mol_type = other DNA
cattcctcctccaaaagccc

SEQ ID NO: 58525 - DNA, 20 bp, synthetic construct
  misc_feature 1..20: note = chemically synthesized
  source 1..20: mol_type = other DNA
actgcaatcccttctgcacc

SEQ ID NO: 58526 - DNA, 20 bp, synthetic construct
  misc_feature 1..20: note = chemically synthesized
  source 1..20: mol_type = other DNA
caatcccttctgcacccagc

SEQ ID NO: 58527 - DNA, 20 bp, synthetic construct
  misc_feature 1..20: note = chemically synthesized
  source 1..20: mol_type = other DNA
aatcccttctgcacccagcc

SEQ ID NO: 58528 - DNA, 20 bp, synthetic construct
  misc_feature 1..20: note = chemically synthesized
  source 1..20: mol_type = other DNA
tcctatgacacacacctccc

SEQ ID NO: 58529 - DNA, 20 bp, synthetic construct
  misc_feature 1..20: note = chemically synthesized
  source 1..20: mol_type = other DNA
acacacctccccagtgcaca

SEQ ID NO: 58530 - DNA, 20 bp, synthetic construct
  misc_feature 1..20: note = chemically synthesized
  source 1..20: mol_type = other DNA
cacacagacctgcccaactg

SEQ ID NO: 58531 - DNA, 20 bp, synthetic construct
  misc_feature 1..20: note = chemically synthesized
  source 1..20: mol_type = other DNA
acacagacctgcccaactgt

SEQ ID NO: 58532 - DNA, 20 bp, synthetic construct
  misc_feature 1..20: note = chemically synthesized
  source 1..20: mol_type = other DNA
cacagacctgcccaactgtg

SEQ ID NO: 58533 - DNA, 20 bp, synthetic construct
  misc_feature 1..20: note = chemically synthesized
  source 1..20: mol_type = other DNA
ccaactgtggggctgcccac

SEQ ID NO: 58534 - DNA, 20 bp, synthetic construct
  misc_feature 1..20: note = chemically synthesized
  source 1..20: mol_type = other DNA
caactgtggggctgcccact

SEQ ID NO: 58535 - DNA, 20 bp, synthetic construct
  misc_feature 1..20: note = chemically synthesized
  source 1..20: mol_type = other DNA
gctgcccactgggcatttca

SEQ ID NO: 58536 - DNA, 20 bp, synthetic construct
  misc_feature 1..20: note = chemically synthesized
  source 1..20: mol_type = other DNA
ctgcccactgggcatttcat

SEQ ID NO: 58537 - DNA, 20 bp, synthetic construct
  misc_feature 1..20: note = chemically synthesized
  source 1..20: mol_type = other DNA
cccactgggcatttcatagg

SEQ ID NO: 58538 - DNA, 20 bp, synthetic construct
  misc_feature 1..20: note = chemically synthesized
  source 1..20: mol_type = other DNA
tgggcatttcataggtggct

SEQ ID NO: 58539 - DNA, 20 bp, synthetic construct
  misc_feature 1..20: note = chemically synthesized
  source 1..20: mol_type = other DNA
gctcagtcctcttccctctg

SEQ ID NO: 58540 - DNA, 20 bp, synthetic construct
  misc_feature 1..20: note = chemically synthesized
  source 1..20: mol_type = other DNA
agtcctcttccctctgcagc

SEQ ID NO: 58541 - DNA, 20 bp, synthetic construct
  misc_feature 1..20: note = chemically synthesized
  source 1..20: mol_type = other DNA
cttccctctgcagctggccc

SEQ ID NO: 58542 - DNA, 20 bp, synthetic construct
  misc_feature 1..20: note = chemically synthesized
  source 1..20: mol_type = other DNA
agctggccccagaaacctgc

SEQ ID NO: 58543 - DNA, 20 bp, synthetic construct
  misc_feature 1..20: note = chemically synthesized
  source 1..20: mol_type = other DNA
cccagaaacctgccagttat

SEQ ID NO: 58544 - DNA, 20 bp, synthetic construct
  misc_feature 1..20: note = chemically synthesized
  source 1..20: mol_type = other DNA
aacctgccagttattggtgc

SEQ ID NO: 58545 - DNA, 20 bp, synthetic construct
  misc_feature 1..20: note = chemically synthesized
  source 1..20: mol_type = other DNA
acctgccagttattggtgcc

SEQ ID NO: 58546 - DNA, 20 bp, synthetic construct
  misc_feature 1..20: note = chemically synthesized
  source 1..20: mol_type = other DNA
tattggtgccaggtctgtgc

SEQ ID NO: 58547 - DNA, 20 bp, synthetic construct
  misc_feature 1..20: note = chemically synthesized
  source 1..20: mol_type = other DNA
attggtgccaggtctgtgcc

SEQ ID NO: 58548 - DNA, 20 bp, synthetic construct
  misc_feature 1..20: note = chemically synthesized
  source 1..20: mol_type = other DNA
tggtgccaggtctgtgccag

SEQ ID NO: 58549 - DNA, 20 bp, synthetic construct
  misc_feature 1..20: note = chemically synthesized
  source 1..20: mol_type = other DNA
ggtgccaggtctgtgccagg

SEQ ID NO: 58550 - DNA, 20 bp, synthetic construct
  misc_feature 1..20: note = chemically synthesized
  source 1..20: mol_type = other DNA
gtgccaggtctgtgccagga

SEQ ID NO: 58551 - DNA, 20 bp, synthetic construct
  misc_feature 1..20: note = chemically synthesized
  source 1..20: mol_type = other DNA
caggtctgtgccaggagggc

SEQ ID NO: 58552 - DNA, 20 bp, synthetic construct
  misc_feature 1..20: note = chemically synthesized
  source 1..20: mol_type = other DNA
aggtctgtgccaggagggcg

SEQ ID NO: 58553 - DNA, 20 bp, synthetic construct
  misc_feature 1..20: note = chemically synthesized
  source 1..20: mol_type = other DNA
agggcgaggcctgtcatttc

SEQ ID NO: 58554 - DNA, 20 bp, synthetic construct
  misc_feature 1..20: note = chemically synthesized
  source 1..20: mol_type = other DNA
tgtcatttctagtaatcctc

SEQ ID NO: 58555 - DNA, 20 bp, synthetic construct
  misc_feature 1..20: note = chemically synthesized
  source 1..20: mol_type = other DNA
gtcatttctagtaatcctct

SEQ ID NO: 58556 - DNA, 20 bp, synthetic construct
  misc_feature 1..20: note = chemically synthesized
  source 1..20: mol_type = other DNA
atttctagtaatcctctggg

SEQ ID NO: 58557 - DNA, 20 bp, synthetic construct
  misc_feature 1..20: note = chemically synthesized
  source 1..20: mol_type = other DNA
cagtgtgactgtacctcttg

SEQ ID NO: 58558 - DNA, 20 bp, synthetic construct
  misc_feature 1..20: note = chemically synthesized
  source 1..20: mol_type = other DNA
gtacctcttgcggcaactca

SEQ ID NO: 58559 - DNA, 20 bp, synthetic construct
  misc_feature 1..20: note = chemically synthesized
  source 1..20: mol_type = other DNA
tacctcttgcggcaactcaa

SEQ ID NO: 58560 - DNA, 20 bp, synthetic construct
  misc_feature 1..20: note = chemically synthesized
  source 1..20: mol_type = other DNA
acctcttgcggcaactcaaa

SEQ ID NO: 58561 - DNA, 20 bp, synthetic construct
  misc_feature 1..20: note = chemically synthesized
  source 1..20: mol_type = other DNA
ctcttgcggcaactcaaagg

SEQ ID NO: 58562 - DNA, 20 bp, synthetic construct
  misc_feature 1..20: note = chemically synthesized
  source 1..20: mol_type = other DNA
cttgcggcaactcaaaggga

SEQ ID NO: 58563 - DNA, 20 bp, synthetic construct
  misc_feature 1..20: note = chemically synthesized
  source 1..20: mol_type = other DNA
ttgcggcaactcaaagggag

SEQ ID NO: 58564 - DNA, 20 bp, synthetic construct
  misc_feature 1..20: note = chemically synthesized
  source 1..20: mol_type = other DNA
tgcggcaactcaaagggaga

SEQ ID NO: 58565 - DNA, 20 bp, synthetic construct
  misc_feature 1..20: note = chemically synthesized
  source 1..20: mol_type = other DNA
agggagagggtgacttgtcc

SEQ ID NO: 58566 - DNA, 20 bp, synthetic construct
  misc_feature 1..20: note = chemically synthesized
  source 1..20: mol_type = other DNA
gggagagggtgacttgtccc

SEQ ID NO: 58567 - DNA, 20 bp, synthetic construct
  misc_feature 1..20: note = chemically synthesized
  source 1..20: mol_type = other DNA
gggtgacttgtcccgggtca

SEQ ID NO: 58568 - DNA, 20 bp, synthetic construct
  misc_feature 1..20: note = chemically synthesized
  source 1..20: mol_type = other DNA
gtgacttgtcccgggtcaca

SEQ ID NO: 58569 - DNA, 20 bp, synthetic construct
  misc_feature 1..20: note = chemically synthesized
  source 1..20: mol_type = other DNA
gtcccgggtcacagagctga

SEQ ID NO: 58570 - DNA, 20 bp, synthetic construct
  misc_feature 1..20: note = chemically synthesized
  source 1..20: mol_type = other DNA
tcccgggtcacagagctgaa

SEQ ID NO: 58571 - DNA, 20 bp, synthetic construct
  misc_feature 1..20: note = chemically synthesized
  source 1..20: mol_type = other DNA
cccgggtcacagagctgaaa

SEQ ID NO: 58572 - DNA, 20 bp, synthetic construct
  misc_feature 1..20: note = chemically synthesized
  source 1..20: mol_type = other DNA
gggtcacagagctgaaaggg

SEQ ID NO: 58573 - DNA, 20 bp, synthetic construct
  misc_feature 1..20: note = chemically synthesized
  source 1..20: mol_type = other DNA
ggtcacagagctgaaagggc

SEQ ID NO: 58574 - DNA, 20 bp, synthetic construct
  misc_feature 1..20: note = chemically synthesized
  source 1..20: mol_type = other DNA
agctgaaagggcaggtacaa

SEQ ID NO: 58575 - DNA, 20 bp, synthetic construct
  misc_feature 1..20: note = chemically synthesized
  source 1..20: mol_type = other DNA
gctgaaagggcaggtacaac

SEQ ID NO: 58576 - DNA, 20 bp, synthetic construct
  misc_feature 1..20: note = chemically synthesized
  source 1..20: mol_type = other DNA
aggtacaacaggtgacatgc

SEQ ID NO: 58577 - DNA, 20 bp, synthetic construct
  misc_feature 1..20: note = chemically synthesized
  source 1..20: mol_type = other DNA
ggtacaacaggtgacatgcc

SEQ ID NO: 58578 - DNA, 20 bp, synthetic construct
  misc_feature 1..20: note = chemically synthesized
  source 1..20: mol_type = other DNA
ggtgacatgccgggctgtct

SEQ ID NO: 58579 - DNA, 20 bp, synthetic construct
  misc_feature 1..20: note = chemically synthesized
  source 1..20: mol_type = other DNA
gccgggctgtctgagtttat

SEQ ID NO: 58580 - DNA, 20 bp, synthetic construct
  misc_feature 1..20: note = chemically synthesized
  source 1..20: mol_type = other DNA
ccgggctgtctgagtttatg

SEQ ID NO: 58581 - DNA, 20 bp, synthetic construct
  misc_feature 1..20: note = chemically synthesized
  source 1..20: mol_type = other DNA
cgggctgtctgagtttatga

SEQ ID NO: 58582 - DNA, 20 bp, synthetic construct
  misc_feature 1..20: note = chemically synthesized
  source 1..20: mol_type = other DNA
tgtctgagtttatgagggcc

SEQ ID NO: 58583 - DNA, 20 bp, synthetic construct
  misc_feature 1..20: note = chemically synthesized
  source 1..20: mol_type = other DNA
gggcccagtcttgtgtctgc

SEQ ID NO: 58584 - DNA, 20 bp, synthetic construct
  misc_feature 1..20: note = chemically synthesized
  source 1..20: mol_type = other DNA
ggcccagtcttgtgtctgcc

SEQ ID NO: 58585 - DNA, 20 bp, synthetic construct
  misc_feature 1..20: note = chemically synthesized
  source 1..20: mol_type = other DNA
tcttgtgtctgccgggcaat

SEQ ID NO: 58586 - DNA, 20 bp, synthetic construct
  misc_feature 1..20: note = chemically synthesized
  source 1..20: mol_type = other DNA
gtgtctgccgggcaatgagc

SEQ ID NO: 58587 - DNA, 20 bp, synthetic construct
  misc_feature 1..20: note = chemically synthesized
  source 1..20: mol_type = other DNA
tgtctgccgggcaatgagca

SEQ ID NO: 58588 - DNA, 20 bp, synthetic construct
  misc_feature 1..20: note = chemically synthesized
  source 1..20: mol_type = other DNA
agcaaggctccttcctgtcc

SEQ ID NO: 58589 - DNA, 20 bp, synthetic construct
  misc_feature 1..20: note = chemically synthesized
  source 1..20: mol_type = other DNA
ccaagctccccgcccctccc

SEQ ID NO: 58590 - DNA, 20 bp, synthetic construct
  misc_feature 1..20: note = chemically synthesized
  source 1..20: mol_type = other DNA
cagcctactgcctccacccg

SEQ ID NO: 58591 - DNA, 20 bp, synthetic construct
  misc_feature 1..20: note = chemically synthesized
  source 1..20: mol_type = other DNA
tccacccgaagtctacttcc

SEQ ID NO: 58592 - DNA, 20 bp, synthetic construct
  misc_feature 1..20: note = chemically synthesized
  source 1..20: mol_type = other DNA
ccacccgaagtctacttcct

SEQ ID NO: 58593 - DNA, 20 bp, synthetic construct
  misc_feature 1..20: note = chemically synthesized
  source 1..20: mol_type = other DNA
cccgaagtctacttcctggg

SEQ ID NO: 58594 - DNA, 20 bp, synthetic construct
  misc_feature 1..20: note = chemically synthesized
  source 1..20: mol_type = other DNA
ccgaagtctacttcctgggt

SEQ ID NO: 58595 - DNA, 20 bp, synthetic construct
  misc_feature 1..20: note = chemically synthesized
  source 1..20: mol_type = other DNA
aagtctacttcctgggtggg

SEQ ID NO: 58596 - DNA, 20 bp, synthetic construct
  misc_feature 1..20: note = chemically synthesized
  source 1..20: mol_type = other DNA
agtctacttcctgggtgggc

SEQ ID NO: 58597 - DNA, 20 bp, synthetic construct
  misc_feature 1..20: note = chemically synthesized
  source 1..20: mol_type = other DNA
cttcctgggtgggcaggaac

SEQ ID NO: 58598 - DNA, 20 bp, synthetic construct
  misc_feature 1..20: note = chemically synthesized
  source 1..20: mol_type = other DNA
ttcctgggtgggcaggaact

SEQ ID NO: 58599 - DNA, 20 bp, synthetic construct
  misc_feature 1..20: note = chemically synthesized
  source 1..20: mol_type = other DNA
caggaactgggcactgtgcc

SEQ ID NO: 58600 - DNA, 20 bp, synthetic construct
  misc_feature 1..20: note = chemically synthesized
  source 1..20: mol_type = other DNA
aggaactgggcactgtgccc

SEQ ID NO: 58601 - DNA, 20 bp, synthetic construct
  misc_feature 1..20: note = chemically synthesized
  source 1..20: mol_type = other DNA
ggaactgggcactgtgccca

SEQ ID NO: 58602 - DNA, 20 bp, synthetic construct
  misc_feature 1..20: note = chemically synthesized
  source 1..20: mol_type = other DNA
gggcatgcactgcctccacg

SEQ ID NO: 58603 - DNA, 20 bp, synthetic construct
  misc_feature 1..20: note = chemically synthesized
  source 1..20: mol_type = other DNA
tgcctccacgcagcaaccct

SEQ ID NO: 58604 - DNA, 20 bp, synthetic construct
  misc_feature 1..20: note = chemically synthesized
  source 1..20: mol_type = other DNA
cctccacgcagcaaccctca

SEQ ID NO: 58605 - DNA, 20 bp, synthetic construct
  misc_feature 1..20: note = chemically synthesized
  source 1..20: mol_type = other DNA
gcagcaaccctcagagtcct

SEQ ID NO: 58606 - DNA, 20 bp, synthetic construct
  misc_feature 1..20: note = chemically synthesized
  source 1..20: mol_type = other DNA
tcagagtcctgagctgaacc

SEQ ID NO: 58607 - DNA, 20 bp, synthetic construct
  misc_feature 1..20: note = chemically synthesized
  source 1..20: mol_type = other DNA
gagtcctgagctgaaccaag

SEQ ID NO: 58608 - DNA, 20 bp, synthetic construct
  misc_feature 1..20: note = chemically synthesized
  source 1..20: mol_type = other DNA
agtcctgagctgaaccaaga

SEQ ID NO: 58609 - DNA, 20 bp, synthetic construct
  misc_feature 1..20: note = chemically synthesized
  source 1..20: mol_type = other DNA
tcctgagctgaaccaagaag

SEQ ID NO: 58610 - DNA, 20 bp, synthetic construct
  misc_feature 1..20: note = chemically synthesized
  source 1..20: mol_type = other DNA
cctgagctgaaccaagaagg

SEQ ID NO: 58611 - DNA, 20 bp, synthetic construct
  misc_feature 1..20: note = chemically synthesized
  source 1..20: mol_type = other DNA
tgagctgaaccaagaaggag

SEQ ID NO: 58612 - DNA, 20 bp, synthetic construct
  misc_feature 1..20: note = chemically synthesized
  source 1..20: mol_type = other DNA
gagctgaaccaagaaggagg

SEQ ID NO: 58613 - DNA, 20 bp, synthetic construct
  misc_feature 1..20: note = chemically synthesized
  source 1..20: mol_type = other DNA
agctgaaccaagaaggagga

SEQ ID NO: 58614 - DNA, 20 bp, synthetic construct
  misc_feature 1..20: note = chemically synthesized
  source 1..20: mol_type = other DNA
gctgaaccaagaaggaggag

SEQ ID NO: 58615 - DNA, 20 bp, synthetic construct
  misc_feature 1..20: note = chemically synthesized
  source 1..20: mol_type = other DNA
ctgaaccaagaaggaggagg

SEQ ID NO: 58616 - DNA, 20 bp, synthetic construct
  misc_feature 1..20: note = chemically synthesized
  source 1..20: mol_type = other DNA
accaagaaggaggagggggt

SEQ ID NO: 58617 - DNA, 20 bp, synthetic construct
  misc_feature 1..20: note = chemically synthesized
  source 1..20: mol_type = other DNA
ccaagaaggaggagggggtc

SEQ ID NO: 58618 - DNA, 20 bp, synthetic construct
  misc_feature 1..20: note = chemically synthesized
  source 1..20: mol_type = other DNA
gaggagggggtcgggcctcc

SEQ ID NO: 58619 - DNA, 20 bp, synthetic construct
  misc_feature 1..20: note = chemically synthesized
  source 1..20: mol_type = other DNA
aggagggggtcgggcctccg

SEQ ID NO: 58620 - DNA, 20 bp, synthetic construct
  misc_feature 1..20: note = chemically synthesized
  source 1..20: mol_type = other DNA
agggggtcgggcctccgagg

SEQ ID NO: 58621 - DNA, 20 bp, synthetic construct
  misc_feature 1..20: note = chemically synthesized
  source 1..20: mol_type = other DNA
gggggtcgggcctccgagga

SEQ ID NO: 58622 - DNA, 20 bp, synthetic construct
  misc_feature 1..20: note = chemically synthesized
  source 1..20: mol_type = other DNA
tcgggcctccgaggaaggcc

SEQ ID NO: 58623 - DNA, 20 bp, synthetic construct
  misc_feature 1..20: note = chemically synthesized
  source 1..20: mol_type = other DNA
ggcctagccgctgctgctgc

SEQ ID NO: 58624 - DNA, 20 bp, synthetic construct
  misc_feature 1..20: note = chemically synthesized
  source 1..20: mol_type = other DNA
gcctagccgctgctgctgcc

SEQ ID NO: 58625 - DNA, 20 bp, synthetic construct
  misc_feature 1..20: note = chemically synthesized
  source 1..20: mol_type = other DNA
gctgctgctgccaggaattc

SEQ ID NO: 58626 - DNA, 20 bp, synthetic construct
  misc_feature 1..20: note = chemically synthesized
  source 1..20: mol_type = other DNA
ctgctgctgccaggaattcc

SEQ ID NO: 58627 - DNA, 20 bp, synthetic construct
  misc_feature 1..20: note = chemically synthesized
  source 1..20: mol_type = other DNA
tgctgccaggaattccaggt

SEQ ID NO: 58628 - DNA, 20 bp, synthetic construct
  misc_feature 1..20: note = chemically synthesized
  source 1..20: mol_type = other DNA
ctgccaggaattccaggttg

SEQ ID NO: 58629 - DNA, 20 bp, synthetic construct
  misc_feature 1..20: note = chemically synthesized
  source 1..20: mol_type = other DNA
tgccaggaattccaggttgg

SEQ ID NO: 58630 - DNA, 20 bp, synthetic construct
  misc_feature 1..20: note = chemically synthesized
  source 1..20: mol_type = other DNA
gccaggaattccaggttgga

SEQ ID NO: 58631 - DNA, 20 bp, synthetic construct
  misc_feature 1..20: note = chemically synthesized
  source 1..20: mol_type = other DNA
ccaggaattccaggttggag

SEQ ID NO: 58632 - DNA, 20 bp, synthetic construct
  misc_feature 1..20: note = chemically synthesized
  source 1..20: mol_type = other DNA
ggaattccaggttggagggg

SEQ ID NO: 58633 - DNA, 20 bp, synthetic construct
  misc_feature 1..20: note = chemically synthesized
  source 1..20: mol_type = other DNA
gaggggcggcaacctcctgc

SEQ ID NO: 58634 - DNA, 20 bp, synthetic construct
  misc_feature 1..20: note = chemically synthesized
  source 1..20: mol_type = other DNA
ggcaacctcctgccagcctt

SEQ ID NO: 58635 - DNA, 20 bp, synthetic construct
  misc_feature 1..20: note = chemically synthesized
  source 1..20: mol_type = other DNA
gcaacctcctgccagccttc

SEQ ID NO: 58636 - DNA, 20 bp, synthetic construct
  misc_feature 1..20: note = chemically synthesized
  source 1..20: mol_type = other DNA
ggccactctcctgtgcctgc

SEQ ID NO: 58637 - DNA, 20 bp, synthetic construct
  misc_feature 1..20: note = chemically synthesized
  source 1..20: mol_type = other DNA
cactctcctgtgcctgccag

SEQ ID NO: 58638 - DNA, 20 bp, synthetic construct
  misc_feature 1..20: note = chemically synthesized
  source 1..20: mol_type = other DNA
ctctcctgtgcctgccagaa

SEQ ID NO: 58639 - DNA, 20 bp, synthetic construct
  misc_feature 1..20: note = chemically synthesized
  source 1..20: mol_type = other DNA
cctgtgcctgccagaagaga

SEQ ID NO: 58640 - DNA, 20 bp, synthetic construct
  misc_feature 1..20: note = chemically synthesized
  source 1..20: mol_type = other DNA
tgtgcctgccagaagagaca

SEQ ID NO: 58641 - DNA, 20 bp, synthetic construct
  misc_feature 1..20: note = chemically synthesized
  source 1..20: mol_type = other DNA
tgccagaagagacagagctt

SEQ ID NO: 58642 - DNA, 20 bp, synthetic construct
  misc_feature 1..20: note = chemically synthesized
  source 1..20: mol_type = other DNA
gccagaagagacagagcttg

SEQ ID NO: 58643 - DNA, 20 bp, synthetic construct
  misc_feature 1..20: note = chemically synthesized
  source 1..20: mol_type = other DNA
cagaagagacagagcttgag

SEQ ID NO: 58644 - DNA, 20 bp, synthetic construct
  misc_feature 1..20: note = chemically synthesized
  source 1..20: mol_type = other DNA
gaagagacagagcttgagga

SEQ ID NO: 58645 - DNA, 20 bp, synthetic construct
  misc_feature 1..20: note = chemically synthesized
  source 1..20: mol_type = other DNA
acagagcttgaggagagctt

SEQ ID NO: 58646 - DNA, 20 bp, synthetic construct
  misc_feature 1..20: note = chemically synthesized
  source 1..20: mol_type = other DNA
cagagcttgaggagagcttg

SEQ ID NO: 58647 - DNA, 20 bp, synthetic construct
  misc_feature 1..20: note = chemically synthesized
  source 1..20: mol_type = other DNA
gagcttgaggagagcttgag

SEQ ID NO: 58648 - DNA, 20 bp, synthetic construct
  misc_feature 1..20: note = chemically synthesized
  source 1..20: mol_type = other DNA
gcttgaggagagcttgagga

SEQ ID NO: 58649 - DNA, 20 bp, synthetic construct
  misc_feature 1..20: note = chemically synthesized
  source 1..20: mol_type = other DNA
tgaggagagcttgaggagag

SEQ ID NO: 58650 - DNA, 20 bp, synthetic construct
  misc_feature 1..20: note = chemically synthesized
  source 1..20: mol_type = other DNA
gaggagagcttgaggagagc

SEQ ID NO: 58651 - DNA, 20 bp, synthetic construct
  misc_feature 1..20: note = chemically synthesized
  source 1..20: mol_type = other DNA
agagcttgaggagagcagga

SEQ ID NO: 58652 - DNA, 20 bp, synthetic construct
  misc_feature 1..20: note = chemically synthesized
  source 1..20: mol_type = other DNA
gagcttgaggagagcaggaa

SEQ ID NO: 58653 - DNA, 20 bp, synthetic construct
  misc_feature 1..20: note = chemically synthesized
  source 1..20: mol_type = other DNA
cttgaggagagcaggaaagg

SEQ ID NO: 58654 - DNA, 20 bp, synthetic construct
  misc_feature 1..20: note = chemically synthesized
  source 1..20: mol_type = other DNA
ttgaggagagcaggaaaggt

SEQ ID NO: 58655 - DNA, 20 bp, synthetic construct
  misc_feature 1..20: note = chemically synthesized
  source 1..20: mol_type = other DNA
cattgctgctgctgctcact

SEQ ID NO: 58656 - DNA, 20 bp, synthetic construct
  misc_feature 1..20: note = chemically synthesized
  source 1..20: mol_type = other DNA
ctgctgctcactcagttcca

SEQ ID NO: 58657 - DNA, 20 bp, synthetic construct
  misc_feature 1..20: note = chemically synthesized
  source 1..20: mol_type = other DNA
tgctgctcactcagttccac

SEQ ID NO: 58658 - DNA, 20 bp, synthetic construct
  misc_feature 1..20: note = chemically synthesized
  source 1..20: mol_type = other DNA
tgctcactcagttccacagg

SEQ ID NO: 58659 - DNA, 20 bp, synthetic construct
  misc_feature 1..20: note = chemically synthesized
  source 1..20: mol_type = other DNA
gctcactcagttccacaggt

SEQ ID NO: 58660 - DNA, 20 bp, synthetic construct
  misc_feature 1..20: note = chemically synthesized
  source 1..20: mol_type = other DNA
tcactcagttccacaggtgg

SEQ ID NO: 58661 - DNA, 20 bp, synthetic construct
  misc_feature 1..20: note = chemically synthesized
  source 1..20: mol_type = other DNA
cactcagttccacaggtggg

SEQ ID NO: 58662 - DNA, 20 bp, synthetic construct
  misc_feature 1..20: note = chemically synthesized
  source 1..20: mol_type = other DNA
actcagttccacaggtggga

SEQ ID NO: 58663 - DNA, 20 bp, synthetic construct
  misc_feature 1..20: note = chemically synthesized
  source 1..20: mol_type = other DNA
agttccacaggtgggaggga

SEQ ID NO: 58664 - DNA, 20 bp, synthetic construct
  misc_feature 1..20: note = chemically synthesized
  source 1..20: mol_type = other DNA
tccacaggtgggagggacag

SEQ ID NO: 58665 - DNA, 20 bp, synthetic construct
  misc_feature 1..20: note = chemically synthesized
  source 1..20: mol_type = other DNA
ccacaggtgggagggacagc

SEQ ID NO: 58666 - DNA, 20 bp, synthetic construct
  misc_feature 1..20: note = chemically synthesized
  source 1..20: mol_type = other DNA
cacaggtgggagggacagca

SEQ ID NO: 58667 - DNA, 20 bp, synthetic construct
  misc_feature 1..20: note = chemically synthesized
  source 1..20: mol_type = other DNA
gtgggagggacagcagggct

SEQ ID NO: 58668 - DNA, 20 bp, synthetic construct
  misc_feature 1..20: note = chemically synthesized
  source 1..20: mol_type = other DNA
gggagggacagcagggctta

SEQ ID NO: 58669 - DNA, 20 bp, synthetic construct
  misc_feature 1..20: note = chemically synthesized
  source 1..20: mol_type = other DNA
agggacagcagggcttagag

SEQ ID NO: 58670 - DNA, 20 bp, synthetic construct
  misc_feature 1..20: note = chemically synthesized
  source 1..20: mol_type = other DNA
gggacagcagggcttagagt

SEQ ID NO: 58671 - DNA, 20 bp, synthetic construct
  misc_feature 1..20: note = chemically synthesized
  source 1..20: mol_type = other DNA
ggacagcagggcttagagtg

SEQ ID NO: 58672 - DNA, 20 bp, synthetic construct
  misc_feature 1..20: note = chemically synthesized
  source 1..20: mol_type = other DNA
gacagcagggcttagagtgg

SEQ ID NO: 58673 - DNA, 20 bp, synthetic construct
  misc_feature 1..20: note = chemically synthesized
  source 1..20: mol_type = other DNA
ttagagtgggggtcattgtg

SEQ ID NO: 58674 - DNA, 20 bp, synthetic construct
  misc_feature 1..20: note = chemically synthesized
  source 1..20: mol_type = other DNA
agtgggggtcattgtgcaga

SEQ ID NO: 58675 - DNA, 20 bp, synthetic construct
  misc_feature 1..20: note = chemically synthesized
  source 1..20: mol_type = other DNA
gtgggggtcattgtgcagat

SEQ ID NO: 58676 - DNA, 20 bp, synthetic construct
  misc_feature 1..20: note = chemically synthesized
  source 1..20: mol_type = other DNA
attgtgcagatgggaaaaca

SEQ ID NO: 58677 - DNA, 20 bp, synthetic construct
  misc_feature 1..20: note = chemically synthesized
  source 1..20: mol_type = other DNA
ttgtgcagatgggaaaacaa

SEQ ID NO: 58678 - DNA, 20 bp, synthetic construct
  misc_feature 1..20: note = chemically synthesized
  source 1..20: mol_type = other DNA
cagatgggaaaacaaaggcc

SEQ ID NO: 58679 - DNA, 20 bp, synthetic construct
  misc_feature 1..20: note = chemically synthesized
  source 1..20: mol_type = other DNA
gatgggaaaacaaaggccca

SEQ ID NO: 58680 - DNA, 20 bp, synthetic construct
  misc_feature 1..20: note = chemically synthesized
  source 1..20: mol_type = other DNA
tgggaaaacaaaggcccaga

SEQ ID NO: 58681 - DNA, 20 bp, synthetic construct
  misc_feature 1..20: note = chemically synthesized
  source 1..20: mol_type = other DNA
gggaaaacaaaggcccagag

SEQ ID NO: 58682 - DNA, 20 bp, synthetic construct
  misc_feature 1..20: note = chemically synthesized
  source 1..20: mol_type = other DNA
ggaaaacaaaggcccagaga

SEQ ID NO: 58683 - DNA, 20 bp, synthetic construct
  misc_feature 1..20: note = chemically synthesized
  source 1..20: mol_type = other DNA
gaaaacaaaggcccagagag

SEQ ID NO: 58684 - DNA, 20 bp, synthetic construct
  misc_feature 1..20: note = chemically synthesized
  source 1..20: mol_type = other DNA
aacaaaggcccagagagggg

SEQ ID NO: 58685 - DNA, 20 bp, synthetic construct
  misc_feature 1..20: note = chemically synthesized
  source 1..20: mol_type = other DNA
cagagaggggaagaaatgcc

SEQ ID NO: 58686 - DNA, 20 bp, synthetic construct
  misc_feature 1..20: note = chemically synthesized
  source 1..20: mol_type = other DNA
agagaggggaagaaatgccc

SEQ ID NO: 58687 - DNA, 20 bp, synthetic construct
  misc_feature 1..20: note = chemically synthesized
  source 1..20: mol_type = other DNA
agaggggaagaaatgcccag

SEQ ID NO: 58688 - DNA, 20 bp, synthetic construct
  misc_feature 1..20: note = chemically synthesized
  source 1..20: mol_type = other DNA
agaaatgcccaggagctacc

SEQ ID NO: 58689 - DNA, 20 bp, synthetic construct
  misc_feature 1..20: note = chemically synthesized
  source 1..20: mol_type = other DNA
gaaatgcccaggagctaccg

SEQ ID NO: 58690 - DNA, 20 bp, synthetic construct
  misc_feature 1..20: note = chemically synthesized
  source 1..20: mol_type = other DNA
aaatgcccaggagctaccga

SEQ ID NO: 58691 - DNA, 20 bp, synthetic construct
  misc_feature 1..20: note = chemically synthesized
  source 1..20: mol_type = other DNA
tgcccaggagctaccgaggg

SEQ ID NO: 58692 - DNA, 20 bp, synthetic construct
  misc_feature 1..20: note = chemically synthesized
  source 1..20: mol_type = other DNA
gcccaggagctaccgagggc

SEQ ID NO: 58693 - DNA, 20 bp, synthetic construct
  misc_feature 1..20: note = chemically synthesized
  source 1..20: mol_type = other DNA
agggcaggcgacctcaacca

SEQ ID NO: 58694 - DNA, 20 bp, synthetic construct
  misc_feature 1..20: note = chemically synthesized
  source 1..20: mol_type = other DNA
aggcgacctcaaccacagcc

SEQ ID NO: 58695 - DNA, 20 bp, synthetic construct
  misc_feature 1..20: note = chemically synthesized
  source 1..20: mol_type = other DNA
cctcaaccacagcccagtgc

SEQ ID NO: 58696 - DNA, 20 bp, synthetic construct
  misc_feature 1..20: note = chemically synthesized
  source 1..20: mol_type = other DNA
tcaaccacagcccagtgctg

SEQ ID NO: 58697 - DNA, 20 bp, synthetic construct
  misc_feature 1..20: note = chemically synthesized
  source 1..20: mol_type = other DNA
cagcccagtgctggagctgt

SEQ ID NO: 58698 - DNA, 20 bp, synthetic construct
  misc_feature 1..20: note = chemically synthesized
  source 1..20: mol_type = other DNA
cccagtgctggagctgtgag

SEQ ID NO: 58699 - DNA, 20 bp, synthetic construct
  misc_feature 1..20: note = chemically synthesized
  source 1..20: mol_type = other DNA
gctggagctgtgagtggatg

SEQ ID NO: 58700 - DNA, 20 bp, synthetic construct
  misc_feature 1..20: note = chemically synthesized
  source 1..20: mol_type = other DNA
tggagctgtgagtggatgta

SEQ ID NO: 58701 - DNA, 20 bp, synthetic construct
  misc_feature 1..20: note = chemically synthesized
  source 1..20: mol_type = other DNA
agctgtgagtggatgtagag

SEQ ID NO: 58702 - DNA, 20 bp, synthetic construct
  misc_feature 1..20: note = chemically synthesized
  source 1..20: mol_type = other DNA
tgtgagtggatgtagagcag

SEQ ID NO: 58703 - DNA, 20 bp, synthetic construct
  misc_feature 1..20: note = chemically synthesized
  source 1..20: mol_type = other DNA
agagcagcggaatatccatt

SEQ ID NO: 58704 - DNA, 20 bp, synthetic construct
  misc_feature 1..20: note = chemically synthesized
  source 1..20: mol_type = other DNA
cagcggaatatccattcagc

SEQ ID NO: 58705 - DNA, 20 bp, synthetic construct
  misc_feature 1..20: note = chemically synthesized
  source 1..20: mol_type = other DNA
gaatatccattcagccagct

SEQ ID NO: 58706 - DNA, 20 bp, synthetic construct
  misc_feature 1..20: note = chemically synthesized
  source 1..20: mol_type = other DNA
aatatccattcagccagctc

SEQ ID NO: 58707 - DNA, 20 bp, synthetic construct
  misc_feature 1..20: note = chemically synthesized
  source 1..20: mol_type = other DNA
atatccattcagccagctca

SEQ ID NO: 58708 - DNA, 20 bp, synthetic construct
  misc_feature 1..20: note = chemically synthesized
  source 1..20: mol_type = other DNA
tatccattcagccagctcag

SEQ ID NO: 58709 - DNA, 20 bp, synthetic construct
  misc_feature 1..20: note = chemically synthesized
  source 1..20: mol_type = other DNA
ccattcagccagctcagggg

SEQ ID NO: 58710 - DNA, 20 bp, synthetic construct
  misc_feature 1..20: note = chemically synthesized
  source 1..20: mol_type = other DNA
cattcagccagctcagggga

SEQ ID NO: 58711 - DNA, 20 bp, synthetic construct
  misc_feature 1..20: note = chemically synthesized
  source 1..20: mol_type = other DNA
cagccagctcaggggaagga

SEQ ID NO: 58712 - DNA, 20 bp, synthetic construct
  misc_feature 1..20: note = chemically synthesized
  source 1..20: mol_type = other DNA
agccagctcaggggaaggac

SEQ ID NO: 58713 - DNA, 20 bp, synthetic construct
  misc_feature 1..20: note = chemically synthesized
  source 1..20: mol_type = other DNA
gccagctcaggggaaggaca

SEQ ID NO: 58714 - DNA, 20 bp, synthetic construct
  misc_feature 1..20: note = chemically synthesized
  source 1..20: mol_type = other DNA
ccagctcaggggaaggacag

SEQ ID NO: 58715 - DNA, 20 bp, synthetic construct
  misc_feature 1..20: note = chemically synthesized
  source 1..20: mol_type = other DNA
ggggaaggacaggggccctg

SEQ ID NO: 58716 - DNA, 20 bp, synthetic construct
  misc_feature 1..20: note = chemically synthesized
  source 1..20: mol_type = other DNA
aaggacaggggccctgaagc

SEQ ID NO: 58717 - DNA, 20 bp, synthetic construct
  misc_feature 1..20: note = chemically synthesized
  source 1..20: mol_type = other DNA
aggacaggggccctgaagcc

SEQ ID NO: 58718 - DNA, 20 bp, synthetic construct
  misc_feature 1..20: note = chemically synthesized
  source 1..20: mol_type = other DNA
ggacaggggccctgaagcca

SEQ ID NO: 58719 - DNA, 20 bp, synthetic construct
  misc_feature 1..20: note = chemically synthesized
  source 1..20: mol_type = other DNA
gacaggggccctgaagccag

SEQ ID NO: 58720 - DNA, 20 bp, synthetic construct
  misc_feature 1..20: note = chemically synthesized
  source 1..20: mol_type = other DNA
ggggccctgaagccagggga

SEQ ID NO: 58721 - DNA, 20 bp, synthetic construct
  misc_feature 1..20: note = chemically synthesized
  source 1..20: mol_type = other DNA
ggccctgaagccaggggatg

SEQ ID NO: 58722 - DNA, 20 bp, synthetic construct
  misc_feature 1..20: note = chemically synthesized
  source 1..20: mol_type = other DNA
gaagccaggggatggagctg

SEQ ID NO: 58723 - DNA, 20 bp, synthetic construct
  misc_feature 1..20: note = chemically synthesized
  source 1..20: mol_type = other DNA
aagccaggggatggagctgc

SEQ ID NO: 58724 - DNA, 20 bp, synthetic construct
  misc_feature 1..20: note = chemically synthesized
  source 1..20: mol_type = other DNA
agccaggggatggagctgca

SEQ ID NO: 58725 - DNA, 20 bp, synthetic construct
  misc_feature 1..20: note = chemically synthesized
  source 1..20: mol_type = other DNA
caggggatggagctgcaggg

SEQ ID NO: 58726 - DNA, 20 bp, synthetic construct
  misc_feature 1..20: note = chemically synthesized
  source 1..20: mol_type = other DNA
aggggatggagctgcaggga

SEQ ID NO: 58727 - DNA, 20 bp, synthetic construct
  misc_feature 1..20: note = chemically synthesized
  source 1..20: mol_type = other DNA
ggggatggagctgcagggaa

SEQ ID NO: 58728 - DNA, 20 bp, synthetic construct
  misc_feature 1..20: note = chemically synthesized
  source 1..20: mol_type = other DNA
ggatggagctgcagggaagg

SEQ ID NO: 58729 - DNA, 20 bp, synthetic construct
  misc_feature 1..20: note = chemically synthesized
  source 1..20: mol_type = other DNA
gagctgcagggaagggagct

SEQ ID NO: 58730 - DNA, 20 bp, synthetic construct
  misc_feature 1..20: note = chemically synthesized
  source 1..20: mol_type = other DNA
gctgcagggaagggagctca

SEQ ID NO: 58731 - DNA, 20 bp, synthetic construct
  misc_feature 1..20: note = chemically synthesized
  source 1..20: mol_type = other DNA
tgcagggaagggagctcaga

SEQ ID NO: 58732 - DNA, 20 bp, synthetic construct
  misc_feature 1..20: note = chemically synthesized
  source 1..20: mol_type = other DNA
agggaagggagctcagagag

SEQ ID NO: 58733 - DNA, 20 bp, synthetic construct
  misc_feature 1..20: note = chemically synthesized
  source 1..20: mol_type = other DNA
gggaagggagctcagagaga

SEQ ID NO: 58734 - DNA, 20 bp, synthetic construct
  misc_feature 1..20: note = chemically synthesized
  source 1..20: mol_type = other DNA
ggaagggagctcagagagaa

SEQ ID NO: 58735 - DNA, 20 bp, synthetic construct
  misc_feature 1..20: note = chemically synthesized
  source 1..20: mol_type = other DNA
gaagggagctcagagagaag

SEQ ID NO: 58736 - DNA, 20 bp, synthetic construct
  misc_feature 1..20: note = chemically synthesized
  source 1..20: mol_type = other DNA
agggagctcagagagaaggg

SEQ ID NO: 58737 - DNA, 20 bp, synthetic construct
  misc_feature 1..20: note = chemically synthesized
  source 1..20: mol_type = other DNA
gggagctcagagagaagggg

SEQ ID NO: 58738 - DNA, 20 bp, synthetic construct
  misc_feature 1..20: note = chemically synthesized
  source 1..20: mol_type = other DNA
ggagctcagagagaagggga

SEQ ID NO: 58739 - DNA, 20 bp, synthetic construct
  misc_feature 1..20: note = chemically synthesized
  source 1..20: mol_type = other DNA
gagctcagagagaaggggag

SEQ ID NO: 58740 - DNA, 20 bp, synthetic construct
  misc_feature 1..20: note = chemically synthesized
  source 1..20: mol_type = other DNA
gctcagagagaaggggaggg

SEQ ID NO: 58741 - DNA, 20 bp, synthetic construct
  misc_feature 1..20: note = chemically synthesized
  source 1..20: mol_type = other DNA
agagaaggggaggggagtct

SEQ ID NO: 58742 - DNA, 20 bp, synthetic construct
  misc_feature 1..20: note = chemically synthesized
  source 1..20: mol_type = other DNA
aggggaggggagtctgagct

SEQ ID NO: 58743 - DNA, 20 bp, synthetic construct
  misc_feature 1..20: note = chemically synthesized
  source 1..20: mol_type = other DNA
ctcagtttcccgctgcctga

SEQ ID NO: 58744 - DNA, 20 bp, synthetic construct
  misc_feature 1..20: note = chemically synthesized
  source 1..20: mol_type = other DNA
tcagtttcccgctgcctgaa

SEQ ID NO: 58745 - DNA, 20 bp, synthetic construct
  misc_feature 1..20: note = chemically synthesized
  source 1..20: mol_type = other DNA
agtttcccgctgcctgaaag

SEQ ID NO: 58746 - DNA, 20 bp, synthetic construct
  misc_feature 1..20: note = chemically synthesized
  source 1..20: mol_type = other DNA
gtttcccgctgcctgaaagg

SEQ ID NO: 58747 - DNA, 20 bp, synthetic construct
  misc_feature 1..20: note = chemically synthesized
  source 1..20: mol_type = other DNA
tttcccgctgcctgaaagga

SEQ ID NO: 58748 - DNA, 20 bp, synthetic construct
  misc_feature 1..20: note = chemically synthesized
  source 1..20: mol_type = other DNA
cccgctgcctgaaaggaggg

SEQ ID NO: 58749 - DNA, 20 bp, synthetic construct
  misc_feature 1..20: note = chemically synthesized
  source 1..20: mol_type = other DNA
ggtggtacctactcccttca

SEQ ID NO: 58750 - DNA, 20 bp, synthetic construct
  misc_feature 1..20: note = chemically synthesized
  source 1..20: mol_type = other DNA
gtggtacctactcccttcac

SEQ ID NO: 58751 - DNA, 20 bp, synthetic construct
  misc_feature 1..20: note = chemically synthesized
  source 1..20: mol_type = other DNA
tggtacctactcccttcaca

SEQ ID NO: 58752 - DNA, 20 bp, synthetic construct
  misc_feature 1..20: note = chemically synthesized
  source 1..20: mol_type = other DNA
ccttcacagggtaactgaat

SEQ ID NO: 58753 - DNA, 20 bp, synthetic construct
  misc_feature 1..20: note = chemically synthesized
  source 1..20: mol_type = other DNA
ttcacagggtaactgaatga

SEQ ID NO: 58754 - DNA, 20 bp, synthetic construct
  misc_feature 1..20: note = chemically synthesized
  source 1..20: mol_type = other DNA
taactgaatgagagactgcc

SEQ ID NO: 58755 - DNA, 20 bp, synthetic construct
  misc_feature 1..20: note = chemically synthesized
  source 1..20: mol_type = other DNA
actgaatgagagactgcctg

SEQ ID NO: 58756 - DNA, 20 bp, synthetic construct
  misc_feature 1..20: note = chemically synthesized
  source 1..20: mol_type = other DNA
ctgaatgagagactgcctgg

SEQ ID NO: 58757 - DNA, 20 bp, synthetic construct
  misc_feature 1..20: note = chemically synthesized
  source 1..20: mol_type = other DNA
atgagagactgcctggagga

SEQ ID NO: 58758 - DNA, 20 bp, synthetic construct
  misc_feature 1..20: note = chemically synthesized
  source 1..20: mol_type = other DNA
tgcctggaggaaagctcttc

SEQ ID NO: 58759 - DNA, 20 bp, synthetic construct
  misc_feature 1..20: note = chemically synthesized
  source 1..20: mol_type = other DNA
ggaggaaagctcttcaagtg

SEQ ID NO: 58760 - DNA, 20 bp, synthetic construct
  misc_feature 1..20: note = chemically synthesized
  source 1..20: mol_type = other DNA
aagtgtggcccaccccaccc

SEQ ID NO: 58761 - DNA, 20 bp, synthetic construct
  misc_feature 1..20: note = chemically synthesized
  source 1..20: mol_type = other DNA
ccaccccaccccagtgacac

SEQ ID NO: 58762 - DNA, 20 bp, synthetic construct
  misc_feature 1..20: note = chemically synthesized
  source 1..20: mol_type = other DNA
agtgacaccagcccctgaca

SEQ ID NO: 58763 - DNA, 20 bp, synthetic construct
  misc_feature 1..20: note = chemically synthesized
  source 1..20: mol_type = other DNA
gtgacaccagcccctgacac

SEQ ID NO: 58764 - DNA, 20 bp, synthetic construct
  misc_feature 1..20: note = chemically synthesized
  source 1..20: mol_type = other DNA
tgacaccagcccctgacacg

SEQ ID NO: 58765 - DNA, 20 bp, synthetic construct
  misc_feature 1..20: note = chemically synthesized
  source 1..20: mol_type = other DNA
gacaccagcccctgacacgg

SEQ ID NO: 58766 - DNA, 20 bp, synthetic construct
  misc_feature 1..20: note = chemically synthesized
  source 1..20: mol_type = other DNA
caccagcccctgacacgggg

SEQ ID NO: 58767 - DNA, 20 bp, synthetic construct
  misc_feature 1..20: note = chemically synthesized
  source 1..20: mol_type = other DNA
accagcccctgacacggggg

SEQ ID NO: 58768 - DNA, 20 bp, synthetic construct
  misc_feature 1..20: note = chemically synthesized
  source 1..20: mol_type = other DNA
ccagcccctgacacggggga

SEQ ID NO: 58769 - DNA, 20 bp, synthetic construct
  misc_feature 1..20: note = chemically synthesized
  source 1..20: mol_type = other DNA
agcccctgacacgggggagg

SEQ ID NO: 58770 - DNA, 20 bp, synthetic construct
  misc_feature 1..20: note = chemically synthesized
  source 1..20: mol_type = other DNA
gcccctgacacgggggaggg

SEQ ID NO: 58771 - DNA, 20 bp, synthetic construct
  misc_feature 1..20: note = chemically synthesized
  source 1..20: mol_type = other DNA
cccctgacacgggggaggga

SEQ ID NO: 58772 - DNA, 20 bp, synthetic construct
  misc_feature 1..20: note = chemically synthesized
  source 1..20: mol_type = other DNA
ctgacacgggggagggaggg

SEQ ID NO: 58773 - DNA, 20 bp, synthetic construct
  misc_feature 1..20: note = chemically synthesized
  source 1..20: mol_type = other DNA
cgggggagggagggcagcat

SEQ ID NO: 58774 - DNA, 20 bp, synthetic construct
  misc_feature 1..20: note = chemically synthesized
  source 1..20: mol_type = other DNA
gggggagggagggcagcatc

SEQ ID NO: 58775 - DNA, 20 bp, synthetic construct
  misc_feature 1..20: note = chemically synthesized
  source 1..20: mol_type = other DNA
gggagggagggcagcatcag

SEQ ID NO: 58776 - DNA, 20 bp, synthetic construct
  misc_feature 1..20: note = chemically synthesized
  source 1..20: mol_type = other DNA
ggagggagggcagcatcagg

SEQ ID NO: 58777 - DNA, 20 bp, synthetic construct
  misc_feature 1..20: note = chemically synthesized
  source 1..20: mol_type = other DNA
gagggagggcagcatcagga

SEQ ID NO: 58778 - DNA, 20 bp, synthetic construct
  misc_feature 1..20: note = chemically synthesized
  source 1..20: mol_type = other DNA
agggagggcagcatcaggag

SEQ ID NO: 58779 - DNA, 20 bp, synthetic construct
  misc_feature 1..20: note = chemically synthesized
  source 1..20: mol_type = other DNA
cagcatcaggaggggctttc

SEQ ID NO: 58780 - DNA, 20 bp, synthetic construct
  misc_feature 1..20: note = chemically synthesized
  source 1..20: mol_type = other DNA
agcatcaggaggggctttct

SEQ ID NO: 58781 - DNA, 20 bp, synthetic construct
  misc_feature 1..20: note = chemically synthesized
  source 1..20: mol_type = other DNA
aggggctttctgggcacacc

SEQ ID NO: 58782 - DNA, 20 bp, synthetic construct
  misc_feature 1..20: note = chemically synthesized
  source 1..20: mol_type = other DNA
cacacccagtacccgtctct

SEQ ID NO: 58783 - DNA, 20 bp, synthetic construct
  misc_feature 1..20: note = chemically synthesized
  source 1..20: mol_type = other DNA
ctgttgcattttaatcctca

SEQ ID NO: 58784 - DNA, 20 bp, synthetic construct
  misc_feature 1..20: note = chemically synthesized
  source 1..20: mol_type = other DNA
ttgcattttaatcctcacag

SEQ ID NO: 58785 - DNA, 20 bp, synthetic construct
  misc_feature 1..20: note = chemically synthesized
  source 1..20: mol_type = other DNA
aatcctcacagcagctcaac

SEQ ID NO: 58786 - DNA, 20 bp, synthetic construct
  misc_feature 1..20: note = chemically synthesized
  source 1..20: mol_type = other DNA
atcctcacagcagctcaaca

SEQ ID NO: 58787 - DNA, 20 bp, synthetic construct
  misc_feature 1..20: note = chemically synthesized
  source 1..20: mol_type = other DNA
ccgtcaccatccccatttta

SEQ ID NO: 58788 - DNA, 20 bp, synthetic construct
  misc_feature 1..20: note = chemically synthesized
  source 1..20: mol_type = other DNA
caccatccccattttacaga

SEQ ID NO: 58789 - DNA, 20 bp, synthetic construct
  misc_feature 1..20: note = chemically synthesized
  source 1..20: mol_type = other DNA
accatccccattttacagat

SEQ ID NO: 58790 - DNA, 20 bp, synthetic construct
  misc_feature 1..20: note = chemically synthesized
  source 1..20: mol_type = other DNA
ccatccccattttacagata

SEQ ID NO: 58791 - DNA, 20 bp, synthetic construct
  misc_feature 1..20: note = chemically synthesized
  source 1..20: mol_type = other DNA
attttacagatagggaaatt

SEQ ID NO: 58792 - DNA, 20 bp, synthetic construct
  misc_feature 1..20: note = chemically synthesized
  source 1..20: mol_type = other DNA
ttttacagatagggaaattg

SEQ ID NO: 58793 - DNA, 20 bp, synthetic construct
  misc_feature 1..20: note = chemically synthesized
  source 1..20: mol_type = other DNA
cagatagggaaattgaggct

SEQ ID NO: 58794 - DNA, 20 bp, synthetic construct
  misc_feature 1..20: note = chemically synthesized
  source 1..20: mol_type = other DNA
gatagggaaattgaggctcg

SEQ ID NO: 58795 - DNA, 20 bp, synthetic construct
  misc_feature 1..20: note = chemically synthesized
  source 1..20: mol_type = other DNA
agggaaattgaggctcggag

SEQ ID NO: 58796 - DNA, 20 bp, synthetic construct
  misc_feature 1..20: note = chemically synthesized
  source 1..20: mol_type = other DNA
agcggttaaacaactcacct

SEQ ID NO: 58797 - DNA, 20 bp, synthetic construct
  misc_feature 1..20: note = chemically synthesized
  source 1..20: mol_type = other DNA
gcggttaaacaactcacctg

SEQ ID NO: 58798 - DNA, 20 bp, synthetic construct
  misc_feature 1..20: note = chemically synthesized
  source 1..20: mol_type = other DNA
acaactcacctgaggcctca

SEQ ID NO: 58799 - DNA, 20 bp, synthetic construct
  misc_feature 1..20: note = chemically synthesized
  source 1..20: mol_type = other DNA
ctcacctgaggcctcacagc

SEQ ID NO: 58800 - DNA, 20 bp, synthetic construct
  misc_feature 1..20: note = chemically synthesized
  source 1..20: mol_type = other DNA
cctgaggcctcacagccagt

SEQ ID NO: 58801 - DNA, 20 bp, synthetic construct
  misc_feature 1..20: note = chemically synthesized
  source 1..20: mol_type = other DNA
gaggcctcacagccagtaag

SEQ ID NO: 58802 - DNA, 20 bp, synthetic construct
  misc_feature 1..20: note = chemically synthesized
  source 1..20: mol_type = other DNA
aggcctcacagccagtaagt

SEQ ID NO: 58803 - DNA, 20 bp, synthetic construct
  misc_feature 1..20: note = chemically synthesized
  source 1..20: mol_type = other DNA
cagccagtaagtgggttccc

SEQ ID NO: 58804 - DNA, 20 bp, synthetic construct
  misc_feature 1..20: note = chemically synthesized
  source 1..20: mol_type = other DNA
cctggtctgaatgtgtgtgc

SEQ ID NO: 58805 - DNA, 20 bp, synthetic construct
  misc_feature 1..20: note = chemically synthesized
  source 1..20: mol_type = other DNA
tggtctgaatgtgtgtgctg

SEQ ID NO: 58806 - DNA, 20 bp, synthetic construct
  misc_feature 1..20: note = chemically synthesized
  source 1..20: mol_type = other DNA
ggtctgaatgtgtgtgctgg

SEQ ID NO: 58807 - DNA, 20 bp, synthetic construct
  misc_feature 1..20: note = chemically synthesized
  source 1..20: mol_type = other DNA
gtgtgtgctggaggatcctg

SEQ ID NO: 58808 - DNA, 20 bp, synthetic construct
  misc_feature 1..20: note = chemically synthesized
  source 1..20: mol_type = other DNA
tgtgtgctggaggatcctgt

SEQ ID NO: 58809 - DNA, 20 bp, synthetic construct
  misc_feature 1..20: note = chemically synthesized
  source 1..20: mol_type = other DNA
gatcctgtgggtcactcgcc

SEQ ID NO: 58810 - DNA, 20 bp, synthetic construct
  misc_feature 1..20: note = chemically synthesized
  source 1..20: mol_type = other DNA
cctgtgggtcactcgcctgg

SEQ ID NO: 58811 - DNA, 20 bp, synthetic construct
  misc_feature 1..20: note = chemically synthesized
  source 1..20: mol_type = other DNA
tgtgggtcactcgcctggta

SEQ ID NO: 58812 - DNA, 20 bp, synthetic construct
  misc_feature 1..20: note = chemically synthesized
  source 1..20: mol_type = other DNA
cactcgcctggtagagcccc

SEQ ID NO: 58813 - DNA, 20 bp, synthetic construct
  misc_feature 1..20: note = chemically synthesized
  source 1..20: mol_type = other DNA
actcgcctggtagagcccca

SEQ ID NO: 58814 - DNA, 20 bp, synthetic construct
  misc_feature 1..20: note = chemically synthesized
  source 1..20: mol_type = other DNA
cgcctggtagagccccaagg

SEQ ID NO: 58815 - DNA, 20 bp, synthetic construct
  misc_feature 1..20: note = chemically synthesized
  source 1..20: mol_type = other DNA
cctggtagagccccaaggtg

SEQ ID NO: 58816 - DNA, 20 bp, synthetic construct
  misc_feature 1..20: note = chemically synthesized
  source 1..20: mol_type = other DNA
ctggtagagccccaaggtgg

SEQ ID NO: 58817 - DNA, 20 bp, synthetic construct
  misc_feature 1..20: note = chemically synthesized
  source 1..20: mol_type = other DNA
ccccaaggtggaggcataaa

SEQ ID NO: 58818 - DNA, 20 bp, synthetic construct
  misc_feature 1..20: note = chemically synthesized
  source 1..20: mol_type = other DNA
cccaaggtggaggcataaat

SEQ ID NO: 58819 - DNA, 20 bp, synthetic construct
  misc_feature 1..20: note = chemically synthesized
  source 1..20: mol_type = other DNA
ggtggaggcataaatgggac

SEQ ID NO: 58820 - DNA, 20 bp, synthetic construct
  misc_feature 1..20: note = chemically synthesized
  source 1..20: mol_type = other DNA
taaatgggactggtgaatga

SEQ ID NO: 58821 - DNA, 20 bp, synthetic construct
  misc_feature 1..20: note = chemically synthesized
  source 1..20: mol_type = other DNA
atgggactggtgaatgacag

SEQ ID NO: 58822 - DNA, 20 bp, synthetic construct
  misc_feature 1..20: note = chemically synthesized
  source 1..20: mol_type = other DNA
tgggactggtgaatgacaga

SEQ ID NO: 58823 - DNA, 20 bp, synthetic construct
  misc_feature 1..20: note = chemically synthesized
  source 1..20: mol_type = other DNA
gggactggtgaatgacagaa

SEQ ID NO: 58824 - DNA, 20 bp, synthetic construct
  misc_feature 1..20: note = chemically synthesized
  source 1..20: mol_type = other DNA
ggactggtgaatgacagaag

SEQ ID NO: 58825 - DNA, 20 bp, synthetic construct
  misc_feature 1..20: note = chemically synthesized
  source 1..20: mol_type = other DNA
cactcatccattcactctgc

SEQ ID NO: 58826 - DNA, 20 bp, synthetic construct
  misc_feature 1..20: note = chemically synthesized
  source 1..20: mol_type = other DNA
attcactctgcaagtatcta

SEQ ID NO: 58827 - DNA, 20 bp, synthetic construct
  misc_feature 1..20: note = chemically synthesized
  source 1..20: mol_type = other DNA
agtatctacggcacgtacgc

SEQ ID NO: 58828 - DNA, 20 bp, synthetic construct
  misc_feature 1..20: note = chemically synthesized
  source 1..20: mol_type = other DNA
cggcacgtacgccagctccc

SEQ ID NO: 58829 - DNA, 20 bp, synthetic construct
  misc_feature 1..20: note = chemically synthesized
  source 1..20: mol_type = other DNA
cacgtacgccagctcccaag

SEQ ID NO: 58830 - DNA, 20 bp, synthetic construct
  misc_feature 1..20: note = chemically synthesized
  source 1..20: mol_type = other DNA
acgtacgccagctcccaagc

SEQ ID NO: 58831 - DNA, 20 bp, synthetic construct
  misc_feature 1..20: note = chemically synthesized
  source 1..20: mol_type = other DNA
ccagctcccaagcaggtttg

SEQ ID NO: 58832 - DNA, 20 bp, synthetic construct
  misc_feature 1..20: note = chemically synthesized
  source 1..20: mol_type = other DNA
cagctcccaagcaggtttgc

SEQ ID NO: 58833 - DNA, 20 bp, synthetic construct
  misc_feature 1..20: note = chemically synthesized
  source 1..20: mol_type = other DNA
aagcaggtttgcgggttgca

SEQ ID NO: 58834 - DNA, 20 bp, synthetic construct
  misc_feature 1..20: note = chemically synthesized
  source 1..20: mol_type = other DNA
caggtttgcgggttgcacag

SEQ ID NO: 58835 - DNA, 20 bp, synthetic construct
  misc_feature 1..20: note = chemically synthesized
  source 1..20: mol_type = other DNA
aggtttgcgggttgcacagc

SEQ ID NO: 58836 - DNA, 20 bp, synthetic construct
  misc_feature 1..20: note = chemically synthesized
  source 1..20: mol_type = other DNA
gcgggcgatgcaatctgatt

SEQ ID NO: 58837 - DNA, 20 bp, synthetic construct
  misc_feature 1..20: note = chemically synthesized
  source 1..20: mol_type = other DNA
cgggcgatgcaatctgattt

SEQ ID NO: 58838 - DNA, 20 bp, synthetic construct
  misc_feature 1..20: note = chemically synthesized
  source 1..20: mol_type = other DNA
caatctgatttaggctttta

SEQ ID NO: 58839 - DNA, 20 bp, synthetic construct
  misc_feature 1..20: note = chemically synthesized
  source 1..20: mol_type = other DNA
aatctgatttaggcttttaa

SEQ ID NO: 58840 - DNA, 20 bp, synthetic construct
  misc_feature 1..20: note = chemically synthesized
  source 1..20: mol_type = other DNA
atctgatttaggcttttaaa

SEQ ID NO: 58841 - DNA, 20 bp, synthetic construct
  misc_feature 1..20: note = chemically synthesized
  source 1..20: mol_type = other DNA
cttttaaagggattgcaatc

SEQ ID NO: 58842 - DNA, 20 bp, synthetic construct
  misc_feature 1..20: note = chemically synthesized
  source 1..20: mol_type = other DNA
ttaaagggattgcaatcaag

SEQ ID NO: 58843 - DNA, 20 bp, synthetic construct
  misc_feature 1..20: note = chemically synthesized
  source 1..20: mol_type = other DNA
taaagggattgcaatcaagt

SEQ ID NO: 58844 - DNA, 20 bp, synthetic construct
  misc_feature 1..20: note = chemically synthesized
  source 1..20: mol_type = other DNA
aaagggattgcaatcaagtg

SEQ ID NO: 58845 - DNA, 20 bp, synthetic construct
  misc_feature 1..20: note = chemically synthesized
  source 1..20: mol_type = other DNA
gcaatcaagtggggccccac

SEQ ID NO: 58846 - DNA, 20 bp, synthetic construct
  misc_feature 1..20: note = chemically synthesized
  source 1..20: mol_type = other DNA
cctcccctcccctccacccc

SEQ ID NO: 58847 - DNA, 20 bp, synthetic construct
  misc_feature 1..20: note = chemically synthesized
  source 1..20: mol_type = other DNA
cccctcccctccacccccag

SEQ ID NO: 58848 - DNA, 20 bp, synthetic construct
  misc_feature 1..20: note = chemically synthesized
  source 1..20: mol_type = other DNA
tccacccccagcagtctcca

SEQ ID NO: 58849 - DNA, 20 bp, synthetic construct
  misc_feature 1..20: note = chemically synthesized
  source 1..20: mol_type = other DNA
ccacccccagcagtctccaa

SEQ ID NO: 58850 - DNA, 20 bp, synthetic construct
  misc_feature 1..20: note = chemically synthesized
  source 1..20: mol_type = other DNA
ccaaaggcctccaacaaccc

SEQ ID NO: 58851 - DNA, 20 bp, synthetic construct
  misc_feature 1..20: note = chemically synthesized
  source 1..20: mol_type = other DNA
aaaggcctccaacaacccca

SEQ ID NO: 58852 - DNA, 20 bp, synthetic construct
  misc_feature 1..20: note = chemically synthesized
  source 1..20: mol_type = other DNA
ggcctccaacaaccccagag

SEQ ID NO: 58853 - DNA, 20 bp, synthetic construct
  misc_feature 1..20: note = chemically synthesized
  source 1..20: mol_type = other DNA
gcctccaacaaccccagagt

SEQ ID NO: 58854 - DNA, 20 bp, synthetic construct
  misc_feature 1..20: note = chemically synthesized
  source 1..20: mol_type = other DNA
cctccaacaaccccagagtg

SEQ ID NO: 58855 - DNA, 20 bp, synthetic construct
  misc_feature 1..20: note = chemically synthesized
  source 1..20: mol_type = other DNA
ctccaacaaccccagagtgg

SEQ ID NO: 58856 - DNA, 20 bp, synthetic construct
  misc_feature 1..20: note = chemically synthesized
  source 1..20: mol_type = other DNA
gagtgggggccatgtatcca

SEQ ID NO: 58857 - DNA, 20 bp, synthetic construct
  misc_feature 1..20: note = chemically synthesized
  source 1..20: mol_type = other DNA
catgtatccaaagaaactcc

SEQ ID NO: 58858 - DNA, 20 bp, synthetic construct
  misc_feature 1..20: note = chemically synthesized
  source 1..20: mol_type = other DNA
aagaaactccaagctgtata

SEQ ID NO: 58859 - DNA, 20 bp, synthetic construct
  misc_feature 1..20: note = chemically synthesized
  source 1..20: mol_type = other DNA
aagctgtatacggatcacac

SEQ ID NO: 58860 - DNA, 20 bp, synthetic construct
  misc_feature 1..20: note = chemically synthesized
  source 1..20: mol_type = other DNA
tacggatcacactggttttc

SEQ ID NO: 58861 - DNA, 20 bp, synthetic construct
  misc_feature 1..20: note = chemically synthesized
  source 1..20: mol_type = other DNA
acggatcacactggttttcc

SEQ ID NO: 58862 - DNA, 20 bp, synthetic construct
  misc_feature 1..20: note = chemically synthesized
  source 1..20: mol_type = other DNA
ggatcacactggttttccag

SEQ ID NO: 58863 - DNA, 20 bp, synthetic construct
  misc_feature 1..20: note = chemically synthesized
  source 1..20: mol_type = other DNA
tggttttccaggagcaaaaa

SEQ ID NO: 58864 - DNA, 20 bp, synthetic construct
  misc_feature 1..20: note = chemically synthesized
  source 1..20: mol_type = other DNA
tccaggagcaaaaacagaaa

SEQ ID NO: 58865 - DNA, 20 bp, synthetic construct
  misc_feature 1..20: note = chemically synthesized
  source 1..20: mol_type = other DNA
ccaggagcaaaaacagaaac

SEQ ID NO: 58866 - DNA, 20 bp, synthetic construct
  misc_feature 1..20: note = chemically synthesized
  source 1..20: mol_type = other DNA
gcaaaaacagaaacaggcct

SEQ ID NO: 58867 - DNA, 20 bp, synthetic construct
  misc_feature 1..20: note = chemically synthesized
  source 1..20: mol_type = other DNA
caaaaacagaaacaggcctg

SEQ ID NO: 58868 - DNA, 20 bp, synthetic construct
  misc_feature 1..20: note = chemically synthesized
  source 1..20: mol_type = other DNA
aacagaaacaggcctgaggc

SEQ ID NO: 58869 - DNA, 20 bp, synthetic construct
  misc_feature 1..20: note = chemically synthesized
  source 1..20: mol_type = other DNA
attgaacctcctcctgctct

SEQ ID NO: 58870 - DNA, 20 bp, synthetic construct
  misc_feature 1..20: note = chemically synthesized
  source 1..20: mol_type = other DNA
gaacctcctcctgctctgag

SEQ ID NO: 58871 - DNA, 20 bp, synthetic construct
  misc_feature 1..20: note = chemically synthesized
  source 1..20: mol_type = other DNA
tcctcctgctctgagcagcc

SEQ ID NO: 58872 - DNA, 20 bp, synthetic construct
  misc_feature 1..20: note = chemically synthesized
  source 1..20: mol_type = other DNA
cctcctgctctgagcagcct

SEQ ID NO: 58873 - DNA, 20 bp, synthetic construct
  misc_feature 1..20: note = chemically synthesized
  source 1..20: mol_type = other DNA
ctcctgctctgagcagcctg

SEQ ID NO: 58874 - DNA, 20 bp, synthetic construct
  misc_feature 1..20: note = chemically synthesized
  source 1..20: mol_type = other DNA
tcctgctctgagcagcctgg

SEQ ID NO: 58875 - DNA, 20 bp, synthetic construct
  misc_feature 1..20: note = chemically synthesized
  source 1..20: mol_type = other DNA
cctgctctgagcagcctggg

SEQ ID NO: 58876 - DNA, 20 bp, synthetic construct
  misc_feature 1..20: note = chemically synthesized
  source 1..20: mol_type = other DNA
gctctgagcagcctgggggg

SEQ ID NO: 58877 - DNA, 20 bp, synthetic construct
  misc_feature 1..20: note = chemically synthesized
  source 1..20: mol_type = other DNA
agcagcctggggggcagact

SEQ ID NO: 58878 - DNA, 20 bp, synthetic construct
  misc_feature 1..20: note = chemically synthesized
  source 1..20: mol_type = other DNA
agcctggggggcagactaag

SEQ ID NO: 58879 - DNA, 20 bp, synthetic construct
  misc_feature 1..20: note = chemically synthesized
  source 1..20: mol_type = other DNA
cctggggggcagactaagca

SEQ ID NO: 58880 - DNA, 20 bp, synthetic construct
  misc_feature 1..20: note = chemically synthesized
  source 1..20: mol_type = other DNA
ctggggggcagactaagcag

SEQ ID NO: 58881 - DNA, 20 bp, synthetic construct
  misc_feature 1..20: note = chemically synthesized
  source 1..20: mol_type = other DNA
tggggggcagactaagcaga

SEQ ID NO: 58882 - DNA, 20 bp, synthetic construct
  misc_feature 1..20: note = chemically synthesized
  source 1..20: mol_type = other DNA
agactaagcagagggctgtg

SEQ ID NO: 58883 - DNA, 20 bp, synthetic construct
  misc_feature 1..20: note = chemically synthesized
  source 1..20: mol_type = other DNA
gggctgtgcagacccacata

SEQ ID NO: 58884 - DNA, 20 bp, synthetic construct
  misc_feature 1..20: note = chemically synthesized
  source 1..20: mol_type = other DNA
gctgtgcagacccacataaa

SEQ ID NO: 58885 - DNA, 20 bp, synthetic construct
  misc_feature 1..20: note = chemically synthesized
  source 1..20: mol_type = other DNA
ataaagagcctactgtgtgc

SEQ ID NO: 58886 - DNA, 20 bp, synthetic construct
  misc_feature 1..20: note = chemically synthesized
  source 1..20: mol_type = other DNA
taaagagcctactgtgtgcc

SEQ ID NO: 58887 - DNA, 20 bp, synthetic construct
  misc_feature 1..20: note = chemically synthesized
  source 1..20: mol_type = other DNA
gtgtgccaggcacttcaccc

SEQ ID NO: 58888 - DNA, 20 bp, synthetic construct
  misc_feature 1..20: note = chemically synthesized
  source 1..20: mol_type = other DNA
tgtgccaggcacttcacccg

SEQ ID NO: 58889 - DNA, 20 bp, synthetic construct
  misc_feature 1..20: note = chemically synthesized
  source 1..20: mol_type = other DNA
cttcacccgaggcacttcac

SEQ ID NO: 58890 - DNA, 20 bp, synthetic construct
  misc_feature 1..20: note = chemically synthesized
  source 1..20: mol_type = other DNA
aggcacttcacaagcatgct

SEQ ID NO: 58891 - DNA, 20 bp, synthetic construct
  misc_feature 1..20: note = chemically synthesized
  source 1..20: mol_type = other DNA
ggcacttcacaagcatgctt

SEQ ID NO: 58892 - DNA, 20 bp, synthetic construct
  misc_feature 1..20: note = chemically synthesized
  source 1..20: mol_type = other DNA
gaatgaaacttccaactctt

SEQ ID NO: 58893 - DNA, 20 bp, synthetic construct
  misc_feature 1..20: note = chemically synthesized
  source 1..20: mol_type = other DNA
aatgaaacttccaactcttt

SEQ ID NO: 58894 - DNA, 20 bp, synthetic construct
  misc_feature 1..20: note = chemically synthesized
  source 1..20: mol_type = other DNA
acttccaactctttgggatg

SEQ ID NO: 58895 - DNA, 20 bp, synthetic construct
  misc_feature 1..20: note = chemically synthesized
  source 1..20: mol_type = other DNA
cttccaactctttgggatgc

SEQ ID NO: 58896 - DNA, 20 bp, synthetic construct
  misc_feature 1..20: note = chemically synthesized
  source 1..20: mol_type = other DNA
tctttgggatgcaggtgaaa

SEQ ID NO: 58897 - DNA, 20 bp, synthetic construct
  misc_feature 1..20: note = chemically synthesized
  source 1..20: mol_type = other DNA
gatgcaggtgaaacagttcc

SEQ ID NO: 58898 - DNA, 20 bp, synthetic construct
  misc_feature 1..20: note = chemically synthesized
  source 1..20: mol_type = other DNA
aggtgaaacagttcctggtt

SEQ ID NO: 58899 - DNA, 20 bp, synthetic construct
  misc_feature 1..20: note = chemically synthesized
  source 1..20: mol_type = other DNA
gtgaaacagttcctggttca

SEQ ID NO: 58900 - DNA, 20 bp, synthetic construct
  misc_feature 1..20: note = chemically synthesized
  source 1..20: mol_type = other DNA
gaaacagttcctggttcaga

SEQ ID NO: 58901 - DNA, 20 bp, synthetic construct
  misc_feature 1..20: note = chemically synthesized
  source 1..20: mol_type = other DNA
aaacagttcctggttcagag

SEQ ID NO: 58902 - DNA, 20 bp, synthetic construct
  misc_feature 1..20: note = chemically synthesized
  source 1..20: mol_type = other DNA
gttcctggttcagagaggtg

SEQ ID NO: 58903 - DNA, 20 bp, synthetic construct
  misc_feature 1..20: note = chemically synthesized
  source 1..20: mol_type = other DNA
cctggttcagagaggtgaag

SEQ ID NO: 58904 - DNA, 20 bp, synthetic construct
  misc_feature 1..20: note = chemically synthesized
  source 1..20: mol_type = other DNA
agaggtgaagcggcctgcct

SEQ ID NO: 58905 - DNA, 20 bp, synthetic construct
  misc_feature 1..20: note = chemically synthesized
  source 1..20: mol_type = other DNA
gaggtgaagcggcctgcctg

SEQ ID NO: 58906 - DNA, 20 bp, synthetic construct
  misc_feature 1..20: note = chemically synthesized
  source 1..20: mol_type = other DNA
gtgaagcggcctgcctgagg

SEQ ID NO: 58907 - DNA, 20 bp, synthetic construct
  misc_feature 1..20: note = chemically synthesized
  source 1..20: mol_type = other DNA
gcggcctgcctgaggcagca

SEQ ID NO: 58908 - DNA, 20 bp, synthetic construct
  misc_feature 1..20: note = chemically synthesized
  source 1..20: mol_type = other DNA
ggcagcacagctcttcttta

SEQ ID NO: 58909 - DNA, 20 bp, synthetic construct
  misc_feature 1..20: note = chemically synthesized
  source 1..20: mol_type = other DNA
cccacctctaccctgtctca

SEQ ID NO: 58910 - DNA, 20 bp, synthetic construct
  misc_feature 1..20: note = chemically synthesized
  source 1..20: mol_type = other DNA
tgtctcacggccccccatgc

SEQ ID NO: 58911 - DNA, 20 bp, synthetic construct
  misc_feature 1..20: note = chemically synthesized
  source 1..20: mol_type = other DNA
ggccccccatgccagcctga

SEQ ID NO: 58912 - DNA, 20 bp, synthetic construct
  misc_feature 1..20: note = chemically synthesized
  source 1..20: mol_type = other DNA
cctgacggttgtgtctgcct

SEQ ID NO: 58913 - DNA, 20 bp, synthetic construct
  misc_feature 1..20: note = chemically synthesized
  source 1..20: mol_type = other DNA
gtcatgctccatttttccat

SEQ ID NO: 58914 - DNA, 20 bp, synthetic construct
  misc_feature 1..20: note = chemically synthesized
  source 1..20: mol_type = other DNA
tcatgctccatttttccatc

SEQ ID NO: 58915 - DNA, 20 bp, synthetic construct
  misc_feature 1..20: note = chemically synthesized
  source 1..20: mol_type = other DNA
atttttccatcgggaccatc

SEQ ID NO: 58916 - DNA, 20 bp, synthetic construct
  misc_feature 1..20: note = chemically synthesized
  source 1..20: mol_type = other DNA
ttttccatcgggaccatcaa

SEQ ID NO: 58917 - DNA, 20 bp, synthetic construct
  misc_feature 1..20: note = chemically synthesized
  source 1..20: mol_type = other DNA
tttccatcgggaccatcaag

SEQ ID NO: 58918 - DNA, 20 bp, synthetic construct
  misc_feature 1..20: note = chemically synthesized
  source 1..20: mol_type = other DNA
ttccatcgggaccatcaaga

SEQ ID NO: 58919 - DNA, 20 bp, synthetic construct
  misc_feature 1..20: note = chemically synthesized
  source 1..20: mol_type = other DNA
tcaagagggtgtttgtgtct

SEQ ID NO: 58920 - DNA, 20 bp, synthetic construct
  misc_feature 1..20: note = chemically synthesized
  source 1..20: mol_type = other DNA
caagagggtgtttgtgtcta

SEQ ID NO: 58921 - DNA, 20 bp, synthetic construct
  misc_feature 1..20: note = chemically synthesized
  source 1..20: mol_type = other DNA
tgtttgtgtctaaggctgac

SEQ ID NO: 58922 - DNA, 20 bp, synthetic construct
  misc_feature 1..20: note = chemically synthesized
  source 1..20: mol_type = other DNA
gtttgtgtctaaggctgact

SEQ ID NO: 58923 - DNA, 20 bp, synthetic construct
  misc_feature 1..20: note = chemically synthesized
  source 1..20: mol_type = other DNA
taaggctgactgggtaactt

SEQ ID NO: 58924 - DNA, 20 bp, synthetic construct
  misc_feature 1..20: note = chemically synthesized
  source 1..20: mol_type = other DNA
ctgactgggtaactttggat

SEQ ID NO: 58925 - DNA, 20 bp, synthetic construct
  misc_feature 1..20: note = chemically synthesized
  source 1..20: mol_type = other DNA
actgggtaactttggatgag

SEQ ID NO: 58926 - DNA, 20 bp, synthetic construct
  misc_feature 1..20: note = chemically synthesized
  source 1..20: mol_type = other DNA
atgagcggtctctccgctct

SEQ ID NO: 58927 - DNA, 20 bp, synthetic construct
  misc_feature 1..20: note = chemically synthesized
  source 1..20: mol_type = other DNA
ctgtttcctcatctgtcaaa

SEQ ID NO: 58928 - DNA, 20 bp, synthetic construct
  misc_feature 1..20: note = chemically synthesized
  source 1..20: mol_type = other DNA
tgtttcctcatctgtcaaat

SEQ ID NO: 58929 - DNA, 20 bp, synthetic construct
  misc_feature 1..20: note = chemically synthesized
  source 1..20: mol_type = other DNA
tctaacccactctgatctcc

SEQ ID NO: 58930 - DNA, 20 bp, synthetic construct
  misc_feature 1..20: note = chemically synthesized
  source 1..20: mol_type = other DNA
ctaacccactctgatctccc

SEQ ID NO: 58931 - DNA, 20 bp, synthetic construct
  misc_feature 1..20: note = chemically synthesized
  source 1..20: mol_type = other DNA
taacccactctgatctccca

SEQ ID NO: 58932 - DNA, 20 bp, synthetic construct
  misc_feature 1..20: note = chemically synthesized
  source 1..20: mol_type = other DNA
cccactctgatctcccaggg

SEQ ID NO: 58933 - DNA, 20 bp, synthetic construct
  misc_feature 1..20: note = chemically synthesized
  source 1..20: mol_type = other DNA
actctgatctcccagggcgg

SEQ ID NO: 58934 - DNA, 20 bp, synthetic construct
  misc_feature 1..20: note = chemically synthesized
  source 1..20: mol_type = other DNA
tgatctcccagggcggcagt

SEQ ID NO: 58935 - DNA, 20 bp, synthetic construct
  misc_feature 1..20: note = chemically synthesized
  source 1..20: mol_type = other DNA
ccagggcggcagtaagtctt

SEQ ID NO: 58936 - DNA, 20 bp, synthetic construct
  misc_feature 1..20: note = chemically synthesized
  source 1..20: mol_type = other DNA
cggcagtaagtcttcagcat

SEQ ID NO: 58937 - DNA, 20 bp, synthetic construct
  misc_feature 1..20: note = chemically synthesized
  source 1..20: mol_type = other DNA
ggcagtaagtcttcagcatc

SEQ ID NO: 58938 - DNA, 20 bp, synthetic construct
  misc_feature 1..20: note = chemically synthesized
  source 1..20: mol_type = other DNA
gtcttcagcatcaggcattt

SEQ ID NO: 58939 - DNA, 20 bp, synthetic construct
  misc_feature 1..20: note = chemically synthesized
  source 1..20: mol_type = other DNA
tcttcagcatcaggcatttt

SEQ ID NO: 58940 - DNA, 20 bp, synthetic construct
  misc_feature 1..20: note = chemically synthesized
  source 1..20: mol_type = other DNA
cttcagcatcaggcattttg

SEQ ID NO: 58941 - DNA, 20 bp, synthetic construct
  misc_feature 1..20: note = chemically synthesized
  source 1..20: mol_type = other DNA
tcaggcattttggggtgact

SEQ ID NO: 58942 - DNA, 20 bp, synthetic construct
  misc_feature 1..20: note = chemically synthesized
  source 1..20: mol_type = other DNA
ttttggggtgactcagtaaa

SEQ ID NO: 58943 - DNA, 20 bp, synthetic construct
  misc_feature 1..20: note = chemically synthesized
  source 1..20: mol_type = other DNA
tggggtgactcagtaaatgg

SEQ ID NO: 58944 - DNA, 20 bp, synthetic construct
  misc_feature 1..20: note = chemically synthesized
  source 1..20: mol_type = other DNA
taaatggtagatcttgctac

SEQ ID NO: 58945 - DNA, 20 bp, synthetic construct
  misc_feature 1..20: note = chemically synthesized
  source 1..20: mol_type = other DNA
atggtagatcttgctaccag

SEQ ID NO: 58946 - DNA, 20 bp, synthetic construct
  misc_feature 1..20: note = chemically synthesized
  source 1..20: mol_type = other DNA
agatcttgctaccagtggaa

SEQ ID NO: 58947 - DNA, 20 bp, synthetic construct
  misc_feature 1..20: note = chemically synthesized
  source 1..20: mol_type = other DNA
ctaccagtggaacagccact

SEQ ID NO: 58948 - DNA, 20 bp, synthetic construct
  misc_feature 1..20: note = chemically synthesized
  source 1..20: mol_type = other DNA
taccagtggaacagccacta

SEQ ID NO: 58949 - DNA, 20 bp, synthetic construct
  misc_feature 1..20: note = chemically synthesized
  source 1..20: mol_type = other DNA
aacagccactaaggattctg

SEQ ID NO: 58950 - DNA, 20 bp, synthetic construct
  misc_feature 1..20: note = chemically synthesized
  source 1..20: mol_type = other DNA
gccactaaggattctgcagt

SEQ ID NO: 58951 - DNA, 20 bp, synthetic construct
  misc_feature 1..20: note = chemically synthesized
  source 1..20: mol_type = other DNA
cactaaggattctgcagtga

SEQ ID NO: 58952 - DNA, 20 bp, synthetic construct
  misc_feature 1..20: note = chemically synthesized
  source 1..20: mol_type = other DNA
taaggattctgcagtgagag

SEQ ID NO: 58953 - DNA, 20 bp, synthetic construct
  misc_feature 1..20: note = chemically synthesized
  source 1..20: mol_type = other DNA
aggattctgcagtgagagca

SEQ ID NO: 58954 - DNA, 20 bp, synthetic construct
  misc_feature 1..20: note = chemically synthesized
  source 1..20: mol_type = other DNA
ggattctgcagtgagagcag

SEQ ID NO: 58955 - DNA, 20 bp, synthetic construct
  misc_feature 1..20: note = chemically synthesized
  source 1..20: mol_type = other DNA
gattctgcagtgagagcaga

SEQ ID NO: 58956 - DNA, 20 bp, synthetic construct
  misc_feature 1..20: note = chemically synthesized
  source 1..20: mol_type = other DNA
ctgcagtgagagcagagggc

SEQ ID NO: 58957 - DNA, 20 bp, synthetic construct
  misc_feature 1..20: note = chemically synthesized
  source 1..20: mol_type = other DNA
gtgagagcagagggccagct

SEQ ID NO: 58958 - DNA, 20 bp, synthetic construct
  misc_feature 1..20: note = chemically synthesized
  source 1..20: mol_type = other DNA
agagcagagggccagctaag

SEQ ID NO: 58959 - DNA, 20 bp, synthetic construct
  misc_feature 1..20: note = chemically synthesized
  source 1..20: mol_type = other DNA
ccagctaagtggtactctcc

SEQ ID NO: 58960 - DNA, 20 bp, synthetic construct
  misc_feature 1..20: note = chemically synthesized
  source 1..20: mol_type = other DNA
agctaagtggtactctccca

SEQ ID NO: 58961 - DNA, 20 bp, synthetic construct
  misc_feature 1..20: note = chemically synthesized
  source 1..20: mol_type = other DNA
tcacgccaccccctccacct

SEQ ID NO: 58962 - DNA, 20 bp, synthetic construct
  misc_feature 1..20: note = chemically synthesized
  source 1..20: mol_type = other DNA
caccccctccaccttggaca

SEQ ID NO: 58963 - DNA, 20 bp, synthetic construct
  misc_feature 1..20: note = chemically synthesized
  source 1..20: mol_type = other DNA
accccctccaccttggacac

SEQ ID NO: 58964 - DNA, 20 bp, synthetic construct
  misc_feature 1..20: note = chemically synthesized
  source 1..20: mol_type = other DNA
accttggacacaggacgctg

SEQ ID NO: 58965 - DNA, 20 bp, synthetic construct
  misc_feature 1..20: note = chemically synthesized
  source 1..20: mol_type = other DNA
cacaggacgctgtggtttct

SEQ ID NO: 58966 - DNA, 20 bp, synthetic construct
  misc_feature 1..20: note = chemically synthesized
  source 1..20: mol_type = other DNA
ggacgctgtggtttctgagc

SEQ ID NO: 58967 - DNA, 20 bp, synthetic construct
  misc_feature 1..20: note = chemically synthesized
  source 1..20: mol_type = other DNA
gacgctgtggtttctgagcc

SEQ ID NO: 58968 - DNA, 20 bp, synthetic construct
  misc_feature 1..20: note = chemically synthesized
  source 1..20: mol_type = other DNA
ccaggtacaatgactccttt

SEQ ID NO: 58969 - DNA, 20 bp, synthetic construct
  misc_feature 1..20: note = chemically synthesized
  source 1..20: mol_type = other DNA
gtacaatgactcctttcggt

SEQ ID NO: 58970 - DNA, 20 bp, synthetic construct
  misc_feature 1..20: note = chemically synthesized
  source 1..20: mol_type = other DNA
atgactcctttcggtaagtg

SEQ ID NO: 58971 - DNA, 20 bp, synthetic construct
  misc_feature 1..20: note = chemically synthesized
  source 1..20: mol_type = other DNA
actcctttcggtaagtgcag

SEQ ID NO: 58972 - DNA, 20 bp, synthetic construct
  misc_feature 1..20: note = chemically synthesized
  source 1..20: mol_type = other DNA
cctttcggtaagtgcagtgg

SEQ ID NO: 58973 - DNA, 20 bp, synthetic construct
  misc_feature 1..20: note = chemically synthesized
  source 1..20: mol_type = other DNA
agtggaagctgtacactgcc

SEQ ID NO: 58974 - DNA, 20 bp, synthetic construct
  misc_feature 1..20: note = chemically synthesized
  source 1..20: mol_type = other DNA
gtggaagctgtacactgccc

SEQ ID NO: 58975 - DNA, 20 bp, synthetic construct
  misc_feature 1..20: note = chemically synthesized
  source 1..20: mol_type = other DNA
agctgtacactgcccaggca

SEQ ID NO: 58976 - DNA, 20 bp, synthetic construct
  misc_feature 1..20: note = chemically synthesized
  source 1..20: mol_type = other DNA
cactgcccaggcaaagcgtc

SEQ ID NO: 58977 - DNA, 20 bp, synthetic construct
  misc_feature 1..20: note = chemically synthesized
  source 1..20: mol_type = other DNA
actgcccaggcaaagcgtcc

SEQ ID NO: 58978 - DNA, 20 bp, synthetic construct
  misc_feature 1..20: note = chemically synthesized
  source 1..20: mol_type = other DNA
gcccaggcaaagcgtccggg

SEQ ID NO: 58979 - DNA, 20 bp, synthetic construct
  misc_feature 1..20: note = chemically synthesized
  source 1..20: mol_type = other DNA
ggcaaagcgtccgggcagcg

SEQ ID NO: 58980 - DNA, 20 bp, synthetic construct
  misc_feature 1..20: note = chemically synthesized
  source 1..20: mol_type = other DNA
gcaaagcgtccgggcagcgt

SEQ ID NO: 58981 - DNA, 20 bp, synthetic construct
  misc_feature 1..20: note = chemically synthesized
  source 1..20: mol_type = other DNA
aagcgtccgggcagcgtagg

SEQ ID NO: 58982 - DNA, 20 bp, synthetic construct
  misc_feature 1..20: note = chemically synthesized
  source 1..20: mol_type = other DNA
agcgtccgggcagcgtaggc

SEQ ID NO: 58983 - DNA, 20 bp, synthetic construct
  misc_feature 1..20: note = chemically synthesized
  source 1..20: mol_type = other DNA
ggcagcgtaggcgggcgact

SEQ ID NO: 58984 - DNA, 20 bp, synthetic construct
  misc_feature 1..20: note = chemically synthesized
  source 1..20: mol_type = other DNA
taggcgggcgactcagatcc

SEQ ID NO: 58985 - DNA, 20 bp, synthetic construct
  misc_feature 1..20: note = chemically synthesized
  source 1..20: mol_type = other DNA
cgggcgactcagatcccagc

SEQ ID NO: 58986 - DNA, 20 bp, synthetic construct
  misc_feature 1..20: note = chemically synthesized
  source 1..20: mol_type = other DNA
gcgactcagatcccagccag

SEQ ID NO: 58987 - DNA, 20 bp, synthetic construct
  misc_feature 1..20: note = chemically synthesized
  source 1..20: mol_type = other DNA
cagatcccagccagtggact

SEQ ID NO: 58988 - DNA, 20 bp, synthetic construct
  misc_feature 1..20: note = chemically synthesized
  source 1..20: mol_type = other DNA
ctgtttgctcctccgataac

SEQ ID NO: 58989 - DNA, 20 bp, synthetic construct
  misc_feature 1..20: note = chemically synthesized
  source 1..20: mol_type = other DNA
tgtttgctcctccgataact

SEQ ID NO: 58990 - DNA, 20 bp, synthetic construct
  misc_feature 1..20: note = chemically synthesized
  source 1..20: mol_type = other DNA
gtttgctcctccgataactg

SEQ ID NO: 58991 - DNA, 20 bp, synthetic construct
  misc_feature 1..20: note = chemically synthesized
  source 1..20: mol_type = other DNA
tccgataactggggtgacct

SEQ ID NO: 58992 - DNA, 20 bp, synthetic construct
  misc_feature 1..20: note = chemically synthesized
  source 1..20: mol_type = other DNA
tgaccttggttaatattcac

SEQ ID NO: 58993 - DNA, 20 bp, synthetic construct
  misc_feature 1..20: note = chemically synthesized
  source 1..20: mol_type = other DNA
ccttggttaatattcaccag

SEQ ID NO: 58994 - DNA, 20 bp, synthetic construct
  misc_feature 1..20: note = chemically synthesized
  source 1..20: mol_type = other DNA
agcctcccccgttgcccctc

SEQ ID NO: 58995 - DNA, 20 bp, synthetic construct
  misc_feature 1..20: note = chemically synthesized
  source 1..20: mol_type = other DNA
ctggatccactgcttaaata

SEQ ID NO: 58996 - DNA, 20 bp, synthetic construct
  misc_feature 1..20: note = chemically synthesized
  source 1..20: mol_type = other DNA
tccactgcttaaatacggac

SEQ ID NO: 58997 - DNA, 20 bp, synthetic construct
  misc_feature 1..20: note = chemically synthesized
  source 1..20: mol_type = other DNA
ccactgcttaaatacggacg

SEQ ID NO: 58998 - DNA, 20 bp, synthetic construct
  misc_feature 1..20: note = chemically synthesized
  source 1..20: mol_type = other DNA
tgcttaaatacggacgagga

SEQ ID NO: 58999 - DNA, 20 bp, synthetic construct
  misc_feature 1..20: note = chemically synthesized
  source 1..20: mol_type = other DNA
gcttaaatacggacgaggac

SEQ ID NO: 59000 - DNA, 20 bp, synthetic construct
  misc_feature 1..20: note = chemically synthesized
  source 1..20: mol_type = other DNA
cttaaatacggacgaggaca

SEQ ID NO: 59001 - DNA, 20 bp, synthetic construct
  misc_feature 1..20: note = chemically synthesized
  source 1..20: mol_type = other DNA
aggacagggccctgtctcct

SEQ ID NO: 59002 - DNA, 20 bp, synthetic construct
  misc_feature 1..20: note = chemically synthesized
  source 1..20: mol_type = other DNA
gggccctgtctcctcagctt

SEQ ID NO: 59003 - DNA, 20 bp, synthetic construct
  misc_feature 1..20: note = chemically synthesized
  source 1..20: mol_type = other DNA
ggccctgtctcctcagcttc

SEQ ID NO: 59004 - DNA, 20 bp, synthetic construct
  misc_feature 1..20: note = chemically synthesized
  source 1..20: mol_type = other DNA
ttcaggcaccaccactgacc

SEQ ID NO: 59005 - DNA, 20 bp, synthetic construct
  misc_feature 1..20: note = chemically synthesized
  source 1..20: mol_type = other DNA
tcaggcaccaccactgacct

SEQ ID NO: 59006 - DNA, 20 bp, synthetic construct
  misc_feature 1..20: note = chemically synthesized
  source 1..20: mol_type = other DNA
gcaccaccactgacctggga

SEQ ID NO: 59007 - DNA, 20 bp, synthetic construct
  misc_feature 1..20: note = chemically synthesized
  source 1..20: mol_type = other DNA
gacctgggacagtgaatcgt

SEQ ID NO: 59008 - DNA, 20 bp, synthetic construct
  misc_feature 1..20: note = chemically synthesized
  source 1..20: mol_type = other DNA
gtaagtatgcctttcactgc

SEQ ID NO: 59009 - DNA, 20 bp, synthetic construct
  misc_feature 1..20: note = chemically synthesized
  source 1..20: mol_type = other DNA
aagtatgcctttcactgcga

SEQ ID NO: 59010 - DNA, 20 bp, synthetic construct
  misc_feature 1..20: note = chemically synthesized
  source 1..20: mol_type = other DNA
agtatgcctttcactgcgag

SEQ ID NO: 59011 - DNA, 20 bp, synthetic construct
  misc_feature 1..20: note = chemically synthesized
  source 1..20: mol_type = other DNA
cctttcactgcgagaggttc

SEQ ID NO: 59012 - DNA, 20 bp, synthetic construct
  misc_feature 1..20: note = chemically synthesized
  source 1..20: mol_type = other DNA
tttcactgcgagaggttctg

SEQ ID NO: 59013 - DNA, 20 bp, synthetic construct
  misc_feature 1..20: note = chemically synthesized
  source 1..20: mol_type = other DNA
tcactgcgagaggttctgga

SEQ ID NO: 59014 - DNA, 20 bp, synthetic construct
  misc_feature 1..20: note = chemically synthesized
  source 1..20: mol_type = other DNA
cactgcgagaggttctggag

SEQ ID NO: 59015 - DNA, 20 bp, synthetic construct
  misc_feature 1..20: note = chemically synthesized
  source 1..20: mol_type = other DNA
gaggttctggagaggcttct

SEQ ID NO: 59016 - DNA, 20 bp, synthetic construct
  misc_feature 1..20: note = chemically synthesized
  source 1..20: mol_type = other DNA
agaggcttctgagctcccca

SEQ ID NO: 59017 - DNA, 20 bp, synthetic construct
  misc_feature 1..20: note = chemically synthesized
  source 1..20: mol_type = other DNA
cttctgagctccccatggcc

SEQ ID NO: 59018 - DNA, 20 bp, synthetic construct
  misc_feature 1..20: note = chemically synthesized
  source 1..20: mol_type = other DNA
ttctgagctccccatggccc

SEQ ID NO: 59019 - DNA, 20 bp, synthetic construct
  misc_feature 1..20: note = chemically synthesized
  source 1..20: mol_type = other DNA
tgagctccccatggcccagg

SEQ ID NO: 59020 - DNA, 20 bp, synthetic construct
  misc_feature 1..20: note = chemically synthesized
  source 1..20: mol_type = other DNA
gagctccccatggcccaggc

SEQ ID NO: 59021 - DNA, 20 bp, synthetic construct
  misc_feature 1..20: note = chemically synthesized
  source 1..20: mol_type = other DNA
ctccccatggcccaggcagg

SEQ ID NO: 59022 - DNA, 20 bp, synthetic construct
  misc_feature 1..20: note = chemically synthesized
  source 1..20: mol_type = other DNA
cccatggcccaggcaggcag

SEQ ID NO: 59023 - DNA, 20 bp, synthetic construct
  misc_feature 1..20: note = chemically synthesized
  source 1..20: mol_type = other DNA
ccatggcccaggcaggcagc

SEQ ID NO: 59024 - DNA, 20 bp, synthetic construct
  misc_feature 1..20: note = chemically synthesized
  source 1..20: mol_type = other DNA
gcccaggcaggcagcaggtc

SEQ ID NO: 59025 - DNA, 20 bp, synthetic construct
  misc_feature 1..20: note = chemically synthesized
  source 1..20: mol_type = other DNA
cccaggcaggcagcaggtct

SEQ ID NO: 59026 - DNA, 20 bp, synthetic construct
  misc_feature 1..20: note = chemically synthesized
  source 1..20: mol_type = other DNA
ccaggcaggcagcaggtctg

SEQ ID NO: 59027 - DNA, 20 bp, synthetic construct
  misc_feature 1..20: note = chemically synthesized
  source 1..20: mol_type = other DNA
ggcaggcagcaggtctgggg

SEQ ID NO: 59028 - DNA, 20 bp, synthetic construct
  misc_feature 1..20: note = chemically synthesized
  source 1..20: mol_type = other DNA
gcaggcagcaggtctggggc

SEQ ID NO: 59029 - DNA, 20 bp, synthetic construct
  misc_feature 1..20: note = chemically synthesized
  source 1..20: mol_type = other DNA
aggcagcaggtctggggcag

SEQ ID NO: 59030 - DNA, 20 bp, synthetic construct
  misc_feature 1..20: note = chemically synthesized
  source 1..20: mol_type = other DNA
ggcagcaggtctggggcagg

SEQ ID NO: 59031 - DNA, 20 bp, synthetic construct
  misc_feature 1..20: note = chemically synthesized
  source 1..20: mol_type = other DNA
gcagcaggtctggggcagga

SEQ ID NO: 59032 - DNA, 20 bp, synthetic construct
  misc_feature 1..20: note = chemically synthesized
  source 1..20: mol_type = other DNA
cagcaggtctggggcaggag

SEQ ID NO: 59033 - DNA, 20 bp, synthetic construct
  misc_feature 1..20: note = chemically synthesized
  source 1..20: mol_type = other DNA
agcaggtctggggcaggagg

SEQ ID NO: 59034 - DNA, 20 bp, synthetic construct
  misc_feature 1..20: note = chemically synthesized
  source 1..20: mol_type = other DNA
gcaggtctggggcaggaggg

SEQ ID NO: 59035 - DNA, 20 bp, synthetic construct
  misc_feature 1..20: note = chemically synthesized
  source 1..20: mol_type = other DNA
ctggggcaggaggggggttg

SEQ ID NO: 59036 - DNA, 20 bp, synthetic construct
  misc_feature 1..20: note = chemically synthesized
  source 1..20: mol_type = other DNA
ggggcaggaggggggttgtg

SEQ ID NO: 59037 - DNA, 20 bp, synthetic construct
  misc_feature 1..20: note = chemically synthesized
  source 1..20: mol_type = other DNA
gcaggaggggggttgtggag

SEQ ID NO: 59038 - DNA, 20 bp, synthetic construct
  misc_feature 1..20: note = chemically synthesized
  source 1..20: mol_type = other DNA
caggaggggggttgtggagt

SEQ ID NO: 59039 - DNA, 20 bp, synthetic construct
  misc_feature 1..20: note = chemically synthesized
  source 1..20: mol_type = other DNA
ggagtgggtatccgcctgct

SEQ ID NO: 59040 - DNA, 20 bp, synthetic construct
  misc_feature 1..20: note = chemically synthesized
  source 1..20: mol_type = other DNA
gagtgggtatccgcctgctg

SEQ ID NO: 59041 - DNA, 20 bp, synthetic construct
  misc_feature 1..20: note = chemically synthesized
  source 1..20: mol_type = other DNA
ggtatccgcctgctgaggtg

SEQ ID NO: 59042 - DNA, 20 bp, synthetic construct
  misc_feature 1..20: note = chemically synthesized
  source 1..20: mol_type = other DNA
gtatccgcctgctgaggtgc

SEQ ID NO: 59043 - DNA, 20 bp, synthetic construct
  misc_feature 1..20: note = chemically synthesized
  source 1..20: mol_type = other DNA
tatccgcctgctgaggtgca

SEQ ID NO: 59044 - DNA, 20 bp, synthetic construct
  misc_feature 1..20: note = chemically synthesized
  source 1..20: mol_type = other DNA
ccgcctgctgaggtgcaggg

SEQ ID NO: 59045 - DNA, 20 bp, synthetic construct
  misc_feature 1..20: note = chemically synthesized
  source 1..20: mol_type = other DNA
ctgctgaggtgcagggcaga

SEQ ID NO: 59046 - DNA, 20 bp, synthetic construct
  misc_feature 1..20: note = chemically synthesized
  source 1..20: mol_type = other DNA
gctgaggtgcagggcagatg

SEQ ID NO: 59047 - DNA, 20 bp, synthetic construct
  misc_feature 1..20: note = chemically synthesized
  source 1..20: mol_type = other DNA
tgaggtgcagggcagatgga

SEQ ID NO: 59048 - DNA, 20 bp, synthetic construct
  misc_feature 1..20: note = chemically synthesized
  source 1..20: mol_type = other DNA
gaggtgcagggcagatggag

SEQ ID NO: 59049 - DNA, 20 bp, synthetic construct
  misc_feature 1..20: note = chemically synthesized
  source 1..20: mol_type = other DNA
cagggcagatggagaggctg

SEQ ID NO: 59050 - DNA, 20 bp, synthetic construct
  misc_feature 1..20: note = chemically synthesized
  source 1..20: mol_type = other DNA
cagatggagaggctgcagct

SEQ ID NO: 59051 - DNA, 20 bp, synthetic construct
  misc_feature 1..20: note = chemically synthesized
  source 1..20: mol_type = other DNA
agctcctattttcataataa

SEQ ID NO: 59052 - DNA, 20 bp, synthetic construct
  misc_feature 1..20: note = chemically synthesized
  source 1..20: mol_type = other DNA
tcctattttcataataacag

SEQ ID NO: 59053 - DNA, 20 bp, synthetic construct
  misc_feature 1..20: note = chemically synthesized
  source 1..20: mol_type = other DNA
ttcataataacagcagccat

SEQ ID NO: 59054 - DNA, 20 bp, synthetic construct
  misc_feature 1..20: note = chemically synthesized
  source 1..20: mol_type = other DNA
tcataataacagcagccatg

SEQ ID NO: 59055 - DNA, 20 bp, synthetic construct
  misc_feature 1..20: note = chemically synthesized
  source 1..20: mol_type = other DNA
cataataacagcagccatga

SEQ ID NO: 59056 - DNA, 20 bp, synthetic construct
  misc_feature 1..20: note = chemically synthesized
  source 1..20: mol_type = other DNA
gagggttgtgtcctgtttcc

SEQ ID NO: 59057 - DNA, 20 bp, synthetic construct
  misc_feature 1..20: note = chemically synthesized
  source 1..20: mol_type = other DNA
tcctgtttcccagtcctgcc

SEQ ID NO: 59058 - DNA, 20 bp, synthetic construct
  misc_feature 1..20: note = chemically synthesized
  source 1..20: mol_type = other DNA
agtcctgcccggtcccccct

SEQ ID NO: 59059 - DNA, 20 bp, synthetic construct
  misc_feature 1..20: note = chemically synthesized
  source 1..20: mol_type = other DNA
ggtcccccctcggtacctcc

SEQ ID NO: 59060 - DNA, 20 bp, synthetic construct
  misc_feature 1..20: note = chemically synthesized
  source 1..20: mol_type = other DNA
cccccctcggtacctcctgg

SEQ ID NO: 59061 - DNA, 20 bp, synthetic construct
  misc_feature 1..20: note = chemically synthesized
  source 1..20: mol_type = other DNA
gtacctcctggtggatacac

SEQ ID NO: 59062 - DNA, 20 bp, synthetic construct
  misc_feature 1..20: note = chemically synthesized
  source 1..20: mol_type = other DNA
gtggatacactggttcctgt

SEQ ID NO: 59063 - DNA, 20 bp, synthetic construct
  misc_feature 1..20: note = chemically synthesized
  source 1..20: mol_type = other DNA
gatacactggttcctgtaag

SEQ ID NO: 59064 - DNA, 20 bp, synthetic construct
  misc_feature 1..20: note = chemically synthesized
  source 1..20: mol_type = other DNA
acactggttcctgtaagcag

SEQ ID NO: 59065 - DNA, 20 bp, synthetic construct
  misc_feature 1..20: note = chemically synthesized
  source 1..20: mol_type = other DNA
ctggttcctgtaagcagaag

SEQ ID NO: 59066 - DNA, 20 bp, synthetic construct
  misc_feature 1..20: note = chemically synthesized
  source 1..20: mol_type = other DNA
tcctgtaagcagaagtggat

SEQ ID NO: 59067 - DNA, 20 bp, synthetic construct
  misc_feature 1..20: note = chemically synthesized
  source 1..20: mol_type = other DNA
cctgtaagcagaagtggatg

SEQ ID NO: 59068 - DNA, 20 bp, synthetic construct
  misc_feature 1..20: note = chemically synthesized
  source 1..20: mol_type = other DNA
ctgtaagcagaagtggatga

SEQ ID NO: 59069 - DNA, 20 bp, synthetic construct
  misc_feature 1..20: note = chemically synthesized
  source 1..20: mol_type = other DNA
cagaagtggatgagggtgtc

SEQ ID NO: 59070 - DNA, 20 bp, synthetic construct
  misc_feature 1..20: note = chemically synthesized
  source 1..20: mol_type = other DNA
agaagtggatgagggtgtct

SEQ ID NO: 59071 - DNA, 20 bp, synthetic construct
  misc_feature 1..20: note = chemically synthesized
  source 1..20: mol_type = other DNA
gatgagggtgtctaggtctg

SEQ ID NO: 59072 - DNA, 20 bp, synthetic construct
  misc_feature 1..20: note = chemically synthesized
  source 1..20: mol_type = other DNA
ggtgtctaggtctgcagtcc

SEQ ID NO: 59073 - DNA, 20 bp, synthetic construct
  misc_feature 1..20: note = chemically synthesized
  source 1..20: mol_type = other DNA
ggtctgcagtcctggcaccc

SEQ ID NO: 59074 - DNA, 20 bp, synthetic construct
  misc_feature 1..20: note = chemically synthesized
  source 1..20: mol_type = other DNA
gtctgcagtcctggcacccc

SEQ ID NO: 59075 - DNA, 20 bp, synthetic construct
  misc_feature 1..20: note = chemically synthesized
  source 1..20: mol_type = other DNA
gcagtcctggcaccccagga

SEQ ID NO: 59076 - DNA, 20 bp, synthetic construct
  misc_feature 1..20: note = chemically synthesized
  source 1..20: mol_type = other DNA
cagtcctggcaccccaggat

SEQ ID NO: 59077 - DNA, 20 bp, synthetic construct
  misc_feature 1..20: note = chemically synthesized
  source 1..20: mol_type = other DNA
agtcctggcaccccaggatg

SEQ ID NO: 59078 - DNA, 20 bp, synthetic construct
  misc_feature 1..20: note = chemically synthesized
  source 1..20: mol_type = other DNA
gtcctggcaccccaggatgg

SEQ ID NO: 59079 - DNA, 20 bp, synthetic construct
  misc_feature 1..20: note = chemically synthesized
  source 1..20: mol_type = other DNA
caccccaggatgggggacac

SEQ ID NO: 59080 - DNA, 20 bp, synthetic construct
  misc_feature 1..20: note = chemically synthesized
  source 1..20: mol_type = other DNA
caggatgggggacaccagcc

SEQ ID NO: 59081 - DNA, 20 bp, synthetic construct
  misc_feature 1..20: note = chemically synthesized
  source 1..20: mol_type = other DNA
gggggacaccagccaagata

SEQ ID NO: 59082 - DNA, 20 bp, synthetic construct
  misc_feature 1..20: note = chemically synthesized
  source 1..20: mol_type = other DNA
caccagccaagatacagcaa

SEQ ID NO: 59083 - DNA, 20 bp, synthetic construct
  misc_feature 1..20: note = chemically synthesized
  source 1..20: mol_type = other DNA
aagatacagcaacagcaaca

SEQ ID NO: 59084 - DNA, 20 bp, synthetic construct
  misc_feature 1..20: note = chemically synthesized
  source 1..20: mol_type = other DNA
acagcaacagcaacaaagcg

SEQ ID NO: 59085 - DNA, 20 bp, synthetic construct
  misc_feature 1..20: note = chemically synthesized
  source 1..20: mol_type = other DNA
gccatttctttctgtttgca

SEQ ID NO: 59086 - DNA, 20 bp, synthetic construct
  misc_feature 1..20: note = chemically synthesized
  source 1..20: mol_type = other DNA
tgcacagctcctctgtctgt

SEQ ID NO: 59087 - DNA, 20 bp, synthetic construct
  misc_feature 1..20: note = chemically synthesized
  source 1..20: mol_type = other DNA
gcacagctcctctgtctgtc

SEQ ID NO: 59088 - DNA, 20 bp, synthetic construct
  misc_feature 1..20: note = chemically synthesized
  source 1..20: mol_type = other DNA
cacagctcctctgtctgtcg

SEQ ID NO: 59089 - DNA, 20 bp, synthetic construct
  misc_feature 1..20: note = chemically synthesized
  source 1..20: mol_type = other DNA
acagctcctctgtctgtcgg

SEQ ID NO: 59090 - DNA, 20 bp, synthetic construct
  misc_feature 1..20: note = chemically synthesized
  source 1..20: mol_type = other DNA
tcctgtctgttgtctcctat

SEQ ID NO: 59091 - DNA, 20 bp, synthetic construct
  misc_feature 1..20: note = chemically synthesized
  source 1..20: mol_type = other DNA
tcaccacctctcctactgct

SEQ ID NO: 59092 - DNA, 20 bp, synthetic construct
  misc_feature 1..20: note = chemically synthesized
  source 1..20: mol_type = other DNA
caccacctctcctactgctt

SEQ ID NO: 59093 - DNA, 20 bp, synthetic construct
  misc_feature 1..20: note = chemically synthesized
  source 1..20: mol_type = other DNA
tgcatctttctccccttcta

SEQ ID NO: 59094 - DNA, 20 bp, synthetic construct
  misc_feature 1..20: note = chemically synthesized
  source 1..20: mol_type = other DNA
ctttctccccttctatagat

SEQ ID NO: 59095 - DNA, 20 bp, synthetic construct
  misc_feature 1..20: note = chemically synthesized
  source 1..20: mol_type = other DNA
tttctccccttctatagatg

SEQ ID NO: 59096 - DNA, 20 bp, synthetic construct
  misc_feature 1..20: note = chemically synthesized
  source 1..20: mol_type = other DNA
tctccccttctatagatgag

SEQ ID NO: 59097 - DNA, 20 bp, synthetic construct
  misc_feature 1..20: note = chemically synthesized
  source 1..20: mol_type = other DNA
ctccccttctatagatgagg

SEQ ID NO: 59098 - DNA, 20 bp, synthetic construct
  misc_feature 1..20: note = chemically synthesized
  source 1..20: mol_type = other DNA
cttctatagatgaggaggtt

SEQ ID NO: 59099 - DNA, 20 bp, synthetic construct
  misc_feature 1..20: note = chemically synthesized
  source 1..20: mol_type = other DNA
ttctatagatgaggaggtta

SEQ ID NO: 59100 - DNA, 20 bp, synthetic construct
  misc_feature 1..20: note = chemically synthesized
  source 1..20: mol_type = other DNA
tagatgaggaggttaaggtc

SEQ ID NO: 59101 - DNA, 20 bp, synthetic construct
  misc_feature 1..20: note = chemically synthesized
  source 1..20: mol_type = other DNA
gatgaggaggttaaggtcca

SEQ ID NO: 59102 - DNA, 20 bp, synthetic construct
  misc_feature 1..20: note = chemically synthesized
  source 1..20: mol_type = other DNA
tgaggaggttaaggtccaga

SEQ ID NO: 59103 - DNA, 20 bp, synthetic construct
  misc_feature 1..20: note = chemically synthesized
  source 1..20: mol_type = other DNA
gaggaggttaaggtccagag

SEQ ID NO: 59104 - DNA, 20 bp, synthetic construct
  misc_feature 1..20: note = chemically synthesized
  source 1..20: mol_type = other DNA
aggaggttaaggtccagaga

SEQ ID NO: 59105 - DNA, 20 bp, synthetic construct
  misc_feature 1..20: note = chemically synthesized
  source 1..20: mol_type = other DNA
ggaggttaaggtccagagag

SEQ ID NO: 59106 - DNA, 20 bp, synthetic construct
  misc_feature 1..20: note = chemically synthesized
  source 1..20: mol_type = other DNA
ggttaaggtccagagagggg

SEQ ID NO: 59107 - DNA, 20 bp, synthetic construct
  misc_feature 1..20: note = chemically synthesized
  source 1..20: mol_type = other DNA
gttaaggtccagagaggggt

SEQ ID NO: 59108 - DNA, 20 bp, synthetic construct
  misc_feature 1..20: note = chemically synthesized
  source 1..20: mol_type = other DNA
ttaaggtccagagaggggtg

SEQ ID NO: 59109 - DNA, 20 bp, synthetic construct
  misc_feature 1..20: note = chemically synthesized
  source 1..20: mol_type = other DNA
aaggtccagagaggggtggg

SEQ ID NO: 59110 - DNA, 20 bp, synthetic construct
  misc_feature 1..20: note = chemically synthesized
  source 1..20: mol_type = other DNA
aggtccagagaggggtgggg

SEQ ID NO: 59111 - DNA, 20 bp, synthetic construct
  misc_feature 1..20: note = chemically synthesized
  source 1..20: mol_type = other DNA
agaggggtggggaggaacgc

SEQ ID NO: 59112 - DNA, 20 bp, synthetic construct
  misc_feature 1..20: note = chemically synthesized
  source 1..20: mol_type = other DNA
ctcacattctccatcccctc

SEQ ID NO: 59113 - DNA, 20 bp, synthetic construct
  misc_feature 1..20: note = chemically synthesized
  source 1..20: mol_type = other DNA
ccatcccctccagatatgac

SEQ ID NO: 59114 - DNA, 20 bp, synthetic construct
  misc_feature 1..20: note = chemically synthesized
  source 1..20: mol_type = other DNA
catcccctccagatatgacc

SEQ ID NO: 59115 - DNA, 20 bp, synthetic construct
  misc_feature 1..20: note = chemically synthesized
  source 1..20: mol_type = other DNA
cctccagatatgaccaggaa

SEQ ID NO: 59116 - DNA, 20 bp, synthetic construct
  misc_feature 1..20: note = chemically synthesized
  source 1..20: mol_type = other DNA
gaccaggaacagacctgtgc

SEQ ID NO: 59117 - DNA, 20 bp, synthetic construct
  misc_feature 1..20: note = chemically synthesized
  source 1..20: mol_type = other DNA
accaggaacagacctgtgcc

SEQ ID NO: 59118 - DNA, 20 bp, synthetic construct
  misc_feature 1..20: note = chemically synthesized
  source 1..20: mol_type = other DNA
aacagacctgtgccaggcct

SEQ ID NO: 59119 - DNA, 20 bp, synthetic construct
  misc_feature 1..20: note = chemically synthesized
  source 1..20: mol_type = other DNA
gcctcagccttacatcaaaa

SEQ ID NO: 59120 - DNA, 20 bp, synthetic construct
  misc_feature 1..20: note = chemically synthesized
  source 1..20: mol_type = other DNA
cctcagccttacatcaaaat

SEQ ID NO: 59121 - DNA, 20 bp, synthetic construct
  misc_feature 1..20: note = chemically synthesized
  source 1..20: mol_type = other DNA
atgggcctccccatgcaccg

SEQ ID NO: 59122 - DNA, 20 bp, synthetic construct
  misc_feature 1..20: note = chemically synthesized
  source 1..20: mol_type = other DNA
ccccatgcaccgtggacctc

SEQ ID NO: 59123 - DNA, 20 bp, synthetic construct
  misc_feature 1..20: note = chemically synthesized
  source 1..20: mol_type = other DNA
cccatgcaccgtggacctct

SEQ ID NO: 59124 - DNA, 20 bp, synthetic construct
  misc_feature 1..20: note = chemically synthesized
  source 1..20: mol_type = other DNA
acctctgggccctcctgtcc

SEQ ID NO: 59125 - DNA, 20 bp, synthetic construct
  misc_feature 1..20: note = chemically synthesized
  source 1..20: mol_type = other DNA
tctgggccctcctgtcccag

SEQ ID NO: 59126 - DNA, 20 bp, synthetic construct
  misc_feature 1..20: note = chemically synthesized
  source 1..20: mol_type = other DNA
tgggccctcctgtcccagtg

SEQ ID NO: 59127 - DNA, 20 bp, synthetic construct
  misc_feature 1..20: note = chemically synthesized
  source 1..20: mol_type = other DNA
gggccctcctgtcccagtgg

SEQ ID NO: 59128 - DNA, 20 bp, synthetic construct
  misc_feature 1..20: note = chemically synthesized
  source 1..20: mol_type = other DNA
cctcctgtcccagtggagga

SEQ ID NO: 59129 - DNA, 20 bp, synthetic construct
  misc_feature 1..20: note = chemically synthesized
  source 1..20: mol_type = other DNA
ctcctgtcccagtggaggac

SEQ ID NO: 59130 - DNA, 20 bp, synthetic construct
  misc_feature 1..20: note = chemically synthesized
  source 1..20: mol_type = other DNA
ctgtcccagtggaggacagg

SEQ ID NO: 59131 - DNA, 20 bp, synthetic construct
  misc_feature 1..20: note = chemically synthesized
  source 1..20: mol_type = other DNA
agtggaggacaggaagctgt

SEQ ID NO: 59132 - DNA, 20 bp, synthetic construct
  misc_feature 1..20: note = chemically synthesized
  source 1..20: mol_type = other DNA
gtggaggacaggaagctgtg

SEQ ID NO: 59133 - DNA, 20 bp, synthetic construct
  misc_feature 1..20: note = chemically synthesized
  source 1..20: mol_type = other DNA
tggaggacaggaagctgtga

SEQ ID NO: 59134 - DNA, 20 bp, synthetic construct
  misc_feature 1..20: note = chemically synthesized
  source 1..20: mol_type = other DNA
ggaggacaggaagctgtgag

SEQ ID NO: 59135 - DNA, 20 bp, synthetic construct
  misc_feature 1..20: note = chemically synthesized
  source 1..20: mol_type = other DNA
ctgtgaggggcactgtcacc

SEQ ID NO: 59136 - DNA, 20 bp, synthetic construct
  misc_feature 1..20: note = chemically synthesized
  source 1..20: mol_type = other DNA
tgtgaggggcactgtcaccc

SEQ ID NO: 59137 - DNA, 20 bp, synthetic construct
  misc_feature 1..20: note = chemically synthesized
  source 1..20: mol_type = other DNA
gtgaggggcactgtcaccca

SEQ ID NO: 59138 - DNA, 20 bp, synthetic construct
  misc_feature 1..20: note = chemically synthesized
  source 1..20: mol_type = other DNA
ggcactgtcacccagggctc

SEQ ID NO: 59139 - DNA, 20 bp, synthetic construct
  misc_feature 1..20: note = chemically synthesized
  source 1..20: mol_type = other DNA
ctgtcacccagggctcaagc

SEQ ID NO: 59140 - DNA, 20 bp, synthetic construct
  misc_feature 1..20: note = chemically synthesized
  source 1..20: mol_type = other DNA
cctgaataatcgctctgcac

SEQ ID NO: 59141 - DNA, 20 bp, synthetic construct
  misc_feature 1..20: note = chemically synthesized
  source 1..20: mol_type = other DNA
ctgaataatcgctctgcacc

SEQ ID NO: 59142 - DNA, 20 bp, synthetic construct
  misc_feature 1..20: note = chemically synthesized
  source 1..20: mol_type = other DNA
aatcgctctgcaccaggcca

SEQ ID NO: 59143 - DNA, 20 bp, synthetic construct
  misc_feature 1..20: note = chemically synthesized
  source 1..20: mol_type = other DNA
ctctgcaccaggccacggct

SEQ ID NO: 59144 - DNA, 20 bp, synthetic construct
  misc_feature 1..20: note = chemically synthesized
  source 1..20: mol_type = other DNA
caccaggccacggctaagct

SEQ ID NO: 59145 - DNA, 20 bp, synthetic construct
  misc_feature 1..20: note = chemically synthesized
  source 1..20: mol_type = other DNA
gctaagctcagtgcgtgatt

SEQ ID NO: 59146 - DNA, 20 bp, synthetic construct
  misc_feature 1..20: note = chemically synthesized
  source 1..20: mol_type = other DNA
attaagcctcataaccctcc

SEQ ID NO: 59147 - DNA, 20 bp, synthetic construct
  misc_feature 1..20: note = chemically synthesized
  source 1..20: mol_type = other DNA
ttaagcctcataaccctcca

SEQ ID NO: 59148 - DNA, 20 bp, synthetic construct
  misc_feature 1..20: note = chemically synthesized
  source 1..20: mol_type = other DNA
agcctcataaccctccaagg

SEQ ID NO: 59149 - DNA, 20 bp, synthetic construct
  misc_feature 1..20: note = chemically synthesized
  source 1..20: mol_type = other DNA
taaccctccaaggcagttac

SEQ ID NO: 59150 - DNA, 20 bp, synthetic construct
  misc_feature 1..20: note = chemically synthesized
  source 1..20: mol_type = other DNA
ctagtgtgattcccatttta

SEQ ID NO: 59151 - DNA, 20 bp, synthetic construct
  misc_feature 1..20: note = chemically synthesized
  source 1..20: mol_type = other DNA
gtgattcccattttacagat

SEQ ID NO: 59152 - DNA, 20 bp, synthetic construct
  misc_feature 1..20: note = chemically synthesized
  source 1..20: mol_type = other DNA
tgattcccattttacagatg

SEQ ID NO: 59153 - DNA, 20 bp, synthetic construct
  misc_feature 1..20: note = chemically synthesized
  source 1..20: mol_type = other DNA
ttcccattttacagatgagg

SEQ ID NO: 59154 - DNA, 20 bp, synthetic construct
  misc_feature 1..20: note = chemically synthesized
  source 1..20: mol_type = other DNA
cattttacagatgaggaaga

SEQ ID NO: 59155 - DNA, 20 bp, synthetic construct
  misc_feature 1..20: note = chemically synthesized
  source 1..20: mol_type = other DNA
attttacagatgaggaagat

SEQ ID NO: 59156 - DNA, 20 bp, synthetic construct
  misc_feature 1..20: note = chemically synthesized
  source 1..20: mol_type = other DNA
ttttacagatgaggaagatg

SEQ ID NO: 59157 - DNA, 20 bp, synthetic construct
  misc_feature 1..20: note = chemically synthesized
  source 1..20: mol_type = other DNA
acagatgaggaagatgggga

SEQ ID NO: 59158 - DNA, 20 bp, synthetic construct
  misc_feature 1..20: note = chemically synthesized
  source 1..20: mol_type = other DNA
agatgaggaagatggggaca

SEQ ID NO: 59159 - DNA, 20 bp, synthetic construct
  misc_feature 1..20: note = chemically synthesized
  source 1..20: mol_type = other DNA
atgaggaagatggggacaga

SEQ ID NO: 59160 - DNA, 20 bp, synthetic construct
  misc_feature 1..20: note = chemically synthesized
  source 1..20: mol_type = other DNA
tgaggaagatggggacagag

SEQ ID NO: 59161 - DNA, 20 bp, synthetic construct
  misc_feature 1..20: note = chemically synthesized
  source 1..20: mol_type = other DNA
gggacagagaggtgaataac

SEQ ID NO: 59162 - DNA, 20 bp, synthetic construct
  misc_feature 1..20: note = chemically synthesized
  source 1..20: mol_type = other DNA
atcacacaccatccataatt

SEQ ID NO: 59163 - DNA, 20 bp, synthetic construct
  misc_feature 1..20: note = chemically synthesized
  source 1..20: mol_type = other DNA
tcacacaccatccataattc

SEQ ID NO: 59164 - DNA, 20 bp, synthetic construct
  misc_feature 1..20: note = chemically synthesized
  source 1..20: mol_type = other DNA
caccatccataattcgggct

SEQ ID NO: 59165 - DNA, 20 bp, synthetic construct
  misc_feature 1..20: note = chemically synthesized
  source 1..20: mol_type = other DNA
accatccataattcgggctc

SEQ ID NO: 59166 - DNA, 20 bp, synthetic construct
  misc_feature 1..20: note = chemically synthesized
  source 1..20: mol_type = other DNA
ataattcgggctcaggcacc

SEQ ID NO: 59167 - DNA, 20 bp, synthetic construct
  misc_feature 1..20: note = chemically synthesized
  source 1..20: mol_type = other DNA
cgggctcaggcacctggctc

SEQ ID NO: 59168 - DNA, 20 bp, synthetic construct
  misc_feature 1..20: note = chemically synthesized
  source 1..20: mol_type = other DNA
agtccccaaactcttgaacc

SEQ ID NO: 59169 - DNA, 20 bp, synthetic construct
  misc_feature 1..20: note = chemically synthesized
  source 1..20: mol_type = other DNA
caaactcttgaacctggccc

SEQ ID NO: 59170 - DNA, 20 bp, synthetic construct
  misc_feature 1..20: note = chemically synthesized
  source 1..20: mol_type = other DNA
cctagtgtcactgtttctct

SEQ ID NO: 59171 - DNA, 20 bp, synthetic construct
  misc_feature 1..20: note = chemically synthesized
  source 1..20: mol_type = other DNA
ctagtgtcactgtttctctt

SEQ ID NO: 59172 - DNA, 20 bp, synthetic construct
  misc_feature 1..20: note = chemically synthesized
  source 1..20: mol_type = other DNA
tcactgtttctcttgggtct

SEQ ID NO: 59173 - DNA, 20 bp, synthetic construct
  misc_feature 1..20: note = chemically synthesized
  source 1..20: mol_type = other DNA
cactgtttctcttgggtctc

SEQ ID NO: 59174 - DNA, 20 bp, synthetic construct
  misc_feature 1..20: note = chemically synthesized
  source 1..20: mol_type = other DNA
ttctcttgggtctcaggcgc

SEQ ID NO: 59175 - DNA, 20 bp, synthetic construct
  misc_feature 1..20: note = chemically synthesized
  source 1..20: mol_type = other DNA
cttgggtctcaggcgctgga

SEQ ID NO: 59176 - DNA, 20 bp, synthetic construct
  misc_feature 1..20: note = chemically synthesized
  source 1..20: mol_type = other DNA
ttgggtctcaggcgctggat

SEQ ID NO: 59177 - DNA, 20 bp, synthetic construct
  misc_feature 1..20: note = chemically synthesized
  source 1..20: mol_type = other DNA
tgggtctcaggcgctggatg

SEQ ID NO: 59178 - DNA, 20 bp, synthetic construct
  misc_feature 1..20: note = chemically synthesized
  source 1..20: mol_type = other DNA
ctcaggcgctggatggggaa

SEQ ID NO: 59179 - DNA, 20 bp, synthetic construct
  misc_feature 1..20: note = chemically synthesized
  source 1..20: mol_type = other DNA
tcaggcgctggatggggaac

SEQ ID NO: 59180 - DNA, 20 bp, synthetic construct
  misc_feature 1..20: note = chemically synthesized
  source 1..20: mol_type = other DNA
tggatggggaacaggaaacc

SEQ ID NO: 59181 - DNA, 20 bp, synthetic construct
  misc_feature 1..20: note = chemically synthesized
  source 1..20: mol_type = other DNA
ggatggggaacaggaaacct

SEQ ID NO: 59182 - DNA, 20 bp, synthetic construct
  misc_feature 1..20: note = chemically synthesized
  source 1..20: mol_type = other DNA
ggggaacaggaaacctgggc

SEQ ID NO: 59183 - DNA, 20 bp, synthetic construct
  misc_feature 1..20: note = chemically synthesized
  source 1..20: mol_type = other DNA
aggaaacctgggctggactt

SEQ ID NO: 59184 - DNA, 20 bp, synthetic construct
  misc_feature 1..20: note = chemically synthesized
  source 1..20: mol_type = other DNA
ggaaacctgggctggacttg

SEQ ID NO: 59185 - DNA, 20 bp, synthetic construct
  misc_feature 1..20: note = chemically synthesized
  source 1..20: mol_type = other DNA
cttgaggcctctctgatgct

SEQ ID NO: 59186 - DNA, 20 bp, synthetic construct
  misc_feature 1..20: note = chemically synthesized
  source 1..20: mol_type = other DNA
tctctgatgctcggtgactt

SEQ ID NO: 59187 - DNA, 20 bp, synthetic construct
  misc_feature 1..20: note = chemically synthesized
  source 1..20: mol_type = other DNA
tgatgctcggtgacttcaga

SEQ ID NO: 59188 - DNA, 20 bp, synthetic construct
  misc_feature 1..20: note = chemically synthesized
  source 1..20: mol_type = other DNA
gctcaacctctctgttctct

SEQ ID NO: 59189 - DNA, 20 bp, synthetic construct
  misc_feature 1..20: note = chemically synthesized
  source 1..20: mol_type = other DNA
ctcaacctctctgttctctt

SEQ ID NO: 59190 - DNA, 20 bp, synthetic construct
  misc_feature 1..20: note = chemically synthesized
  source 1..20: mol_type = other DNA
ccacccgaccttgatctctg

SEQ ID NO: 59191 - DNA, 20 bp, synthetic construct
  misc_feature 1..20: note = chemically synthesized
  source 1..20: mol_type = other DNA
gaccttgatctctgaagtgt

SEQ ID NO: 59192 - DNA, 20 bp, synthetic construct
  misc_feature 1..20: note = chemically synthesized
  source 1..20: mol_type = other DNA
cttgatctctgaagtgttgg

SEQ ID NO: 59193 - DNA, 20 bp, synthetic construct
  misc_feature 1..20: note = chemically synthesized
  source 1..20: mol_type = other DNA
ttgatctctgaagtgttgga

SEQ ID NO: 59194 - DNA, 20 bp, synthetic construct
  misc_feature 1..20: note = chemically synthesized
  source 1..20: mol_type = other DNA
gatttaatttttcctgcact

SEQ ID NO: 59195 - DNA, 20 bp, synthetic construct
  misc_feature 1..20: note = chemically synthesized
  source 1..20: mol_type = other DNA
atttttcctgcactgagttt

SEQ ID NO: 59196 - DNA, 20 bp, synthetic construct
  misc_feature 1..20: note = chemically synthesized
  source 1..20: mol_type = other DNA
ttttcctgcactgagttttg

SEQ ID NO: 59197 - DNA, 20 bp, synthetic construct
  misc_feature 1..20: note = chemically synthesized
  source 1..20: mol_type = other DNA
cctgcactgagttttggaga

SEQ ID NO: 59198 - DNA, 20 bp, synthetic construct
  misc_feature 1..20: note = chemically synthesized
  source 1..20: mol_type = other DNA
ctgcactgagttttggagac

SEQ ID NO: 59199 - DNA, 20 bp, synthetic construct
  misc_feature 1..20: note = chemically synthesized
  source 1..20: mol_type = other DNA
agttttggagacaggtcaaa

SEQ ID NO: 59200 - DNA, 20 bp, synthetic construct
  misc_feature 1..20: note = chemically synthesized
  source 1..20: mol_type = other DNA
gacaggtcaaaaagatgacc

SEQ ID NO: 59201 - DNA, 20 bp, synthetic construct
  misc_feature 1..20: note = chemically synthesized
  source 1..20: mol_type = other DNA
acaggtcaaaaagatgacca

SEQ ID NO: 59202 - DNA, 20 bp, synthetic construct
  misc_feature 1..20: note = chemically synthesized
  source 1..20: mol_type = other DNA
tcaaaaagatgaccaaggcc

SEQ ID NO: 59203 - DNA, 20 bp, synthetic construct
  misc_feature 1..20: note = chemically synthesized
  source 1..20: mol_type = other DNA
caaaaagatgaccaaggcca

SEQ ID NO: 59204 - DNA, 20 bp, synthetic construct
  misc_feature 1..20: note = chemically synthesized
  source 1..20: mol_type = other DNA
aaagatgaccaaggccaagg

SEQ ID NO: 59205 - DNA, 20 bp, synthetic construct
  misc_feature 1..20: note = chemically synthesized
  source 1..20: mol_type = other DNA
atgaccaaggccaaggtggc

SEQ ID NO: 59206 - DNA, 20 bp, synthetic construct
  misc_feature 1..20: note = chemically synthesized
  source 1..20: mol_type = other DNA
ccaaggtggccagtttccta

SEQ ID NO: 59207 - DNA, 20 bp, synthetic construct
  misc_feature 1..20: note = chemically synthesized
  source 1..20: mol_type = other DNA
ttcctatagaacgcctctaa

SEQ ID NO: 59208 - DNA, 20 bp, synthetic construct
  misc_feature 1..20: note = chemically synthesized
  source 1..20: mol_type = other DNA
gaacgcctctaaaagacctg

SEQ ID NO: 59209 - DNA, 20 bp, synthetic construct
  misc_feature 1..20: note = chemically synthesized
  source 1..20: mol_type = other DNA
ctctaaaagacctgcagcaa

SEQ ID NO: 59210 - DNA, 20 bp, synthetic construct
  misc_feature 1..20: note = chemically synthesized
  source 1..20: mol_type = other DNA
taaaagacctgcagcaatag

SEQ ID NO: 59211 - DNA, 20 bp, synthetic construct
  misc_feature 1..20: note = chemically synthesized
  source 1..20: mol_type = other DNA
agacctgcagcaatagcagc

SEQ ID NO: 59212 - DNA, 20 bp, synthetic construct
  misc_feature 1..20: note = chemically synthesized
  source 1..20: mol_type = other DNA
gcagcaatagcagcaagaac

SEQ ID NO: 59213 - DNA, 20 bp, synthetic construct
  misc_feature 1..20: note = chemically synthesized
  source 1..20: mol_type = other DNA
cagcaagaactggtattctc

SEQ ID NO: 59214 - DNA, 20 bp, synthetic construct
  misc_feature 1..20: note = chemically synthesized
  source 1..20: mol_type = other DNA
attctcgagaacttgctgcg

SEQ ID NO: 59215 - DNA, 20 bp, synthetic construct
  misc_feature 1..20: note = chemically synthesized
  source 1..20: mol_type = other DNA
ctcgagaacttgctgcgcag

SEQ ID NO: 59216 - DNA, 20 bp, synthetic construct
  misc_feature 1..20: note = chemically synthesized
  source 1..20: mol_type = other DNA
tcgagaacttgctgcgcagc

SEQ ID NO: 59217 - DNA, 20 bp, synthetic construct
  misc_feature 1..20: note = chemically synthesized
  source 1..20: mol_type = other DNA
gctgcgcagcaggcacttct

SEQ ID NO: 59218 - DNA, 20 bp, synthetic construct
  misc_feature 1..20: note = chemically synthesized
  source 1..20: mol_type = other DNA
atgtgtatttaatttcacaa

SEQ ID NO: 59219 - DNA, 20 bp, synthetic construct
  misc_feature 1..20: note = chemically synthesized
  source 1..20: mol_type = other DNA
ttcacaatagctctatgaca

SEQ ID NO: 59220 - DNA, 20 bp, synthetic construct
  misc_feature 1..20: note = chemically synthesized
  source 1..20: mol_type = other DNA
aagtccacctttctcatctc

SEQ ID NO: 59221 - DNA, 20 bp, synthetic construct
  misc_feature 1..20: note = chemically synthesized
  source 1..20: mol_type = other DNA
agtccacctttctcatctcc

SEQ ID NO: 59222 - DNA, 20 bp, synthetic construct
  misc_feature 1..20: note = chemically synthesized
  source 1..20: mol_type = other DNA
tttctcatctccaggaaact

SEQ ID NO: 59223 - DNA, 20 bp, synthetic construct
  misc_feature 1..20: note = chemically synthesized
  source 1..20: mol_type = other DNA
ttctcatctccaggaaactg

SEQ ID NO: 59224 - DNA, 20 bp, synthetic construct
  misc_feature 1..20: note = chemically synthesized
  source 1..20: mol_type = other DNA
atctccaggaaactgaggtt

SEQ ID NO: 59225 - DNA, 20 bp, synthetic construct
  misc_feature 1..20: note = chemically synthesized
  source 1..20: mol_type = other DNA
ctccaggaaactgaggttca

SEQ ID NO: 59226 - DNA, 20 bp, synthetic construct
  misc_feature 1..20: note = chemically synthesized
  source 1..20: mol_type = other DNA
ccaggaaactgaggttcaga

SEQ ID NO: 59227 - DNA, 20 bp, synthetic construct
  misc_feature 1..20: note = chemically synthesized
  source 1..20: mol_type = other DNA
caggaaactgaggttcagag

SEQ ID NO: 59228 - DNA, 20 bp, synthetic construct
  misc_feature 1..20: note = chemically synthesized
  source 1..20: mol_type = other DNA
aactgaggttcagagaggtt

SEQ ID NO: 59229 - DNA, 20 bp, synthetic construct
  misc_feature 1..20: note = chemically synthesized
  source 1..20: mol_type = other DNA
agaggttaagtaacttgtcc

SEQ ID NO: 59230 - DNA, 20 bp, synthetic construct
  misc_feature 1..20: note = chemically synthesized
  source 1..20: mol_type = other DNA
gaggttaagtaacttgtcca

SEQ ID NO: 59231 - DNA, 20 bp, synthetic construct
  misc_feature 1..20: note = chemically synthesized
  source 1..20: mol_type = other DNA
gtaacttgtccaaggtcaca

SEQ ID NO: 59232 - DNA, 20 bp, synthetic construct
  misc_feature 1..20: note = chemically synthesized
  source 1..20: mol_type = other DNA
gtccaaggtcacacagctaa

SEQ ID NO: 59233 - DNA, 20 bp, synthetic construct
  misc_feature 1..20: note = chemically synthesized
  source 1..20: mol_type = other DNA
aaggtcacacagctaatagc

SEQ ID NO: 59234 - DNA, 20 bp, synthetic construct
  misc_feature 1..20: note = chemically synthesized
  source 1..20: mol_type = other DNA
cagctaatagcaagttgacg

SEQ ID NO: 59235 - DNA, 20 bp, synthetic construct
  misc_feature 1..20: note = chemically synthesized
  source 1..20: mol_type = other DNA
gctaatagcaagttgacgtg

SEQ ID NO: 59236 - DNA, 20 bp, synthetic construct
  misc_feature 1..20: note = chemically synthesized
  source 1..20: mol_type = other DNA
caagttgacgtggagcaatc

SEQ ID NO: 59237 - DNA, 20 bp, synthetic construct
  misc_feature 1..20: note = chemically synthesized
  source 1..20: mol_type = other DNA
gacgtggagcaatctggcct

SEQ ID NO: 59238 - DNA, 20 bp, synthetic construct
  misc_feature 1..20: note = chemically synthesized
  source 1..20: mol_type = other DNA
cgtggagcaatctggcctca

SEQ ID NO: 59239 - DNA, 20 bp, synthetic construct
  misc_feature 1..20: note = chemically synthesized
  source 1..20: mol_type = other DNA
ggcctcagagcctttaattt

SEQ ID NO: 59240 - DNA, 20 bp, synthetic construct
  misc_feature 1..20: note = chemically synthesized
  source 1..20: mol_type = other DNA
agagcctttaattttagcca

SEQ ID NO: 59241 - DNA, 20 bp, synthetic construct
  misc_feature 1..20: note = chemically synthesized
  source 1..20: mol_type = other DNA
ctgatgctcccctcttcatt

SEQ ID NO: 59242 - DNA, 20 bp, synthetic construct
  misc_feature 1..20: note = chemically synthesized
  source 1..20: mol_type = other DNA
tgctcccctcttcatttagc

SEQ ID NO: 59243 - DNA, 20 bp, synthetic construct
  misc_feature 1..20: note = chemically synthesized
  source 1..20: mol_type = other DNA
gctcccctcttcatttagcc

SEQ ID NO: 59244 - DNA, 20 bp, synthetic construct
  misc_feature 1..20: note = chemically synthesized
  source 1..20: mol_type = other DNA
atttagccaggctgcctctg

SEQ ID NO: 59245 - DNA, 20 bp, synthetic construct
  misc_feature 1..20: note = chemically synthesized
  source 1..20: mol_type = other DNA
cctctgaagttttctgattc

SEQ ID NO: 59246 - DNA, 20 bp, synthetic construct
  misc_feature 1..20: note = chemically synthesized
  source 1..20: mol_type = other DNA
gttttctgattcaagacttc

SEQ ID NO: 59247 - DNA, 20 bp, synthetic construct
  misc_feature 1..20: note = chemically synthesized
  source 1..20: mol_type = other DNA
tgattcaagacttctggctt

SEQ ID NO: 59248 - DNA, 20 bp, synthetic construct
  misc_feature 1..20: note = chemically synthesized
  source 1..20: mol_type = other DNA
tctggcttcagctttgtaca

SEQ ID NO: 59249 - DNA, 20 bp, synthetic construct
  misc_feature 1..20: note = chemically synthesized
  source 1..20: mol_type = other DNA
tggcttcagctttgtacaca

SEQ ID NO: 59250 - DNA, 20 bp, synthetic construct
  misc_feature 1..20: note = chemically synthesized
  source 1..20: mol_type = other DNA
acacagagatgattcaatgt

SEQ ID NO: 59251 - DNA, 20 bp, synthetic construct
  misc_feature 1..20: note = chemically synthesized
  source 1..20: mol_type = other DNA
cacagagatgattcaatgtc

SEQ ID NO: 59252 - DNA, 20 bp, synthetic construct
  misc_feature 1..20: note = chemically synthesized
  source 1..20: mol_type = other DNA
gatgattcaatgtcaggttt

SEQ ID NO: 59253 - DNA, 20 bp, synthetic construct
  misc_feature 1..20: note = chemically synthesized
  source 1..20: mol_type = other DNA
tgattcaatgtcaggttttg

SEQ ID NO: 59254 - DNA, 20 bp, synthetic construct
  misc_feature 1..20: note = chemically synthesized
  source 1..20: mol_type = other DNA
gagtgaaatctgtttaatcc

SEQ ID NO: 59255 - DNA, 20 bp, synthetic construct
  misc_feature 1..20: note = chemically synthesized
  source 1..20: mol_type = other DNA
ttaatcccagacaaaacatt

SEQ ID NO: 59256 - DNA, 20 bp, synthetic construct
  misc_feature 1..20: note = chemically synthesized
  source 1..20: mol_type = other DNA
taatcccagacaaaacattt

SEQ ID NO: 59257 - DNA, 20 bp, synthetic construct
  misc_feature 1..20: note = chemically synthesized
  source 1..20: mol_type = other DNA
aaacatttaggattacatct

SEQ ID NO: 59258 - DNA, 20 bp, synthetic construct
  misc_feature 1..20: note = chemically synthesized
  source 1..20: mol_type = other DNA
ggattacatctcagttttgt

SEQ ID NO: 59259 - DNA, 20 bp, synthetic construct
  misc_feature 1..20: note = chemically synthesized
  source 1..20: mol_type = other DNA
tacatctcagttttgtaagc

SEQ ID NO: 59260 - DNA, 20 bp, synthetic construct
  misc_feature 1..20: note = chemically synthesized
  source 1..20: mol_type = other DNA
atctcagttttgtaagcaag

SEQ ID NO: 59261 - DNA, 20 bp, synthetic construct
  misc_feature 1..20: note = chemically synthesized
  source 1..20: mol_type = other DNA
gcaagtagctctgtgatttt

SEQ ID NO: 59262 - DNA, 20 bp, synthetic construct
  misc_feature 1..20: note = chemically synthesized
  source 1..20: mol_type = other DNA
gtagctctgtgatttttagt

SEQ ID NO: 59263 - DNA, 20 bp, synthetic construct
  misc_feature 1..20: note = chemically synthesized
  source 1..20: mol_type = other DNA
gtgagttatttaatgctctt

SEQ ID NO: 59264 - DNA, 20 bp, synthetic construct
  misc_feature 1..20: note = chemically synthesized
  source 1..20: mol_type = other DNA
tgagttatttaatgctcttt

SEQ ID NO: 59265 - DNA, 20 bp, synthetic construct
  misc_feature 1..20: note = chemically synthesized
  source 1..20: mol_type = other DNA
gagttatttaatgctctttg

SEQ ID NO: 59266 - DNA, 20 bp, synthetic construct
  misc_feature 1..20: note = chemically synthesized
  source 1..20: mol_type = other DNA
caatttttctatctataaaa

SEQ ID NO: 59267 - DNA, 20 bp, synthetic construct
  misc_feature 1..20: note = chemically synthesized
  source 1..20: mol_type = other DNA
aatttttctatctataaaat

SEQ ID NO: 59268 - DNA, 20 bp, synthetic construct
  misc_feature 1..20: note = chemically synthesized
  source 1..20: mol_type = other DNA
atttttctatctataaaata

SEQ ID NO: 59269 - DNA, 20 bp, synthetic construct
  misc_feature 1..20: note = chemically synthesized
  source 1..20: mol_type = other DNA
ggctaataatttgcacctta

SEQ ID NO: 59270 - DNA, 20 bp, synthetic construct
  misc_feature 1..20: note = chemically synthesized
  source 1..20: mol_type = other DNA
gctaataatttgcaccttat

SEQ ID NO: 59271 - DNA, 20 bp, synthetic construct
  misc_feature 1..20: note = chemically synthesized
  source 1..20: mol_type = other DNA
ctaataatttgcaccttata

SEQ ID NO: 59272 - DNA, 20 bp, synthetic construct
  misc_feature 1..20: note = chemically synthesized
  source 1..20: mol_type = other DNA
taatttgcaccttatagggt

SEQ ID NO: 59273 - DNA, 20 bp, synthetic construct
  misc_feature 1..20: note = chemically synthesized
  source 1..20: mol_type = other DNA
caccttatagggtaagcttt

SEQ ID NO: 59274 - DNA, 20 bp, synthetic construct
  misc_feature 1..20: note = chemically synthesized
  source 1..20: mol_type = other DNA
accttatagggtaagctttg

SEQ ID NO: 59275 - DNA, 20 bp, synthetic construct
  misc_feature 1..20: note = chemically synthesized
  source 1..20: mol_type = other DNA
tatagggtaagctttgagga

SEQ ID NO: 59276 - DNA, 20 bp, synthetic construct
  misc_feature 1..20: note = chemically synthesized
  source 1..20: mol_type = other DNA
ggtaagctttgaggacagat

SEQ ID NO: 59277 - DNA, 20 bp, synthetic construct
  misc_feature 1..20: note = chemically synthesized
  source 1..20: mol_type = other DNA
tgaggacagattagatgata

SEQ ID NO: 59278 - DNA, 20 bp, synthetic construct
  misc_feature 1..20: note = chemically synthesized
  source 1..20: mol_type = other DNA
atacggtgcctgtaaaacac

SEQ ID NO: 59279 - DNA, 20 bp, synthetic construct
  misc_feature 1..20: note = chemically synthesized
  source 1..20: mol_type = other DNA
tacggtgcctgtaaaacacc

SEQ ID NO: 59280 - DNA, 20 bp, synthetic construct
  misc_feature 1..20: note = chemically synthesized
  source 1..20: mol_type = other DNA
gcctgtaaaacaccaggtgt

SEQ ID NO: 59281 - DNA, 20 bp, synthetic construct
  misc_feature 1..20: note = chemically synthesized
  source 1..20: mol_type = other DNA
gtaaaacaccaggtgttagt

SEQ ID NO: 59282 - DNA, 20 bp, synthetic construct
  misc_feature 1..20: note = chemically synthesized
  source 1..20: mol_type = other DNA
acaccaggtgttagtaagtg

SEQ ID NO: 59283 - DNA, 20 bp, synthetic construct
  misc_feature 1..20: note = chemically synthesized
  source 1..20: mol_type = other DNA
gttagtaagtgtggcaatga

SEQ ID NO: 59284 - DNA, 20 bp, synthetic construct
  misc_feature 1..20: note = chemically synthesized
  source 1..20: mol_type = other DNA
gtggcaatgatggtgacgct

SEQ ID NO: 59285 - DNA, 20 bp, synthetic construct
  misc_feature 1..20: note = chemically synthesized
  source 1..20: mol_type = other DNA
tggcaatgatggtgacgctg

SEQ ID NO: 59286 - DNA, 20 bp, synthetic construct
  misc_feature 1..20: note = chemically synthesized
  source 1..20: mol_type = other DNA
cgctgaggctgatgtttgct

SEQ ID NO: 59287 - DNA, 20 bp, synthetic construct
  misc_feature 1..20: note = chemically synthesized
  source 1..20: mol_type = other DNA
aggctgatgtttgcttagca

SEQ ID NO: 59288 - DNA, 20 bp, synthetic construct
  misc_feature 1..20: note = chemically synthesized
  source 1..20: mol_type = other DNA
ggctgatgtttgcttagcat

SEQ ID NO: 59289 - DNA, 20 bp, synthetic construct
  misc_feature 1..20: note = chemically synthesized
  source 1..20: mol_type = other DNA
gctgatgtttgcttagcata

SEQ ID NO: 59290 - DNA, 20 bp, synthetic construct
  misc_feature 1..20: note = chemically synthesized
  source 1..20: mol_type = other DNA
atgtttgcttagcatagggt

SEQ ID NO: 59291 - DNA, 20 bp, synthetic construct
  misc_feature 1..20: note = chemically synthesized
  source 1..20: mol_type = other DNA
tgtttgcttagcatagggtt

SEQ ID NO: 59292 - DNA, 20 bp, synthetic construct
  misc_feature 1..20: note = chemically synthesized
  source 1..20: mol_type = other DNA
ttgcttagcatagggttagg

SEQ ID NO: 59293 - DNA, 20 bp, synthetic construct
  misc_feature 1..20: note = chemically synthesized
  source 1..20: mol_type = other DNA
ttagcatagggttaggcagc

SEQ ID NO: 59294 - DNA, 20 bp, synthetic construct
  misc_feature 1..20: note = chemically synthesized
  source 1..20: mol_type = other DNA
gcatagggttaggcagctgg

SEQ ID NO: 59295 - DNA, 20 bp, synthetic construct
  misc_feature 1..20: note = chemically synthesized
  source 1..20: mol_type = other DNA
catagggttaggcagctggc

SEQ ID NO: 59296 - DNA, 20 bp, synthetic construct
  misc_feature 1..20: note = chemically synthesized
  source 1..20: mol_type = other DNA
agggttaggcagctggcagg

SEQ ID NO: 59297 - DNA, 20 bp, synthetic construct
  misc_feature 1..20: note = chemically synthesized
  source 1..20: mol_type = other DNA
ggcagctggcaggcagtaaa

SEQ ID NO: 59298 - DNA, 20 bp, synthetic construct
  misc_feature 1..20: note = chemically synthesized
  source 1..20: mol_type = other DNA
gctggcaggcagtaaacagt

SEQ ID NO: 59299 - DNA, 20 bp, synthetic construct
  misc_feature 1..20: note = chemically synthesized
  source 1..20: mol_type = other DNA
taaacagttggataatttaa

SEQ ID NO: 59300 - DNA, 20 bp, synthetic construct
  misc_feature 1..20: note = chemically synthesized
  source 1..20: mol_type = other DNA
aatggaaaatttgccaaact

SEQ ID NO: 59301 - DNA, 20 bp, synthetic construct
  misc_feature 1..20: note = chemically synthesized
  source 1..20: mol_type = other DNA
ctcagatgctgttcactgct

SEQ ID NO: 59302 - DNA, 20 bp, synthetic construct
  misc_feature 1..20: note = chemically synthesized
  source 1..20: mol_type = other DNA
agatgctgttcactgctgag

SEQ ID NO: 59303 - DNA, 20 bp, synthetic construct
  misc_feature 1..20: note = chemically synthesized
  source 1..20: mol_type = other DNA
gatgctgttcactgctgagc

SEQ ID NO: 59304 - DNA, 20 bp, synthetic construct
  misc_feature 1..20: note = chemically synthesized
  source 1..20: mol_type = other DNA
tgctgttcactgctgagcag

SEQ ID NO: 59305 - DNA, 20 bp, synthetic construct
  misc_feature 1..20: note = chemically synthesized
  source 1..20: mol_type = other DNA
ggagccccttcctgctgaaa

SEQ ID NO: 59306 - DNA, 20 bp, synthetic construct
  misc_feature 1..20: note = chemically synthesized
  source 1..20: mol_type = other DNA
ccttcctgctgaaatggtcc

SEQ ID NO: 59307 - DNA, 20 bp, synthetic construct
  misc_feature 1..20: note = chemically synthesized
  source 1..20: mol_type = other DNA
cttcctgctgaaatggtcct

SEQ ID NO: 59308 - DNA, 20 bp, synthetic construct
  misc_feature 1..20: note = chemically synthesized
  source 1..20: mol_type = other DNA
ttcctgctgaaatggtcctg

SEQ ID NO: 59309 - DNA, 20 bp, synthetic construct
  misc_feature 1..20: note = chemically synthesized
  source 1..20: mol_type = other DNA
cctgctgaaatggtcctggg

SEQ ID NO: 59310 - DNA, 20 bp, synthetic construct
  misc_feature 1..20: note = chemically synthesized
  source 1..20: mol_type = other DNA
tgaaatggtcctggggagtg

SEQ ID NO: 59311 - DNA, 20 bp, synthetic construct
  misc_feature 1..20: note = chemically synthesized
  source 1..20: mol_type = other DNA
aatggtcctggggagtgcag

SEQ ID NO: 59312 - DNA, 20 bp, synthetic construct
  misc_feature 1..20: note = chemically synthesized
  source 1..20: mol_type = other DNA
atggtcctggggagtgcagc

SEQ ID NO: 59313 - DNA, 20 bp, synthetic construct
  misc_feature 1..20: note = chemically synthesized
  source 1..20: mol_type = other DNA
ggggagtgcagcaggctctc

SEQ ID NO: 59314 - DNA, 20 bp, synthetic construct
  misc_feature 1..20: note = chemically synthesized
  source 1..20: mol_type = other DNA
gggagtgcagcaggctctcc

SEQ ID NO: 59315 - DNA, 20 bp, synthetic construct
  misc_feature 1..20: note = chemically synthesized
  source 1..20: mol_type = other DNA
agtgcagcaggctctccggg

SEQ ID NO: 59316 - DNA, 20 bp, synthetic construct
  misc_feature 1..20: note = chemically synthesized
  source 1..20: mol_type = other DNA
ggaagaaatctaccatctct

SEQ ID NO: 59317 - DNA, 20 bp, synthetic construct
  misc_feature 1..20: note = chemically synthesized
  source 1..20: mol_type = other DNA
gaagaaatctaccatctctc

SEQ ID NO: 59318 - DNA, 20 bp, synthetic construct
  misc_feature 1..20: note = chemically synthesized
  source 1..20: mol_type = other DNA
gaaatctaccatctctcggg

SEQ ID NO: 59319 - DNA, 20 bp, synthetic construct
  misc_feature 1..20: note = chemically synthesized
  source 1..20: mol_type = other DNA
aaatctaccatctctcgggc

SEQ ID NO: 59320 - DNA, 20 bp, synthetic construct
  misc_feature 1..20: note = chemically synthesized
  source 1..20: mol_type = other DNA
atctaccatctctcgggcag

SEQ ID NO: 59321 - DNA, 20 bp, synthetic construct
  misc_feature 1..20: note = chemically synthesized
  source 1..20: mol_type = other DNA
gcaggagctcaacctgtgtg

SEQ ID NO: 59322 - DNA, 20 bp, synthetic construct
  misc_feature 1..20: note = chemically synthesized
  source 1..20: mol_type = other DNA
caggagctcaacctgtgtgc

SEQ ID NO: 59323 - DNA, 20 bp, synthetic construct
  misc_feature 1..20: note = chemically synthesized
  source 1..20: mol_type = other DNA
gctcaacctgtgtgcaggta

SEQ ID NO: 59324 - DNA, 20 bp, synthetic construct
  misc_feature 1..20: note = chemically synthesized
  source 1..20: mol_type = other DNA
ctcaacctgtgtgcaggtac

SEQ ID NO: 59325 - DNA, 20 bp, synthetic construct
  misc_feature 1..20: note = chemically synthesized
  source 1..20: mol_type = other DNA
tcaacctgtgtgcaggtaca

SEQ ID NO: 59326 - DNA, 20 bp, synthetic construct
  misc_feature 1..20: note = chemically synthesized
  source 1..20: mol_type = other DNA
aacctgtgtgcaggtacagg

SEQ ID NO: 59327 - DNA, 20 bp, synthetic construct
  misc_feature 1..20: note = chemically synthesized
  source 1..20: mol_type = other DNA
acctgtgtgcaggtacaggg

SEQ ID NO: 59328 - DNA, 20 bp, synthetic construct
  misc_feature 1..20: note = chemically synthesized
  source 1..20: mol_type = other DNA
cctgtgtgcaggtacaggga

SEQ ID NO: 59329 - DNA, 20 bp, synthetic construct
  misc_feature 1..20: note = chemically synthesized
  source 1..20: mol_type = other DNA
acagggagggcttcctcacc

SEQ ID NO: 59330 - DNA, 20 bp, synthetic construct
  misc_feature 1..20: note = chemically synthesized
  source 1..20: mol_type = other DNA
tgcccactcatgcattacgt

SEQ ID NO: 59331 - DNA, 20 bp, synthetic construct
  misc_feature 1..20: note = chemically synthesized
  source 1..20: mol_type = other DNA
ttattcctcatccctgtcca

SEQ ID NO: 59332 - DNA, 20 bp, synthetic construct
  misc_feature 1..20: note = chemically synthesized
  source 1..20: mol_type = other DNA
tattcctcatccctgtccaa

SEQ ID NO: 59333 - DNA, 20 bp, synthetic construct
  misc_feature 1..20: note = chemically synthesized
  source 1..20: mol_type = other DNA
ggattcttttctccattgta

SEQ ID NO: 59334 - DNA, 20 bp, synthetic construct
  misc_feature 1..20: note = chemically synthesized
  source 1..20: mol_type = other DNA
ttctccattgtacagctatg

SEQ ID NO: 59335 - DNA, 20 bp, synthetic construct
  misc_feature 1..20: note = chemically synthesized
  source 1..20: mol_type = other DNA
ccattgtacagctatgaagc

SEQ ID NO: 59336 - DNA, 20 bp, synthetic construct
  misc_feature 1..20: note = chemically synthesized
  source 1..20: mol_type = other DNA
agctatgaagctagtgctca

SEQ ID NO: 59337 - DNA, 20 bp, synthetic construct
  misc_feature 1..20: note = chemically synthesized
  source 1..20: mol_type = other DNA
tatgaagctagtgctcaaag

SEQ ID NO: 59338 - DNA, 20 bp, synthetic construct
  misc_feature 1..20: note = chemically synthesized
  source 1..20: mol_type = other DNA
agctagtgctcaaagaagtg

SEQ ID NO: 59339 - DNA, 20 bp, synthetic construct
  misc_feature 1..20: note = chemically synthesized
  source 1..20: mol_type = other DNA
agaagtgaagtcatttaccc

SEQ ID NO: 59340 - DNA, 20 bp, synthetic construct
  misc_feature 1..20: note = chemically synthesized
  source 1..20: mol_type = other DNA
gaagtgaagtcatttacccc

SEQ ID NO: 59341 - DNA, 20 bp, synthetic construct
  misc_feature 1..20: note = chemically synthesized
  source 1..20: mol_type = other DNA
atttaccccaggccccctgc

SEQ ID NO: 59342 - DNA, 20 bp, synthetic construct
  misc_feature 1..20: note = chemically synthesized
  source 1..20: mol_type = other DNA
accccaggccccctgccagt

SEQ ID NO: 59343 - DNA, 20 bp, synthetic construct
  misc_feature 1..20: note = chemically synthesized
  source 1..20: mol_type = other DNA
ggccccctgccagtaagtga

SEQ ID NO: 59344 - DNA, 20 bp, synthetic construct
  misc_feature 1..20: note = chemically synthesized
  source 1..20: mol_type = other DNA
gccccctgccagtaagtgac

SEQ ID NO: 59345 - DNA, 20 bp, synthetic construct
  misc_feature 1..20: note = chemically synthesized
  source 1..20: mol_type = other DNA
ccccctgccagtaagtgaca

SEQ ID NO: 59346 - DNA, 20 bp, synthetic construct
  misc_feature 1..20: note = chemically synthesized
  source 1..20: mol_type = other DNA
tgccagtaagtgacagggcc

SEQ ID NO: 59347 - DNA, 20 bp, synthetic construct
  misc_feature 1..20: note = chemically synthesized
  source 1..20: mol_type = other DNA
tgacagggcctggtcacact

SEQ ID NO: 59348 - DNA, 20 bp, synthetic construct
  misc_feature 1..20: note = chemically synthesized
  source 1..20: mol_type = other DNA
gacagggcctggtcacactt

SEQ ID NO: 59349 - DNA, 20 bp, synthetic construct
  misc_feature 1..20: note = chemically synthesized
  source 1..20: mol_type = other DNA
acttgggtttatttattgcc

SEQ ID NO: 59350 - DNA, 20 bp, synthetic construct
  misc_feature 1..20: note = chemically synthesized
  source 1..20: mol_type = other DNA
ttatttattgcccagttcaa

SEQ ID NO: 59351 - DNA, 20 bp, synthetic construct
  misc_feature 1..20: note = chemically synthesized
  source 1..20: mol_type = other DNA
tatttattgcccagttcaac

SEQ ID NO: 59352 - DNA, 20 bp, synthetic construct
  misc_feature 1..20: note = chemically synthesized
  source 1..20: mol_type = other DNA
ttcaacaggttgtttgacca

SEQ ID NO: 59353 - DNA, 20 bp, synthetic construct
  misc_feature 1..20: note = chemically synthesized
  source 1..20: mol_type = other DNA
tcaacaggttgtttgaccat

SEQ ID NO: 59354 - DNA, 20 bp, synthetic construct
  misc_feature 1..20: note = chemically synthesized
  source 1..20: mol_type = other DNA
caggttgtttgaccataggc

SEQ ID NO: 59355 - DNA, 20 bp, synthetic construct
  misc_feature 1..20: note = chemically synthesized
  source 1..20: mol_type = other DNA
ttctcttccctgcaccctgc

SEQ ID NO: 59356 - DNA, 20 bp, synthetic construct
  misc_feature 1..20: note = chemically synthesized
  source 1..20: mol_type = other DNA
tctcttccctgcaccctgcc

SEQ ID NO: 59357 - DNA, 20 bp, synthetic construct
  misc_feature 1..20: note = chemically synthesized
  source 1..20: mol_type = other DNA
gcaccctgccgggttgctct

SEQ ID NO: 59358 - DNA, 20 bp, synthetic construct
  misc_feature 1..20: note = chemically synthesized
  source 1..20: mol_type = other DNA
ggtcccttattttatgctcc

SEQ ID NO: 59359 - DNA, 20 bp, synthetic construct
  misc_feature 1..20: note = chemically synthesized
  source 1..20: mol_type = other DNA
gtcccttattttatgctccc

SEQ ID NO: 59360 - DNA, 20 bp, synthetic construct
  misc_feature 1..20: note = chemically synthesized
  source 1..20: mol_type = other DNA
ccttattttatgctcccggg

SEQ ID NO: 59361 - DNA, 20 bp, synthetic construct
  misc_feature 1..20: note = chemically synthesized
  source 1..20: mol_type = other DNA
tttatgctcccgggtagaaa

SEQ ID NO: 59362 - DNA, 20 bp, synthetic construct
  misc_feature 1..20: note = chemically synthesized
  source 1..20: mol_type = other DNA
ctcccgggtagaaatggtgt

SEQ ID NO: 59363 - DNA, 20 bp, synthetic construct
  misc_feature 1..20: note = chemically synthesized
  source 1..20: mol_type = other DNA
gggtagaaatggtgtgagat

SEQ ID NO: 59364 - DNA, 20 bp, synthetic construct
  misc_feature 1..20: note = chemically synthesized
  source 1..20: mol_type = other DNA
ggtagaaatggtgtgagatt

SEQ ID NO: 59365 - DNA, 20 bp, synthetic construct
  misc_feature 1..20: note = chemically synthesized
  source 1..20: mol_type = other DNA
agaaatggtgtgagattagg

SEQ ID NO: 59366 - DNA, 20 bp, synthetic construct
  misc_feature 1..20: note = chemically synthesized
  source 1..20: mol_type = other DNA
gaaatggtgtgagattaggc

SEQ ID NO: 59367 - DNA, 20 bp, synthetic construct
  misc_feature 1..20: note = chemically synthesized
  source 1..20: mol_type = other DNA
aaatggtgtgagattaggca

SEQ ID NO: 59368 - DNA, 20 bp, synthetic construct
  misc_feature 1..20: note = chemically synthesized
  source 1..20: mol_type = other DNA
atggtgtgagattaggcagg

SEQ ID NO: 59369 - DNA, 20 bp, synthetic construct
  misc_feature 1..20: note = chemically synthesized
  source 1..20: mol_type = other DNA
gtgtgagattaggcagggag

SEQ ID NO: 59370 - DNA, 20 bp, synthetic construct
  misc_feature 1..20: note = chemically synthesized
  source 1..20: mol_type = other DNA
gtggctcgcttccctgtccc

SEQ ID NO: 59371 - DNA, 20 bp, synthetic construct
  misc_feature 1..20: note = chemically synthesized
  source 1..20: mol_type = other DNA
tccctgtccctggccccgca

SEQ ID NO: 59372 - DNA, 20 bp, synthetic construct
  misc_feature 1..20: note = chemically synthesized
  source 1..20: mol_type = other DNA
cctgtccctggccccgcaaa

SEQ ID NO: 59373 - DNA, 20 bp, synthetic construct
  misc_feature 1..20: note = chemically synthesized
  source 1..20: mol_type = other DNA
gctcccacctgccccgatcc

SEQ ID NO: 59374 - DNA, 20 bp, synthetic construct
  misc_feature 1..20: note = chemically synthesized
  source 1..20: mol_type = other DNA
atcccagaaatgtcaccatg

SEQ ID NO: 59375 - DNA, 20 bp, synthetic construct
  misc_feature 1..20: note = chemically synthesized
  source 1..20: mol_type = other DNA
ccatgaagccttcattcttt

SEQ ID NO: 59376 - DNA, 20 bp, synthetic construct
  misc_feature 1..20: note = chemically synthesized
  source 1..20: mol_type = other DNA
gccttcattcttttggttta

SEQ ID NO: 59377 - DNA, 20 bp, synthetic construct
  misc_feature 1..20: note = chemically synthesized
  source 1..20: mol_type = other DNA
cattcttttggtttaaagct

SEQ ID NO: 59378 - DNA, 20 bp, synthetic construct
  misc_feature 1..20: note = chemically synthesized
  source 1..20: mol_type = other DNA
tttggtttaaagcttggcct

SEQ ID NO: 59379 - DNA, 20 bp, synthetic construct
  misc_feature 1..20: note = chemically synthesized
  source 1..20: mol_type = other DNA
gcctcagtgtccgtacacca

SEQ ID NO: 59380 - DNA, 20 bp, synthetic construct
  misc_feature 1..20: note = chemically synthesized
  source 1..20: mol_type = other DNA
cctcagtgtccgtacaccat

SEQ ID NO: 59381 - DNA, 20 bp, synthetic construct
  misc_feature 1..20: note = chemically synthesized
  source 1..20: mol_type = other DNA
ctcagtgtccgtacaccatg

SEQ ID NO: 59382 - DNA, 20 bp, synthetic construct
  misc_feature 1..20: note = chemically synthesized
  source 1..20: mol_type = other DNA
tccgtacaccatggggtact

SEQ ID NO: 59383 - DNA, 20 bp, synthetic construct
  misc_feature 1..20: note = chemically synthesized
  source 1..20: mol_type = other DNA
tacaccatggggtacttggc

SEQ ID NO: 59384 - DNA, 20 bp, synthetic construct
  misc_feature 1..20: note = chemically synthesized
  source 1..20: mol_type = other DNA
ccatggggtacttggccaga

SEQ ID NO: 59385 - DNA, 20 bp, synthetic construct
  misc_feature 1..20: note = chemically synthesized
  source 1..20: mol_type = other DNA
gatggcgactttctcctctc

SEQ ID NO: 59386 - DNA, 20 bp, synthetic construct
  misc_feature 1..20: note = chemically synthesized
  source 1..20: mol_type = other DNA
ctcctctccagtcgccctcc

SEQ ID NO: 59387 - DNA, 20 bp, synthetic construct
  misc_feature 1..20: note = chemically synthesized
  source 1..20: mol_type = other DNA
tcctctccagtcgccctccc

SEQ ID NO: 59388 - DNA, 20 bp, synthetic construct
  misc_feature 1..20: note = chemically synthesized
  source 1..20: mol_type = other DNA
ccagtcgccctcccaggcac

SEQ ID NO: 59389 - DNA, 20 bp, synthetic construct
  misc_feature 1..20: note = chemically synthesized
  source 1..20: mol_type = other DNA
ccctcccaggcactagcttt

SEQ ID NO: 59390 - DNA, 20 bp, synthetic construct
  misc_feature 1..20: note = chemically synthesized
  source 1..20: mol_type = other DNA
cctcccaggcactagctttt

SEQ ID NO: 59391 - DNA, 20 bp, synthetic construct
  misc_feature 1..20: note = chemically synthesized
  source 1..20: mol_type = other DNA
tcccaggcactagcttttag

SEQ ID NO: 59392 - DNA, 20 bp, synthetic construct
  misc_feature 1..20: note = chemically synthesized
  source 1..20: mol_type = other DNA
ggcactagcttttaggagtg

SEQ ID NO: 59393 - DNA, 20 bp, synthetic construct
  misc_feature 1..20: note = chemically synthesized
  source 1..20: mol_type = other DNA
gcactagcttttaggagtgc

SEQ ID NO: 59394 - DNA, 20 bp, synthetic construct
  misc_feature 1..20: note = chemically synthesized
  source 1..20: mol_type = other DNA
cactagcttttaggagtgca

SEQ ID NO: 59395 - DNA, 20 bp, synthetic construct
  misc_feature 1..20: note = chemically synthesized
  source 1..20: mol_type = other DNA
gtgcagggtgctgcctctga

SEQ ID NO: 59396 - DNA, 20 bp, synthetic construct
  misc_feature 1..20: note = chemically synthesized
  source 1..20: mol_type = other DNA
cagggtgctgcctctgatag

SEQ ID NO: 59397 - DNA, 20 bp, synthetic construct
  misc_feature 1..20: note = chemically synthesized
  source 1..20: mol_type = other DNA
agggtgctgcctctgataga

SEQ ID NO: 59398 - DNA, 20 bp, synthetic construct
  misc_feature 1..20: note = chemically synthesized
  source 1..20: mol_type = other DNA
gggtgctgcctctgatagaa

SEQ ID NO: 59399 - DNA, 20 bp, synthetic construct
  misc_feature 1..20: note = chemically synthesized
  source 1..20: mol_type = other DNA
gctgcctctgatagaagggc

SEQ ID NO: 59400 - DNA, 20 bp, synthetic construct
  misc_feature 1..20: note = chemically synthesized
  source 1..20: mol_type = other DNA
ctgcctctgatagaagggcc

SEQ ID NO: 59401 - DNA, 20 bp, synthetic construct
  misc_feature 1..20: note = chemically synthesized
  source 1..20: mol_type = other DNA
gcctctgatagaagggccag

SEQ ID NO: 59402 - DNA, 20 bp, synthetic construct
  misc_feature 1..20: note = chemically synthesized
  source 1..20: mol_type = other DNA
ctctgatagaagggccagga

SEQ ID NO: 59403 - DNA, 20 bp, synthetic construct
  misc_feature 1..20: note = chemically synthesized
  source 1..20: mol_type = other DNA
ctgatagaagggccaggaga

SEQ ID NO: 59404 - DNA, 20 bp, synthetic construct
  misc_feature 1..20: note = chemically synthesized
  source 1..20: mol_type = other DNA
atagaagggccaggagagag

SEQ ID NO: 59405 - DNA, 20 bp, synthetic construct
  misc_feature 1..20: note = chemically synthesized
  source 1..20: mol_type = other DNA
tagaagggccaggagagagc

SEQ ID NO: 59406 - DNA, 20 bp, synthetic construct
  misc_feature 1..20: note = chemically synthesized
  source 1..20: mol_type = other DNA
ggccaggagagagcaggttt

SEQ ID NO: 59407 - DNA, 20 bp, synthetic construct
  misc_feature 1..20: note = chemically synthesized
  source 1..20: mol_type = other DNA
ccaggagagagcaggttttg

SEQ ID NO: 59408 - DNA, 20 bp, synthetic construct
  misc_feature 1..20: note = chemically synthesized
  source 1..20: mol_type = other DNA
ttttggagtcctgatgttat

SEQ ID NO: 59409 - DNA, 20 bp, synthetic construct
  misc_feature 1..20: note = chemically synthesized
  source 1..20: mol_type = other DNA
tttggagtcctgatgttata

SEQ ID NO: 59410 - DNA, 20 bp, synthetic construct
  misc_feature 1..20: note = chemically synthesized
  source 1..20: mol_type = other DNA
agtcctgatgttataaggaa

SEQ ID NO: 59411 - DNA, 20 bp, synthetic construct
  misc_feature 1..20: note = chemically synthesized
  source 1..20: mol_type = other DNA
tgatgttataaggaacagct

SEQ ID NO: 59412 - DNA, 20 bp, synthetic construct
  misc_feature 1..20: note = chemically synthesized
  source 1..20: mol_type = other DNA
gatgttataaggaacagctt

SEQ ID NO: 59413 - DNA, 20 bp, synthetic construct
  misc_feature 1..20: note = chemically synthesized
  source 1..20: mol_type = other DNA
tgttataaggaacagcttgg

SEQ ID NO: 59414 - DNA, 20 bp, synthetic construct
  misc_feature 1..20: note = chemically synthesized
  source 1..20: mol_type = other DNA
gttataaggaacagcttggg

SEQ ID NO: 59415 - DNA, 20 bp, synthetic construct
  misc_feature 1..20: note = chemically synthesized
  source 1..20: mol_type = other DNA
atgaacccaacatgatgctt

SEQ ID NO: 59416 - DNA, 20 bp, synthetic construct
  misc_feature 1..20: note = chemically synthesized
  source 1..20: mol_type = other DNA
gatgcttgagaccaatgtca

SEQ ID NO: 59417 - DNA, 20 bp, synthetic construct
  misc_feature 1..20: note = chemically synthesized
  source 1..20: mol_type = other DNA
aattctgacattcatcatct

SEQ ID NO: 59418 - DNA, 20 bp, synthetic construct
  misc_feature 1..20: note = chemically synthesized
  source 1..20: mol_type = other DNA
acattcatcatctgagatct

SEQ ID NO: 59419 - DNA, 20 bp, synthetic construct
  misc_feature 1..20: note = chemically synthesized
  source 1..20: mol_type = other DNA
cattcatcatctgagatctg

SEQ ID NO: 59420 - DNA, 20 bp, synthetic construct
  misc_feature 1..20: note = chemically synthesized
  source 1..20: mol_type = other DNA
tcatctgagatctgaggaca

SEQ ID NO: 59421 - DNA, 20 bp, synthetic construct
  misc_feature 1..20: note = chemically synthesized
  source 1..20: mol_type = other DNA
atctgaggacacagctgtct

SEQ ID NO: 59422 - DNA, 20 bp, synthetic construct
  misc_feature 1..20: note = chemically synthesized
  source 1..20: mol_type = other DNA
gctgtctcagttcatgatct

SEQ ID NO: 59423 - DNA, 20 bp, synthetic construct
  misc_feature 1..20: note = chemically synthesized
  source 1..20: mol_type = other DNA
tcagttcatgatctgagtgc

SEQ ID NO: 59424 - DNA, 20 bp, synthetic construct
  misc_feature 1..20: note = chemically synthesized
  source 1..20: mol_type = other DNA
cagttcatgatctgagtgct

SEQ ID NO: 59425 - DNA, 20 bp, synthetic construct
  misc_feature 1..20: note = chemically synthesized
  source 1..20: mol_type = other DNA
tcatgatctgagtgctggga

SEQ ID NO: 59426 - DNA, 20 bp, synthetic construct
  misc_feature 1..20: note = chemically synthesized
  source 1..20: mol_type = other DNA
atctgagtgctgggaaagcc

SEQ ID NO: 59427 - DNA, 20 bp, synthetic construct
  misc_feature 1..20: note = chemically synthesized
  source 1..20: mol_type = other DNA
gggaaagccaagacttgttc

SEQ ID NO: 59428 - DNA, 20 bp, synthetic construct
  misc_feature 1..20: note = chemically synthesized
  source 1..20: mol_type = other DNA
tttgtcactgacttgctgta

SEQ ID NO: 59429 - DNA, 20 bp, synthetic construct
  misc_feature 1..20: note = chemically synthesized
  source 1..20: mol_type = other DNA
acttgctgtatagcctcaac

SEQ ID NO: 59430 - DNA, 20 bp, synthetic construct
  misc_feature 1..20: note = chemically synthesized
  source 1..20: mol_type = other DNA
cttgctgtatagcctcaaca

SEQ ID NO: 59431 - DNA, 20 bp, synthetic construct
  misc_feature 1..20: note = chemically synthesized
  source 1..20: mol_type = other DNA
aacaaggccctgaccctctc

SEQ ID NO: 59432 - DNA, 20 bp, synthetic construct
  misc_feature 1..20: note = chemically synthesized
  source 1..20: mol_type = other DNA
acaaggccctgaccctctct

SEQ ID NO: 59433 - DNA, 20 bp, synthetic construct
  misc_feature 1..20: note = chemically synthesized
  source 1..20: mol_type = other DNA
cttcaaactcttcactgtga

SEQ ID NO: 59434 - DNA, 20 bp, synthetic construct
  misc_feature 1..20: note = chemically synthesized
  source 1..20: mol_type = other DNA
ttcaaactcttcactgtgaa

SEQ ID NO: 59435 - DNA, 20 bp, synthetic construct
  misc_feature 1..20: note = chemically synthesized
  source 1..20: mol_type = other DNA
caaactcttcactgtgaaag

SEQ ID NO: 59436 - DNA, 20 bp, synthetic construct
  misc_feature 1..20: note = chemically synthesized
  source 1..20: mol_type = other DNA
aaactcttcactgtgaaagg

SEQ ID NO: 59437 - DNA, 20 bp, synthetic construct
  misc_feature 1..20: note = chemically synthesized
  source 1..20: mol_type = other DNA
tcactgtgaaaggaggaaac

SEQ ID NO: 59438 - DNA, 20 bp, synthetic construct
  misc_feature 1..20: note = chemically synthesized
  source 1..20: mol_type = other DNA
actgtgaaaggaggaaacca

SEQ ID NO: 59439 - DNA, 20 bp, synthetic construct
  misc_feature 1..20: note = chemically synthesized
  source 1..20: mol_type = other DNA
gtgaaaggaggaaaccagag

SEQ ID NO: 59440 - DNA, 20 bp, synthetic construct
  misc_feature 1..20: note = chemically synthesized
  source 1..20: mol_type = other DNA
tgaaaggaggaaaccagagt

SEQ ID NO: 59441 - DNA, 20 bp, synthetic construct
  misc_feature 1..20: note = chemically synthesized
  source 1..20: mol_type = other DNA
cagagtaggtgatgtgacac

SEQ ID NO: 59442 - DNA, 20 bp, synthetic construct
  misc_feature 1..20: note = chemically synthesized
  source 1..20: mol_type = other DNA
agagtaggtgatgtgacacc

SEQ ID NO: 59443 - DNA, 20 bp, synthetic construct
  misc_feature 1..20: note = chemically synthesized
  source 1..20: mol_type = other DNA
taggtgatgtgacaccagga

SEQ ID NO: 59444 - DNA, 20 bp, synthetic construct
  misc_feature 1..20: note = chemically synthesized
  source 1..20: mol_type = other DNA
tgatgtgacaccaggaaaga

SEQ ID NO: 59445 - DNA, 20 bp, synthetic construct
  misc_feature 1..20: note = chemically synthesized
  source 1..20: mol_type = other DNA
gtgacaccaggaaagatgga

SEQ ID NO: 59446 - DNA, 20 bp, synthetic construct
  misc_feature 1..20: note = chemically synthesized
  source 1..20: mol_type = other DNA
tgacaccaggaaagatggat

SEQ ID NO: 59447 - DNA, 20 bp, synthetic construct
  misc_feature 1..20: note = chemically synthesized
  source 1..20: mol_type = other DNA
ccaggaaagatggatgggtg

SEQ ID NO: 59448 - DNA, 20 bp, synthetic construct
  misc_feature 1..20: note = chemically synthesized
  source 1..20: mol_type = other DNA
caggaaagatggatgggtgt

SEQ ID NO: 59449 - DNA, 20 bp, synthetic construct
  misc_feature 1..20: note = chemically synthesized
  source 1..20: mol_type = other DNA
aggaaagatggatgggtgtg

SEQ ID NO: 59450 - DNA, 20 bp, synthetic construct
  misc_feature 1..20: note = chemically synthesized
  source 1..20: mol_type = other DNA
ggaaagatggatgggtgtgg

SEQ ID NO: 59451 - DNA, 20 bp, synthetic construct
  misc_feature 1..20: note = chemically synthesized
  source 1..20: mol_type = other DNA
gtgggggaatgtgctcctcc

SEQ ID NO: 59452 - DNA, 20 bp, synthetic construct
  misc_feature 1..20: note = chemically synthesized
  source 1..20: mol_type = other DNA
cctcgccaccctccctgcac

SEQ ID NO: 59453 - DNA, 20 bp, synthetic construct
  misc_feature 1..20: note = chemically synthesized
  source 1..20: mol_type = other DNA
ccagcctctccacctccttt

SEQ ID NO: 59454 - DNA, 20 bp, synthetic construct
  misc_feature 1..20: note = chemically synthesized
  source 1..20: mol_type = other DNA
ctctccacctcctttgagcc

SEQ ID NO: 59455 - DNA, 20 bp, synthetic construct
  misc_feature 1..20: note = chemically synthesized
  source 1..20: mol_type = other DNA
gagcccagaattcccctgtc

SEQ ID NO: 59456 - DNA, 20 bp, synthetic construct
  misc_feature 1..20: note = chemically synthesized
  source 1..20: mol_type = other DNA
agcccagaattcccctgtct

SEQ ID NO: 59457 - DNA, 20 bp, synthetic construct
  misc_feature 1..20: note = chemically synthesized
  source 1..20: mol_type = other DNA
cccagaattcccctgtctag

SEQ ID NO: 59458 - DNA, 20 bp, synthetic construct
  misc_feature 1..20: note = chemically synthesized
  source 1..20: mol_type = other DNA
ccagaattcccctgtctagg

SEQ ID NO: 59459 - DNA, 20 bp, synthetic construct
  misc_feature 1..20: note = chemically synthesized
  source 1..20: mol_type = other DNA
cagaattcccctgtctagga

SEQ ID NO: 59460 - DNA, 20 bp, synthetic construct
  misc_feature 1..20: note = chemically synthesized
  source 1..20: mol_type = other DNA
gagggcacctgtctcatgcc

SEQ ID NO: 59461 - DNA, 20 bp, synthetic construct
  misc_feature 1..20: note = chemically synthesized
  source 1..20: mol_type = other DNA
acctgtctcatgcctagcca

SEQ ID NO: 59462 - DNA, 20 bp, synthetic construct
  misc_feature 1..20: note = chemically synthesized
  source 1..20: mol_type = other DNA
cctgtctcatgcctagccat

SEQ ID NO: 59463 - DNA, 20 bp, synthetic construct
  misc_feature 1..20: note = chemically synthesized
  source 1..20: mol_type = other DNA
ctgttttgctacattgaacc

SEQ ID NO: 59464 - DNA, 20 bp, synthetic construct
  misc_feature 1..20: note = chemically synthesized
  source 1..20: mol_type = other DNA
acccagatgccattctaacc

SEQ ID NO: 59465 - DNA, 20 bp, synthetic construct
  misc_feature 1..20: note = chemically synthesized
  source 1..20: mol_type = other DNA
gccattctaaccaagaatcc

SEQ ID NO: 59466 - DNA, 20 bp, synthetic construct
  misc_feature 1..20: note = chemically synthesized
  source 1..20: mol_type = other DNA
ttctaaccaagaatcctggc

SEQ ID NO: 59467 - DNA, 20 bp, synthetic construct
  misc_feature 1..20: note = chemically synthesized
  source 1..20: mol_type = other DNA
tctaaccaagaatcctggct

SEQ ID NO: 59468 - DNA, 20 bp, synthetic construct
  misc_feature 1..20: note = chemically synthesized
  source 1..20: mol_type = other DNA
ccaagaatcctggctgggtg

SEQ ID NO: 59469 - DNA, 20 bp, synthetic construct
  misc_feature 1..20: note = chemically synthesized
  source 1..20: mol_type = other DNA
caagaatcctggctgggtgc

SEQ ID NO: 59470 - DNA, 20 bp, synthetic construct
  misc_feature 1..20: note = chemically synthesized
  source 1..20: mol_type = other DNA
aagaatcctggctgggtgca

SEQ ID NO: 59471 - DNA, 20 bp, synthetic construct
  misc_feature 1..20: note = chemically synthesized
  source 1..20: mol_type = other DNA
agaatcctggctgggtgcag

SEQ ID NO: 59472 - DNA, 20 bp, synthetic construct
  misc_feature 1..20: note = chemically synthesized
  source 1..20: mol_type = other DNA
ggggctctcgcctgtaaccc

SEQ ID NO: 59473 - DNA, 20 bp, synthetic construct
  misc_feature 1..20: note = chemically synthesized
  source 1..20: mol_type = other DNA
cgcctgtaaccccagcactt

SEQ ID NO: 59474 - DNA, 20 bp, synthetic construct
  misc_feature 1..20: note = chemically synthesized
  source 1..20: mol_type = other DNA
gcctgtaaccccagcacttt

SEQ ID NO: 59475 - DNA, 20 bp, synthetic construct
  misc_feature 1..20: note = chemically synthesized
  source 1..20: mol_type = other DNA
ctgtaaccccagcactttgg

SEQ ID NO: 59476 - DNA, 20 bp, synthetic construct
  misc_feature 1..20: note = chemically synthesized
  source 1..20: mol_type = other DNA
tgtaaccccagcactttggg

SEQ ID NO: 59477 - DNA, 20 bp, synthetic construct
  misc_feature 1..20: note = chemically synthesized
  source 1..20: mol_type = other DNA
ccccagcactttgggaggcc

SEQ ID NO: 59478 - DNA, 20 bp, synthetic construct
  misc_feature 1..20: note = chemically synthesized
  source 1..20: mol_type = other DNA
cccagcactttgggaggcca

SEQ ID NO: 59479 - DNA, 20 bp, synthetic construct
  misc_feature 1..20: note = chemically synthesized
  source 1..20: mol_type = other DNA
agcactttgggaggccaagg

SEQ ID NO: 59480 - DNA, 20 bp, synthetic construct
  misc_feature 1..20: note = chemically synthesized
  source 1..20: mol_type = other DNA
gcactttgggaggccaaggc

SEQ ID NO: 59481 - DNA, 20 bp, synthetic construct
  misc_feature 1..20: note = chemically synthesized
  source 1..20: mol_type = other DNA
ctttgggaggccaaggcagg

SEQ ID NO: 59482 - DNA, 20 bp, synthetic construct
  misc_feature 1..20: note = chemically synthesized
  source 1..20: mol_type = other DNA
gaggccaaggcaggcggatc

SEQ ID NO: 59483 - DNA, 20 bp, synthetic construct
  misc_feature 1..20: note = chemically synthesized
  source 1..20: mol_type = other DNA
ggccaaggcaggcggatcaa

SEQ ID NO: 59484 - DNA, 20 bp, synthetic construct
  misc_feature 1..20: note = chemically synthesized
  source 1..20: mol_type = other DNA
gccaaggcaggcggatcaag

SEQ ID NO: 59485 - DNA, 20 bp, synthetic construct
  misc_feature 1..20: note = chemically synthesized
  source 1..20: mol_type = other DNA
aggcaggcggatcaagaggt

SEQ ID NO: 59486 - DNA, 20 bp, synthetic construct
  misc_feature 1..20: note = chemically synthesized
  source 1..20: mol_type = other DNA
ggcaggcggatcaagaggtc

SEQ ID NO: 59487 - DNA, 20 bp, synthetic construct
  misc_feature 1..20: note = chemically synthesized
  source 1..20: mol_type = other DNA
caggcggatcaagaggtcag

SEQ ID NO: 59488 - DNA, 20 bp, synthetic construct
  misc_feature 1..20: note = chemically synthesized
  source 1..20: mol_type = other DNA
gatcaagaggtcaggagttc

SEQ ID NO: 59489 - DNA, 20 bp, synthetic construct
  misc_feature 1..20: note = chemically synthesized
  source 1..20: mol_type = other DNA
tcaggagttcaagacctgcc

SEQ ID NO: 59490 - DNA, 20 bp, synthetic construct
  misc_feature 1..20: note = chemically synthesized
  source 1..20: mol_type = other DNA
caagacctgcctggccaaca

SEQ ID NO: 59491 - DNA, 20 bp, synthetic construct
  misc_feature 1..20: note = chemically synthesized
  source 1..20: mol_type = other DNA
tggccaacacggtgaaacct

SEQ ID NO: 59492 - DNA, 20 bp, synthetic construct
  misc_feature 1..20: note = chemically synthesized
  source 1..20: mol_type = other DNA
tctactaaaaatacaaaaat

SEQ ID NO: 59493 - DNA, 20 bp, synthetic construct
  misc_feature 1..20: note = chemically synthesized
  source 1..20: mol_type = other DNA
ctaaaaatacaaaaattagc

SEQ ID NO: 59494 - DNA, 20 bp, synthetic construct
  misc_feature 1..20: note = chemically synthesized
  source 1..20: mol_type = other DNA
taaaaatacaaaaattagcc

SEQ ID NO: 59495 - DNA, 20 bp, synthetic construct
  misc_feature 1..20: note = chemically synthesized
  source 1..20: mol_type = other DNA
atacaaaaattagccaggcg

SEQ ID NO: 59496 - DNA, 20 bp, synthetic construct
  misc_feature 1..20: note = chemically synthesized
  source 1..20: mol_type = other DNA
caaaaattagccaggcgtgg

SEQ ID NO: 59497 - DNA, 20 bp, synthetic construct
  misc_feature 1..20: note = chemically synthesized
  source 1..20: mol_type = other DNA
gtggcacacgcctgtaatcc

SEQ ID NO: 59498 - DNA, 20 bp, synthetic construct
  misc_feature 1..20: note = chemically synthesized
  source 1..20: mol_type = other DNA
cgcctgtaatcccagctatt

SEQ ID NO: 59499 - DNA, 20 bp, synthetic construct
  misc_feature 1..20: note = chemically synthesized
  source 1..20: mol_type = other DNA
gcctgtaatcccagctattt

SEQ ID NO: 59500 - DNA, 20 bp, synthetic construct
  misc_feature 1..20: note = chemically synthesized
  source 1..20: mol_type = other DNA
tgtaatcccagctatttggg

SEQ ID NO: 59501 - DNA, 20 bp, synthetic construct
  misc_feature 1..20: note = chemically synthesized
  source 1..20: mol_type = other DNA
tcccagctatttgggaagct

SEQ ID NO: 59502 - DNA, 20 bp, synthetic construct
  misc_feature 1..20: note = chemically synthesized
  source 1..20: mol_type = other DNA
agctatttgggaagctgaga

SEQ ID NO: 59503 - DNA, 20 bp, synthetic construct
  misc_feature 1..20: note = chemically synthesized
  source 1..20: mol_type = other DNA
tatttgggaagctgagacag

SEQ ID NO: 59504 - DNA, 20 bp, synthetic construct
  misc_feature 1..20: note = chemically synthesized
  source 1..20: mol_type = other DNA
acagaagaatttcttgaacc

SEQ ID NO: 59505 - DNA, 20 bp, synthetic construct
  misc_feature 1..20: note = chemically synthesized
  source 1..20: mol_type = other DNA
cagaagaatttcttgaaccc

SEQ ID NO: 59506 - DNA, 20 bp, synthetic construct
  misc_feature 1..20: note = chemically synthesized
  source 1..20: mol_type = other DNA
gaagaatttcttgaacccgg

SEQ ID NO: 59507 - DNA, 20 bp, synthetic construct
  misc_feature 1..20: note = chemically synthesized
  source 1..20: mol_type = other DNA
aagaatttcttgaacccggg

SEQ ID NO: 59508 - DNA, 20 bp, synthetic construct
  misc_feature 1..20: note = chemically synthesized
  source 1..20: mol_type = other DNA
aatttcttgaacccgggagg

SEQ ID NO: 59509 - DNA, 20 bp, synthetic construct
  misc_feature 1..20: note = chemically synthesized
  source 1..20: mol_type = other DNA
tttcttgaacccgggaggtg

SEQ ID NO: 59510 - DNA, 20 bp, synthetic construct
  misc_feature 1..20: note = chemically synthesized
  source 1..20: mol_type = other DNA
ttcttgaacccgggaggtgg

SEQ ID NO: 59511 - DNA, 20 bp, synthetic construct
  misc_feature 1..20: note = chemically synthesized
  source 1..20: mol_type = other DNA
aacccgggaggtggaggttt

SEQ ID NO: 59512 - DNA, 20 bp, synthetic construct
  misc_feature 1..20: note = chemically synthesized
  source 1..20: mol_type = other DNA
cgggaggtggaggtttcagt

SEQ ID NO: 59513 - DNA, 20 bp, synthetic construct
  misc_feature 1..20: note = chemically synthesized
  source 1..20: mol_type = other DNA
ggtggaggtttcagtgagcc

SEQ ID NO: 59514 - DNA, 20 bp, synthetic construct
  misc_feature 1..20: note = chemically synthesized
  source 1..20: mol_type = other DNA
cacgccactgcactccaccc

SEQ ID NO: 59515 - DNA, 20 bp, synthetic construct
  misc_feature 1..20: note = chemically synthesized
  source 1..20: mol_type = other DNA
gccactgcactccaccctgg

SEQ ID NO: 59516 - DNA, 20 bp, synthetic construct
  misc_feature 1..20: note = chemically synthesized
  source 1..20: mol_type = other DNA
gcactccaccctggcagata

SEQ ID NO: 59517 - DNA, 20 bp, synthetic construct
  misc_feature 1..20: note = chemically synthesized
  source 1..20: mol_type = other DNA
tccaccctggcagataaagc

SEQ ID NO: 59518 - DNA, 20 bp, synthetic construct
  misc_feature 1..20: note = chemically synthesized
  source 1..20: mol_type = other DNA
aaaaacccaaaaacctatgt

SEQ ID NO: 59519 - DNA, 20 bp, synthetic construct
  misc_feature 1..20: note = chemically synthesized
  source 1..20: mol_type = other DNA
caaaaacctatgttagtgta

SEQ ID NO: 59520 - DNA, 20 bp, synthetic construct
  misc_feature 1..20: note = chemically synthesized
  source 1..20: mol_type = other DNA
aaaacctatgttagtgtaca

SEQ ID NO: 59521 - DNA, 20 bp, synthetic construct
  misc_feature 1..20: note = chemically synthesized
  source 1..20: mol_type = other DNA
aaacctatgttagtgtacag

SEQ ID NO: 59522 - DNA, 20 bp, synthetic construct
  misc_feature 1..20: note = chemically synthesized
  source 1..20: mol_type = other DNA
aacctatgttagtgtacaga

SEQ ID NO: 59523 - DNA, 20 bp, synthetic construct
  misc_feature 1..20: note = chemically synthesized
  source 1..20: mol_type = other DNA
tgttagtgtacagagggccc

SEQ ID NO: 59524 - DNA, 20 bp, synthetic construct
  misc_feature 1..20: note = chemically synthesized
  source 1..20: mol_type = other DNA
gtgtacagagggccccagtg

SEQ ID NO: 59525 - DNA, 20 bp, synthetic construct
  misc_feature 1..20: note = chemically synthesized
  source 1..20: mol_type = other DNA
gccccagtgaagtcttctcc

SEQ ID NO: 59526 - DNA, 20 bp, synthetic construct
  misc_feature 1..20: note = chemically synthesized
  source 1..20: mol_type = other DNA
ccagccccactttgcacaac

SEQ ID NO: 59527 - DNA, 20 bp, synthetic construct
  misc_feature 1..20: note = chemically synthesized
  source 1..20: mol_type = other DNA
cagccccactttgcacaact

SEQ ID NO: 59528 - DNA, 20 bp, synthetic construct
  misc_feature 1..20: note = chemically synthesized
  source 1..20: mol_type = other DNA
agccccactttgcacaactg

SEQ ID NO: 59529 - DNA, 20 bp, synthetic construct
  misc_feature 1..20: note = chemically synthesized
  source 1..20: mol_type = other DNA
ccccactttgcacaactggg

SEQ ID NO: 59530 - DNA, 20 bp, synthetic construct
  misc_feature 1..20: note = chemically synthesized
  source 1..20: mol_type = other DNA
ccactttgcacaactgggga

SEQ ID NO: 59531 - DNA, 20 bp, synthetic construct
  misc_feature 1..20: note = chemically synthesized
  source 1..20: mol_type = other DNA
tttgcacaactggggagagt

SEQ ID NO: 59532 - DNA, 20 bp, synthetic construct
  misc_feature 1..20: note = chemically synthesized
  source 1..20: mol_type = other DNA
ttgcacaactggggagagtg

SEQ ID NO: 59533 - DNA, 20 bp, synthetic construct
  misc_feature 1..20: note = chemically synthesized
  source 1..20: mol_type = other DNA
aactggggagagtgaggccc

SEQ ID NO: 59534 - DNA, 20 bp, synthetic construct
  misc_feature 1..20: note = chemically synthesized
  source 1..20: mol_type = other DNA
actggggagagtgaggcccc

SEQ ID NO: 59535 - DNA, 20 bp, synthetic construct
  misc_feature 1..20: note = chemically synthesized
  source 1..20: mol_type = other DNA
ggagagtgaggccccaggac

SEQ ID NO: 59536 - DNA, 20 bp, synthetic construct
  misc_feature 1..20: note = chemically synthesized
  source 1..20: mol_type = other DNA
agagtgaggccccaggacca

SEQ ID NO: 59537 - DNA, 20 bp, synthetic construct
  misc_feature 1..20: note = chemically synthesized
  source 1..20: mol_type = other DNA
gagtgaggccccaggaccag

SEQ ID NO: 59538 - DNA, 20 bp, synthetic construct
  misc_feature 1..20: note = chemically synthesized
  source 1..20: mol_type = other DNA
ggaccagaggattcttgcta

SEQ ID NO: 59539 - DNA, 20 bp, synthetic construct
  misc_feature 1..20: note = chemically synthesized
  source 1..20: mol_type = other DNA
gaccagaggattcttgctaa

SEQ ID NO: 59540 - DNA, 20 bp, synthetic construct
  misc_feature 1..20: note = chemically synthesized
  source 1..20: mol_type = other DNA
gaggattcttgctaaaggcc

SEQ ID NO: 59541 - DNA, 20 bp, synthetic construct
  misc_feature 1..20: note = chemically synthesized
  source 1..20: mol_type = other DNA
gattcttgctaaaggccaag

SEQ ID NO: 59542 - DNA, 20 bp, synthetic construct
  misc_feature 1..20: note = chemically synthesized
  source 1..20: mol_type = other DNA
cttgctaaaggccaagtgga

SEQ ID NO: 59543 - DNA, 20 bp, synthetic construct
  misc_feature 1..20: note = chemically synthesized
  source 1..20: mol_type = other DNA
aaaggccaagtggatagtga

SEQ ID NO: 59544 - DNA, 20 bp, synthetic construct
  misc_feature 1..20: note = chemically synthesized
  source 1..20: mol_type = other DNA
gtggatagtgatggccctgc

SEQ ID NO: 59545 - DNA, 20 bp, synthetic construct
  misc_feature 1..20: note = chemically synthesized
  source 1..20: mol_type = other DNA
tggatagtgatggccctgcc

SEQ ID NO: 59546 - DNA, 20 bp, synthetic construct
  misc_feature 1..20: note = chemically synthesized
  source 1..20: mol_type = other DNA
ggatagtgatggccctgcca

SEQ ID NO: 59547 - DNA, 20 bp, synthetic construct
  misc_feature 1..20: note = chemically synthesized
  source 1..20: mol_type = other DNA
agtgatggccctgccagggc

SEQ ID NO: 59548 - DNA, 20 bp, synthetic construct
  misc_feature 1..20: note = chemically synthesized
  source 1..20: mol_type = other DNA
gatggccctgccagggctag

SEQ ID NO: 59549 - DNA, 20 bp, synthetic construct
  misc_feature 1..20: note = chemically synthesized
  source 1..20: mol_type = other DNA
gggctagaagccacaacctc

SEQ ID NO: 59550 - DNA, 20 bp, synthetic construct
  misc_feature 1..20: note = chemically synthesized
  source 1..20: mol_type = other DNA
aagccacaacctctggccct

SEQ ID NO: 59551 - DNA, 20 bp, synthetic construct
  misc_feature 1..20: note = chemically synthesized
  source 1..20: mol_type = other DNA
agccacaacctctggccctg

SEQ ID NO: 59552 - DNA, 20 bp, synthetic construct
  misc_feature 1..20: note = chemically synthesized
  source 1..20: mol_type = other DNA
cctctggccctgaggccact

SEQ ID NO: 59553 - DNA, 20 bp, synthetic construct
  misc_feature 1..20: note = chemically synthesized
  source 1..20: mol_type = other DNA
ctgaggccactcagcatatt

SEQ ID NO: 59554 - DNA, 20 bp, synthetic construct
  misc_feature 1..20: note = chemically synthesized
  source 1..20: mol_type = other DNA
tatttagtgtccccaccctg

SEQ ID NO: 59555 - DNA, 20 bp, synthetic construct
  misc_feature 1..20: note = chemically synthesized
  source 1..20: mol_type = other DNA
tttagtgtccccaccctgca

SEQ ID NO: 59556 - DNA, 20 bp, synthetic construct
  misc_feature 1..20: note = chemically synthesized
  source 1..20: mol_type = other DNA
ttagtgtccccaccctgcag

SEQ ID NO: 59557 - DNA, 20 bp, synthetic construct
  misc_feature 1..20: note = chemically synthesized
  source 1..20: mol_type = other DNA
ccaactccctcctgaccact

SEQ ID NO: 59558 - DNA, 20 bp, synthetic construct
  misc_feature 1..20: note = chemically synthesized
  source 1..20: mol_type = other DNA
accactgagccctgtaatga

SEQ ID NO: 59559 - DNA, 20 bp, synthetic construct
  misc_feature 1..20: note = chemically synthesized
  source 1..20: mol_type = other DNA
ccactgagccctgtaatgat

SEQ ID NO: 59560 - DNA, 20 bp, synthetic construct
  misc_feature 1..20: note = chemically synthesized
  source 1..20: mol_type = other DNA
cactgagccctgtaatgatg

SEQ ID NO: 59561 - DNA, 20 bp, synthetic construct
  misc_feature 1..20: note = chemically synthesized
  source 1..20: mol_type = other DNA
actgagccctgtaatgatgg

SEQ ID NO: 59562 - DNA, 20 bp, synthetic construct
  misc_feature 1..20: note = chemically synthesized
  source 1..20: mol_type = other DNA
aatgatgggggaatttccat

SEQ ID NO: 59563 - DNA, 20 bp, synthetic construct
  misc_feature 1..20: note = chemically synthesized
  source 1..20: mol_type = other DNA
gggaatttccataagccatg

SEQ ID NO: 59564 - DNA, 20 bp, synthetic construct
  misc_feature 1..20: note = chemically synthesized
  source 1..20: mol_type = other DNA
ggaatttccataagccatga

SEQ ID NO: 59565 - DNA, 20 bp, synthetic construct
  misc_feature 1..20: note = chemically synthesized
  source 1..20: mol_type = other DNA
aagccatgaaggactgcaca

SEQ ID NO: 59566 - DNA, 20 bp, synthetic construct
  misc_feature 1..20: note = chemically synthesized
  source 1..20: mol_type = other DNA
atgaaggactgcacaaagtt

SEQ ID NO: 59567 - DNA, 20 bp, synthetic construct
  misc_feature 1..20: note = chemically synthesized
  source 1..20: mol_type = other DNA
aggactgcacaaagttcagt

SEQ ID NO: 59568 - DNA, 20 bp, synthetic construct
  misc_feature 1..20: note = chemically synthesized
  source 1..20: mol_type = other DNA
ggactgcacaaagttcagtt

SEQ ID NO: 59569 - DNA, 20 bp, synthetic construct
  misc_feature 1..20: note = chemically synthesized
  source 1..20: mol_type = other DNA
ctgcacaaagttcagttggg

SEQ ID NO: 59570 - DNA, 20 bp, synthetic construct
  misc_feature 1..20: note = chemically synthesized
  source 1..20: mol_type = other DNA
aaagttcagttgggaagtga

SEQ ID NO: 59571 - DNA, 20 bp, synthetic construct
  misc_feature 1..20: note = chemically synthesized
  source 1..20: mol_type = other DNA
agttcagttgggaagtgaaa

SEQ ID NO: 59572 - DNA, 20 bp, synthetic construct
  misc_feature 1..20: note = chemically synthesized
  source 1..20: mol_type = other DNA
gggaagtgaaagagaaatta

SEQ ID NO: 59573 - DNA, 20 bp, synthetic construct
  misc_feature 1..20: note = chemically synthesized
  source 1..20: mol_type = other DNA
ggaagtgaaagagaaattaa

SEQ ID NO: 59574 - DNA, 20 bp, synthetic construct
  misc_feature 1..20: note = chemically synthesized
  source 1..20: mol_type = other DNA
gaagtgaaagagaaattaaa

SEQ ID NO: 59575 - DNA, 20 bp, synthetic construct
  misc_feature 1..20: note = chemically synthesized
  source 1..20: mol_type = other DNA
agtgaaagagaaattaaagg

SEQ ID NO: 59576 - DNA, 20 bp, synthetic construct
  misc_feature 1..20: note = chemically synthesized
  source 1..20: mol_type = other DNA
aaagagaaattaaagggaga

SEQ ID NO: 59577 - DNA, 20 bp, synthetic construct
  misc_feature 1..20: note = chemically synthesized
  source 1..20: mol_type = other DNA
taaagggagatggaaatata

SEQ ID NO: 59578 - DNA, 20 bp, synthetic construct
  misc_feature 1..20: note = chemically synthesized
  source 1..20: mol_type = other DNA
gaaatatacagcactaattt

SEQ ID NO: 59579 - DNA, 20 bp, synthetic construct
  misc_feature 1..20: note = chemically synthesized
  source 1..20: mol_type = other DNA
actaattttagcaccgtctt

SEQ ID NO: 59580 - DNA, 20 bp, synthetic construct
  misc_feature 1..20: note = chemically synthesized
  source 1..20: mol_type = other DNA
gtctttagttctaacaacac

SEQ ID NO: 59581 - DNA, 20 bp, synthetic construct
  misc_feature 1..20: note = chemically synthesized
  source 1..20: mol_type = other DNA
ttagttctaacaacactagc

SEQ ID NO: 59582 - DNA, 20 bp, synthetic construct
  misc_feature 1..20: note = chemically synthesized
  source 1..20: mol_type = other DNA
ctaacaacactagctagctg

SEQ ID NO: 59583 - DNA, 20 bp, synthetic construct
  misc_feature 1..20: note = chemically synthesized
  source 1..20: mol_type = other DNA
aacatgtattatgtaatgtg

SEQ ID NO: 59584 - DNA, 20 bp, synthetic construct
  misc_feature 1..20: note = chemically synthesized
  source 1..20: mol_type = other DNA
aatgtgtggtctgttccatt

SEQ ID NO: 59585 - DNA, 20 bp, synthetic construct
  misc_feature 1..20: note = chemically synthesized
  source 1..20: mol_type = other DNA
tctgttccatttggattact

SEQ ID NO: 59586 - DNA, 20 bp, synthetic construct
  misc_feature 1..20: note = chemically synthesized
  source 1..20: mol_type = other DNA
tgttccatttggattactta

SEQ ID NO: 59587 - DNA, 20 bp, synthetic construct
  misc_feature 1..20: note = chemically synthesized
  source 1..20: mol_type = other DNA
gttccatttggattacttag

SEQ ID NO: 59588 - DNA, 20 bp, synthetic construct
  misc_feature 1..20: note = chemically synthesized
  source 1..20: mol_type = other DNA
tttggattacttagaggcac

SEQ ID NO: 59589 - DNA, 20 bp, synthetic construct
  misc_feature 1..20: note = chemically synthesized
  source 1..20: mol_type = other DNA
ttggattacttagaggcacg

SEQ ID NO: 59590 - DNA, 20 bp, synthetic construct
  misc_feature 1..20: note = chemically synthesized
  source 1..20: mol_type = other DNA
tggattacttagaggcacga

SEQ ID NO: 59591 - DNA, 20 bp, synthetic construct
  misc_feature 1..20: note = chemically synthesized
  source 1..20: mol_type = other DNA
ttacttagaggcacgagggc

SEQ ID NO: 59592 - DNA, 20 bp, synthetic construct
  misc_feature 1..20: note = chemically synthesized
  source 1..20: mol_type = other DNA
tacttagaggcacgagggcc

SEQ ID NO: 59593 - DNA, 20 bp, synthetic construct
  misc_feature 1..20: note = chemically synthesized
  source 1..20: mol_type = other DNA
cttagaggcacgagggccag

SEQ ID NO: 59594 - DNA, 20 bp, synthetic construct
  misc_feature 1..20: note = chemically synthesized
  source 1..20: mol_type = other DNA
gaggcacgagggccaggaga

SEQ ID NO: 59595 - DNA, 20 bp, synthetic construct
  misc_feature 1..20: note = chemically synthesized
  source 1..20: mol_type = other DNA
aggcacgagggccaggagaa

SEQ ID NO: 59596 - DNA, 20 bp, synthetic construct
  misc_feature 1..20: note = chemically synthesized
  source 1..20: mol_type = other DNA
cacgagggccaggagaaagg

SEQ ID NO: 59597 - DNA, 20 bp, synthetic construct
  misc_feature 1..20: note = chemically synthesized
  source 1..20: mol_type = other DNA
gagggccaggagaaaggtgg

SEQ ID NO: 59598 - DNA, 20 bp, synthetic construct
  misc_feature 1..20: note = chemically synthesized
  source 1..20: mol_type = other DNA
gggccaggagaaaggtggtg

SEQ ID NO: 59599 - DNA, 20 bp, synthetic construct
  misc_feature 1..20: note = chemically synthesized
  source 1..20: mol_type = other DNA
gccaggagaaaggtggtgga

SEQ ID NO: 59600 - DNA, 20 bp, synthetic construct
  misc_feature 1..20: note = chemically synthesized
  source 1..20: mol_type = other DNA
gaaaggtggtggagagaaac

SEQ ID NO: 59601 - DNA, 20 bp, synthetic construct
  misc_feature 1..20: note = chemically synthesized
  source 1..20: mol_type = other DNA
cacttcatttgttgctttat

SEQ ID NO: 59602 - DNA, 20 bp, synthetic construct
  misc_feature 1..20: note = chemically synthesized
  source 1..20: mol_type = other DNA
ttcatttgttgctttattgg

SEQ ID NO: 59603 - DNA, 20 bp, synthetic construct
  misc_feature 1..20: note = chemically synthesized
  source 1..20: mol_type = other DNA
tcatttgttgctttattgga

SEQ ID NO: 59604 - DNA, 20 bp, synthetic construct
  misc_feature 1..20: note = chemically synthesized
  source 1..20: mol_type = other DNA
tattggaaggaaacttttaa

SEQ ID NO: 59605 - DNA, 20 bp, synthetic construct
  misc_feature 1..20: note = chemically synthesized
  source 1..20: mol_type = other DNA
aaggaaacttttaaaagtcc

SEQ ID NO: 59606 - DNA, 20 bp, synthetic construct
  misc_feature 1..20: note = chemically synthesized
  source 1..20: mol_type = other DNA
aggaaacttttaaaagtcca

SEQ ID NO: 59607 - DNA, 20 bp, synthetic construct
  misc_feature 1..20: note = chemically synthesized
  source 1..20: mol_type = other DNA
ggaaacttttaaaagtccaa

SEQ ID NO: 59608 - DNA, 20 bp, synthetic construct
  misc_feature 1..20: note = chemically synthesized
  source 1..20: mol_type = other DNA
gaaacttttaaaagtccaag

SEQ ID NO: 59609 - DNA, 20 bp, synthetic construct
  misc_feature 1..20: note = chemically synthesized
  source 1..20: mol_type = other DNA
aaacttttaaaagtccaagg

SEQ ID NO: 59610 - DNA, 20 bp, synthetic construct
  misc_feature 1..20: note = chemically synthesized
  source 1..20: mol_type = other DNA
ttaaaagtccaagggggttg

SEQ ID NO: 59611 - DNA, 20 bp, synthetic construct
  misc_feature 1..20: note = chemically synthesized
  source 1..20: mol_type = other DNA
atctcaatatttgttatttc

SEQ ID NO: 59612 - DNA, 20 bp, synthetic construct
  misc_feature 1..20: note = chemically synthesized
  source 1..20: mol_type = other DNA
tatttccagctttttttctc

SEQ ID NO: 59613 - DNA, 20 bp, synthetic construct
  misc_feature 1..20: note = chemically synthesized
  source 1..20: mol_type = other DNA
gtttttcatttcccaaattc

SEQ ID NO: 59614 - DNA, 20 bp, synthetic construct
  misc_feature 1..20: note = chemically synthesized
  source 1..20: mol_type = other DNA
tttttcatttcccaaattca

SEQ ID NO: 59615 - DNA, 20 bp, synthetic construct
  misc_feature 1..20: note = chemically synthesized
  source 1..20: mol_type = other DNA
ctttttctttgtattttgtt

SEQ ID NO: 59616 - DNA, 20 bp, synthetic construct
  misc_feature 1..20: note = chemically synthesized
  source 1..20: mol_type = other DNA
tttgtattttgttaagatga

SEQ ID NO: 59617 - DNA, 20 bp, synthetic construct
  misc_feature 1..20: note = chemically synthesized
  source 1..20: mol_type = other DNA
ttttgttaagatgatggttt

SEQ ID NO: 59618 - DNA, 20 bp, synthetic construct
  misc_feature 1..20: note = chemically synthesized
  source 1..20: mol_type = other DNA
gatggttttggttttgtgac

SEQ ID NO: 59619 - DNA, 20 bp, synthetic construct
  misc_feature 1..20: note = chemically synthesized
  source 1..20: mol_type = other DNA
ggttttggttttgtgactag

SEQ ID NO: 59620 - DNA, 20 bp, synthetic construct
  misc_feature 1..20: note = chemically synthesized
  source 1..20: mol_type = other DNA
gtgactagtagttaacaatg

SEQ ID NO: 59621 - DNA, 20 bp, synthetic construct
  misc_feature 1..20: note = chemically synthesized
  source 1..20: mol_type = other DNA
gtagttaacaatgtggctgc

SEQ ID NO: 59622 - DNA, 20 bp, synthetic construct
  misc_feature 1..20: note = chemically synthesized
  source 1..20: mol_type = other DNA
tagttaacaatgtggctgcc

SEQ ID NO: 59623 - DNA, 20 bp, synthetic construct
  misc_feature 1..20: note = chemically synthesized
  source 1..20: mol_type = other DNA
gctgccgggcatattctcct

SEQ ID NO: 59624 - DNA, 20 bp, synthetic construct
  misc_feature 1..20: note = chemically synthesized
  source 1..20: mol_type = other DNA
ccgggcatattctcctcagc

SEQ ID NO: 59625 - DNA, 20 bp, synthetic construct
  misc_feature 1..20: note = chemically synthesized
  source 1..20: mol_type = other DNA
cgggcatattctcctcagct

SEQ ID NO: 59626 - DNA, 20 bp, synthetic construct
  misc_feature 1..20: note = chemically synthesized
  source 1..20: mol_type = other DNA
attctcctcagctaggacct

SEQ ID NO: 59627 - DNA, 20 bp, synthetic construct
  misc_feature 1..20: note = chemically synthesized
  source 1..20: mol_type = other DNA
cctcagttttcccatctgtg

SEQ ID NO: 59628 - DNA, 20 bp, synthetic construct
  misc_feature 1..20: note = chemically synthesized
  source 1..20: mol_type = other DNA
agttttcccatctgtgaaga

SEQ ID NO: 59629 - DNA, 20 bp, synthetic construct
  misc_feature 1..20: note = chemically synthesized
  source 1..20: mol_type = other DNA
tttcccatctgtgaagacgg

SEQ ID NO: 59630 - DNA, 20 bp, synthetic construct
  misc_feature 1..20: note = chemically synthesized
  source 1..20: mol_type = other DNA
ttcccatctgtgaagacggc

SEQ ID NO: 59631 - DNA, 20 bp, synthetic construct
  misc_feature 1..20: note = chemically synthesized
  source 1..20: mol_type = other DNA
tgaagacggcaggttctacc

SEQ ID NO: 59632 - DNA, 20 bp, synthetic construct
  misc_feature 1..20: note = chemically synthesized
  source 1..20: mol_type = other DNA
gaagacggcaggttctacct

SEQ ID NO: 59633 - DNA, 20 bp, synthetic construct
  misc_feature 1..20: note = chemically synthesized
  source 1..20: mol_type = other DNA
aagacggcaggttctaccta

SEQ ID NO: 59634 - DNA, 20 bp, synthetic construct
  misc_feature 1..20: note = chemically synthesized
  source 1..20: mol_type = other DNA
agacggcaggttctacctag

SEQ ID NO: 59635 - DNA, 20 bp, synthetic construct
  misc_feature 1..20: note = chemically synthesized
  source 1..20: mol_type = other DNA
gacggcaggttctacctagg

SEQ ID NO: 59636 - DNA, 20 bp, synthetic construct
  misc_feature 1..20: note = chemically synthesized
  source 1..20: mol_type = other DNA
aggttctacctagggggctg

SEQ ID NO: 59637 - DNA, 20 bp, synthetic construct
  misc_feature 1..20: note = chemically synthesized
  source 1..20: mol_type = other DNA
ggttctacctagggggctgc

SEQ ID NO: 59638 - DNA, 20 bp, synthetic construct
  misc_feature 1..20: note = chemically synthesized
  source 1..20: mol_type = other DNA
ctacctagggggctgcaggc

SEQ ID NO: 59639 - DNA, 20 bp, synthetic construct
  misc_feature 1..20: note = chemically synthesized
  source 1..20: mol_type = other DNA
cctagggggctgcaggctgg

SEQ ID NO: 59640 - DNA, 20 bp, synthetic construct
  misc_feature 1..20: note = chemically synthesized
  source 1..20: mol_type = other DNA
ggctgcaggctggtggtccg

SEQ ID NO: 59641 - DNA, 20 bp, synthetic construct
  misc_feature 1..20: note = chemically synthesized
  source 1..20: mol_type = other DNA
caggctggtggtccgaagcc

SEQ ID NO: 59642 - DNA, 20 bp, synthetic construct
  misc_feature 1..20: note = chemically synthesized
  source 1..20: mol_type = other DNA
aggctggtggtccgaagcct

SEQ ID NO: 59643 - DNA, 20 bp, synthetic construct
  misc_feature 1..20: note = chemically synthesized
  source 1..20: mol_type = other DNA
gtccgaagcctgggcatatc

SEQ ID NO: 59644 - DNA, 20 bp, synthetic construct
  misc_feature 1..20: note = chemically synthesized
  source 1..20: mol_type = other DNA
ccgaagcctgggcatatctg

SEQ ID NO: 59645 - DNA, 20 bp, synthetic construct
  misc_feature 1..20: note = chemically synthesized
  source 1..20: mol_type = other DNA
aagcctgggcatatctggag

SEQ ID NO: 59646 - DNA, 20 bp, synthetic construct
  misc_feature 1..20: note = chemically synthesized
  source 1..20: mol_type = other DNA
cctgggcatatctggagtag

SEQ ID NO: 59647 - DNA, 20 bp, synthetic construct
  misc_feature 1..20: note = chemically synthesized
  source 1..20: mol_type = other DNA
ctgggcatatctggagtaga

SEQ ID NO: 59648 - DNA, 20 bp, synthetic construct
  misc_feature 1..20: note = chemically synthesized
  source 1..20: mol_type = other DNA
ctggagtagaaggatcactg

SEQ ID NO: 59649 - DNA, 20 bp, synthetic construct
  misc_feature 1..20: note = chemically synthesized
  source 1..20: mol_type = other DNA
tggagtagaaggatcactgt

SEQ ID NO: 59650 - DNA, 20 bp, synthetic construct
  misc_feature 1..20: note = chemically synthesized
  source 1..20: mol_type = other DNA
ggagtagaaggatcactgtg

SEQ ID NO: 59651 - DNA, 20 bp, synthetic construct
  misc_feature 1..20: note = chemically synthesized
  source 1..20: mol_type = other DNA
gtagaaggatcactgtgggg

SEQ ID NO: 59652 - DNA, 20 bp, synthetic construct
  misc_feature 1..20: note = chemically synthesized
  source 1..20: mol_type = other DNA
tagaaggatcactgtggggc

SEQ ID NO: 59653 - DNA, 20 bp, synthetic construct
  misc_feature 1..20: note = chemically synthesized
  source 1..20: mol_type = other DNA
agaaggatcactgtggggca

SEQ ID NO: 59654 - DNA, 20 bp, synthetic construct
  misc_feature 1..20: note = chemically synthesized
  source 1..20: mol_type = other DNA
aggatcactgtggggcaggg

SEQ ID NO: 59655 - DNA, 20 bp, synthetic construct
  misc_feature 1..20: note = chemically synthesized
  source 1..20: mol_type = other DNA
ggatcactgtggggcagggc

SEQ ID NO: 59656 - DNA, 20 bp, synthetic construct
  misc_feature 1..20: note = chemically synthesized
  source 1..20: mol_type = other DNA
gggcaggttctgtgttgctg

SEQ ID NO: 59657 - DNA, 20 bp, synthetic construct
  misc_feature 1..20: note = chemically synthesized
  source 1..20: mol_type = other DNA
cgttgactttgaccattgct

SEQ ID NO: 59658 - DNA, 20 bp, synthetic construct
  misc_feature 1..20: note = chemically synthesized
  source 1..20: mol_type = other DNA
tgactttgaccattgctcgg

SEQ ID NO: 59659 - DNA, 20 bp, synthetic construct
  misc_feature 1..20: note = chemically synthesized
  source 1..20: mol_type = other DNA
actttgaccattgctcggca

SEQ ID NO: 59660 - DNA, 20 bp, synthetic construct
  misc_feature 1..20: note = chemically synthesized
  source 1..20: mol_type = other DNA
tcggcagagcctgctctcgc

SEQ ID NO: 59661 - DNA, 20 bp, synthetic construct
  misc_feature 1..20: note = chemically synthesized
  source 1..20: mol_type = other DNA
agagcctgctctcgctggtt

SEQ ID NO: 59662 - DNA, 20 bp, synthetic construct
  misc_feature 1..20: note = chemically synthesized
  source 1..20: mol_type = other DNA
tgctctcgctggttcagcca

SEQ ID NO: 59663 - DNA, 20 bp, synthetic construct
  misc_feature 1..20: note = chemically synthesized
  source 1..20: mol_type = other DNA
gctctcgctggttcagccac

SEQ ID NO: 59664 - DNA, 20 bp, synthetic construct
  misc_feature 1..20: note = chemically synthesized
  source 1..20: mol_type = other DNA
cccaccactccctattgtct

SEQ ID NO: 59665 - DNA, 20 bp, synthetic construct
  misc_feature 1..20: note = chemically synthesized
  source 1..20: mol_type = other DNA
actccctattgtctcagccc

SEQ ID NO: 59666 - DNA, 20 bp, synthetic construct
  misc_feature 1..20: note = chemically synthesized
  source 1..20: mol_type = other DNA
ctccctattgtctcagcccc

SEQ ID NO: 59667 - DNA, 20 bp, synthetic construct
  misc_feature 1..20: note = chemically synthesized
  source 1..20: mol_type = other DNA
atgaaacatgtattcctcac

SEQ ID NO: 59668 - DNA, 20 bp, synthetic construct
  misc_feature 1..20: note = chemically synthesized
  source 1..20: mol_type = other DNA
cctcactggcctatcacctg

SEQ ID NO: 59669 - DNA, 20 bp, synthetic construct
  misc_feature 1..20: note = chemically synthesized
  source 1..20: mol_type = other DNA
cctgccaacccctccctcaa

SEQ ID NO: 59670 - DNA, 20 bp, synthetic construct
  misc_feature 1..20: note = chemically synthesized
  source 1..20: mol_type = other DNA
tgccaacccctccctcaaaa

SEQ ID NO: 59671 - DNA, 20 bp, synthetic construct
  misc_feature 1..20: note = chemically synthesized
  source 1..20: mol_type = other DNA
cctcaaaagagttgccctct

SEQ ID NO: 59672 - DNA, 20 bp, synthetic construct
  misc_feature 1..20: note = chemically synthesized
  source 1..20: mol_type = other DNA
ctctcagatccttttgatgt

SEQ ID NO: 59673 - DNA, 20 bp, synthetic construct
  misc_feature 1..20: note = chemically synthesized
  source 1..20: mol_type = other DNA
tctcagatccttttgatgta

SEQ ID NO: 59674 - DNA, 20 bp, synthetic construct
  misc_feature 1..20: note = chemically synthesized
  source 1..20: mol_type = other DNA
gatccttttgatgtaaggtt

SEQ ID NO: 59675 - DNA, 20 bp, synthetic construct
  misc_feature 1..20: note = chemically synthesized
  source 1..20: mol_type = other DNA
ttgatgtaaggtttggtgtt

SEQ ID NO: 59676 - DNA, 20 bp, synthetic construct
  misc_feature 1..20: note = chemically synthesized
  source 1..20: mol_type = other DNA
ataaacatcactttatgtat

SEQ ID NO: 59677 - DNA, 20 bp, synthetic construct
  misc_feature 1..20: note = chemically synthesized
  source 1..20: mol_type = other DNA
taaacatcactttatgtatg

SEQ ID NO: 59678 - DNA, 20 bp, synthetic construct
  misc_feature 1..20: note = chemically synthesized
  source 1..20: mol_type = other DNA
ctttatgtatgaggcaaaat

SEQ ID NO: 59679 - DNA, 20 bp, synthetic construct
  misc_feature 1..20: note = chemically synthesized
  source 1..20: mol_type = other DNA
tttatgtatgaggcaaaatg

SEQ ID NO: 59680 - DNA, 20 bp, synthetic construct
  misc_feature 1..20: note = chemically synthesized
  source 1..20: mol_type = other DNA
gtatgaggcaaaatgaggac

SEQ ID NO: 59681 - DNA, 20 bp, synthetic construct
  misc_feature 1..20: note = chemically synthesized
  source 1..20: mol_type = other DNA
tatgaggcaaaatgaggacc

SEQ ID NO: 59682 - DNA, 20 bp, synthetic construct
  misc_feature 1..20: note = chemically synthesized
  source 1..20: mol_type = other DNA
atgaggcaaaatgaggacca

SEQ ID NO: 59683 - DNA, 20 bp, synthetic construct
  misc_feature 1..20: note = chemically synthesized
  source 1..20: mol_type = other DNA
gaggcaaaatgaggaccagg

SEQ ID NO: 59684 - DNA, 20 bp, synthetic construct
  misc_feature 1..20: note = chemically synthesized
  source 1..20: mol_type = other DNA
gggagatgaatgacttgtcc

SEQ ID NO: 59685 - DNA, 20 bp, synthetic construct
  misc_feature 1..20: note = chemically synthesized
  source 1..20: mol_type = other DNA
cttgtcctggctcatacacc

SEQ ID NO: 59686 - DNA, 20 bp, synthetic construct
  misc_feature 1..20: note = chemically synthesized
  source 1..20: mol_type = other DNA
tcctggctcatacacctgga

SEQ ID NO: 59687 - DNA, 20 bp, synthetic construct
  misc_feature 1..20: note = chemically synthesized
  source 1..20: mol_type = other DNA
ctcatacacctggaaagtga

SEQ ID NO: 59688 - DNA, 20 bp, synthetic construct
  misc_feature 1..20: note = chemically synthesized
  source 1..20: mol_type = other DNA
catacacctggaaagtgaca

SEQ ID NO: 59689 - DNA, 20 bp, synthetic construct
  misc_feature 1..20: note = chemically synthesized
  source 1..20: mol_type = other DNA
cacctggaaagtgacagagt

SEQ ID NO: 59690 - DNA, 20 bp, synthetic construct
  misc_feature 1..20: note = chemically synthesized
  source 1..20: mol_type = other DNA
ggaaagtgacagagtcagat

SEQ ID NO: 59691 - DNA, 20 bp, synthetic construct
  misc_feature 1..20: note = chemically synthesized
  source 1..20: mol_type = other DNA
gacagagtcagattagatcc

SEQ ID NO: 59692 - DNA, 20 bp, synthetic construct
  misc_feature 1..20: note = chemically synthesized
  source 1..20: mol_type = other DNA
acagagtcagattagatccc

SEQ ID NO: 59693 - DNA, 20 bp, synthetic construct
  misc_feature 1..20: note = chemically synthesized
  source 1..20: mol_type = other DNA
ttagatcccaggtctatctg

SEQ ID NO: 59694 - DNA, 20 bp, synthetic construct
  misc_feature 1..20: note = chemically synthesized
  source 1..20: mol_type = other DNA
ccaggtctatctgaagttaa

SEQ ID NO: 59695 - DNA, 20 bp, synthetic construct
  misc_feature 1..20: note = chemically synthesized
  source 1..20: mol_type = other DNA
aggtctatctgaagttaaaa

SEQ ID NO: 59696 - DNA, 20 bp, synthetic construct
  misc_feature 1..20: note = chemically synthesized
  source 1..20: mol_type = other DNA
ggtctatctgaagttaaaag

SEQ ID NO: 59697 - DNA, 20 bp, synthetic construct
  misc_feature 1..20: note = chemically synthesized
  source 1..20: mol_type = other DNA
cacctcctccatctacttta

SEQ ID NO: 59698 - DNA, 20 bp, synthetic construct
  misc_feature 1..20: note = chemically synthesized
  source 1..20: mol_type = other DNA
ctcctccatctactttaaag

SEQ ID NO: 59699 - DNA, 20 bp, synthetic construct
  misc_feature 1..20: note = chemically synthesized
  source 1..20: mol_type = other DNA
cagcacaaacccctgctttc

SEQ ID NO: 59700 - DNA, 20 bp, synthetic construct
  misc_feature 1..20: note = chemically synthesized
  source 1..20: mol_type = other DNA
agcacaaacccctgctttca

SEQ ID NO: 59701 - DNA, 20 bp, synthetic construct
  misc_feature 1..20: note = chemically synthesized
  source 1..20: mol_type = other DNA
cacaaacccctgctttcaag

SEQ ID NO: 59702 - DNA, 20 bp, synthetic construct
  misc_feature 1..20: note = chemically synthesized
  source 1..20: mol_type = other DNA
caaacccctgctttcaagga

SEQ ID NO: 59703 - DNA, 20 bp, synthetic construct
  misc_feature 1..20: note = chemically synthesized
  source 1..20: mol_type = other DNA
ccctgctttcaaggagagat

SEQ ID NO: 59704 - DNA, 20 bp, synthetic construct
  misc_feature 1..20: note = chemically synthesized
  source 1..20: mol_type = other DNA
aggagagatgagcgtctcta

SEQ ID NO: 59705 - DNA, 20 bp, synthetic construct
  misc_feature 1..20: note = chemically synthesized
  source 1..20: mol_type = other DNA
agcgtctctaaagcccctga

SEQ ID NO: 59706 - DNA, 20 bp, synthetic construct
  misc_feature 1..20: note = chemically synthesized
  source 1..20: mol_type = other DNA
tctctaaagcccctgacagc

SEQ ID NO: 59707 - DNA, 20 bp, synthetic construct
  misc_feature 1..20: note = chemically synthesized
  source 1..20: mol_type = other DNA
tctaaagcccctgacagcaa

SEQ ID NO: 59708 - DNA, 20 bp, synthetic construct
  misc_feature 1..20: note = chemically synthesized
  source 1..20: mol_type = other DNA
agcccctgacagcaagagcc

SEQ ID NO: 59709 - DNA, 20 bp, synthetic construct
  misc_feature 1..20: note = chemically synthesized
  source 1..20: mol_type = other DNA
tgacagcaagagcccagaac

SEQ ID NO: 59710 - DNA, 20 bp, synthetic construct
  misc_feature 1..20: note = chemically synthesized
  source 1..20: mol_type = other DNA
gacagcaagagcccagaact

SEQ ID NO: 59711 - DNA, 20 bp, synthetic construct
  misc_feature 1..20: note = chemically synthesized
  source 1..20: mol_type = other DNA
gcccagaactgggacaccat

SEQ ID NO: 59712 - DNA, 20 bp, synthetic construct
  misc_feature 1..20: note = chemically synthesized
  source 1..20: mol_type = other DNA
ctgggacaccattagtgacc

SEQ ID NO: 59713 - DNA, 20 bp, synthetic construct
  misc_feature 1..20: note = chemically synthesized
  source 1..20: mol_type = other DNA
gacaccattagtgacccaga

SEQ ID NO: 59714 - DNA, 20 bp, synthetic construct
  misc_feature 1..20: note = chemically synthesized
  source 1..20: mol_type = other DNA
accattagtgacccagacgg

SEQ ID NO: 59715 - DNA, 20 bp, synthetic construct
  misc_feature 1..20: note = chemically synthesized
  source 1..20: mol_type = other DNA
ccattagtgacccagacggc

SEQ ID NO: 59716 - DNA, 20 bp, synthetic construct
  misc_feature 1..20: note = chemically synthesized
  source 1..20: mol_type = other DNA
tagtgacccagacggcaggt

SEQ ID NO: 59717 - DNA, 20 bp, synthetic construct
  misc_feature 1..20: note = chemically synthesized
  source 1..20: mol_type = other DNA
gacggcaggtaagctgactg

SEQ ID NO: 59718 - DNA, 20 bp, synthetic construct
  misc_feature 1..20: note = chemically synthesized
  source 1..20: mol_type = other DNA
acggcaggtaagctgactgc

SEQ ID NO: 59719 - DNA, 20 bp, synthetic construct
  misc_feature 1..20: note = chemically synthesized
  source 1..20: mol_type = other DNA
ggcaggtaagctgactgcag

SEQ ID NO: 59720 - DNA, 20 bp, synthetic construct
  misc_feature 1..20: note = chemically synthesized
  source 1..20: mol_type = other DNA
taagctgactgcaggagcat

SEQ ID NO: 59721 - DNA, 20 bp, synthetic construct
  misc_feature 1..20: note = chemically synthesized
  source 1..20: mol_type = other DNA
catcagcctattcttgtgtc

SEQ ID NO: 59722 - DNA, 20 bp, synthetic construct
  misc_feature 1..20: note = chemically synthesized
  source 1..20: mol_type = other DNA
atcagcctattcttgtgtct

SEQ ID NO: 59723 - DNA, 20 bp, synthetic construct
  misc_feature 1..20: note = chemically synthesized
  source 1..20: mol_type = other DNA
tattcttgtgtctgggacca

SEQ ID NO: 59724 - DNA, 20 bp, synthetic construct
  misc_feature 1..20: note = chemically synthesized
  source 1..20: mol_type = other DNA
ttcttgtgtctgggaccaca

SEQ ID NO: 59725 - DNA, 20 bp, synthetic construct
  misc_feature 1..20: note = chemically synthesized
  source 1..20: mol_type = other DNA
tctgggaccacagagcattg

SEQ ID NO: 59726 - DNA, 20 bp, synthetic construct
  misc_feature 1..20: note = chemically synthesized
  source 1..20: mol_type = other DNA
ctgggaccacagagcattgt

SEQ ID NO: 59727 - DNA, 20 bp, synthetic construct
  misc_feature 1..20: note = chemically synthesized
  source 1..20: mol_type = other DNA
tgggaccacagagcattgtg

SEQ ID NO: 59728 - DNA, 20 bp, synthetic construct
  misc_feature 1..20: note = chemically synthesized
  source 1..20: mol_type = other DNA
accacagagcattgtgggga

SEQ ID NO: 59729 - DNA, 20 bp, synthetic construct
  misc_feature 1..20: note = chemically synthesized
  source 1..20: mol_type = other DNA
gtggggacagccccgtctct

SEQ ID NO: 59730 - DNA, 20 bp, synthetic construct
  misc_feature 1..20: note = chemically synthesized
  source 1..20: mol_type = other DNA
tggggacagccccgtctctt

SEQ ID NO: 59731 - DNA, 20 bp, synthetic construct
  misc_feature 1..20: note = chemically synthesized
  source 1..20: mol_type = other DNA
tctcttgggaaaaaaaccct

SEQ ID NO: 59732 - DNA, 20 bp, synthetic construct
  misc_feature 1..20: note = chemically synthesized
  source 1..20: mol_type = other DNA
ctcttgggaaaaaaacccta

SEQ ID NO: 59733 - DNA, 20 bp, synthetic construct
  misc_feature 1..20: note = chemically synthesized
  source 1..20: mol_type = other DNA
tcttgggaaaaaaaccctaa

SEQ ID NO: 59734 - DNA, 20 bp, synthetic construct
  misc_feature 1..20: note = chemically synthesized
  source 1..20: mol_type = other DNA
ggaaaaaaaccctaagggct

SEQ ID NO: 59735 - DNA, 20 bp, synthetic construct
  misc_feature 1..20: note = chemically synthesized
  source 1..20: mol_type = other DNA
gaaaaaaaccctaagggctg

SEQ ID NO: 59736 - DNA, 20 bp, synthetic construct
  misc_feature 1..20: note = chemically synthesized
  source 1..20: mol_type = other DNA
taagggctgaggatccttgt

SEQ ID NO: 59737 - DNA, 20 bp, synthetic construct
  misc_feature 1..20: note = chemically synthesized
  source 1..20: mol_type = other DNA
ctgaggatccttgtgagtgt

SEQ ID NO: 59738 - DNA, 20 bp, synthetic construct
  misc_feature 1..20: note = chemically synthesized
  source 1..20: mol_type = other DNA
tgaggatccttgtgagtgtt

SEQ ID NO: 59739 - DNA, 20 bp, synthetic construct
  misc_feature 1..20: note = chemically synthesized
  source 1..20: mol_type = other DNA
ggatccttgtgagtgttggg

SEQ ID NO: 59740 - DNA, 20 bp, synthetic construct
  misc_feature 1..20: note = chemically synthesized
  source 1..20: mol_type = other DNA
gatccttgtgagtgttgggt

SEQ ID NO: 59741 - DNA, 20 bp, synthetic construct
  misc_feature 1..20: note = chemically synthesized
  source 1..20: mol_type = other DNA
ttgtgagtgttgggtgggaa

SEQ ID NO: 59742 - DNA, 20 bp, synthetic construct
  misc_feature 1..20: note = chemically synthesized
  source 1..20: mol_type = other DNA
tgttgggtgggaacagctcc

SEQ ID NO: 59743 - DNA, 20 bp, synthetic construct
  misc_feature 1..20: note = chemically synthesized
  source 1..20: mol_type = other DNA
gttgggtgggaacagctccc

SEQ ID NO: 59744 - DNA, 20 bp, synthetic construct
  misc_feature 1..20: note = chemically synthesized
  source 1..20: mol_type = other DNA
tgggtgggaacagctcccag

SEQ ID NO: 59745 - DNA, 20 bp, synthetic construct
  misc_feature 1..20: note = chemically synthesized
  source 1..20: mol_type = other DNA
gggtgggaacagctcccagg

SEQ ID NO: 59746 - DNA, 20 bp, synthetic construct
  misc_feature 1..20: note = chemically synthesized
  source 1..20: mol_type = other DNA
gctcccaggaggtttaatca

SEQ ID NO: 59747 - DNA, 20 bp, synthetic construct
  misc_feature 1..20: note = chemically synthesized
  source 1..20: mol_type = other DNA
cacagcccctccatgctctc

SEQ ID NO: 59748 - DNA, 20 bp, synthetic construct
  misc_feature 1..20: note = chemically synthesized
  source 1..20: mol_type = other DNA
tctagctgttgccattgtgc

SEQ ID NO: 59749 - DNA, 20 bp, synthetic construct
  misc_feature 1..20: note = chemically synthesized
  source 1..20: mol_type = other DNA
agatgcatttcccttctgtg

SEQ ID NO: 59750 - DNA, 20 bp, synthetic construct
  misc_feature 1..20: note = chemically synthesized
  source 1..20: mol_type = other DNA
tgcatttcccttctgtgcag

SEQ ID NO: 59751 - DNA, 20 bp, synthetic construct
  misc_feature 1..20: note = chemically synthesized
  source 1..20: mol_type = other DNA
cttctgtgcagcagtttccc

SEQ ID NO: 59752 - DNA, 20 bp, synthetic construct
  misc_feature 1..20: note = chemically synthesized
  source 1..20: mol_type = other DNA
cagtttccctggccactaaa

SEQ ID NO: 59753 - DNA, 20 bp, synthetic construct
  misc_feature 1..20: note = chemically synthesized
  source 1..20: mol_type = other DNA
tttccctggccactaaatag

SEQ ID NO: 59754 - DNA, 20 bp, synthetic construct
  misc_feature 1..20: note = chemically synthesized
  source 1..20: mol_type = other DNA
ttccctggccactaaatagt

SEQ ID NO: 59755 - DNA, 20 bp, synthetic construct
  misc_feature 1..20: note = chemically synthesized
  source 1..20: mol_type = other DNA
tggccactaaatagtgggat

SEQ ID NO: 59756 - DNA, 20 bp, synthetic construct
  misc_feature 1..20: note = chemically synthesized
  source 1..20: mol_type = other DNA
cactaaatagtgggattaga

SEQ ID NO: 59757 - DNA, 20 bp, synthetic construct
  misc_feature 1..20: note = chemically synthesized
  source 1..20: mol_type = other DNA
taaatagtgggattagatag

SEQ ID NO: 59758 - DNA, 20 bp, synthetic construct
  misc_feature 1..20: note = chemically synthesized
  source 1..20: mol_type = other DNA
ggattagatagaagccctcc

SEQ ID NO: 59759 - DNA, 20 bp, synthetic construct
  misc_feature 1..20: note = chemically synthesized
  source 1..20: mol_type = other DNA
gattagatagaagccctcca

SEQ ID NO: 59760 - DNA, 20 bp, synthetic construct
  misc_feature 1..20: note = chemically synthesized
  source 1..20: mol_type = other DNA
attagatagaagccctccaa

SEQ ID NO: 59761 - DNA, 20 bp, synthetic construct
  misc_feature 1..20: note = chemically synthesized
  source 1..20: mol_type = other DNA
agaagccctccaagggcttc

SEQ ID NO: 59762 - DNA, 20 bp, synthetic construct
  misc_feature 1..20: note = chemically synthesized
  source 1..20: mol_type = other DNA
catgattcttgattctgatc

SEQ ID NO: 59763 - DNA, 20 bp, synthetic construct
  misc_feature 1..20: note = chemically synthesized
  source 1..20: mol_type = other DNA
ttctgatctggcccgattcc

SEQ ID NO: 59764 - DNA, 20 bp, synthetic construct
  misc_feature 1..20: note = chemically synthesized
  source 1..20: mol_type = other DNA
gcccgattcctggataatcg

SEQ ID NO: 59765 - DNA, 20 bp, synthetic construct
  misc_feature 1..20: note = chemically synthesized
  source 1..20: mol_type = other DNA
cccgattcctggataatcgt

SEQ ID NO: 59766 - DNA, 20 bp, synthetic construct
  misc_feature 1..20: note = chemically synthesized
  source 1..20: mol_type = other DNA
gattcctggataatcgtggg

SEQ ID NO: 59767 - DNA, 20 bp, synthetic construct
  misc_feature 1..20: note = chemically synthesized
  source 1..20: mol_type = other DNA
attcctggataatcgtgggc

SEQ ID NO: 59768 - DNA, 20 bp, synthetic construct
  misc_feature 1..20: note = chemically synthesized
  source 1..20: mol_type = other DNA
tttcttcttttgtaaaacaa

SEQ ID NO: 59769 - DNA, 20 bp, synthetic construct
  misc_feature 1..20: note = chemically synthesized
  source 1..20: mol_type = other DNA
tggctgtaccatttgcatct

SEQ ID NO: 59770 - DNA, 20 bp, synthetic construct
  misc_feature 1..20: note = chemically synthesized
  source 1..20: mol_type = other DNA
ggctgtaccatttgcatctt

SEQ ID NO: 59771 - DNA, 20 bp, synthetic construct
  misc_feature 1..20: note = chemically synthesized
  source 1..20: mol_type = other DNA
gctgtaccatttgcatctta

SEQ ID NO: 59772 - DNA, 20 bp, synthetic construct
  misc_feature 1..20: note = chemically synthesized
  source 1..20: mol_type = other DNA
tttgcatcttagggtcattg

SEQ ID NO: 59773 - DNA, 20 bp, synthetic construct
  misc_feature 1..20: note = chemically synthesized
  source 1..20: mol_type = other DNA
cttagggtcattgcagatgt

SEQ ID NO: 59774 - DNA, 20 bp, synthetic construct
  misc_feature 1..20: note = chemically synthesized
  source 1..20: mol_type = other DNA
cagatgtaagtgttgctgtc

SEQ ID NO: 59775 - DNA, 20 bp, synthetic construct
  misc_feature 1..20: note = chemically synthesized
  source 1..20: mol_type = other DNA
gatgtaagtgttgctgtcca

SEQ ID NO: 59776 - DNA, 20 bp, synthetic construct
  misc_feature 1..20: note = chemically synthesized
  source 1..20: mol_type = other DNA
aagtgttgctgtccagagcc

SEQ ID NO: 59777 - DNA, 20 bp, synthetic construct
  misc_feature 1..20: note = chemically synthesized
  source 1..20: mol_type = other DNA
agtgttgctgtccagagcct

SEQ ID NO: 59778 - DNA, 20 bp, synthetic construct
  misc_feature 1..20: note = chemically synthesized
  source 1..20: mol_type = other DNA
tgctgtccagagcctgggtg

SEQ ID NO: 59779 - DNA, 20 bp, synthetic construct
  misc_feature 1..20: note = chemically synthesized
  source 1..20: mol_type = other DNA
gctgtccagagcctgggtgc

SEQ ID NO: 59780 - DNA, 20 bp, synthetic construct
  misc_feature 1..20: note = chemically synthesized
  source 1..20: mol_type = other DNA
cagagcctgggtgcaggacc

SEQ ID NO: 59781 - DNA, 20 bp, synthetic construct
  misc_feature 1..20: note = chemically synthesized
  source 1..20: mol_type = other DNA
ctgggtgcaggacctagatg

SEQ ID NO: 59782 - DNA, 20 bp, synthetic construct
  misc_feature 1..20: note = chemically synthesized
  source 1..20: mol_type = other DNA
tgggtgcaggacctagatgt

SEQ ID NO: 59783 - DNA, 20 bp, synthetic construct
  misc_feature 1..20: note = chemically synthesized
  source 1..20: mol_type = other DNA
aggacctagatgtaggattc

SEQ ID NO: 59784 - DNA, 20 bp, synthetic construct
  misc_feature 1..20: note = chemically synthesized
  source 1..20: mol_type = other DNA
ttctggttctgctacttcct

SEQ ID NO: 59785 - DNA, 20 bp, synthetic construct
  misc_feature 1..20: note = chemically synthesized
  source 1..20: mol_type = other DNA
acttcctcagtgacattgaa

SEQ ID NO: 59786 - DNA, 20 bp, synthetic construct
  misc_feature 1..20: note = chemically synthesized
  source 1..20: mol_type = other DNA
aatagctgacctaatctctc

SEQ ID NO: 59787 - DNA, 20 bp, synthetic construct
  misc_feature 1..20: note = chemically synthesized
  source 1..20: mol_type = other DNA
tgacctaatctctctggctt

SEQ ID NO: 59788 - DNA, 20 bp, synthetic construct
  misc_feature 1..20: note = chemically synthesized
  source 1..20: mol_type = other DNA
tttggtttcttcatctgtaa

SEQ ID NO: 59789 - DNA, 20 bp, synthetic construct
  misc_feature 1..20: note = chemically synthesized
  source 1..20: mol_type = other DNA
ggtttcttcatctgtaaaag

SEQ ID NO: 59790 - DNA, 20 bp, synthetic construct
  misc_feature 1..20: note = chemically synthesized
  source 1..20: mol_type = other DNA
gtttcttcatctgtaaaaga

SEQ ID NO: 59791 - DNA, 20 bp, synthetic construct
  misc_feature 1..20: note = chemically synthesized
  source 1..20: mol_type = other DNA
catctgtaaaagaaggatat

SEQ ID NO: 59792 - DNA, 20 bp, synthetic construct
  misc_feature 1..20: note = chemically synthesized
  source 1..20: mol_type = other DNA
taaaagaaggatattagcat

SEQ ID NO: 59793 - DNA, 20 bp, synthetic construct
  misc_feature 1..20: note = chemically synthesized
  source 1..20: mol_type = other DNA
atattagcattagcacctca

SEQ ID NO: 59794 - DNA, 20 bp, synthetic construct
  misc_feature 1..20: note = chemically synthesized
  source 1..20: mol_type = other DNA
tattagcattagcacctcac

SEQ ID NO: 59795 - DNA, 20 bp, synthetic construct
  misc_feature 1..20: note = chemically synthesized
  source 1..20: mol_type = other DNA
gcacctcacgggattgttac

SEQ ID NO: 59796 - DNA, 20 bp, synthetic construct
  misc_feature 1..20: note = chemically synthesized
  source 1..20: mol_type = other DNA
ctcacgggattgttacaaga

SEQ ID NO: 59797 - DNA, 20 bp, synthetic construct
  misc_feature 1..20: note = chemically synthesized
  source 1..20: mol_type = other DNA
agcaatgaattaacacatgt

SEQ ID NO: 59798 - DNA, 20 bp, synthetic construct
  misc_feature 1..20: note = chemically synthesized
  source 1..20: mol_type = other DNA
tgaattaacacatgtgagca

SEQ ID NO: 59799 - DNA, 20 bp, synthetic construct
  misc_feature 1..20: note = chemically synthesized
  source 1..20: mol_type = other DNA
aattaacacatgtgagcacg

SEQ ID NO: 59800 - DNA, 20 bp, synthetic construct
  misc_feature 1..20: note = chemically synthesized
  source 1..20: mol_type = other DNA
acacatgtgagcacggagaa

SEQ ID NO: 59801 - DNA, 20 bp, synthetic construct
  misc_feature 1..20: note = chemically synthesized
  source 1..20: mol_type = other DNA
tgagcacggagaacagtgct

SEQ ID NO: 59802 - DNA, 20 bp, synthetic construct
  misc_feature 1..20: note = chemically synthesized
  source 1..20: mol_type = other DNA
ggagaacagtgcttggcata

SEQ ID NO: 59803 - DNA, 20 bp, synthetic construct
  misc_feature 1..20: note = chemically synthesized
  source 1..20: mol_type = other DNA
aacagtgcttggcatatggt

SEQ ID NO: 59804 - DNA, 20 bp, synthetic construct
  misc_feature 1..20: note = chemically synthesized
  source 1..20: mol_type = other DNA
tgctattcttctgattcttt

SEQ ID NO: 59805 - DNA, 20 bp, synthetic construct
  misc_feature 1..20: note = chemically synthesized
  source 1..20: mol_type = other DNA
tctttcagtgttactgatgt

SEQ ID NO: 59806 - DNA, 20 bp, synthetic construct
  misc_feature 1..20: note = chemically synthesized
  source 1..20: mol_type = other DNA
tcagtgttactgatgtcggc

SEQ ID NO: 59807 - DNA, 20 bp, synthetic construct
  misc_feature 1..20: note = chemically synthesized
  source 1..20: mol_type = other DNA
tactgatgtcggcaagtact

SEQ ID NO: 59808 - DNA, 20 bp, synthetic construct
  misc_feature 1..20: note = chemically synthesized
  source 1..20: mol_type = other DNA
atgtcggcaagtacttggca

SEQ ID NO: 59809 - DNA, 20 bp, synthetic construct
  misc_feature 1..20: note = chemically synthesized
  source 1..20: mol_type = other DNA
tgtcggcaagtacttggcac

SEQ ID NO: 59810 - DNA, 20 bp, synthetic construct
  misc_feature 1..20: note = chemically synthesized
  source 1..20: mol_type = other DNA
ggcaagtacttggcacaggc

SEQ ID NO: 59811 - DNA, 20 bp, synthetic construct
  misc_feature 1..20: note = chemically synthesized
  source 1..20: mol_type = other DNA
caggctggtttaataatccc

SEQ ID NO: 59812 - DNA, 20 bp, synthetic construct
  misc_feature 1..20: note = chemically synthesized
  source 1..20: mol_type = other DNA
aggctggtttaataatccct

SEQ ID NO: 59813 - DNA, 20 bp, synthetic construct
  misc_feature 1..20: note = chemically synthesized
  source 1..20: mol_type = other DNA
aatccctaggcacttccacg

SEQ ID NO: 59814 - DNA, 20 bp, synthetic construct
  misc_feature 1..20: note = chemically synthesized
  source 1..20: mol_type = other DNA
tggtgtcaatccctgatcac

SEQ ID NO: 59815 - DNA, 20 bp, synthetic construct
  misc_feature 1..20: note = chemically synthesized
  source 1..20: mol_type = other DNA
ggtgtcaatccctgatcact

SEQ ID NO: 59816 - DNA, 20 bp, synthetic construct
  misc_feature 1..20: note = chemically synthesized
  source 1..20: mol_type = other DNA
tgtcaatccctgatcactgg

SEQ ID NO: 59817 - DNA, 20 bp, synthetic construct
  misc_feature 1..20: note = chemically synthesized
  source 1..20: mol_type = other DNA
agtcatcatgtgccttgact

SEQ ID NO: 59818 - DNA, 20 bp, synthetic construct
  misc_feature 1..20: note = chemically synthesized
  source 1..20: mol_type = other DNA
gtcatcatgtgccttgactc

SEQ ID NO: 59819 - DNA, 20 bp, synthetic construct
  misc_feature 1..20: note = chemically synthesized
  source 1..20: mol_type = other DNA
tcatcatgtgccttgactcg

SEQ ID NO: 59820 - DNA, 20 bp, synthetic construct
  misc_feature 1..20: note = chemically synthesized
  source 1..20: mol_type = other DNA
atgtgccttgactcggggcc

SEQ ID NO: 59821 - DNA, 20 bp, synthetic construct
  misc_feature 1..20: note = chemically synthesized
  source 1..20: mol_type = other DNA
gcccccccatctctgtcttg

SEQ ID NO: 59822 - DNA, 20 bp, synthetic construct
  misc_feature 1..20: note = chemically synthesized
  source 1..20: mol_type = other DNA
cccccccatctctgtcttgc

SEQ ID NO: 59823 - DNA, 20 bp, synthetic construct
  misc_feature 1..20: note = chemically synthesized
  source 1..20: mol_type = other DNA
caatgccgtcttctgtctcg

SEQ ID NO: 59824 - DNA, 20 bp, synthetic construct
  misc_feature 1..20: note = chemically synthesized
  source 1..20: mol_type = other DNA
aatgccgtcttctgtctcgt

SEQ ID NO: 59825 - DNA, 20 bp, synthetic construct
  misc_feature 1..20: note = chemically synthesized
  source 1..20: mol_type = other DNA
atgccgtcttctgtctcgtg

SEQ ID NO: 59826 - DNA, 20 bp, synthetic construct
  misc_feature 1..20: note = chemically synthesized
  source 1..20: mol_type = other DNA
ctcgtggggcatcctcctgc

SEQ ID NO: 59827 - DNA, 20 bp, synthetic construct
  misc_feature 1..20: note = chemically synthesized
  source 1..20: mol_type = other DNA
gtggggcatcctcctgctgg

SEQ ID NO: 59828 - DNA, 20 bp, synthetic construct
  misc_feature 1..20: note = chemically synthesized
  source 1..20: mol_type = other DNA
tggggcatcctcctgctggc

SEQ ID NO: 59829 - DNA, 20 bp, synthetic construct
  misc_feature 1..20: note = chemically synthesized
  source 1..20: mol_type = other DNA
gctggcaggcctgtgctgcc

SEQ ID NO: 59830 - DNA, 20 bp, synthetic construct
  misc_feature 1..20: note = chemically synthesized
  source 1..20: mol_type = other DNA
ctgcctggtccctgtctccc

SEQ ID NO: 59831 - DNA, 20 bp, synthetic construct
  misc_feature 1..20: note = chemically synthesized
  source 1..20: mol_type = other DNA
tggtccctgtctccctggct

SEQ ID NO: 59832 - DNA, 20 bp, synthetic construct
  misc_feature 1..20: note = chemically synthesized
  source 1..20: mol_type = other DNA
ggtccctgtctccctggctg

SEQ ID NO: 59833 - DNA, 20 bp, synthetic construct
  misc_feature 1..20: note = chemically synthesized
  source 1..20: mol_type = other DNA
tctccctggctgaggatccc

SEQ ID NO: 59834 - DNA, 20 bp, synthetic construct
  misc_feature 1..20: note = chemically synthesized
  source 1..20: mol_type = other DNA
ctccctggctgaggatcccc

SEQ ID NO: 59835 - DNA, 20 bp, synthetic construct
  misc_feature 1..20: note = chemically synthesized
  source 1..20: mol_type = other DNA
tccctggctgaggatcccca

SEQ ID NO: 59836 - DNA, 20 bp, synthetic construct
  misc_feature 1..20: note = chemically synthesized
  source 1..20: mol_type = other DNA
cctggctgaggatccccagg

SEQ ID NO: 59837 - DNA, 20 bp, synthetic construct
  misc_feature 1..20: note = chemically synthesized
  source 1..20: mol_type = other DNA
atccccagggagatgctgcc

SEQ ID NO: 59838 - DNA, 20 bp, synthetic construct
  misc_feature 1..20: note = chemically synthesized
  source 1..20: mol_type = other DNA
cccagggagatgctgcccag

SEQ ID NO: 59839 - DNA, 20 bp, synthetic construct
  misc_feature 1..20: note = chemically synthesized
  source 1..20: mol_type = other DNA
gggagatgctgcccagaaga

SEQ ID NO: 59840 - DNA, 20 bp, synthetic construct
  misc_feature 1..20: note = chemically synthesized
  source 1..20: mol_type = other DNA
cagatacatcccaccatgat

SEQ ID NO: 59841 - DNA, 20 bp, synthetic construct
  misc_feature 1..20: note = chemically synthesized
  source 1..20: mol_type = other DNA
agatacatcccaccatgatc

SEQ ID NO: 59842 - DNA, 20 bp, synthetic construct
  misc_feature 1..20: note = chemically synthesized
  source 1..20: mol_type = other DNA
aggatcacccaaccttcaac

SEQ ID NO: 59843 - DNA, 20 bp, synthetic construct
  misc_feature 1..20: note = chemically synthesized
  source 1..20: mol_type = other DNA
caacaagatcacccccaacc

SEQ ID NO: 59844 - DNA, 20 bp, synthetic construct
  misc_feature 1..20: note = chemically synthesized
  source 1..20: mol_type = other DNA
agatcacccccaacctggct

SEQ ID NO: 59845 - DNA, 20 bp, synthetic construct
  misc_feature 1..20: note = chemically synthesized
  source 1..20: mol_type = other DNA
aacctggctgagttcgcctt

SEQ ID NO: 59846 - DNA, 20 bp, synthetic construct
  misc_feature 1..20: note = chemically synthesized
  source 1..20: mol_type = other DNA
tcgccttcagcctataccgc

SEQ ID NO: 59847 - DNA, 20 bp, synthetic construct
  misc_feature 1..20: note = chemically synthesized
  source 1..20: mol_type = other DNA
cttcagcctataccgccagc

SEQ ID NO: 59848 - DNA, 20 bp, synthetic construct
  misc_feature 1..20: note = chemically synthesized
  source 1..20: mol_type = other DNA
tataccgccagctggcacac

SEQ ID NO: 59849 - DNA, 20 bp, synthetic construct
  misc_feature 1..20: note = chemically synthesized
  source 1..20: mol_type = other DNA
cagctggcacaccagtccaa

SEQ ID NO: 59850 - DNA, 20 bp, synthetic construct
  misc_feature 1..20: note = chemically synthesized
  source 1..20: mol_type = other DNA
caccaatatcttcttctccc

SEQ ID NO: 59851 - DNA, 20 bp, synthetic construct
  misc_feature 1..20: note = chemically synthesized
  source 1..20: mol_type = other DNA
aatatcttcttctccccagt

SEQ ID NO: 59852 - DNA, 20 bp, synthetic construct
  misc_feature 1..20: note = chemically synthesized
  source 1..20: mol_type = other DNA
ctccccagtgagcatcgcta

SEQ ID NO: 59853 - DNA, 20 bp, synthetic construct
  misc_feature 1..20: note = chemically synthesized
  source 1..20: mol_type = other DNA
agcctttgcaatgctctccc

SEQ ID NO: 59854 - DNA, 20 bp, synthetic construct
  misc_feature 1..20: note = chemically synthesized
  source 1..20: mol_type = other DNA
gcctttgcaatgctctccct

SEQ ID NO: 59855 - DNA, 20 bp, synthetic construct
  misc_feature 1..20: note = chemically synthesized
  source 1..20: mol_type = other DNA
cctttgcaatgctctccctg

SEQ ID NO: 59856 - DNA, 20 bp, synthetic construct
  misc_feature 1..20: note = chemically synthesized
  source 1..20: mol_type = other DNA
caatgctctccctggggacc

SEQ ID NO: 59857 - DNA, 20 bp, synthetic construct
  misc_feature 1..20: note = chemically synthesized
  source 1..20: mol_type = other DNA
aatgctctccctggggacca

SEQ ID NO: 59858 - DNA, 20 bp, synthetic construct
  misc_feature 1..20: note = chemically synthesized
  source 1..20: mol_type = other DNA
tgacactcacgatgaaatcc

SEQ ID NO: 59859 - DNA, 20 bp, synthetic construct
  misc_feature 1..20: note = chemically synthesized
  source 1..20: mol_type = other DNA
acactcacgatgaaatcctg

SEQ ID NO: 59860 - DNA, 20 bp, synthetic construct
  misc_feature 1..20: note = chemically synthesized
  source 1..20: mol_type = other DNA
cactcacgatgaaatcctgg

SEQ ID NO: 59861 - DNA, 20 bp, synthetic construct
  misc_feature 1..20: note = chemically synthesized
  source 1..20: mol_type = other DNA
actcacgatgaaatcctgga

SEQ ID NO: 59862 - DNA, 20 bp, synthetic construct
  misc_feature 1..20: note = chemically synthesized
  source 1..20: mol_type = other DNA
gggcctgaatttcaacctca

SEQ ID NO: 59863 - DNA, 20 bp, synthetic construct
  misc_feature 1..20: note = chemically synthesized
  source 1..20: mol_type = other DNA
gcctgaatttcaacctcacg

SEQ ID NO: 59864 - DNA, 20 bp, synthetic construct
  misc_feature 1..20: note = chemically synthesized
  source 1..20: mol_type = other DNA
tttcaacctcacggagattc

SEQ ID NO: 59865 - DNA, 20 bp, synthetic construct
  misc_feature 1..20: note = chemically synthesized
  source 1..20: mol_type = other DNA
tcaacctcacggagattccg

SEQ ID NO: 59866 - DNA, 20 bp, synthetic construct
  misc_feature 1..20: note = chemically synthesized
  source 1..20: mol_type = other DNA
caacctcacggagattccgg

SEQ ID NO: 59867 - DNA, 20 bp, synthetic construct
  misc_feature 1..20: note = chemically synthesized
  source 1..20: mol_type = other DNA
tcacggagattccggaggct

SEQ ID NO: 59868 - DNA, 20 bp, synthetic construct
  misc_feature 1..20: note = chemically synthesized
  source 1..20: mol_type = other DNA
tccggaggctcagatccatg

SEQ ID NO: 59869 - DNA, 20 bp, synthetic construct
  misc_feature 1..20: note = chemically synthesized
  source 1..20: mol_type = other DNA
ccggaggctcagatccatga

SEQ ID NO: 59870 - DNA, 20 bp, synthetic construct
  misc_feature 1..20: note = chemically synthesized
  source 1..20: mol_type = other DNA
ctcagatccatgaaggcttc

SEQ ID NO: 59871 - DNA, 20 bp, synthetic construct
  misc_feature 1..20: note = chemically synthesized
  source 1..20: mol_type = other DNA
tcagatccatgaaggcttcc

SEQ ID NO: 59872 - DNA, 20 bp, synthetic construct
  misc_feature 1..20: note = chemically synthesized
  source 1..20: mol_type = other DNA
aactcctccgtaccctcaac

SEQ ID NO: 59873 - DNA, 20 bp, synthetic construct
  misc_feature 1..20: note = chemically synthesized
  source 1..20: mol_type = other DNA
cctccgtaccctcaaccagc

SEQ ID NO: 59874 - DNA, 20 bp, synthetic construct
  misc_feature 1..20: note = chemically synthesized
  source 1..20: mol_type = other DNA
cgtaccctcaaccagccaga

SEQ ID NO: 59875 - DNA, 20 bp, synthetic construct
  misc_feature 1..20: note = chemically synthesized
  source 1..20: mol_type = other DNA
ccctcaaccagccagacagc

SEQ ID NO: 59876 - DNA, 20 bp, synthetic construct
  misc_feature 1..20: note = chemically synthesized
  source 1..20: mol_type = other DNA
accagccagacagccagctc

SEQ ID NO: 59877 - DNA, 20 bp, synthetic construct
  misc_feature 1..20: note = chemically synthesized
  source 1..20: mol_type = other DNA
agccagctccagctgaccac

SEQ ID NO: 59878 - DNA, 20 bp, synthetic construct
  misc_feature 1..20: note = chemically synthesized
  source 1..20: mol_type = other DNA
ctccagctgaccaccggcaa

SEQ ID NO: 59879 - DNA, 20 bp, synthetic construct
  misc_feature 1..20: note = chemically synthesized
  source 1..20: mol_type = other DNA
accggcaatggcctgttcct

SEQ ID NO: 59880 - DNA, 20 bp, synthetic construct
  misc_feature 1..20: note = chemically synthesized
  source 1..20: mol_type = other DNA
gcaatggcctgttcctcagc

SEQ ID NO: 59881 - DNA, 20 bp, synthetic construct
  misc_feature 1..20: note = chemically synthesized
  source 1..20: mol_type = other DNA
caatggcctgttcctcagcg

SEQ ID NO: 59882 - DNA, 20 bp, synthetic construct
  misc_feature 1..20: note = chemically synthesized
  source 1..20: mol_type = other DNA
aatggcctgttcctcagcga

SEQ ID NO: 59883 - DNA, 20 bp, synthetic construct
  misc_feature 1..20: note = chemically synthesized
  source 1..20: mol_type = other DNA
tgttcctcagcgagggcctg

SEQ ID NO: 59884 - DNA, 20 bp, synthetic construct
  misc_feature 1..20: note = chemically synthesized
  source 1..20: mol_type = other DNA
cctcagcgagggcctgaagc

SEQ ID NO: 59885 - DNA, 20 bp, synthetic construct
  misc_feature 1..20: note = chemically synthesized
  source 1..20: mol_type = other DNA
cagcgagggcctgaagctag

SEQ ID NO: 59886 - DNA, 20 bp, synthetic construct
  misc_feature 1..20: note = chemically synthesized
  source 1..20: mol_type = other DNA
agggcctgaagctagtggat

SEQ ID NO: 59887 - DNA, 20 bp, synthetic construct
  misc_feature 1..20: note = chemically synthesized
  source 1..20: mol_type = other DNA
gaagctagtggataagtttt

SEQ ID NO: 59888 - DNA, 20 bp, synthetic construct
  misc_feature 1..20: note = chemically synthesized
  source 1..20: mol_type = other DNA
agctagtggataagtttttg

SEQ ID NO: 59889 - DNA, 20 bp, synthetic construct
  misc_feature 1..20: note = chemically synthesized
  source 1..20: mol_type = other DNA
gctagtggataagtttttgg

SEQ ID NO: 59890 - DNA, 20 bp, synthetic construct
  misc_feature 1..20: note = chemically synthesized
  source 1..20: mol_type = other DNA
agtttttggaggatgttaaa

SEQ ID NO: 59891 - DNA, 20 bp, synthetic construct
  misc_feature 1..20: note = chemically synthesized
  source 1..20: mol_type = other DNA
tgttaaaaagttgtaccact

SEQ ID NO: 59892 - DNA, 20 bp, synthetic construct
  misc_feature 1..20: note = chemically synthesized
  source 1..20: mol_type = other DNA
taaaaagttgtaccactcag

SEQ ID NO: 59893 - DNA, 20 bp, synthetic construct
  misc_feature 1..20: note = chemically synthesized
  source 1..20: mol_type = other DNA
gaagccttcactgtcaactt

SEQ ID NO: 59894 - DNA, 20 bp, synthetic construct
  misc_feature 1..20: note = chemically synthesized
  source 1..20: mol_type = other DNA
aagccttcactgtcaacttc

SEQ ID NO: 59895 - DNA, 20 bp, synthetic construct
  misc_feature 1..20: note = chemically synthesized
  source 1..20: mol_type = other DNA
agccttcactgtcaacttcg

SEQ ID NO: 59896 - DNA, 20 bp, synthetic construct
  misc_feature 1..20: note = chemically synthesized
  source 1..20: mol_type = other DNA
tgtcaacttcggggacaccg

SEQ ID NO: 59897 - DNA, 20 bp, synthetic construct
  misc_feature 1..20: note = chemically synthesized
  source 1..20: mol_type = other DNA
tcaacttcggggacaccgaa

SEQ ID NO: 59898 - DNA, 20 bp, synthetic construct
  misc_feature 1..20: note = chemically synthesized
  source 1..20: mol_type = other DNA
caacttcggggacaccgaag

SEQ ID NO: 59899 - DNA, 20 bp, synthetic construct
  misc_feature 1..20: note = chemically synthesized
  source 1..20: mol_type = other DNA
tcggggacaccgaagaggcc

SEQ ID NO: 59900 - DNA, 20 bp, synthetic construct
  misc_feature 1..20: note = chemically synthesized
  source 1..20: mol_type = other DNA
acaccgaagaggccaagaaa

SEQ ID NO: 59901 - DNA, 20 bp, synthetic construct
  misc_feature 1..20: note = chemically synthesized
  source 1..20: mol_type = other DNA
gaaacagatcaacgattacg

SEQ ID NO: 59902 - DNA, 20 bp, synthetic construct
  misc_feature 1..20: note = chemically synthesized
  source 1..20: mol_type = other DNA
aacagatcaacgattacgtg

SEQ ID NO: 59903 - DNA, 20 bp, synthetic construct
  misc_feature 1..20: note = chemically synthesized
  source 1..20: mol_type = other DNA
agatcaacgattacgtggag

SEQ ID NO: 59904 - DNA, 20 bp, synthetic construct
  misc_feature 1..20: note = chemically synthesized
  source 1..20: mol_type = other DNA
gatcaacgattacgtggaga

SEQ ID NO: 59905 - DNA, 20 bp, synthetic construct
  misc_feature 1..20: note = chemically synthesized
  source 1..20: mol_type = other DNA
atcaacgattacgtggagaa

SEQ ID NO: 59906 - DNA, 20 bp, synthetic construct
  misc_feature 1..20: note = chemically synthesized
  source 1..20: mol_type = other DNA
ttacgtggagaagggtactc

SEQ ID NO: 59907 - DNA, 20 bp, synthetic construct
  misc_feature 1..20: note = chemically synthesized
  source 1..20: mol_type = other DNA
tacgtggagaagggtactca

SEQ ID NO: 59908 - DNA, 20 bp, synthetic construct
  misc_feature 1..20: note = chemically synthesized
  source 1..20: mol_type = other DNA
acgtggagaagggtactcaa

SEQ ID NO: 59909 - DNA, 20 bp, synthetic construct
  misc_feature 1..20: note = chemically synthesized
  source 1..20: mol_type = other DNA
gggtactcaagggaaaattg

SEQ ID NO: 59910 - DNA, 20 bp, synthetic construct
  misc_feature 1..20: note = chemically synthesized
  source 1..20: mol_type = other DNA
tcaagggaaaattgtggatt

SEQ ID NO: 59911 - DNA, 20 bp, synthetic construct
  misc_feature 1..20: note = chemically synthesized
  source 1..20: mol_type = other DNA
ggaaaattgtggatttggtc

SEQ ID NO: 59912 - DNA, 20 bp, synthetic construct
  misc_feature 1..20: note = chemically synthesized
  source 1..20: mol_type = other DNA
gaaaattgtggatttggtca

SEQ ID NO: 59913 - DNA, 20 bp, synthetic construct
  misc_feature 1..20: note = chemically synthesized
  source 1..20: mol_type = other DNA
aaattgtggatttggtcaag

SEQ ID NO: 59914 - DNA, 20 bp, synthetic construct
  misc_feature 1..20: note = chemically synthesized
  source 1..20: mol_type = other DNA
gatttggtcaaggagcttga

SEQ ID NO: 59915 - DNA, 20 bp, synthetic construct
  misc_feature 1..20: note = chemically synthesized
  source 1..20: mol_type = other DNA
tttggtcaaggagcttgaca

SEQ ID NO: 59916 - DNA, 20 bp, synthetic construct
  misc_feature 1..20: note = chemically synthesized
  source 1..20: mol_type = other DNA
caaggagcttgacagagaca

SEQ ID NO: 59917 - DNA, 20 bp, synthetic construct
  misc_feature 1..20: note = chemically synthesized
  source 1..20: mol_type = other DNA
cagagacacagtttttgctc

SEQ ID NO: 59918 - DNA, 20 bp, synthetic construct
  misc_feature 1..20: note = chemically synthesized
  source 1..20: mol_type = other DNA
ggtgaattacatcttcttta

SEQ ID NO: 59919 - DNA, 20 bp, synthetic construct
  misc_feature 1..20: note = chemically synthesized
  source 1..20: mol_type = other DNA
gtgaattacatcttctttaa

SEQ ID NO: 59920 - DNA, 20 bp, synthetic construct
  misc_feature 1..20: note = chemically synthesized
  source 1..20: mol_type = other DNA
attacatcttctttaaaggt

SEQ ID NO: 59921 - DNA, 20 bp, synthetic construct
  misc_feature 1..20: note = chemically synthesized
  source 1..20: mol_type = other DNA
ttacatcttctttaaaggta

SEQ ID NO: 59922 - DNA, 20 bp, synthetic construct
  misc_feature 1..20: note = chemically synthesized
  source 1..20: mol_type = other DNA
taaaggtaaggttgctcaac

SEQ ID NO: 59923 - DNA, 20 bp, synthetic construct
  misc_feature 1..20: note = chemically synthesized
  source 1..20: mol_type = other DNA
taaggttgctcaaccagcct

SEQ ID NO: 59924 - DNA, 20 bp, synthetic construct
  misc_feature 1..20: note = chemically synthesized
  source 1..20: mol_type = other DNA
accagcctgagctgttccca

SEQ ID NO: 59925 - DNA, 20 bp, synthetic construct
  misc_feature 1..20: note = chemically synthesized
  source 1..20: mol_type = other DNA
tgagctgttcccatagaaac

SEQ ID NO: 59926 - DNA, 20 bp, synthetic construct
  misc_feature 1..20: note = chemically synthesized
  source 1..20: mol_type = other DNA
caaaaatattctcaaaccat

SEQ ID NO: 59927 - DNA, 20 bp, synthetic construct
  misc_feature 1..20: note = chemically synthesized
  source 1..20: mol_type = other DNA
atcagttcttgaactctcct

SEQ ID NO: 59928 - DNA, 20 bp, synthetic construct
  misc_feature 1..20: note = chemically synthesized
  source 1..20: mol_type = other DNA
ctctccttggcaatgcatta

SEQ ID NO: 59929 - DNA, 20 bp, synthetic construct
  misc_feature 1..20: note = chemically synthesized
  source 1..20: mol_type = other DNA
tctccttggcaatgcattat

SEQ ID NO: 59930 - DNA, 20 bp, synthetic construct
  misc_feature 1..20: note = chemically synthesized
  source 1..20: mol_type = other DNA
tggcaatgcattatgggcca

SEQ ID NO: 59931 - DNA, 20 bp, synthetic construct
  misc_feature 1..20: note = chemically synthesized
  source 1..20: mol_type = other DNA
tgggccatagcaatgctttt

SEQ ID NO: 59932 - DNA, 20 bp, synthetic construct
  misc_feature 1..20: note = chemically synthesized
  source 1..20: mol_type = other DNA
catagcaatgcttttcagcg

SEQ ID NO: 59933 - DNA, 20 bp, synthetic construct
  misc_feature 1..20: note = chemically synthesized
  source 1..20: mol_type = other DNA
gcttttcagcgtggattctt

SEQ ID NO: 59934 - DNA, 20 bp, synthetic construct
  misc_feature 1..20: note = chemically synthesized
  source 1..20: mol_type = other DNA
ctaaaatgttttccatcatt

SEQ ID NO: 59935 - DNA, 20 bp, synthetic construct
  misc_feature 1..20: note = chemically synthesized
  source 1..20: mol_type = other DNA
tttccatcattgagtaattt

SEQ ID NO: 59936 - DNA, 20 bp, synthetic construct
  misc_feature 1..20: note = chemically synthesized
  source 1..20: mol_type = other DNA
ttccatcattgagtaatttg

SEQ ID NO: 59937 - DNA, 20 bp, synthetic construct
  misc_feature 1..20: note = chemically synthesized
  source 1..20: mol_type = other DNA
tgagtaatttgaggaaataa

SEQ ID NO: 59938 - DNA, 20 bp, synthetic construct
  misc_feature 1..20: note = chemically synthesized
  source 1..20: mol_type = other DNA
taaactgtcaaaactactga

SEQ ID NO: 59939 - DNA, 20 bp, synthetic construct
  misc_feature 1..20: note = chemically synthesized
  source 1..20: mol_type = other DNA
caaaactactgacagctctg

SEQ ID NO: 59940 - DNA, 20 bp, synthetic construct
  misc_feature 1..20: note = chemically synthesized
  source 1..20: mol_type = other DNA
gacagctctgcagaactttt

SEQ ID NO: 59941 - DNA, 20 bp, synthetic construct
  misc_feature 1..20: note = chemically synthesized
  source 1..20: mol_type = other DNA
cagctctgcagaacttttca

SEQ ID NO: 59942 - DNA, 20 bp, synthetic construct
  misc_feature 1..20: note = chemically synthesized
  source 1..20: mol_type = other DNA
ccttgtgtatactgtatatg

SEQ ID NO: 59943 - DNA, 20 bp, synthetic construct
  misc_feature 1..20: note = chemically synthesized
  source 1..20: mol_type = other DNA
tatgtagaatatataatgct

SEQ ID NO: 59944 - DNA, 20 bp, synthetic construct
  misc_feature 1..20: note = chemically synthesized
  source 1..20: mol_type = other DNA
atatataatgcttagaacta

SEQ ID NO: 59945 - DNA, 20 bp, synthetic construct
  misc_feature 1..20: note = chemically synthesized
  source 1..20: mol_type = other DNA
aaattgtaatacactgcata

SEQ ID NO: 59946 - DNA, 20 bp, synthetic construct
  misc_feature 1..20: note = chemically synthesized
  source 1..20: mol_type = other DNA
aattgtaatacactgcataa

SEQ ID NO: 59947 - DNA, 20 bp, synthetic construct
  misc_feature 1..20: note = chemically synthesized
  source 1..20: mol_type = other DNA
attgtaatacactgcataaa

SEQ ID NO: 59948 - DNA, 20 bp, synthetic construct
  misc_feature 1..20: note = chemically synthesized
  source 1..20: mol_type = other DNA
taatacactgcataaaggga

SEQ ID NO: 59949 - DNA, 20 bp, synthetic construct
  misc_feature 1..20: note = chemically synthesized
  source 1..20: mol_type = other DNA
tgcataaagggatagtttca

SEQ ID NO: 59950 - DNA, 20 bp, synthetic construct
  misc_feature 1..20: note = chemically synthesized
  source 1..20: mol_type = other DNA
gaacatactttacacgactc

SEQ ID NO: 59951 - DNA, 20 bp, synthetic construct
  misc_feature 1..20: note = chemically synthesized
  source 1..20: mol_type = other DNA
tttacacgactctagtgtcc

SEQ ID NO: 59952 - DNA, 20 bp, synthetic construct
  misc_feature 1..20: note = chemically synthesized
  source 1..20: mol_type = other DNA
cgactctagtgtcccagaat

SEQ ID NO: 59953 - DNA, 20 bp, synthetic construct
  misc_feature 1..20: note = chemically synthesized
  source 1..20: mol_type = other DNA
tagtgtcccagaatcagtat

SEQ ID NO: 59954 - DNA, 20 bp, synthetic construct
  misc_feature 1..20: note = chemically synthesized
  source 1..20: mol_type = other DNA
gtatcagttttgcaatctga

SEQ ID NO: 59955 - DNA, 20 bp, synthetic construct
  misc_feature 1..20: note = chemically synthesized
  source 1..20: mol_type = other DNA
gttttgcaatctgaaagacc

SEQ ID NO: 59956 - DNA, 20 bp, synthetic construct
  misc_feature 1..20: note = chemically synthesized
  source 1..20: mol_type = other DNA
ttttgcaatctgaaagacct

SEQ ID NO: 59957 - DNA, 20 bp, synthetic construct
  misc_feature 1..20: note = chemically synthesized
  source 1..20: mol_type = other DNA
aatcctgcctctaacacaat

SEQ ID NO: 59958 - DNA, 20 bp, synthetic construct
  misc_feature 1..20: note = chemically synthesized
  source 1..20: mol_type = other DNA
acaatgcattctacctcttt

SEQ ID NO: 59959 - DNA, 20 bp, synthetic construct
  misc_feature 1..20: note = chemically synthesized
  source 1..20: mol_type = other DNA
caatgcattctacctctttg

SEQ ID NO: 59960 - DNA, 20 bp, synthetic construct
  misc_feature 1..20: note = chemically synthesized
  source 1..20: mol_type = other DNA
gaggtgctaatttctcatct

SEQ ID NO: 59961 - DNA, 20 bp, synthetic construct
  misc_feature 1..20: note = chemically synthesized
  source 1..20: mol_type = other DNA
gctaatttctcatcttagca

SEQ ID NO: 59962 - DNA, 20 bp, synthetic construct
  misc_feature 1..20: note = chemically synthesized
  source 1..20: mol_type = other DNA
caaaataccattcttgctgt

SEQ ID NO: 59963 - DNA, 20 bp, synthetic construct
  misc_feature 1..20: note = chemically synthesized
  source 1..20: mol_type = other DNA
aaaataccattcttgctgtc

SEQ ID NO: 59964 - DNA, 20 bp, synthetic construct
  misc_feature 1..20: note = chemically synthesized
  source 1..20: mol_type = other DNA
ttcttgctgtcaggtttttt

SEQ ID NO: 59965 - DNA, 20 bp, synthetic construct
  misc_feature 1..20: note = chemically synthesized
  source 1..20: mol_type = other DNA
tcttgctgtcaggttttttt

SEQ ID NO: 59966 - DNA, 20 bp, synthetic construct
  misc_feature 1..20: note = chemically synthesized
  source 1..20: mol_type = other DNA
ttaggattaaacaaatgaca

SEQ ID NO: 59967 - DNA, 20 bp, synthetic construct
  misc_feature 1..20: note = chemically synthesized
  source 1..20: mol_type = other DNA
taaacaaatgacaaagactg

SEQ ID NO: 59968 - DNA, 20 bp, synthetic construct
  misc_feature 1..20: note = chemically synthesized
  source 1..20: mol_type = other DNA
aaacaaatgacaaagactgt

SEQ ID NO: 59969 - DNA, 20 bp, synthetic construct
  misc_feature 1..20: note = chemically synthesized
  source 1..20: mol_type = other DNA
aacaaatgacaaagactgtg

SEQ ID NO: 59970 - DNA, 20 bp, synthetic construct
  misc_feature 1..20: note = chemically synthesized
  source 1..20: mol_type = other DNA
aatgacaaagactgtgggga

SEQ ID NO: 59971 - DNA, 20 bp, synthetic construct
  misc_feature 1..20: note = chemically synthesized
  source 1..20: mol_type = other DNA
aagactgtggggatggtgtg

SEQ ID NO: 59972 - DNA, 20 bp, synthetic construct
  misc_feature 1..20: note = chemically synthesized
  source 1..20: mol_type = other DNA
tggggatggtgtgtggcata

SEQ ID NO: 59973 - DNA, 20 bp, synthetic construct
  misc_feature 1..20: note = chemically synthesized
  source 1..20: mol_type = other DNA
ggatggtgtgtggcatacag

SEQ ID NO: 59974 - DNA, 20 bp, synthetic construct
  misc_feature 1..20: note = chemically synthesized
  source 1..20: mol_type = other DNA
gatggtgtgtggcatacagc

SEQ ID NO: 59975 - DNA, 20 bp, synthetic construct
  misc_feature 1..20: note = chemically synthesized
  source 1..20: mol_type = other DNA
gtgtggcatacagcaggtga

SEQ ID NO: 59976 - DNA, 20 bp, synthetic construct
  misc_feature 1..20: note = chemically synthesized
  source 1..20: mol_type = other DNA
tgatggactcttctgtatct

SEQ ID NO: 59977 - DNA, 20 bp, synthetic construct
  misc_feature 1..20: note = chemically synthesized
  source 1..20: mol_type = other DNA
gatggactcttctgtatctc

SEQ ID NO: 59978 - DNA, 20 bp, synthetic construct
  misc_feature 1..20: note = chemically synthesized
  source 1..20: mol_type = other DNA
caggctgccttcctgcccct

SEQ ID NO: 59979 - DNA, 20 bp, synthetic construct
  misc_feature 1..20: note = chemically synthesized
  source 1..20: mol_type = other DNA
aggctgccttcctgcccctg

SEQ ID NO: 59980 - DNA, 20 bp, synthetic construct
  misc_feature 1..20: note = chemically synthesized
  source 1..20: mol_type = other DNA
ggctgccttcctgcccctga

SEQ ID NO: 59981 - DNA, 20 bp, synthetic construct
  misc_feature 1..20: note = chemically synthesized
  source 1..20: mol_type = other DNA
gctgccttcctgcccctgag

SEQ ID NO: 59982 - DNA, 20 bp, synthetic construct
  misc_feature 1..20: note = chemically synthesized
  source 1..20: mol_type = other DNA
cccctgaggggttaaaatgc

SEQ ID NO: 59983 - DNA, 20 bp, synthetic construct
  misc_feature 1..20: note = chemically synthesized
  source 1..20: mol_type = other DNA
ccctgaggggttaaaatgcc

SEQ ID NO: 59984 - DNA, 20 bp, synthetic construct
  misc_feature 1..20: note = chemically synthesized
  source 1..20: mol_type = other DNA
cctgaggggttaaaatgcca

SEQ ID NO: 59985 - DNA, 20 bp, synthetic construct
  misc_feature 1..20: note = chemically synthesized
  source 1..20: mol_type = other DNA
gggttaaaatgccagggtcc

SEQ ID NO: 59986 - DNA, 20 bp, synthetic construct
  misc_feature 1..20: note = chemically synthesized
  source 1..20: mol_type = other DNA
ggttaaaatgccagggtcct

SEQ ID NO: 59987 - DNA, 20 bp, synthetic construct
  misc_feature 1..20: note = chemically synthesized
  source 1..20: mol_type = other DNA
gttaaaatgccagggtcctg

SEQ ID NO: 59988 - DNA, 20 bp, synthetic construct
  misc_feature 1..20: note = chemically synthesized
  source 1..20: mol_type = other DNA
ttaaaatgccagggtcctgg

SEQ ID NO: 59989 - DNA, 20 bp, synthetic construct
  misc_feature 1..20: note = chemically synthesized
  source 1..20: mol_type = other DNA
tgccagggtcctgggggccc

SEQ ID NO: 59990 - DNA, 20 bp, synthetic construct
  misc_feature 1..20: note = chemically synthesized
  source 1..20: mol_type = other DNA
gccagggtcctgggggcccc

SEQ ID NO: 59991 - DNA, 20 bp, synthetic construct
  misc_feature 1..20: note = chemically synthesized
  source 1..20: mol_type = other DNA
ccagggtcctgggggcccca

SEQ ID NO: 59992 - DNA, 20 bp, synthetic construct
  misc_feature 1..20: note = chemically synthesized
  source 1..20: mol_type = other DNA
tgggggccccagggcattct

SEQ ID NO: 59993 - DNA, 20 bp, synthetic construct
  misc_feature 1..20: note = chemically synthesized
  source 1..20: mol_type = other DNA
ggccccagggcattctaagc

SEQ ID NO: 59994 - DNA, 20 bp, synthetic construct
  misc_feature 1..20: note = chemically synthesized
  source 1..20: mol_type = other DNA
taagccagctcccactgtcc

SEQ ID NO: 59995 - DNA, 20 bp, synthetic construct
  misc_feature 1..20: note = chemically synthesized
  source 1..20: mol_type = other DNA
aagccagctcccactgtccc

SEQ ID NO: 59996 - DNA, 20 bp, synthetic construct
  misc_feature 1..20: note = chemically synthesized
  source 1..20: mol_type = other DNA
ctcccactgtcccaggaaaa

SEQ ID NO: 59997 - DNA, 20 bp, synthetic construct
  misc_feature 1..20: note = chemically synthesized
  source 1..20: mol_type = other DNA
actgtcccaggaaaacagca

SEQ ID NO: 59998 - DNA, 20 bp, synthetic construct
  misc_feature 1..20: note = chemically synthesized
  source 1..20: mol_type = other DNA
ctgtcccaggaaaacagcat

SEQ ID NO: 59999 - DNA, 20 bp, synthetic construct
  misc_feature 1..20: note = chemically synthesized
  source 1..20: mol_type = other DNA
tgtcccaggaaaacagcata

SEQ ID NO: 60000 - DNA, 20 bp, synthetic construct
  misc_feature 1..20: note = chemically synthesized
  source 1..20: mol_type = other DNA
gtcccaggaaaacagcatag

SEQ ID NO: 60001 - DNA, 20 bp, synthetic construct
  misc_feature 1..20: note = chemically synthesized
  source 1..20: mol_type = other DNA
cccaggaaaacagcataggg

SEQ ID NO: 60002 - DNA, 20 bp, synthetic construct
  misc_feature 1..20: note = chemically synthesized
  source 1..20: mol_type = other DNA
ccaggaaaacagcatagggg

SEQ ID NO: 60003 - DNA, 20 bp, synthetic construct
  misc_feature 1..20: note = chemically synthesized
  source 1..20: mol_type = other DNA
caggaaaacagcatagggga

SEQ ID NO: 60004 - DNA, 20 bp, synthetic construct
  misc_feature 1..20: note = chemically synthesized
  source 1..20: mol_type = other DNA
aggaaaacagcataggggag

SEQ ID NO: 60005 - DNA, 20 bp, synthetic construct
  misc_feature 1..20: note = chemically synthesized
  source 1..20: mol_type = other DNA
gaaaacagcataggggaggg

SEQ ID NO: 60006 - DNA, 20 bp, synthetic construct
  misc_feature 1..20: note = chemically synthesized
  source 1..20: mol_type = other DNA
aaaacagcataggggagggg

SEQ ID NO: 60007 - DNA, 20 bp, synthetic construct
  misc_feature 1..20: note = chemically synthesized
  source 1..20: mol_type = other DNA
acagcataggggaggggagg

SEQ ID NO: 60008 - DNA, 20 bp, synthetic construct
  misc_feature 1..20: note = chemically synthesized
  source 1..20: mol_type = other DNA
cagcataggggaggggaggt

SEQ ID NO: 60009 - DNA, 20 bp, synthetic construct
  misc_feature 1..20: note = chemically synthesized
  source 1..20: mol_type = other DNA
gcataggggaggggaggtgg

SEQ ID NO: 60010 - DNA, 20 bp, synthetic construct
  misc_feature 1..20: note = chemically synthesized
  source 1..20: mol_type = other DNA
cataggggaggggaggtggg

SEQ ID NO: 60011 - DNA, 20 bp, synthetic construct
  misc_feature 1..20: note = chemically synthesized
  source 1..20: mol_type = other DNA
ggggaggggaggtgggaggc

SEQ ID NO: 60012 - DNA, 20 bp, synthetic construct
  misc_feature 1..20: note = chemically synthesized
  source 1..20: mol_type = other DNA
gggaggggaggtgggaggca

SEQ ID NO: 60013 - DNA, 20 bp, synthetic construct
  misc_feature 1..20: note = chemically synthesized
  source 1..20: mol_type = other DNA
ggggaggtgggaggcaaggc

SEQ ID NO: 60014 - DNA, 20 bp, synthetic construct
  misc_feature 1..20: note = chemically synthesized
  source 1..20: mol_type = other DNA
gggaggtgggaggcaaggcc

SEQ ID NO: 60015 - DNA, 20 bp, synthetic construct
  misc_feature 1..20: note = chemically synthesized
  source 1..20: mol_type = other DNA
ggaggtgggaggcaaggcca

SEQ ID NO: 60016 - DNA, 20 bp, synthetic construct
  misc_feature 1..20: note = chemically synthesized
  source 1..20: mol_type = other DNA
gaggtgggaggcaaggccag

SEQ ID NO: 60017 - DNA, 20 bp, synthetic construct
  misc_feature 1..20: note = chemically synthesized
  source 1..20: mol_type = other DNA
ggggctgcttcctccactct

SEQ ID NO: 60018 - DNA, 20 bp, synthetic construct
  misc_feature 1..20: note = chemically synthesized
  source 1..20: mol_type = other DNA
gggctgcttcctccactctg

SEQ ID NO: 60019 - DNA, 20 bp, synthetic construct
  misc_feature 1..20: note = chemically synthesized
  source 1..20: mol_type = other DNA
tctgaggctcccttgctctt

SEQ ID NO: 60020 - DNA, 20 bp, synthetic construct
  misc_feature 1..20: note = chemically synthesized
  source 1..20: mol_type = other DNA
ctgaggctcccttgctcttg

SEQ ID NO: 60021 - DNA, 20 bp, synthetic construct
  misc_feature 1..20: note = chemically synthesized
  source 1..20: mol_type = other DNA
gctcccttgctcttgaggca

SEQ ID NO: 60022 - DNA, 20 bp, synthetic construct
  misc_feature 1..20: note = chemically synthesized
  source 1..20: mol_type = other DNA
ctcccttgctcttgaggcaa

SEQ ID NO: 60023 - DNA, 20 bp, synthetic construct
  misc_feature 1..20: note = chemically synthesized
  source 1..20: mol_type = other DNA
cccttgctcttgaggcaaag

SEQ ID NO: 60024 - DNA, 20 bp, synthetic construct
  misc_feature 1..20: note = chemically synthesized
  source 1..20: mol_type = other DNA
ccttgctcttgaggcaaagg

SEQ ID NO: 60025 - DNA, 20 bp, synthetic construct
  misc_feature 1..20: note = chemically synthesized
  source 1..20: mol_type = other DNA
cttgctcttgaggcaaagga

SEQ ID NO: 60026 - DNA, 20 bp, synthetic construct
  misc_feature 1..20: note = chemically synthesized
  source 1..20: mol_type = other DNA
gctcttgaggcaaaggaggg

SEQ ID NO: 60027 - DNA, 20 bp, synthetic construct
  misc_feature 1..20: note = chemically synthesized
  source 1..20: mol_type = other DNA
cttgaggcaaaggagggcag

SEQ ID NO: 60028 - DNA, 20 bp, synthetic construct
  misc_feature 1..20: note = chemically synthesized
  source 1..20: mol_type = other DNA
tgaggcaaaggagggcagtg

SEQ ID NO: 60029 - DNA, 20 bp, synthetic construct
  misc_feature 1..20: note = chemically synthesized
  source 1..20: mol_type = other DNA
aggcaaaggagggcagtgga

SEQ ID NO: 60030 - DNA, 20 bp, synthetic construct
  misc_feature 1..20: note = chemically synthesized
  source 1..20: mol_type = other DNA
caaaggagggcagtggagag

SEQ ID NO: 60031 - DNA, 20 bp, synthetic construct
  misc_feature 1..20: note = chemically synthesized
  source 1..20: mol_type = other DNA
ggagggcagtggagagcagc

SEQ ID NO: 60032 - DNA, 20 bp, synthetic construct
  misc_feature 1..20: note = chemically synthesized
  source 1..20: mol_type = other DNA
gagggcagtggagagcagcc

SEQ ID NO: 60033 - DNA, 20 bp, synthetic construct
  misc_feature 1..20: note = chemically synthesized
  source 1..20: mol_type = other DNA
agtggagagcagccaggctg

SEQ ID NO: 60034 - DNA, 20 bp, synthetic construct
  misc_feature 1..20: note = chemically synthesized
  source 1..20: mol_type = other DNA
gagagcagccaggctgcagt

SEQ ID NO: 60035 - DNA, 20 bp, synthetic construct
  misc_feature 1..20: note = chemically synthesized
  source 1..20: mol_type = other DNA
cagccaggctgcagtcagca

SEQ ID NO: 60036 - DNA, 20 bp, synthetic construct
  misc_feature 1..20: note = chemically synthesized
  source 1..20: mol_type = other DNA
ggctgcagtcagcacagcta

SEQ ID NO: 60037 - DNA, 20 bp, synthetic construct
  misc_feature 1..20: note = chemically synthesized
  source 1..20: mol_type = other DNA
agtcagcacagctaaagtcc

SEQ ID NO: 60038 - DNA, 20 bp, synthetic construct
  misc_feature 1..20: note = chemically synthesized
  source 1..20: mol_type = other DNA
ctaaagtcctggctctgctg

SEQ ID NO: 60039 - DNA, 20 bp, synthetic construct
  misc_feature 1..20: note = chemically synthesized
  source 1..20: mol_type = other DNA
tcctggctctgctgtggcct

SEQ ID NO: 60040 - DNA, 20 bp, synthetic construct
  misc_feature 1..20: note = chemically synthesized
  source 1..20: mol_type = other DNA
tggctctgctgtggccttag

SEQ ID NO: 60041 - DNA, 20 bp, synthetic construct
  misc_feature 1..20: note = chemically synthesized
  source 1..20: mol_type = other DNA
ggctctgctgtggccttagt

SEQ ID NO: 60042 - DNA, 20 bp, synthetic construct
  misc_feature 1..20: note = chemically synthesized
  source 1..20: mol_type = other DNA
gctctgctgtggccttagtg

SEQ ID NO: 60043 - DNA, 20 bp, synthetic construct
  misc_feature 1..20: note = chemically synthesized
  source 1..20: mol_type = other DNA
ctctgctgtggccttagtgg

SEQ ID NO: 60044 - DNA, 20 bp, synthetic construct
  misc_feature 1..20: note = chemically synthesized
  source 1..20: mol_type = other DNA
ctgtggccttagtgggggcc

SEQ ID NO: 60045 - DNA, 20 bp, synthetic construct
  misc_feature 1..20: note = chemically synthesized
  source 1..20: mol_type = other DNA
tgtggccttagtgggggccc

SEQ ID NO: 60046 - DNA, 20 bp, synthetic construct
  misc_feature 1..20: note = chemically synthesized
  source 1..20: mol_type = other DNA
tgggggcccaggtccctctc

SEQ ID NO: 60047 - DNA, 20 bp, synthetic construct
  misc_feature 1..20: note = chemically synthesized
  source 1..20: mol_type = other DNA
cccaggtccctctccagccc

SEQ ID NO: 60048 - DNA, 20 bp, synthetic construct
  misc_feature 1..20: note = chemically synthesized
  source 1..20: mol_type = other DNA
gtctcctccttctgtccaat

SEQ ID NO: 60049 - DNA, 20 bp, synthetic construct
  misc_feature 1..20: note = chemically synthesized
  source 1..20: mol_type = other DNA
cctccttctgtccaatgaga

SEQ ID NO: 60050 - DNA, 20 bp, synthetic construct
  misc_feature 1..20: note = chemically synthesized
  source 1..20: mol_type = other DNA
cttctgtccaatgagaaagc

SEQ ID NO: 60051 - DNA, 20 bp, synthetic construct
  misc_feature 1..20: note = chemically synthesized
  source 1..20: mol_type = other DNA
ttctgtccaatgagaaagct

SEQ ID NO: 60052 - DNA, 20 bp, synthetic construct
  misc_feature 1..20: note = chemically synthesized
  source 1..20: mol_type = other DNA
tccaatgagaaagctgggat

SEQ ID NO: 60053 - DNA, 20 bp, synthetic construct
  misc_feature 1..20: note = chemically synthesized
  source 1..20: mol_type = other DNA
ccaatgagaaagctgggatc

SEQ ID NO: 60054 - DNA, 20 bp, synthetic construct
  misc_feature 1..20: note = chemically synthesized
  source 1..20: mol_type = other DNA
caatgagaaagctgggatca

SEQ ID NO: 60055 - DNA, 20 bp, synthetic construct
  misc_feature 1..20: note = chemically synthesized
  source 1..20: mol_type = other DNA
aatgagaaagctgggatcag

SEQ ID NO: 60056 - DNA, 20 bp, synthetic construct
  misc_feature 1..20: note = chemically synthesized
  source 1..20: mol_type = other DNA
agctgggatcaggggtccct

SEQ ID NO: 60057 - DNA, 20 bp, synthetic construct
  misc_feature 1..20: note = chemically synthesized
  source 1..20: mol_type = other DNA
gctgggatcaggggtccctg

SEQ ID NO: 60058 - DNA, 20 bp, synthetic construct
  misc_feature 1..20: note = chemically synthesized
  source 1..20: mol_type = other DNA
gtccactctgcatgcctcga

SEQ ID NO: 60059 - DNA, 20 bp, synthetic construct
  misc_feature 1..20: note = chemically synthesized
  source 1..20: mol_type = other DNA
ctctgcatgcctcgatggtg

SEQ ID NO: 60060 - DNA, 20 bp, synthetic construct
  misc_feature 1..20: note = chemically synthesized
  source 1..20: mol_type = other DNA
cctcgatggtgaagctctgt

SEQ ID NO: 60061 - DNA, 20 bp, synthetic construct
  misc_feature 1..20: note = chemically synthesized
  source 1..20: mol_type = other DNA
atggtgaagctctgttggta

SEQ ID NO: 60062 - DNA, 20 bp, synthetic construct
  misc_feature 1..20: note = chemically synthesized
  source 1..20: mol_type = other DNA
gtgaagctctgttggtatgg

SEQ ID NO: 60063 - DNA, 20 bp, synthetic construct
  misc_feature 1..20: note = chemically synthesized
  source 1..20: mol_type = other DNA
gaagctctgttggtatggca

SEQ ID NO: 60064 - DNA, 20 bp, synthetic construct
  misc_feature 1..20: note = chemically synthesized
  source 1..20: mol_type = other DNA
aagctctgttggtatggcag

SEQ ID NO: 60065 - DNA, 20 bp, synthetic construct
  misc_feature 1..20: note = chemically synthesized
  source 1..20: mol_type = other DNA
agctctgttggtatggcaga

SEQ ID NO: 60066 - DNA, 20 bp, synthetic construct
  misc_feature 1..20: note = chemically synthesized
  source 1..20: mol_type = other DNA
gctctgttggtatggcagag

SEQ ID NO: 60067 - DNA, 20 bp, synthetic construct
  misc_feature 1..20: note = chemically synthesized
  source 1..20: mol_type = other DNA
tctgttggtatggcagaggg

SEQ ID NO: 60068 - DNA, 20 bp, synthetic construct
  misc_feature 1..20: note = chemically synthesized
  source 1..20: mol_type = other DNA
ctgttggtatggcagagggg

SEQ ID NO: 60069 - DNA, 20 bp, synthetic construct
  misc_feature 1..20: note = chemically synthesized
  source 1..20: mol_type = other DNA
atggcagaggggaggctgct

SEQ ID NO: 60070 - DNA, 20 bp, synthetic construct
  misc_feature 1..20: note = chemically synthesized
  source 1..20: mol_type = other DNA
tggcagaggggaggctgctc

SEQ ID NO: 60071 - DNA, 20 bp, synthetic construct
  misc_feature 1..20: note = chemically synthesized
  source 1..20: mol_type = other DNA
ctgcatttcccctgccaatc

SEQ ID NO: 60072 - DNA, 20 bp, synthetic construct
  misc_feature 1..20: note = chemically synthesized
  source 1..20: mol_type = other DNA
gcatttcccctgccaatcta

SEQ ID NO: 60073 - DNA, 20 bp, synthetic construct
  misc_feature 1..20: note = chemically synthesized
  source 1..20: mol_type = other DNA
catttcccctgccaatctag

SEQ ID NO: 60074 - DNA, 20 bp, synthetic construct
  misc_feature 1..20: note = chemically synthesized
  source 1..20: mol_type = other DNA
cccctgccaatctagaggat

SEQ ID NO: 60075 - DNA, 20 bp, synthetic construct
  misc_feature 1..20: note = chemically synthesized
  source 1..20: mol_type = other DNA
ccctgccaatctagaggatg

SEQ ID NO: 60076 - DNA, 20 bp, synthetic construct
  misc_feature 1..20: note = chemically synthesized
  source 1..20: mol_type = other DNA
gccaatctagaggatgagga

SEQ ID NO: 60077 - DNA, 20 bp, synthetic construct
  misc_feature 1..20: note = chemically synthesized
  source 1..20: mol_type = other DNA
tagaggatgaggaaagctct

SEQ ID NO: 60078 - DNA, 20 bp, synthetic construct
  misc_feature 1..20: note = chemically synthesized
  source 1..20: mol_type = other DNA
agaggatgaggaaagctctc

SEQ ID NO: 60079 - DNA, 20 bp, synthetic construct
  misc_feature 1..20: note = chemically synthesized
  source 1..20: mol_type = other DNA
atgaggaaagctctcaggaa

SEQ ID NO: 60080 - DNA, 20 bp, synthetic construct
  misc_feature 1..20: note = chemically synthesized
  source 1..20: mol_type = other DNA
ggaaagctctcaggaatagt

SEQ ID NO: 60081 - DNA, 20 bp, synthetic construct
  misc_feature 1..20: note = chemically synthesized
  source 1..20: mol_type = other DNA
aagctctcaggaatagtaag

SEQ ID NO: 60082 - DNA, 20 bp, synthetic construct
  misc_feature 1..20: note = chemically synthesized
  source 1..20: mol_type = other DNA
agtaagcagaatgtttgccc

SEQ ID NO: 60083 - DNA, 20 bp, synthetic construct
  misc_feature 1..20: note = chemically synthesized
  source 1..20: mol_type = other DNA
tttgccctggatgaataact

SEQ ID NO: 60084 - DNA, 20 bp, synthetic construct
  misc_feature 1..20: note = chemically synthesized
  source 1..20: mol_type = other DNA
taactgagctgccaattaac

SEQ ID NO: 60085 - DNA, 20 bp, synthetic construct
  misc_feature 1..20: note = chemically synthesized
  source 1..20: mol_type = other DNA
aactgagctgccaattaaca

SEQ ID NO: 60086 - DNA, 20 bp, synthetic construct
  misc_feature 1..20: note = chemically synthesized
  source 1..20: mol_type = other DNA
actgagctgccaattaacaa

SEQ ID NO: 60087 - DNA, 20 bp, synthetic construct
  misc_feature 1..20: note = chemically synthesized
  source 1..20: mol_type = other DNA
ctgagctgccaattaacaag

SEQ ID NO: 60088 - DNA, 20 bp, synthetic construct
  misc_feature 1..20: note = chemically synthesized
  source 1..20: mol_type = other DNA
agctgccaattaacaagggg

SEQ ID NO: 60089 - DNA, 20 bp, synthetic construct
  misc_feature 1..20: note = chemically synthesized
  source 1..20: mol_type = other DNA
gctgccaattaacaaggggc

SEQ ID NO: 60090 - DNA, 20 bp, synthetic construct
  misc_feature 1..20: note = chemically synthesized
  source 1..20: mol_type = other DNA
ctgccaattaacaaggggca

SEQ ID NO: 60091 - DNA, 20 bp, synthetic construct
  misc_feature 1..20: note = chemically synthesized
  source 1..20: mol_type = other DNA
gccaattaacaaggggcagg

SEQ ID NO: 60092 - DNA, 20 bp, synthetic construct
  misc_feature 1..20: note = chemically synthesized
  source 1..20: mol_type = other DNA
taacaaggggcagggagcct

SEQ ID NO: 60093 - DNA, 20 bp, synthetic construct
  misc_feature 1..20: note = chemically synthesized
  source 1..20: mol_type = other DNA
aaggggcagggagccttaga

SEQ ID NO: 60094 - DNA, 20 bp, synthetic construct
  misc_feature 1..20: note = chemically synthesized
  source 1..20: mol_type = other DNA
gggcagggagccttagacag

SEQ ID NO: 60095 - DNA, 20 bp, synthetic construct
  misc_feature 1..20: note = chemically synthesized
  source 1..20: mol_type = other DNA
ggcagggagccttagacaga

SEQ ID NO: 60096 - DNA, 20 bp, synthetic construct
  misc_feature 1..20: note = chemically synthesized
  source 1..20: mol_type = other DNA
acattttatttgtaatatcc

SEQ ID NO: 60097 - DNA, 20 bp, synthetic construct
  misc_feature 1..20: note = chemically synthesized
  source 1..20: mol_type = other DNA
atgattccaataaaaatgca

SEQ ID NO: 60098 - DNA, 20 bp, synthetic construct
  misc_feature 1..20: note = chemically synthesized
  source 1..20: mol_type = other DNA
ataaaaatgcacagccacga

SEQ ID NO: 60099 - DNA, 20 bp, synthetic construct
  misc_feature 1..20: note = chemically synthesized
  source 1..20: mol_type = other DNA
acagccacgatggcatctct

SEQ ID NO: 60100 - DNA, 20 bp, synthetic construct
  misc_feature 1..20: note = chemically synthesized
  source 1..20: mol_type = other DNA
agcctgacatcgccacgatg

SEQ ID NO: 60101 - DNA, 20 bp, synthetic construct
  misc_feature 1..20: note = chemically synthesized
  source 1..20: mol_type = other DNA
agaaattctgcatcttcctc

SEQ ID NO: 60102 - DNA, 20 bp, synthetic construct
  misc_feature 1..20: note = chemically synthesized
  source 1..20: mol_type = other DNA
tatccccacacaatcttttt

SEQ ID NO: 60103 - DNA, 20 bp, synthetic construct
  misc_feature 1..20: note = chemically synthesized
  source 1..20: mol_type = other DNA
ccccacacaatctttttcgg

SEQ ID NO: 60104 - DNA, 20 bp, synthetic construct
  misc_feature 1..20: note = chemically synthesized
  source 1..20: mol_type = other DNA
cacaatctttttcggcagct

SEQ ID NO: 60105 - DNA, 20 bp, synthetic construct
  misc_feature 1..20: note = chemically synthesized
  source 1..20: mol_type = other DNA
atctttttcggcagcttgga

SEQ ID NO: 60106 - DNA, 20 bp, synthetic construct
  misc_feature 1..20: note = chemically synthesized
  source 1..20: mol_type = other DNA
ttttcggcagcttggatggt

SEQ ID NO: 60107 - DNA, 20 bp, synthetic construct
  misc_feature 1..20: note = chemically synthesized
  source 1..20: mol_type = other DNA
gcagcttggatggtcagttt

SEQ ID NO: 60108 - DNA, 20 bp, synthetic construct
  misc_feature 1..20: note = chemically synthesized
  source 1..20: mol_type = other DNA
gtcagtttcagcacctttta

SEQ ID NO: 60109 - DNA, 20 bp, synthetic construct
  misc_feature 1..20: note = chemically synthesized
  source 1..20: mol_type = other DNA
agcaccttttacagatgatg

SEQ ID NO: 60110 - DNA, 20 bp, synthetic construct
  misc_feature 1..20: note = chemically synthesized
  source 1..20: mol_type = other DNA
cttttacagatgatgaagct

SEQ ID NO: 60111 - DNA, 20 bp, synthetic construct
  misc_feature 1..20: note = chemically synthesized
  source 1..20: mol_type = other DNA
agatgatgaagctgagcctc

SEQ ID NO: 60112 - DNA, 20 bp, synthetic construct
  misc_feature 1..20: note = chemically synthesized
  source 1..20: mol_type = other DNA
gatgatgaagctgagcctcg

SEQ ID NO: 60113 - DNA, 20 bp, synthetic construct
  misc_feature 1..20: note = chemically synthesized
  source 1..20: mol_type = other DNA
atgatgaagctgagcctcga

SEQ ID NO: 60114 - DNA, 20 bp, synthetic construct
  misc_feature 1..20: note = chemically synthesized
  source 1..20: mol_type = other DNA
ctcgagggatgtgtgtcgtc

SEQ ID NO: 60115 - DNA, 20 bp, synthetic construct
  misc_feature 1..20: note = chemically synthesized
  source 1..20: mol_type = other DNA
tcgagggatgtgtgtcgtca

SEQ ID NO: 60116 - DNA, 20 bp, synthetic construct
  misc_feature 1..20: note = chemically synthesized
  source 1..20: mol_type = other DNA
cgagggatgtgtgtcgtcaa

SEQ ID NO: 60117 - DNA, 20 bp, synthetic construct
  misc_feature 1..20: note = chemically synthesized
  source 1..20: mol_type = other DNA
gagggatgtgtgtcgtcaag

SEQ ID NO: 60118 - DNA, 20 bp, synthetic construct
  misc_feature 1..20: note = chemically synthesized
  source 1..20: mol_type = other DNA
agggatgtgtgtcgtcaagg

SEQ ID NO: 60119 - DNA, 20 bp, synthetic construct
  misc_feature 1..20: note = chemically synthesized
  source 1..20: mol_type = other DNA
tgtgtgtcgtcaagggggct

SEQ ID NO: 60120 - DNA, 20 bp, synthetic construct
  misc_feature 1..20: note = chemically synthesized
  source 1..20: mol_type = other DNA
gtgtgtcgtcaagggggctc

SEQ ID NO: 60121 - DNA, 20 bp, synthetic construct
  misc_feature 1..20: note = chemically synthesized
  source 1..20: mol_type = other DNA
tgtgtcgtcaagggggctca

SEQ ID NO: 60122 - DNA, 20 bp, synthetic construct
  misc_feature 1..20: note = chemically synthesized
  source 1..20: mol_type = other DNA
caagggggctcagggcttct

SEQ ID NO: 60123 - DNA, 20 bp, synthetic construct
  misc_feature 1..20: note = chemically synthesized
  source 1..20: mol_type = other DNA
aagggggctcagggcttctc

SEQ ID NO: 60124 - DNA, 20 bp, synthetic construct
  misc_feature 1..20: note = chemically synthesized
  source 1..20: mol_type = other DNA
agggggctcagggcttctca

SEQ ID NO: 60125 - DNA, 20 bp, synthetic construct
  misc_feature 1..20: note = chemically synthesized
  source 1..20: mol_type = other DNA
ggggctcagggcttctcagg

SEQ ID NO: 60126 - DNA, 20 bp, synthetic construct
  misc_feature 1..20: note = chemically synthesized
  source 1..20: mol_type = other DNA
gggctcagggcttctcaggg

SEQ ID NO: 60127 - DNA, 20 bp, synthetic construct
  misc_feature 1..20: note = chemically synthesized
  source 1..20: mol_type = other DNA
ggctcagggcttctcaggga

SEQ ID NO: 60128 - DNA, 20 bp, synthetic construct
  misc_feature 1..20: note = chemically synthesized
  source 1..20: mol_type = other DNA
gctcagggcttctcagggag

SEQ ID NO: 60129 - DNA, 20 bp, synthetic construct
  misc_feature 1..20: note = chemically synthesized
  source 1..20: mol_type = other DNA
cttctcagggaggggactca

SEQ ID NO: 60130 - DNA, 20 bp, synthetic construct
  misc_feature 1..20: note = chemically synthesized
  source 1..20: mol_type = other DNA
tccaaaccttcactcacccc

SEQ ID NO: 60131 - DNA, 20 bp, synthetic construct
  misc_feature 1..20: note = chemically synthesized
  source 1..20: mol_type = other DNA
tgcccaccttcccctctctc

SEQ ID NO: 60132 - DNA, 20 bp, synthetic construct
  misc_feature 1..20: note = chemically synthesized
  source 1..20: mol_type = other DNA
gcccaccttcccctctctcc

SEQ ID NO: 60133 - DNA, 20 bp, synthetic construct
  misc_feature 1..20: note = chemically synthesized
  source 1..20: mol_type = other DNA
ttcccctctctccaggcaaa

SEQ ID NO: 60134 - DNA, 20 bp, synthetic construct
  misc_feature 1..20: note = chemically synthesized
  source 1..20: mol_type = other DNA
tcccctctctccaggcaaat

SEQ ID NO: 60135 - DNA, 20 bp, synthetic construct
  misc_feature 1..20: note = chemically synthesized
  source 1..20: mol_type = other DNA
ccctctctccaggcaaatgg

SEQ ID NO: 60136 - DNA, 20 bp, synthetic construct
  misc_feature 1..20: note = chemically synthesized
  source 1..20: mol_type = other DNA
ctctctccaggcaaatggga

SEQ ID NO: 60137 - DNA, 20 bp, synthetic construct
  misc_feature 1..20: note = chemically synthesized
  source 1..20: mol_type = other DNA
caaatgggagagaccctttg

SEQ ID NO: 60138 - DNA, 20 bp, synthetic construct
  misc_feature 1..20: note = chemically synthesized
  source 1..20: mol_type = other DNA
gggagagaccctttgaagtc

SEQ ID NO: 60139 - DNA, 20 bp, synthetic construct
  misc_feature 1..20: note = chemically synthesized
  source 1..20: mol_type = other DNA
ggagagaccctttgaagtca

SEQ ID NO: 60140 - DNA, 20 bp, synthetic construct
  misc_feature 1..20: note = chemically synthesized
  source 1..20: mol_type = other DNA
cctttgaagtcaaggacacc

SEQ ID NO: 60141 - DNA, 20 bp, synthetic construct
  misc_feature 1..20: note = chemically synthesized
  source 1..20: mol_type = other DNA
ctttgaagtcaaggacaccg

SEQ ID NO: 60142 - DNA, 20 bp, synthetic construct
  misc_feature 1..20: note = chemically synthesized
  source 1..20: mol_type = other DNA
tgaagtcaaggacaccgagg

SEQ ID NO: 60143 - DNA, 20 bp, synthetic construct
  misc_feature 1..20: note = chemically synthesized
  source 1..20: mol_type = other DNA
aagtcaaggacaccgaggaa

SEQ ID NO: 60144 - DNA, 20 bp, synthetic construct
  misc_feature 1..20: note = chemically synthesized
  source 1..20: mol_type = other DNA
agtcaaggacaccgaggaag

SEQ ID NO: 60145 - DNA, 20 bp, synthetic construct
  misc_feature 1..20: note = chemically synthesized
  source 1..20: mol_type = other DNA
cgaggaagaggacttccacg

SEQ ID NO: 60146 - DNA, 20 bp, synthetic construct
  misc_feature 1..20: note = chemically synthesized
  source 1..20: mol_type = other DNA
aagaggacttccacgtggac

SEQ ID NO: 60147 - DNA, 20 bp, synthetic construct
  misc_feature 1..20: note = chemically synthesized
  source 1..20: mol_type = other DNA
agaggacttccacgtggacc

SEQ ID NO: 60148 - DNA, 20 bp, synthetic construct
  misc_feature 1..20: note = chemically synthesized
  source 1..20: mol_type = other DNA
tggaccaggtgaccaccgtg

SEQ ID NO: 60149 - DNA, 20 bp, synthetic construct
  misc_feature 1..20: note = chemically synthesized
  source 1..20: mol_type = other DNA
ggaccaggtgaccaccgtga

SEQ ID NO: 60150 - DNA, 20 bp, synthetic construct
  misc_feature 1..20: note = chemically synthesized
  source 1..20: mol_type = other DNA
ccgtgaaggtgcctatgatg

SEQ ID NO: 60151 - DNA, 20 bp, synthetic construct
  misc_feature 1..20: note = chemically synthesized
  source 1..20: mol_type = other DNA
ggtgcctatgatgaagcgtt

SEQ ID NO: 60152 - DNA, 20 bp, synthetic construct
  misc_feature 1..20: note = chemically synthesized
  source 1..20: mol_type = other DNA
gtgcctatgatgaagcgttt

SEQ ID NO: 60153 - DNA, 20 bp, synthetic construct
  misc_feature 1..20: note = chemically synthesized
  source 1..20: mol_type = other DNA
gtttaggcatgtttaacatc

SEQ ID NO: 60154 - DNA, 20 bp, synthetic construct
  misc_feature 1..20: note = chemically synthesized
  source 1..20: mol_type = other DNA
tgtttaacatccagcactgt

SEQ ID NO: 60155 - DNA, 20 bp, synthetic construct
  misc_feature 1..20: note = chemically synthesized
  source 1..20: mol_type = other DNA
ttaacatccagcactgtaag

SEQ ID NO: 60156 - DNA, 20 bp, synthetic construct
  misc_feature 1..20: note = chemically synthesized
  source 1..20: mol_type = other DNA
cagcactgtaagaagctgtc

SEQ ID NO: 60157 - DNA, 20 bp, synthetic construct
  misc_feature 1..20: note = chemically synthesized
  source 1..20: mol_type = other DNA
actgtaagaagctgtccagc

SEQ ID NO: 60158 - DNA, 20 bp, synthetic construct
  misc_feature 1..20: note = chemically synthesized
  source 1..20: mol_type = other DNA
ctgtaagaagctgtccagct

SEQ ID NO: 60159 - DNA, 20 bp, synthetic construct
  misc_feature 1..20: note = chemically synthesized
  source 1..20: mol_type = other DNA
ggtgctgctgatgaaatacc

SEQ ID NO: 60160 - DNA, 20 bp, synthetic construct
  misc_feature 1..20: note = chemically synthesized
  source 1..20: mol_type = other DNA
gtgctgctgatgaaatacct

SEQ ID NO: 60161 - DNA, 20 bp, synthetic construct
  misc_feature 1..20: note = chemically synthesized
  source 1..20: mol_type = other DNA
ccatcttcttcctgcctgat

SEQ ID NO: 60162 - DNA, 20 bp, synthetic construct
  misc_feature 1..20: note = chemically synthesized
  source 1..20: mol_type = other DNA
catcttcttcctgcctgatg

SEQ ID NO: 60163 - DNA, 20 bp, synthetic construct
  misc_feature 1..20: note = chemically synthesized
  source 1..20: mol_type = other DNA
atcttcttcctgcctgatga

SEQ ID NO: 60164 - DNA, 20 bp, synthetic construct
  misc_feature 1..20: note = chemically synthesized
  source 1..20: mol_type = other DNA
tcttcttcctgcctgatgag

SEQ ID NO: 60165 - DNA, 20 bp, synthetic construct
  misc_feature 1..20: note = chemically synthesized
  source 1..20: mol_type = other DNA
tgcctgatgaggggaaacta

SEQ ID NO: 60166 - DNA, 20 bp, synthetic construct
  misc_feature 1..20: note = chemically synthesized
  source 1..20: mol_type = other DNA
tgaggggaaactacagcacc

SEQ ID NO: 60167 - DNA, 20 bp, synthetic construct
  misc_feature 1..20: note = chemically synthesized
  source 1..20: mol_type = other DNA
tcacccacgatatcatcacc

SEQ ID NO: 60168 - DNA, 20 bp, synthetic construct
  misc_feature 1..20: note = chemically synthesized
  source 1..20: mol_type = other DNA
cgatatcatcaccaagttcc

SEQ ID NO: 60169 - DNA, 20 bp, synthetic construct
  misc_feature 1..20: note = chemically synthesized
  source 1..20: mol_type = other DNA
caccaagttcctggaaaatg

SEQ ID NO: 60170 - DNA, 20 bp, synthetic construct
  misc_feature 1..20: note = chemically synthesized
  source 1..20: mol_type = other DNA
aagttcctggaaaatgaaga

SEQ ID NO: 60171 - DNA, 20 bp, synthetic construct
  misc_feature 1..20: note = chemically synthesized
  source 1..20: mol_type = other DNA
ttcctggaaaatgaagacag

SEQ ID NO: 60172 - DNA, 20 bp, synthetic construct
  misc_feature 1..20: note = chemically synthesized
  source 1..20: mol_type = other DNA
tcctggaaaatgaagacaga

SEQ ID NO: 60173 - DNA, 20 bp, synthetic construct
  misc_feature 1..20: note = chemically synthesized
  source 1..20: mol_type = other DNA
agaaggtgattccccaacct

SEQ ID NO: 60174 - DNA, 20 bp, synthetic construct
  misc_feature 1..20: note = chemically synthesized
  source 1..20: mol_type = other DNA
gaaggtgattccccaacctg

SEQ ID NO: 60175 - DNA, 20 bp, synthetic construct
  misc_feature 1..20: note = chemically synthesized
  source 1..20: mol_type = other DNA
aaggtgattccccaacctga

SEQ ID NO: 60176 - DNA, 20 bp, synthetic construct
  misc_feature 1..20: note = chemically synthesized
  source 1..20: mol_type = other DNA
tccccaacctgagggtgacc

SEQ ID NO: 60177 - DNA, 20 bp, synthetic construct
  misc_feature 1..20: note = chemically synthesized
  source 1..20: mol_type = other DNA
ccaacctgagggtgaccaag

SEQ ID NO: 60178 - DNA, 20 bp, synthetic construct
  misc_feature 1..20: note = chemically synthesized
  source 1..20: mol_type = other DNA
aagaagctgcccacacctct

SEQ ID NO: 60179 - DNA, 20 bp, synthetic construct
  misc_feature 1..20: note = chemically synthesized
  source 1..20: mol_type = other DNA
cccacacctcttagccatgt

SEQ ID NO: 60180 - DNA, 20 bp, synthetic construct
  misc_feature 1..20: note = chemically synthesized
  source 1..20: mol_type = other DNA
ccacacctcttagccatgtt

SEQ ID NO: 60181 - DNA, 20 bp, synthetic construct
  misc_feature 1..20: note = chemically synthesized
  source 1..20: mol_type = other DNA
ctcttagccatgttgggact

SEQ ID NO: 60182 - DNA, 20 bp, synthetic construct
  misc_feature 1..20: note = chemically synthesized
  source 1..20: mol_type = other DNA
tcttagccatgttgggactg

SEQ ID NO: 60183 - DNA, 20 bp, synthetic construct
  misc_feature 1..20: note = chemically synthesized
  source 1..20: mol_type = other DNA
atgttgggactgaggcccat

SEQ ID NO: 60184 - DNA, 20 bp, synthetic construct
  misc_feature 1..20: note = chemically synthesized
  source 1..20: mol_type = other DNA
tgttgggactgaggcccatc

SEQ ID NO: 60185 - DNA, 20 bp, synthetic construct
  misc_feature 1..20: note = chemically synthesized
  source 1..20: mol_type = other DNA
ggactgaggcccatcaggac

SEQ ID NO: 60186 - DNA, 20 bp, synthetic construct
  misc_feature 1..20: note = chemically synthesized
  source 1..20: mol_type = other DNA
tgaggcccatcaggactggc

SEQ ID NO: 60187 - DNA, 20 bp, synthetic construct
  misc_feature 1..20: note = chemically synthesized
  source 1..20: mol_type = other DNA
aggcccatcaggactggcca

SEQ ID NO: 60188 - DNA, 20 bp, synthetic construct
  misc_feature 1..20: note = chemically synthesized
  source 1..20: mol_type = other DNA
ggcccatcaggactggccag

SEQ ID NO: 60189 - DNA, 20 bp, synthetic construct
  misc_feature 1..20: note = chemically synthesized
  source 1..20: mol_type = other DNA
gcccatcaggactggccaga

SEQ ID NO: 60190 - DNA, 20 bp, synthetic construct
  misc_feature 1..20: note = chemically synthesized
  source 1..20: mol_type = other DNA
tcaggactggccagagggct

SEQ ID NO: 60191 - DNA, 20 bp, synthetic construct
  misc_feature 1..20: note = chemically synthesized
  source 1..20: mol_type = other DNA
caggactggccagagggctg

SEQ ID NO: 60192 - DNA, 20 bp, synthetic construct
  misc_feature 1..20: note = chemically synthesized
  source 1..20: mol_type = other DNA
ggactggccagagggctgag

SEQ ID NO: 60193 - DNA, 20 bp, synthetic construct
  misc_feature 1..20: note = chemically synthesized
  source 1..20: mol_type = other DNA
gactggccagagggctgagg

SEQ ID NO: 60194 - DNA, 20 bp, synthetic construct
  misc_feature 1..20: note = chemically synthesized
  source 1..20: mol_type = other DNA
actggccagagggctgagga

SEQ ID NO: 60195 - DNA, 20 bp, synthetic construct
  misc_feature 1..20: note = chemically synthesized
  source 1..20: mol_type = other DNA
gagggtgaaccccacatccc

SEQ ID NO: 60196 - DNA, 20 bp, synthetic construct
  misc_feature 1..20: note = chemically synthesized
  source 1..20: mol_type = other DNA
agggtgaaccccacatccct

SEQ ID NO: 60197 - DNA, 20 bp, synthetic construct
  misc_feature 1..20: note = chemically synthesized
  source 1..20: mol_type = other DNA
actgctactctgtataaact

SEQ ID NO: 60198 - DNA, 20 bp, synthetic construct
  misc_feature 1..20: note = chemically synthesized
  source 1..20: mol_type = other DNA
ctctgtataaacttggcttc

SEQ ID NO: 60199 - DNA, 20 bp, synthetic construct
  misc_feature 1..20: note = chemically synthesized
  source 1..20: mol_type = other DNA
ataaacttggcttccagaat

SEQ ID NO: 60200 - DNA, 20 bp, synthetic construct
  misc_feature 1..20: note = chemically synthesized
  source 1..20: mol_type = other DNA
taaacttggcttccagaatg

SEQ ID NO: 60201 - DNA, 20 bp, synthetic construct
  misc_feature 1..20: note = chemically synthesized
  source 1..20: mol_type = other DNA
tccagaatgaggccaccact

SEQ ID NO: 60202 - DNA, 20 bp, synthetic construct
  misc_feature 1..20: note = chemically synthesized
  source 1..20: mol_type = other DNA
aatgaggccaccactgagtt

SEQ ID NO: 60203 - DNA, 20 bp, synthetic construct
  misc_feature 1..20: note = chemically synthesized
  source 1..20: mol_type = other DNA
atgaggccaccactgagttc

SEQ ID NO: 60204 - DNA, 20 bp, synthetic construct
  misc_feature 1..20: note = chemically synthesized
  source 1..20: mol_type = other DNA
aggccaccactgagttcagg

SEQ ID NO: 60205 - DNA, 20 bp, synthetic construct
  misc_feature 1..20: note = chemically synthesized
  source 1..20: mol_type = other DNA
cagcgccatccatgctccat

SEQ ID NO: 60206 - DNA, 20 bp, synthetic construct
  misc_feature 1..20: note = chemically synthesized
  source 1..20: mol_type = other DNA
agcgccatccatgctccatg

SEQ ID NO: 60207 - DNA, 20 bp, synthetic construct
  misc_feature 1..20: note = chemically synthesized
  source 1..20: mol_type = other DNA
cgccatccatgctccatgag

SEQ ID NO: 60208 - DNA, 20 bp, synthetic construct
  misc_feature 1..20: note = chemically synthesized
  source 1..20: mol_type = other DNA
gccatccatgctccatgagg

SEQ ID NO: 60209 - DNA, 20 bp, synthetic construct
  misc_feature 1..20: note = chemically synthesized
  source 1..20: mol_type = other DNA
tccatgctccatgaggagga

SEQ ID NO: 60210 - DNA, 20 bp, synthetic construct
  misc_feature 1..20: note = chemically synthesized
  source 1..20: mol_type = other DNA
tccatgaggaggacagtacc

SEQ ID NO: 60211 - DNA, 20 bp, synthetic construct
  misc_feature 1..20: note = chemically synthesized
  source 1..20: mol_type = other DNA
ccatgaggaggacagtaccc

SEQ ID NO: 60212 - DNA, 20 bp, synthetic construct
  misc_feature 1..20: note = chemically synthesized
  source 1..20: mol_type = other DNA
catgaggaggacagtaccca

SEQ ID NO: 60213 - DNA, 20 bp, synthetic construct
  misc_feature 1..20: note = chemically synthesized
  source 1..20: mol_type = other DNA
atgaggaggacagtacccag

SEQ ID NO: 60214 - DNA, 20 bp, synthetic construct
  misc_feature 1..20: note = chemically synthesized
  source 1..20: mol_type = other DNA
ggaggacagtacccaggggt

SEQ ID NO: 60215 - DNA, 20 bp, synthetic construct
  misc_feature 1..20: note = chemically synthesized
  source 1..20: mol_type = other DNA
gaggacagtacccaggggtg

SEQ ID NO: 60216 - DNA, 20 bp, synthetic construct
  misc_feature 1..20: note = chemically synthesized
  source 1..20: mol_type = other DNA
ggacagtacccaggggtgag

SEQ ID NO: 60217 - DNA, 20 bp, synthetic construct
  misc_feature 1..20: note = chemically synthesized
  source 1..20: mol_type = other DNA
gacagtacccaggggtgagg

SEQ ID NO: 60218 - DNA, 20 bp, synthetic construct
  misc_feature 1..20: note = chemically synthesized
  source 1..20: mol_type = other DNA
tacccaggggtgaggaggta

SEQ ID NO: 60219 - DNA, 20 bp, synthetic construct
  misc_feature 1..20: note = chemically synthesized
  source 1..20: mol_type = other DNA
acccaggggtgaggaggtaa

SEQ ID NO: 60220 - DNA, 20 bp, synthetic construct
  misc_feature 1..20: note = chemically synthesized
  source 1..20: mol_type = other DNA
ggaggtaaaggtctcgtccc

SEQ ID NO: 60221 - DNA, 20 bp, synthetic construct
  misc_feature 1..20: note = chemically synthesized
  source 1..20: mol_type = other DNA
gaggtaaaggtctcgtccct

SEQ ID NO: 60222 - DNA, 20 bp, synthetic construct
  misc_feature 1..20: note = chemically synthesized
  source 1..20: mol_type = other DNA
aggtaaaggtctcgtccctg

SEQ ID NO: 60223 - DNA, 20 bp, synthetic construct
  misc_feature 1..20: note = chemically synthesized
  source 1..20: mol_type = other DNA
tccctggggacttcccactc

SEQ ID NO: 60224 - DNA, 20 bp, synthetic construct
  misc_feature 1..20: note = chemically synthesized
  source 1..20: mol_type = other DNA
ggggacttcccactccagtg

SEQ ID NO: 60225 - DNA, 20 bp, synthetic construct
  misc_feature 1..20: note = chemically synthesized
  source 1..20: mol_type = other DNA
cactgtcccttcccaatatc

SEQ ID NO: 60226 - DNA, 20 bp, synthetic construct
  misc_feature 1..20: note = chemically synthesized
  source 1..20: mol_type = other DNA
ccttcccaatatccagtgcc

SEQ ID NO: 60227 - DNA, 20 bp, synthetic construct
  misc_feature 1..20: note = chemically synthesized
  source 1..20: mol_type = other DNA
cttcccaatatccagtgccc

SEQ ID NO: 60228 - DNA, 20 bp, synthetic construct
  misc_feature 1..20: note = chemically synthesized
  source 1..20: mol_type = other DNA
ttcccaatatccagtgccca

SEQ ID NO: 60229 - DNA, 20 bp, synthetic construct
  misc_feature 1..20: note = chemically synthesized
  source 1..20: mol_type = other DNA
ccaatatccagtgcccaggg

SEQ ID NO: 60230 - DNA, 20 bp, synthetic construct
  misc_feature 1..20: note = chemically synthesized
  source 1..20: mol_type = other DNA
caatatccagtgcccagggc

SEQ ID NO: 60231 - DNA, 20 bp, synthetic construct
  misc_feature 1..20: note = chemically synthesized
  source 1..20: mol_type = other DNA
aatatccagtgcccagggca

SEQ ID NO: 60232 - DNA, 20 bp, synthetic construct
  misc_feature 1..20: note = chemically synthesized
  source 1..20: mol_type = other DNA
tccagtgcccagggcaggga

SEQ ID NO: 60233 - DNA, 20 bp, synthetic construct
  misc_feature 1..20: note = chemically synthesized
  source 1..20: mol_type = other DNA
agtgcccagggcagggacag

SEQ ID NO: 60234 - DNA, 20 bp, synthetic construct
  misc_feature 1..20: note = chemically synthesized
  source 1..20: mol_type = other DNA
agcagcaccaccacacgttc

SEQ ID NO: 60235 - DNA, 20 bp, synthetic construct
  misc_feature 1..20: note = chemically synthesized
  source 1..20: mol_type = other DNA
agcaccaccacacgttctgg

SEQ ID NO: 60236 - DNA, 20 bp, synthetic construct
  misc_feature 1..20: note = chemically synthesized
  source 1..20: mol_type = other DNA
cacgttctggcagaaccaaa

SEQ ID NO: 60237 - DNA, 20 bp, synthetic construct
  misc_feature 1..20: note = chemically synthesized
  source 1..20: mol_type = other DNA
acgttctggcagaaccaaaa

SEQ ID NO: 60238 - DNA, 20 bp, synthetic construct
  misc_feature 1..20: note = chemically synthesized
  source 1..20: mol_type = other DNA
ctggcagaaccaaaaaggaa

SEQ ID NO: 60239 - DNA, 20 bp, synthetic construct
  misc_feature 1..20: note = chemically synthesized
  source 1..20: mol_type = other DNA
cagaaccaaaaaggaacaga

SEQ ID NO: 60240 - DNA, 20 bp, synthetic construct
  misc_feature 1..20: note = chemically synthesized
  source 1..20: mol_type = other DNA
agaaccaaaaaggaacagat

SEQ ID NO: 60241 - DNA, 20 bp, synthetic construct
  misc_feature 1..20: note = chemically synthesized
  source 1..20: mol_type = other DNA
aaaggaacagatgggcttcc

SEQ ID NO: 60242 - DNA, 20 bp, synthetic construct
  misc_feature 1..20: note = chemically synthesized
  source 1..20: mol_type = other DNA
aacagatgggcttcctggca

SEQ ID NO: 60243 - DNA, 20 bp, synthetic construct
  misc_feature 1..20: note = chemically synthesized
  source 1..20: mol_type = other DNA
acagatgggcttcctggcaa

SEQ ID NO: 60244 - DNA, 20 bp, synthetic construct
  misc_feature 1..20: note = chemically synthesized
  source 1..20: mol_type = other DNA
gatgggcttcctggcaaagg

SEQ ID NO: 60245 - DNA, 20 bp, synthetic construct
  misc_feature 1..20: note = chemically synthesized
  source 1..20: mol_type = other DNA
gggcttcctggcaaaggcag

SEQ ID NO: 60246 - DNA, 20 bp, synthetic construct
  misc_feature 1..20: note = chemically synthesized
  source 1..20: mol_type = other DNA
cttcctggcaaaggcagcag

SEQ ID NO: 60247 - DNA, 20 bp, synthetic construct
  misc_feature 1..20: note = chemically synthesized
  source 1..20: mol_type = other DNA
tcctggcaaaggcagcagtg

SEQ ID NO: 60248 - DNA, 20 bp, synthetic construct
  misc_feature 1..20: note = chemically synthesized
  source 1..20: mol_type = other DNA
gcaaaggcagcagtggagtg

SEQ ID NO: 60249 - DNA, 20 bp, synthetic construct
  misc_feature 1..20: note = chemically synthesized
  source 1..20: mol_type = other DNA
aaaggcagcagtggagtgtg

SEQ ID NO: 60250 - DNA, 20 bp, synthetic construct
  misc_feature 1..20: note = chemically synthesized
  source 1..20: mol_type = other DNA
agcagtggagtgtggagttc

SEQ ID NO: 60251 - DNA, 20 bp, synthetic construct
  misc_feature 1..20: note = chemically synthesized
  source 1..20: mol_type = other DNA
gcagtggagtgtggagttca

SEQ ID NO: 60252 - DNA, 20 bp, synthetic construct
  misc_feature 1..20: note = chemically synthesized
  source 1..20: mol_type = other DNA
cagtggagtgtggagttcaa

SEQ ID NO: 60253 - DNA, 20 bp, synthetic construct
  misc_feature 1..20: note = chemically synthesized
  source 1..20: mol_type = other DNA
tggagtgtggagttcaaggg

SEQ ID NO: 60254 - DNA, 20 bp, synthetic construct
  misc_feature 1..20: note = chemically synthesized
  source 1..20: mol_type = other DNA
gttcaagggtagaatgtccc

SEQ ID NO: 60255 - DNA, 20 bp, synthetic construct
  misc_feature 1..20: note = chemically synthesized
  source 1..20: mol_type = other DNA
ttcaagggtagaatgtccct

SEQ ID NO: 60256 - DNA, 20 bp, synthetic construct
  misc_feature 1..20: note = chemically synthesized
  source 1..20: mol_type = other DNA
tcaagggtagaatgtccctg

SEQ ID NO: 60257 - DNA, 20 bp, synthetic construct
  misc_feature 1..20: note = chemically synthesized
  source 1..20: mol_type = other DNA
caagggtagaatgtccctgg

SEQ ID NO: 60258 - DNA, 20 bp, synthetic construct
  misc_feature 1..20: note = chemically synthesized
  source 1..20: mol_type = other DNA
aagggtagaatgtccctggg

SEQ ID NO: 60259 - DNA, 20 bp, synthetic construct
  misc_feature 1..20: note = chemically synthesized
  source 1..20: mol_type = other DNA
gtagaatgtccctgggggga

SEQ ID NO: 60260 - DNA, 20 bp, synthetic construct
  misc_feature 1..20: note = chemically synthesized
  source 1..20: mol_type = other DNA
tagaatgtccctggggggac

SEQ ID NO: 60261 - DNA, 20 bp, synthetic construct
  misc_feature 1..20: note = chemically synthesized
  source 1..20: mol_type = other DNA
agaatgtccctggggggacg

SEQ ID NO: 60262 - DNA, 20 bp, synthetic construct
  misc_feature 1..20: note = chemically synthesized
  source 1..20: mol_type = other DNA
gaatgtccctggggggacgg

SEQ ID NO: 60263 - DNA, 20 bp, synthetic construct
  misc_feature 1..20: note = chemically synthesized
  source 1..20: mol_type = other DNA
tgtccctggggggacggggg

SEQ ID NO: 60264 - DNA, 20 bp, synthetic construct
  misc_feature 1..20: note = chemically synthesized
  source 1..20: mol_type = other DNA
tccctggggggacgggggaa

SEQ ID NO: 60265 - DNA, 20 bp, synthetic construct
  misc_feature 1..20: note = chemically synthesized
  source 1..20: mol_type = other DNA
ggacgggggaagagcctgtg

SEQ ID NO: 60266 - DNA, 20 bp, synthetic construct
  misc_feature 1..20: note = chemically synthesized
  source 1..20: mol_type = other DNA
gggggaagagcctgtgtggc

SEQ ID NO: 60267 - DNA, 20 bp, synthetic construct
  misc_feature 1..20: note = chemically synthesized
  source 1..20: mol_type = other DNA
ggggaagagcctgtgtggca

SEQ ID NO: 60268 - DNA, 20 bp, synthetic construct
  misc_feature 1..20: note = chemically synthesized
  source 1..20: mol_type = other DNA
agagcctgtgtggcaaggcc

SEQ ID NO: 60269 - DNA, 20 bp, synthetic construct
  misc_feature 1..20: note = chemically synthesized
  source 1..20: mol_type = other DNA
ctgtgtggcaaggcccagaa

SEQ ID NO: 60270 - DNA, 20 bp, synthetic construct
  misc_feature 1..20: note = chemically synthesized
  source 1..20: mol_type = other DNA
gtggcaaggcccagaaaagc

SEQ ID NO: 60271 - DNA, 20 bp, synthetic construct
  misc_feature 1..20: note = chemically synthesized
  source 1..20: mol_type = other DNA
tggcaaggcccagaaaagca

SEQ ID NO: 60272 - DNA, 20 bp, synthetic construct
  misc_feature 1..20: note = chemically synthesized
  source 1..20: mol_type = other DNA
aggcccagaaaagcaaggtt

SEQ ID NO: 60273 - DNA, 20 bp, synthetic construct
  misc_feature 1..20: note = chemically synthesized
  source 1..20: mol_type = other DNA
agaaaagcaaggttcggaat

SEQ ID NO: 60274 - DNA, 20 bp, synthetic construct
  misc_feature 1..20: note = chemically synthesized
  source 1..20: mol_type = other DNA
agcaaggttcggaattggaa

SEQ ID NO: 60275 - DNA, 20 bp, synthetic construct
  misc_feature 1..20: note = chemically synthesized
  source 1..20: mol_type = other DNA
aggttcggaattggaacagc

SEQ ID NO: 60276 - DNA, 20 bp, synthetic construct
  misc_feature 1..20: note = chemically synthesized
  source 1..20: mol_type = other DNA
ggttcggaattggaacagcc

SEQ ID NO: 60277 - DNA, 20 bp, synthetic construct
  misc_feature 1..20: note = chemically synthesized
  source 1..20: mol_type = other DNA
gaacagccaggccatgttcg

SEQ ID NO: 60278 - DNA, 20 bp, synthetic construct
  misc_feature 1..20: note = chemically synthesized
  source 1..20: mol_type = other DNA
cagccaggccatgttcgcag

SEQ ID NO: 60279 - DNA, 20 bp, synthetic construct
  misc_feature 1..20: note = chemically synthesized
  source 1..20: mol_type = other DNA
agccaggccatgttcgcaga

SEQ ID NO: 60280 - DNA, 20 bp, synthetic construct
  misc_feature 1..20: note = chemically synthesized
  source 1..20: mol_type = other DNA
gcgtttctctgtcactttat

SEQ ID NO: 60281 - DNA, 20 bp, synthetic construct
  misc_feature 1..20: note = chemically synthesized
  source 1..20: mol_type = other DNA
tgtcactttatcggtgctgt

SEQ ID NO: 60282 - DNA, 20 bp, synthetic construct
  misc_feature 1..20: note = chemically synthesized
  source 1..20: mol_type = other DNA
ctttatcggtgctgttagat

SEQ ID NO: 60283 - DNA, 20 bp, synthetic construct
  misc_feature 1..20: note = chemically synthesized
  source 1..20: mol_type = other DNA
tttatcggtgctgttagatt

SEQ ID NO: 60284 - DNA, 20 bp, synthetic construct
  misc_feature 1..20: note = chemically synthesized
  source 1..20: mol_type = other DNA
ctgttagattgggtgtcctg

SEQ ID NO: 60285 - DNA, 20 bp, synthetic construct
  misc_feature 1..20: note = chemically synthesized
  source 1..20: mol_type = other DNA
tagattgggtgtcctgtagt

SEQ ID NO: 60286 - DNA, 20 bp, synthetic construct
  misc_feature 1..20: note = chemically synthesized
  source 1..20: mol_type = other DNA
agtaagtgatacttaaacat

SEQ ID NO: 60287 - DNA, 20 bp, synthetic construct
  misc_feature 1..20: note = chemically synthesized
  source 1..20: mol_type = other DNA
cttaaacatgagccacacat

SEQ ID NO: 60288 - DNA, 20 bp, synthetic construct
  misc_feature 1..20: note = chemically synthesized
  source 1..20: mol_type = other DNA
atgcccatgccctgctgatc

SEQ ID NO: 60289 - DNA, 20 bp, synthetic construct
  misc_feature 1..20: note = chemically synthesized
  source 1..20: mol_type = other DNA
gttttgtacactgtaaaacc

SEQ ID NO: 60290 - DNA, 20 bp, synthetic construct
  misc_feature 1..20: note = chemically synthesized
  source 1..20: mol_type = other DNA
aaaccaagatgaaaatacaa

SEQ ID NO: 60291 - DNA, 20 bp, synthetic construct
  misc_feature 1..20: note = chemically synthesized
  source 1..20: mol_type = other DNA
aaccaagatgaaaatacaaa

SEQ ID NO: 60292 - DNA, 20 bp, synthetic construct
  misc_feature 1..20: note = chemically synthesized
  source 1..20: mol_type = other DNA
gatgaaaatacaaaaggtgt

SEQ ID NO: 60293 - DNA, 20 bp, synthetic construct
  misc_feature 1..20: note = chemically synthesized
  source 1..20: mol_type = other DNA
atgaaaatacaaaaggtgtc

SEQ ID NO: 60294 - DNA, 20 bp, synthetic construct
  misc_feature 1..20: note = chemically synthesized
  source 1..20: mol_type = other DNA
aaaaggtgtcgggttcataa

SEQ ID NO: 60295 - DNA, 20 bp, synthetic construct
  misc_feature 1..20: note = chemically synthesized
  source 1..20: mol_type = other DNA
aaaggtgtcgggttcataat

SEQ ID NO: 60296 - DNA, 20 bp, synthetic construct
  misc_feature 1..20: note = chemically synthesized
  source 1..20: mol_type = other DNA
tcgggttcataataggaatc

SEQ ID NO: 60297 - DNA, 20 bp, synthetic construct
  misc_feature 1..20: note = chemically synthesized
  source 1..20: mol_type = other DNA
cgggttcataataggaatcg

SEQ ID NO: 60298 - DNA, 20 bp, synthetic construct
  misc_feature 1..20: note = chemically synthesized
  source 1..20: mol_type = other DNA
ttcataataggaatcgaggc

SEQ ID NO: 60299 - DNA, 20 bp, synthetic construct
  misc_feature 1..20: note = chemically synthesized
  source 1..20: mol_type = other DNA
ggaatttctctgttccatgc

SEQ ID NO: 60300 - DNA, 20 bp, synthetic construct
  misc_feature 1..20: note = chemically synthesized
  source 1..20: mol_type = other DNA
gttccatgccagcacctcct

SEQ ID NO: 60301 - DNA, 20 bp, synthetic construct
  misc_feature 1..20: note = chemically synthesized
  source 1..20: mol_type = other DNA
ttccatgccagcacctcctg

SEQ ID NO: 60302 - DNA, 20 bp, synthetic construct
  misc_feature 1..20: note = chemically synthesized
  source 1..20: mol_type = other DNA
acctcctgaggtctctgctc

SEQ ID NO: 60303 - DNA, 20 bp, synthetic construct
  misc_feature 1..20: note = chemically synthesized
  source 1..20: mol_type = other DNA
cctcctgaggtctctgctcc

SEQ ID NO: 60304 - DNA, 20 bp, synthetic construct
  misc_feature 1..20: note = chemically synthesized
  source 1..20: mol_type = other DNA
ctcctgaggtctctgctcca

SEQ ID NO: 60305 - DNA, 20 bp, synthetic construct
  misc_feature 1..20: note = chemically synthesized
  source 1..20: mol_type = other DNA
tcctgaggtctctgctccag

SEQ ID NO: 60306 - DNA, 20 bp, synthetic construct
  misc_feature 1..20: note = chemically synthesized
  source 1..20: mol_type = other DNA
aggtctctgctccaggggtt

SEQ ID NO: 60307 - DNA, 20 bp, synthetic construct
  misc_feature 1..20: note = chemically synthesized
  source 1..20: mol_type = other DNA
ctctgctccaggggttgaga

SEQ ID NO: 60308 - DNA, 20 bp, synthetic construct
  misc_feature 1..20: note = chemically synthesized
  source 1..20: mol_type = other DNA
ccaggggttgagaaagaaca

SEQ ID NO: 60309 - DNA, 20 bp, synthetic construct
  misc_feature 1..20: note = chemically synthesized
  source 1..20: mol_type = other DNA
aggggttgagaaagaacaaa

SEQ ID NO: 60310 - DNA, 20 bp, synthetic construct
  misc_feature 1..20: note = chemically synthesized
  source 1..20: mol_type = other DNA
ggggttgagaaagaacaaag

SEQ ID NO: 60311 - DNA, 20 bp, synthetic construct
  misc_feature 1..20: note = chemically synthesized
  source 1..20: mol_type = other DNA
tgagaaagaacaaagaggct

SEQ ID NO: 60312 - DNA, 20 bp, synthetic construct
  misc_feature 1..20: note = chemically synthesized
  source 1..20: mol_type = other DNA
agaaagaacaaagaggctga

SEQ ID NO: 60313 - DNA, 20 bp, synthetic construct
  misc_feature 1..20: note = chemically synthesized
  source 1..20: mol_type = other DNA
gaaagaacaaagaggctgag

SEQ ID NO: 60314 - DNA, 20 bp, synthetic construct
  misc_feature 1..20: note = chemically synthesized
  source 1..20: mol_type = other DNA
aaagaacaaagaggctgaga

SEQ ID NO: 60315 - DNA, 20 bp, synthetic construct
  misc_feature 1..20: note = chemically synthesized
  source 1..20: mol_type = other DNA
caaagaggctgagagggtaa

SEQ ID NO: 60316 - DNA, 20 bp, synthetic construct
  misc_feature 1..20: note = chemically synthesized
  source 1..20: mol_type = other DNA
aggctgagagggtaacggat

SEQ ID NO: 60317 - DNA, 20 bp, synthetic construct
  misc_feature 1..20: note = chemically synthesized
  source 1..20: mol_type = other DNA
gctgagagggtaacggatca

SEQ ID NO: 60318 - DNA, 20 bp, synthetic construct
  misc_feature 1..20: note = chemically synthesized
  source 1..20: mol_type = other DNA
tgagagggtaacggatcaga

SEQ ID NO: 60319 - DNA, 20 bp, synthetic construct
  misc_feature 1..20: note = chemically synthesized
  source 1..20: mol_type = other DNA
gggtaacggatcagagagcc

SEQ ID NO: 60320 - DNA, 20 bp, synthetic construct
  misc_feature 1..20: note = chemically synthesized
  source 1..20: mol_type = other DNA
gtaacggatcagagagccca

SEQ ID NO: 60321 - DNA, 20 bp, synthetic construct
  misc_feature 1..20: note = chemically synthesized
  source 1..20: mol_type = other DNA
ggatcagagagcccagagcc

SEQ ID NO: 60322 - DNA, 20 bp, synthetic construct
  misc_feature 1..20: note = chemically synthesized
  source 1..20: mol_type = other DNA
gccaagctgcccgctcacac

SEQ ID NO: 60323 - DNA, 20 bp, synthetic construct
  misc_feature 1..20: note = chemically synthesized
  source 1..20: mol_type = other DNA
cgctcacaccagaccctgct

SEQ ID NO: 60324 - DNA, 20 bp, synthetic construct
  misc_feature 1..20: note = chemically synthesized
  source 1..20: mol_type = other DNA
gctcacaccagaccctgctc

SEQ ID NO: 60325 - DNA, 20 bp, synthetic construct
  misc_feature 1..20: note = chemically synthesized
  source 1..20: mol_type = other DNA
ctcacaccagaccctgctca

SEQ ID NO: 60326 - DNA, 20 bp, synthetic construct
  misc_feature 1..20: note = chemically synthesized
  source 1..20: mol_type = other DNA
acaccagaccctgctcaggg

SEQ ID NO: 60327 - DNA, 20 bp, synthetic construct
  misc_feature 1..20: note = chemically synthesized
  source 1..20: mol_type = other DNA
agggtggcattgtctcccca

SEQ ID NO: 60328 - DNA, 20 bp, synthetic construct
  misc_feature 1..20: note = chemically synthesized
  source 1..20: mol_type = other DNA
attgtctccccatggaaaac

SEQ ID NO: 60329 - DNA, 20 bp, synthetic construct
  misc_feature 1..20: note = chemically synthesized
  source 1..20: mol_type = other DNA
tgtctccccatggaaaacca

SEQ ID NO: 60330 - DNA, 20 bp, synthetic construct
  misc_feature 1..20: note = chemically synthesized
  source 1..20: mol_type = other DNA
tctccccatggaaaaccaga

SEQ ID NO: 60331 - DNA, 20 bp, synthetic construct
  misc_feature 1..20: note = chemically synthesized
  source 1..20: mol_type = other DNA
ctccccatggaaaaccagag

SEQ ID NO: 60332 - DNA, 20 bp, synthetic construct
  misc_feature 1..20: note = chemically synthesized
  source 1..20: mol_type = other DNA
ccccatggaaaaccagagag

SEQ ID NO: 60333 - DNA, 20 bp, synthetic construct
  misc_feature 1..20: note = chemically synthesized
  source 1..20: mol_type = other DNA
gaaaaccagagaggagcact

SEQ ID NO: 60334 - DNA, 20 bp, synthetic construct
  misc_feature 1..20: note = chemically synthesized
  source 1..20: mol_type = other DNA
ccagagaggagcactcagcc

SEQ ID NO: 60335 - DNA, 20 bp, synthetic construct
  misc_feature 1..20: note = chemically synthesized
  source 1..20: mol_type = other DNA
gaggagcactcagcctggtg

SEQ ID NO: 60336 - DNA, 20 bp, synthetic construct
  misc_feature 1..20: note = chemically synthesized
  source 1..20: mol_type = other DNA
ctcttctcttatccactaaa

SEQ ID NO: 60337 - DNA, 20 bp, synthetic construct
  misc_feature 1..20: note = chemically synthesized
  source 1..20: mol_type = other DNA
atccactaaacggttgtcac

SEQ ID NO: 60338 - DNA, 20 bp, synthetic construct
  misc_feature 1..20: note = chemically synthesized
  source 1..20: mol_type = other DNA
tccactaaacggttgtcact

SEQ ID NO: 60339 - DNA, 20 bp, synthetic construct
  misc_feature 1..20: note = chemically synthesized
  source 1..20: mol_type = other DNA
ttgtcactgggcactgccac

SEQ ID NO: 60340 - DNA, 20 bp, synthetic construct
  misc_feature 1..20: note = chemically synthesized
  source 1..20: mol_type = other DNA
ccaccagccccgtgtttctc

SEQ ID NO: 60341 - DNA, 20 bp, synthetic construct
  misc_feature 1..20: note = chemically synthesized
  source 1..20: mol_type = other DNA
caccagccccgtgtttctct

SEQ ID NO: 60342 - DNA, 20 bp, synthetic construct
  misc_feature 1..20: note = chemically synthesized
  source 1..20: mol_type = other DNA
gccccgtgtttctctgggtg

SEQ ID NO: 60343 - DNA, 20 bp, synthetic construct
  misc_feature 1..20: note = chemically synthesized
  source 1..20: mol_type = other DNA
ccccgtgtttctctgggtgt

SEQ ID NO: 60344 - DNA, 20 bp, synthetic construct
  misc_feature 1..20: note = chemically synthesized
  source 1..20: mol_type = other DNA
cccgtgtttctctgggtgta

SEQ ID NO: 60345 - DNA, 20 bp, synthetic construct
  misc_feature 1..20: note = chemically synthesized
  source 1..20: mol_type = other DNA
tttctctgggtgtagggccc

SEQ ID NO: 60346 - DNA, 20 bp, synthetic construct
  misc_feature 1..20: note = chemically synthesized
  source 1..20: mol_type = other DNA
ttctctgggtgtagggccct

SEQ ID NO: 60347 - DNA, 20 bp, synthetic construct
  misc_feature 1..20: note = chemically synthesized
  source 1..20: mol_type = other DNA
tctctgggtgtagggccctg

SEQ ID NO: 60348 - DNA, 20 bp, synthetic construct
  misc_feature 1..20: note = chemically synthesized
  source 1..20: mol_type = other DNA
gtagggccctggggatgtta

SEQ ID NO: 60349 - DNA, 20 bp, synthetic construct
  misc_feature 1..20: note = chemically synthesized
  source 1..20: mol_type = other DNA
tagggccctggggatgttac

SEQ ID NO: 60350 - DNA, 20 bp, synthetic construct
  misc_feature 1..20: note = chemically synthesized
  source 1..20: mol_type = other DNA
gccctggggatgttacaggc

SEQ ID NO: 60351 - DNA, 20 bp, synthetic construct
  misc_feature 1..20: note = chemically synthesized
  source 1..20: mol_type = other DNA
ccctggggatgttacaggct

SEQ ID NO: 60352 - DNA, 20 bp, synthetic construct
  misc_feature 1..20: note = chemically synthesized
  source 1..20: mol_type = other DNA
cctggggatgttacaggctg

SEQ ID NO: 60353 - DNA, 20 bp, synthetic construct
  misc_feature 1..20: note = chemically synthesized
  source 1..20: mol_type = other DNA
ctggggatgttacaggctgg

SEQ ID NO: 60354 - DNA, 20 bp, synthetic construct
  misc_feature 1..20: note = chemically synthesized
  source 1..20: mol_type = other DNA
ggatgttacaggctgggggc

SEQ ID NO: 60355 - DNA, 20 bp, synthetic construct
  misc_feature 1..20: note = chemically synthesized
  source 1..20: mol_type = other DNA
gatgttacaggctgggggcc

SEQ ID NO: 60356 - DNA, 20 bp, synthetic construct
  misc_feature 1..20: note = chemically synthesized
  source 1..20: mol_type = other DNA
ggccaggtgacccaacacta

SEQ ID NO: 60357 - DNA, 20 bp, synthetic construct
  misc_feature 1..20: note = chemically synthesized
  source 1..20: mol_type = other DNA
gccaggtgacccaacactac

SEQ ID NO: 60358 - DNA, 20 bp, synthetic construct
  misc_feature 1..20: note = chemically synthesized
  source 1..20: mol_type = other DNA
ccaggtgacccaacactaca

SEQ ID NO: 60359 - DNA, 20 bp, synthetic construct
  misc_feature 1..20: note = chemically synthesized
  source 1..20: mol_type = other DNA
gtgacccaacactacagggc

SEQ ID NO: 60360 - DNA, 20 bp, synthetic construct
  misc_feature 1..20: note = chemically synthesized
  source 1..20: mol_type = other DNA
ccaacactacagggcaagat

SEQ ID NO: 60361 - DNA, 20 bp, synthetic construct
  misc_feature 1..20: note = chemically synthesized
  source 1..20: mol_type = other DNA
cactacagggcaagatgaga

SEQ ID NO: 60362 - DNA, 20 bp, synthetic construct
  misc_feature 1..20: note = chemically synthesized
  source 1..20: mol_type = other DNA
actacagggcaagatgagac

SEQ ID NO: 60363 - DNA, 20 bp, synthetic construct
  misc_feature 1..20: note = chemically synthesized
  source 1..20: mol_type = other DNA
ggcaagatgagacaggcttc

SEQ ID NO: 60364 - DNA, 20 bp, synthetic construct
  misc_feature 1..20: note = chemically synthesized
  source 1..20: mol_type = other DNA
gcaagatgagacaggcttcc

SEQ ID NO: 60365 - DNA, 20 bp, synthetic construct
  misc_feature 1..20: note = chemically synthesized
  source 1..20: mol_type = other DNA
agacaggcttccaggacacc

SEQ ID NO: 60366 - DNA, 20 bp, synthetic construct
  misc_feature 1..20: note = chemically synthesized
  source 1..20: mol_type = other DNA
ttccaggacacctagaatat

SEQ ID NO: 60367 - DNA, 20 bp, synthetic construct
  misc_feature 1..20: note = chemically synthesized
  source 1..20: mol_type = other DNA
ccaggacacctagaatatca

SEQ ID NO: 60368 - DNA, 20 bp, synthetic construct
  misc_feature 1..20: note = chemically synthesized
  source 1..20: mol_type = other DNA
caggacacctagaatatcag

SEQ ID NO: 60369 - DNA, 20 bp, synthetic construct
  misc_feature 1..20: note = chemically synthesized
  source 1..20: mol_type = other DNA
ggacacctagaatatcagag

SEQ ID NO: 60370 - DNA, 20 bp, synthetic construct
  misc_feature 1..20: note = chemically synthesized
  source 1..20: mol_type = other DNA
gacacctagaatatcagagg

SEQ ID NO: 60371 - DNA, 20 bp, synthetic construct
  misc_feature 1..20: note = chemically synthesized
  source 1..20: mol_type = other DNA
acctagaatatcagaggagg

SEQ ID NO: 60372 - DNA, 20 bp, synthetic construct
  misc_feature 1..20: note = chemically synthesized
  source 1..20: mol_type = other DNA
atcagaggaggtggcatttc

SEQ ID NO: 60373 - DNA, 20 bp, synthetic construct
  misc_feature 1..20: note = chemically synthesized
  source 1..20: mol_type = other DNA
taacattctttgactcaatg

SEQ ID NO: 60374 - DNA, 20 bp, synthetic construct
  misc_feature 1..20: note = chemically synthesized
  source 1..20: mol_type = other DNA
cattctttgactcaatgtag

SEQ ID NO: 60375 - DNA, 20 bp, synthetic construct
  misc_feature 1..20: note = chemically synthesized
  source 1..20: mol_type = other DNA
ttctttgactcaatgtagaa

SEQ ID NO: 60376 - DNA, 20 bp, synthetic construct
  misc_feature 1..20: note = chemically synthesized
  source 1..20: mol_type = other DNA
actcaatgtagaagagctaa

SEQ ID NO: 60377 - DNA, 20 bp, synthetic construct
  misc_feature 1..20: note = chemically synthesized
  source 1..20: mol_type = other DNA
caatgtagaagagctaaaag

SEQ ID NO: 60378 - DNA, 20 bp, synthetic construct
  misc_feature 1..20: note = chemically synthesized
  source 1..20: mol_type = other DNA
gctaaaagtagaacaaacca

SEQ ID NO: 60379 - DNA, 20 bp, synthetic construct
  misc_feature 1..20: note = chemically synthesized
  source 1..20: mol_type = other DNA
aagtagaacaaaccaaagcc

SEQ ID NO: 60380 - DNA, 20 bp, synthetic construct
  misc_feature 1..20: note = chemically synthesized
  source 1..20: mol_type = other DNA
ccaaagccgagttcccatct

SEQ ID NO: 60381 - DNA, 20 bp, synthetic construct
  misc_feature 1..20: note = chemically synthesized
  source 1..20: mol_type = other DNA
gccgagttcccatcttagtg

SEQ ID NO: 60382 - DNA, 20 bp, synthetic construct
  misc_feature 1..20: note = chemically synthesized
  source 1..20: mol_type = other DNA
ccgagttcccatcttagtgt

SEQ ID NO: 60383 - DNA, 20 bp, synthetic construct
  misc_feature 1..20: note = chemically synthesized
  source 1..20: mol_type = other DNA
agttcccatcttagtgtggg

SEQ ID NO: 60384 - DNA, 20 bp, synthetic construct
  misc_feature 1..20: note = chemically synthesized
  source 1..20: mol_type = other DNA
ttcccatcttagtgtgggtg

SEQ ID NO: 60385 - DNA, 20 bp, synthetic construct
  misc_feature 1..20: note = chemically synthesized
  source 1..20: mol_type = other DNA
tcccatcttagtgtgggtgg

SEQ ID NO: 60386 - DNA, 20 bp, synthetic construct
  misc_feature 1..20: note = chemically synthesized
  source 1..20: mol_type = other DNA
cttagtgtgggtggaggaca

SEQ ID NO: 60387 - DNA, 20 bp, synthetic construct
  misc_feature 1..20: note = chemically synthesized
  source 1..20: mol_type = other DNA
ttagtgtgggtggaggacac

SEQ ID NO: 60388 - DNA, 20 bp, synthetic construct
  misc_feature 1..20: note = chemically synthesized
  source 1..20: mol_type = other DNA
agtgtgggtggaggacacag

SEQ ID NO: 60389 - DNA, 20 bp, synthetic construct
  misc_feature 1..20: note = chemically synthesized
  source 1..20: mol_type = other DNA
tgggtggaggacacaggagt

SEQ ID NO: 60390 - DNA, 20 bp, synthetic construct
  misc_feature 1..20: note = chemically synthesized
  source 1..20: mol_type = other DNA
gtggaggacacaggagtaag

SEQ ID NO: 60391 - DNA, 20 bp, synthetic construct
  misc_feature 1..20: note = chemically synthesized
  source 1..20: mol_type = other DNA
gaggacacaggagtaagtgg

SEQ ID NO: 60392 - DNA, 20 bp, synthetic construct
  misc_feature 1..20: note = chemically synthesized
  source 1..20: mol_type = other DNA
gagtaagtggcagaaataat

SEQ ID NO: 60393 - DNA, 20 bp, synthetic construct
  misc_feature 1..20: note = chemically synthesized
  source 1..20: mol_type = other DNA
agtggcagaaataatcagaa

SEQ ID NO: 60394 - DNA, 20 bp, synthetic construct
  misc_feature 1..20: note = chemically synthesized
  source 1..20: mol_type = other DNA
aaaagaaaacacttgcactg

SEQ ID NO: 60395 - DNA, 20 bp, synthetic construct
  misc_feature 1..20: note = chemically synthesized
  source 1..20: mol_type = other DNA
agaaaacacttgcactgtgg

SEQ ID NO: 60396 - DNA, 20 bp, synthetic construct
  misc_feature 1..20: note = chemically synthesized
  source 1..20: mol_type = other DNA
gaaaacacttgcactgtggt

SEQ ID NO: 60397 - DNA, 20 bp, synthetic construct
  misc_feature 1..20: note = chemically synthesized
  source 1..20: mol_type = other DNA
acttgcactgtggtgggtcc

SEQ ID NO: 60398 - DNA, 20 bp, synthetic construct
  misc_feature 1..20: note = chemically synthesized
  source 1..20: mol_type = other DNA
tgcactgtggtgggtcccag

SEQ ID NO: 60399 - DNA, 20 bp, synthetic construct
  misc_feature 1..20: note = chemically synthesized
  source 1..20: mol_type = other DNA
gtggtgggtcccagaagaac

SEQ ID NO: 60400 - DNA, 20 bp, synthetic construct
  misc_feature 1..20: note = chemically synthesized
  source 1..20: mol_type = other DNA
ggtgggtcccagaagaacaa

SEQ ID NO: 60401 - DNA, 20 bp, synthetic construct
  misc_feature 1..20: note = chemically synthesized
  source 1..20: mol_type = other DNA
gtgggtcccagaagaacaag

SEQ ID NO: 60402 - DNA, 20 bp, synthetic construct
  misc_feature 1..20: note = chemically synthesized
  source 1..20: mol_type = other DNA
tgaatttcttttctgcacga

SEQ ID NO: 60403 - DNA, 20 bp, synthetic construct
  misc_feature 1..20: note = chemically synthesized
  source 1..20: mol_type = other DNA
gaatttcttttctgcacgac

SEQ ID NO: 60404 - DNA, 20 bp, synthetic construct
  misc_feature 1..20: note = chemically synthesized
  source 1..20: mol_type = other DNA
tttctgcacgacaggtctgc

SEQ ID NO: 60405 - DNA, 20 bp, synthetic construct
  misc_feature 1..20: note = chemically synthesized
  source 1..20: mol_type = other DNA
ttacccaaactgtccattac

SEQ ID NO: 60406 - DNA, 20 bp, synthetic construct
  misc_feature 1..20: note = chemically synthesized
  source 1..20: mol_type = other DNA
ttactggaacctatgatctg

SEQ ID NO: 60407 - DNA, 20 bp, synthetic construct
  misc_feature 1..20: note = chemically synthesized
  source 1..20: mol_type = other DNA
actggaacctatgatctgaa

SEQ ID NO: 60408 - DNA, 20 bp, synthetic construct
  misc_feature 1..20: note = chemically synthesized
  source 1..20: mol_type = other DNA
ctatgatctgaagagcgtcc

SEQ ID NO: 60409 - DNA, 20 bp, synthetic construct
  misc_feature 1..20: note = chemically synthesized
  source 1..20: mol_type = other DNA
tatgatctgaagagcgtcct

SEQ ID NO: 60410 - DNA, 20 bp, synthetic construct
  misc_feature 1..20: note = chemically synthesized
  source 1..20: mol_type = other DNA
gaagagcgtcctgggtcaac

SEQ ID NO: 60411 - DNA, 20 bp, synthetic construct
  misc_feature 1..20: note = chemically synthesized
  source 1..20: mol_type = other DNA
aagagcgtcctgggtcaact

SEQ ID NO: 60412 - DNA, 20 bp, synthetic construct
  misc_feature 1..20: note = chemically synthesized
  source 1..20: mol_type = other DNA
tgggtcaactgggcatcact

SEQ ID NO: 60413 - DNA, 20 bp, synthetic construct
  misc_feature 1..20: note = chemically synthesized
  source 1..20: mol_type = other DNA
gggtcaactgggcatcacta

SEQ ID NO: 60414 - DNA, 20 bp, synthetic construct
  misc_feature 1..20: note = chemically synthesized
  source 1..20: mol_type = other DNA
ctgggcatcactaaggtctt

SEQ ID NO: 60415 - DNA, 20 bp, synthetic construct
  misc_feature 1..20: note = chemically synthesized
  source 1..20: mol_type = other DNA
atcactaaggtcttcagcaa

SEQ ID NO: 60416 - DNA, 20 bp, synthetic construct
  misc_feature 1..20: note = chemically synthesized
  source 1..20: mol_type = other DNA
tcactaaggtcttcagcaat

SEQ ID NO: 60417 - DNA, 20 bp, synthetic construct
  misc_feature 1..20: note = chemically synthesized
  source 1..20: mol_type = other DNA
cactaaggtcttcagcaatg

SEQ ID NO: 60418 - DNA, 20 bp, synthetic construct
  misc_feature 1..20: note = chemically synthesized
  source 1..20: mol_type = other DNA
agcaatggggctgacctctc

SEQ ID NO: 60419 - DNA, 20 bp, synthetic construct
  misc_feature 1..20: note = chemically synthesized
  source 1..20: mol_type = other DNA
gcaatggggctgacctctcc

SEQ ID NO: 60420 - DNA, 20 bp, synthetic construct
  misc_feature 1..20: note = chemically synthesized
  source 1..20: mol_type = other DNA
caatggggctgacctctccg

SEQ ID NO: 60421 - DNA, 20 bp, synthetic construct
  misc_feature 1..20: note = chemically synthesized
  source 1..20: mol_type = other DNA
ggctgacctctccggggtca

SEQ ID NO: 60422 - DNA, 20 bp, synthetic construct
  misc_feature 1..20: note = chemically synthesized
  source 1..20: mol_type = other DNA
ctgacctctccggggtcaca

SEQ ID NO: 60423 - DNA, 20 bp, synthetic construct
  misc_feature 1..20: note = chemically synthesized
  source 1..20: mol_type = other DNA
tgacctctccggggtcacag

SEQ ID NO: 60424 - DNA, 20 bp, synthetic construct
  misc_feature 1..20: note = chemically synthesized
  source 1..20: mol_type = other DNA
acctctccggggtcacagag

SEQ ID NO: 60425 - DNA, 20 bp, synthetic construct
  misc_feature 1..20: note = chemically synthesized
  source 1..20: mol_type = other DNA
cctctccggggtcacagagg

SEQ ID NO: 60426 - DNA, 20 bp, synthetic construct
  misc_feature 1..20: note = chemically synthesized
  source 1..20: mol_type = other DNA
tcacagaggaggcacccctg

SEQ ID NO: 60427 - DNA, 20 bp, synthetic construct
  misc_feature 1..20: note = chemically synthesized
  source 1..20: mol_type = other DNA
aggcacccctgaagctctcc

SEQ ID NO: 60428 - DNA, 20 bp, synthetic construct
  misc_feature 1..20: note = chemically synthesized
  source 1..20: mol_type = other DNA
ggcacccctgaagctctcca

SEQ ID NO: 60429 - DNA, 20 bp, synthetic construct
  misc_feature 1..20: note = chemically synthesized
  source 1..20: mol_type = other DNA
cccctgaagctctccaaggt

SEQ ID NO: 60430 - DNA, 20 bp, synthetic construct
  misc_feature 1..20: note = chemically synthesized
  source 1..20: mol_type = other DNA
ctgacgaccttgttgcaccc

SEQ ID NO: 60431 - DNA, 20 bp, synthetic construct
  misc_feature 1..20: note = chemically synthesized
  source 1..20: mol_type = other DNA
ttgttgcaccctggtatctg

SEQ ID NO: 60432 - DNA, 20 bp, synthetic construct
  misc_feature 1..20: note = chemically synthesized
  source 1..20: mol_type = other DNA
tgttgcaccctggtatctgt

SEQ ID NO: 60433 - DNA, 20 bp, synthetic construct
  misc_feature 1..20: note = chemically synthesized
  source 1..20: mol_type = other DNA
gttgcaccctggtatctgta

SEQ ID NO: 60434 - DNA, 20 bp, synthetic construct
  misc_feature 1..20: note = chemically synthesized
  source 1..20: mol_type = other DNA
gcaccctggtatctgtaggg

SEQ ID NO: 60435 - DNA, 20 bp, synthetic construct
  misc_feature 1..20: note = chemically synthesized
  source 1..20: mol_type = other DNA
tatctgtagggaagaatgtg

SEQ ID NO: 60436 - DNA, 20 bp, synthetic construct
  misc_feature 1..20: note = chemically synthesized
  source 1..20: mol_type = other DNA
atctgtagggaagaatgtgt

SEQ ID NO: 60437 - DNA, 20 bp, synthetic construct
  misc_feature 1..20: note = chemically synthesized
  source 1..20: mol_type = other DNA
tctgtagggaagaatgtgtg

SEQ ID NO: 60438 - DNA, 20 bp, synthetic construct
  misc_feature 1..20: note = chemically synthesized
  source 1..20: mol_type = other DNA
ctgtagggaagaatgtgtgg

SEQ ID NO: 60439 - DNA, 20 bp, synthetic construct
  misc_feature 1..20: note = chemically synthesized
  source 1..20: mol_type = other DNA
ggaagaatgtgtgggggctg

SEQ ID NO: 60440 - DNA, 20 bp, synthetic construct
  misc_feature 1..20: note = chemically synthesized
  source 1..20: mol_type = other DNA
gggggctgcagctctgtcct

SEQ ID NO: 60441 - DNA, 20 bp, synthetic construct
  misc_feature 1..20: note = chemically synthesized
  source 1..20: mol_type = other DNA
ggggctgcagctctgtcctg

SEQ ID NO: 60442 - DNA, 20 bp, synthetic construct
  misc_feature 1..20: note = chemically synthesized
  source 1..20: mol_type = other DNA
tgcagctctgtcctgaggct

SEQ ID NO: 60443 - DNA, 20 bp, synthetic construct
  misc_feature 1..20: note = chemically synthesized
  source 1..20: mol_type = other DNA
gcagctctgtcctgaggctg

SEQ ID NO: 60444 - DNA, 20 bp, synthetic construct
  misc_feature 1..20: note = chemically synthesized
  source 1..20: mol_type = other DNA
gctctgtcctgaggctgagg

SEQ ID NO: 60445 - DNA, 20 bp, synthetic construct
  misc_feature 1..20: note = chemically synthesized
  source 1..20: mol_type = other DNA
ctctgtcctgaggctgagga

SEQ ID NO: 60446 - DNA, 20 bp, synthetic construct
  misc_feature 1..20: note = chemically synthesized
  source 1..20: mol_type = other DNA
tctgtcctgaggctgaggaa

SEQ ID NO: 60447 - DNA, 20 bp, synthetic construct
  misc_feature 1..20: note = chemically synthesized
  source 1..20: mol_type = other DNA
ctgtcctgaggctgaggaag

SEQ ID NO: 60448 - DNA, 20 bp, synthetic construct
  misc_feature 1..20: note = chemically synthesized
  source 1..20: mol_type = other DNA
ctgaggctgaggaaggggcc

SEQ ID NO: 60449 - DNA, 20 bp, synthetic construct
  misc_feature 1..20: note = chemically synthesized
  source 1..20: mol_type = other DNA
tgaggctgaggaaggggccg

SEQ ID NO: 60450 - DNA, 20 bp, synthetic construct
  misc_feature 1..20: note = chemically synthesized
  source 1..20: mol_type = other DNA
gaggctgaggaaggggccga

SEQ ID NO: 60451 - DNA, 20 bp, synthetic construct
  misc_feature 1..20: note = chemically synthesized
  source 1..20: mol_type = other DNA
ggggccgagggaaacaaatg

SEQ ID NO: 60452 - DNA, 20 bp, synthetic construct
  misc_feature 1..20: note = chemically synthesized
  source 1..20: mol_type = other DNA
gagggaaacaaatgaagacc

SEQ ID NO: 60453 - DNA, 20 bp, synthetic construct
  misc_feature 1..20: note = chemically synthesized
  source 1..20: mol_type = other DNA
agggaaacaaatgaagaccc

SEQ ID NO: 60454 - DNA, 20 bp, synthetic construct
  misc_feature 1..20: note = chemically synthesized
  source 1..20: mol_type = other DNA
aacaaatgaagacccaggct

SEQ ID NO: 60455 - DNA, 20 bp, synthetic construct
  misc_feature 1..20: note = chemically synthesized
  source 1..20: mol_type = other DNA
agacccaggctgagctcctg

SEQ ID NO: 60456 - DNA, 20 bp, synthetic construct
  misc_feature 1..20: note = chemically synthesized
  source 1..20: mol_type = other DNA
atgcccgtgattcactgaca

SEQ ID NO: 60457 - DNA, 20 bp, synthetic construct
  misc_feature 1..20: note = chemically synthesized
  source 1..20: mol_type = other DNA
tgcccgtgattcactgacac

SEQ ID NO: 60458 - DNA, 20 bp, synthetic construct
  misc_feature 1..20: note = chemically synthesized
  source 1..20: mol_type = other DNA
tgattcactgacacgggacg

SEQ ID NO: 60459 - DNA, 20 bp, synthetic construct
  misc_feature 1..20: note = chemically synthesized
  source 1..20: mol_type = other DNA
tgacacgggacgtggtcaaa

SEQ ID NO: 60460 - DNA, 20 bp, synthetic construct
  misc_feature 1..20: note = chemically synthesized
  source 1..20: mol_type = other DNA
cgggacgtggtcaaacagca

SEQ ID NO: 60461 - DNA, 20 bp, synthetic construct
  misc_feature 1..20: note = chemically synthesized
  source 1..20: mol_type = other DNA
acgtggtcaaacagcaaagc

SEQ ID NO: 60462 - DNA, 20 bp, synthetic construct
  misc_feature 1..20: note = chemically synthesized
  source 1..20: mol_type = other DNA
cgtggtcaaacagcaaagcc

SEQ ID NO: 60463 - DNA, 20 bp, synthetic construct
  misc_feature 1..20: note = chemically synthesized
  source 1..20: mol_type = other DNA
ggtcaaacagcaaagccagg

SEQ ID NO: 60464 - DNA, 20 bp, synthetic construct
  misc_feature 1..20: note = chemically synthesized
  source 1..20: mol_type = other DNA
gtcaaacagcaaagccaggc

SEQ ID NO: 60465 - DNA, 20 bp, synthetic construct
  misc_feature 1..20: note = chemically synthesized
  source 1..20: mol_type = other DNA
tcaaacagcaaagccaggca

SEQ ID NO: 60466 - DNA, 20 bp, synthetic construct
  misc_feature 1..20: note = chemically synthesized
  source 1..20: mol_type = other DNA
caaacagcaaagccaggcag

SEQ ID NO: 60467 - DNA, 20 bp, synthetic construct
  misc_feature 1..20: note = chemically synthesized
  source 1..20: mol_type = other DNA
ccaggcaggggactgctgtg

SEQ ID NO: 60468 - DNA, 20 bp, synthetic construct
  misc_feature 1..20: note = chemically synthesized
  source 1..20: mol_type = other DNA
gcaggggactgctgtgcagc

SEQ ID NO: 60469 - DNA, 20 bp, synthetic construct
  misc_feature 1..20: note = chemically synthesized
  source 1..20: mol_type = other DNA
tgctgtgcagctggcacttt

SEQ ID NO: 60470 - DNA, 20 bp, synthetic construct
  misc_feature 1..20: note = chemically synthesized
  source 1..20: mol_type = other DNA
gctgtgcagctggcactttc

SEQ ID NO: 60471 - DNA, 20 bp, synthetic construct
  misc_feature 1..20: note = chemically synthesized
  source 1..20: mol_type = other DNA
ctgtgcagctggcactttcg

SEQ ID NO: 60472 - DNA, 20 bp, synthetic construct
  misc_feature 1..20: note = chemically synthesized
  source 1..20: mol_type = other DNA
gcactttcggggcctccctt

SEQ ID NO: 60473 - DNA, 20 bp, synthetic construct
  misc_feature 1..20: note = chemically synthesized
  source 1..20: mol_type = other DNA
cactttcggggcctcccttg

SEQ ID NO: 60474 - DNA, 20 bp, synthetic construct
  misc_feature 1..20: note = chemically synthesized
  source 1..20: mol_type = other DNA
cctgaatttcaactttgccc

SEQ ID NO: 60475 - DNA, 20 bp, synthetic construct
  misc_feature 1..20: note = chemically synthesized
  source 1..20: mol_type = other DNA
caactttgcccaagaccttc

SEQ ID NO: 60476 - DNA, 20 bp, synthetic construct
  misc_feature 1..20: note = chemically synthesized
  source 1..20: mol_type = other DNA
gcccaagaccttctagacat

SEQ ID NO: 60477 - DNA, 20 bp, synthetic construct
  misc_feature 1..20: note = chemically synthesized
  source 1..20: mol_type = other DNA
cccaagaccttctagacatt

SEQ ID NO: 60478 - DNA, 20 bp, synthetic construct
  misc_feature 1..20: note = chemically synthesized
  source 1..20: mol_type = other DNA
ttgatttatccatactgaca

SEQ ID NO: 60479 - DNA, 20 bp, synthetic construct
  misc_feature 1..20: note = chemically synthesized
  source 1..20: mol_type = other DNA
tttatccatactgacacaga

SEQ ID NO: 60480 - DNA, 20 bp, synthetic construct
  misc_feature 1..20: note = chemically synthesized
  source 1..20: mol_type = other DNA
ttatccatactgacacagaa

SEQ ID NO: 60481 - DNA, 20 bp, synthetic construct
  misc_feature 1..20: note = chemically synthesized
  source 1..20: mol_type = other DNA
catactgacacagaaaggtt

SEQ ID NO: 60482 - DNA, 20 bp, synthetic construct
  misc_feature 1..20: note = chemically synthesized
  source 1..20: mol_type = other DNA
atactgacacagaaaggttt

SEQ ID NO: 60483 - DNA, 20 bp, synthetic construct
  misc_feature 1..20: note = chemically synthesized
  source 1..20: mol_type = other DNA
gacacagaaaggtttgggct

SEQ ID NO: 60484 - DNA, 20 bp, synthetic construct
  misc_feature 1..20: note = chemically synthesized
  source 1..20: mol_type = other DNA
gtttgggctaagttgtttca

SEQ ID NO: 60485 - DNA, 20 bp, synthetic construct
  misc_feature 1..20: note = chemically synthesized
  source 1..20: mol_type = other DNA
tttgggctaagttgtttcaa

SEQ ID NO: 60486 - DNA, 20 bp, synthetic construct
  misc_feature 1..20: note = chemically synthesized
  source 1..20: mol_type = other DNA
ttctgactccttcgatctgt

SEQ ID NO: 60487 - DNA, 20 bp, synthetic construct
  misc_feature 1..20: note = chemically synthesized
  source 1..20: mol_type = other DNA
ctccttcgatctgtgagatt

SEQ ID NO: 60488 - DNA, 20 bp, synthetic construct
  misc_feature 1..20: note = chemically synthesized
  source 1..20: mol_type = other DNA
tctgaattaatgaatgattt

SEQ ID NO: 60489 - DNA, 20 bp, synthetic construct
  misc_feature 1..20: note = chemically synthesized
  source 1..20: mol_type = other DNA
ttaatgaatgatttcagcta

SEQ ID NO: 60490 - DNA, 20 bp, synthetic construct
  misc_feature 1..20: note = chemically synthesized
  source 1..20: mol_type = other DNA
gctaaagatgacacttattt

SEQ ID NO: 60491 - DNA, 20 bp, synthetic construct
  misc_feature 1..20: note = chemically synthesized
  source 1..20: mol_type = other DNA
acacttattttggaaaacta

SEQ ID NO: 60492 - DNA, 20 bp, synthetic construct
  misc_feature 1..20: note = chemically synthesized
  source 1..20: mol_type = other DNA
cacttattttggaaaactaa

SEQ ID NO: 60493 - DNA, 20 bp, synthetic construct
  misc_feature 1..20: note = chemically synthesized
  source 1..20: mol_type = other DNA
aggcgaccaatgaacaactg

SEQ ID NO: 60494 - DNA, 20 bp, synthetic construct
  misc_feature 1..20: note = chemically synthesized
  source 1..20: mol_type = other DNA
aacaactgcagttccatgaa

SEQ ID NO: 60495 - DNA, 20 bp, synthetic construct
  misc_feature 1..20: note = chemically synthesized
  source 1..20: mol_type = other DNA
catgaatggctgcattatct

SEQ ID NO: 60496 - DNA, 20 bp, synthetic construct
  misc_feature 1..20: note = chemically synthesized
  source 1..20: mol_type = other DNA
atgaatggctgcattatctt

SEQ ID NO: 60497 - DNA, 20 bp, synthetic construct
  misc_feature 1..20: note = chemically synthesized
  source 1..20: mol_type = other DNA
tgaatggctgcattatcttg

SEQ ID NO: 60498 - DNA, 20 bp, synthetic construct
  misc_feature 1..20: note = chemically synthesized
  source 1..20: mol_type = other DNA
ggctgcattatcttggggtc

SEQ ID NO: 60499 - DNA, 20 bp, synthetic construct
  misc_feature 1..20: note = chemically synthesized
  source 1..20: mol_type = other DNA
gctgcattatcttggggtct

SEQ ID NO: 60500 - DNA, 20 bp, synthetic construct
  misc_feature 1..20: note = chemically synthesized
  source 1..20: mol_type = other DNA
cttggggtctgggcactgtg

SEQ ID NO: 60501 - DNA, 20 bp, synthetic construct
  misc_feature 1..20: note = chemically synthesized
  source 1..20: mol_type = other DNA
ttggggtctgggcactgtga

SEQ ID NO: 60502 - DNA, 20 bp, synthetic construct
  misc_feature 1..20: note = chemically synthesized
  source 1..20: mol_type = other DNA
ggcactgtgaaggtcactgc

SEQ ID NO: 60503 - DNA, 20 bp, synthetic construct
  misc_feature 1..20: note = chemically synthesized
  source 1..20: mol_type = other DNA
gcactgtgaaggtcactgcc

SEQ ID NO: 60504 - DNA, 20 bp, synthetic construct
  misc_feature 1..20: note = chemically synthesized
  source 1..20: mol_type = other DNA
cactgtgaaggtcactgcca

SEQ ID NO: 60505 - DNA, 20 bp, synthetic construct
  misc_feature 1..20: note = chemically synthesized
  source 1..20: mol_type = other DNA
ctgccagggtccgtgtcctc

SEQ ID NO: 60506 - DNA, 20 bp, synthetic construct
  misc_feature 1..20: note = chemically synthesized
  source 1..20: mol_type = other DNA
tgccagggtccgtgtcctca

SEQ ID NO: 60507 - DNA, 20 bp, synthetic construct
  misc_feature 1..20: note = chemically synthesized
  source 1..20: mol_type = other DNA
ccagggtccgtgtcctcaag

SEQ ID NO: 60508 - DNA, 20 bp, synthetic construct
  misc_feature 1..20: note = chemically synthesized
  source 1..20: mol_type = other DNA
ccgtgtcctcaaggagcttc

SEQ ID NO: 60509 - DNA, 20 bp, synthetic construct
  misc_feature 1..20: note = chemically synthesized
  source 1..20: mol_type = other DNA
aggagcttcaagccgtgtac

SEQ ID NO: 60510 - DNA, 20 bp, synthetic construct
  misc_feature 1..20: note = chemically synthesized
  source 1..20: mol_type = other DNA
gcttcaagccgtgtactaga

SEQ ID NO: 60511 - DNA, 20 bp, synthetic construct
  misc_feature 1..20: note = chemically synthesized
  source 1..20: mol_type = other DNA
cttcaagccgtgtactagaa

SEQ ID NO: 60512 - DNA, 20 bp, synthetic construct
  misc_feature 1..20: note = chemically synthesized
  source 1..20: mol_type = other DNA
tcaagccgtgtactagaaag

SEQ ID NO: 60513 - DNA, 20 bp, synthetic construct
  misc_feature 1..20: note = chemically synthesized
  source 1..20: mol_type = other DNA
aagccgtgtactagaaagga

SEQ ID NO: 60514 - DNA, 20 bp, synthetic construct
  misc_feature 1..20: note = chemically synthesized
  source 1..20: mol_type = other DNA
gccgtgtactagaaaggaga

SEQ ID NO: 60515 - DNA, 20 bp, synthetic construct
  misc_feature 1..20: note = chemically synthesized
  source 1..20: mol_type = other DNA
tactagaaaggagagagccc

SEQ ID NO: 60516 - DNA, 20 bp, synthetic construct
  misc_feature 1..20: note = chemically synthesized
  source 1..20: mol_type = other DNA
ctagaaaggagagagccctg

SEQ ID NO: 60517 - DNA, 20 bp, synthetic construct
  misc_feature 1..20: note = chemically synthesized
  source 1..20: mol_type = other DNA
tagaaaggagagagccctgg

SEQ ID NO: 60518 - DNA, 20 bp, synthetic construct
  misc_feature 1..20: note = chemically synthesized
  source 1..20: mol_type = other DNA
aaaggagagagccctggagg

SEQ ID NO: 60519 - DNA, 20 bp, synthetic construct
  misc_feature 1..20: note = chemically synthesized
  source 1..20: mol_type = other DNA
gagagccctggaggcagacg

SEQ ID NO: 60520 - DNA, 20 bp, synthetic construct
  misc_feature 1..20: note = chemically synthesized
  source 1..20: mol_type = other DNA
gagccctggaggcagacgtg

SEQ ID NO: 60521 - DNA, 20 bp, synthetic construct
  misc_feature 1..20: note = chemically synthesized
  source 1..20: mol_type = other DNA
acgatgctcttccctgttct

SEQ ID NO: 60522 - DNA, 20 bp, synthetic construct
  misc_feature 1..20: note = chemically synthesized
  source 1..20: mol_type = other DNA
ctcttccctgttctgagttg

SEQ ID NO: 60523 - DNA, 20 bp, synthetic construct
  misc_feature 1..20: note = chemically synthesized
  source 1..20: mol_type = other DNA
tcttccctgttctgagttgt

SEQ ID NO: 60524 - DNA, 20 bp, synthetic construct
  misc_feature 1..20: note = chemically synthesized
  source 1..20: mol_type = other DNA
tctgagttgtgggtgcacct

SEQ ID NO: 60525 - DNA, 20 bp, synthetic construct
  misc_feature 1..20: note = chemically synthesized
  source 1..20: mol_type = other DNA
gagttgtgggtgcacctgag

SEQ ID NO: 60526 - DNA, 20 bp, synthetic construct
  misc_feature 1..20: note = chemically synthesized
  source 1..20: mol_type = other DNA
agttgtgggtgcacctgagc

SEQ ID NO: 60527 - DNA, 20 bp, synthetic construct
  misc_feature 1..20: note = chemically synthesized
  source 1..20: mol_type = other DNA
gttgtgggtgcacctgagca

SEQ ID NO: 60528 - DNA, 20 bp, synthetic construct
  misc_feature 1..20: note = chemically synthesized
  source 1..20: mol_type = other DNA
ttgtgggtgcacctgagcag

SEQ ID NO: 60529 - DNA, 20 bp, synthetic construct
  misc_feature 1..20: note = chemically synthesized
  source 1..20: mol_type = other DNA
tgtgggtgcacctgagcagg

SEQ ID NO: 60530 - DNA, 20 bp, synthetic construct
  misc_feature 1..20: note = chemically synthesized
  source 1..20: mol_type = other DNA
tgggtgcacctgagcagggg

SEQ ID NO: 60531 - DNA, 20 bp, synthetic construct
  misc_feature 1..20: note = chemically synthesized
  source 1..20: mol_type = other DNA
ggtgcacctgagcaggggga

SEQ ID NO: 60532 - DNA, 20 bp, synthetic construct
  misc_feature 1..20: note = chemically synthesized
  source 1..20: mol_type = other DNA
gtgcacctgagcagggggag

SEQ ID NO: 60533 - DNA, 20 bp, synthetic construct
  misc_feature 1..20: note = chemically synthesized
  source 1..20: mol_type = other DNA
gcagggggagaggcgcttgt

SEQ ID NO: 60534 - DNA, 20 bp, synthetic construct
  misc_feature 1..20: note = chemically synthesized
  source 1..20: mol_type = other DNA
cagggggagaggcgcttgtc

SEQ ID NO: 60535 - DNA, 20 bp, synthetic construct
  misc_feature 1..20: note = chemically synthesized
  source 1..20: mol_type = other DNA
ggggagaggcgcttgtcagg

SEQ ID NO: 60536 - DNA, 20 bp, synthetic construct
  misc_feature 1..20: note = chemically synthesized
  source 1..20: mol_type = other DNA
agaggcgcttgtcaggaaga

SEQ ID NO: 60537 - DNA, 20 bp, synthetic construct
  misc_feature 1..20: note = chemically synthesized
  source 1..20: mol_type = other DNA
gcgcttgtcaggaagatgga

SEQ ID NO: 60538 - DNA, 20 bp, synthetic construct
  misc_feature 1..20: note = chemically synthesized
  source 1..20: mol_type = other DNA
gcttgtcaggaagatggaca

SEQ ID NO: 60539 - DNA, 20 bp, synthetic construct
  misc_feature 1..20: note = chemically synthesized
  source 1..20: mol_type = other DNA
cttgtcaggaagatggacag

SEQ ID NO: 60540 - DNA, 20 bp, synthetic construct
  misc_feature 1..20: note = chemically synthesized
  source 1..20: mol_type = other DNA
ttgtcaggaagatggacaga

SEQ ID NO: 60541 - DNA, 20 bp, synthetic construct
  misc_feature 1..20: note = chemically synthesized
  source 1..20: mol_type = other DNA
tgtcaggaagatggacagag

SEQ ID NO: 60542 - DNA, 20 bp, synthetic construct
  misc_feature 1..20: note = chemically synthesized
  source 1..20: mol_type = other DNA
tcaggaagatggacagaggg

SEQ ID NO: 60543 - DNA, 20 bp, synthetic construct
  misc_feature 1..20: note = chemically synthesized
  source 1..20: mol_type = other DNA
gaagatggacagaggggagc

SEQ ID NO: 60544 - DNA, 20 bp, synthetic construct
  misc_feature 1..20: note = chemically synthesized
  source 1..20: mol_type = other DNA
cagaggggagccagccccat

SEQ ID NO: 60545 - DNA, 20 bp, synthetic construct
  misc_feature 1..20: note = chemically synthesized
  source 1..20: mol_type = other DNA
ggagccagccccatcagcca

SEQ ID NO: 60546 - DNA, 20 bp, synthetic construct
  misc_feature 1..20: note = chemically synthesized
  source 1..20: mol_type = other DNA
gccccatcagccaaagcctt

SEQ ID NO: 60547 - DNA, 20 bp, synthetic construct
  misc_feature 1..20: note = chemically synthesized
  source 1..20: mol_type = other DNA
ccccatcagccaaagccttg

SEQ ID NO: 60548 - DNA, 20 bp, synthetic construct
  misc_feature 1..20: note = chemically synthesized
  source 1..20: mol_type = other DNA
ccatcagccaaagccttgag

SEQ ID NO: 60549 - DNA, 20 bp, synthetic construct
  misc_feature 1..20: note = chemically synthesized
  source 1..20: mol_type = other DNA
catcagccaaagccttgagg

SEQ ID NO: 60550 - DNA, 20 bp, synthetic construct
  misc_feature 1..20: note = chemically synthesized
  source 1..20: mol_type = other DNA
tcagccaaagccttgaggag

SEQ ID NO: 60551 - DNA, 20 bp, synthetic construct
  misc_feature 1..20: note = chemically synthesized
  source 1..20: mol_type = other DNA
ccaaagccttgaggaggagc

SEQ ID NO: 60552 - DNA, 20 bp, synthetic construct
  misc_feature 1..20: note = chemically synthesized
  source 1..20: mol_type = other DNA
caaagccttgaggaggagca

SEQ ID NO: 60553 - DNA, 20 bp, synthetic construct
  misc_feature 1..20: note = chemically synthesized
  source 1..20: mol_type = other DNA
gaggagcaaggcctatgtga

SEQ ID NO: 60554 - DNA, 20 bp, synthetic construct
  misc_feature 1..20: note = chemically synthesized
  source 1..20: mol_type = other DNA
aggagcaaggcctatgtgac

SEQ ID NO: 60555 - DNA, 20 bp, synthetic construct
  misc_feature 1..20: note = chemically synthesized
  source 1..20: mol_type = other DNA
ggagcaaggcctatgtgaca

SEQ ID NO: 60556 - DNA, 20 bp, synthetic construct
  misc_feature 1..20: note = chemically synthesized
  source 1..20: mol_type = other DNA
agcaaggcctatgtgacagg

SEQ ID NO: 60557 - DNA, 20 bp, synthetic construct
  misc_feature 1..20: note = chemically synthesized
  source 1..20: mol_type = other DNA
gcaaggcctatgtgacaggg

SEQ ID NO: 60558 - DNA, 20 bp, synthetic construct
  misc_feature 1..20: note = chemically synthesized
  source 1..20: mol_type = other DNA
caaggcctatgtgacaggga

SEQ ID NO: 60559 - DNA, 20 bp, synthetic construct
  misc_feature 1..20: note = chemically synthesized
  source 1..20: mol_type = other DNA
aggcctatgtgacagggagg

SEQ ID NO: 60560 - DNA, 20 bp, synthetic construct
  misc_feature 1..20: note = chemically synthesized
  source 1..20: mol_type = other DNA
gcctatgtgacagggaggga

SEQ ID NO: 60561 - DNA, 20 bp, synthetic construct
  misc_feature 1..20: note = chemically synthesized
  source 1..20: mol_type = other DNA
cctatgtgacagggagggag

SEQ ID NO: 60562 - DNA, 20 bp, synthetic construct
  misc_feature 1..20: note = chemically synthesized
  source 1..20: mol_type = other DNA
acagggagggagaggatgtg

SEQ ID NO: 60563 - DNA, 20 bp, synthetic construct
  misc_feature 1..20: note = chemically synthesized
  source 1..20: mol_type = other DNA
cagggagggagaggatgtgc

SEQ ID NO: 60564 - DNA, 20 bp, synthetic construct
  misc_feature 1..20: note = chemically synthesized
  source 1..20: mol_type = other DNA
agggagggagaggatgtgca

SEQ ID NO: 60565 - DNA, 20 bp, synthetic construct
  misc_feature 1..20: note = chemically synthesized
  source 1..20: mol_type = other DNA
agggagaggatgtgcagggc

SEQ ID NO: 60566 - DNA, 20 bp, synthetic construct
  misc_feature 1..20: note = chemically synthesized
  source 1..20: mol_type = other DNA
gggagaggatgtgcagggcc

SEQ ID NO: 60567 - DNA, 20 bp, synthetic construct
  misc_feature 1..20: note = chemically synthesized
  source 1..20: mol_type = other DNA
ggagaggatgtgcagggcca

SEQ ID NO: 60568 - DNA, 20 bp, synthetic construct
  misc_feature 1..20: note = chemically synthesized
  source 1..20: mol_type = other DNA
tgtgcagggccagggccgtc

SEQ ID NO: 60569 - DNA, 20 bp, synthetic construct
  misc_feature 1..20: note = chemically synthesized
  source 1..20: mol_type = other DNA
gtgcagggccagggccgtcc

SEQ ID NO: 60570 - DNA, 20 bp, synthetic construct
  misc_feature 1..20: note = chemically synthesized
  source 1..20: mol_type = other DNA
tgcagggccagggccgtcca

SEQ ID NO: 60571 - DNA, 20 bp, synthetic construct
  misc_feature 1..20: note = chemically synthesized
  source 1..20: mol_type = other DNA
gcagggccagggccgtccag

SEQ ID NO: 60572 - DNA, 20 bp, synthetic construct
  misc_feature 1..20: note = chemically synthesized
  source 1..20: mol_type = other DNA
cagggccagggccgtccagg

SEQ ID NO: 60573 - DNA, 20 bp, synthetic construct
  misc_feature 1..20: note = chemically synthesized
  source 1..20: mol_type = other DNA
gggccagggccgtccagggg

SEQ ID NO: 60574 - DNA, 20 bp, synthetic construct
  misc_feature 1..20: note = chemically synthesized
  source 1..20: mol_type = other DNA
cagggccgtccagggggagt

SEQ ID NO: 60575 - DNA, 20 bp, synthetic construct
  misc_feature 1..20: note = chemically synthesized
  source 1..20: mol_type = other DNA
cagggggagtgagcgcttcc

SEQ ID NO: 60576 - DNA, 20 bp, synthetic construct
  misc_feature 1..20: note = chemically synthesized
  source 1..20: mol_type = other DNA
agggggagtgagcgcttcct

SEQ ID NO: 60577 - DNA, 20 bp, synthetic construct
  misc_feature 1..20: note = chemically synthesized
  source 1..20: mol_type = other DNA
ggggagtgagcgcttcctgg

SEQ ID NO: 60578 - DNA, 20 bp, synthetic construct
  misc_feature 1..20: note = chemically synthesized
  source 1..20: mol_type = other DNA
gggagtgagcgcttcctggg

SEQ ID NO: 60579 - DNA, 20 bp, synthetic construct
  misc_feature 1..20: note = chemically synthesized
  source 1..20: mol_type = other DNA
ttcctgggaggtgtccacgt

SEQ ID NO: 60580 - DNA, 20 bp, synthetic construct
  misc_feature 1..20: note = chemically synthesized
  source 1..20: mol_type = other DNA
tgtccacgtgagccttgctc

SEQ ID NO: 60581 - DNA, 20 bp, synthetic construct
  misc_feature 1..20: note = chemically synthesized
  source 1..20: mol_type = other DNA
gtccacgtgagccttgctcg

SEQ ID NO: 60582 - DNA, 20 bp, synthetic construct
  misc_feature 1..20: note = chemically synthesized
  source 1..20: mol_type = other DNA
cgtgagccttgctcgaggcc

SEQ ID NO: 60583 - DNA, 20 bp, synthetic construct
  misc_feature 1..20: note = chemically synthesized
  source 1..20: mol_type = other DNA
gtgagccttgctcgaggcct

SEQ ID NO: 60584 - DNA, 20 bp, synthetic construct
  misc_feature 1..20: note = chemically synthesized
  source 1..20: mol_type = other DNA
ccttgctcgaggcctgggat

SEQ ID NO: 60585 - DNA, 20 bp, synthetic construct
  misc_feature 1..20: note = chemically synthesized
  source 1..20: mol_type = other DNA
gtctctgcttctctcccctc

SEQ ID NO: 60586 - DNA, 20 bp, synthetic construct
  misc_feature 1..20: note = chemically synthesized
  source 1..20: mol_type = other DNA
tctctgcttctctcccctcc

SEQ ID NO: 60587 - DNA, 20 bp, synthetic construct
  misc_feature 1..20: note = chemically synthesized
  source 1..20: mol_type = other DNA
ctcccctccaggccgtgcat

SEQ ID NO: 60588 - DNA, 20 bp, synthetic construct
  misc_feature 1..20: note = chemically synthesized
  source 1..20: mol_type = other DNA
tcccctccaggccgtgcata

SEQ ID NO: 60589 - DNA, 20 bp, synthetic construct
  misc_feature 1..20: note = chemically synthesized
  source 1..20: mol_type = other DNA
aggctgtgctgaccatcgac

SEQ ID NO: 60590 - DNA, 20 bp, synthetic construct
  misc_feature 1..20: note = chemically synthesized
  source 1..20: mol_type = other DNA
tgtgctgaccatcgacgaga

SEQ ID NO: 60591 - DNA, 20 bp, synthetic construct
  misc_feature 1..20: note = chemically synthesized
  source 1..20: mol_type = other DNA
gtgctgaccatcgacgagaa

SEQ ID NO: 60592 - DNA, 20 bp, synthetic construct
  misc_feature 1..20: note = chemically synthesized
  source 1..20: mol_type = other DNA
tgctgaccatcgacgagaaa

SEQ ID NO: 60593 - DNA, 20 bp, synthetic construct
  misc_feature 1..20: note = chemically synthesized
  source 1..20: mol_type = other DNA
catcgacgagaaagggactg

SEQ ID NO: 60594 - DNA, 20 bp, synthetic construct
  misc_feature 1..20: note = chemically synthesized
  source 1..20: mol_type = other DNA
gagaaagggactgaagctgc

SEQ ID NO: 60595 - DNA, 20 bp, synthetic construct
  misc_feature 1..20: note = chemically synthesized
  source 1..20: mol_type = other DNA
agaaagggactgaagctgct

SEQ ID NO: 60596 - DNA, 20 bp, synthetic construct
  misc_feature 1..20: note = chemically synthesized
  source 1..20: mol_type = other DNA
gaaagggactgaagctgctg

SEQ ID NO: 60597 - DNA, 20 bp, synthetic construct
  misc_feature 1..20: note = chemically synthesized
  source 1..20: mol_type = other DNA
agctgctggggccatgtttt

SEQ ID NO: 60598 - DNA, 20 bp, synthetic construct
  misc_feature 1..20: note = chemically synthesized
  source 1..20: mol_type = other DNA
ctgctggggccatgttttta

SEQ ID NO: 60599 - DNA, 20 bp, synthetic construct
  misc_feature 1..20: note = chemically synthesized
  source 1..20: mol_type = other DNA
tgctggggccatgtttttag

SEQ ID NO: 60600 - DNA, 20 bp, synthetic construct
  misc_feature 1..20: note = chemically synthesized
  source 1..20: mol_type = other DNA
tacccatgtctatccccccc

SEQ ID NO: 60601 - DNA, 20 bp, synthetic construct
  misc_feature 1..20: note = chemically synthesized
  source 1..20: mol_type = other DNA
acccatgtctatcccccccg

SEQ ID NO: 60602 - DNA, 20 bp, synthetic construct
  misc_feature 1..20: note = chemically synthesized
  source 1..20: mol_type = other DNA
tgtctatcccccccgaggtc

SEQ ID NO: 60603 - DNA, 20 bp, synthetic construct
  misc_feature 1..20: note = chemically synthesized
  source 1..20: mol_type = other DNA
taatgattgaacaaaatacc

SEQ ID NO: 60604 - DNA, 20 bp, synthetic construct
  misc_feature 1..20: note = chemically synthesized
  source 1..20: mol_type = other DNA
taccaagtctcccctcttca

SEQ ID NO: 60605 - DNA, 20 bp, synthetic construct
  misc_feature 1..20: note = chemically synthesized
  source 1..20: mol_type = other DNA
accaagtctcccctcttcat

SEQ ID NO: 60606 - DNA, 20 bp, synthetic construct
  misc_feature 1..20: note = chemically synthesized
  source 1..20: mol_type = other DNA
gtctcccctcttcatgggaa

SEQ ID NO: 60607 - DNA, 20 bp, synthetic construct
  misc_feature 1..20: note = chemically synthesized
  source 1..20: mol_type = other DNA
tcccctcttcatgggaaaag

SEQ ID NO: 60608 - DNA, 20 bp, synthetic construct
  misc_feature 1..20: note = chemically synthesized
  source 1..20: mol_type = other DNA
caacccctcccctccatccc

SEQ ID NO: 60609 - DNA, 20 bp, synthetic construct
  misc_feature 1..20: note = chemically synthesized
  source 1..20: mol_type = other DNA
tccatccctggccccctccc

SEQ ID NO: 60610 - DNA, 20 bp, synthetic construct
  misc_feature 1..20: note = chemically synthesized
  source 1..20: mol_type = other DNA
cccctccctggatgacatta

SEQ ID NO: 60611 - DNA, 20 bp, synthetic construct
  misc_feature 1..20: note = chemically synthesized
  source 1..20: mol_type = other DNA
ctccctggatgacattaaag

SEQ ID NO: 60612 - DNA, 20 bp, synthetic construct
  misc_feature 1..20: note = chemically synthesized
  source 1..20: mol_type = other DNA
tccctggatgacattaaaga

SEQ ID NO: 60613 - DNA, 20 bp, synthetic construct
  misc_feature 1..20: note = chemically synthesized
  source 1..20: mol_type = other DNA
ccctggatgacattaaagaa

SEQ ID NO: 60614 - DNA, 20 bp, synthetic construct
  misc_feature 1..20: note = chemically synthesized
  source 1..20: mol_type = other DNA
gatgacattaaagaagggtt

SEQ ID NO: 60615 - DNA, 20 bp, synthetic construct
  misc_feature 1..20: note = chemically synthesized
  source 1..20: mol_type = other DNA
acattaaagaagggttgagc

SEQ ID NO: 60616 - DNA, 20 bp, synthetic construct
  misc_feature 1..20: note = chemically synthesized
  source 1..20: mol_type = other DNA
atccctcccatgttttctct

SEQ ID NO: 60617 - DNA, 20 bp, synthetic construct
  misc_feature 1..20: note = chemically synthesized
  source 1..20: mol_type = other DNA
tgagtctccctttgcctgct

SEQ ID NO: 60618 - DNA, 20 bp, synthetic construct
  misc_feature 1..20: note = chemically synthesized
  source 1..20: mol_type = other DNA
gagtctccctttgcctgctg

SEQ ID NO: 60619 - DNA, 20 bp, synthetic construct
  misc_feature 1..20: note = chemically synthesized
  source 1..20: mol_type = other DNA
ttgcctgctgaggctgtatg

SEQ ID NO: 60620 - DNA, 20 bp, synthetic construct
  misc_feature 1..20: note = chemically synthesized
  source 1..20: mol_type = other DNA
tgcctgctgaggctgtatgt

SEQ ID NO: 60621 - DNA, 20 bp, synthetic construct
  misc_feature 1..20: note = chemically synthesized
  source 1..20: mol_type = other DNA
ctgaggctgtatgtgggctc

SEQ ID NO: 60622 - DNA, 20 bp, synthetic construct
  misc_feature 1..20: note = chemically synthesized
  source 1..20: mol_type = other DNA
tgaggctgtatgtgggctcc

SEQ ID NO: 60623 - DNA, 20 bp, synthetic construct
  misc_feature 1..20: note = chemically synthesized
  source 1..20: mol_type = other DNA
tgtatgtgggctccaggtaa

SEQ ID NO: 60624 - DNA, 20 bp, synthetic construct
  misc_feature 1..20: note = chemically synthesized
  source 1..20: mol_type = other DNA
ccaggtaacagtgctgtctt

SEQ ID NO: 60625 - DNA, 20 bp, synthetic construct
  misc_feature 1..20: note = chemically synthesized
  source 1..20: mol_type = other DNA
caggtaacagtgctgtcttc

SEQ ID NO: 60626 - DNA, 20 bp, synthetic construct
  misc_feature 1..20: note = chemically synthesized
  source 1..20: mol_type = other DNA
ggccccctgaactgtgttca

SEQ ID NO: 60627 - DNA, 20 bp, synthetic construct
  misc_feature 1..20: note = chemically synthesized
  source 1..20: mol_type = other DNA
ccccctgaactgtgttcatg

SEQ ID NO: 60628 - DNA, 20 bp, synthetic construct
  misc_feature 1..20: note = chemically synthesized
  source 1..20: mol_type = other DNA
aactgtgttcatggagcatc

SEQ ID NO: 60629 - DNA, 20 bp, synthetic construct
  misc_feature 1..20: note = chemically synthesized
  source 1..20: mol_type = other DNA
gtgttcatggagcatctggc

SEQ ID NO: 60630 - DNA, 20 bp, synthetic construct
  misc_feature 1..20: note = chemically synthesized
  source 1..20: mol_type = other DNA
tgttcatggagcatctggct

SEQ ID NO: 60631 - DNA, 20 bp, synthetic construct
  misc_feature 1..20: note = chemically synthesized
  source 1..20: mol_type = other DNA
tcatggagcatctggctggg

SEQ ID NO: 60632 - DNA, 20 bp, synthetic construct
  misc_feature 1..20: note = chemically synthesized
  source 1..20: mol_type = other DNA
catggagcatctggctgggt

SEQ ID NO: 60633 - DNA, 20 bp, synthetic construct
  misc_feature 1..20: note = chemically synthesized
  source 1..20: mol_type = other DNA
ctggctgggtaggcacatgc

SEQ ID NO: 60634 - DNA, 20 bp, synthetic construct
  misc_feature 1..20: note = chemically synthesized
  source 1..20: mol_type = other DNA
tggctgggtaggcacatgct

SEQ ID NO: 60635 - DNA, 20 bp, synthetic construct
  misc_feature 1..20: note = chemically synthesized
  source 1..20: mol_type = other DNA
gcacatgctgggcttgaatc

SEQ ID NO: 60636 - DNA, 20 bp, synthetic construct
  misc_feature 1..20: note = chemically synthesized
  source 1..20: mol_type = other DNA
cacatgctgggcttgaatcc

SEQ ID NO: 60637 - DNA, 20 bp, synthetic construct
  misc_feature 1..20: note = chemically synthesized
  source 1..20: mol_type = other DNA
acatgctgggcttgaatcca

SEQ ID NO: 60638 - DNA, 20 bp, synthetic construct
  misc_feature 1..20: note = chemically synthesized
  source 1..20: mol_type = other DNA
catgctgggcttgaatccag

SEQ ID NO: 60639 - DNA, 20 bp, synthetic construct
  misc_feature 1..20: note = chemically synthesized
  source 1..20: mol_type = other DNA
atgctgggcttgaatccagg

SEQ ID NO: 60640 - DNA, 20 bp, synthetic construct
  misc_feature 1..20: note = chemically synthesized
  source 1..20: mol_type = other DNA
tgctgggcttgaatccaggg

SEQ ID NO: 60641 - DNA, 20 bp, synthetic construct
  misc_feature 1..20: note = chemically synthesized
  source 1..20: mol_type = other DNA
tccaggggggactgaatcct

SEQ ID NO: 60642 - DNA, 20 bp, synthetic construct
  misc_feature 1..20: note = chemically synthesized
  source 1..20: mol_type = other DNA
gggactgaatcctcagctta

SEQ ID NO: 60643 - DNA, 20 bp, synthetic construct
  misc_feature 1..20: note = chemically synthesized
  source 1..20: mol_type = other DNA
gaatcctcagcttacggacc

SEQ ID NO: 60644 - DNA, 20 bp, synthetic construct
  misc_feature 1..20: note = chemically synthesized
  source 1..20: mol_type = other DNA
aatcctcagcttacggacct

SEQ ID NO: 60645 - DNA, 20 bp, synthetic construct
  misc_feature 1..20: note = chemically synthesized
  source 1..20: mol_type = other DNA
gacctgggcccatctgtttc

SEQ ID NO: 60646 - DNA, 20 bp, synthetic construct
  misc_feature 1..20: note = chemically synthesized
  source 1..20: mol_type = other DNA
cctgggcccatctgtttctg

SEQ ID NO: 60647 - DNA, 20 bp, synthetic construct
  misc_feature 1..20: note = chemically synthesized
  source 1..20: mol_type = other DNA
ctgggcccatctgtttctgg

SEQ ID NO: 60648 - DNA, 20 bp, synthetic construct
  misc_feature 1..20: note = chemically synthesized
  source 1..20: mol_type = other DNA
tgggcccatctgtttctgga

SEQ ID NO: 60649 - DNA, 20 bp, synthetic construct
  misc_feature 1..20: note = chemically synthesized
  source 1..20: mol_type = other DNA
catctgtttctggagggctc

SEQ ID NO: 60650 - DNA, 20 bp, synthetic construct
  misc_feature 1..20: note = chemically synthesized
  source 1..20: mol_type = other DNA
cagtcttccttgtcctgtct

SEQ ID NO: 60651 - DNA, 20 bp, synthetic construct
  misc_feature 1..20: note = chemically synthesized
  source 1..20: mol_type = other DNA
gtcttccttgtcctgtcttg

SEQ ID NO: 60652 - DNA, 20 bp, synthetic construct
  misc_feature 1..20: note = chemically synthesized
  source 1..20: mol_type = other DNA
tgtcctgtcttggagtcccc

SEQ ID NO: 60653 - DNA, 20 bp, synthetic construct
  misc_feature 1..20: note = chemically synthesized
  source 1..20: mol_type = other DNA
cctgtcttggagtccccaag

SEQ ID NO: 60654 - DNA, 20 bp, synthetic construct
  misc_feature 1..20: note = chemically synthesized
  source 1..20: mol_type = other DNA
ctgtcttggagtccccaaga

SEQ ID NO: 60655 - DNA, 20 bp, synthetic construct
  misc_feature 1..20: note = chemically synthesized
  source 1..20: mol_type = other DNA
gagtccccaagaaggaatca

SEQ ID NO: 60656 - DNA, 20 bp, synthetic construct
  misc_feature 1..20: note = chemically synthesized
  source 1..20: mol_type = other DNA
agtccccaagaaggaatcac

SEQ ID NO: 60657 - DNA, 20 bp, synthetic construct
  misc_feature 1..20: note = chemically synthesized
  source 1..20: mol_type = other DNA
gtccccaagaaggaatcaca

SEQ ID NO: 60658 - DNA, 20 bp, synthetic construct
  misc_feature 1..20: note = chemically synthesized
  source 1..20: mol_type = other DNA
tccccaagaaggaatcacag

SEQ ID NO: 60659 - DNA, 20 bp, synthetic construct
  misc_feature 1..20: note = chemically synthesized
  source 1..20: mol_type = other DNA
cccaagaaggaatcacaggg

SEQ ID NO: 60660 - DNA, 20 bp, synthetic construct
  misc_feature 1..20: note = chemically synthesized
  source 1..20: mol_type = other DNA
ccaagaaggaatcacagggg

SEQ ID NO: 60661 - DNA, 20 bp, synthetic construct
  misc_feature 1..20: note = chemically synthesized
  source 1..20: mol_type = other DNA
aggaatcacaggggaggaac

SEQ ID NO: 60662 - DNA, 20 bp, synthetic construct
  misc_feature 1..20: note = chemically synthesized
  source 1..20: mol_type = other DNA
acaggggaggaaccagatac

SEQ ID NO: 60663 - DNA, 20 bp, synthetic construct
  misc_feature 1..20: note = chemically synthesized
  source 1..20: mol_type = other DNA
ccagataccagccatgaccc

SEQ ID NO: 60664 - DNA, 20 bp, synthetic construct
  misc_feature 1..20: note = chemically synthesized
  source 1..20: mol_type = other DNA
cagataccagccatgacccc

SEQ ID NO: 60665 - DNA, 20 bp, synthetic construct
  misc_feature 1..20: note = chemically synthesized
  source 1..20: mol_type = other DNA
ccatgaccccaggctccacc

SEQ ID NO: 60666 - DNA, 20 bp, synthetic construct
  misc_feature 1..20: note = chemically synthesized
  source 1..20: mol_type = other DNA
atcccccactcccccccacc

SEQ ID NO: 60667 - DNA, 20 bp, synthetic construct
  misc_feature 1..20: note = chemically synthesized
  source 1..20: mol_type = other DNA
cccccactcccccccaccca

SEQ ID NO: 60668 - DNA, 20 bp, synthetic construct
  misc_feature 1..20: note = chemically synthesized
  source 1..20: mol_type = other DNA
cccagagttgctcatcctgc

SEQ ID NO: 60669 - DNA, 20 bp, synthetic construct
  misc_feature 1..20: note = chemically synthesized
  source 1..20: mol_type = other DNA
ccagagttgctcatcctgcc

SEQ ID NO: 60670 - DNA, 20 bp, synthetic construct
  misc_feature 1..20: note = chemically synthesized
  source 1..20: mol_type = other DNA
cagagttgctcatcctgcca

SEQ ID NO: 60671 - DNA, 20 bp, synthetic construct
  misc_feature 1..20: note = chemically synthesized
  source 1..20: mol_type = other DNA
gttgctcatcctgccagggc

SEQ ID NO: 60672 - DNA, 20 bp, synthetic construct
  misc_feature 1..20: note = chemically synthesized
  source 1..20: mol_type = other DNA
gggctggctgtgcccacccc

SEQ ID NO: 60673 - DNA, 20 bp, synthetic construct
  misc_feature 1..20: note = chemically synthesized
  source 1..20: mol_type = other DNA
ggctggctgtgcccacccca

SEQ ID NO: 60674 - DNA, 20 bp, synthetic construct
  misc_feature 1..20: note = chemically synthesized
  source 1..20: mol_type = other DNA
ccaccccaaggctgccctcc

SEQ ID NO: 60675 - DNA, 20 bp, synthetic construct
  misc_feature 1..20: note = chemically synthesized
  source 1..20: mol_type = other DNA
caccccaaggctgccctcct

SEQ ID NO: 60676 - DNA, 20 bp, synthetic construct
  misc_feature 1..20: note = chemically synthesized
  source 1..20: mol_type = other DNA
accccaaggctgccctcctg

SEQ ID NO: 60677 - DNA, 20 bp, synthetic construct
  misc_feature 1..20: note = chemically synthesized
  source 1..20: mol_type = other DNA
ccccaaggctgccctcctgg

SEQ ID NO: 60678 - DNA, 20 bp, synthetic construct
  misc_feature 1..20: note = chemically synthesized
  source 1..20: mol_type = other DNA
ggctgccctcctgggggccc

SEQ ID NO: 60679 - DNA, 20 bp, synthetic construct
  misc_feature 1..20: note = chemically synthesized
  source 1..20: mol_type = other DNA
agaactgcctgatcgtgccg

SEQ ID NO: 60680 - DNA, 20 bp, synthetic construct
  misc_feature 1..20: note = chemically synthesized
  source 1..20: mol_type = other DNA
tgcctgatcgtgccgtggcc

SEQ ID NO: 60681 - DNA, 20 bp, synthetic construct
  misc_feature 1..20: note = chemically synthesized
  source 1..20: mol_type = other DNA
cgtgccgtggcccagttttg

SEQ ID NO: 60682 - DNA, 20 bp, synthetic construct
  misc_feature 1..20: note = chemically synthesized
  source 1..20: mol_type = other DNA
gcccagttttgtggcatctg

SEQ ID NO: 60683 - DNA, 20 bp, synthetic construct
  misc_feature 1..20: note = chemically synthesized
  source 1..20: mol_type = other DNA
tgtggcatctgcagcaacac

SEQ ID NO: 60684 - DNA, 20 bp, synthetic construct
  misc_feature 1..20: note = chemically synthesized
  source 1..20: mol_type = other DNA
tggcatctgcagcaacacaa

SEQ ID NO: 60685 - DNA, 20 bp, synthetic construct
  misc_feature 1..20: note = chemically synthesized
  source 1..20: mol_type = other DNA
gcatctgcagcaacacaaga

SEQ ID NO: 60686 - DNA, 20 bp, synthetic construct
  misc_feature 1..20: note = chemically synthesized
  source 1..20: mol_type = other DNA
atctgcagcaacacaagaga

SEQ ID NO: 60687 - DNA, 20 bp, synthetic construct
  misc_feature 1..20: note = chemically synthesized
  source 1..20: mol_type = other DNA
tctgcagcaacacaagagag

SEQ ID NO: 60688 - DNA, 20 bp, synthetic construct
  misc_feature 1..20: note = chemically synthesized
  source 1..20: mol_type = other DNA
ttgacccgctgtcacctaac

SEQ ID NO: 60689 - DNA, 20 bp, synthetic construct
  misc_feature 1..20: note = chemically synthesized
  source 1..20: mol_type = other DNA
cgctgtcacctaaccagact

SEQ ID NO: 60690 - DNA, 20 bp, synthetic construct
  misc_feature 1..20: note = chemically synthesized
  source 1..20: mol_type = other DNA
gctgtcacctaaccagactc

SEQ ID NO: 60691 - DNA, 20 bp, synthetic construct
  misc_feature 1..20: note = chemically synthesized
  source 1..20: mol_type = other DNA
gactcgggccctgcacctct

SEQ ID NO: 60692 - DNA, 20 bp, synthetic construct
  misc_feature 1..20: note = chemically synthesized
  source 1..20: mol_type = other DNA
actcgggccctgcacctctc

SEQ ID NO: 60693 - DNA, 20 bp, synthetic construct
  misc_feature 1..20: note = chemically synthesized
  source 1..20: mol_type = other DNA
ctgcacctctcaggcacttc

SEQ ID NO: 60694 - DNA, 20 bp, synthetic construct
  misc_feature 1..20: note = chemically synthesized
  source 1..20: mol_type = other DNA
ggcacttctggaaaatgact

SEQ ID NO: 60695 - DNA, 20 bp, synthetic construct
  misc_feature 1..20: note = chemically synthesized
  source 1..20: mol_type = other DNA
gcacttctggaaaatgactg

SEQ ID NO: 60696 - DNA, 20 bp, synthetic construct
  misc_feature 1..20: note = chemically synthesized
  source 1..20: mol_type = other DNA
cttctggaaaatgactgagg

SEQ ID NO: 60697 - DNA, 20 bp, synthetic construct
  misc_feature 1..20: note = chemically synthesized
  source 1..20: mol_type = other DNA
actgaggcagattcttcctg

SEQ ID NO: 60698 - DNA, 20 bp, synthetic construct
  misc_feature 1..20: note = chemically synthesized
  source 1..20: mol_type = other DNA
ttcctgaagcccattctcca

SEQ ID NO: 60699 - DNA, 20 bp, synthetic construct
  misc_feature 1..20: note = chemically synthesized
  source 1..20: mol_type = other DNA
tcctgaagcccattctccat

SEQ ID NO: 60700 - DNA, 20 bp, synthetic construct
  misc_feature 1..20: note = chemically synthesized
  source 1..20: mol_type = other DNA
cctgaagcccattctccatg

SEQ ID NO: 60701 - DNA, 20 bp, synthetic construct
  misc_feature 1..20: note = chemically synthesized
  source 1..20: mol_type = other DNA
cccattctccatggggcaac

SEQ ID NO: 60702 - DNA, 20 bp, synthetic construct
  misc_feature 1..20: note = chemically synthesized
  source 1..20: mol_type = other DNA
ccattctccatggggcaaca

SEQ ID NO: 60703 - DNA, 20 bp, synthetic construct
  misc_feature 1..20: note = chemically synthesized
  source 1..20: mol_type = other DNA
ttgtccttccatcgctgccc

SEQ ID NO: 60704 - DNA, 20 bp, synthetic construct
  misc_feature 1..20: note = chemically synthesized
  source 1..20: mol_type = other DNA
ccttccatcgctgccccaga

SEQ ID NO: 60705 - DNA, 20 bp, synthetic construct
  misc_feature 1..20: note = chemically synthesized
  source 1..20: mol_type = other DNA
aagcctcacatatctccgtt

SEQ ID NO: 60706 - DNA, 20 bp, synthetic construct
  misc_feature 1..20: note = chemically synthesized
  source 1..20: mol_type = other DNA
cacatatctccgtttagaat

SEQ ID NO: 60707 - DNA, 20 bp, synthetic construct
  misc_feature 1..20: note = chemically synthesized
  source 1..20: mol_type = other DNA
acatatctccgtttagaatc

SEQ ID NO: 60708 - DNA, 20 bp, synthetic construct
  misc_feature 1..20: note = chemically synthesized
  source 1..20: mol_type = other DNA
agaatcaggtcccttctccc

SEQ ID NO: 60709 - DNA, 20 bp, synthetic construct
  misc_feature 1..20: note = chemically synthesized
  source 1..20: mol_type = other DNA
aggtcccttctccccagatg

SEQ ID NO: 60710 - DNA, 20 bp, synthetic construct
  misc_feature 1..20: note = chemically synthesized
  source 1..20: mol_type = other DNA
gtcccttctccccagatgaa

SEQ ID NO: 60711 - DNA, 20 bp, synthetic construct
  misc_feature 1..20: note = chemically synthesized
  source 1..20: mol_type = other DNA
tcccttctccccagatgaag

SEQ ID NO: 60712 - DNA, 20 bp, synthetic construct
  misc_feature 1..20: note = chemically synthesized
  source 1..20: mol_type = other DNA
ccttctccccagatgaagag

SEQ ID NO: 60713 - DNA, 20 bp, synthetic construct
  misc_feature 1..20: note = chemically synthesized
  source 1..20: mol_type = other DNA
cttctccccagatgaagagg

SEQ ID NO: 60714 - DNA, 20 bp, synthetic construct
  misc_feature 1..20: note = chemically synthesized
  source 1..20: mol_type = other DNA
ttctccccagatgaagagga

SEQ ID NO: 60715 - DNA, 20 bp, synthetic construct
  misc_feature 1..20: note = chemically synthesized
  source 1..20: mol_type = other DNA
tgttttctctatctcctcct

SEQ ID NO: 60716 - DNA, 20 bp, synthetic construct
  misc_feature 1..20: note = chemically synthesized
  source 1..20: mol_type = other DNA
atctcctcctcagacttgac

SEQ ID NO: 60717 - DNA, 20 bp, synthetic construct
  misc_feature 1..20: note = chemically synthesized
  source 1..20: mol_type = other DNA
tctcctcctcagacttgacc

SEQ ID NO: 60718 - DNA, 20 bp, synthetic construct
  misc_feature 1..20: note = chemically synthesized
  source 1..20: mol_type = other DNA
tcctcagacttgaccaggcc

SEQ ID NO: 60719 - DNA, 20 bp, synthetic construct
  misc_feature 1..20: note = chemically synthesized
  source 1..20: mol_type = other DNA
tcagacttgaccaggcccag

SEQ ID NO: 60720 - DNA, 20 bp, synthetic construct
  misc_feature 1..20: note = chemically synthesized
  source 1..20: mol_type = other DNA
cagacttgaccaggcccagc

SEQ ID NO: 60721 - DNA, 20 bp, synthetic construct
  misc_feature 1..20: note = chemically synthesized
  source 1..20: mol_type = other DNA
tgaccaggcccagcaggccc

SEQ ID NO: 60722 - DNA, 20 bp, synthetic construct
  misc_feature 1..20: note = chemically synthesized
  source 1..20: mol_type = other DNA
ccaggcccagcaggccccag

SEQ ID NO: 60723 - DNA, 20 bp, synthetic construct
  misc_feature 1..20: note = chemically synthesized
  source 1..20: mol_type = other DNA
cctatatcccttctcctccc

SEQ ID NO: 60724 - DNA, 20 bp, synthetic construct
  misc_feature 1..20: note = chemically synthesized
  source 1..20: mol_type = other DNA
ccttctcctccctagtcaca

SEQ ID NO: 60725 - DNA, 20 bp, synthetic construct
  misc_feature 1..20: note = chemically synthesized
  source 1..20: mol_type = other DNA
cctccctagtcacatggcca

SEQ ID NO: 60726 - DNA, 20 bp, synthetic construct
  misc_feature 1..20: note = chemically synthesized
  source 1..20: mol_type = other DNA
ctccctagtcacatggccat

SEQ ID NO: 60727 - DNA, 20 bp, synthetic construct
  misc_feature 1..20: note = chemically synthesized
  source 1..20: mol_type = other DNA
catggccataggcctgctga

SEQ ID NO: 60728 - DNA, 20 bp, synthetic construct
  misc_feature 1..20: note = chemically synthesized
  source 1..20: mol_type = other DNA
ccataggcctgctgatggct

SEQ ID NO: 60729 - DNA, 20 bp, synthetic construct
  misc_feature 1..20: note = chemically synthesized
  source 1..20: mol_type = other DNA
cataggcctgctgatggctc

SEQ ID NO: 60730 - DNA, 20 bp, synthetic construct
  misc_feature 1..20: note = chemically synthesized
  source 1..20: mol_type = other DNA
aggcctgctgatggctcagg

SEQ ID NO: 60731 - DNA, 20 bp, synthetic construct
  misc_feature 1..20: note = chemically synthesized
  source 1..20: mol_type = other DNA
ggcctgctgatggctcagga

SEQ ID NO: 60732 - DNA, 20 bp, synthetic construct
  misc_feature 1..20: note = chemically synthesized
  source 1..20: mol_type = other DNA
tggctcaggaaggccattgc

SEQ ID NO: 60733 - DNA, 20 bp, synthetic construct
  misc_feature 1..20: note = chemically synthesized
  source 1..20: mol_type = other DNA
ggctcaggaaggccattgca

SEQ ID NO: 60734 - DNA, 20 bp, synthetic construct
  misc_feature 1..20: note = chemically synthesized
  source 1..20: mol_type = other DNA
aggccattgcaaggactcct

SEQ ID NO: 60735 - DNA, 20 bp, synthetic construct
  misc_feature 1..20: note = chemically synthesized
  source 1..20: mol_type = other DNA
ttgcaaggactcctcagcta

SEQ ID NO: 60736 - DNA, 20 bp, synthetic construct
  misc_feature 1..20: note = chemically synthesized
  source 1..20: mol_type = other DNA
tgcaaggactcctcagctat

SEQ ID NO: 60737 - DNA, 20 bp, synthetic construct
  misc_feature 1..20: note = chemically synthesized
  source 1..20: mol_type = other DNA
caaggactcctcagctatgg

SEQ ID NO: 60738 - DNA, 20 bp, synthetic construct
  misc_feature 1..20: note = chemically synthesized
  source 1..20: mol_type = other DNA
aggactcctcagctatggga

SEQ ID NO: 60739 - DNA, 20 bp, synthetic construct
  misc_feature 1..20: note = chemically synthesized
  source 1..20: mol_type = other DNA
ggactcctcagctatgggag

SEQ ID NO: 60740 - DNA, 20 bp, synthetic construct
  misc_feature 1..20: note = chemically synthesized
  source 1..20: mol_type = other DNA
ctcctcagctatgggagagg

SEQ ID NO: 60741 - DNA, 20 bp, synthetic construct
  misc_feature 1..20: note = chemically synthesized
  source 1..20: mol_type = other DNA
acccctccctttcctcctct

SEQ ID NO: 60742 - DNA, 20 bp, synthetic construct
  misc_feature 1..20: note = chemically synthesized
  source 1..20: mol_type = other DNA
ttcctcctctgagtcccgac

SEQ ID NO: 60743 - DNA, 20 bp, synthetic construct
  misc_feature 1..20: note = chemically synthesized
  source 1..20: mol_type = other DNA
tcctcctctgagtcccgact

SEQ ID NO: 60744 - DNA, 20 bp, synthetic construct
  misc_feature 1..20: note = chemically synthesized
  source 1..20: mol_type = other DNA
cctcctctgagtcccgactg

SEQ ID NO: 60745 - DNA, 20 bp, synthetic construct
  misc_feature 1..20: note = chemically synthesized
  source 1..20: mol_type = other DNA
gtcccgactggggccacatg

SEQ ID NO: 60746 - DNA, 20 bp, synthetic construct
  misc_feature 1..20: note = chemically synthesized
  source 1..20: mol_type = other DNA
tgtgcctgttgctgtccctg

SEQ ID NO: 60747 - DNA, 20 bp, synthetic construct
  misc_feature 1..20: note = chemically synthesized
  source 1..20: mol_type = other DNA
gttgctgtccctgcagtctt

SEQ ID NO: 60748 - DNA, 20 bp, synthetic construct
  misc_feature 1..20: note = chemically synthesized
  source 1..20: mol_type = other DNA
tgctgtccctgcagtcttca

SEQ ID NO: 60749 - DNA, 20 bp, synthetic construct
  misc_feature 1..20: note = chemically synthesized
  source 1..20: mol_type = other DNA
gctgtccctgcagtcttcag

SEQ ID NO: 60750 - DNA, 20 bp, synthetic construct
  misc_feature 1..20: note = chemically synthesized
  source 1..20: mol_type = other DNA
ctgtccctgcagtcttcaga

SEQ ID NO: 60751 - DNA, 20 bp, synthetic construct
  misc_feature 1..20: note = chemically synthesized
  source 1..20: mol_type = other DNA
cagtcttcagagggccaccg

SEQ ID NO: 60752 - DNA, 20 bp, synthetic construct
  misc_feature 1..20: note = chemically synthesized
  source 1..20: mol_type = other DNA
tcagagggccaccgcagctc

SEQ ID NO: 60753 - DNA, 20 bp, synthetic construct
  misc_feature 1..20: note = chemically synthesized
  source 1..20: mol_type = other DNA
ccaccgcagctccagtgcca

SEQ ID NO: 60754 - DNA, 20 bp, synthetic construct
  misc_feature 1..20: note = chemically synthesized
  source 1..20: mol_type = other DNA
ccgcagctccagtgccacgg

SEQ ID NO: 60755 - DNA, 20 bp, synthetic construct
  misc_feature 1..20: note = chemically synthesized
  source 1..20: mol_type = other DNA
cgcagctccagtgccacggc

SEQ ID NO: 60756 - DNA, 20 bp, synthetic construct
  misc_feature 1..20: note = chemically synthesized
  source 1..20: mol_type = other DNA
cagctccagtgccacggcag

SEQ ID NO: 60757 - DNA, 20 bp, synthetic construct
  misc_feature 1..20: note = chemically synthesized
  source 1..20: mol_type = other DNA
agctccagtgccacggcagg

SEQ ID NO: 60758 - DNA, 20 bp, synthetic construct
  misc_feature 1..20: note = chemically synthesized
  source 1..20: mol_type = other DNA
ggcaggaggctgttcctgaa

SEQ ID NO: 60759 - DNA, 20 bp, synthetic construct
  misc_feature 1..20: note = chemically synthesized
  source 1..20: mol_type = other DNA
ctgttcctgaatagcccctg

SEQ ID NO: 60760 - DNA, 20 bp, synthetic construct
  misc_feature 1..20: note = chemically synthesized
  source 1..20: mol_type = other DNA
tcctgaatagcccctgtggt

SEQ ID NO: 60761 - DNA, 20 bp, synthetic construct
  misc_feature 1..20: note = chemically synthesized
  source 1..20: mol_type = other DNA
cctgaatagcccctgtggta

SEQ ID NO: 60762 - DNA, 20 bp, synthetic construct
  misc_feature 1..20: note = chemically synthesized
  source 1..20: mol_type = other DNA
ctgaatagcccctgtggtaa

SEQ ID NO: 60763 - DNA, 20 bp, synthetic construct
  misc_feature 1..20: note = chemically synthesized
  source 1..20: mol_type = other DNA
atagcccctgtggtaagggc

SEQ ID NO: 60764 - DNA, 20 bp, synthetic construct
  misc_feature 1..20: note = chemically synthesized
  source 1..20: mol_type = other DNA
tagcccctgtggtaagggcc

SEQ ID NO: 60765 - DNA, 20 bp, synthetic construct
  misc_feature 1..20: note = chemically synthesized
  source 1..20: mol_type = other DNA
gcccctgtggtaagggccag

SEQ ID NO: 60766 - DNA, 20 bp, synthetic construct
  misc_feature 1..20: note = chemically synthesized
  source 1..20: mol_type = other DNA
ccctgtggtaagggccagga

SEQ ID NO: 60767 - DNA, 20 bp, synthetic construct
  misc_feature 1..20: note = chemically synthesized
  source 1..20: mol_type = other DNA
ggagagtccttccatcctcc

SEQ ID NO: 60768 - DNA, 20 bp, synthetic construct
  misc_feature 1..20: note = chemically synthesized
  source 1..20: mol_type = other DNA
gagagtccttccatcctcca

SEQ ID NO: 60769 - DNA, 20 bp, synthetic construct
  misc_feature 1..20: note = chemically synthesized
  source 1..20: mol_type = other DNA
catcctccaaggccctgcta

SEQ ID NO: 60770 - DNA, 20 bp, synthetic construct
  misc_feature 1..20: note = chemically synthesized
  source 1..20: mol_type = other DNA
atcctccaaggccctgctaa

SEQ ID NO: 60771 - DNA, 20 bp, synthetic construct
  misc_feature 1..20: note = chemically synthesized
  source 1..20: mol_type = other DNA
caaggccctgctaaaggaca

SEQ ID NO: 60772 - DNA, 20 bp, synthetic construct
  misc_feature 1..20: note = chemically synthesized
  source 1..20: mol_type = other DNA
ggccctgctaaaggacacag

SEQ ID NO: 60773 - DNA, 20 bp, synthetic construct
  misc_feature 1..20: note = chemically synthesized
  source 1..20: mol_type = other DNA
ctgctaaaggacacagcagc

SEQ ID NO: 60774 - DNA, 20 bp, synthetic construct
  misc_feature 1..20: note = chemically synthesized
  source 1..20: mol_type = other DNA
tgctaaaggacacagcagcc

SEQ ID NO: 60775 - DNA, 20 bp, synthetic construct
  misc_feature 1..20: note = chemically synthesized
  source 1..20: mol_type = other DNA
taaaggacacagcagccagg

SEQ ID NO: 60776 - DNA, 20 bp, synthetic construct
  misc_feature 1..20: note = chemically synthesized
  source 1..20: mol_type = other DNA
acagcagccaggaagtcccc

SEQ ID NO: 60777 - DNA, 20 bp, synthetic construct
  misc_feature 1..20: note = chemically synthesized
  source 1..20: mol_type = other DNA
cagcagccaggaagtcccct

SEQ ID NO: 60778 - DNA, 20 bp, synthetic construct
  misc_feature 1..20: note = chemically synthesized
  source 1..20: mol_type = other DNA
caggaagtcccctgggcccc

SEQ ID NO: 60779 - DNA, 20 bp, synthetic construct
  misc_feature 1..20: note = chemically synthesized
  source 1..20: mol_type = other DNA
gtcccctgggcccctagctg

SEQ ID NO: 60780 - DNA, 20 bp, synthetic construct
  misc_feature 1..20: note = chemically synthesized
  source 1..20: mol_type = other DNA
tcccctgggcccctagctga

SEQ ID NO: 60781 - DNA, 20 bp, synthetic construct
  misc_feature 1..20: note = chemically synthesized
  source 1..20: mol_type = other DNA
ctgggcccctagctgaagga

SEQ ID NO: 60782 - DNA, 20 bp, synthetic construct
  misc_feature 1..20: note = chemically synthesized
  source 1..20: mol_type = other DNA
cctgctccctccgtctctac

SEQ ID NO: 60783 - DNA, 20 bp, synthetic construct
  misc_feature 1..20: note = chemically synthesized
  source 1..20: mol_type = other DNA
ctgctccctccgtctctacc

SEQ ID NO: 60784 - DNA, 20 bp, synthetic construct
  misc_feature 1..20: note = chemically synthesized
  source 1..20: mol_type = other DNA
ccctccgtctctaccaggaa

SEQ ID NO: 60785 - DNA, 20 bp, synthetic construct
  misc_feature 1..20: note = chemically synthesized
  source 1..20: mol_type = other DNA
ccaggaatggccttgtccta

SEQ ID NO: 60786 - DNA, 20 bp, synthetic construct
  misc_feature 1..20: note = chemically synthesized
  source 1..20: mol_type = other DNA
ggaatggccttgtcctatgg

SEQ ID NO: 60787 - DNA, 20 bp, synthetic construct
  misc_feature 1..20: note = chemically synthesized
  source 1..20: mol_type = other DNA
gaatggccttgtcctatgga

SEQ ID NO: 60788 - DNA, 20 bp, synthetic construct
  misc_feature 1..20: note = chemically synthesized
  source 1..20: mol_type = other DNA
tgccccatcccaaactaatc

SEQ ID NO: 60789 - DNA, 20 bp, synthetic construct
  misc_feature 1..20: note = chemically synthesized
  source 1..20: mol_type = other DNA
gccccatcccaaactaatct

SEQ ID NO: 60790 - DNA, 20 bp, synthetic construct
  misc_feature 1..20: note = chemically synthesized
  source 1..20: mol_type = other DNA
ctgtcatgaatgtgtactta

SEQ ID NO: 60791 - DNA, 20 bp, synthetic construct
  misc_feature 1..20: note = chemically synthesized
  source 1..20: mol_type = other DNA
tgtcatgaatgtgtacttaa

SEQ ID NO: 60792 - DNA, 20 bp, synthetic construct
  misc_feature 1..20: note = chemically synthesized
  source 1..20: mol_type = other DNA
tgaatgtgtacttaaaggat

SEQ ID NO: 60793 - DNA, 20 bp, synthetic construct
  misc_feature 1..20: note = chemically synthesized
  source 1..20: mol_type = other DNA
gaatgtgtacttaaaggatg

SEQ ID NO: 60794 - DNA, 20 bp, synthetic construct
  misc_feature 1..20: note = chemically synthesized
  source 1..20: mol_type = other DNA
tgtacttaaaggatgaggtt

SEQ ID NO: 60795 - DNA, 20 bp, synthetic construct
  misc_feature 1..20: note = chemically synthesized
  source 1..20: mol_type = other DNA
tgaggttgagtcataccaaa

SEQ ID NO: 60796 - DNA, 20 bp, synthetic construct
  misc_feature 1..20: note = chemically synthesized
  source 1..20: mol_type = other DNA
ataccaaatagtgatttcga

SEQ ID NO: 60797 - DNA, 20 bp, synthetic construct
  misc_feature 1..20: note = chemically synthesized
  source 1..20: mol_type = other DNA
gtgatttcgatagttcaaaa

SEQ ID NO: 60798 - DNA, 20 bp, synthetic construct
  misc_feature 1..20: note = chemically synthesized
  source 1..20: mol_type = other DNA
atagttcaaaatggtgaaat

SEQ ID NO: 60799 - DNA, 20 bp, synthetic construct
  misc_feature 1..20: note = chemically synthesized
  source 1..20: mol_type = other DNA
attagcaattctacatgatt

SEQ ID NO: 60800 - DNA, 20 bp, synthetic construct
  misc_feature 1..20: note = chemically synthesized
  source 1..20: mol_type = other DNA
acatgattcagtctaatcaa

SEQ ID NO: 60801 - DNA, 20 bp, synthetic construct
  misc_feature 1..20: note = chemically synthesized
  source 1..20: mol_type = other DNA
ataccgactgtttcccacac

SEQ ID NO: 60802 - DNA, 20 bp, synthetic construct
  misc_feature 1..20: note = chemically synthesized
  source 1..20: mol_type = other DNA
cacaagtctcctgttctctt

SEQ ID NO: 60803 - DNA, 20 bp, synthetic construct
  misc_feature 1..20: note = chemically synthesized
  source 1..20: mol_type = other DNA
ctcttaagcttactcactga

SEQ ID NO: 60804 - DNA, 20 bp, synthetic construct
  misc_feature 1..20: note = chemically synthesized
  source 1..20: mol_type = other DNA
cactctccacaaatacatta

SEQ ID NO: 60805 - DNA, 20 bp, synthetic construct
  misc_feature 1..20: note = chemically synthesized
  source 1..20: mol_type = other DNA
ccacaaatacattaaagata

SEQ ID NO: 60806 - DNA, 20 bp, synthetic construct
  misc_feature 1..20: note = chemically synthesized
  source 1..20: mol_type = other DNA
ttaaagatatggccatcacc

SEQ ID NO: 60807 - DNA, 20 bp, synthetic construct
  misc_feature 1..20: note = chemically synthesized
  source 1..20: mol_type = other DNA
atggccatcaccaagccccc

SEQ ID NO: 60808 - DNA, 20 bp, synthetic construct
  misc_feature 1..20: note = chemically synthesized
  source 1..20: mol_type = other DNA
tggccatcaccaagccccct

SEQ ID NO: 60809 - DNA, 20 bp, synthetic construct
  misc_feature 1..20: note = chemically synthesized
  source 1..20: mol_type = other DNA
caagccccctaggatgacac

SEQ ID NO: 60810 - DNA, 20 bp, synthetic construct
  misc_feature 1..20: note = chemically synthesized
  source 1..20: mol_type = other DNA
cctaggatgacaccagacct

SEQ ID NO: 60811 - DNA, 20 bp, synthetic construct
  misc_feature 1..20: note = chemically synthesized
  source 1..20: mol_type = other DNA
taggatgacaccagacctga

SEQ ID NO: 60812 - DNA, 20 bp, synthetic construct
  misc_feature 1..20: note = chemically synthesized
  source 1..20: mol_type = other DNA
acaccagacctgagagtctg

SEQ ID NO: 60813 - DNA, 20 bp, synthetic construct
  misc_feature 1..20: note = chemically synthesized
  source 1..20: mol_type = other DNA
gacctgagagtctgaagacc

SEQ ID NO: 60814 - DNA, 20 bp, synthetic construct
  misc_feature 1..20: note = chemically synthesized
  source 1..20: mol_type = other DNA
gagtctgaagacctggatcc

SEQ ID NO: 60815 - DNA, 20 bp, synthetic construct
  misc_feature 1..20: note = chemically synthesized
  source 1..20: mol_type = other DNA
gttctgacttttccccctga

SEQ ID NO: 60816 - DNA, 20 bp, synthetic construct
  misc_feature 1..20: note = chemically synthesized
  source 1..20: mol_type = other DNA
acagctgtgtgaccttcgtg

SEQ ID NO: 60817 - DNA, 20 bp, synthetic construct
  misc_feature 1..20: note = chemically synthesized
  source 1..20: mol_type = other DNA
tgaagtcgccaaacctctct

SEQ ID NO: 60818 - DNA, 20 bp, synthetic construct
  misc_feature 1..20: note = chemically synthesized
  source 1..20: mol_type = other DNA
cgccaaacctctctgagccc

SEQ ID NO: 60819 - DNA, 20 bp, synthetic construct
  misc_feature 1..20: note = chemically synthesized
  source 1..20: mol_type = other DNA
ctctgagccccagtcattgc

SEQ ID NO: 60820 - DNA, 20 bp, synthetic construct
  misc_feature 1..20: note = chemically synthesized
  source 1..20: mol_type = other DNA
gagccccagtcattgctagt

SEQ ID NO: 60821 - DNA, 20 bp, synthetic construct
  misc_feature 1..20: note = chemically synthesized
  source 1..20: mol_type = other DNA
tgctagtaagacctgccttt

SEQ ID NO: 60822 - DNA, 20 bp, synthetic construct
  misc_feature 1..20: note = chemically synthesized
  source 1..20: mol_type = other DNA
agtaagacctgcctttgagt

SEQ ID NO: 60823 - DNA, 20 bp, synthetic construct
  misc_feature 1..20: note = chemically synthesized
  source 1..20: mol_type = other DNA
tttgagttggtatgatgttc

SEQ ID NO: 60824 - DNA, 20 bp, synthetic construct
  misc_feature 1..20: note = chemically synthesized
  source 1..20: mol_type = other DNA
agttggtatgatgttcaagt

SEQ ID NO: 60825 - DNA, 20 bp, synthetic construct
  misc_feature 1..20: note = chemically synthesized
  source 1..20: mol_type = other DNA
aacaaaatgtttatacccat

SEQ ID NO: 60826 - DNA, 20 bp, synthetic construct
  misc_feature 1..20: note = chemically synthesized
  source 1..20: mol_type = other DNA
aatgtttatacccattagaa

SEQ ID NO: 60827 - DNA, 20 bp, synthetic construct
  misc_feature 1..20: note = chemically synthesized
  source 1..20: mol_type = other DNA
tgtttatacccattagaaca

SEQ ID NO: 60828 - DNA, 20 bp, synthetic construct
  misc_feature 1..20: note = chemically synthesized
  source 1..20: mol_type = other DNA
ccattagaacagagaataaa

SEQ ID NO: 60829 - DNA, 20 bp, synthetic construct
  misc_feature 1..20: note = chemically synthesized
  source 1..20: mol_type = other DNA
actacatttcttgcacttat

SEQ ID NO: 60830 - DNA, 20 bp, synthetic construct
  misc_feature 1..20: note = chemically synthesized
  source 1..20: mol_type = other DNA
cttatgagctttctgtgaat

SEQ ID NO: 60831 - DNA, 20 bp, synthetic construct
  misc_feature 1..20: note = chemically synthesized
  source 1..20: mol_type = other DNA
gtgaatcagacatccctatg

SEQ ID NO: 60832 - DNA, 20 bp, synthetic construct
  misc_feature 1..20: note = chemically synthesized
  source 1..20: mol_type = other DNA
tccctatgaagtacctcccc

SEQ ID NO: 60833 - DNA, 20 bp, synthetic construct
  misc_feature 1..20: note = chemically synthesized
  source 1..20: mol_type = other DNA
tgtttctcatttactcactg

SEQ ID NO: 60834 - DNA, 20 bp, synthetic construct
  misc_feature 1..20: note = chemically synthesized
  source 1..20: mol_type = other DNA
ttctcatttactcactgtag

SEQ ID NO: 60835 - DNA, 20 bp, synthetic construct
  misc_feature 1..20: note = chemically synthesized
  source 1..20: mol_type = other DNA
gtagcagcactgcgatgtgt

SEQ ID NO: 60836 - DNA, 20 bp, synthetic construct
  misc_feature 1..20: note = chemically synthesized
  source 1..20: mol_type = other DNA
tgctcttaaactccaaatct

SEQ ID NO: 60837 - DNA, 20 bp, synthetic construct
  misc_feature 1..20: note = chemically synthesized
  source 1..20: mol_type = other DNA
gctcttaaactccaaatctg

SEQ ID NO: 60838 - DNA, 20 bp, synthetic construct
  misc_feature 1..20: note = chemically synthesized
  source 1..20: mol_type = other DNA
actccaaatctgaggaaact

SEQ ID NO: 60839 - DNA, 20 bp, synthetic construct
  misc_feature 1..20: note = chemically synthesized
  source 1..20: mol_type = other DNA
ctccaaatctgaggaaactg

SEQ ID NO: 60840 - DNA, 20 bp, synthetic construct
  misc_feature 1..20: note = chemically synthesized
  source 1..20: mol_type = other DNA
aatctgaggaaactgaggct

SEQ ID NO: 60841 - DNA, 20 bp, synthetic construct
  misc_feature 1..20: note = chemically synthesized
  source 1..20: mol_type = other DNA
tctgaggaaactgaggctca

SEQ ID NO: 60842 - DNA, 20 bp, synthetic construct
  misc_feature 1..20: note = chemically synthesized
  source 1..20: mol_type = other DNA
tgaggaaactgaggctcaga

SEQ ID NO: 60843 - DNA, 20 bp, synthetic construct
  misc_feature 1..20: note = chemically synthesized
  source 1..20: mol_type = other DNA
gaggaaactgaggctcagag

SEQ ID NO: 60844 - DNA, 20 bp, synthetic construct
  misc_feature 1..20: note = chemically synthesized
  source 1..20: mol_type = other DNA
ctgaggctcagagaggctac

SEQ ID NO: 60845 - DNA, 20 bp, synthetic construct
  misc_feature 1..20: note = chemically synthesized
  source 1..20: mol_type = other DNA
tggtctcccacaatgtcaca

SEQ ID NO: 60846 - DNA, 20 bp, synthetic construct
  misc_feature 1..20: note = chemically synthesized
  source 1..20: mol_type = other DNA
cacaatgtcacacagctcat

SEQ ID NO: 60847 - DNA, 20 bp, synthetic construct
  misc_feature 1..20: note = chemically synthesized
  source 1..20: mol_type = other DNA
aatgtcacacagctcataag

SEQ ID NO: 60848 - DNA, 20 bp, synthetic construct
  misc_feature 1..20: note = chemically synthesized
  source 1..20: mol_type = other DNA
cacacagctcataagtggca

SEQ ID NO: 60849 - DNA, 20 bp, synthetic construct
  misc_feature 1..20: note = chemically synthesized
  source 1..20: mol_type = other DNA
cagctcataagtggcaaagc

SEQ ID NO: 60850 - DNA, 20 bp, synthetic construct
  misc_feature 1..20: note = chemically synthesized
  source 1..20: mol_type = other DNA
aagtggcaaagctggcttga

SEQ ID NO: 60851 - DNA, 20 bp, synthetic construct
  misc_feature 1..20: note = chemically synthesized
  source 1..20: mol_type = other DNA
agtggcaaagctggcttgat

SEQ ID NO: 60852 - DNA, 20 bp, synthetic construct
  misc_feature 1..20: note = chemically synthesized
  source 1..20: mol_type = other DNA
ctcaccacactctccccttc

SEQ ID NO: 60853 - DNA, 20 bp, synthetic construct
  misc_feature 1..20: note = chemically synthesized
  source 1..20: mol_type = other DNA
tcaccacactctccccttcg

SEQ ID NO: 60854 - DNA, 20 bp, synthetic construct
  misc_feature 1..20: note = chemically synthesized
  source 1..20: mol_type = other DNA
caccacactctccccttcga

SEQ ID NO: 60855 - DNA, 20 bp, synthetic construct
  misc_feature 1..20: note = chemically synthesized
  source 1..20: mol_type = other DNA
agggtcacgctaaacttctg

SEQ ID NO: 60856 - DNA, 20 bp, synthetic construct
  misc_feature 1..20: note = chemically synthesized
  source 1..20: mol_type = other DNA
ggtcacgctaaacttctgca

SEQ ID NO: 60857 - DNA, 20 bp, synthetic construct
  misc_feature 1..20: note = chemically synthesized
  source 1..20: mol_type = other DNA
gtcacgctaaacttctgcag

SEQ ID NO: 60858 - DNA, 20 bp, synthetic construct
  misc_feature 1..20: note = chemically synthesized
  source 1..20: mol_type = other DNA
gaggtaattcctccttaaac

SEQ ID NO: 60859 - DNA, 20 bp, synthetic construct
  misc_feature 1..20: note = chemically synthesized
  source 1..20: mol_type = other DNA
gtaattcctccttaaaccag

SEQ ID NO: 60860 - DNA, 20 bp, synthetic construct
  misc_feature 1..20: note = chemically synthesized
  source 1..20: mol_type = other DNA
taattcctccttaaaccaga

SEQ ID NO: 60861 - DNA, 20 bp, synthetic construct
  misc_feature 1..20: note = chemically synthesized
  source 1..20: mol_type = other DNA
aattcctccttaaaccagaa

SEQ ID NO: 60862 - DNA, 20 bp, synthetic construct
  misc_feature 1..20: note = chemically synthesized
  source 1..20: mol_type = other DNA
ccttaaaccagaagggttgc

SEQ ID NO: 60863 - DNA, 20 bp, synthetic construct
  misc_feature 1..20: note = chemically synthesized
  source 1..20: mol_type = other DNA
taaaccagaagggttgctgg

SEQ ID NO: 60864 - DNA, 20 bp, synthetic construct
  misc_feature 1..20: note = chemically synthesized
  source 1..20: mol_type = other DNA
gaagggttgctggtggccca

SEQ ID NO: 60865 - DNA, 20 bp, synthetic construct
  misc_feature 1..20: note = chemically synthesized
  source 1..20: mol_type = other DNA
ggtggcccacagctcacgcc

SEQ ID NO: 60866 - DNA, 20 bp, synthetic construct
  misc_feature 1..20: note = chemically synthesized
  source 1..20: mol_type = other DNA
tcacgcctagcacacttcat

SEQ ID NO: 60867 - DNA, 20 bp, synthetic construct
  misc_feature 1..20: note = chemically synthesized
  source 1..20: mol_type = other DNA
tgagaaaaacaccctgtgcc

SEQ ID NO: 60868 - DNA, 20 bp, synthetic construct
  misc_feature 1..20: note = chemically synthesized
  source 1..20: mol_type = other DNA
aaaacaccctgtgcccagtg

SEQ ID NO: 60869 - DNA, 20 bp, synthetic construct
  misc_feature 1..20: note = chemically synthesized
  source 1..20: mol_type = other DNA
aacaccctgtgcccagtgtg

SEQ ID NO: 60870 - DNA, 20 bp, synthetic construct
  misc_feature 1..20: note = chemically synthesized
  source 1..20: mol_type = other DNA
accctgtgcccagtgtggag

SEQ ID NO: 60871 - DNA, 20 bp, synthetic construct
  misc_feature 1..20: note = chemically synthesized
  source 1..20: mol_type = other DNA
ccctgtgcccagtgtggagc

SEQ ID NO: 60872 - DNA, 20 bp, synthetic construct
  misc_feature 1..20: note = chemically synthesized
  source 1..20: mol_type = other DNA
cccagtgtggagcaggcatt

SEQ ID NO: 60873 - DNA, 20 bp, synthetic construct
  misc_feature 1..20: note = chemically synthesized
  source 1..20: mol_type = other DNA
gtggagcaggcattgagctg

SEQ ID NO: 60874 - DNA, 20 bp, synthetic construct
  misc_feature 1..20: note = chemically synthesized
  source 1..20: mol_type = other DNA
tggagcaggcattgagctga

SEQ ID NO: 60875 - DNA, 20 bp, synthetic construct
  misc_feature 1..20: note = chemically synthesized
  source 1..20: mol_type = other DNA
agcaggcattgagctgaagg

SEQ ID NO: 60876 - DNA, 20 bp, synthetic construct
  misc_feature 1..20: note = chemically synthesized
  source 1..20: mol_type = other DNA
ggcattgagctgaaggtggt

SEQ ID NO: 60877 - DNA, 20 bp, synthetic construct
  misc_feature 1..20: note = chemically synthesized
  source 1..20: mol_type = other DNA
attgagctgaaggtggtgag

SEQ ID NO: 60878 - DNA, 20 bp, synthetic construct
  misc_feature 1..20: note = chemically synthesized
  source 1..20: mol_type = other DNA
gagctgaaggtggtgagcag

SEQ ID NO: 60879 - DNA, 20 bp, synthetic construct
  misc_feature 1..20: note = chemically synthesized
  source 1..20: mol_type = other DNA
gtgagcagaagctcatccac

SEQ ID NO: 60880 - DNA, 20 bp, synthetic construct
  misc_feature 1..20: note = chemically synthesized
  source 1..20: mol_type = other DNA
tcatccaccagatgttgaca

SEQ ID NO: 60881 - DNA, 20 bp, synthetic construct
  misc_feature 1..20: note = chemically synthesized
  source 1..20: mol_type = other DNA
ccagatgttgacacagcccg

SEQ ID NO: 60882 - DNA, 20 bp, synthetic construct
  misc_feature 1..20: note = chemically synthesized
  source 1..20: mol_type = other DNA
gttgacacagcccgcagcct

SEQ ID NO: 60883 - DNA, 20 bp, synthetic construct
  misc_feature 1..20: note = chemically synthesized
  source 1..20: mol_type = other DNA
ttgacacagcccgcagcctt

SEQ ID NO: 60884 - DNA, 20 bp, synthetic construct
  misc_feature 1..20: note = chemically synthesized
  source 1..20: mol_type = other DNA
ccgcagccttgggcgaccca

SEQ ID NO: 60885 - DNA, 20 bp, synthetic construct
  misc_feature 1..20: note = chemically synthesized
  source 1..20: mol_type = other DNA
cgcagccttgggcgacccac

SEQ ID NO: 60886 - DNA, 20 bp, synthetic construct
  misc_feature 1..20: note = chemically synthesized
  source 1..20: mol_type = other DNA
caggactcctcttatttaac

SEQ ID NO: 60887 - DNA, 20 bp, synthetic construct
  misc_feature 1..20: note = chemically synthesized
  source 1..20: mol_type = other DNA
cctcttatttaactggcatt

SEQ ID NO: 60888 - DNA, 20 bp, synthetic construct
  misc_feature 1..20: note = chemically synthesized
  source 1..20: mol_type = other DNA
cttatttaactggcatttgg

SEQ ID NO: 60889 - DNA, 20 bp, synthetic construct
  misc_feature 1..20: note = chemically synthesized
  source 1..20: mol_type = other DNA
ttatttaactggcatttggt

SEQ ID NO: 60890 - DNA, 20 bp, synthetic construct
  misc_feature 1..20: note = chemically synthesized
  source 1..20: mol_type = other DNA
atttaactggcatttggtag

SEQ ID NO: 60891 - DNA, 20 bp, synthetic construct
  misc_feature 1..20: note = chemically synthesized
  source 1..20: mol_type = other DNA
actggcatttggtaggagaa

SEQ ID NO: 60892 - DNA, 20 bp, synthetic construct
  misc_feature 1..20: note = chemically synthesized
  source 1..20: mol_type = other DNA
ctggcatttggtaggagaac

SEQ ID NO: 60893 - DNA, 20 bp, synthetic construct
  misc_feature 1..20: note = chemically synthesized
  source 1..20: mol_type = other DNA
tggcatttggtaggagaaca

SEQ ID NO: 60894 - DNA, 20 bp, synthetic construct
  misc_feature 1..20: note = chemically synthesized
  source 1..20: mol_type = other DNA
ggcatttggtaggagaacag

SEQ ID NO: 60895 - DNA, 20 bp, synthetic construct
  misc_feature 1..20: note = chemically synthesized
  source 1..20: mol_type = other DNA
atttggtaggagaacagggg

SEQ ID NO: 60896 - DNA, 20 bp, synthetic construct
  misc_feature 1..20: note = chemically synthesized
  source 1..20: mol_type = other DNA
ttggtaggagaacaggggca

SEQ ID NO: 60897 - DNA, 20 bp, synthetic construct
  misc_feature 1..20: note = chemically synthesized
  source 1..20: mol_type = other DNA
ggagaacaggggcagagtca

SEQ ID NO: 60898 - DNA, 20 bp, synthetic construct
  misc_feature 1..20: note = chemically synthesized
  source 1..20: mol_type = other DNA
acaggggcagagtcaaagac

SEQ ID NO: 60899 - DNA, 20 bp, synthetic construct
  misc_feature 1..20: note = chemically synthesized
  source 1..20: mol_type = other DNA
gggcagagtcaaagacaagt

SEQ ID NO: 60900 - DNA, 20 bp, synthetic construct
  misc_feature 1..20: note = chemically synthesized
  source 1..20: mol_type = other DNA
tcaaagacaagttggctttc

SEQ ID NO: 60901 - DNA, 20 bp, synthetic construct
  misc_feature 1..20: note = chemically synthesized
  source 1..20: mol_type = other DNA
aaagacaagttggctttctg

SEQ ID NO: 60902 - DNA, 20 bp, synthetic construct
  misc_feature 1..20: note = chemically synthesized
  source 1..20: mol_type = other DNA
agacaagttggctttctgga

SEQ ID NO: 60903 - DNA, 20 bp, synthetic construct
  misc_feature 1..20: note = chemically synthesized
  source 1..20: mol_type = other DNA
agttggctttctggagagcc

SEQ ID NO: 60904 - DNA, 20 bp, synthetic construct
  misc_feature 1..20: note = chemically synthesized
  source 1..20: mol_type = other DNA
gttggctttctggagagccc

SEQ ID NO: 60905 - DNA, 20 bp, synthetic construct
  misc_feature 1..20: note = chemically synthesized
  source 1..20: mol_type = other DNA
ttggctttctggagagccca

SEQ ID NO: 60906 - DNA, 20 bp, synthetic construct
  misc_feature 1..20: note = chemically synthesized
  source 1..20: mol_type = other DNA
gctttctggagagcccaggg

SEQ ID NO: 60907 - DNA, 20 bp, synthetic construct
  misc_feature 1..20: note = chemically synthesized
  source 1..20: mol_type = other DNA
ctttctggagagcccagggc

SEQ ID NO: 60908 - DNA, 20 bp, synthetic construct
  misc_feature 1..20: note = chemically synthesized
  source 1..20: mol_type = other DNA
tttctggagagcccagggca

SEQ ID NO: 60909 - DNA, 20 bp, synthetic construct
  misc_feature 1..20: note = chemically synthesized
  source 1..20: mol_type = other DNA
ctggagagcccagggcaggg

SEQ ID NO: 60910 - DNA, 20 bp, synthetic construct
  misc_feature 1..20: note = chemically synthesized
  source 1..20: mol_type = other DNA
tggagagcccagggcaggga

SEQ ID NO: 60911 - DNA, 20 bp, synthetic construct
  misc_feature 1..20: note = chemically synthesized
  source 1..20: mol_type = other DNA
gagagcccagggcagggaag

SEQ ID NO: 60912 - DNA, 20 bp, synthetic construct
  misc_feature 1..20: note = chemically synthesized
  source 1..20: mol_type = other DNA
agagcccagggcagggaagg

SEQ ID NO: 60913 - DNA, 20 bp, synthetic construct
  misc_feature 1..20: note = chemically synthesized
  source 1..20: mol_type = other DNA
gcccagggcagggaaggagg

SEQ ID NO: 60914 - DNA, 20 bp, synthetic construct
  misc_feature 1..20: note = chemically synthesized
  source 1..20: mol_type = other DNA
cagggcagggaaggaggtgg

SEQ ID NO: 60915 - DNA, 20 bp, synthetic construct
  misc_feature 1..20: note = chemically synthesized
  source 1..20: mol_type = other DNA
gggaaggaggtggcagcgct

SEQ ID NO: 60916 - DNA, 20 bp, synthetic construct
  misc_feature 1..20: note = chemically synthesized
  source 1..20: mol_type = other DNA
ggaaggaggtggcagcgctg

SEQ ID NO: 60917 - DNA, 20 bp, synthetic construct
  misc_feature 1..20: note = chemically synthesized
  source 1..20: mol_type = other DNA
gaaggaggtggcagcgctga

SEQ ID NO: 60918 - DNA, 20 bp, synthetic construct
  misc_feature 1..20: note = chemically synthesized
  source 1..20: mol_type = other DNA
ggaggtggcagcgctgaggg

SEQ ID NO: 60919 - DNA, 20 bp, synthetic construct
  misc_feature 1..20: note = chemically synthesized
  source 1..20: mol_type = other DNA
agcgctgagggcggtcacct

SEQ ID NO: 60920 - DNA, 20 bp, synthetic construct
  misc_feature 1..20: note = chemically synthesized
  source 1..20: mol_type = other DNA
gacaccatcgttttactttg

SEQ ID NO: 60921 - DNA, 20 bp, synthetic construct
  misc_feature 1..20: note = chemically synthesized
  source 1..20: mol_type = other DNA
aagaattgtctgtcacacac

SEQ ID NO: 60922 - DNA, 20 bp, synthetic construct
  misc_feature 1..20: note = chemically synthesized
  source 1..20: mol_type = other DNA
gtctgtcacacacgagttga

SEQ ID NO: 60923 - DNA, 20 bp, synthetic construct
  misc_feature 1..20: note = chemically synthesized
  source 1..20: mol_type = other DNA
gtcacacacgagttgacagt

SEQ ID NO: 60924 - DNA, 20 bp, synthetic construct
  misc_feature 1..20: note = chemically synthesized
  source 1..20: mol_type = other DNA
tcacacacgagttgacagtc

SEQ ID NO: 60925 - DNA, 20 bp, synthetic construct
  misc_feature 1..20: note = chemically synthesized
  source 1..20: mol_type = other DNA
acacgagttgacagtcagga

SEQ ID NO: 60926 - DNA, 20 bp, synthetic construct
  misc_feature 1..20: note = chemically synthesized
  source 1..20: mol_type = other DNA
cacgagttgacagtcaggat

SEQ ID NO: 60927 - DNA, 20 bp, synthetic construct
  misc_feature 1..20: note = chemically synthesized
  source 1..20: mol_type = other DNA
cgagttgacagtcaggatgg

SEQ ID NO: 60928 - DNA, 20 bp, synthetic construct
  misc_feature 1..20: note = chemically synthesized
  source 1..20: mol_type = other DNA
agttgacagtcaggatggga

SEQ ID NO: 60929 - DNA, 20 bp, synthetic construct
  misc_feature 1..20: note = chemically synthesized
  source 1..20: mol_type = other DNA
gggagagaccccattcaaac

SEQ ID NO: 60930 - DNA, 20 bp, synthetic construct
  misc_feature 1..20: note = chemically synthesized
  source 1..20: mol_type = other DNA
ttcaaactagcataacctcc

SEQ ID NO: 60931 - DNA, 20 bp, synthetic construct
  misc_feature 1..20: note = chemically synthesized
  source 1..20: mol_type = other DNA
caaactagcataacctccca

SEQ ID NO: 60932 - DNA, 20 bp, synthetic construct
  misc_feature 1..20: note = chemically synthesized
  source 1..20: mol_type = other DNA
aaactagcataacctcccag

SEQ ID NO: 60933 - DNA, 20 bp, synthetic construct
  misc_feature 1..20: note = chemically synthesized
  source 1..20: mol_type = other DNA
aactagcataacctcccaga

SEQ ID NO: 60934 - DNA, 20 bp, synthetic construct
  misc_feature 1..20: note = chemically synthesized
  source 1..20: mol_type = other DNA
aacctcccagagggaattcc

SEQ ID NO: 60935 - DNA, 20 bp, synthetic construct
  misc_feature 1..20: note = chemically synthesized
  source 1..20: mol_type = other DNA
acctcccagagggaattcct

SEQ ID NO: 60936 - DNA, 20 bp, synthetic construct
  misc_feature 1..20: note = chemically synthesized
  source 1..20: mol_type = other DNA
agggaattcctgggctcccc

SEQ ID NO: 60937 - DNA, 20 bp, synthetic construct
  misc_feature 1..20: note = chemically synthesized
  source 1..20: mol_type = other DNA
gggaattcctgggctcccct

SEQ ID NO: 60938 - DNA, 20 bp, synthetic construct
  misc_feature 1..20: note = chemically synthesized
  source 1..20: mol_type = other DNA
tgggctcccctgggaatcaa

SEQ ID NO: 60939 - DNA, 20 bp, synthetic construct
  misc_feature 1..20: note = chemically synthesized
  source 1..20: mol_type = other DNA
gggctcccctgggaatcaac

SEQ ID NO: 60940 - DNA, 20 bp, synthetic construct
  misc_feature 1..20: note = chemically synthesized
  source 1..20: mol_type = other DNA
ggctcccctgggaatcaaca

SEQ ID NO: 60941 - DNA, 20 bp, synthetic construct
  misc_feature 1..20: note = chemically synthesized
  source 1..20: mol_type = other DNA
ccctgggaatcaacagggat

SEQ ID NO: 60942 - DNA, 20 bp, synthetic construct
  misc_feature 1..20: note = chemically synthesized
  source 1..20: mol_type = other DNA
ggaatcaacagggatcagtc

SEQ ID NO: 60943 - DNA, 20 bp, synthetic construct
  misc_feature 1..20: note = chemically synthesized
  source 1..20: mol_type = other DNA
gaatcaacagggatcagtca

SEQ ID NO: 60944 - DNA, 20 bp, synthetic construct
  misc_feature 1..20: note = chemically synthesized
  source 1..20: mol_type = other DNA
caacagggatcagtcaagga

SEQ ID NO: 60945 - DNA, 20 bp, synthetic construct
  misc_feature 1..20: note = chemically synthesized
  source 1..20: mol_type = other DNA
aacagggatcagtcaaggat

SEQ ID NO: 60946 - DNA, 20 bp, synthetic construct
  misc_feature 1..20: note = chemically synthesized
  source 1..20: mol_type = other DNA
agggatcagtcaaggatggg

SEQ ID NO: 60947 - DNA, 20 bp, synthetic construct
  misc_feature 1..20: note = chemically synthesized
  source 1..20: mol_type = other DNA
ggatcagtcaaggatgggca

SEQ ID NO: 60948 - DNA, 20 bp, synthetic construct
  misc_feature 1..20: note = chemically synthesized
  source 1..20: mol_type = other DNA
tgtcatgacaacctcattat

SEQ ID NO: 60949 - DNA, 20 bp, synthetic construct
  misc_feature 1..20: note = chemically synthesized
  source 1..20: mol_type = other DNA
gtcatgacaacctcattatg

SEQ ID NO: 60950 - DNA, 20 bp, synthetic construct
  misc_feature 1..20: note = chemically synthesized
  source 1..20: mol_type = other DNA
atgacaacctcattatgagg

SEQ ID NO: 60951 - DNA, 20 bp, synthetic construct
  misc_feature 1..20: note = chemically synthesized
  source 1..20: mol_type = other DNA
ggaagacaaatatatgtcac

SEQ ID NO: 60952 - DNA, 20 bp, synthetic construct
  misc_feature 1..20: note = chemically synthesized
  source 1..20: mol_type = other DNA
tatatgtcacaagtccgtga

SEQ ID NO: 60953 - DNA, 20 bp, synthetic construct
  misc_feature 1..20: note = chemically synthesized
  source 1..20: mol_type = other DNA
atatgtcacaagtccgtgat

SEQ ID NO: 60954 - DNA, 20 bp, synthetic construct
  misc_feature 1..20: note = chemically synthesized
  source 1..20: mol_type = other DNA
gtccgtgatgggacaaccat

SEQ ID NO: 60955 - DNA, 20 bp, synthetic construct
  misc_feature 1..20: note = chemically synthesized
  source 1..20: mol_type = other DNA
atgggacaaccataagacct

SEQ ID NO: 60956 - DNA, 20 bp, synthetic construct
  misc_feature 1..20: note = chemically synthesized
  source 1..20: mol_type = other DNA
ctcagcttcactgtatcttc

SEQ ID NO: 60957 - DNA, 20 bp, synthetic construct
  misc_feature 1..20: note = chemically synthesized
  source 1..20: mol_type = other DNA
cagcttcactgtatcttcca

SEQ ID NO: 60958 - DNA, 20 bp, synthetic construct
  misc_feature 1..20: note = chemically synthesized
  source 1..20: mol_type = other DNA
cactgtccaacgtgatcctc

SEQ ID NO: 60959 - DNA, 20 bp, synthetic construct
  misc_feature 1..20: note = chemically synthesized
  source 1..20: mol_type = other DNA
gtccaacgtgatcctccaga

SEQ ID NO: 60960 - DNA, 20 bp, synthetic construct
  misc_feature 1..20: note = chemically synthesized
  source 1..20: mol_type = other DNA
tccaacgtgatcctccagac

SEQ ID NO: 60961 - DNA, 20 bp, synthetic construct
  misc_feature 1..20: note = chemically synthesized
  source 1..20: mol_type = other DNA
gatcctccagacaggttctg

SEQ ID NO: 60962 - DNA, 20 bp, synthetic construct
  misc_feature 1..20: note = chemically synthesized
  source 1..20: mol_type = other DNA
atcctccagacaggttctgc

SEQ ID NO: 60963 - DNA, 20 bp, synthetic construct
  misc_feature 1..20: note = chemically synthesized
  source 1..20: mol_type = other DNA
cagacaggttctgcaggacg

SEQ ID NO: 60964 - DNA, 20 bp, synthetic construct
  misc_feature 1..20: note = chemically synthesized
  source 1..20: mol_type = other DNA
aggttctgcaggacgcagcc

SEQ ID NO: 60965 - DNA, 20 bp, synthetic construct
  misc_feature 1..20: note = chemically synthesized
  source 1..20: mol_type = other DNA
ggttctgcaggacgcagcct

SEQ ID NO: 60966 - DNA, 20 bp, synthetic construct
  misc_feature 1..20: note = chemically synthesized
  source 1..20: mol_type = other DNA
cctaggactcattatcccca

SEQ ID NO: 60967 - DNA, 20 bp, synthetic construct
  misc_feature 1..20: note = chemically synthesized
  source 1..20: mol_type = other DNA
cattatccccaaagtacaca

SEQ ID NO: 60968 - DNA, 20 bp, synthetic construct
  misc_feature 1..20: note = chemically synthesized
  source 1..20: mol_type = other DNA
attatccccaaagtacacat

SEQ ID NO: 60969 - DNA, 20 bp, synthetic construct
  misc_feature 1..20: note = chemically synthesized
  source 1..20: mol_type = other DNA
ttatccccaaagtacacatg

SEQ ID NO: 60970 - DNA, 20 bp, synthetic construct
  misc_feature 1..20: note = chemically synthesized
  source 1..20: mol_type = other DNA
aaagtacacatggggaaact

SEQ ID NO: 60971 - DNA, 20 bp, synthetic construct
  misc_feature 1..20: note = chemically synthesized
  source 1..20: mol_type = other DNA
aagtacacatggggaaactc

SEQ ID NO: 60972 - DNA, 20 bp, synthetic construct
  misc_feature 1..20: note = chemically synthesized
  source 1..20: mol_type = other DNA
cacatggggaaactcaggcc

SEQ ID NO: 60973 - DNA, 20 bp, synthetic construct
  misc_feature 1..20: note = chemically synthesized
  source 1..20: mol_type = other DNA
atggggaaactcaggcccag

SEQ ID NO: 60974 - DNA, 20 bp, synthetic construct
  misc_feature 1..20: note = chemically synthesized
  source 1..20: mol_type = other DNA
tggggaaactcaggcccagc

SEQ ID NO: 60975 - DNA, 20 bp, synthetic construct
  misc_feature 1..20: note = chemically synthesized
  source 1..20: mol_type = other DNA
agcaggtcaaatgctctgtc

SEQ ID NO: 60976 - DNA, 20 bp, synthetic construct
  misc_feature 1..20: note = chemically synthesized
  source 1..20: mol_type = other DNA
gtcaaatgctctgtccagtg

SEQ ID NO: 60977 - DNA, 20 bp, synthetic construct
  misc_feature 1..20: note = chemically synthesized
  source 1..20: mol_type = other DNA
tcaaatgctctgtccagtgt

SEQ ID NO: 60978 - DNA, 20 bp, synthetic construct
  misc_feature 1..20: note = chemically synthesized
  source 1..20: mol_type = other DNA
tgctctgtccagtgtgggcc

SEQ ID NO: 60979 - DNA, 20 bp, synthetic construct
  misc_feature 1..20: note = chemically synthesized
  source 1..20: mol_type = other DNA
tctgtccagtgtgggcctgg

SEQ ID NO: 60980 - DNA, 20 bp, synthetic construct
  misc_feature 1..20: note = chemically synthesized
  source 1..20: mol_type = other DNA
ctgtccagtgtgggcctgga

SEQ ID NO: 60981 - DNA, 20 bp, synthetic construct
  misc_feature 1..20: note = chemically synthesized
  source 1..20: mol_type = other DNA
tccagtgtgggcctggaagg

SEQ ID NO: 60982 - DNA, 20 bp, synthetic construct
  misc_feature 1..20: note = chemically synthesized
  source 1..20: mol_type = other DNA
ccagtgtgggcctggaaggc

SEQ ID NO: 60983 - DNA, 20 bp, synthetic construct
  misc_feature 1..20: note = chemically synthesized
  source 1..20: mol_type = other DNA
aggcaggtcttctccactgt

SEQ ID NO: 60984 - DNA, 20 bp, synthetic construct
  misc_feature 1..20: note = chemically synthesized
  source 1..20: mol_type = other DNA
ggcaggtcttctccactgtt

SEQ ID NO: 60985 - DNA, 20 bp, synthetic construct
  misc_feature 1..20: note = chemically synthesized
  source 1..20: mol_type = other DNA
gtcttctccactgttaggcc

SEQ ID NO: 60986 - DNA, 20 bp, synthetic construct
  misc_feature 1..20: note = chemically synthesized
  source 1..20: mol_type = other DNA
ttaggcctggctgtccccaa

SEQ ID NO: 60987 - DNA, 20 bp, synthetic construct
  misc_feature 1..20: note = chemically synthesized
  source 1..20: mol_type = other DNA
cccaacagcacatacttcct

SEQ ID NO: 60988 - DNA, 20 bp, synthetic construct
  misc_feature 1..20: note = chemically synthesized
  source 1..20: mol_type = other DNA
acatacttcctcagtccata

SEQ ID NO: 60989 - DNA, 20 bp, synthetic construct
  misc_feature 1..20: note = chemically synthesized
  source 1..20: mol_type = other DNA
catacttcctcagtccatat

SEQ ID NO: 60990 - DNA, 20 bp, synthetic construct
  misc_feature 1..20: note = chemically synthesized
  source 1..20: mol_type = other DNA
cgataaacaactccatcctc

SEQ ID NO: 60991 - DNA, 20 bp, synthetic construct
  misc_feature 1..20: note = chemically synthesized
  source 1..20: mol_type = other DNA
gataaacaactccatcctcc

SEQ ID NO: 60992 - DNA, 20 bp, synthetic construct
  misc_feature 1..20: note = chemically synthesized
  source 1..20: mol_type = other DNA
aacctgctgtgccctaacat

SEQ ID NO: 60993 - DNA, 20 bp, synthetic construct
  misc_feature 1..20: note = chemically synthesized
  source 1..20: mol_type = other DNA
ctgtgccctaacatcagctg

SEQ ID NO: 60994 - DNA, 20 bp, synthetic construct
  misc_feature 1..20: note = chemically synthesized
  source 1..20: mol_type = other DNA
tgtgccctaacatcagctga

SEQ ID NO: 60995 - DNA, 20 bp, synthetic construct
  misc_feature 1..20: note = chemically synthesized
  source 1..20: mol_type = other DNA
cctaacatcagctgaaggcc

SEQ ID NO: 60996 - DNA, 20 bp, synthetic construct
  misc_feature 1..20: note = chemically synthesized
  source 1..20: mol_type = other DNA
atcagctgaaggccaagctg

SEQ ID NO: 60997 - DNA, 20 bp, synthetic construct
  misc_feature 1..20: note = chemically synthesized
  source 1..20: mol_type = other DNA
tcagctgaaggccaagctgc

SEQ ID NO: 60998 - DNA, 20 bp, synthetic construct
  misc_feature 1..20: note = chemically synthesized
  source 1..20: mol_type = other DNA
cagctgaaggccaagctgcg

SEQ ID NO: 60999 - DNA, 20 bp, synthetic construct
  misc_feature 1..20: note = chemically synthesized
  source 1..20: mol_type = other DNA
ggccaagctgcggggcaccc

SEQ ID NO: 61000 - DNA, 20 bp, synthetic construct
  misc_feature 1..20: note = chemically synthesized
  source 1..20: mol_type = other DNA
gccaagctgcggggcaccct

SEQ ID NO: 61001 - DNA, 20 bp, synthetic construct
  misc_feature 1..20: note = chemically synthesized
  source 1..20: mol_type = other DNA
cggggcaccctgggtgttcc

SEQ ID NO: 61002 - DNA, 20 bp, synthetic construct
  misc_feature 1..20: note = chemically synthesized
  source 1..20: mol_type = other DNA
tccaagtcactttccctctg

SEQ ID NO: 61003 - DNA, 20 bp, synthetic construct
  misc_feature 1..20: note = chemically synthesized
  source 1..20: mol_type = other DNA
ccaagtcactttccctctgc

SEQ ID NO: 61004 - DNA, 20 bp, synthetic construct
  misc_feature 1..20: note = chemically synthesized
  source 1..20: mol_type = other DNA
agtcactttccctctgcagg

SEQ ID NO: 61005 - DNA, 20 bp, synthetic construct
  misc_feature 1..20: note = chemically synthesized
  source 1..20: mol_type = other DNA
gtcactttccctctgcaggc

SEQ ID NO: 61006 - DNA, 20 bp, synthetic construct
  misc_feature 1..20: note = chemically synthesized
  source 1..20: mol_type = other DNA
aacctcatcctgctctgaaa

SEQ ID NO: 61007 - DNA, 20 bp, synthetic construct
  misc_feature 1..20: note = chemically synthesized
  source 1..20: mol_type = other DNA
catcctgctctgaaacagat

SEQ ID NO: 61008 - DNA, 20 bp, synthetic construct
  misc_feature 1..20: note = chemically synthesized
  source 1..20: mol_type = other DNA
tcctgctctgaaacagatga

SEQ ID NO: 61009 - DNA, 20 bp, synthetic construct
  misc_feature 1..20: note = chemically synthesized
  source 1..20: mol_type = other DNA
cctgctctgaaacagatgag

SEQ ID NO: 61010 - DNA, 20 bp, synthetic construct
  misc_feature 1..20: note = chemically synthesized
  source 1..20: mol_type = other DNA
ctgctctgaaacagatgaga

SEQ ID NO: 61011 - DNA, 20 bp, synthetic construct
  misc_feature 1..20: note = chemically synthesized
  source 1..20: mol_type = other DNA
aaacagatgagagggaaacg

SEQ ID NO: 61012 - DNA, 20 bp, synthetic construct
  misc_feature 1..20: note = chemically synthesized
  source 1..20: mol_type = other DNA
tgagagggaaacgcagaaaa

SEQ ID NO: 61013 - DNA, 20 bp, synthetic construct
  misc_feature 1..20: note = chemically synthesized
  source 1..20: mol_type = other DNA
gaaacgcagaaaacagcttc

SEQ ID NO: 61014 - DNA, 20 bp, synthetic construct
  misc_feature 1..20: note = chemically synthesized
  source 1..20: mol_type = other DNA
gcagaaaacagcttccagct

SEQ ID NO: 61015 - DNA, 20 bp, synthetic construct
  misc_feature 1..20: note = chemically synthesized
  source 1..20: mol_type = other DNA
aaaacagcttccagctcagc

SEQ ID NO: 61016 - DNA, 20 bp, synthetic construct
  misc_feature 1..20: note = chemically synthesized
  source 1..20: mol_type = other DNA
aaacagcttccagctcagcc

SEQ ID NO: 61017 - DNA, 20 bp, synthetic construct
  misc_feature 1..20: note = chemically synthesized
  source 1..20: mol_type = other DNA
tccagctcagccaggaacct

SEQ ID NO: 61018 - DNA, 20 bp, synthetic construct
  misc_feature 1..20: note = chemically synthesized
  source 1..20: mol_type = other DNA
cagctcagccaggaacctta

SEQ ID NO: 61019 - DNA, 20 bp, synthetic construct
  misc_feature 1..20: note = chemically synthesized
  source 1..20: mol_type = other DNA
tcctgaccttttacctcgcc

SEQ ID NO: 61020 - DNA, 20 bp, synthetic construct
  misc_feature 1..20: note = chemically synthesized
  source 1..20: mol_type = other DNA
cctgaccttttacctcgcct

SEQ ID NO: 61021 - DNA, 20 bp, synthetic construct
  misc_feature 1..20: note = chemically synthesized
  source 1..20: mol_type = other DNA
tgaccttttacctcgcctag

SEQ ID NO: 61022 - DNA, 20 bp, synthetic construct
  misc_feature 1..20: note = chemically synthesized
  source 1..20: mol_type = other DNA
ttacctcgcctaggagtttg

SEQ ID NO: 61023 - DNA, 20 bp, synthetic construct
  misc_feature 1..20: note = chemically synthesized
  source 1..20: mol_type = other DNA
tacctcgcctaggagtttgc

SEQ ID NO: 61024 - DNA, 20 bp, synthetic construct
  misc_feature 1..20: note = chemically synthesized
  source 1..20: mol_type = other DNA
acctcgcctaggagtttgca

SEQ ID NO: 61025 - DNA, 20 bp, synthetic construct
  misc_feature 1..20: note = chemically synthesized
  source 1..20: mol_type = other DNA
cctcgcctaggagtttgcag

SEQ ID NO: 61026 - DNA, 20 bp, synthetic construct
  misc_feature 1..20: note = chemically synthesized
  source 1..20: mol_type = other DNA
tcgcctaggagtttgcaggg

SEQ ID NO: 61027 - DNA, 20 bp, synthetic construct
  misc_feature 1..20: note = chemically synthesized
  source 1..20: mol_type = other DNA
gcctaggagtttgcagggga

SEQ ID NO: 61028 - DNA, 20 bp, synthetic construct
  misc_feature 1..20: note = chemically synthesized
  source 1..20: mol_type = other DNA
gggagagaacacacgaattt

SEQ ID NO: 61029 - DNA, 20 bp, synthetic construct
  misc_feature 1..20: note = chemically synthesized
  source 1..20: mol_type = other DNA
acacacgaatttcggatttt

SEQ ID NO: 61030 - DNA, 20 bp, synthetic construct
  misc_feature 1..20: note = chemically synthesized
  source 1..20: mol_type = other DNA
tcggattttaagcctaaata

SEQ ID NO: 61031 - DNA, 20 bp, synthetic construct
  misc_feature 1..20: note = chemically synthesized
  source 1..20: mol_type = other DNA
cggattttaagcctaaataa

SEQ ID NO: 61032 - DNA, 20 bp, synthetic construct
  misc_feature 1..20: note = chemically synthesized
  source 1..20: mol_type = other DNA
attttaagcctaaataaagg

SEQ ID NO: 61033 - DNA, 20 bp, synthetic construct
  misc_feature 1..20: note = chemically synthesized
  source 1..20: mol_type = other DNA
agcctaaataaaggaagcct

SEQ ID NO: 61034 - DNA, 20 bp, synthetic construct
  misc_feature 1..20: note = chemically synthesized
  source 1..20: mol_type = other DNA
ataaaggaagccttagtttg

SEQ ID NO: 61035 - DNA, 20 bp, synthetic construct
  misc_feature 1..20: note = chemically synthesized
  source 1..20: mol_type = other DNA
gaagccttagtttgaagtgc

SEQ ID NO: 61036 - DNA, 20 bp, synthetic construct
  misc_feature 1..20: note = chemically synthesized
  source 1..20: mol_type = other DNA
gtttgaagtgcaagctctgc

SEQ ID NO: 61037 - DNA, 20 bp, synthetic construct
  misc_feature 1..20: note = chemically synthesized
  source 1..20: mol_type = other DNA
gaagtgcaagctctgccgga

SEQ ID NO: 61038 - DNA, 20 bp, synthetic construct
  misc_feature 1..20: note = chemically synthesized
  source 1..20: mol_type = other DNA
aagtgcaagctctgccggac

SEQ ID NO: 61039 - DNA, 20 bp, synthetic construct
  misc_feature 1..20: note = chemically synthesized
  source 1..20: mol_type = other DNA
agtgcaagctctgccggaca

SEQ ID NO: 61040 - DNA, 20 bp, synthetic construct
  misc_feature 1..20: note = chemically synthesized
  source 1..20: mol_type = other DNA
gtgcaagctctgccggacag

SEQ ID NO: 61041 - DNA, 20 bp, synthetic construct
  misc_feature 1..20: note = chemically synthesized
  source 1..20: mol_type = other DNA
tgcaagctctgccggacagg

SEQ ID NO: 61042 - DNA, 20 bp, synthetic construct
  misc_feature 1..20: note = chemically synthesized
  source 1..20: mol_type = other DNA
ccggacagggggcaccctgt

SEQ ID NO: 61043 - DNA, 20 bp, synthetic construct
  misc_feature 1..20: note = chemically synthesized
  source 1..20: mol_type = other DNA
ccctgtgagccccatttgtt

SEQ ID NO: 61044 - DNA, 20 bp, synthetic construct
  misc_feature 1..20: note = chemically synthesized
  source 1..20: mol_type = other DNA
ctgtgagccccatttgttaa

SEQ ID NO: 61045 - DNA, 20 bp, synthetic construct
  misc_feature 1..20: note = chemically synthesized
  source 1..20: mol_type = other DNA
tgtgagccccatttgttaag

SEQ ID NO: 61046 - DNA, 20 bp, synthetic construct
  misc_feature 1..20: note = chemically synthesized
  source 1..20: mol_type = other DNA
cccatttgttaagaggacaa

SEQ ID NO: 61047 - DNA, 20 bp, synthetic construct
  misc_feature 1..20: note = chemically synthesized
  source 1..20: mol_type = other DNA
tttgttaagaggacaatagt

SEQ ID NO: 61048 - DNA, 20 bp, synthetic construct
  misc_feature 1..20: note = chemically synthesized
  source 1..20: mol_type = other DNA
tgttaagaggacaatagtca

SEQ ID NO: 61049 - DNA, 20 bp, synthetic construct
  misc_feature 1..20: note = chemically synthesized
  source 1..20: mol_type = other DNA
ttaagaggacaatagtcaga

SEQ ID NO: 61050 - DNA, 20 bp, synthetic construct
  misc_feature 1..20: note = chemically synthesized
  source 1..20: mol_type = other DNA
gacaatagtcagagagcttc

SEQ ID NO: 61051 - DNA, 20 bp, synthetic construct
  misc_feature 1..20: note = chemically synthesized
  source 1..20: mol_type = other DNA
acaatagtcagagagcttcc

SEQ ID NO: 61052 - DNA, 20 bp, synthetic construct
  misc_feature 1..20: note = chemically synthesized
  source 1..20: mol_type = other DNA
gagcttccaggctctcacac

SEQ ID NO: 61053 - DNA, 20 bp, synthetic construct
  misc_feature 1..20: note = chemically synthesized
  source 1..20: mol_type = other DNA
ccaggctctcacaccagaaa

SEQ ID NO: 61054 - DNA, 20 bp, synthetic construct
  misc_feature 1..20: note = chemically synthesized
  source 1..20: mol_type = other DNA
caggctctcacaccagaaac

SEQ ID NO: 61055 - DNA, 20 bp, synthetic construct
  misc_feature 1..20: note = chemically synthesized
  source 1..20: mol_type = other DNA
cacaccagaaacaggaaata

SEQ ID NO: 61056 - DNA, 20 bp, synthetic construct
  misc_feature 1..20: note = chemically synthesized
  source 1..20: mol_type = other DNA
tttcacactgatctccttcc

SEQ ID NO: 61057 - DNA, 20 bp, synthetic construct
  misc_feature 1..20: note = chemically synthesized
  source 1..20: mol_type = other DNA
ttcacactgatctccttccc

SEQ ID NO: 61058 - DNA, 20 bp, synthetic construct
  misc_feature 1..20: note = chemically synthesized
  source 1..20: mol_type = other DNA
cacactgatctccttcccag

SEQ ID NO: 61059 - DNA, 20 bp, synthetic construct
  misc_feature 1..20: note = chemically synthesized
  source 1..20: mol_type = other DNA
ttgatcctctccataaatcc

SEQ ID NO: 61060 - DNA, 20 bp, synthetic construct
  misc_feature 1..20: note = chemically synthesized
  source 1..20: mol_type = other DNA
atcctctccataaatccgag

SEQ ID NO: 61061 - DNA, 20 bp, synthetic construct
  misc_feature 1..20: note = chemically synthesized
  source 1..20: mol_type = other DNA
tcctctccataaatccgagc

SEQ ID NO: 61062 - DNA, 20 bp, synthetic construct
  misc_feature 1..20: note = chemically synthesized
  source 1..20: mol_type = other DNA
tctccataaatccgagcggg

SEQ ID NO: 61063 - DNA, 20 bp, synthetic construct
  misc_feature 1..20: note = chemically synthesized
  source 1..20: mol_type = other DNA
catttatccaaacaacaaac

SEQ ID NO: 61064 - DNA, 20 bp, synthetic construct
  misc_feature 1..20: note = chemically synthesized
  source 1..20: mol_type = other DNA
aacaacaaacaagcaaacat

SEQ ID NO: 61065 - DNA, 20 bp, synthetic construct
  misc_feature 1..20: note = chemically synthesized
  source 1..20: mol_type = other DNA
aagcaaacatgagctgtgta

SEQ ID NO: 61066 - DNA, 20 bp, synthetic construct
  misc_feature 1..20: note = chemically synthesized
  source 1..20: mol_type = other DNA
agcaaacatgagctgtgtat

SEQ ID NO: 61067 - DNA, 20 bp, synthetic construct
  misc_feature 1..20: note = chemically synthesized
  source 1..20: mol_type = other DNA
gcaaacatgagctgtgtatg

SEQ ID NO: 61068 - DNA, 20 bp, synthetic construct
  misc_feature 1..20: note = chemically synthesized
  source 1..20: mol_type = other DNA
caaacatgagctgtgtatgg

SEQ ID NO: 61069 - DNA, 20 bp, synthetic construct
  misc_feature 1..20: note = chemically synthesized
  source 1..20: mol_type = other DNA
catgagctgtgtatggggga

SEQ ID NO: 61070 - DNA, 20 bp, synthetic construct
  misc_feature 1..20: note = chemically synthesized
  source 1..20: mol_type = other DNA
tgagctgtgtatgggggata

SEQ ID NO: 61071 - DNA, 20 bp, synthetic construct
  misc_feature 1..20: note = chemically synthesized
  source 1..20: mol_type = other DNA
agctgtgtatgggggataga

SEQ ID NO: 61072 - DNA, 20 bp, synthetic construct
  misc_feature 1..20: note = chemically synthesized
  source 1..20: mol_type = other DNA
gggatagagagaatgaaacc

SEQ ID NO: 61073 - DNA, 20 bp, synthetic construct
  misc_feature 1..20: note = chemically synthesized
  source 1..20: mol_type = other DNA
ggatagagagaatgaaaccc

SEQ ID NO: 61074 - DNA, 20 bp, synthetic construct
  misc_feature 1..20: note = chemically synthesized
  source 1..20: mol_type = other DNA
aatgaaacccaggtccatcc

SEQ ID NO: 61075 - DNA, 20 bp, synthetic construct
  misc_feature 1..20: note = chemically synthesized
  source 1..20: mol_type = other DNA
atgaaacccaggtccatccc

SEQ ID NO: 61076 - DNA, 20 bp, synthetic construct
  misc_feature 1..20: note = chemically synthesized
  source 1..20: mol_type = other DNA
tgaaacccaggtccatcccg

SEQ ID NO: 61077 - DNA, 20 bp, synthetic construct
  misc_feature 1..20: note = chemically synthesized
  source 1..20: mol_type = other DNA
aaacccaggtccatcccggg

SEQ ID NO: 61078 - DNA, 20 bp, synthetic construct
  misc_feature 1..20: note = chemically synthesized
  source 1..20: mol_type = other DNA
gtccatcccggggagaatgc

SEQ ID NO: 61079 - DNA, 20 bp, synthetic construct
  misc_feature 1..20: note = chemically synthesized
  source 1..20: mol_type = other DNA
ccggggagaatgctggtcta

SEQ ID NO: 61080 - DNA, 20 bp, synthetic construct
  misc_feature 1..20: note = chemically synthesized
  source 1..20: mol_type = other DNA
gggagaatgctggtctatgg

SEQ ID NO: 61081 - DNA, 20 bp, synthetic construct
  misc_feature 1..20: note = chemically synthesized
  source 1..20: mol_type = other DNA
agaatgctggtctatggcag

SEQ ID NO: 61082 - DNA, 20 bp, synthetic construct
  misc_feature 1..20: note = chemically synthesized
  source 1..20: mol_type = other DNA
gaatgctggtctatggcagt

SEQ ID NO: 61083 - DNA, 20 bp, synthetic construct
  misc_feature 1..20: note = chemically synthesized
  source 1..20: mol_type = other DNA
aatgctggtctatggcagtg

SEQ ID NO: 61084 - DNA, 20 bp, synthetic construct
  misc_feature 1..20: note = chemically synthesized
  source 1..20: mol_type = other DNA
tgctggtctatggcagtggg

SEQ ID NO: 61085 - DNA, 20 bp, synthetic construct
  misc_feature 1..20: note = chemically synthesized
  source 1..20: mol_type = other DNA
tggtctatggcagtggggag

SEQ ID NO: 61086 - DNA, 20 bp, synthetic construct
  misc_feature 1..20: note = chemically synthesized
  source 1..20: mol_type = other DNA
gtggggagcagtgaataaat

SEQ ID NO: 61087 - DNA, 20 bp, synthetic construct
  misc_feature 1..20: note = chemically synthesized
  source 1..20: mol_type = other DNA
tggggagcagtgaataaatg

SEQ ID NO: 61088 - DNA, 20 bp, synthetic construct
  misc_feature 1..20: note = chemically synthesized
  source 1..20: mol_type = other DNA
ataaatgaggcgtacatcca

SEQ ID NO: 61089 - DNA, 20 bp, synthetic construct
  misc_feature 1..20: note = chemically synthesized
  source 1..20: mol_type = other DNA
gaggcgtacatccatggatc

SEQ ID NO: 61090 - DNA, 20 bp, synthetic construct
  misc_feature 1..20: note = chemically synthesized
  source 1..20: mol_type = other DNA
aggcgtacatccatggatct

SEQ ID NO: 61091 - DNA, 20 bp, synthetic construct
  misc_feature 1..20: note = chemically synthesized
  source 1..20: mol_type = other DNA
cgtacatccatggatctggg

SEQ ID NO: 61092 - DNA, 20 bp, synthetic construct
  misc_feature 1..20: note = chemically synthesized
  source 1..20: mol_type = other DNA
tacatccatggatctgggtg

SEQ ID NO: 61093 - DNA, 20 bp, synthetic construct
  misc_feature 1..20: note = chemically synthesized
  source 1..20: mol_type = other DNA
catccatggatctgggtgga

SEQ ID NO: 61094 - DNA, 20 bp, synthetic construct
  misc_feature 1..20: note = chemically synthesized
  source 1..20: mol_type = other DNA
atccatggatctgggtggag

SEQ ID NO: 61095 - DNA, 20 bp, synthetic construct
  misc_feature 1..20: note = chemically synthesized
  source 1..20: mol_type = other DNA
tccatggatctgggtggaga

SEQ ID NO: 61096 - DNA, 20 bp, synthetic construct
  misc_feature 1..20: note = chemically synthesized
  source 1..20: mol_type = other DNA
tggatctgggtggagagggt

SEQ ID NO: 61097 - DNA, 20 bp, synthetic construct
  misc_feature 1..20: note = chemically synthesized
  source 1..20: mol_type = other DNA
ggatctgggtggagagggtc

SEQ ID NO: 61098 - DNA, 20 bp, synthetic construct
  misc_feature 1..20: note = chemically synthesized
  source 1..20: mol_type = other DNA
gatctgggtggagagggtca

SEQ ID NO: 61099 - DNA, 20 bp, synthetic construct
  misc_feature 1..20: note = chemically synthesized
  source 1..20: mol_type = other DNA
gagagggtcagggtgtaacc

SEQ ID NO: 61100 - DNA, 20 bp, synthetic construct
  misc_feature 1..20: note = chemically synthesized
  source 1..20: mol_type = other DNA
agagggtcagggtgtaaccc

SEQ ID NO: 61101 - DNA, 20 bp, synthetic construct
  misc_feature 1..20: note = chemically synthesized
  source 1..20: mol_type = other DNA
ggtgtaacccaggacctttc

SEQ ID NO: 61102 - DNA, 20 bp, synthetic construct
  misc_feature 1..20: note = chemically synthesized
  source 1..20: mol_type = other DNA
tgtaacccaggacctttcca

SEQ ID NO: 61103 - DNA, 20 bp, synthetic construct
  misc_feature 1..20: note = chemically synthesized
  source 1..20: mol_type = other DNA
gtaacccaggacctttccag

SEQ ID NO: 61104 - DNA, 20 bp, synthetic construct
  misc_feature 1..20: note = chemically synthesized
  source 1..20: mol_type = other DNA
caggacctttccagaggcat

SEQ ID NO: 61105 - DNA, 20 bp, synthetic construct
  misc_feature 1..20: note = chemically synthesized
  source 1..20: mol_type = other DNA
ctttccagaggcatgagaaa

SEQ ID NO: 61106 - DNA, 20 bp, synthetic construct
  misc_feature 1..20: note = chemically synthesized
  source 1..20: mol_type = other DNA
ccagaggcatgagaaacagt

SEQ ID NO: 61107 - DNA, 20 bp, synthetic construct
  misc_feature 1..20: note = chemically synthesized
  source 1..20: mol_type = other DNA
aaacagtcagcctacaccca

SEQ ID NO: 61108 - DNA, 20 bp, synthetic construct
  misc_feature 1..20: note = chemically synthesized
  source 1..20: mol_type = other DNA
cagatgacctcaaacacccc

SEQ ID NO: 61109 - DNA, 20 bp, synthetic construct
  misc_feature 1..20: note = chemically synthesized
  source 1..20: mol_type = other DNA
acaccccaagtgctccttga

SEQ ID NO: 61110 - DNA, 20 bp, synthetic construct
  misc_feature 1..20: note = chemically synthesized
  source 1..20: mol_type = other DNA
caccccaagtgctccttgaa

SEQ ID NO: 61111 - DNA, 20 bp, synthetic construct
  misc_feature 1..20: note = chemically synthesized
  source 1..20: mol_type = other DNA
caagtgctccttgaaaggct

SEQ ID NO: 61112 - DNA, 20 bp, synthetic construct
  misc_feature 1..20: note = chemically synthesized
  source 1..20: mol_type = other DNA
aagtgctccttgaaaggctg

SEQ ID NO: 61113 - DNA, 20 bp, synthetic construct
  misc_feature 1..20: note = chemically synthesized
  source 1..20: mol_type = other DNA
tgaggcttttgtgttgctct

SEQ ID NO: 61114 - DNA, 20 bp, synthetic construct
  misc_feature 1..20: note = chemically synthesized
  source 1..20: mol_type = other DNA
gcttttgtgttgctcttggt

SEQ ID NO: 61115 - DNA, 20 bp, synthetic construct
  misc_feature 1..20: note = chemically synthesized
  source 1..20: mol_type = other DNA
gctcttggttggattattca

SEQ ID NO: 61116 - DNA, 20 bp, synthetic construct
  misc_feature 1..20: note = chemically synthesized
  source 1..20: mol_type = other DNA
ctcttggttggattattcac

SEQ ID NO: 61117 - DNA, 20 bp, synthetic construct
  misc_feature 1..20: note = chemically synthesized
  source 1..20: mol_type = other DNA
tggattattcacaggcaatg

SEQ ID NO: 61118 - DNA, 20 bp, synthetic construct
  misc_feature 1..20: note = chemically synthesized
  source 1..20: mol_type = other DNA
tcacaggcaatgaagtaaac

SEQ ID NO: 61119 - DNA, 20 bp, synthetic construct
  misc_feature 1..20: note = chemically synthesized
  source 1..20: mol_type = other DNA
cacaggcaatgaagtaaaca

SEQ ID NO: 61120 - DNA, 20 bp, synthetic construct
  misc_feature 1..20: note = chemically synthesized
  source 1..20: mol_type = other DNA
gaagtaaacaaggcacacca

SEQ ID NO: 61121 - DNA, 20 bp, synthetic construct
  misc_feature 1..20: note = chemically synthesized
  source 1..20: mol_type = other DNA
aagtaaacaaggcacaccac

SEQ ID NO: 61122 - DNA, 20 bp, synthetic construct
  misc_feature 1..20: note = chemically synthesized
  source 1..20: mol_type = other DNA
acaaggcacaccacaggact

SEQ ID NO: 61123 - DNA, 20 bp, synthetic construct
  misc_feature 1..20: note = chemically synthesized
  source 1..20: mol_type = other DNA
cacaccacaggactcagaac

SEQ ID NO: 61124 - DNA, 20 bp, synthetic construct
  misc_feature 1..20: note = chemically synthesized
  source 1..20: mol_type = other DNA
acaccacaggactcagaacc

SEQ ID NO: 61125 - DNA, 20 bp, synthetic construct
  misc_feature 1..20: note = chemically synthesized
  source 1..20: mol_type = other DNA
caccacaggactcagaacca

SEQ ID NO: 61126 - DNA, 20 bp, synthetic construct
  misc_feature 1..20: note = chemically synthesized
  source 1..20: mol_type = other DNA
acaggactcagaaccaggga

SEQ ID NO: 61127 - DNA, 20 bp, synthetic construct
  misc_feature 1..20: note = chemically synthesized
  source 1..20: mol_type = other DNA
agaaccagggacagcttccg

SEQ ID NO: 61128 - DNA, 20 bp, synthetic construct
  misc_feature 1..20: note = chemically synthesized
  source 1..20: mol_type = other DNA
gaaccagggacagcttccgc

SEQ ID NO: 61129 - DNA, 20 bp, synthetic construct
  misc_feature 1..20: note = chemically synthesized
  source 1..20: mol_type = other DNA
ggacagcttccgcaggaacc

SEQ ID NO: 61130 - DNA, 20 bp, synthetic construct
  misc_feature 1..20: note = chemically synthesized
  source 1..20: mol_type = other DNA
gacagcttccgcaggaacct

SEQ ID NO: 61131 - DNA, 20 bp, synthetic construct
  misc_feature 1..20: note = chemically synthesized
  source 1..20: mol_type = other DNA
gcttccgcaggaacctgggt

SEQ ID NO: 61132 - DNA, 20 bp, synthetic construct
  misc_feature 1..20: note = chemically synthesized
  source 1..20: mol_type = other DNA
ggaacctgggtcagttctaa

SEQ ID NO: 61133 - DNA, 20 bp, synthetic construct
  misc_feature 1..20: note = chemically synthesized
  source 1..20: mol_type = other DNA
gaacctgggtcagttctaaa

SEQ ID NO: 61134 - DNA, 20 bp, synthetic construct
  misc_feature 1..20: note = chemically synthesized
  source 1..20: mol_type = other DNA
gtcagttctaaaaggacaaa

SEQ ID NO: 61135 - DNA, 20 bp, synthetic construct
  misc_feature 1..20: note = chemically synthesized
  source 1..20: mol_type = other DNA
aggacaaatggaatgaccct

SEQ ID NO: 61136 - DNA, 20 bp, synthetic construct
  misc_feature 1..20: note = chemically synthesized
  source 1..20: mol_type = other DNA
acaaatggaatgaccctgag

SEQ ID NO: 61137 - DNA, 20 bp, synthetic construct
  misc_feature 1..20: note = chemically synthesized
  source 1..20: mol_type = other DNA
aaatggaatgaccctgagta

SEQ ID NO: 61138 - DNA, 20 bp, synthetic construct
  misc_feature 1..20: note = chemically synthesized
  source 1..20: mol_type = other DNA
tggaatgaccctgagtagag

SEQ ID NO: 61139 - DNA, 20 bp, synthetic construct
  misc_feature 1..20: note = chemically synthesized
  source 1..20: mol_type = other DNA
atgaccctgagtagagaagt

SEQ ID NO: 61140 - DNA, 20 bp, synthetic construct
  misc_feature 1..20: note = chemically synthesized
  source 1..20: mol_type = other DNA
gaccctgagtagagaagtca

SEQ ID NO: 61141 - DNA, 20 bp, synthetic construct
  misc_feature 1..20: note = chemically synthesized
  source 1..20: mol_type = other DNA
ctgagtagagaagtcagaga

SEQ ID NO: 61142 - DNA, 20 bp, synthetic construct
  misc_feature 1..20: note = chemically synthesized
  source 1..20: mol_type = other DNA
tgagtagagaagtcagagaa

SEQ ID NO: 61143 - DNA, 20 bp, synthetic construct
  misc_feature 1..20: note = chemically synthesized
  source 1..20: mol_type = other DNA
cagagaaaggcactctcact

SEQ ID NO: 61144 - DNA, 20 bp, synthetic construct
  misc_feature 1..20: note = chemically synthesized
  source 1..20: mol_type = other DNA
agagaaaggcactctcactg

SEQ ID NO: 61145 - DNA, 20 bp, synthetic construct
  misc_feature 1..20: note = chemically synthesized
  source 1..20: mol_type = other DNA
actgaggcaaactccctccc

SEQ ID NO: 61146 - DNA, 20 bp, synthetic construct
  misc_feature 1..20: note = chemically synthesized
  source 1..20: mol_type = other DNA
gaggcaaactccctccccag

SEQ ID NO: 61147 - DNA, 20 bp, synthetic construct
  misc_feature 1..20: note = chemically synthesized
  source 1..20: mol_type = other DNA
aggcaaactccctccccagc

SEQ ID NO: 61148 - DNA, 20 bp, synthetic construct
  misc_feature 1..20: note = chemically synthesized
  source 1..20: mol_type = other DNA
ggcaaactccctccccagca

SEQ ID NO: 61149 - DNA, 20 bp, synthetic construct
  misc_feature 1..20: note = chemically synthesized
  source 1..20: mol_type = other DNA
ctccctccccagcagggacc

SEQ ID NO: 61150 - DNA, 20 bp, synthetic construct
  misc_feature 1..20: note = chemically synthesized
  source 1..20: mol_type = other DNA
tccctccccagcagggaccc

SEQ ID NO: 61151 - DNA, 20 bp, synthetic construct
  misc_feature 1..20: note = chemically synthesized
  source 1..20: mol_type = other DNA
ctccccagcagggacccagg

SEQ ID NO: 61152 - DNA, 20 bp, synthetic construct
  misc_feature 1..20: note = chemically synthesized
  source 1..20: mol_type = other DNA
cagggacccaggcagcaact

SEQ ID NO: 61153 - DNA, 20 bp, synthetic construct
  misc_feature 1..20: note = chemically synthesized
  source 1..20: mol_type = other DNA
acccaggcagcaactcggaa

SEQ ID NO: 61154 - DNA, 20 bp, synthetic construct
  misc_feature 1..20: note = chemically synthesized
  source 1..20: mol_type = other DNA
caggcagcaactcggaaaag

SEQ ID NO: 61155 - DNA, 20 bp, synthetic construct
  misc_feature 1..20: note = chemically synthesized
  source 1..20: mol_type = other DNA
aggcagcaactcggaaaagc

SEQ ID NO: 61156 - DNA, 20 bp, synthetic construct
  misc_feature 1..20: note = chemically synthesized
  source 1..20: mol_type = other DNA
gcagcaactcggaaaagcag

SEQ ID NO: 61157 - DNA, 20 bp, synthetic construct
  misc_feature 1..20: note = chemically synthesized
  source 1..20: mol_type = other DNA
agtgtcactattgtatcata

SEQ ID NO: 61158 - DNA, 20 bp, synthetic construct
  misc_feature 1..20: note = chemically synthesized
  source 1..20: mol_type = other DNA
gtgtcactattgtatcatat

SEQ ID NO: 61159 - DNA, 20 bp, synthetic construct
  misc_feature 1..20: note = chemically synthesized
  source 1..20: mol_type = other DNA
gtcactattgtatcatatgg

SEQ ID NO: 61160 - DNA, 20 bp, synthetic construct
  misc_feature 1..20: note = chemically synthesized
  source 1..20: mol_type = other DNA
cactattgtatcatatggga

SEQ ID NO: 61161 - DNA, 20 bp, synthetic construct
  misc_feature 1..20: note = chemically synthesized
  source 1..20: mol_type = other DNA
actattgtatcatatgggag

SEQ ID NO: 61162 - DNA, 20 bp, synthetic construct
  misc_feature 1..20: note = chemically synthesized
  source 1..20: mol_type = other DNA
ctattgtatcatatgggaga

SEQ ID NO: 61163 - DNA, 20 bp, synthetic construct
  misc_feature 1..20: note = chemically synthesized
  source 1..20: mol_type = other DNA
ttgtatcatatgggagaggg

SEQ ID NO: 61164 - DNA, 20 bp, synthetic construct
  misc_feature 1..20: note = chemically synthesized
  source 1..20: mol_type = other DNA
tgtatcatatgggagagggc

SEQ ID NO: 61165 - DNA, 20 bp, synthetic construct
  misc_feature 1..20: note = chemically synthesized
  source 1..20: mol_type = other DNA
gagggcaggctgtgtgctct

SEQ ID NO: 61166 - DNA, 20 bp, synthetic construct
  misc_feature 1..20: note = chemically synthesized
  source 1..20: mol_type = other DNA
agggcaggctgtgtgctctc

SEQ ID NO: 61167 - DNA, 20 bp, synthetic construct
  misc_feature 1..20: note = chemically synthesized
  source 1..20: mol_type = other DNA
gggcaggctgtgtgctctca

SEQ ID NO: 61168 - DNA, 20 bp, synthetic construct
  misc_feature 1..20: note = chemically synthesized
  source 1..20: mol_type = other DNA
caggctgtgtgctctcaggg

SEQ ID NO: 61169 - DNA, 20 bp, synthetic construct
  misc_feature 1..20: note = chemically synthesized
  source 1..20: mol_type = other DNA
tcctcaacttctctgtgccg

SEQ ID NO: 61170 - DNA, 20 bp, synthetic construct
  misc_feature 1..20: note = chemically synthesized
  source 1..20: mol_type = other DNA
gcaaaatgtaaatcaaattt

SEQ ID NO: 61171 - DNA, 20 bp, synthetic construct
  misc_feature 1..20: note = chemically synthesized
  source 1..20: mol_type = other DNA
caaaatgtaaatcaaatttg

SEQ ID NO: 61172 - DNA, 20 bp, synthetic construct
  misc_feature 1..20: note = chemically synthesized
  source 1..20: mol_type = other DNA
tgcaatgacttatttctcta

SEQ ID NO: 61173 - DNA, 20 bp, synthetic construct
  misc_feature 1..20: note = chemically synthesized
  source 1..20: mol_type = other DNA
ttccttgtccttgtcccatg

SEQ ID NO: 61174 - DNA, 20 bp, synthetic construct
  misc_feature 1..20: note = chemically synthesized
  source 1..20: mol_type = other DNA
tgtccttgtcccatgtagcc

SEQ ID NO: 61175 - DNA, 20 bp, synthetic construct
  misc_feature 1..20: note = chemically synthesized
  source 1..20: mol_type = other DNA
gtagcccagaaatcttcctc

SEQ ID NO: 61176 - DNA, 20 bp, synthetic construct
  misc_feature 1..20: note = chemically synthesized
  source 1..20: mol_type = other DNA
ccagaaatcttcctctggcc

SEQ ID NO: 61177 - DNA, 20 bp, synthetic construct
  misc_feature 1..20: note = chemically synthesized
  source 1..20: mol_type = other DNA
atcttcctctggcctagttg

SEQ ID NO: 61178 - DNA, 20 bp, synthetic construct
  misc_feature 1..20: note = chemically synthesized
  source 1..20: mol_type = other DNA
cttcctctggcctagttgtg

SEQ ID NO: 61179 - DNA, 20 bp, synthetic construct
  misc_feature 1..20: note = chemically synthesized
  source 1..20: mol_type = other DNA
tctggcctagttgtggagcc

SEQ ID NO: 61180 - DNA, 20 bp, synthetic construct
  misc_feature 1..20: note = chemically synthesized
  source 1..20: mol_type = other DNA
ctagttgtggagcctggcct

SEQ ID NO: 61181 - DNA, 20 bp, synthetic construct
  misc_feature 1..20: note = chemically synthesized
  source 1..20: mol_type = other DNA
tggcctaagtcgcacattgc

SEQ ID NO: 61182 - DNA, 20 bp, synthetic construct
  misc_feature 1..20: note = chemically synthesized
  source 1..20: mol_type = other DNA
gcctaagtcgcacattgctg

SEQ ID NO: 61183 - DNA, 20 bp, synthetic construct
  misc_feature 1..20: note = chemically synthesized
  source 1..20: mol_type = other DNA
aagtcgcacattgctggaga

SEQ ID NO: 61184 - DNA, 20 bp, synthetic construct
  misc_feature 1..20: note = chemically synthesized
  source 1..20: mol_type = other DNA
gcacattgctggagatggtg

SEQ ID NO: 61185 - DNA, 20 bp, synthetic construct
  misc_feature 1..20: note = chemically synthesized
  source 1..20: mol_type = other DNA
ctggagatggtgaagctgac

SEQ ID NO: 61186 - DNA, 20 bp, synthetic construct
  misc_feature 1..20: note = chemically synthesized
  source 1..20: mol_type = other DNA
atggtgaagctgaccagcat

SEQ ID NO: 61187 - DNA, 20 bp, synthetic construct
  misc_feature 1..20: note = chemically synthesized
  source 1..20: mol_type = other DNA
ggtgaagctgaccagcatga

SEQ ID NO: 61188 - DNA, 20 bp, synthetic construct
  misc_feature 1..20: note = chemically synthesized
  source 1..20: mol_type = other DNA
gtgaagctgaccagcatgag

SEQ ID NO: 61189 - DNA, 20 bp, synthetic construct
  misc_feature 1..20: note = chemically synthesized
  source 1..20: mol_type = other DNA
agctgaccagcatgagaggt

SEQ ID NO: 61190 - DNA, 20 bp, synthetic construct
  misc_feature 1..20: note = chemically synthesized
  source 1..20: mol_type = other DNA
cagcatgagaggtcagtttc

SEQ ID NO: 61191 - DNA, 20 bp, synthetic construct
  misc_feature 1..20: note = chemically synthesized
  source 1..20: mol_type = other DNA
catgagaggtcagtttctag

SEQ ID NO: 61192 - DNA, 20 bp, synthetic construct
  misc_feature 1..20: note = chemically synthesized
  source 1..20: mol_type = other DNA
tctagaagcccaaatcccaa

SEQ ID NO: 61193 - DNA, 20 bp, synthetic construct
  misc_feature 1..20: note = chemically synthesized
  source 1..20: mol_type = other DNA
ctagaagcccaaatcccaac

SEQ ID NO: 61194 - DNA, 20 bp, synthetic construct
  misc_feature 1..20: note = chemically synthesized
  source 1..20: mol_type = other DNA
gcccaaatcccaacaggcat

SEQ ID NO: 61195 - DNA, 20 bp, synthetic construct
  misc_feature 1..20: note = chemically synthesized
  source 1..20: mol_type = other DNA
taagcctcaccctccaatat

SEQ ID NO: 61196 - DNA, 20 bp, synthetic construct
  misc_feature 1..20: note = chemically synthesized
  source 1..20: mol_type = other DNA
ccctccaatatcagctctat

SEQ ID NO: 61197 - DNA, 20 bp, synthetic construct
  misc_feature 1..20: note = chemically synthesized
  source 1..20: mol_type = other DNA
catttgtccttttcctcaaa

SEQ ID NO: 61198 - DNA, 20 bp, synthetic construct
  misc_feature 1..20: note = chemically synthesized
  source 1..20: mol_type = other DNA
atttgtccttttcctcaaat

SEQ ID NO: 61199 - DNA, 20 bp, synthetic construct
  misc_feature 1..20: note = chemically synthesized
  source 1..20: mol_type = other DNA
tgtccttttcctcaaatggg

SEQ ID NO: 61200 - DNA, 20 bp, synthetic construct
  misc_feature 1..20: note = chemically synthesized
  source 1..20: mol_type = other DNA
ttcctcaaatgggtggcact

SEQ ID NO: 61201 - DNA, 20 bp, synthetic construct
  misc_feature 1..20: note = chemically synthesized
  source 1..20: mol_type = other DNA
tcctcaaatgggtggcactt

SEQ ID NO: 61202 - DNA, 20 bp, synthetic construct
  misc_feature 1..20: note = chemically synthesized
  source 1..20: mol_type = other DNA
tcaaatgggtggcacttggg

SEQ ID NO: 61203 - DNA, 20 bp, synthetic construct
  misc_feature 1..20: note = chemically synthesized
  source 1..20: mol_type = other DNA
caaatgggtggcacttgggc

SEQ ID NO: 61204 - DNA, 20 bp, synthetic construct
  misc_feature 1..20: note = chemically synthesized
  source 1..20: mol_type = other DNA
aaatgggtggcacttgggca

SEQ ID NO: 61205 - DNA, 20 bp, synthetic construct
  misc_feature 1..20: note = chemically synthesized
  source 1..20: mol_type = other DNA
tgggtggcacttgggcaggg

SEQ ID NO: 61206 - DNA, 20 bp, synthetic construct
  misc_feature 1..20: note = chemically synthesized
  source 1..20: mol_type = other DNA
gtggcacttgggcagggcag

SEQ ID NO: 61207 - DNA, 20 bp, synthetic construct
  misc_feature 1..20: note = chemically synthesized
  source 1..20: mol_type = other DNA
tggcacttgggcagggcaga

SEQ ID NO: 61208 - DNA, 20 bp, synthetic construct
  misc_feature 1..20: note = chemically synthesized
  source 1..20: mol_type = other DNA
ggcacttgggcagggcagaa

SEQ ID NO: 61209 - DNA, 20 bp, synthetic construct
  misc_feature 1..20: note = chemically synthesized
  source 1..20: mol_type = other DNA
cttgggcagggcagaagggc

SEQ ID NO: 61210 - DNA, 20 bp, synthetic construct
  misc_feature 1..20: note = chemically synthesized
  source 1..20: mol_type = other DNA
ggcagaagggctggttatcc

SEQ ID NO: 61211 - DNA, 20 bp, synthetic construct
  misc_feature 1..20: note = chemically synthesized
  source 1..20: mol_type = other DNA
aagggctggttatccaagct

SEQ ID NO: 61212 - DNA, 20 bp, synthetic construct
  misc_feature 1..20: note = chemically synthesized
  source 1..20: mol_type = other DNA
ggctggttatccaagcttgg

SEQ ID NO: 61213 - DNA, 20 bp, synthetic construct
  misc_feature 1..20: note = chemically synthesized
  source 1..20: mol_type = other DNA
ccaagcttggaagatgctga

SEQ ID NO: 61214 - DNA, 20 bp, synthetic construct
  misc_feature 1..20: note = chemically synthesized
  source 1..20: mol_type = other DNA
agcttggaagatgctgacag

SEQ ID NO: 61215 - DNA, 20 bp, synthetic construct
  misc_feature 1..20: note = chemically synthesized
  source 1..20: mol_type = other DNA
gctgacagcagacgcttcaa

SEQ ID NO: 61216 - DNA, 20 bp, synthetic construct
  misc_feature 1..20: note = chemically synthesized
  source 1..20: mol_type = other DNA
gacagcagacgcttcaatgg

SEQ ID NO: 61217 - DNA, 20 bp, synthetic construct
  misc_feature 1..20: note = chemically synthesized
  source 1..20: mol_type = other DNA
agcagacgcttcaatggcag

SEQ ID NO: 61218 - DNA, 20 bp, synthetic construct
  misc_feature 1..20: note = chemically synthesized
  source 1..20: mol_type = other DNA
gcagacgcttcaatggcagt

SEQ ID NO: 61219 - DNA, 20 bp, synthetic construct
  misc_feature 1..20: note = chemically synthesized
  source 1..20: mol_type = other DNA
agacgcttcaatggcagtag

SEQ ID NO: 61220 - DNA, 20 bp, synthetic construct
  misc_feature 1..20: note = chemically synthesized
  source 1..20: mol_type = other DNA
agttttctgatcactgtcat

SEQ ID NO: 61221 - DNA, 20 bp, synthetic construct
  misc_feature 1..20: note = chemically synthesized
  source 1..20: mol_type = other DNA
tactgttgaaatcgtgacat

SEQ ID NO: 61222 - DNA, 20 bp, synthetic construct
  misc_feature 1..20: note = chemically synthesized
  source 1..20: mol_type = other DNA
actgttgaaatcgtgacatc

SEQ ID NO: 61223 - DNA, 20 bp, synthetic construct
  misc_feature 1..20: note = chemically synthesized
  source 1..20: mol_type = other DNA
cgtgacatcaggaatgatga

SEQ ID NO: 61224 - DNA, 20 bp, synthetic construct
  misc_feature 1..20: note = chemically synthesized
  source 1..20: mol_type = other DNA
gtgacatcaggaatgatgaa

SEQ ID NO: 61225 - DNA, 20 bp, synthetic construct
  misc_feature 1..20: note = chemically synthesized
  source 1..20: mol_type = other DNA
tcaggaatgatgaaaggaac

SEQ ID NO: 61226 - DNA, 20 bp, synthetic construct
  misc_feature 1..20: note = chemically synthesized
  source 1..20: mol_type = other DNA
aggaatgatgaaaggaacta

SEQ ID NO: 61227 - DNA, 20 bp, synthetic construct
  misc_feature 1..20: note = chemically synthesized
  source 1..20: mol_type = other DNA
atgatgaaaggaactagagt

SEQ ID NO: 61228 - DNA, 20 bp, synthetic construct
  misc_feature 1..20: note = chemically synthesized
  source 1..20: mol_type = other DNA
tgaaaggaactagagtcaga

SEQ ID NO: 61229 - DNA, 20 bp, synthetic construct
  misc_feature 1..20: note = chemically synthesized
  source 1..20: mol_type = other DNA
ggaactagagtcagatggtc

SEQ ID NO: 61230 - DNA, 20 bp, synthetic construct
  misc_feature 1..20: note = chemically synthesized
  source 1..20: mol_type = other DNA
aactagagtcagatggtctg

SEQ ID NO: 61231 - DNA, 20 bp, synthetic construct
  misc_feature 1..20: note = chemically synthesized
  source 1..20: mol_type = other DNA
tagagtcagatggtctggag

SEQ ID NO: 61232 - DNA, 20 bp, synthetic construct
  misc_feature 1..20: note = chemically synthesized
  source 1..20: mol_type = other DNA
agagtcagatggtctggagc

SEQ ID NO: 61233 - DNA, 20 bp, synthetic construct
  misc_feature 1..20: note = chemically synthesized
  source 1..20: mol_type = other DNA
gagtcagatggtctggagcg

SEQ ID NO: 61234 - DNA, 20 bp, synthetic construct
  misc_feature 1..20: note = chemically synthesized
  source 1..20: mol_type = other DNA
tcagatggtctggagcgggg

SEQ ID NO: 61235 - DNA, 20 bp, synthetic construct
  misc_feature 1..20: note = chemically synthesized
  source 1..20: mol_type = other DNA
atggtctggagcggggaagt

SEQ ID NO: 61236 - DNA, 20 bp, synthetic construct
  misc_feature 1..20: note = chemically synthesized
  source 1..20: mol_type = other DNA
tggtctggagcggggaagtg

SEQ ID NO: 61237 - DNA, 20 bp, synthetic construct
  misc_feature 1..20: note = chemically synthesized
  source 1..20: mol_type = other DNA
gtctggagcggggaagtgag

SEQ ID NO: 61238 - DNA, 20 bp, synthetic construct
  misc_feature 1..20: note = chemically synthesized
  source 1..20: mol_type = other DNA
tgaggagctgaaacctcctt

SEQ ID NO: 61239 - DNA, 20 bp, synthetic construct
  misc_feature 1..20: note = chemically synthesized
  source 1..20: mol_type = other DNA
agctgaaacctccttcagtc

SEQ ID NO: 61240 - DNA, 20 bp, synthetic construct
  misc_feature 1..20: note = chemically synthesized
  source 1..20: mol_type = other DNA
cagtctggttgctgtgtccc

SEQ ID NO: 61241 - DNA, 20 bp, synthetic construct
  misc_feature 1..20: note = chemically synthesized
  source 1..20: mol_type = other DNA
agtctggttgctgtgtcccc

SEQ ID NO: 61242 - DNA, 20 bp, synthetic construct
  misc_feature 1..20: note = chemically synthesized
  source 1..20: mol_type = other DNA
gtctggttgctgtgtcccca

SEQ ID NO: 61243 - DNA, 20 bp, synthetic construct
  misc_feature 1..20: note = chemically synthesized
  source 1..20: mol_type = other DNA
tggttgctgtgtccccaggg

SEQ ID NO: 61244 - DNA, 20 bp, synthetic construct
  misc_feature 1..20: note = chemically synthesized
  source 1..20: mol_type = other DNA
ggttgctgtgtccccagggt

SEQ ID NO: 61245 - DNA, 20 bp, synthetic construct
  misc_feature 1..20: note = chemically synthesized
  source 1..20: mol_type = other DNA
tgctgtgtccccagggtggg

SEQ ID NO: 61246 - DNA, 20 bp, synthetic construct
  misc_feature 1..20: note = chemically synthesized
  source 1..20: mol_type = other DNA
tcccctctgttcatcccaca

SEQ ID NO: 61247 - DNA, 20 bp, synthetic construct
  misc_feature 1..20: note = chemically synthesized
  source 1..20: mol_type = other DNA
cccctctgttcatcccacat

SEQ ID NO: 61248 - DNA, 20 bp, synthetic construct
  misc_feature 1..20: note = chemically synthesized
  source 1..20: mol_type = other DNA
ctgttcatcccacatgggac

SEQ ID NO: 61249 - DNA, 20 bp, synthetic construct
  misc_feature 1..20: note = chemically synthesized
  source 1..20: mol_type = other DNA
ttcatcccacatgggacaag

SEQ ID NO: 61250 - DNA, 20 bp, synthetic construct
  misc_feature 1..20: note = chemically synthesized
  source 1..20: mol_type = other DNA
catcccacatgggacaagta

SEQ ID NO: 61251 - DNA, 20 bp, synthetic construct
  misc_feature 1..20: note = chemically synthesized
  source 1..20: mol_type = other DNA
cccacatgggacaagtagag

SEQ ID NO: 61252 - DNA, 20 bp, synthetic construct
  misc_feature 1..20: note = chemically synthesized
  source 1..20: mol_type = other DNA
ccacatgggacaagtagagc

SEQ ID NO: 61253 - DNA, 20 bp, synthetic construct
  misc_feature 1..20: note = chemically synthesized
  source 1..20: mol_type = other DNA
acatgggacaagtagagcgg

SEQ ID NO: 61254 - DNA, 20 bp, synthetic construct
  misc_feature 1..20: note = chemically synthesized
  source 1..20: mol_type = other DNA
atgggacaagtagagcggga

SEQ ID NO: 61255 - DNA, 20 bp, synthetic construct
  misc_feature 1..20: note = chemically synthesized
  source 1..20: mol_type = other DNA
tgggacaagtagagcgggag

SEQ ID NO: 61256 - DNA, 20 bp, synthetic construct
  misc_feature 1..20: note = chemically synthesized
  source 1..20: mol_type = other DNA
agaggaatcaaccctttcta

SEQ ID NO: 61257 - DNA, 20 bp, synthetic construct
  misc_feature 1..20: note = chemically synthesized
  source 1..20: mol_type = other DNA
gaggaatcaaccctttctaa

SEQ ID NO: 61258 - DNA, 20 bp, synthetic construct
  misc_feature 1..20: note = chemically synthesized
  source 1..20: mol_type = other DNA
aggaatcaaccctttctaaa

SEQ ID NO: 61259 - DNA, 20 bp, synthetic construct
  misc_feature 1..20: note = chemically synthesized
  source 1..20: mol_type = other DNA
caaccctttctaaagggttg

SEQ ID NO: 61260 - DNA, 20 bp, synthetic construct
  misc_feature 1..20: note = chemically synthesized
  source 1..20: mol_type = other DNA
ttctaaagggttgaagcatt

SEQ ID NO: 61261 - DNA, 20 bp, synthetic construct
  misc_feature 1..20: note = chemically synthesized
  source 1..20: mol_type = other DNA
gggttgaagcattgagctgt

SEQ ID NO: 61262 - DNA, 20 bp, synthetic construct
  misc_feature 1..20: note = chemically synthesized
  source 1..20: mol_type = other DNA
gcattgagctgtgagcttct

SEQ ID NO: 61263 - DNA, 20 bp, synthetic construct
  misc_feature 1..20: note = chemically synthesized
  source 1..20: mol_type = other DNA
tgtgagcttctcggttgctg

SEQ ID NO: 61264 - DNA, 20 bp, synthetic construct
  misc_feature 1..20: note = chemically synthesized
  source 1..20: mol_type = other DNA
cccatcctgactgaaacaac

SEQ ID NO: 61265 - DNA, 20 bp, synthetic construct
  misc_feature 1..20: note = chemically synthesized
  source 1..20: mol_type = other DNA
agaattcatgaaatgcatca

SEQ ID NO: 61266 - DNA, 20 bp, synthetic construct
  misc_feature 1..20: note = chemically synthesized
  source 1..20: mol_type = other DNA
attcatgaaatgcatcaaag

SEQ ID NO: 61267 - DNA, 20 bp, synthetic construct
  misc_feature 1..20: note = chemically synthesized
  source 1..20: mol_type = other DNA
gaagtcttcacctactacgc

SEQ ID NO: 61268 - DNA, 20 bp, synthetic construct
  misc_feature 1..20: note = chemically synthesized
  source 1..20: mol_type = other DNA
cttcacctactacgcaagcc

SEQ ID NO: 61269 - DNA, 20 bp, synthetic construct
  misc_feature 1..20: note = chemically synthesized
  source 1..20: mol_type = other DNA
cacctactacgcaagcctgg

SEQ ID NO: 61270 - DNA, 20 bp, synthetic construct
  misc_feature 1..20: note = chemically synthesized
  source 1..20: mol_type = other DNA
acctactacgcaagcctgga

SEQ ID NO: 61271 - DNA, 20 bp, synthetic construct
  misc_feature 1..20: note = chemically synthesized
  source 1..20: mol_type = other DNA
cctactacgcaagcctggaa

SEQ ID NO: 61272 - DNA, 20 bp, synthetic construct
  misc_feature 1..20: note = chemically synthesized
  source 1..20: mol_type = other DNA
gcaagcctggaagggtgact

SEQ ID NO: 61273 - DNA, 20 bp, synthetic construct
  misc_feature 1..20: note = chemically synthesized
  source 1..20: mol_type = other DNA
gactaagatctgaaaaacac

SEQ ID NO: 61274 - DNA, 20 bp, synthetic construct
  misc_feature 1..20: note = chemically synthesized
  source 1..20: mol_type = other DNA
actaagatctgaaaaacacc

SEQ ID NO: 61275 - DNA, 20 bp, synthetic construct
  misc_feature 1..20: note = chemically synthesized
  source 1..20: mol_type = other DNA
aagatctgaaaaacaccggg

SEQ ID NO: 61276 - DNA, 20 bp, synthetic construct
  misc_feature 1..20: note = chemically synthesized
  source 1..20: mol_type = other DNA
agatctgaaaaacaccggga

SEQ ID NO: 61277 - DNA, 20 bp, synthetic construct
  misc_feature 1..20: note = chemically synthesized
  source 1..20: mol_type = other DNA
gaaaaacaccgggaaggcta

SEQ ID NO: 61278 - DNA, 20 bp, synthetic construct
  misc_feature 1..20: note = chemically synthesized
  source 1..20: mol_type = other DNA
aaaaacaccgggaaggctaa

SEQ ID NO: 61279 - DNA, 20 bp, synthetic construct
  misc_feature 1..20: note = chemically synthesized
  source 1..20: mol_type = other DNA
aaggctaaaggaactcccac

SEQ ID NO: 61280 - DNA, 20 bp, synthetic construct
  misc_feature 1..20: note = chemically synthesized
  source 1..20: mol_type = other DNA
aggctaaaggaactcccaca

SEQ ID NO: 61281 - DNA, 20 bp, synthetic construct
  misc_feature 1..20: note = chemically synthesized
  source 1..20: mol_type = other DNA
ctcccacaaggaaaccccat

SEQ ID NO: 61282 - DNA, 20 bp, synthetic construct
  misc_feature 1..20: note = chemically synthesized
  source 1..20: mol_type = other DNA
cacaaggaaaccccattaga

SEQ ID NO: 61283 - DNA, 20 bp, synthetic construct
  misc_feature 1..20: note = chemically synthesized
  source 1..20: mol_type = other DNA
gaaaccccattagaaagttc

SEQ ID NO: 61284 - DNA, 20 bp, synthetic construct
  misc_feature 1..20: note = chemically synthesized
  source 1..20: mol_type = other DNA
cattagaaagttctagttac

SEQ ID NO: 61285 - DNA, 20 bp, synthetic construct
  misc_feature 1..20: note = chemically synthesized
  source 1..20: mol_type = other DNA
agttctagttacaagatgct

SEQ ID NO: 61286 - DNA, 20 bp, synthetic construct
  misc_feature 1..20: note = chemically synthesized
  source 1..20: mol_type = other DNA
tagttacaagatgctcagca

SEQ ID NO: 61287 - DNA, 20 bp, synthetic construct
  misc_feature 1..20: note = chemically synthesized
  source 1..20: mol_type = other DNA
agttacaagatgctcagcac

SEQ ID NO: 61288 - DNA, 20 bp, synthetic construct
  misc_feature 1..20: note = chemically synthesized
  source 1..20: mol_type = other DNA
gatgctcagcacaggccatg

SEQ ID NO: 61289 - DNA, 20 bp, synthetic construct
  misc_feature 1..20: note = chemically synthesized
  source 1..20: mol_type = other DNA
aggccatgcagaaatacgcc

SEQ ID NO: 61290 - DNA, 20 bp, synthetic construct
  misc_feature 1..20: note = chemically synthesized
  source 1..20: mol_type = other DNA
tgcagaaatacgcccagatc

SEQ ID NO: 61291 - DNA, 20 bp, synthetic construct
  misc_feature 1..20: note = chemically synthesized
  source 1..20: mol_type = other DNA
agaaatacgcccagatccgg

SEQ ID NO: 61292 - DNA, 20 bp, synthetic construct
  misc_feature 1..20: note = chemically synthesized
  source 1..20: mol_type = other DNA
atacgcccagatccggtggt

SEQ ID NO: 61293 - DNA, 20 bp, synthetic construct
  misc_feature 1..20: note = chemically synthesized
  source 1..20: mol_type = other DNA
gcccagatccggtggtgagc

SEQ ID NO: 61294 - DNA, 20 bp, synthetic construct
  misc_feature 1..20: note = chemically synthesized
  source 1..20: mol_type = other DNA
cccagatccggtggtgagca

SEQ ID NO: 61295 - DNA, 20 bp, synthetic construct
  misc_feature 1..20: note = chemically synthesized
  source 1..20: mol_type = other DNA
atccggtggtgagcaaggaa

SEQ ID NO: 61296 - DNA, 20 bp, synthetic construct
  misc_feature 1..20: note = chemically synthesized
  source 1..20: mol_type = other DNA
cggtggtgagcaaggaacgg

SEQ ID NO: 61297 - DNA, 20 bp, synthetic construct
  misc_feature 1..20: note = chemically synthesized
  source 1..20: mol_type = other DNA
ggtggtgagcaaggaacggt

SEQ ID NO: 61298 - DNA, 20 bp, synthetic construct
  misc_feature 1..20: note = chemically synthesized
  source 1..20: mol_type = other DNA
gcaaggaacggtaggaatgt

SEQ ID NO: 61299 - DNA, 20 bp, synthetic construct
  misc_feature 1..20: note = chemically synthesized
  source 1..20: mol_type = other DNA
acggtaggaatgtgagcact

SEQ ID NO: 61300 - DNA, 20 bp, synthetic construct
  misc_feature 1..20: note = chemically synthesized
  source 1..20: mol_type = other DNA
aatgtgagcactgagtcacg

SEQ ID NO: 61301 - DNA, 20 bp, synthetic construct
  misc_feature 1..20: note = chemically synthesized
  source 1..20: mol_type = other DNA
atgtgagcactgagtcacgc

SEQ ID NO: 61302 - DNA, 20 bp, synthetic construct
  misc_feature 1..20: note = chemically synthesized
  source 1..20: mol_type = other DNA
gtgagcactgagtcacgcag

SEQ ID NO: 61303 - DNA, 20 bp, synthetic construct
  misc_feature 1..20: note = chemically synthesized
  source 1..20: mol_type = other DNA
gagcactgagtcacgcagga

SEQ ID NO: 61304 - DNA, 20 bp, synthetic construct
  misc_feature 1..20: note = chemically synthesized
  source 1..20: mol_type = other DNA
agtcacgcaggagagactca

SEQ ID NO: 61305 - DNA, 20 bp, synthetic construct
  misc_feature 1..20: note = chemically synthesized
  source 1..20: mol_type = other DNA
gtcacgcaggagagactcat

SEQ ID NO: 61306 - DNA, 20 bp, synthetic construct
  misc_feature 1..20: note = chemically synthesized
  source 1..20: mol_type = other DNA
tcacgcaggagagactcata

SEQ ID NO: 61307 - DNA, 20 bp, synthetic construct
  misc_feature 1..20: note = chemically synthesized
  source 1..20: mol_type = other DNA
cacgcaggagagactcatag

SEQ ID NO: 61308 - DNA, 20 bp, synthetic construct
  misc_feature 1..20: note = chemically synthesized
  source 1..20: mol_type = other DNA
ggagagactcataggggctc

SEQ ID NO: 61309 - DNA, 20 bp, synthetic construct
  misc_feature 1..20: note = chemically synthesized
  source 1..20: mol_type = other DNA
agactcataggggctcaagc

SEQ ID NO: 61310 - DNA, 20 bp, synthetic construct
  misc_feature 1..20: note = chemically synthesized
  source 1..20: mol_type = other DNA
tcataggggctcaagccagc

SEQ ID NO: 61311 - DNA, 20 bp, synthetic construct
  misc_feature 1..20: note = chemically synthesized
  source 1..20: mol_type = other DNA
cataggggctcaagccagca

SEQ ID NO: 61312 - DNA, 20 bp, synthetic construct
  misc_feature 1..20: note = chemically synthesized
  source 1..20: mol_type = other DNA
ataggggctcaagccagcaa

SEQ ID NO: 61313 - DNA, 20 bp, synthetic construct
  misc_feature 1..20: note = chemically synthesized
  source 1..20: mol_type = other DNA
taggggctcaagccagcaag

SEQ ID NO: 61314 - DNA, 20 bp, synthetic construct
  misc_feature 1..20: note = chemically synthesized
  source 1..20: mol_type = other DNA
ggctcaagccagcaagggga

SEQ ID NO: 61315 - DNA, 20 bp, synthetic construct
  misc_feature 1..20: note = chemically synthesized
  source 1..20: mol_type = other DNA
gcctccaccccacgcactgt

SEQ ID NO: 61316 - DNA, 20 bp, synthetic construct
  misc_feature 1..20: note = chemically synthesized
  source 1..20: mol_type = other DNA
ccccacgcactgttggccaa

SEQ ID NO: 61317 - DNA, 20 bp, synthetic construct
  misc_feature 1..20: note = chemically synthesized
  source 1..20: mol_type = other DNA
cactgttggccaacagcttc

SEQ ID NO: 61318 - DNA, 20 bp, synthetic construct
  misc_feature 1..20: note = chemically synthesized
  source 1..20: mol_type = other DNA
actgttggccaacagcttcc

SEQ ID NO: 61319 - DNA, 20 bp, synthetic construct
  misc_feature 1..20: note = chemically synthesized
  source 1..20: mol_type = other DNA
ctgttggccaacagcttcca

SEQ ID NO: 61320 - DNA, 20 bp, synthetic construct
  misc_feature 1..20: note = chemically synthesized
  source 1..20: mol_type = other DNA
tgttggccaacagcttccag

SEQ ID NO: 61321 - DNA, 20 bp, synthetic construct
  misc_feature 1..20: note = chemically synthesized
  source 1..20: mol_type = other DNA
cttccaggggcatttgctct

SEQ ID NO: 61322 - DNA, 20 bp, synthetic construct
  misc_feature 1..20: note = chemically synthesized
  source 1..20: mol_type = other DNA
ccaggggcatttgctctcag

SEQ ID NO: 61323 - DNA, 20 bp, synthetic construct
  misc_feature 1..20: note = chemically synthesized
  source 1..20: mol_type = other DNA
gcatttgctctcagaagtca

SEQ ID NO: 61324 - DNA, 20 bp, synthetic construct
  misc_feature 1..20: note = chemically synthesized
  source 1..20: mol_type = other DNA
aagctgattttccacaattg

SEQ ID NO: 61325 - DNA, 20 bp, synthetic construct
  misc_feature 1..20: note = chemically synthesized
  source 1..20: mol_type = other DNA
agctgttggccaacagtgcg

SEQ ID NO: 61326 - DNA, 20 bp, synthetic construct
  misc_feature 1..20: note = chemically synthesized
  source 1..20: mol_type = other DNA
ccttgctggcttgagcccct

SEQ ID NO: 61327 - DNA, 20 bp, synthetic construct
  misc_feature 1..20: note = chemically synthesized
  source 1..20: mol_type = other DNA
ctaccgttccttgctcacca

SEQ ID NO: 61328 - DNA, 20 bp, synthetic construct
  misc_feature 1..20: note = chemically synthesized
  source 1..20: mol_type = other DNA
ttgtaactagaactttctaa

SEQ ID NO: 61329 - DNA, 20 bp, synthetic construct
  misc_feature 1..20: note = chemically synthesized
  source 1..20: mol_type = other DNA
ttctaatggggtttccttgt

SEQ ID NO: 61330 - DNA, 20 bp, synthetic construct
  misc_feature 1..20: note = chemically synthesized
  source 1..20: mol_type = other DNA
agacttctttgatgcatttc

SEQ ID NO: 61331 - DNA, 20 bp, synthetic construct
  misc_feature 1..20: note = chemically synthesized
  source 1..20: mol_type = other DNA
tgaattctggttgtttcagt

SEQ ID NO: 61332 - DNA, 20 bp, synthetic construct
  misc_feature 1..20: note = chemically synthesized
  source 1..20: mol_type = other DNA
ttgtttcagtcaggatgggc

SEQ ID NO: 61333 - DNA, 20 bp, synthetic construct
  misc_feature 1..20: note = chemically synthesized
  source 1..20: mol_type = other DNA
caatgcttcaaccctttaga

SEQ ID NO: 61334 - DNA, 20 bp, synthetic construct
  misc_feature 1..20: note = chemically synthesized
  source 1..20: mol_type = other DNA
cccgctctacttgtcccatg

SEQ ID NO: 61335 - DNA, 20 bp, synthetic construct
  misc_feature 1..20: note = chemically synthesized
  source 1..20: mol_type = other DNA
tcccatgtgggatgaacaga

SEQ ID NO: 61336 - DNA, 20 bp, synthetic construct
  misc_feature 1..20: note = chemically synthesized
  source 1..20: mol_type = other DNA
gctgtcagcatcttccaagc

SEQ ID NO: 61337 - DNA, 20 bp, synthetic construct
  misc_feature 1..20: note = chemically synthesized
  source 1..20: mol_type = other DNA
ccatttgaggaaaaggacaa

SEQ ID NO: 61338 - DNA, 20 bp, synthetic construct
  misc_feature 1..20: note = chemically synthesized
  source 1..20: mol_type = other DNA
ttctgatagagctgatattg

SEQ ID NO: 61339 - DNA, 20 bp, synthetic construct
  misc_feature 1..20: note = chemically synthesized
  source 1..20: mol_type = other DNA
agggtgaggcttatgcctgt

SEQ ID NO: 61340 - DNA, 20 bp, synthetic construct
  misc_feature 1..20: note = chemically synthesized
  source 1..20: mol_type = other DNA
atagtgacactcctgctttt

SEQ ID NO: 61341 - DNA, 20 bp, synthetic construct
  misc_feature 1..20: note = chemically synthesized
  source 1..20: mol_type = other DNA
ctgcttttccgagttgctgc

SEQ ID NO: 61342 - DNA, 20 bp, synthetic construct
  misc_feature 1..20: note = chemically synthesized
  source 1..20: mol_type = other DNA
gcctgggtccctgctgggga

SEQ ID NO: 61343 - DNA, 20 bp, synthetic construct
  misc_feature 1..20: note = chemically synthesized
  source 1..20: mol_type = other DNA
gggagggagtttgcctcagt

SEQ ID NO: 61344 - DNA, 20 bp, synthetic construct
  misc_feature 1..20: note = chemically synthesized
  source 1..20: mol_type = other DNA
ctttctctgacttctctact

SEQ ID NO: 61345 - DNA, 20 bp, synthetic construct
  misc_feature 1..20: note = chemically synthesized
  source 1..20: mol_type = other DNA
tgcggaagctgtccctggtt

SEQ ID NO: 61346 - DNA, 20 bp, synthetic construct
  misc_feature 1..20: note = chemically synthesized
  source 1..20: mol_type = other DNA
ccttgtttacttcattgcct

SEQ ID NO: 61347 - DNA, 20 bp, synthetic construct
  misc_feature 1..20: note = chemically synthesized
  source 1..20: mol_type = other DNA
tcagcctttcaaggagcact

SEQ ID NO: 61348 - DNA, 20 bp, synthetic construct
  misc_feature 1..20: note = chemically synthesized
  source 1..20: mol_type = other DNA
tggggtgtttgaggtcatct

SEQ ID NO: 61349 - DNA, 20 bp, synthetic construct
  misc_feature 1..20: note = chemically synthesized
  source 1..20: mol_type = other DNA
ctcatgcctctggaaaggtc

SEQ ID NO: 61350 - DNA, 20 bp, synthetic construct
  misc_feature 1..20: note = chemically synthesized
  source 1..20: mol_type = other DNA
gaccctctccacccagatcc

SEQ ID NO: 61351 - DNA, 20 bp, synthetic construct
  misc_feature 1..20: note = chemically synthesized
  source 1..20: mol_type = other DNA
ccatagaccagcattctccc

SEQ ID NO: 61352 - DNA, 20 bp, synthetic construct
  misc_feature 1..20: note = chemically synthesized
  source 1..20: mol_type = other DNA
gcattctccccgggatggac

SEQ ID NO: 61353 - DNA, 20 bp, synthetic construct
  misc_feature 1..20: note = chemically synthesized
  source 1..20: mol_type = other DNA
catgtttgcttgtttgttgt

SEQ ID NO: 61354 - DNA, 20 bp, synthetic construct
  misc_feature 1..20: note = chemically synthesized
  source 1..20: mol_type = other DNA
tttggataaatgcttcccgc

SEQ ID NO: 61355 - DNA, 20 bp, synthetic construct
  misc_feature 1..20: note = chemically synthesized
  source 1..20: mol_type = other DNA
ttcccgctcggatttatgga

SEQ ID NO: 61356 - DNA, 20 bp, synthetic construct
  misc_feature 1..20: note = chemically synthesized
  source 1..20: mol_type = other DNA
ctcttaacaaatggggctca

SEQ ID NO: 61357 - DNA, 20 bp, synthetic construct
  misc_feature 1..20: note = chemically synthesized
  source 1..20: mol_type = other DNA
ccctctcatctgtttcagag

SEQ ID NO: 61358 - DNA, 20 bp, synthetic construct
  misc_feature 1..20: note = chemically synthesized
  source 1..20: mol_type = other DNA
ggaaagtgacttggaacacc

SEQ ID NO: 61359 - DNA, 20 bp, synthetic construct
  misc_feature 1..20: note = chemically synthesized
  source 1..20: mol_type = other DNA
gttgatgcagtgtggtcctg

SEQ ID NO: 61360 - DNA, 20 bp, synthetic construct
  misc_feature 1..20: note = chemically synthesized
  source 1..20: mol_type = other DNA
tgcagtgtggtcctggagga

SEQ ID NO: 61361 - DNA, 20 bp, synthetic construct
  misc_feature 1..20: note = chemically synthesized
  source 1..20: mol_type = other DNA
gagcatttgacctgctgggc

SEQ ID NO: 61362 - DNA, 20 bp, synthetic construct
  misc_feature 1..20: note = chemically synthesized
  source 1..20: mol_type = other DNA
agtttccccatgtgtacttt

SEQ ID NO: 61363 - DNA, 20 bp, synthetic construct
  misc_feature 1..20: note = chemically synthesized
  source 1..20: mol_type = other DNA
ccatgtgtactttggggata

SEQ ID NO: 61364 - DNA, 20 bp, synthetic construct
  misc_feature 1..20: note = chemically synthesized
  source 1..20: mol_type = other DNA
cgtcctgcagaacctgtctg

SEQ ID NO: 61365 - DNA, 20 bp, synthetic construct
  misc_feature 1..20: note = chemically synthesized
  source 1..20: mol_type = other DNA
ctggaggatcacgttggaca

SEQ ID NO: 61366 - DNA, 20 bp, synthetic construct
  misc_feature 1..20: note = chemically synthesized
  source 1..20: mol_type = other DNA
gttgattcccaggggagccc

SEQ ID NO: 61367 - DNA, 20 bp, synthetic construct
  misc_feature 1..20: note = chemically synthesized
  source 1..20: mol_type = other DNA
ctctgggaggttatgctagt

SEQ ID NO: 61368 - DNA, 20 bp, synthetic construct
  misc_feature 1..20: note = chemically synthesized
  source 1..20: mol_type = other DNA
ggaggttatgctagtttgaa

SEQ ID NO: 61369 - DNA, 20 bp, synthetic construct
  misc_feature 1..20: note = chemically synthesized
  source 1..20: mol_type = other DNA
ccaaatgccagttaaataag

SEQ ID NO: 61370 - DNA, 20 bp, synthetic construct
  misc_feature 1..20: note = chemically synthesized
  source 1..20: mol_type = other DNA
agttaaataagaggagtcct

SEQ ID NO: 61371 - DNA, 20 bp, synthetic construct
  misc_feature 1..20: note = chemically synthesized
  source 1..20: mol_type = other DNA
gcgggctgtgtcaacatctg

SEQ ID NO: 61372 - DNA, 20 bp, synthetic construct
  misc_feature 1..20: note = chemically synthesized
  source 1..20: mol_type = other DNA
tgcctgctccacactgggca

SEQ ID NO: 61373 - DNA, 20 bp, synthetic construct
  misc_feature 1..20: note = chemically synthesized
  source 1..20: mol_type = other DNA
gcaacccttctggtttaagg

SEQ ID NO: 61374 - DNA, 20 bp, synthetic construct
  misc_feature 1..20: note = chemically synthesized
  source 1..20: mol_type = other DNA
ttagcgtgaccctcgaaggg

SEQ ID NO: 61375 - DNA, 20 bp, synthetic construct
  misc_feature 1..20: note = chemically synthesized
  source 1..20: mol_type = other DNA
agcctcagtttcctcagatt

SEQ ID NO: 61376 - DNA, 20 bp, synthetic construct
  misc_feature 1..20: note = chemically synthesized
  source 1..20: mol_type = other DNA
cacatcgcagtgctgctaca

SEQ ID NO: 61377 - DNA, 20 bp, synthetic construct
  misc_feature 1..20: note = chemically synthesized
  source 1..20: mol_type = other DNA
agccaggggaggtacttcat

SEQ ID NO: 61378 - DNA, 20 bp, synthetic construct
  misc_feature 1..20: note = chemically synthesized
  source 1..20: mol_type = other DNA
tctatttattctctgttcta

SEQ ID NO: 61379 - DNA, 20 bp, synthetic construct
  misc_feature 1..20: note = chemically synthesized
  source 1..20: mol_type = other DNA
tcagggggaaaagtcagaac

SEQ ID NO: 61380 - DNA, 20 bp, synthetic construct
  misc_feature 1..20: note = chemically synthesized
  source 1..20: mol_type = other DNA
atatctttaatgtatttgtg

SEQ ID NO: 61381 - DNA, 20 bp, synthetic construct
  misc_feature 1..20: note = chemically synthesized
  source 1..20: mol_type = other DNA
tggagagtgaaaggctgtca

SEQ ID NO: 61382 - DNA, 20 bp, synthetic construct
  misc_feature 1..20: note = chemically synthesized
  source 1..20: mol_type = other DNA
gtcggtatccattgattaga

SEQ ID NO: 61383 - DNA, 20 bp, synthetic construct
  misc_feature 1..20: note = chemically synthesized
  source 1..20: mol_type = other DNA
attgattagactgaatcatg

SEQ ID NO: 61384 - DNA, 20 bp, synthetic construct
  misc_feature 1..20: note = chemically synthesized
  source 1..20: mol_type = other DNA
ttaagtacacattcatgaca

SEQ ID NO: 61385 - DNA, 20 bp, synthetic construct
  misc_feature 1..20: note = chemically synthesized
  source 1..20: mol_type = other DNA
cagtgattcctagattagtt

SEQ ID NO: 61386 - DNA, 20 bp, synthetic construct
  misc_feature 1..20: note = chemically synthesized
  source 1..20: mol_type = other DNA
tgtcctttagcagggccttg

SEQ ID NO: 61387 - DNA, 20 bp, synthetic construct
  misc_feature 1..20: note = chemically synthesized
  source 1..20: mol_type = other DNA
ggactcagaggaggaaaggg

SEQ ID NO: 61388 - DNA, 20 bp, synthetic construct
  misc_feature 1..20: note = chemically synthesized
  source 1..20: mol_type = other DNA
ggaggaaagggaggggttgc

SEQ ID NO: 61389 - DNA, 20 bp, synthetic construct
  misc_feature 1..20: note = chemically synthesized
  source 1..20: mol_type = other DNA
gggaggggttgcgggggtca

SEQ ID NO: 61390 - DNA, 20 bp, synthetic construct
  misc_feature 1..20: note = chemically synthesized
  source 1..20: mol_type = other DNA
tgcttcctctcccatagctg

SEQ ID NO: 61391 - DNA, 20 bp, synthetic construct
  misc_feature 1..20: note = chemically synthesized
  source 1..20: mol_type = other DNA
ccatgtgactagggaggaga

SEQ ID NO: 61392 - DNA, 20 bp, synthetic construct
  misc_feature 1..20: note = chemically synthesized
  source 1..20: mol_type = other DNA
actagggaggagaagggata

SEQ ID NO: 61393 - DNA, 20 bp, synthetic construct
  misc_feature 1..20: note = chemically synthesized
  source 1..20: mol_type = other DNA
cagcgatggaaggacaagga

SEQ ID NO: 61394 - DNA, 20 bp, synthetic construct
  misc_feature 1..20: note = chemically synthesized
  source 1..20: mol_type = other DNA
ggtgtccttgttgccccatg

SEQ ID NO: 61395 - DNA, 20 bp, synthetic construct
  misc_feature 1..20: note = chemically synthesized
  source 1..20: mol_type = other DNA
catggagaatgggcttcagg

SEQ ID NO: 61396 - DNA, 20 bp, synthetic construct
  misc_feature 1..20: note = chemically synthesized
  source 1..20: mol_type = other DNA
gtgcctgagaggtgcagggc

SEQ ID NO: 61397 - DNA, 20 bp, synthetic construct
  misc_feature 1..20: note = chemically synthesized
  source 1..20: mol_type = other DNA
ccgagtctggttaggtgaca

SEQ ID NO: 61398 - DNA, 20 bp, synthetic construct
  misc_feature 1..20: note = chemically synthesized
  source 1..20: mol_type = other DNA
ggcccccaggagggcagcct

SEQ ID NO: 61399 - DNA, 20 bp, synthetic construct
  misc_feature 1..20: note = chemically synthesized
  source 1..20: mol_type = other DNA
gtgggcacagccagccctgg

SEQ ID NO: 61400 - DNA, 20 bp, synthetic construct
  misc_feature 1..20: note = chemically synthesized
  source 1..20: mol_type = other DNA
ccctggcaggatgagcaact

SEQ ID NO: 61401 - DNA, 20 bp, synthetic construct
  misc_feature 1..20: note = chemically synthesized
  source 1..20: mol_type = other DNA
atgagcaactctgggtgggg

SEQ ID NO: 61402 - DNA, 20 bp, synthetic construct
  misc_feature 1..20: note = chemically synthesized
  source 1..20: mol_type = other DNA
actctgggtgggggggagtg

SEQ ID NO: 61403 - DNA, 20 bp, synthetic construct
  misc_feature 1..20: note = chemically synthesized
  source 1..20: mol_type = other DNA
tgaagatgcttggtggagcc

SEQ ID NO: 61404 - DNA, 20 bp, synthetic construct
  misc_feature 1..20: note = chemically synthesized
  source 1..20: mol_type = other DNA
tgggcccaggtccgtaagct

SEQ ID NO: 61405 - DNA, 20 bp, synthetic construct
  misc_feature 1..20: note = chemically synthesized
  source 1..20: mol_type = other DNA
agctgaggattcagtccccc

SEQ ID NO: 61406 - DNA, 20 bp, synthetic construct
  misc_feature 1..20: note = chemically synthesized
  source 1..20: mol_type = other DNA
agactcagagaaaacatggg

SEQ ID NO: 61407 - DNA, 20 bp, synthetic construct
  misc_feature 1..20: note = chemically synthesized
  source 1..20: mol_type = other DNA
tgtcatccagggagggggcc

SEQ ID NO: 61408 - DNA, 20 bp, synthetic construct
  misc_feature 1..20: note = chemically synthesized
  source 1..20: mol_type = other DNA
gggggccagggatggagggg

SEQ ID NO: 61409 - DNA, 20 bp, synthetic construct
  misc_feature 1..20: note = chemically synthesized
  source 1..20: mol_type = other DNA
ggagcgagaggcagttattt

SEQ ID NO: 61410 - DNA, 20 bp, synthetic construct
  misc_feature 1..20: note = chemically synthesized
  source 1..20: mol_type = other DNA
gagaggcagttatttttggg

SEQ ID NO: 61411 - DNA, 20 bp, synthetic construct
  misc_feature 1..20: note = chemically synthesized
  source 1..20: mol_type = other DNA
gttcaatcattaagaagaca

SEQ ID NO: 61412 - DNA, 20 bp, synthetic construct
  misc_feature 1..20: note = chemically synthesized
  source 1..20: mol_type = other DNA
ttgttgaacttgacctcggg

SEQ ID NO: 61413 - DNA, 20 bp, synthetic construct
  misc_feature 1..20: note = chemically synthesized
  source 1..20: mol_type = other DNA
tgacctcgggggggatagac

SEQ ID NO: 61414 - DNA, 20 bp, synthetic construct
  misc_feature 1..20: note = chemically synthesized
  source 1..20: mol_type = other DNA
caccaaatctcacagatcga

SEQ ID NO: 61415 - DNA, 20 bp, synthetic construct
  misc_feature 1..20: note = chemically synthesized
  source 1..20: mol_type = other DNA
ccaaacctttctgtgtcagt

SEQ ID NO: 61416 - DNA, 20 bp, synthetic construct
  misc_feature 1..20: note = chemically synthesized
  source 1..20: mol_type = other DNA
tcttgggcaaagttgaaatt

SEQ ID NO: 61417 - DNA, 20 bp, synthetic construct
  misc_feature 1..20: note = chemically synthesized
  source 1..20: mol_type = other DNA
tttgaccacgtcccgtgtca

SEQ ID NO: 61418 - DNA, 20 bp, synthetic construct
  misc_feature 1..20: note = chemically synthesized
  source 1..20: mol_type = other DNA
ggcatcttcaggagctcagc

SEQ ID NO: 61419 - DNA, 20 bp, synthetic construct
  misc_feature 1..20: note = chemically synthesized
  source 1..20: mol_type = other DNA
acattcttccctacagatac

SEQ ID NO: 61420 - DNA, 20 bp, synthetic construct
  misc_feature 1..20: note = chemically synthesized
  source 1..20: mol_type = other DNA
ccagggtgcaacaaggtcgt

SEQ ID NO: 61421 - DNA, 20 bp, synthetic construct
  misc_feature 1..20: note = chemically synthesized
  source 1..20: mol_type = other DNA
atctcaccttggagagcttc

SEQ ID NO: 61422 - DNA, 20 bp, synthetic construct
  misc_feature 1..20: note = chemically synthesized
  source 1..20: mol_type = other DNA
aggttccagtaatggacagt

SEQ ID NO: 61423 - DNA, 20 bp, synthetic construct
  misc_feature 1..20: note = chemically synthesized
  source 1..20: mol_type = other DNA
ctacttttagctcttctaca

SEQ ID NO: 61424 - DNA, 20 bp, synthetic construct
  misc_feature 1..20: note = chemically synthesized
  source 1..20: mol_type = other DNA
agctcttctacattgagtca

SEQ ID NO: 61425 - DNA, 20 bp, synthetic construct
  misc_feature 1..20: note = chemically synthesized
  source 1..20: mol_type = other DNA
tgagtcaaagaatgttaaca

SEQ ID NO: 61426 - DNA, 20 bp, synthetic construct
  misc_feature 1..20: note = chemically synthesized
  source 1..20: mol_type = other DNA
tcaaagaatgttaacatcga

SEQ ID NO: 61427 - DNA, 20 bp, synthetic construct
  misc_feature 1..20: note = chemically synthesized
  source 1..20: mol_type = other DNA
tctcatcttgccctgtagtg

SEQ ID NO: 61428 - DNA, 20 bp, synthetic construct
  misc_feature 1..20: note = chemically synthesized
  source 1..20: mol_type = other DNA
tgcccagtgacaaccgttta

SEQ ID NO: 61429 - DNA, 20 bp, synthetic construct
  misc_feature 1..20: note = chemically synthesized
  source 1..20: mol_type = other DNA
aaccgtttagtggataagag

SEQ ID NO: 61430 - DNA, 20 bp, synthetic construct
  misc_feature 1..20: note = chemically synthesized
  source 1..20: mol_type = other DNA
agaagagtgaccacaccagg

SEQ ID NO: 61431 - DNA, 20 bp, synthetic construct
  misc_feature 1..20: note = chemically synthesized
  source 1..20: mol_type = other DNA
ggagacaatgccaccctgag

SEQ ID NO: 61432 - DNA, 20 bp, synthetic construct
  misc_feature 1..20: note = chemically synthesized
  source 1..20: mol_type = other DNA
agcagggcatgggcataatc

SEQ ID NO: 61433 - DNA, 20 bp, synthetic construct
  misc_feature 1..20: note = chemically synthesized
  source 1..20: mol_type = other DNA
tgctgtccctgccctgggca

SEQ ID NO: 61434 - DNA, 20 bp, synthetic construct
  misc_feature 1..20: note = chemically synthesized
  source 1..20: mol_type = other DNA
ggaagggacagtgtccacac

SEQ ID NO: 61435 - DNA, 20 bp, synthetic construct
  misc_feature 1..20: note = chemically synthesized
  source 1..20: mol_type = other DNA
agacctttacctcctcaccc

SEQ ID NO: 61436 - DNA, 20 bp, synthetic construct
  misc_feature 1..20: note = chemically synthesized
  source 1..20: mol_type = other DNA
tactgtcctcctcatggagc

SEQ ID NO: 61437 - DNA, 20 bp, synthetic construct
  misc_feature 1..20: note = chemically synthesized
  source 1..20: mol_type = other DNA
ttctggaagccaagtttata

SEQ ID NO: 61438 - DNA, 20 bp, synthetic construct
  misc_feature 1..20: note = chemically synthesized
  source 1..20: mol_type = other DNA
atacagagtagcagtgaccc

SEQ ID NO: 61439 - DNA, 20 bp, synthetic construct
  misc_feature 1..20: note = chemically synthesized
  source 1..20: mol_type = other DNA
gtagcagtgacccagggatg

SEQ ID NO: 61440 - DNA, 20 bp, synthetic construct
  misc_feature 1..20: note = chemically synthesized
  source 1..20: mol_type = other DNA
tcttggtcaccctcaggttg

SEQ ID NO: 61441 - DNA, 20 bp, synthetic construct
  misc_feature 1..20: note = chemically synthesized
  source 1..20: mol_type = other DNA
aggaacttggtgatgatatc

SEQ ID NO: 61442 - DNA, 20 bp, synthetic construct
  misc_feature 1..20: note = chemically synthesized
  source 1..20: mol_type = other DNA
acttggtgatgatatcgtgg

SEQ ID NO: 61443 - DNA, 20 bp, synthetic construct
  misc_feature 1..20: note = chemically synthesized
  source 1..20: mol_type = other DNA
ctggacagcttcttacagtg

SEQ ID NO: 61444 - DNA, 20 bp, synthetic construct
  misc_feature 1..20: note = chemically synthesized
  source 1..20: mol_type = other DNA
cctcggtgtccttgacttca

SEQ ID NO: 61445 - DNA, 20 bp, synthetic construct
  misc_feature 1..20: note = chemically synthesized
  source 1..20: mol_type = other DNA
aggggaaggtgggcatcacc

SEQ ID NO: 61446 - DNA, 20 bp, synthetic construct
  misc_feature 1..20: note = chemically synthesized
  source 1..20: mol_type = other DNA
gaaggtgggcatcaccaggg

SEQ ID NO: 61447 - DNA, 20 bp, synthetic construct
  misc_feature 1..20: note = chemically synthesized
  source 1..20: mol_type = other DNA
aggggtgagtgaaggtttgg

SEQ ID NO: 61448 - DNA, 20 bp, synthetic construct
  misc_feature 1..20: note = chemically synthesized
  source 1..20: mol_type = other DNA
gaaggtttggaagagtgtag

SEQ ID NO: 61449 - DNA, 20 bp, synthetic construct
  misc_feature 1..20: note = chemically synthesized
  source 1..20: mol_type = other DNA
tgtagcagaataaagaaacc

SEQ ID NO: 61450 - DNA, 20 bp, synthetic construct
  misc_feature 1..20: note = chemically synthesized
  source 1..20: mol_type = other DNA
gctgccgaaaaagattgtgt

SEQ ID NO: 61451 - DNA, 20 bp, synthetic construct
  misc_feature 1..20: note = chemically synthesized
  source 1..20: mol_type = other DNA
ttcaaaactagaggaagatg

SEQ ID NO: 61452 - DNA, 20 bp, synthetic construct
  misc_feature 1..20: note = chemically synthesized
  source 1..20: mol_type = other DNA
tcgtggctgtgcatttttat

SEQ ID NO: 61453 - DNA, 20 bp, synthetic construct
  misc_feature 1..20: note = chemically synthesized
  source 1..20: mol_type = other DNA
ttggaatcatatgtttattt

SEQ ID NO: 61454 - DNA, 20 bp, synthetic construct
  misc_feature 1..20: note = chemically synthesized
  source 1..20: mol_type = other DNA
tatgtttatttgagggtgtc

SEQ ID NO: 61455 - DNA, 20 bp, synthetic construct
  misc_feature 1..20: note = chemically synthesized
  source 1..20: mol_type = other DNA
agcttcaccatcgaggcatg

SEQ ID NO: 61456 - DNA, 20 bp, synthetic construct
  misc_feature 1..20: note = chemically synthesized
  source 1..20: mol_type = other DNA
cctcaagagcaagggagcct

SEQ ID NO: 61457 - DNA, 20 bp, synthetic construct
  misc_feature 1..20: note = chemically synthesized
  source 1..20: mol_type = other DNA
tgggacagtgggagctggct

SEQ ID NO: 61458 - DNA, 20 bp, synthetic construct
  misc_feature 1..20: note = chemically synthesized
  source 1..20: mol_type = other DNA
gaaggcagcctgagatacag

SEQ ID NO: 61459 - DNA, 20 bp, synthetic construct
  misc_feature 1..20: note = chemically synthesized
  source 1..20: mol_type = other DNA
tcctaaaaaaacctgacagc

SEQ ID NO: 61460 - DNA, 20 bp, synthetic construct
  misc_feature 1..20: note = chemically synthesized
  source 1..20: mol_type = other DNA
aaattagcacctcaaagagg

SEQ ID NO: 61461 - DNA, 20 bp, synthetic construct
  misc_feature 1..20: note = chemically synthesized
  source 1..20: mol_type = other DNA
aaagctaattgtgttagagg

SEQ ID NO: 61462 - DNA, 20 bp, synthetic construct
  misc_feature 1..20: note = chemically synthesized
  source 1..20: mol_type = other DNA
tgatactgattctgggacac

SEQ ID NO: 61463 - DNA, 20 bp, synthetic construct
  misc_feature 1..20: note = chemically synthesized
  source 1..20: mol_type = other DNA
tgtttgtgtgtagaaaactg

SEQ ID NO: 61464 - DNA, 20 bp, synthetic construct
  misc_feature 1..20: note = chemically synthesized
  source 1..20: mol_type = other DNA
gcccataatgcattgccaag

SEQ ID NO: 61465 - DNA, 20 bp, synthetic construct
  misc_feature 1..20: note = chemically synthesized
  source 1..20: mol_type = other DNA
agttcaagaactgatggttt

SEQ ID NO: 61466 - DNA, 20 bp, synthetic construct
  misc_feature 1..20: note = chemically synthesized
  source 1..20: mol_type = other DNA
accaaatccacaattttccc

SEQ ID NO: 61467 - DNA, 20 bp, synthetic construct
  misc_feature 1..20: note = chemically synthesized
  source 1..20: mol_type = other DNA
gaagttgacagtgaaggctt

SEQ ID NO: 61468 - DNA, 20 bp, synthetic construct
  misc_feature 1..20: note = chemically synthesized
  source 1..20: mol_type = other DNA
agctggctgtctggctggtt

SEQ ID NO: 61469 - DNA, 20 bp, synthetic construct
  misc_feature 1..20: note = chemically synthesized
  source 1..20: mol_type = other DNA
ctggctggttgagggtacgg

SEQ ID NO: 61470 - DNA, 20 bp, synthetic construct
  misc_feature 1..20: note = chemically synthesized
  source 1..20: mol_type = other DNA
aggagttcctggaagccttc

SEQ ID NO: 61471 - DNA, 20 bp, synthetic construct
  misc_feature 1..20: note = chemically synthesized
  source 1..20: mol_type = other DNA
ccttcatggatctgagcctc

SEQ ID NO: 61472 - DNA, 20 bp, synthetic construct
  misc_feature 1..20: note = chemically synthesized
  source 1..20: mol_type = other DNA
aggttgaaattcaggccctc

SEQ ID NO: 61473 - DNA, 20 bp, synthetic construct
  misc_feature 1..20: note = chemically synthesized
  source 1..20: mol_type = other DNA
aggccctccaggatttcatc

SEQ ID NO: 61474 - DNA, 20 bp, synthetic construct
  misc_feature 1..20: note = chemically synthesized
  source 1..20: mol_type = other DNA
aaggcgaactcagccaggtt

SEQ ID NO: 61475 - DNA, 20 bp, synthetic construct
  misc_feature 1..20: note = chemically synthesized
  source 1..20: mol_type = other DNA
gggggtgatcttgttgaagg

SEQ ID NO: 61476 - DNA, 20 bp, synthetic construct
  misc_feature 1..20: note = chemically synthesized
  source 1..20: mol_type = other DNA
ttgggtgatcctgatcatgg

SEQ ID NO: 61477 - DNA, 20 bp, synthetic construct
  misc_feature 1..20: note = chemically synthesized
  source 1..20: mol_type = other DNA
cttctgggcagcatctccct

SEQ ID NO: 61478 - DNA, 20 bp, synthetic construct
  misc_feature 1..20: note = chemically synthesized
  source 1..20: mol_type = other DNA
cagcacaggcctgccagcag

SEQ ID NO: 61479 - DNA, 20 bp, synthetic construct
  misc_feature 1..20: note = chemically synthesized
  source 1..20: mol_type = other DNA
agagatgggggggccaggcc

SEQ ID NO: 61480 - DNA, 20 bp, synthetic construct
  misc_feature 1..20: note = chemically synthesized
  source 1..20: mol_type = other DNA
catgatgactcccagtgatc

SEQ ID NO: 61481 - DNA, 20 bp, synthetic construct
  misc_feature 1..20: note = chemically synthesized
  source 1..20: mol_type = other DNA
gacaccacgtggaagtgcct

SEQ ID NO: 61482 - DNA, 20 bp, synthetic construct
  misc_feature 1..20: note = chemically synthesized
  source 1..20: mol_type = other DNA
gccgacatcagtaacactga

SEQ ID NO: 61483 - DNA, 20 bp, synthetic construct
  misc_feature 1..20: note = chemically synthesized
  source 1..20: mol_type = other DNA
agtaacactgaaagaatcag

SEQ ID NO: 61484 - DNA, 20 bp, synthetic construct
  misc_feature 1..20: note = chemically synthesized
  source 1..20: mol_type = other DNA
cactgaggaagtagcagaac

SEQ ID NO: 61485 - DNA, 20 bp, synthetic construct
  misc_feature 1..20: note = chemically synthesized
  source 1..20: mol_type = other DNA
agaaaatgaggcacaagaag

SEQ ID NO: 61486 - DNA, 20 bp, synthetic construct
  misc_feature 1..20: note = chemically synthesized
  source 1..20: mol_type = other DNA
gggcctgcccacgattatcc

SEQ ID NO: 61487 - DNA, 20 bp, synthetic construct
  misc_feature 1..20: note = chemically synthesized
  source 1..20: mol_type = other DNA
atccaggaatcgggccagat

SEQ ID NO: 61488 - DNA, 20 bp, synthetic construct
  misc_feature 1..20: note = chemically synthesized
  source 1..20: mol_type = other DNA
aatcgggccagatcagaatc

SEQ ID NO: 61489 - DNA, 20 bp, synthetic construct
  misc_feature 1..20: note = chemically synthesized
  source 1..20: mol_type = other DNA
tgttcccacccaacactcac

SEQ ID NO: 61490 - DNA, 20 bp, synthetic construct
  misc_feature 1..20: note = chemically synthesized
  source 1..20: mol_type = other DNA
tcacaaggatcctcagccct

SEQ ID NO: 61491 - DNA, 20 bp, synthetic construct
  misc_feature 1..20: note = chemically synthesized
  source 1..20: mol_type = other DNA
tgctctgtggtcccagacac

SEQ ID NO: 61492 - DNA, 20 bp, synthetic construct
  misc_feature 1..20: note = chemically synthesized
  source 1..20: mol_type = other DNA
gcagtcagcttacctgccgt

SEQ ID NO: 61493 - DNA, 20 bp, synthetic construct
  misc_feature 1..20: note = chemically synthesized
  source 1..20: mol_type = other DNA
gctcatctctccttgaaagc

SEQ ID NO: 61494 - DNA, 20 bp, synthetic construct
  misc_feature 1..20: note = chemically synthesized
  source 1..20: mol_type = other DNA
cttttaacttcagatagacc

SEQ ID NO: 61495 - DNA, 20 bp, synthetic construct
  misc_feature 1..20: note = chemically synthesized
  source 1..20: mol_type = other DNA
ataaagtgatgtttatgtat

SEQ ID NO: 61496 - DNA, 20 bp, synthetic construct
  misc_feature 1..20: note = chemically synthesized
  source 1..20: mol_type = other DNA
aacaccaaaccttacatcaa

SEQ ID NO: 61497 - DNA, 20 bp, synthetic construct
  misc_feature 1..20: note = chemically synthesized
  source 1..20: mol_type = other DNA
gagggcaactcttttgaggg

SEQ ID NO: 61498 - DNA, 20 bp, synthetic construct
  misc_feature 1..20: note = chemically synthesized
  source 1..20: mol_type = other DNA
cttcaggtgataggccagtg

SEQ ID NO: 61499 - DNA, 20 bp, synthetic construct
  misc_feature 1..20: note = chemically synthesized
  source 1..20: mol_type = other DNA
tacccggggctgagacaata

SEQ ID NO: 61500 - DNA, 20 bp, synthetic construct
  misc_feature 1..20: note = chemically synthesized
  source 1..20: mol_type = other DNA
aaactgaggtcctagctgag

SEQ ID NO: 61501 - DNA, 20 bp, synthetic construct
  misc_feature 1..20: note = chemically synthesized
  source 1..20: mol_type = other DNA
atacaaagaaaaaggtgtcc

SEQ ID NO: 61502 - DNA, 20 bp, synthetic construct
  misc_feature 1..20: note = chemically synthesized
  source 1..20: mol_type = other DNA
acagggctcagtggtcagga

SEQ ID NO: 61503 - DNA, 20 bp, synthetic construct
  misc_feature 1..20: note = chemically synthesized
  source 1..20: mol_type = other DNA
aggagggagttgggcctctg

SEQ ID NO: 61504 - DNA, 20 bp, synthetic construct
  misc_feature 1..20: note = chemically synthesized
  source 1..20: mol_type = other DNA
gggtggggacactaaatatg

SEQ ID NO: 61505 - DNA, 20 bp, synthetic construct
  misc_feature 1..20: note = chemically synthesized
  source 1..20: mol_type = other DNA
ctatccacttggcctttagc

SEQ ID NO: 61506 - DNA, 20 bp, synthetic construct
  misc_feature 1..20: note = chemically synthesized
  source 1..20: mol_type = other DNA
ctgtacactaacataggttt

SEQ ID NO: 61507 - DNA, 20 bp, synthetic construct
  misc_feature 1..20: note = chemically synthesized
  source 1..20: mol_type = other DNA
tttttgggttttttttgaga

SEQ ID NO: 61508 - DNA, 20 bp, synthetic construct
  misc_feature 1..20: note = chemically synthesized
  source 1..20: mol_type = other DNA
cagagtctcgctttatctgc

SEQ ID NO: 61509 - DNA, 20 bp, synthetic construct
  misc_feature 1..20: note = chemically synthesized
  source 1..20: mol_type = other DNA
tctcgctttatctgccaggg

SEQ ID NO: 61510 - DNA, 20 bp, synthetic construct
  misc_feature 1..20: note = chemically synthesized
  source 1..20: mol_type = other DNA
ctcactgaaacctccacctc

SEQ ID NO: 61511 - DNA, 20 bp, synthetic construct
  misc_feature 1..20: note = chemically synthesized
  source 1..20: mol_type = other DNA
gtctcagcttcccaaatagc

SEQ ID NO: 61512 - DNA, 20 bp, synthetic construct
  misc_feature 1..20: note = chemically synthesized
  source 1..20: mol_type = other DNA
gccttggcctcccaaagtgc

SEQ ID NO: 61513 - DNA, 20 bp, synthetic construct
  misc_feature 1..20: note = chemically synthesized
  source 1..20: mol_type = other DNA
cgagagcccctgcacccagc

SEQ ID NO: 61514 - DNA, 20 bp, synthetic construct
  misc_feature 1..20: note = chemically synthesized
  source 1..20: mol_type = other DNA
acccagccaggattcttggt

SEQ ID NO: 61515 - DNA, 20 bp, synthetic construct
  misc_feature 1..20: note = chemically synthesized
  source 1..20: mol_type = other DNA
attcttggttagaatggcat

SEQ ID NO: 61516 - DNA, 20 bp, synthetic construct
  misc_feature 1..20: note = chemically synthesized
  source 1..20: mol_type = other DNA
tcaatgtagcaaaacagatg

SEQ ID NO: 61517 - DNA, 20 bp, synthetic construct
  misc_feature 1..20: note = chemically synthesized
  source 1..20: mol_type = other DNA
acaggtgccctcctagacag

SEQ ID NO: 61518 - DNA, 20 bp, synthetic construct
  misc_feature 1..20: note = chemically synthesized
  source 1..20: mol_type = other DNA
ggtggagaggctggtgcagg

SEQ ID NO: 61519 - DNA, 20 bp, synthetic construct
  misc_feature 1..20: note = chemically synthesized
  source 1..20: mol_type = other DNA
tggtgcagggagggtggcga

SEQ ID NO: 61520 - DNA, 20 bp, synthetic construct
  misc_feature 1..20: note = chemically synthesized
  source 1..20: mol_type = other DNA
ggtttcctcctttcacagtg

SEQ ID NO: 61521 - DNA, 20 bp, synthetic construct
  misc_feature 1..20: note = chemically synthesized
  source 1..20: mol_type = other DNA
tgaagagtttgaagcccaga

SEQ ID NO: 61522 - DNA, 20 bp, synthetic construct
  misc_feature 1..20: note = chemically synthesized
  source 1..20: mol_type = other DNA
gtgtcctcagatctcagatg

SEQ ID NO: 61523 - DNA, 20 bp, synthetic construct
  misc_feature 1..20: note = chemically synthesized
  source 1..20: mol_type = other DNA
agatctcagatgatgaatgt

SEQ ID NO: 61524 - DNA, 20 bp, synthetic construct
  misc_feature 1..20: note = chemically synthesized
  source 1..20: mol_type = other DNA
cattggtctcaagcatcatg

SEQ ID NO: 61525 - DNA, 20 bp, synthetic construct
  misc_feature 1..20: note = chemically synthesized
  source 1..20: mol_type = other DNA
gaggccaagctttaaaccaa

SEQ ID NO: 61526 - DNA, 20 bp, synthetic construct
  misc_feature 1..20: note = chemically synthesized
  source 1..20: mol_type = other DNA
aggcttcatggtgacatttc

SEQ ID NO: 61527 - DNA, 20 bp, synthetic construct
  misc_feature 1..20: note = chemically synthesized
  source 1..20: mol_type = other DNA
agggaccaagagcaacccgg

SEQ ID NO: 61528 - DNA, 20 bp, synthetic construct
  misc_feature 1..20: note = chemically synthesized
  source 1..20: mol_type = other DNA
acccggcagggtgcagggaa

SEQ ID NO: 61529 - DNA, 20 bp, synthetic construct
  misc_feature 1..20: note = chemically synthesized
  source 1..20: mol_type = other DNA
tcacttactggcagggggcc

SEQ ID NO: 61530 - DNA, 20 bp, synthetic construct
  misc_feature 1..20: note = chemically synthesized
  source 1..20: mol_type = other DNA
catagctgtacaatggagaa

SEQ ID NO: 61531 - DNA, 20 bp, synthetic construct
  misc_feature 1..20: note = chemically synthesized
  source 1..20: mol_type = other DNA
gagaaaagaatcctttggac

SEQ ID NO: 61532 - DNA, 20 bp, synthetic construct
  misc_feature 1..20: note = chemically synthesized
  source 1..20: mol_type = other DNA
gaatcctttggacagggatg

SEQ ID NO: 61533 - DNA, 20 bp, synthetic construct
  misc_feature 1..20: note = chemically synthesized
  source 1..20: mol_type = other DNA
aggaataactgacgtaatgc

SEQ ID NO: 61534 - DNA, 20 bp, synthetic construct
  misc_feature 1..20: note = chemically synthesized
  source 1..20: mol_type = other DNA
tgctcagcagtgaacagcat

SEQ ID NO: 61535 - DNA, 20 bp, synthetic construct
  misc_feature 1..20: note = chemically synthesized
  source 1..20: mol_type = other DNA
gtaatcctaaatgttttgtc

SEQ ID NO: 61536 - DNA, 20 bp, synthetic construct
  misc_feature 1..20: note = chemically synthesized
  source 1..20: mol_type = other DNA
tttcactccaaaacctgaca

SEQ ID NO: 61537 - DNA, 20 bp, synthetic construct
  misc_feature 1..20: note = chemically synthesized
  source 1..20: mol_type = other DNA
caaagctgaagccagaagtc

SEQ ID NO: 61538 - DNA, 20 bp, synthetic construct
  misc_feature 1..20: note = chemically synthesized
  source 1..20: mol_type = other DNA
ctgctgcgcagcaagttctc

SEQ ID NO: 61539 - DNA, 20 bp, synthetic construct
  misc_feature 1..20: note = chemically synthesized
  source 1..20: mol_type = other DNA
caacacttcagagatcaagg

SEQ ID NO: 61540 - DNA, 20 bp, synthetic construct
  misc_feature 1..20: note = chemically synthesized
  source 1..20: mol_type = other DNA
cttcagagatcaaggtcggg

SEQ ID NO: 61541 - DNA, 20 bp, synthetic construct
  misc_feature 1..20: note = chemically synthesized
  source 1..20: mol_type = other DNA
gtgacactagggccaggttc

SEQ ID NO: 61542 - DNA, 20 bp, synthetic construct
  misc_feature 1..20: note = chemically synthesized
  source 1..20: mol_type = other DNA
ctggagccaggtgcctgagc

SEQ ID NO: 61543 - DNA, 20 bp, synthetic construct
  misc_feature 1..20: note = chemically synthesized
  source 1..20: mol_type = other DNA
caggtgcctgagcccgaatt

SEQ ID NO: 61544 - DNA, 20 bp, synthetic construct
  misc_feature 1..20: note = chemically synthesized
  source 1..20: mol_type = other DNA
atcttcctcatctgtaaaat

SEQ ID NO: 61545 - DNA, 20 bp, synthetic construct
  misc_feature 1..20: note = chemically synthesized
  source 1..20: mol_type = other DNA
tcacactagtaactgccttg

SEQ ID NO: 61546 - DNA, 20 bp, synthetic construct
  misc_feature 1..20: note = chemically synthesized
  source 1..20: mol_type = other DNA
ctggtgcagagcgattattc

SEQ ID NO: 61547 - DNA, 20 bp, synthetic construct
  misc_feature 1..20: note = chemically synthesized
  source 1..20: mol_type = other DNA
caggaatgccagcttgagcc

SEQ ID NO: 61548 - DNA, 20 bp, synthetic construct
  misc_feature 1..20: note = chemically synthesized
  source 1..20: mol_type = other DNA
tgttcctggtcatatctgga

SEQ ID NO: 61549 - DNA, 20 bp, synthetic construct
  misc_feature 1..20: note = chemically synthesized
  source 1..20: mol_type = other DNA
ggtcatatctggaggggatg

SEQ ID NO: 61550 - DNA, 20 bp, synthetic construct
  misc_feature 1..20: note = chemically synthesized
  source 1..20: mol_type = other DNA
ttggctggtgtcccccatcc

SEQ ID NO: 61551 - DNA, 20 bp, synthetic construct
  misc_feature 1..20: note = chemically synthesized
  source 1..20: mol_type = other DNA
tctgccctgcacctcagcag

SEQ ID NO: 61552 - DNA, 20 bp, synthetic construct
  misc_feature 1..20: note = chemically synthesized
  source 1..20: mol_type = other DNA
tcctcgtccgtatttaagca

SEQ ID NO: 61553 - DNA, 20 bp, synthetic construct
  misc_feature 1..20: note = chemically synthesized
  source 1..20: mol_type = other DNA
ggcaacgggggaggctgctg

SEQ ID NO: 61554 - DNA, 20 bp, synthetic construct
  misc_feature 1..20: note = chemically synthesized
  source 1..20: mol_type = other DNA
caggggctaagtccactggc

SEQ ID NO: 61555 - DNA, 20 bp, synthetic construct
  misc_feature 1..20: note = chemically synthesized
  source 1..20: mol_type = other DNA
ctaagtccactggctgggat

SEQ ID NO: 61556 - DNA, 20 bp, synthetic construct
  misc_feature 1..20: note = chemically synthesized
  source 1..20: mol_type = other DNA
cttccactgcacttaccgaa

SEQ ID NO: 61557 - DNA, 20 bp, synthetic construct
  misc_feature 1..20: note = chemically synthesized
  source 1..20: mol_type = other DNA
cgtcctgtgtccaaggtgga

SEQ ID NO: 61558 - DNA, 20 bp, synthetic construct
  misc_feature 1..20: note = chemically synthesized
  source 1..20: mol_type = other DNA
tccaaggtggagggggtggc

SEQ ID NO: 61559 - DNA, 20 bp, synthetic construct
  misc_feature 1..20: note = chemically synthesized
  source 1..20: mol_type = other DNA
gtgagtcagacagtctctgg

SEQ ID NO: 61560 - DNA, 20 bp, synthetic construct
  misc_feature 1..20: note = chemically synthesized
  source 1..20: mol_type = other DNA
ctggccctctgctctcactg

SEQ ID NO: 61561 - DNA, 20 bp, synthetic construct
  misc_feature 1..20: note = chemically synthesized
  source 1..20: mol_type = other DNA
gtagcaagatctaccattta

SEQ ID NO: 61562 - DNA, 20 bp, synthetic construct
  misc_feature 1..20: note = chemically synthesized
  source 1..20: mol_type = other DNA
ttactgccgccctgggagat

SEQ ID NO: 61563 - DNA, 20 bp, synthetic construct
  misc_feature 1..20: note = chemically synthesized
  source 1..20: mol_type = other DNA
tgccgccctgggagatcaga

SEQ ID NO: 61564 - DNA, 20 bp, synthetic construct
  misc_feature 1..20: note = chemically synthesized
  source 1..20: mol_type = other DNA
tggcatggggggccgtgaga

SEQ ID NO: 61565 - DNA, 20 bp, synthetic construct
  misc_feature 1..20: note = chemically synthesized
  source 1..20: mol_type = other DNA
actgtttcacctgcatccca

SEQ ID NO: 61566 - DNA, 20 bp, synthetic construct
  misc_feature 1..20: note = chemically synthesized
  source 1..20: mol_type = other DNA
aagcatgcttgtgaagtgcc

SEQ ID NO: 61567 - DNA, 20 bp, synthetic construct
  misc_feature 1..20: note = chemically synthesized
  source 1..20: mol_type = other DNA
gcacacagtaggctctttat

SEQ ID NO: 61568 - DNA, 20 bp, synthetic construct
  misc_feature 1..20: note = chemically synthesized
  source 1..20: mol_type = other DNA
agtgtgatccgtatacagct

SEQ ID NO: 61569 - DNA, 20 bp, synthetic construct
  misc_feature 1..20: note = chemically synthesized
  source 1..20: mol_type = other DNA
gtatacagcttggagtttct

SEQ ID NO: 61570 - DNA, 20 bp, synthetic construct
  misc_feature 1..20: note = chemically synthesized
  source 1..20: mol_type = other DNA
tggatacatggcccccactc

SEQ ID NO: 61571 - DNA, 20 bp, synthetic construct
  misc_feature 1..20: note = chemically synthesized
  source 1..20: mol_type = other DNA
ggaggcctttggagactgct

SEQ ID NO: 61572 - DNA, 20 bp, synthetic construct
  misc_feature 1..20: note = chemically synthesized
  source 1..20: mol_type = other DNA
ggtggaggggaggggaggta

SEQ ID NO: 61573 - DNA, 20 bp, synthetic construct
  misc_feature 1..20: note = chemically synthesized
  source 1..20: mol_type = other DNA
gtacgtgccgtagatacttg

SEQ ID NO: 61574 - DNA, 20 bp, synthetic construct
  misc_feature 1..20: note = chemically synthesized
  source 1..20: mol_type = other DNA
gtgccgtagatacttgcaga

SEQ ID NO: 61575 - DNA, 20 bp, synthetic construct
  misc_feature 1..20: note = chemically synthesized
  source 1..20: mol_type = other DNA
cgtagatacttgcagagtga

SEQ ID NO: 61576 - DNA, 20 bp, synthetic construct
  misc_feature 1..20: note = chemically synthesized
  source 1..20: mol_type = other DNA
gatacttgcagagtgaatgg

SEQ ID NO: 61577 - DNA, 20 bp, synthetic construct
  misc_feature 1..20: note = chemically synthesized
  source 1..20: mol_type = other DNA
ccaccttggggctctaccag

SEQ ID NO: 61578 - DNA, 20 bp, synthetic construct
  misc_feature 1..20: note = chemically synthesized
  source 1..20: mol_type = other DNA
tctaccaggcgagtgaccca

SEQ ID NO: 61579 - DNA, 20 bp, synthetic construct
  misc_feature 1..20: note = chemically synthesized
  source 1..20: mol_type = other DNA
tactggctgtgaggcctcag

SEQ ID NO: 61580 - DNA, 20 bp, synthetic construct
  misc_feature 1..20: note = chemically synthesized
  source 1..20: mol_type = other DNA
aatttccctatctgtaaaat

SEQ ID NO: 61581 - DNA, 20 bp, synthetic construct
  misc_feature 1..20: note = chemically synthesized
  source 1..20: mol_type = other DNA
gtaccttgttgagctgctgt

SEQ ID NO: 61582 - DNA, 20 bp, synthetic construct
  misc_feature 1..20: note = chemically synthesized
  source 1..20: mol_type = other DNA
agttcaaggaaagctcagag

SEQ ID NO: 61583 - DNA, 20 bp, synthetic construct
  misc_feature 1..20: note = chemically synthesized
  source 1..20: mol_type = other DNA
ggaaagctcagagacgggta

SEQ ID NO: 61584 - DNA, 20 bp, synthetic construct
  misc_feature 1..20: note = chemically synthesized
  source 1..20: mol_type = other DNA
gtgtcaggggctggtgtcac

SEQ ID NO: 61585 - DNA, 20 bp, synthetic construct
  misc_feature 1..20: note = chemically synthesized
  source 1..20: mol_type = other DNA
aggggctggtgtcactgggg

SEQ ID NO: 61586 - DNA, 20 bp, synthetic construct
  misc_feature 1..20: note = chemically synthesized
  source 1..20: mol_type = other DNA
tcattcagttaccctgtgaa

SEQ ID NO: 61587 - DNA, 20 bp, synthetic construct
  misc_feature 1..20: note = chemically synthesized
  source 1..20: mol_type = other DNA
ctgtccttcccctgagctgg

SEQ ID NO: 61588 - DNA, 20 bp, synthetic construct
  misc_feature 1..20: note = chemically synthesized
  source 1..20: mol_type = other DNA
ccttcccctgagctggctga

SEQ ID NO: 61589 - DNA, 20 bp, synthetic construct
  misc_feature 1..20: note = chemically synthesized
  source 1..20: mol_type = other DNA
tgtccctcccacctgtggaa

SEQ ID NO: 61590 - DNA, 20 bp, synthetic construct
  misc_feature 1..20: note = chemically synthesized
  source 1..20: mol_type = other DNA
gtctcttctggcaggcacag

SEQ ID NO: 61591 - DNA, 20 bp, synthetic construct
  misc_feature 1..20: note = chemically synthesized
  source 1..20: mol_type = other DNA
aggttgccgcccctccaacc

SEQ ID NO: 61592 - DNA, 20 bp, synthetic construct
  misc_feature 1..20: note = chemically synthesized
  source 1..20: mol_type = other DNA
ttggttcagctcaggactct

SEQ ID NO: 61593 - DNA, 20 bp, synthetic construct
  misc_feature 1..20: note = chemically synthesized
  source 1..20: mol_type = other DNA
gcccacccaggaagtagact

SEQ ID NO: 61594 - DNA, 20 bp, synthetic construct
  misc_feature 1..20: note = chemically synthesized
  source 1..20: mol_type = other DNA
ggacaagtcaccctctccct

SEQ ID NO: 61595 - DNA, 20 bp, synthetic construct
  misc_feature 1..20: note = chemically synthesized
  source 1..20: mol_type = other DNA
aggtacagtcacactgccca

SEQ ID NO: 61596 - DNA, 20 bp, synthetic construct
  misc_feature 1..20: note = chemically synthesized
  source 1..20: mol_type = other DNA
gtgtgtgtcataggacctgg

SEQ ID NO: 61597 - DNA, 20 bp, synthetic construct
  misc_feature 1..20: note = chemically synthesized
  source 1..20: mol_type = other DNA
aggacctggctgggtgcaga

SEQ ID NO: 61598 - DNA, 20 bp, synthetic construct
  misc_feature 1..20: note = chemically synthesized
  source 1..20: mol_type = other DNA
ggagctggggcttttggagg

SEQ ID NO: 61599 - DNA, 20 bp, synthetic construct
  misc_feature 1..20: note = chemically synthesized
  source 1..20: mol_type = other DNA
ggaggaggaatgaagaaagc

SEQ ID NO: 61600 - DNA, 20 bp, synthetic construct
  misc_feature 1..20: note = chemically synthesized
  source 1..20: mol_type = other DNA
ggtgaggcaagtaaggggct

SEQ ID NO: 61601 - DNA, 20 bp, synthetic construct
  misc_feature 1..20: note = chemically synthesized
  source 1..20: mol_type = other DNA
caagtaaggggctcagaatt

SEQ ID NO: 61602 - DNA, 20 bp, synthetic construct
  misc_feature 1..20: note = chemically synthesized
  source 1..20: mol_type = other DNA
tccatcctgggaggaagggc

SEQ ID NO: 61603 - DNA, 20 bp, synthetic construct
  misc_feature 1..20: note = chemically synthesized
  source 1..20: mol_type = other DNA
acgcaccaggacaaaatccc

SEQ ID NO: 61604 - DNA, 20 bp, synthetic construct
  misc_feature 1..20: note = chemically synthesized
  source 1..20: mol_type = other DNA
atcccgggggttgtggtggg

SEQ ID NO: 61605 - DNA, 20 bp, synthetic construct
  misc_feature 1..20: note = chemically synthesized
  source 1..20: mol_type = other DNA
ggggttgtggtgggaggggt

SEQ ID NO: 61606 - DNA, 20 bp, synthetic construct
  misc_feature 1..20: note = chemically synthesized
  source 1..20: mol_type = other DNA
agtactcagtggccattcac

SEQ ID NO: 61607 - DNA, 20 bp, synthetic construct
  misc_feature 1..20: note = chemically synthesized
  source 1..20: mol_type = other DNA
gaagatcctgtgagctggtc

SEQ ID NO: 61608 - DNA, 20 bp, synthetic construct
  misc_feature 1..20: note = chemically synthesized
  source 1..20: mol_type = other DNA
tgggagcctcgtggtatggg

SEQ ID NO: 61609 - DNA, 20 bp, synthetic construct
  misc_feature 1..20: note = chemically synthesized
  source 1..20: mol_type = other DNA
cctcgtggtatgggctggat

SEQ ID NO: 61610 - DNA, 20 bp, synthetic construct
  misc_feature 1..20: note = chemically synthesized
  source 1..20: mol_type = other DNA
tatgggctggatagggatgt

SEQ ID NO: 61611 - DNA, 20 bp, synthetic construct
  misc_feature 1..20: note = chemically synthesized
  source 1..20: mol_type = other DNA
gggatgtgagagtcgagatt

SEQ ID NO: 61612 - DNA, 20 bp, synthetic construct
  misc_feature 1..20: note = chemically synthesized
  source 1..20: mol_type = other DNA
gagatttggggtctgcagca

SEQ ID NO: 61613 - DNA, 20 bp, synthetic construct
  misc_feature 1..20: note = chemically synthesized
  source 1..20: mol_type = other DNA
ttggggtctgcagcaaggaa

SEQ ID NO: 61614 - DNA, 20 bp, synthetic construct
  misc_feature 1..20: note = chemically synthesized
  source 1..20: mol_type = other DNA
tgcagcaaggaatcgggtaa

SEQ ID NO: 61615 - DNA, 20 bp, synthetic construct
  misc_feature 1..20: note = chemically synthesized
  source 1..20: mol_type = other DNA
ctgggccaagtaaatcaaga

SEQ ID NO: 61616 - DNA, 20 bp, synthetic construct
  misc_feature 1..20: note = chemically synthesized
  source 1..20: mol_type = other DNA
tcattggcaaagtgcccccg

SEQ ID NO: 61617 - DNA, 20 bp, synthetic construct
  misc_feature 1..20: note = chemically synthesized
  source 1..20: mol_type = other DNA
aggcaccagcttccttcttt

SEQ ID NO: 61618 - DNA, 20 bp, synthetic construct
  misc_feature 1..20: note = chemically synthesized
  source 1..20: mol_type = other DNA
tgcaggtcactggttaaggc

SEQ ID NO: 61619 - DNA, 20 bp, synthetic construct
  misc_feature 1..20: note = chemically synthesized
  source 1..20: mol_type = other DNA
cactggttaaggcgtgggtt

SEQ ID NO: 61620 - DNA, 20 bp, synthetic construct
  misc_feature 1..20: note = chemically synthesized
  source 1..20: mol_type = other DNA
tgagataggaagactctaag

SEQ ID NO: 61621 - DNA, 20 bp, synthetic construct
  misc_feature 1..20: note = chemically synthesized
  source 1..20: mol_type = other DNA
ttccatcaggactgtgaaga

SEQ ID NO: 61622 - DNA, 20 bp, synthetic construct
  misc_feature 1..20: note = chemically synthesized
  source 1..20: mol_type = other DNA
caccaaaggccatgaccttt

SEQ ID NO: 61623 - DNA, 20 bp, synthetic construct
  misc_feature 1..20: note = chemically synthesized
  source 1..20: mol_type = other DNA
ggctctgaaaaaccatatag

SEQ ID NO: 61624 - DNA, 20 bp, synthetic construct
  misc_feature 1..20: note = chemically synthesized
  source 1..20: mol_type = other DNA
aaaccatatagatgggtctc

SEQ ID NO: 61625 - DNA, 20 bp, synthetic construct
  misc_feature 1..20: note = chemically synthesized
  source 1..20: mol_type = other DNA
ctgagcacctgtgacatgca

SEQ ID NO: 61626 - DNA, 20 bp, synthetic construct
  misc_feature 1..20: note = chemically synthesized
  source 1..20: mol_type = other DNA
cctgtgacatgcagaggatg

SEQ ID NO: 61627 - DNA, 20 bp, synthetic construct
  misc_feature 1..20: note = chemically synthesized
  source 1..20: mol_type = other DNA
gtgactgcagctaggtggac

SEQ ID NO: 61628 - DNA, 20 bp, synthetic construct
  misc_feature 1..20: note = chemically synthesized
  source 1..20: mol_type = other DNA
ggtttcctcatctataaaat

SEQ ID NO: 61629 - DNA, 20 bp, synthetic construct
  misc_feature 1..20: note = chemically synthesized
  source 1..20: mol_type = other DNA
cttagatgaggcgatgctgg

SEQ ID NO: 61630 - DNA, 20 bp, synthetic construct
  misc_feature 1..20: note = chemically synthesized
  source 1..20: mol_type = other DNA
gtcttcttataactcattta

SEQ ID NO: 61631 - DNA, 20 bp, synthetic construct
  misc_feature 1..20: note = chemically synthesized
  source 1..20: mol_type = other DNA
tcttataactcatttaatga

SEQ ID NO: 61632 - DNA, 20 bp, synthetic construct
  misc_feature 1..20: note = chemically synthesized
  source 1..20: mol_type = other DNA
tgtgtgttggggaggggagg

SEQ ID NO: 61633 - DNA, 20 bp, synthetic construct
  misc_feature 1..20: note = chemically synthesized
  source 1..20: mol_type = other DNA
ttttttttttttttttgaga

SEQ ID NO: 61634 - DNA, 20 bp, synthetic construct
  misc_feature 1..20: note = chemically synthesized
  source 1..20: mol_type = other DNA
tctcactcagtcacccaggc

SEQ ID NO: 61635 - DNA, 20 bp, synthetic construct
  misc_feature 1..20: note = chemically synthesized
  source 1..20: mol_type = other DNA
cttactgcaaactccacctc

SEQ ID NO: 61636 - DNA, 20 bp, synthetic construct
  misc_feature 1..20: note = chemically synthesized
  source 1..20: mol_type = other DNA
aaactccacctctcgaattc

SEQ ID NO: 61637 - DNA, 20 bp, synthetic construct
  misc_feature 1..20: note = chemically synthesized
  source 1..20: mol_type = other DNA
gattctcgtgcctcagcctc

SEQ ID NO: 61638 - DNA, 20 bp, synthetic construct
  misc_feature 1..20: note = chemically synthesized
  source 1..20: mol_type = other DNA
ttttgtatttttagtagtga

SEQ ID NO: 61639 - DNA, 20 bp, synthetic construct
  misc_feature 1..20: note = chemically synthesized
  source 1..20: mol_type = other DNA
gcctcggcctcccaaagtgc

SEQ ID NO: 61640 - DNA, 20 bp, synthetic construct
  misc_feature 1..20: note = chemically synthesized
  source 1..20: mol_type = other DNA
ggggcaacatagttaaaaga

SEQ ID NO: 61641 - DNA, 20 bp, synthetic construct
  misc_feature 1..20: note = chemically synthesized
  source 1..20: mol_type = other DNA
tatgggccttgatggtcatt

SEQ ID NO: 61642 - DNA, 20 bp, synthetic construct
  misc_feature 1..20: note = chemically synthesized
  source 1..20: mol_type = other DNA
cttgccccaagacatggcac

SEQ ID NO: 61643 - DNA, 20 bp, synthetic construct
  misc_feature 1..20: note = chemically synthesized
  source 1..20: mol_type = other DNA
ttcagaaatacatgccctgc

SEQ ID NO: 61644 - DNA, 20 bp, synthetic construct
  misc_feature 1..20: note = chemically synthesized
  source 1..20: mol_type = other DNA
cccacgcagggcatgtattt

SEQ ID NO: 61645 - DNA, 20 bp, synthetic construct
  misc_feature 1..20: note = chemically synthesized
  source 1..20: mol_type = other DNA
taataagccctcaagtcctg

SEQ ID NO: 61646 - DNA, 20 bp, synthetic construct
  misc_feature 1..20: note = chemically synthesized
  source 1..20: mol_type = other DNA
gtctcccatagtccccacgc

SEQ ID NO: 61647 - DNA, 20 bp, synthetic construct
  misc_feature 1..20: note = chemically synthesized
  source 1..20: mol_type = other DNA
cccatagtccccacgcaagg

SEQ ID NO: 61648 - DNA, 20 bp, synthetic construct
  misc_feature 1..20: note = chemically synthesized
  source 1..20: mol_type = other DNA
acatcagcagagattgtcaa

SEQ ID NO: 61649 - DNA, 20 bp, synthetic construct
  misc_feature 1..20: note = chemically synthesized
  source 1..20: mol_type = other DNA
gggataaagagataacttaa

SEQ ID NO: 61650 - DNA, 20 bp, synthetic construct
  misc_feature 1..20: note = chemically synthesized
  source 1..20: mol_type = other DNA
ttatagttcaataggacaca

SEQ ID NO: 61651 - DNA, 20 bp, synthetic construct
  misc_feature 1..20: note = chemically synthesized
  source 1..20: mol_type = other DNA
atcaaggcccataacctcaa

SEQ ID NO: 61652 - DNA, 20 bp, synthetic construct
  misc_feature 1..20: note = chemically synthesized
  source 1..20: mol_type = other DNA
aaggttagctgcaataaaac

SEQ ID NO: 61653 - DNA, 20 bp, synthetic construct
  misc_feature 1..20: note = chemically synthesized
  source 1..20: mol_type = other DNA
tttagtaattttaacaagaa

SEQ ID NO: 61654 - DNA, 20 bp, synthetic construct
  misc_feature 1..20: note = chemically synthesized
  source 1..20: mol_type = other DNA
tttgccttatttttctctgt

SEQ ID NO: 61655 - DNA, 20 bp, synthetic construct
  misc_feature 1..20: note = chemically synthesized
  source 1..20: mol_type = other DNA
ttatttttctctgtctgagt

SEQ ID NO: 61656 - DNA, 20 bp, synthetic construct
  misc_feature 1..20: note = chemically synthesized
  source 1..20: mol_type = other DNA
tctctgtctgagtaaggata

SEQ ID NO: 61657 - DNA, 20 bp, synthetic construct
  misc_feature 1..20: note = chemically synthesized
  source 1..20: mol_type = other DNA
cgggcagataacttgaggcc

SEQ ID NO: 61658 - DNA, 20 bp, synthetic construct
  misc_feature 1..20: note = chemically synthesized
  source 1..20: mol_type = other DNA
ctaaaaatacaaaaattaac

SEQ ID NO: 61659 - DNA, 20 bp, synthetic construct
  misc_feature 1..20: note = chemically synthesized
  source 1..20: mol_type = other DNA
tactctggaggctgaggcac

SEQ ID NO: 61660 - DNA, 20 bp, synthetic construct
  misc_feature 1..20: note = chemically synthesized
  source 1..20: mol_type = other DNA
acgagaatcgctcgtaattc

SEQ ID NO: 61661 - DNA, 20 bp, synthetic construct
  misc_feature 1..20: note = chemically synthesized
  source 1..20: mol_type = other DNA
taattccagaattcgagagg

SEQ ID NO: 61662 - DNA, 20 bp, synthetic construct
  misc_feature 1..20: note = chemically synthesized
  source 1..20: mol_type = other DNA
ttgcgccactgtactccagc

SEQ ID NO: 61663 - DNA, 20 bp, synthetic construct
  misc_feature 1..20: note = chemically synthesized
  source 1..20: mol_type = other DNA
ctgtactccagcctgggtga

SEQ ID NO: 61664 - DNA, 20 bp, synthetic construct
  misc_feature 1..20: note = chemically synthesized
  source 1..20: mol_type = other DNA
aaaaaaaaaaagaagaagct

SEQ ID NO: 61665 - DNA, 20 bp, synthetic construct
  misc_feature 1..20: note = chemically synthesized
  source 1..20: mol_type = other DNA
cagaaggaaagtgtgtctgc

SEQ ID NO: 61666 - DNA, 20 bp, synthetic construct
  misc_feature 1..20: note = chemically synthesized
  source 1..20: mol_type = other DNA
aaacttcattcattcattaa

SEQ ID NO: 61667 - DNA, 20 bp, synthetic construct
  misc_feature 1..20: note = chemically synthesized
  source 1..20: mol_type = other DNA
cagagaactgagggcctccc

SEQ ID NO: 61668 - DNA, 20 bp, synthetic construct
  misc_feature 1..20: note = chemically synthesized
  source 1..20: mol_type = other DNA
atgagcacggcccctaaaga

SEQ ID NO: 61669 - DNA, 20 bp, synthetic construct
  misc_feature 1..20: note = chemically synthesized
  source 1..20: mol_type = other DNA
tttctggaaaaaatggaagt

SEQ ID NO: 61670 - DNA, 20 bp, synthetic construct
  misc_feature 1..20: note = chemically synthesized
  source 1..20: mol_type = other DNA
ctgatggaagtgactcttct

SEQ ID NO: 61671 - DNA, 20 bp, synthetic construct
  misc_feature 1..20: note = chemically synthesized
  source 1..20: mol_type = other DNA
ggaagctggtgcctgggaag

SEQ ID NO: 61672 - DNA, 20 bp, synthetic construct
  misc_feature 1..20: note = chemically synthesized
  source 1..20: mol_type = other DNA
tgggaaggagggtgcatagt

SEQ ID NO: 61673 - DNA, 20 bp, synthetic construct
  misc_feature 1..20: note = chemically synthesized
  source 1..20: mol_type = other DNA
gtgcatagtgagggtgtgca

SEQ ID NO: 61674 - DNA, 20 bp, synthetic construct
  misc_feature 1..20: note = chemically synthesized
  source 1..20: mol_type = other DNA
gcatggggtgtgtgtgtttg

SEQ ID NO: 61675 - DNA, 20 bp, synthetic construct
  misc_feature 1..20: note = chemically synthesized
  source 1..20: mol_type = other DNA
tctccgggggcactttgcca

SEQ ID NO: 61676 - DNA, 20 bp, synthetic construct
  misc_feature 1..20: note = chemically synthesized
  source 1..20: mol_type = other DNA
ccttactcatgaccagctca

SEQ ID NO: 61677 - DNA, 20 bp, synthetic construct
  misc_feature 1..20: note = chemically synthesized
  source 1..20: mol_type = other DNA
ccatgatgcatttcctctgg

SEQ ID NO: 61678 - DNA, 20 bp, synthetic construct
  misc_feature 1..20: note = chemically synthesized
  source 1..20: mol_type = other DNA
agactttccccctcatgtcc

SEQ ID NO: 61679 - DNA, 20 bp, synthetic construct
  misc_feature 1..20: note = chemically synthesized
  source 1..20: mol_type = other DNA
cctgggggcacagtatcctt

SEQ ID NO: 61680 - DNA, 20 bp, synthetic construct
  misc_feature 1..20: note = chemically synthesized
  source 1..20: mol_type = other DNA
agtatccttgtgaatggcca

SEQ ID NO: 61681 - DNA, 20 bp, synthetic construct
  misc_feature 1..20: note = chemically synthesized
  source 1..20: mol_type = other DNA
acccctcccaccacaacccc

SEQ ID NO: 61682 - DNA, 20 bp, synthetic construct
  misc_feature 1..20: note = chemically synthesized
  source 1..20: mol_type = other DNA
attatcctagcccttcctcc

SEQ ID NO: 61683 - DNA, 20 bp, synthetic construct
  misc_feature 1..20: note = chemically synthesized
  source 1..20: mol_type = other DNA
tcctagcccttcctcccagg

SEQ ID NO: 61684 - DNA, 20 bp, synthetic construct
  misc_feature 1..20: note = chemically synthesized
  source 1..20: mol_type = other DNA
cttgcggcaactcaaaggga

SEQ ID NO: 61685 - DNA, 20 bp, synthetic construct
  misc_feature 1..20: note = chemically synthesized
  source 1..20: mol_type = other DNA
aagggagagggtgacttgtc

SEQ ID NO: 61686 - DNA, 20 bp, synthetic construct
  misc_feature 1..20: note = chemically synthesized
  source 1..20: mol_type = other DNA
caggtgacatgccgggctgt

SEQ ID NO: 61687 - DNA, 20 bp, synthetic construct
  misc_feature 1..20: note = chemically synthesized
  source 1..20: mol_type = other DNA
ctccacccgaagtctacttc

SEQ ID NO: 61688 - DNA, 20 bp, synthetic construct
  misc_feature 1..20: note = chemically synthesized
  source 1..20: mol_type = other DNA
tgcctccacgcagcaaccct

SEQ ID NO: 61689 - DNA, 20 bp, synthetic construct
  misc_feature 1..20: note = chemically synthesized
  source 1..20: mol_type = other DNA
agctgaaccaagaaggagga

SEQ ID NO: 61690 - DNA, 20 bp, synthetic construct
  misc_feature 1..20: note = chemically synthesized
  source 1..20: mol_type = other DNA
gcctagccgctgctgctgcc

SEQ ID NO: 61691 - DNA, 20 bp, synthetic construct
  misc_feature 1..20: note = chemically synthesized
  source 1..20: mol_type = other DNA
gtgggagggacagcagggct

SEQ ID NO: 61692 - DNA, 20 bp, synthetic construct
  misc_feature 1..20: note = chemically synthesized
  source 1..20: mol_type = other DNA
gggacagcagggcttagagt

SEQ ID NO: 61693 - DNA, 20 bp, synthetic construct
  misc_feature 1..20: note = chemically synthesized
  source 1..20: mol_type = other DNA
cacagcccagtgctggagct

SEQ ID NO: 61694 - DNA, 20 bp, synthetic construct
  misc_feature 1..20: note = chemically synthesized
  source 1..20: mol_type = other DNA
gcccagtgctggagctgtga

SEQ ID NO: 61695 - DNA, 20 bp, synthetic construct
  misc_feature 1..20: note = chemically synthesized
  source 1..20: mol_type = other DNA
tgtgagtggatgtagagcag

SEQ ID NO: 61696 - DNA, 20 bp, synthetic construct
  misc_feature 1..20: note = chemically synthesized
  source 1..20: mol_type = other DNA
ggacaggggccctgaagcca

SEQ ID NO: 61697 - DNA, 20 bp, synthetic construct
  misc_feature 1..20: note = chemically synthesized
  source 1..20: mol_type = other DNA
gagctcagagagaaggggag

SEQ ID NO: 61698 - DNA, 20 bp, synthetic construct
  misc_feature 1..20: note = chemically synthesized
  source 1..20: mol_type = other DNA
agtttcccgctgcctgaaag

SEQ ID NO: 61699 - DNA, 20 bp, synthetic construct
  misc_feature 1..20: note = chemically synthesized
  source 1..20: mol_type = other DNA
ggtggtacctactcccttca

SEQ ID NO: 61700 - DNA, 20 bp, synthetic construct
  misc_feature 1..20: note = chemically synthesized
  source 1..20: mol_type = other DNA
ctactcccttcacagggtaa

SEQ ID NO: 61701 - DNA, 20 bp, synthetic construct
  misc_feature 1..20: note = chemically synthesized
  source 1..20: mol_type = other DNA
tgaggcctcacagccagtaa

SEQ ID NO: 61702 - DNA, 20 bp, synthetic construct
  misc_feature 1..20: note = chemically synthesized
  source 1..20: mol_type = other DNA
cagtaagtgggttccctggt

SEQ ID NO: 61703 - DNA, 20 bp, synthetic construct
  misc_feature 1..20: note = chemically synthesized
  source 1..20: mol_type = other DNA
tggtctgaatgtgtgtgctg

SEQ ID NO: 61704 - DNA, 20 bp, synthetic construct
  misc_feature 1..20: note = chemically synthesized
  source 1..20: mol_type = other DNA
tgtgtgtgctggaggatcct

SEQ ID NO: 61705 - DNA, 20 bp, synthetic construct
  misc_feature 1..20: note = chemically synthesized
  source 1..20: mol_type = other DNA
tggaggcataaatgggactg

SEQ ID NO: 61706 - DNA, 20 bp, synthetic construct
  misc_feature 1..20: note = chemically synthesized
  source 1..20: mol_type = other DNA
gccagctcccaagcaggttt

SEQ ID NO: 61707 - DNA, 20 bp, synthetic construct
  misc_feature 1..20: note = chemically synthesized
  source 1..20: mol_type = other DNA
aatctgatttaggcttttaa

SEQ ID NO: 61708 - DNA, 20 bp, synthetic construct
  misc_feature 1..20: note = chemically synthesized
  source 1..20: mol_type = other DNA
ccaaaggcctccaacaaccc

SEQ ID NO: 61709 - DNA, 20 bp, synthetic construct
  misc_feature 1..20: note = chemically synthesized
  source 1..20: mol_type = other DNA
aaagaaactccaagctgtat

SEQ ID NO: 61710 - DNA, 20 bp, synthetic construct
  misc_feature 1..20: note = chemically synthesized
  source 1..20: mol_type = other DNA
ggcacttcacaagcatgctt

SEQ ID NO: 61711 - DNA, 20 bp, synthetic construct
  misc_feature 1..20: note = chemically synthesized
  source 1..20: mol_type = other DNA
gaatgaaacttccaactctt

SEQ ID NO: 61712 - DNA, 20 bp, synthetic construct
  misc_feature 1..20: note = chemically synthesized
  source 1..20: mol_type = other DNA
ttttccatcgggaccatcaa

SEQ ID NO: 61713 - DNA, 20 bp, synthetic construct
  misc_feature 1..20: note = chemically synthesized
  source 1..20: mol_type = other DNA
gtgtttgtgtctaaggctga

SEQ ID NO: 61714 - DNA, 20 bp, synthetic construct
  misc_feature 1..20: note = chemically synthesized
  source 1..20: mol_type = other DNA
ctaaggctgactgggtaact

SEQ ID NO: 61715 - DNA, 20 bp, synthetic construct
  misc_feature 1..20: note = chemically synthesized
  source 1..20: mol_type = other DNA
gtcttcagcatcaggcattt

SEQ ID NO: 61716 - DNA, 20 bp, synthetic construct
  misc_feature 1..20: note = chemically synthesized
  source 1..20: mol_type = other DNA
ctaccagtggaacagccact

SEQ ID NO: 61717 - DNA, 20 bp, synthetic construct
  misc_feature 1..20: note = chemically synthesized
  source 1..20: mol_type = other DNA
ctgtttgctcctccgataac

SEQ ID NO: 61718 - DNA, 20 bp, synthetic construct
  misc_feature 1..20: note = chemically synthesized
  source 1..20: mol_type = other DNA
cagcctcccccgttgcccct

SEQ ID NO: 61719 - DNA, 20 bp, synthetic construct
  misc_feature 1..20: note = chemically synthesized
  source 1..20: mol_type = other DNA
accaccactgacctgggaca

SEQ ID NO: 61720 - DNA, 20 bp, synthetic construct
  misc_feature 1..20: note = chemically synthesized
  source 1..20: mol_type = other DNA
cagcaggtctggggcaggag

SEQ ID NO: 61721 - DNA, 20 bp, synthetic construct
  misc_feature 1..20: note = chemically synthesized
  source 1..20: mol_type = other DNA
ctggggcaggaggggggttg

SEQ ID NO: 61722 - DNA, 20 bp, synthetic construct
  misc_feature 1..20: note = chemically synthesized
  source 1..20: mol_type = other DNA
ggcaggaggggggttgtgga

SEQ ID NO: 61723 - DNA, 20 bp, synthetic construct
  misc_feature 1..20: note = chemically synthesized
  source 1..20: mol_type = other DNA
ttcataataacagcagccat

SEQ ID NO: 61724 - DNA, 20 bp, synthetic construct
  misc_feature 1..20: note = chemically synthesized
  source 1..20: mol_type = other DNA
tcccccctcggtacctcctg

SEQ ID NO: 61725 - DNA, 20 bp, synthetic construct
  misc_feature 1..20: note = chemically synthesized
  source 1..20: mol_type = other DNA
actggttcctgtaagcagaa

SEQ ID NO: 61726 - DNA, 20 bp, synthetic construct
  misc_feature 1..20: note = chemically synthesized
  source 1..20: mol_type = other DNA
tcctgtaagcagaagtggat

SEQ ID NO: 61727 - DNA, 20 bp, synthetic construct
  misc_feature 1..20: note = chemically synthesized
  source 1..20: mol_type = other DNA
ggtctgcagtcctggcaccc

SEQ ID NO: 61728 - DNA, 20 bp, synthetic construct
  misc_feature 1..20: note = chemically synthesized
  source 1..20: mol_type = other DNA
gaggaggttaaggtccagag

SEQ ID NO: 61729 - DNA, 20 bp, synthetic construct
  misc_feature 1..20: note = chemically synthesized
  source 1..20: mol_type = other DNA
cagggctcaagctggcattc

SEQ ID NO: 61730 - DNA, 20 bp, synthetic construct
  misc_feature 1..20: note = chemically synthesized
  source 1..20: mol_type = other DNA
aggaagatggggacagagag

SEQ ID NO: 61731 - DNA, 20 bp, synthetic construct
  misc_feature 1..20: note = chemically synthesized
  source 1..20: mol_type = other DNA
ccctagtgtcactgtttctc

SEQ ID NO: 61732 - DNA, 20 bp, synthetic construct
  misc_feature 1..20: note = chemically synthesized
  source 1..20: mol_type = other DNA
tttctcttgggtctcaggcg

SEQ ID NO: 61733 - DNA, 20 bp, synthetic construct
  misc_feature 1..20: note = chemically synthesized
  source 1..20: mol_type = other DNA
cttgatctctgaagtgttgg

SEQ ID NO: 61734 - DNA, 20 bp, synthetic construct
  misc_feature 1..20: note = chemically synthesized
  source 1..20: mol_type = other DNA
aggatttaatttttcctgca

SEQ ID NO: 61735 - DNA, 20 bp, synthetic construct
  misc_feature 1..20: note = chemically synthesized
  source 1..20: mol_type = other DNA
gatgattcaatgtcaggttt

SEQ ID NO: 61736 - DNA, 20 bp, synthetic construct
  misc_feature 1..20: note = chemically synthesized
  source 1..20: mol_type = other DNA
ttaatcccagacaaaacatt

SEQ ID NO: 61737 - DNA, 20 bp, synthetic construct
  misc_feature 1..20: note = chemically synthesized
  source 1..20: mol_type = other DNA
aagtagctctgtgattttta

SEQ ID NO: 61738 - DNA, 20 bp, synthetic construct
  misc_feature 1..20: note = chemically synthesized
  source 1..20: mol_type = other DNA
ggctaataatttgcacctta

SEQ ID NO: 61739 - DNA, 20 bp, synthetic construct
  misc_feature 1..20: note = chemically synthesized
  source 1..20: mol_type = other DNA
aggctgatgtttgcttagca

SEQ ID NO: 61740 - DNA, 20 bp, synthetic construct
  misc_feature 1..20: note = chemically synthesized
  source 1..20: mol_type = other DNA
agctggcaggcagtaaacag

SEQ ID NO: 61741 - DNA, 20 bp, synthetic construct
  misc_feature 1..20: note = chemically synthesized
  source 1..20: mol_type = other DNA
ttcctgctgaaatggtcctg

SEQ ID NO: 61742 - DNA, 20 bp, synthetic construct
  misc_feature 1..20: note = chemically synthesized
  source 1..20: mol_type = other DNA
ttattcctcatccctgtcca

SEQ ID NO: 61743 - DNA, 20 bp, synthetic construct
  misc_feature 1..20: note = chemically synthesized
  source 1..20: mol_type = other DNA
gtgacagggcctggtcacac

SEQ ID NO: 61744 - DNA, 20 bp, synthetic construct
  misc_feature 1..20: note = chemically synthesized
  source 1..20: mol_type = other DNA
attctcttccctgcaccctg

SEQ ID NO: 61745 - DNA, 20 bp, synthetic construct
  misc_feature 1..20: note = chemically synthesized
  source 1..20: mol_type = other DNA
tggtcccttattttatgctc

SEQ ID NO: 61746 - DNA, 20 bp, synthetic construct
  misc_feature 1..20: note = chemically synthesized
  source 1..20: mol_type = other DNA
aaatggtgtgagattaggca

SEQ ID NO: 61747 - DNA, 20 bp, synthetic construct
  misc_feature 1..20: note = chemically synthesized
  source 1..20: mol_type = other DNA
tccctgtccctggccccgca

SEQ ID NO: 61748 - DNA, 20 bp, synthetic construct
  misc_feature 1..20: note = chemically synthesized
  source 1..20: mol_type = other DNA
gcctcagtgtccgtacacca

SEQ ID NO: 61749 - DNA, 20 bp, synthetic construct
  misc_feature 1..20: note = chemically synthesized
  source 1..20: mol_type = other DNA
cctcccaggcactagctttt

SEQ ID NO: 61750 - DNA, 20 bp, synthetic construct
  misc_feature 1..20: note = chemically synthesized
  source 1..20: mol_type = other DNA
ggcactagcttttaggagtg

SEQ ID NO: 61751 - DNA, 20 bp, synthetic construct
  misc_feature 1..20: note = chemically synthesized
  source 1..20: mol_type = other DNA
ggccaggagagagcaggttt

SEQ ID NO: 61752 - DNA, 20 bp, synthetic construct
  misc_feature 1..20: note = chemically synthesized
  source 1..20: mol_type = other DNA
cagctgtctcagttcatgat

SEQ ID NO: 61753 - DNA, 20 bp, synthetic construct
  misc_feature 1..20: note = chemically synthesized
  source 1..20: mol_type = other DNA
tcactgtgaaaggaggaaac

SEQ ID NO: 61754 - DNA, 20 bp, synthetic construct
  misc_feature 1..20: note = chemically synthesized
  source 1..20: mol_type = other DNA
gtgatgtgacaccaggaaag

SEQ ID NO: 61755 - DNA, 20 bp, synthetic construct
  misc_feature 1..20: note = chemically synthesized
  source 1..20: mol_type = other DNA
tgtgacaccaggaaagatgg

SEQ ID NO: 61756 - DNA, 20 bp, synthetic construct
  misc_feature 1..20: note = chemically synthesized
  source 1..20: mol_type = other DNA
ggaaagatggatgggtgtgg

SEQ ID NO: 61757 - DNA, 20 bp, synthetic construct
  misc_feature 1..20: note = chemically synthesized
  source 1..20: mol_type = other DNA
ctctccacctcctttgagcc

SEQ ID NO: 61758 - DNA, 20 bp, synthetic construct
  misc_feature 1..20: note = chemically synthesized
  source 1..20: mol_type = other DNA
cctgtctcatgcctagccat

SEQ ID NO: 61759 - DNA, 20 bp, synthetic construct
  misc_feature 1..20: note = chemically synthesized
  source 1..20: mol_type = other DNA
acccagatgccattctaacc

SEQ ID NO: 61760 - DNA, 20 bp, synthetic construct
  misc_feature 1..20: note = chemically synthesized
  source 1..20: mol_type = other DNA
attctaaccaagaatcctgg

SEQ ID NO: 61761 - DNA, 20 bp, synthetic construct
  misc_feature 1..20: note = chemically synthesized
  source 1..20: mol_type = other DNA
actttgggaggccaaggcag

SEQ ID NO: 61762 - DNA, 20 bp, synthetic construct
  misc_feature 1..20: note = chemically synthesized
  source 1..20: mol_type = other DNA
ggcaggcggatcaagaggtc

SEQ ID NO: 61763 - DNA, 20 bp, synthetic construct
  misc_feature 1..20: note = chemically synthesized
  source 1..20: mol_type = other DNA
tatttgggaagctgagacag

SEQ ID NO: 61764 - DNA, 20 bp, synthetic construct
  misc_feature 1..20: note = chemically synthesized
  source 1..20: mol_type = other DNA
ccccactttgcacaactggg

SEQ ID NO: 61765 - DNA, 20 bp, synthetic construct
  misc_feature 1..20: note = chemically synthesized
  source 1..20: mol_type = other DNA
agagtgaggccccaggacca

SEQ ID NO: 61766 - DNA, 20 bp, synthetic construct
  misc_feature 1..20: note = chemically synthesized
  source 1..20: mol_type = other DNA
ggattcttgctaaaggccaa

SEQ ID NO: 61767 - DNA, 20 bp, synthetic construct
  misc_feature 1..20: note = chemically synthesized
  source 1..20: mol_type = other DNA
actgagccctgtaatgatgg

SEQ ID NO: 61768 - DNA, 20 bp, synthetic construct
  misc_feature 1..20: note = chemically synthesized
  source 1..20: mol_type = other DNA
taatgtgtggtctgttccat

SEQ ID NO: 61769 - DNA, 20 bp, synthetic construct
  misc_feature 1..20: note = chemically synthesized
  source 1..20: mol_type = other DNA
ggaaacttttaaaagtccaa

SEQ ID NO: 61770 - DNA, 20 bp, synthetic construct
  misc_feature 1..20: note = chemically synthesized
  source 1..20: mol_type = other DNA
ttaaaagtccaagggggttg

SEQ ID NO: 61771 - DNA, 20 bp, synthetic construct
  misc_feature 1..20: note = chemically synthesized
  source 1..20: mol_type = other DNA
gtccgaagcctgggcatatc

SEQ ID NO: 61772 - DNA, 20 bp, synthetic construct
  misc_feature 1..20: note = chemically synthesized
  source 1..20: mol_type = other DNA
cctgggcatatctggagtag

SEQ ID NO: 61773 - DNA, 20 bp, synthetic construct
  misc_feature 1..20: note = chemically synthesized
  source 1..20: mol_type = other DNA
agggcaggttctgtgttgct

SEQ ID NO: 61774 - DNA, 20 bp, synthetic construct
  misc_feature 1..20: note = chemically synthesized
  source 1..20: mol_type = other DNA
cactccctattgtctcagcc

SEQ ID NO: 61775 - DNA, 20 bp, synthetic construct
  misc_feature 1..20: note = chemically synthesized
  source 1..20: mol_type = other DNA
tggcctatcacctgaagcct

SEQ ID NO: 61776 - DNA, 20 bp, synthetic construct
  misc_feature 1..20: note = chemically synthesized
  source 1..20: mol_type = other DNA
cctgccaacccctccctcaa

SEQ ID NO: 61777 - DNA, 20 bp, synthetic construct
  misc_feature 1..20: note = chemically synthesized
  source 1..20: mol_type = other DNA
gcaaaatgaggaccagggag

SEQ ID NO: 61778 - DNA, 20 bp, synthetic construct
  misc_feature 1..20: note = chemically synthesized
  source 1..20: mol_type = other DNA
ctcatacacctggaaagtga

SEQ ID NO: 61779 - DNA, 20 bp, synthetic construct
  misc_feature 1..20: note = chemically synthesized
  source 1..20: mol_type = other DNA
ggaaaaaaaccctaagggct

SEQ ID NO: 61780 - DNA, 20 bp, synthetic construct
  misc_feature 1..20: note = chemically synthesized
  source 1..20: mol_type = other DNA
cctaagggctgaggatcctt

SEQ ID NO: 61781 - DNA, 20 bp, synthetic construct
  misc_feature 1..20: note = chemically synthesized
  source 1..20: mol_type = other DNA
gctgaggatccttgtgagtg

SEQ ID NO: 61782 - DNA, 20 bp, synthetic construct
  misc_feature 1..20: note = chemically synthesized
  source 1..20: mol_type = other DNA
tttccctggccactaaatag

SEQ ID NO: 61783 - DNA, 20 bp, synthetic construct
  misc_feature 1..20: note = chemically synthesized
  source 1..20: mol_type = other DNA
attctgatctggcccgattc

SEQ ID NO: 61784 - DNA, 20 bp, synthetic construct
  misc_feature 1..20: note = chemically synthesized
  source 1..20: mol_type = other DNA
tggctgtaccatttgcatct

SEQ ID NO: 61785 - DNA, 20 bp, synthetic construct
  misc_feature 1..20: note = chemically synthesized
  source 1..20: mol_type = other DNA
taagtgttgctgtccagagc

SEQ ID NO: 61786 - DNA, 20 bp, synthetic construct
  misc_feature 1..20: note = chemically synthesized
  source 1..20: mol_type = other DNA
ctgggtgcaggacctagatg

SEQ ID NO: 61787 - DNA, 20 bp, synthetic construct
  misc_feature 1..20: note = chemically synthesized
  source 1..20: mol_type = other DNA
ctgctacttcctcagtgaca

SEQ ID NO: 61788 - DNA, 20 bp, synthetic construct
  misc_feature 1..20: note = chemically synthesized
  source 1..20: mol_type = other DNA
ggtttcttcatctgtaaaag

SEQ ID NO: 61789 - DNA, 20 bp, synthetic construct
  misc_feature 1..20: note = chemically synthesized
  source 1..20: mol_type = other DNA
atattagcattagcacctca

SEQ ID NO: 61790 - DNA, 20 bp, synthetic construct
  misc_feature 1..20: note = chemically synthesized
  source 1..20: mol_type = other DNA
gggattgttacaagaaagca

SEQ ID NO: 61791 - DNA, 20 bp, synthetic construct
  misc_feature 1..20: note = chemically synthesized
  source 1..20: mol_type = other DNA
ggtgtcaatccctgatcact

SEQ ID NO: 61792 - DNA, 20 bp, synthetic construct
  misc_feature 1..20: note = chemically synthesized
  source 1..20: mol_type = other DNA
tggtccctgtctccctggct

SEQ ID NO: 61793 - DNA, 20 bp, synthetic construct
  misc_feature 1..20: note = chemically synthesized
  source 1..20: mol_type = other DNA
cagatacatcccaccatgat

SEQ ID NO: 61794 - DNA, 20 bp, synthetic construct
  misc_feature 1..20: note = chemically synthesized
  source 1..20: mol_type = other DNA
caagatcacccccaacctgg

SEQ ID NO: 61795 - DNA, 20 bp, synthetic construct
  misc_feature 1..20: note = chemically synthesized
  source 1..20: mol_type = other DNA
acgatgaaatcctggagggc

SEQ ID NO: 61796 - DNA, 20 bp, synthetic construct
  misc_feature 1..20: note = chemically synthesized
  source 1..20: mol_type = other DNA
tcagcgagggcctgaagcta

SEQ ID NO: 61797 - DNA, 20 bp, synthetic construct
  misc_feature 1..20: note = chemically synthesized
  source 1..20: mol_type = other DNA
agctagtggataagtttttg

SEQ ID NO: 61798 - DNA, 20 bp, synthetic construct
  misc_feature 1..20: note = chemically synthesized
  source 1..20: mol_type = other DNA
agatcaacgattacgtggag

SEQ ID NO: 61799 - DNA, 20 bp, synthetic construct
  misc_feature 1..20: note = chemically synthesized
  source 1..20: mol_type = other DNA
agggtactcaagggaaaatt

SEQ ID NO: 61800 - DNA, 20 bp, synthetic construct
  misc_feature 1..20: note = chemically synthesized
  source 1..20: mol_type = other DNA
gagacacagtttttgctctg

SEQ ID NO: 61801 - DNA, 20 bp, synthetic construct
  misc_feature 1..20: note = chemically synthesized
  source 1..20: mol_type = other DNA
ccatagcaatgcttttcagc

SEQ ID NO: 61802 - DNA, 20 bp, synthetic construct
  misc_feature 1..20: note = chemically synthesized
  source 1..20: mol_type = other DNA
cactaaaatgttttccatca

SEQ ID NO: 61803 - DNA, 20 bp, synthetic construct
  misc_feature 1..20: note = chemically synthesized
  source 1..20: mol_type = other DNA
ccttgtgtatactgtatatg

SEQ ID NO: 61804 - DNA, 20 bp, synthetic construct
  misc_feature 1..20: note = chemically synthesized
  source 1..20: mol_type = other DNA
aattgtaatacactgcataa

SEQ ID NO: 61805 - DNA, 20 bp, synthetic construct
  misc_feature 1..20: note = chemically synthesized
  source 1..20: mol_type = other DNA
tttacacgactctagtgtcc

SEQ ID NO: 61806 - DNA, 20 bp, synthetic construct
  misc_feature 1..20: note = chemically synthesized
  source 1..20: mol_type = other DNA
agttttgcaatctgaaagac

SEQ ID NO: 61807 - DNA, 20 bp, synthetic construct
  misc_feature 1..20: note = chemically synthesized
  source 1..20: mol_type = other DNA
ttcttgctgtcaggtttttt

SEQ ID NO: 61808 - DNA, 20 bp, synthetic construct
  misc_feature 1..20: note = chemically synthesized
  source 1..20: mol_type = other DNA
aaacaaatgacaaagactgt

SEQ ID NO: 61809 - DNA, 20 bp, synthetic construct
  misc_feature 1..20: note = chemically synthesized
  source 1..20: mol_type = other DNA
aggctgccttcctgcccctg

SEQ ID NO: 61810 - DNA, 20 bp, synthetic construct
  misc_feature 1..20: note = chemically synthesized
  source 1..20: mol_type = other DNA
cccctgaggggttaaaatgc

SEQ ID NO: 61811 - DNA, 20 bp, synthetic construct
  misc_feature 1..20: note = chemically synthesized
  source 1..20: mol_type = other DNA
cttctgtccaatgagaaagc

SEQ ID NO: 61812 - DNA, 20 bp, synthetic construct
  misc_feature 1..20: note = chemically synthesized
  source 1..20: mol_type = other DNA
ccaatgagaaagctgggatc

SEQ ID NO: 61813 - DNA, 20 bp, synthetic construct
  misc_feature 1..20: note = chemically synthesized
  source 1..20: mol_type = other DNA
gcatttcccctgccaatcta

SEQ ID NO: 61814 - DNA, 20 bp, synthetic construct
  misc_feature 1..20: note = chemically synthesized
  source 1..20: mol_type = other DNA
agaggatgaggaaagctctc

SEQ ID NO: 61815 - DNA, 20 bp, synthetic construct
  misc_feature 1..20: note = chemically synthesized
  source 1..20: mol_type = other DNA
aagctctcaggaatagtaag

SEQ ID NO: 61816 - DNA, 20 bp, synthetic construct
  misc_feature 1..20: note = chemically synthesized
  source 1..20: mol_type = other DNA
tagtaagcagaatgtttgcc

SEQ ID NO: 61817 - DNA, 20 bp, synthetic construct
  misc_feature 1..20: note = chemically synthesized
  source 1..20: mol_type = other DNA
aagcagaatgtttgccctgg

SEQ ID NO: 61818 - DNA, 20 bp, synthetic construct
  misc_feature 1..20: note = chemically synthesized
  source 1..20: mol_type = other DNA
ttctgcatcttcctctagtt

SEQ ID NO: 61819 - DNA, 20 bp, synthetic construct
  misc_feature 1..20: note = chemically synthesized
  source 1..20: mol_type = other DNA
acacaatctttttcggcagc

SEQ ID NO: 61820 - DNA, 20 bp, synthetic construct
  misc_feature 1..20: note = chemically synthesized
  source 1..20: mol_type = other DNA
gatgatgaagctgagcctcg

SEQ ID NO: 61821 - DNA, 20 bp, synthetic construct
  misc_feature 1..20: note = chemically synthesized
  source 1..20: mol_type = other DNA
cactgtaagaagctgtccag

SEQ ID NO: 61822 - DNA, 20 bp, synthetic construct
  misc_feature 1..20: note = chemically synthesized
  source 1..20: mol_type = other DNA
agaaggtgattccccaacct

SEQ ID NO: 61823 - DNA, 20 bp, synthetic construct
  misc_feature 1..20: note = chemically synthesized
  source 1..20: mol_type = other DNA
ggactggccagagggctgag

SEQ ID NO: 61824 - DNA, 20 bp, synthetic construct
  misc_feature 1..20: note = chemically synthesized
  source 1..20: mol_type = other DNA
ggagggtgaaccccacatcc

SEQ ID NO: 61825 - DNA, 20 bp, synthetic construct
  misc_feature 1..20: note = chemically synthesized
  source 1..20: mol_type = other DNA
ctctgtataaacttggcttc

SEQ ID NO: 61826 - DNA, 20 bp, synthetic construct
  misc_feature 1..20: note = chemically synthesized
  source 1..20: mol_type = other DNA
cttccagaatgaggccacca

SEQ ID NO: 61827 - DNA, 20 bp, synthetic construct
  misc_feature 1..20: note = chemically synthesized
  source 1..20: mol_type = other DNA
ccatgaggaggacagtaccc

SEQ ID NO: 61828 - DNA, 20 bp, synthetic construct
  misc_feature 1..20: note = chemically synthesized
  source 1..20: mol_type = other DNA
cttcctggcaaaggcagcag

SEQ ID NO: 61829 - DNA, 20 bp, synthetic construct
  misc_feature 1..20: note = chemically synthesized
  source 1..20: mol_type = other DNA
gcaaaggcagcagtggagtg

SEQ ID NO: 61830 - DNA, 20 bp, synthetic construct
  misc_feature 1..20: note = chemically synthesized
  source 1..20: mol_type = other DNA
agcagtggagtgtggagttc

SEQ ID NO: 61831 - DNA, 20 bp, synthetic construct
  misc_feature 1..20: note = chemically synthesized
  source 1..20: mol_type = other DNA
tggagtgtggagttcaaggg

SEQ ID NO: 61832 - DNA, 20 bp, synthetic construct
  misc_feature 1..20: note = chemically synthesized
  source 1..20: mol_type = other DNA
aggcccagaaaagcaaggtt

SEQ ID NO: 61833 - DNA, 20 bp, synthetic construct
  misc_feature 1..20: note = chemically synthesized
  source 1..20: mol_type = other DNA
actttatcggtgctgttaga

SEQ ID NO: 61834 - DNA, 20 bp, synthetic construct
  misc_feature 1..20: note = chemically synthesized
  source 1..20: mol_type = other DNA
agatgaaaatacaaaaggtg

SEQ ID NO: 61835 - DNA, 20 bp, synthetic construct
  misc_feature 1..20: note = chemically synthesized
  source 1..20: mol_type = other DNA
aaaggtgtcgggttcataat

SEQ ID NO: 61836 - DNA, 20 bp, synthetic construct
  misc_feature 1..20: note = chemically synthesized
  source 1..20: mol_type = other DNA
ttcataataggaatcgaggc

SEQ ID NO: 61837 - DNA, 20 bp, synthetic construct
  misc_feature 1..20: note = chemically synthesized
  source 1..20: mol_type = other DNA
cctcctgaggtctctgctcc

SEQ ID NO: 61838 - DNA, 20 bp, synthetic construct
  misc_feature 1..20: note = chemically synthesized
  source 1..20: mol_type = other DNA
agaaagaacaaagaggctga

SEQ ID NO: 61839 - DNA, 20 bp, synthetic construct
  misc_feature 1..20: note = chemically synthesized
  source 1..20: mol_type = other DNA
acaaagaggctgagagggta

SEQ ID NO: 61840 - DNA, 20 bp, synthetic construct
  misc_feature 1..20: note = chemically synthesized
  source 1..20: mol_type = other DNA
cgctcacaccagaccctgct

SEQ ID NO: 61841 - DNA, 20 bp, synthetic construct
  misc_feature 1..20: note = chemically synthesized
  source 1..20: mol_type = other DNA
gccaccagccccgtgtttct

SEQ ID NO: 61842 - DNA, 20 bp, synthetic construct
  misc_feature 1..20: note = chemically synthesized
  source 1..20: mol_type = other DNA
ttctctgggtgtagggccct

SEQ ID NO: 61843 - DNA, 20 bp, synthetic construct
  misc_feature 1..20: note = chemically synthesized
  source 1..20: mol_type = other DNA
agacaggcttccaggacacc

SEQ ID NO: 61844 - DNA, 20 bp, synthetic construct
  misc_feature 1..20: note = chemically synthesized
  source 1..20: mol_type = other DNA
aaaagtagaacaaaccaaag

SEQ ID NO: 61845 - DNA, 20 bp, synthetic construct
  misc_feature 1..20: note = chemically synthesized
  source 1..20: mol_type = other DNA
agccgagttcccatcttagt

SEQ ID NO: 61846 - DNA, 20 bp, synthetic construct
  misc_feature 1..20: note = chemically synthesized
  source 1..20: mol_type = other DNA
ttagtgtgggtggaggacac

SEQ ID NO: 61847 - DNA, 20 bp, synthetic construct
  misc_feature 1..20: note = chemically synthesized
  source 1..20: mol_type = other DNA
aagaaaacacttgcactgtg

SEQ ID NO: 61848 - DNA, 20 bp, synthetic construct
  misc_feature 1..20: note = chemically synthesized
  source 1..20: mol_type = other DNA
gtgggtcccagaagaacaag

SEQ ID NO: 61849 - DNA, 20 bp, synthetic construct
  misc_feature 1..20: note = chemically synthesized
  source 1..20: mol_type = other DNA
gaggaatgctgtgccatgcc

SEQ ID NO: 61850 - DNA, 20 bp, synthetic construct
  misc_feature 1..20: note = chemically synthesized
  source 1..20: mol_type = other DNA
cctatgatctgaagagcgtc

SEQ ID NO: 61851 - DNA, 20 bp, synthetic construct
  misc_feature 1..20: note = chemically synthesized
  source 1..20: mol_type = other DNA
agcaatggggctgacctctc

SEQ ID NO: 61852 - DNA, 20 bp, synthetic construct
  misc_feature 1..20: note = chemically synthesized
  source 1..20: mol_type = other DNA
gcaccctggtatctgtaggg

SEQ ID NO: 61853 - DNA, 20 bp, synthetic construct
  misc_feature 1..20: note = chemically synthesized
  source 1..20: mol_type = other DNA
ttgaggttgtgtcactgacc

SEQ ID NO: 61854 - DNA, 20 bp, synthetic construct
  misc_feature 1..20: note = chemically synthesized
  source 1..20: mol_type = other DNA
tttgggctaagttgtttcaa

SEQ ID NO: 61855 - DNA, 20 bp, synthetic construct
  misc_feature 1..20: note = chemically synthesized
  source 1..20: mol_type = other DNA
cgatctgtgagatttggtgt

SEQ ID NO: 61856 - DNA, 20 bp, synthetic construct
  misc_feature 1..20: note = chemically synthesized
  source 1..20: mol_type = other DNA
gagatttggtgtctgaatta

SEQ ID NO: 61857 - DNA, 20 bp, synthetic construct
  misc_feature 1..20: note = chemically synthesized
  source 1..20: mol_type = other DNA
caatgaacaactgcagttcc

SEQ ID NO: 61858 - DNA, 20 bp, synthetic construct
  misc_feature 1..20: note = chemically synthesized
  source 1..20: mol_type = other DNA
catgaatggctgcattatct

SEQ ID NO: 61859 - DNA, 20 bp, synthetic construct
  misc_feature 1..20: note = chemically synthesized
  source 1..20: mol_type = other DNA
ggcactgtgaaggtcactgc

SEQ ID NO: 61860 - DNA, 20 bp, synthetic construct
  misc_feature 1..20: note = chemically synthesized
  source 1..20: mol_type = other DNA
gagagccctggaggcagacg

SEQ ID NO: 61861 - DNA, 20 bp, synthetic construct
  misc_feature 1..20: note = chemically synthesized
  source 1..20: mol_type = other DNA
tgacgatgctcttccctgtt

SEQ ID NO: 61862 - DNA, 20 bp, synthetic construct
  misc_feature 1..20: note = chemically synthesized
  source 1..20: mol_type = other DNA
gctcttccctgttctgagtt

SEQ ID NO: 61863 - DNA, 20 bp, synthetic construct
  misc_feature 1..20: note = chemically synthesized
  source 1..20: mol_type = other DNA
gcctatgtgacagggaggga

SEQ ID NO: 61864 - DNA, 20 bp, synthetic construct
  misc_feature 1..20: note = chemically synthesized
  source 1..20: mol_type = other DNA
cagggccagggccgtccagg

SEQ ID NO: 61865 - DNA, 20 bp, synthetic construct
  misc_feature 1..20: note = chemically synthesized
  source 1..20: mol_type = other DNA
cgtgagccttgctcgaggcc

SEQ ID NO: 61866 - DNA, 20 bp, synthetic construct
  misc_feature 1..20: note = chemically synthesized
  source 1..20: mol_type = other DNA
ccctcttcatgggaaaagtg

SEQ ID NO: 61867 - DNA, 20 bp, synthetic construct
  misc_feature 1..20: note = chemically synthesized
  source 1..20: mol_type = other DNA
ctccatccctggccccctcc

SEQ ID NO: 61868 - DNA, 20 bp, synthetic construct
  misc_feature 1..20: note = chemically synthesized
  source 1..20: mol_type = other DNA
ctccctggatgacattaaag

SEQ ID NO: 61869 - DNA, 20 bp, synthetic construct
  misc_feature 1..20: note = chemically synthesized
  source 1..20: mol_type = other DNA
aaatccctcccatgttttct

SEQ ID NO: 61870 - DNA, 20 bp, synthetic construct
  misc_feature 1..20: note = chemically synthesized
  source 1..20: mol_type = other DNA
tgtgttcatggagcatctgg

SEQ ID NO: 61871 - DNA, 20 bp, synthetic construct
  misc_feature 1..20: note = chemically synthesized
  source 1..20: mol_type = other DNA
tgggtaggcacatgctgggc

SEQ ID NO: 61872 - DNA, 20 bp, synthetic construct
  misc_feature 1..20: note = chemically synthesized
  source 1..20: mol_type = other DNA
gggcttgaatccagggggga

SEQ ID NO: 61873 - DNA, 20 bp, synthetic construct
  misc_feature 1..20: note = chemically synthesized
  source 1..20: mol_type = other DNA
cagtcttccttgtcctgtct

SEQ ID NO: 61874 - DNA, 20 bp, synthetic construct
  misc_feature 1..20: note = chemically synthesized
  source 1..20: mol_type = other DNA
ctgtcttggagtccccaaga

SEQ ID NO: 61875 - DNA, 20 bp, synthetic construct
  misc_feature 1..20: note = chemically synthesized
  source 1..20: mol_type = other DNA
atcccccactcccccccacc

SEQ ID NO: 61876 - DNA, 20 bp, synthetic construct
  misc_feature 1..20: note = chemically synthesized
  source 1..20: mol_type = other DNA
aagcctcacatatctccgtt

SEQ ID NO: 61877 - DNA, 20 bp, synthetic construct
  misc_feature 1..20: note = chemically synthesized
  source 1..20: mol_type = other DNA
ccttctccccagatgaagag

SEQ ID NO: 61878 - DNA, 20 bp, synthetic construct
  misc_feature 1..20: note = chemically synthesized
  source 1..20: mol_type = other DNA
caacccctccctttcctcct

SEQ ID NO: 61879 - DNA, 20 bp, synthetic construct
  misc_feature 1..20: note = chemically synthesized
  source 1..20: mol_type = other DNA
gccacggcaggaggctgttc

SEQ ID NO: 61880 - DNA, 20 bp, synthetic construct
  misc_feature 1..20: note = chemically synthesized
  source 1..20: mol_type = other DNA
gcccctgtggtaagggccag

SEQ ID NO: 61881 - DNA, 20 bp, synthetic construct
  misc_feature 1..20: note = chemically synthesized
  source 1..20: mol_type = other DNA
ctgctccctccgtctctacc

SEQ ID NO: 61882 - DNA, 20 bp, synthetic construct
  misc_feature 1..20: note = chemically synthesized
  source 1..20: mol_type = other DNA
gccccatcccaaactaatct

SEQ ID NO: 61883 - DNA, 20 bp, synthetic construct
  misc_feature 1..20: note = chemically synthesized
  source 1..20: mol_type = other DNA
ctgtctaaccactcactgtc

SEQ ID NO: 61884 - DNA, 20 bp, synthetic construct
  misc_feature 1..20: note = chemically synthesized
  source 1..20: mol_type = other DNA
ctgtcatgaatgtgtactta

SEQ ID NO: 61885 - DNA, 20 bp, synthetic construct
  misc_feature 1..20: note = chemically synthesized
  source 1..20: mol_type = other DNA
tgtgtacttaaaggatgagg

SEQ ID NO: 61886 - DNA, 20 bp, synthetic construct
  misc_feature 1..20: note = chemically synthesized
  source 1..20: mol_type = other DNA
tacatgattcagtctaatca

SEQ ID NO: 61887 - DNA, 20 bp, synthetic construct
  misc_feature 1..20: note = chemically synthesized
  source 1..20: mol_type = other DNA
atggccatcaccaagccccc

SEQ ID NO: 61888 - DNA, 20 bp, synthetic construct
  misc_feature 1..20: note = chemically synthesized
  source 1..20: mol_type = other DNA
cctaggatgacaccagacct

SEQ ID NO: 61889 - DNA, 20 bp, synthetic construct
  misc_feature 1..20: note = chemically synthesized
  source 1..20: mol_type = other DNA
agacctgagagtctgaagac

SEQ ID NO: 61890 - DNA, 20 bp, synthetic construct
  misc_feature 1..20: note = chemically synthesized
  source 1..20: mol_type = other DNA
attgctagtaagacctgcct

SEQ ID NO: 61891 - DNA, 20 bp, synthetic construct
  misc_feature 1..20: note = chemically synthesized
  source 1..20: mol_type = other DNA
tgtttatacccattagaaca

SEQ ID NO: 61892 - DNA, 20 bp, synthetic construct
  misc_feature 1..20: note = chemically synthesized
  source 1..20: mol_type = other DNA
cttgcacttatgagctttct

SEQ ID NO: 61893 - DNA, 20 bp, synthetic construct
  misc_feature 1..20: note = chemically synthesized
  source 1..20: mol_type = other DNA
ctgtagcagcactgcgatgt

SEQ ID NO: 61894 - DNA, 20 bp, synthetic construct
  misc_feature 1..20: note = chemically synthesized
  source 1..20: mol_type = other DNA
ctcaccacactctccccttc

SEQ ID NO: 61895 - DNA, 20 bp, synthetic construct
  misc_feature 1..20: note = chemically synthesized
  source 1..20: mol_type = other DNA
gtaattcctccttaaaccag

SEQ ID NO: 61896 - DNA, 20 bp, synthetic construct
  misc_feature 1..20: note = chemically synthesized
  source 1..20: mol_type = other DNA
atttggtaggagaacagggg

SEQ ID NO: 61897 - DNA, 20 bp, synthetic construct
  misc_feature 1..20: note = chemically synthesized
  source 1..20: mol_type = other DNA
gacaccatcgttttactttg

SEQ ID NO: 61898 - DNA, 20 bp, synthetic construct
  misc_feature 1..20: note = chemically synthesized
  source 1..20: mol_type = other DNA
tgaagaattgtctgtcacac

SEQ ID NO: 61899 - DNA, 20 bp, synthetic construct
  misc_feature 1..20: note = chemically synthesized
  source 1..20: mol_type = other DNA
gtcacacacgagttgacagt

SEQ ID NO: 61900 - DNA, 20 bp, synthetic construct
  misc_feature 1..20: note = chemically synthesized
  source 1..20: mol_type = other DNA
aactagcataacctcccaga

SEQ ID NO: 61901 - DNA, 20 bp, synthetic construct
  misc_feature 1..20: note = chemically synthesized
  source 1..20: mol_type = other DNA
gggaattcctgggctcccct

SEQ ID NO: 61902 - DNA, 20 bp, synthetic construct
  misc_feature 1..20: note = chemically synthesized
  source 1..20: mol_type = other DNA
gggctcccctgggaatcaac

SEQ ID NO: 61903 - DNA, 20 bp, synthetic construct
  misc_feature 1..20: note = chemically synthesized
  source 1..20: mol_type = other DNA
ggaatcaacagggatcagtc

SEQ ID NO: 61904 - DNA, 20 bp, synthetic construct
  misc_feature 1..20: note = chemically synthesized
  source 1..20: mol_type = other DNA
agggatcagtcaaggatggg

SEQ ID NO: 61905 - DNA, 20 bp, synthetic construct
  misc_feature 1..20: note = chemically synthesized
  source 1..20: mol_type = other DNA
ctcagcttcactgtatcttc

SEQ ID NO: 61906 - DNA, 20 bp, synthetic construct
  misc_feature 1..20: note = chemically synthesized
  source 1..20: mol_type = other DNA
acatacttcctcagtccata

SEQ ID NO: 61907 - DNA, 20 bp, synthetic construct
  misc_feature 1..20: note = chemically synthesized
  source 1..20: mol_type = other DNA
aggccaagctgcggggcacc

SEQ ID NO: 61908 - DNA, 20 bp, synthetic construct
  misc_feature 1..20: note = chemically synthesized
  source 1..20: mol_type = other DNA
tccagctcagccaggaacct

SEQ ID NO: 61909 - DNA, 20 bp, synthetic construct
  misc_feature 1..20: note = chemically synthesized
  source 1..20: mol_type = other DNA
cctgaccttttacctcgcct

SEQ ID NO: 61910 - DNA, 20 bp, synthetic construct
  misc_feature 1..20: note = chemically synthesized
  source 1..20: mol_type = other DNA
gtttgcaggggagagaacac

SEQ ID NO: 61911 - DNA, 20 bp, synthetic construct
  misc_feature 1..20: note = chemically synthesized
  source 1..20: mol_type = other DNA
ggggagagaacacacgaatt

SEQ ID NO: 61912 - DNA, 20 bp, synthetic construct
  misc_feature 1..20: note = chemically synthesized
  source 1..20: mol_type = other DNA
gcaaacatgagctgtgtatg

SEQ ID NO: 61913 - DNA, 20 bp, synthetic construct
  misc_feature 1..20: note = chemically synthesized
  source 1..20: mol_type = other DNA
agctgtgtatgggggataga

SEQ ID NO: 61914 - DNA, 20 bp, synthetic construct
  misc_feature 1..20: note = chemically synthesized
  source 1..20: mol_type = other DNA
aaacccaggtccatcccggg

SEQ ID NO: 61915 - DNA, 20 bp, synthetic construct
  misc_feature 1..20: note = chemically synthesized
  source 1..20: mol_type = other DNA
gtctatggcagtggggagca

SEQ ID NO: 61916 - DNA, 20 bp, synthetic construct
  misc_feature 1..20: note = chemically synthesized
  source 1..20: mol_type = other DNA
aataaatgaggcgtacatcc

SEQ ID NO: 61917 - DNA, 20 bp, synthetic construct
  misc_feature 1..20: note = chemically synthesized
  source 1..20: mol_type = other DNA
tgaggcgtacatccatggat

SEQ ID NO: 61918 - DNA, 20 bp, synthetic construct
  misc_feature 1..20: note = chemically synthesized
  source 1..20: mol_type = other DNA
catccatggatctgggtgga

SEQ ID NO: 61919 - DNA, 20 bp, synthetic construct
  misc_feature 1..20: note = chemically synthesized
  source 1..20: mol_type = other DNA
tggatctgggtggagagggt

SEQ ID NO: 61920 - DNA, 20 bp, synthetic construct
  misc_feature 1..20: note = chemically synthesized
  source 1..20: mol_type = other DNA
ggcttttgtgttgctcttgg

SEQ ID NO: 61921 - DNA, 20 bp, synthetic construct
  misc_feature 1..20: note = chemically synthesized
  source 1..20: mol_type = other DNA
gggacagcttccgcaggaac

SEQ ID NO: 61922 - DNA, 20 bp, synthetic construct
  misc_feature 1..20: note = chemically synthesized
  source 1..20: mol_type = other DNA
gtcagttctaaaaggacaaa

SEQ ID NO: 61923 - DNA, 20 bp, synthetic construct
  misc_feature 1..20: note = chemically synthesized
  source 1..20: mol_type = other DNA
aaaggacaaatggaatgacc

SEQ ID NO: 61924 - DNA, 20 bp, synthetic construct
  misc_feature 1..20: note = chemically synthesized
  source 1..20: mol_type = other DNA
aggcagcaactcggaaaagc

SEQ ID NO: 61925 - DNA, 20 bp, synthetic construct
  misc_feature 1..20: note = chemically synthesized
  source 1..20: mol_type = other DNA
tcatttgtccttttcctcaa

SEQ ID NO: 61926 - DNA, 20 bp, synthetic construct
  misc_feature 1..20: note = chemically synthesized
  source 1..20: mol_type = other DNA
gcagacgcttcaatggcagt

SEQ ID NO: 61927 - DNA, 20 bp, synthetic construct
  misc_feature 1..20: note = chemically synthesized
  source 1..20: mol_type = other DNA
actgttgaaatcgtgacatc

SEQ ID NO: 61928 - DNA, 20 bp, synthetic construct
  misc_feature 1..20: note = chemically synthesized
  source 1..20: mol_type = other DNA
tcaggaatgatgaaaggaac

SEQ ID NO: 61929 - DNA, 20 bp, synthetic construct
  misc_feature 1..20: note = chemically synthesized
  source 1..20: mol_type = other DNA
cagtctggttgctgtgtccc

SEQ ID NO: 61930 - DNA, 20 bp, synthetic construct
  misc_feature 1..20: note = chemically synthesized
  source 1..20: mol_type = other DNA
ctggttgctgtgtccccagg

SEQ ID NO: 61931 - DNA, 20 bp, synthetic construct
  misc_feature 1..20: note = chemically synthesized
  source 1..20: mol_type = other DNA
tgggacaagtagagcgggag

SEQ ID NO: 61932 - DNA, 20 bp, synthetic construct
  misc_feature 1..20: note = chemically synthesized
  source 1..20: mol_type = other DNA
agaggaatcaaccctttcta

SEQ ID NO: 61933 - DNA, 20 bp, synthetic construct
  misc_feature 1..20: note = chemically synthesized
  source 1..20: mol_type = other DNA
cccatcctgactgaaacaac

SEQ ID NO: 61934 - DNA, 20 bp, synthetic construct
  misc_feature 1..20: note = chemically synthesized
  source 1..20: mol_type = other DNA
cacctactacgcaagcctgg

SEQ ID NO: 61935 - DNA, 20 bp, synthetic construct
  misc_feature 1..20: note = chemically synthesized
  source 1..20: mol_type = other DNA
ggtggtgagcaaggaacggt

SEQ ID NO: 61936 - DNA, 20 bp, synthetic construct
  misc_feature 1..20: note = chemically synthesized
  source 1..20: mol_type = other DNA
gaacggtaggaatgtgagca

SEQ ID NO: 61937 - DNA, 20 bp, synthetic construct
  misc_feature 1..20: note = chemically synthesized
  source 1..20: mol_type = other DNA
cagctcaatgcttcaaccct

SEQ ID NO: 61938 - DNA, 20 bp, synthetic construct
  misc_feature 1..20: note = chemically synthesized
  source 1..20: mol_type = other DNA
cgtgataccaatgacagtga

SEQ ID NO: 61939 - DNA, 20 bp, synthetic construct
  misc_feature 1..20: note = chemically synthesized
  source 1..20: mol_type = other DNA
gcctgttgggatttgggctt

SEQ ID NO: 61940 - DNA, 20 bp, synthetic construct
  misc_feature 1..20: note = chemically synthesized
  source 1..20: mol_type = other DNA
ggacaaggacaaggaacttt

SEQ ID NO: 61941 - DNA, 20 bp, synthetic construct
  misc_feature 1..20: note = chemically synthesized
  source 1..20: mol_type = other DNA
ccttccctgccctgggctct

SEQ ID NO: 61942 - DNA, 20 bp, synthetic construct
  misc_feature 1..20: note = chemically synthesized
  source 1..20: mol_type = other DNA
gtgctgctacagtgagtaaa

SEQ ID NO: 61943 - DNA, 20 bp, synthetic construct
  misc_feature 1..20: note = chemically synthesized
  source 1..20: mol_type = other DNA
ttcatagggatgtctgattc

SEQ ID NO: 61944 - DNA, 20 bp, synthetic construct
  misc_feature 1..20: note = chemically synthesized
  source 1..20: mol_type = other DNA
tcacagaaagctcataagtg

SEQ ID NO: 61945 - DNA, 20 bp, synthetic construct
  misc_feature 1..20: note = chemically synthesized
  source 1..20: mol_type = other DNA
cattgattagactgaatcat

SEQ ID NO: 61946 - DNA, 20 bp, synthetic construct
  misc_feature 1..20: note = chemically synthesized
  source 1..20: mol_type = other DNA
gtcaagtctgaggaggagat

SEQ ID NO: 61947 - DNA, 20 bp, synthetic construct
  misc_feature 1..20: note = chemically synthesized
  source 1..20: mol_type = other DNA
gcagcgatggaaggacaagg

SEQ ID NO: 61948 - DNA, 20 bp, synthetic construct
  misc_feature 1..20: note = chemically synthesized
  source 1..20: mol_type = other DNA
aggtgtccttgttgccccat

SEQ ID NO: 61949 - DNA, 20 bp, synthetic construct
  misc_feature 1..20: note = chemically synthesized
  source 1..20: mol_type = other DNA
ccatggagaatgggcttcag

SEQ ID NO: 61950 - DNA, 20 bp, synthetic construct
  misc_feature 1..20: note = chemically synthesized
  source 1..20: mol_type = other DNA
acaaggaagactggagccct

SEQ ID NO: 61951 - DNA, 20 bp, synthetic construct
  misc_feature 1..20: note = chemically synthesized
  source 1..20: mol_type = other DNA
cagcaggcaaagggagactc

SEQ ID NO: 61952 - DNA, 20 bp, synthetic construct
  misc_feature 1..20: note = chemically synthesized
  source 1..20: mol_type = other DNA
aatctcacagatcgaaggag

SEQ ID NO: 61953 - DNA, 20 bp, synthetic construct
  misc_feature 1..20: note = chemically synthesized
  source 1..20: mol_type = other DNA
taagctggcagacctgtcgt

SEQ ID NO: 61954 - DNA, 20 bp, synthetic construct
  misc_feature 1..20: note = chemically synthesized
  source 1..20: mol_type = other DNA
tggcagacctgtcgtgcaga

SEQ ID NO: 61955 - DNA, 20 bp, synthetic construct
  misc_feature 1..20: note = chemically synthesized
  source 1..20: mol_type = other DNA
tagctcttctacattgagtc

SEQ ID NO: 61956 - DNA, 20 bp, synthetic construct
  misc_feature 1..20: note = chemically synthesized
  source 1..20: mol_type = other DNA
atccccagggccctacaccc

SEQ ID NO: 61957 - DNA, 20 bp, synthetic construct
  misc_feature 1..20: note = chemically synthesized
  source 1..20: mol_type = other DNA
aggaggtgctggcatggaac

SEQ ID NO: 61958 - DNA, 20 bp, synthetic construct
  misc_feature 1..20: note = chemically synthesized
  source 1..20: mol_type = other DNA
aacagcaccgataaagtgac

SEQ ID NO: 61959 - DNA, 20 bp, synthetic construct
  misc_feature 1..20: note = chemically synthesized
  source 1..20: mol_type = other DNA
tgaaggtttggaagagtgta

SEQ ID NO: 61960 - DNA, 20 bp, synthetic construct
  misc_feature 1..20: note = chemically synthesized
  source 1..20: mol_type = other DNA
ttggaagagtgtagcagaat

SEQ ID NO: 61961 - DNA, 20 bp, synthetic construct
  misc_feature 1..20: note = chemically synthesized
  source 1..20: mol_type = other DNA
attcaaaactagaggaagat

SEQ ID NO: 61962 - DNA, 20 bp, synthetic construct
  misc_feature 1..20: note = chemically synthesized
  source 1..20: mol_type = other DNA
ctgggacagtgggagctggc

SEQ ID NO: 61963 - DNA, 20 bp, synthetic construct
  misc_feature 1..20: note = chemically synthesized
  source 1..20: mol_type = other DNA
atcctaaaaaaacctgacag

SEQ ID NO: 61964 - DNA, 20 bp, synthetic construct
  misc_feature 1..20: note = chemically synthesized
  source 1..20: mol_type = other DNA
gtattttgtccatgctaaga

SEQ ID NO: 61965 - DNA, 20 bp, synthetic construct
  misc_feature 1..20: note = chemically synthesized
  source 1..20: mol_type = other DNA
gaaattagcacctcaaagag

SEQ ID NO: 61966 - DNA, 20 bp, synthetic construct
  misc_feature 1..20: note = chemically synthesized
  source 1..20: mol_type = other DNA
aaacattttagtgtttgtgt

SEQ ID NO: 61967 - DNA, 20 bp, synthetic construct
  misc_feature 1..20: note = chemically synthesized
  source 1..20: mol_type = other DNA
gtgtttgtgtgtagaaaact

SEQ ID NO: 61968 - DNA, 20 bp, synthetic construct
  misc_feature 1..20: note = chemically synthesized
  source 1..20: mol_type = other DNA
gagttcaagaactgatggtt

SEQ ID NO: 61969 - DNA, 20 bp, synthetic construct
  misc_feature 1..20: note = chemically synthesized
  source 1..20: mol_type = other DNA
tgccgacatcagtaacactg

SEQ ID NO: 61970 - DNA, 20 bp, synthetic construct
  misc_feature 1..20: note = chemically synthesized
  source 1..20: mol_type = other DNA
cagtaacactgaaagaatca

SEQ ID NO: 61971 - DNA, 20 bp, synthetic construct
  misc_feature 1..20: note = chemically synthesized
  source 1..20: mol_type = other DNA
aatatccttcttttacagat

SEQ ID NO: 61972 - DNA, 20 bp, synthetic construct
  misc_feature 1..20: note = chemically synthesized
  source 1..20: mol_type = other DNA
tcactgaggaagtagcagaa

SEQ ID NO: 61973 - DNA, 20 bp, synthetic construct
  misc_feature 1..20: note = chemically synthesized
  source 1..20: mol_type = other DNA
acagccattgttttacaaaa

SEQ ID NO: 61974 - DNA, 20 bp, synthetic construct
  misc_feature 1..20: note = chemically synthesized
  source 1..20: mol_type = other DNA
tatccaggaatcgggccaga

SEQ ID NO: 61975 - DNA, 20 bp, synthetic construct
  misc_feature 1..20: note = chemically synthesized
  source 1..20: mol_type = other DNA
gaatcgggccagatcagaat

SEQ ID NO: 61976 - DNA, 20 bp, synthetic construct
  misc_feature 1..20: note = chemically synthesized
  source 1..20: mol_type = other DNA
atgctctgtggtcccagaca

SEQ ID NO: 61977 - DNA, 20 bp, synthetic construct
  misc_feature 1..20: note = chemically synthesized
  source 1..20: mol_type = other DNA
cataaagtgatgtttatgta

SEQ ID NO: 61978 - DNA, 20 bp, synthetic construct
  misc_feature 1..20: note = chemically synthesized
  source 1..20: mol_type = other DNA
aaaactgaggtcctagctga

SEQ ID NO: 61979 - DNA, 20 bp, synthetic construct
  misc_feature 1..20: note = chemically synthesized
  source 1..20: mol_type = other DNA
ccatcatcttaacaaaatac

SEQ ID NO: 61980 - DNA, 20 bp, synthetic construct
  misc_feature 1..20: note = chemically synthesized
  source 1..20: mol_type = other DNA
aatttgggaaatgaaaaact

SEQ ID NO: 61981 - DNA, 20 bp, synthetic construct
  misc_feature 1..20: note = chemically synthesized
  source 1..20: mol_type = other DNA
actatccacttggcctttag

SEQ ID NO: 61982 - DNA, 20 bp, synthetic construct
  misc_feature 1..20: note = chemically synthesized
  source 1..20: mol_type = other DNA
aaacctccacctcccgggtt

SEQ ID NO: 61983 - DNA, 20 bp, synthetic construct
  misc_feature 1..20: note = chemically synthesized
  source 1..20: mol_type = other DNA
cacccagccaggattcttgg

SEQ ID NO: 61984 - DNA, 20 bp, synthetic construct
  misc_feature 1..20: note = chemically synthesized
  source 1..20: mol_type = other DNA
ttcaatgtagcaaaacagat

SEQ ID NO: 61985 - DNA, 20 bp, synthetic construct
  misc_feature 1..20: note = chemically synthesized
  source 1..20: mol_type = other DNA
cagatctcagatgatgaatg

SEQ ID NO: 61986 - DNA, 20 bp, synthetic construct
  misc_feature 1..20: note = chemically synthesized
  source 1..20: mol_type = other DNA
cctgggagggcgactggaga

SEQ ID NO: 61987 - DNA, 20 bp, synthetic construct
  misc_feature 1..20: note = chemically synthesized
  source 1..20: mol_type = other DNA
tgaggccaagctttaaacca

SEQ ID NO: 61988 - DNA, 20 bp, synthetic construct
  misc_feature 1..20: note = chemically synthesized
  source 1..20: mol_type = other DNA
aacccggcagggtgcaggga

SEQ ID NO: 61989 - DNA, 20 bp, synthetic construct
  misc_feature 1..20: note = chemically synthesized
  source 1..20: mol_type = other DNA
tagcttcatagctgtacaat

SEQ ID NO: 61990 - DNA, 20 bp, synthetic construct
  misc_feature 1..20: note = chemically synthesized
  source 1..20: mol_type = other DNA
tcatagctgtacaatggaga

SEQ ID NO: 61991 - DNA, 20 bp, synthetic construct
  misc_feature 1..20: note = chemically synthesized
  source 1..20: mol_type = other DNA
ttattagccctattttatag

SEQ ID NO: 61992 - DNA, 20 bp, synthetic construct
  misc_feature 1..20: note = chemically synthesized
  source 1..20: mol_type = other DNA
ctgaagccagaagtcttgaa

SEQ ID NO: 61993 - DNA, 20 bp, synthetic construct
  misc_feature 1..20: note = chemically synthesized
  source 1..20: mol_type = other DNA
gaacctcagtttcctggaga

SEQ ID NO: 61994 - DNA, 20 bp, synthetic construct
  misc_feature 1..20: note = chemically synthesized
  source 1..20: mol_type = other DNA
cctgctgcgcagcaagttct

SEQ ID NO: 61995 - DNA, 20 bp, synthetic construct
  misc_feature 1..20: note = chemically synthesized
  source 1..20: mol_type = other DNA
catccagcgcctgagaccca

SEQ ID NO: 61996 - DNA, 20 bp, synthetic construct
  misc_feature 1..20: note = chemically synthesized
  source 1..20: mol_type = other DNA
tggtcatatctggaggggat

SEQ ID NO: 61997 - DNA, 20 bp, synthetic construct
  misc_feature 1..20: note = chemically synthesized
  source 1..20: mol_type = other DNA
acctcctcatctatagaagg

SEQ ID NO: 61998 - DNA, 20 bp, synthetic construct
  misc_feature 1..20: note = chemically synthesized
  source 1..20: mol_type = other DNA
cagacagaggagctgtgcaa

SEQ ID NO: 61999 - DNA, 20 bp, synthetic construct
  misc_feature 1..20: note = chemically synthesized
  source 1..20: mol_type = other DNA
cagaggagctgtgcaaacag

SEQ ID NO: 62000 - DNA, 20 bp, synthetic construct
  misc_feature 1..20: note = chemically synthesized
  source 1..20: mol_type = other DNA
aaggagtcattgtacctggc

SEQ ID NO: 62001 - DNA, 20 bp, synthetic construct
  misc_feature 1..20: note = chemically synthesized
  source 1..20: mol_type = other DNA
gctggccctctgctctcact

SEQ ID NO: 62002 - DNA, 20 bp, synthetic construct
  misc_feature 1..20: note = chemically synthesized
  source 1..20: mol_type = other DNA
gagacgggtactgggtgtgc

SEQ ID NO: 62003 - DNA, 20 bp, synthetic construct
  misc_feature 1..20: note = chemically synthesized
  source 1..20: mol_type = other DNA
tcacactgcccagaggatta

SEQ ID NO: 62004 - DNA, 20 bp, synthetic construct
  misc_feature 1..20: note = chemically synthesized
  source 1..20: mol_type = other DNA
ggggcttttggaggaggaat

SEQ ID NO: 62005 - DNA, 20 bp, synthetic construct
  misc_feature 1..20: note = chemically synthesized
  source 1..20: mol_type = other DNA
aggtgaggcaagtaaggggc

SEQ ID NO: 62006 - DNA, 20 bp, synthetic construct
  misc_feature 1..20: note = chemically synthesized
  source 1..20: mol_type = other DNA
gattcaaacttccatttttt

SEQ ID NO: 62007 - DNA, 20 bp, synthetic construct
  misc_feature 1..20: note = chemically synthesized
  source 1..20: mol_type = other DNA
ctctttatccttactcagac

SEQ ID NO: 62008 - DNA, 20 bp, synthetic construct
  misc_feature 1..20: note = chemically synthesized
  source 1..20: mol_type = other DNA
actggggtatcttccctggg

SEQ ID NO: 62009 - DNA, 20 bp, synthetic construct
  misc_feature 1..20: note = chemically synthesized
  source 1..20: mol_type = other DNA
aggacttgagggcttattat

SEQ ID NO: 62010 - DNA, 20 bp, synthetic construct
  misc_feature 1..20: note = chemically synthesized
  source 1..20: mol_type = other DNA
cagtgccatgtcttggggca

SEQ ID NO: 62011 - DNA, 20 bp, synthetic construct
  misc_feature 1..20: note = chemically synthesized
  source 1..20: mol_type = other DNA
acatgaacatggtggccttg

SEQ ID NO: 62012 - DNA, 20 bp, synthetic construct
  misc_feature 1..20: note = chemically synthesized
  source 1..20: mol_type = other DNA
gagtaaagttaaaataaagt

SEQ ID NO: 62013 - DNA, 20 bp, synthetic construct
  misc_feature 1..20: note = chemically synthesized
  source 1..20: mol_type = other DNA
ctactctggaggctgaggca

SEQ ID NO: 62014 - DNA, 20 bp, synthetic construct
  misc_feature 1..20: note = chemically synthesized
  source 1..20: mol_type = other DNA
cacgagaatcgctcgtaatt

SEQ ID NO: 62015 - DNA, 20 bp, synthetic construct
  misc_feature 1..20: note = chemically synthesized
  source 1..20: mol_type = other DNA
tgtgagtaggccacatagtt

SEQ ID NO: 62016 - DNA, 20 bp, synthetic construct
  misc_feature 1..20: note = chemically synthesized
  source 1..20: mol_type = other DNA
gccacatagttccagaaaat

SEQ ID NO: 62017 - DNA, 20 bp, synthetic construct
  misc_feature 1..20: note = chemically synthesized
  source 1..20: mol_type = other DNA
cctcagaagagctatgtggg

SEQ ID NO: 62018 - DNA, 20 bp, synthetic construct
  misc_feature 1..20: note = chemically synthesized
  source 1..20: mol_type = other DNA
cctctgcatgtcacaggtgc

SEQ ID NO: 62019 - DNA, 20 bp, synthetic construct
  misc_feature 1..20: note = chemically synthesized
  source 1..20: mol_type = other DNA
tcttccctctgcagctggcc

SEQ ID NO: 62020 - DNA, 20 bp, synthetic construct
  misc_feature 1..20: note = chemically synthesized
  source 1..20: mol_type = other DNA
aaacaaaggcccagagaggg

SEQ ID NO: 62021 - DNA, 20 bp, synthetic construct
  misc_feature 1..20: note = chemically synthesized
  source 1..20: mol_type = other DNA
agagtgggggccatgtatcc

SEQ ID NO: 62022 - DNA, 20 bp, synthetic construct
  misc_feature 1..20: note = chemically synthesized
  source 1..20: mol_type = other DNA
ctggttttccaggagcaaaa

SEQ ID NO: 62023 - DNA, 20 bp, synthetic construct
  misc_feature 1..20: note = chemically synthesized
  source 1..20: mol_type = other DNA
gagtgcagcaggctctccgg

SEQ ID NO: 62024 - DNA, 20 bp, synthetic construct
  misc_feature 1..20: note = chemically synthesized
  source 1..20: mol_type = other DNA
cccttattttatgctcccgg

SEQ ID NO: 62025 - DNA, 20 bp, synthetic construct
  misc_feature 1..20: note = chemically synthesized
  source 1..20: mol_type = other DNA
tgctcccacctgccccgatc

SEQ ID NO: 62026 - DNA, 20 bp, synthetic construct
  misc_feature 1..20: note = chemically synthesized
  source 1..20: mol_type = other DNA
cctctccacctcctttgagc

SEQ ID NO: 62027 - DNA, 20 bp, synthetic construct
  misc_feature 1..20: note = chemically synthesized
  source 1..20: mol_type = other DNA
aacccagatgccattctaac

SEQ ID NO: 62028 - DNA, 20 bp, synthetic construct
  misc_feature 1..20: note = chemically synthesized
  source 1..20: mol_type = other DNA
ctatttgggaagctgagaca

SEQ ID NO: 62029 - DNA, 20 bp, synthetic construct
  misc_feature 1..20: note = chemically synthesized
  source 1..20: mol_type = other DNA
aagttcagttgggaagtgaa

SEQ ID NO: 62030 - DNA, 20 bp, synthetic construct
  misc_feature 1..20: note = chemically synthesized
  source 1..20: mol_type = other DNA
tctaacaacactagctagct

SEQ ID NO: 62031 - DNA, 20 bp, synthetic construct
  misc_feature 1..20: note = chemically synthesized
  source 1..20: mol_type = other DNA
acttagaggcacgagggcca

SEQ ID NO: 62032 - DNA, 20 bp, synthetic construct
  misc_feature 1..20: note = chemically synthesized
  source 1..20: mol_type = other DNA
ggccaggagaaaggtggtgg

SEQ ID NO: 62033 - DNA, 20 bp, synthetic construct
  misc_feature 1..20: note = chemically synthesized
  source 1..20: mol_type = other DNA
tttaaaagtccaagggggtt

SEQ ID NO: 62034 - DNA, 20 bp, synthetic construct
  misc_feature 1..20: note = chemically synthesized
  source 1..20: mol_type = other DNA
agcacctcacgggattgtta

SEQ ID NO: 62035 - DNA, 20 bp, synthetic construct
  misc_feature 1..20: note = chemically synthesized
  source 1..20: mol_type = other DNA
ttcggggacaccgaagaggc

SEQ ID NO: 62036 - DNA, 20 bp, synthetic construct
  misc_feature 1..20: note = chemically synthesized
  source 1..20: mol_type = other DNA
aaccagcctgagctgttccc

SEQ ID NO: 62037 - DNA, 20 bp, synthetic construct
  misc_feature 1..20: note = chemically synthesized
  source 1..20: mol_type = other DNA
tccttgtgtatactgtatat

SEQ ID NO: 62038 - DNA, 20 bp, synthetic construct
  misc_feature 1..20: note = chemically synthesized
  source 1..20: mol_type = other DNA
ctttacacgactctagtgtc

SEQ ID NO: 62039 - DNA, 20 bp, synthetic construct
  misc_feature 1..20: note = chemically synthesized
  source 1..20: mol_type = other DNA
agtctcctccttctgtccaa

SEQ ID NO: 62040 - DNA, 20 bp, synthetic construct
  misc_feature 1..20: note = chemically synthesized
  source 1..20: mol_type = other DNA
aaagctctcaggaatagtaa

SEQ ID NO: 62041 - DNA, 20 bp, synthetic construct
  misc_feature 1..20: note = chemically synthesized
  source 1..20: mol_type = other DNA
tagcctgacatcgccacgat

SEQ ID NO: 62042 - DNA, 20 bp, synthetic construct
  misc_feature 1..20: note = chemically synthesized
  source 1..20: mol_type = other DNA
actctgtataaacttggctt

SEQ ID NO: 62043 - DNA, 20 bp, synthetic construct
  misc_feature 1..20: note = chemically synthesized
  source 1..20: mol_type = other DNA
gtggagtgtggagttcaagg

SEQ ID NO: 62044 - DNA, 20 bp, synthetic construct
  misc_feature 1..20: note = chemically synthesized
  source 1..20: mol_type = other DNA
aagagcctgtgtggcaaggc

SEQ ID NO: 62045 - DNA, 20 bp, synthetic construct
  misc_feature 1..20: note = chemically synthesized
  source 1..20: mol_type = other DNA
gaggtctctgctccaggggt

SEQ ID NO: 62046 - DNA, 20 bp, synthetic construct
  misc_feature 1..20: note = chemically synthesized
  source 1..20: mol_type = other DNA
gagacaggcttccaggacac

SEQ ID NO: 62047 - DNA, 20 bp, synthetic construct
  misc_feature 1..20: note = chemically synthesized
  source 1..20: mol_type = other DNA
ggaggacacaggagtaagtg

SEQ ID NO: 62048 - DNA, 20 bp, synthetic construct
  misc_feature 1..20: note = chemically synthesized
  source 1..20: mol_type = other DNA
ggagtaagtggcagaaataa

SEQ ID NO: 62049 - DNA, 20 bp, synthetic construct
  misc_feature 1..20: note = chemically synthesized
  source 1..20: mol_type = other DNA
aagtggcagaaataatcaga

SEQ ID NO: 62050 - DNA, 20 bp, synthetic construct
  misc_feature 1..20: note = chemically synthesized
  source 1..20: mol_type = other DNA
tgcaccctggtatctgtagg

SEQ ID NO: 62051 - DNA, 20 bp, synthetic construct
  misc_feature 1..20: note = chemically synthesized
  source 1..20: mol_type = other DNA
cttgatttatccatactgac

SEQ ID NO: 62052 - DNA, 20 bp, synthetic construct
  misc_feature 1..20: note = chemically synthesized
  source 1..20: mol_type = other DNA
aaggagcttcaagccgtgta

SEQ ID NO: 62053 - DNA, 20 bp, synthetic construct
  misc_feature 1..20: note = chemically synthesized
  source 1..20: mol_type = other DNA
aaggctgtgctgaccatcga

SEQ ID NO: 62054 - DNA, 20 bp, synthetic construct
  misc_feature 1..20: note = chemically synthesized
  source 1..20: mol_type = other DNA
cttgtccttccatcgctgcc

SEQ ID NO: 62055 - DNA, 20 bp, synthetic construct
  misc_feature 1..20: note = chemically synthesized
  source 1..20: mol_type = other DNA
aaagcctcacatatctccgt

SEQ ID NO: 62056 - DNA, 20 bp, synthetic construct
  misc_feature 1..20: note = chemically synthesized
  source 1..20: mol_type = other DNA
atgtttatacccattagaac

SEQ ID NO: 62057 - DNA, 20 bp, synthetic construct
  misc_feature 1..20: note = chemically synthesized
  source 1..20: mol_type = other DNA
ctcacgcctagcacacttca

SEQ ID NO: 62058 - DNA, 20 bp, synthetic construct
  misc_feature 1..20: note = chemically synthesized
  source 1..20: mol_type = other DNA
agacaccatcgttttacttt

SEQ ID NO: 62059 - DNA, 20 bp, synthetic construct
  misc_feature 1..20: note = chemically synthesized
  source 1..20: mol_type = other DNA
gaaacagatgagagggaaac

SEQ ID NO: 62060 - DNA, 20 bp, synthetic construct
  misc_feature 1..20: note = chemically synthesized
  source 1..20: mol_type = other DNA
agagcttccaggctctcaca

SEQ ID NO: 62061 - DNA, 20 bp, synthetic construct
  misc_feature 1..20: note = chemically synthesized
  source 1..20: mol_type = other DNA
gagctgtgtatgggggatag

SEQ ID NO: 62062 - DNA, 20 bp, synthetic construct
  misc_feature 1..20: note = chemically synthesized
  source 1..20: mol_type = other DNA
gaaacccaggtccatcccgg

SEQ ID NO: 62063 - DNA, 20 bp, synthetic construct
  misc_feature 1..20: note = chemically synthesized
  source 1..20: mol_type = other DNA
ccaggacctttccagaggca

SEQ ID NO: 62064 - DNA, 20 bp, synthetic construct
  misc_feature 1..20: note = chemically synthesized
  source 1..20: mol_type = other DNA
tgaccctgagtagagaagtc

SEQ ID NO: 62065 - DNA, 20 bp, synthetic construct
  misc_feature 1..20: note = chemically synthesized
  source 1..20: mol_type = other DNA
ttgtccttgtcccatgtagc

SEQ ID NO: 62066 - DNA, 20 bp, synthetic construct
  misc_feature 1..20: note = chemically synthesized
  source 1..20: mol_type = other DNA
accctccaatatcagctcta

SEQ ID NO: 62067 - DNA, 20 bp, synthetic construct
  misc_feature 1..20: note = chemically synthesized
  source 1..20: mol_type = other DNA
gcccatcctgactgaaacaa

SEQ ID NO: 62068 - DNA, 20 bp, synthetic construct
  misc_feature 1..20: note = chemically synthesized
  source 1..20: mol_type = other DNA
actcccacaaggaaacccca

SEQ ID NO: 62069 - DNA, 20 bp, synthetic construct
  misc_feature 1..20: note = chemically synthesized
  source 1..20: mol_type = other DNA
agatgctcagcacaggccat

SEQ ID NO: 62070 - DNA, 20 bp, synthetic construct
  misc_feature 1..20: note = chemically synthesized
  source 1..20: mol_type = other DNA
gataccaatgacagtgatca

SEQ ID NO: 62071 - DNA, 20 bp, synthetic construct
  misc_feature 1..20: note = chemically synthesized
  source 1..20: mol_type = other DNA
ggacagtgaatacatttttt

SEQ ID NO: 62072 - DNA, 20 bp, synthetic construct
  misc_feature 1..20: note = chemically synthesized
  source 1..20: mol_type = other DNA
tgacagacaattcttcaaag

SEQ ID NO: 62073 - DNA, 20 bp, synthetic construct
  misc_feature 1..20: note = chemically synthesized
  source 1..20: mol_type = other DNA
aagtctgaggaggagataga

SEQ ID NO: 62074 - DNA, 20 bp, synthetic construct
  misc_feature 1..20: note = chemically synthesized
  source 1..20: mol_type = other DNA
ttgtgttgctgcagatgcca

SEQ ID NO: 62075 - DNA, 20 bp, synthetic construct
  misc_feature 1..20: note = chemically synthesized
  source 1..20: mol_type = other DNA
caggcaaagggagactcaga

SEQ ID NO: 62076 - DNA, 20 bp, synthetic construct
  misc_feature 1..20: note = chemically synthesized
  source 1..20: mol_type = other DNA
tagacatgggtatggcctct

SEQ ID NO: 62077 - DNA, 20 bp, synthetic construct
  misc_feature 1..20: note = chemically synthesized
  source 1..20: mol_type = other DNA
catcttggttttacagtgta

SEQ ID NO: 62078 - DNA, 20 bp, synthetic construct
  misc_feature 1..20: note = chemically synthesized
  source 1..20: mol_type = other DNA
aagattgtgtggggataatt

SEQ ID NO: 62079 - DNA, 20 bp, synthetic construct
  misc_feature 1..20: note = chemically synthesized
  source 1..20: mol_type = other DNA
tgtcatttgtttaatcctaa

SEQ ID NO: 62080 - DNA, 20 bp, synthetic construct
  misc_feature 1..20: note = chemically synthesized
  source 1..20: mol_type = other DNA
aacccaggtctttcagattg

SEQ ID NO: 62081 - DNA, 20 bp, synthetic construct
  misc_feature 1..20: note = chemically synthesized
  source 1..20: mol_type = other DNA
cctcaaattactcaatgatg

SEQ ID NO: 62082 - DNA, 20 bp, synthetic construct
  misc_feature 1..20: note = chemically synthesized
  source 1..20: mol_type = other DNA
cattttagtgtttgtgtgta

SEQ ID NO: 62083 - DNA, 20 bp, synthetic construct
  misc_feature 1..20: note = chemically synthesized
  source 1..20: mol_type = other DNA
aagatgtaattcaccagagc

SEQ ID NO: 62084 - DNA, 20 bp, synthetic construct
  misc_feature 1..20: note = chemically synthesized
  source 1..20: mol_type = other DNA
acaactttttaacatcctcc

SEQ ID NO: 62085 - DNA, 20 bp, synthetic construct
  misc_feature 1..20: note = chemically synthesized
  source 1..20: mol_type = other DNA
cctgccgtcttcacagatgg

SEQ ID NO: 62086 - DNA, 20 bp, synthetic construct
  misc_feature 1..20: note = chemically synthesized
  source 1..20: mol_type = other DNA
acattgttaactactagtca

SEQ ID NO: 62087 - DNA, 20 bp, synthetic construct
  misc_feature 1..20: note = chemically synthesized
  source 1..20: mol_type = other DNA
ttaactactagtcacaaaac

SEQ ID NO: 62088 - DNA, 20 bp, synthetic construct
  misc_feature 1..20: note = chemically synthesized
  source 1..20: mol_type = other DNA
gtccttgaatttgggaaatg

SEQ ID NO: 62089 - DNA, 20 bp, synthetic construct
  misc_feature 1..20: note = chemically synthesized
  source 1..20: mol_type = other DNA
ggcatctgggttcaatgtag

SEQ ID NO: 62090 - DNA, 20 bp, synthetic construct
  misc_feature 1..20: note = chemically synthesized
  source 1..20: mol_type = other DNA
tccttataacatcaggactc

SEQ ID NO: 62091 - DNA, 20 bp, synthetic construct
  misc_feature 1..20: note = chemically synthesized
  source 1..20: mol_type = other DNA
atcacagagctacttgctta

SEQ ID NO: 62092 - DNA, 20 bp, synthetic construct
  misc_feature 1..20: note = chemically synthesized
  source 1..20: mol_type = other DNA
ggattaaacagatttcactc

SEQ ID NO: 62093 - DNA, 20 bp, synthetic construct
  misc_feature 1..20: note = chemically synthesized
  source 1..20: mol_type = other DNA
aagccagaagtcttgaatca

SEQ ID NO: 62094 - DNA, 20 bp, synthetic construct
  misc_feature 1..20: note = chemically synthesized
  source 1..20: mol_type = other DNA
tcatctttttgacctgtctc

SEQ ID NO: 62095 - DNA, 20 bp, synthetic construct
  misc_feature 1..20: note = chemically synthesized
  source 1..20: mol_type = other DNA
tgtttctgtttttgctcctg

SEQ ID NO: 62096 - DNA, 20 bp, synthetic construct
  misc_feature 1..20: note = chemically synthesized
  source 1..20: mol_type = other DNA
gaagggctaggataatctgg

SEQ ID NO: 62097 - DNA, 20 bp, synthetic construct
  misc_feature 1..20: note = chemically synthesized
  source 1..20: mol_type = other DNA
ggggatgtgtcctggctctg

SEQ ID NO: 62098 - DNA, 20 bp, synthetic construct
  misc_feature 1..20: note = chemically synthesized
  source 1..20: mol_type = other DNA
ctttcaaattagccaacttg

SEQ ID NO: 62099 - DNA, 20 bp, synthetic construct
  misc_feature 1..20: note = chemically synthesized
  source 1..20: mol_type = other DNA
ccccttcttgttaaaattac

SEQ ID NO: 62100 - DNA, 20 bp, synthetic construct
  misc_feature 1..20: note = chemically synthesized
  source 1..20: mol_type = other DNA
tcagaaaaggttagctgcaa

SEQ ID NO: 62101 - DNA, 20 bp, synthetic construct
  misc_feature 1..20: note = chemically synthesized
  source 1..20: mol_type = other DNA
gggggtcattgtgcagatgg

SEQ ID NO: 62102 - DNA, 20 bp, synthetic construct
  misc_feature 1..20: note = chemically synthesized
  source 1..20: mol_type = other DNA
cacactggttttccaggagc

SEQ ID NO: 62103 - DNA, 20 bp, synthetic construct
  misc_feature 1..20: note = chemically synthesized
  source 1..20: mol_type = other DNA
aacctctctgttctcttggg

SEQ ID NO: 62104 - DNA, 20 bp, synthetic construct
  misc_feature 1..20: note = chemically synthesized
  source 1..20: mol_type = other DNA
gaaatctgtttaatcccaga

SEQ ID NO: 62105 - DNA, 20 bp, synthetic construct
  misc_feature 1..20: note = chemically synthesized
  source 1..20: mol_type = other DNA
attagatgatacggtgcctg

SEQ ID NO: 62106 - DNA, 20 bp, synthetic construct
  misc_feature 1..20: note = chemically synthesized
  source 1..20: mol_type = other DNA
aagcgagactctgtctcaaa

SEQ ID NO: 62107 - DNA, 20 bp, synthetic construct
  misc_feature 1..20: note = chemically synthesized
  source 1..20: mol_type = other DNA
ctctgtctcaaaaaaaaccc

SEQ ID NO: 62108 - DNA, 20 bp, synthetic construct
  misc_feature 1..20: note = chemically synthesized
  source 1..20: mol_type = other DNA
acagccccgtctcttgggaa

SEQ ID NO: 62109 - DNA, 20 bp, synthetic construct
  misc_feature 1..20: note = chemically synthesized
  source 1..20: mol_type = other DNA
tgcctcattttcttcttttg

SEQ ID NO: 62110 - DNA, 20 bp, synthetic construct
  misc_feature 1..20: note = chemically synthesized
  source 1..20: mol_type = other DNA
gaaataatagattaaactgt

SEQ ID NO: 62111 - DNA, 20 bp, synthetic construct
  misc_feature 1..20: note = chemically synthesized
  source 1..20: mol_type = other DNA
taacacaattagcttttgac

SEQ ID NO: 62112 - DNA, 20 bp, synthetic construct
  misc_feature 1..20: note = chemically synthesized
  source 1..20: mol_type = other DNA
gccagctcccactgtcccag

SEQ ID NO: 62113 - DNA, 20 bp, synthetic construct
  misc_feature 1..20: note = chemically synthesized
  source 1..20: mol_type = other DNA
ctagttcgttttgtacactg

SEQ ID NO: 62114 - DNA, 20 bp, synthetic construct
  misc_feature 1..20: note = chemically synthesized
  source 1..20: mol_type = other DNA
ggtggcattgtctccccatg

SEQ ID NO: 62115 - DNA, 20 bp, synthetic construct
  misc_feature 1..20: note = chemically synthesized
  source 1..20: mol_type = other DNA
tggcagaaataatcagaaaa

SEQ ID NO: 62116 - DNA, 20 bp, synthetic construct
  misc_feature 1..20: note = chemically synthesized
  source 1..20: mol_type = other DNA
taaagatgacacttattttg

SEQ ID NO: 62117 - DNA, 20 bp, synthetic construct
  misc_feature 1..20: note = chemically synthesized
  source 1..20: mol_type = other DNA
cgcctagcacacttcatgag

SEQ ID NO: 62118 - DNA, 20 bp, synthetic construct
  misc_feature 1..20: note = chemically synthesized
  source 1..20: mol_type = other DNA
acagatgagagggaaacgca

SEQ ID NO: 62119 - DNA, 20 bp, synthetic construct
  misc_feature 1..20: note = chemically synthesized
  source 1..20: mol_type = other DNA
tctatcagaaacaaacaaac

SEQ ID NO: 62120 - DNA, 20 bp, synthetic construct
  misc_feature 1..20: note = chemically synthesized
  source 1..20: mol_type = other DNA
ggaagggtgactaagatctg

SEQ ID NO: 62121 - DNA, 20 bp, synthetic construct
  misc_feature 1..20: note = chemically synthesized
  source 1..20: mol_type = other DNA
gagcacttcaattgtggaaa

SEQ ID NO: 62122 - DNA, 20 bp, synthetic construct
  misc_feature 1..20: note = chemically synthesized
  source 1..20: mol_type = other DNA
ggggtggaggccgtcccctt

SEQ ID NO: 62123 - DNA, 20 bp, synthetic construct
  misc_feature 1..20: note = chemically synthesized
  source 1..20: mol_type = other DNA
ttgtaactagaactttctaa

SEQ ID NO: 62124 - DNA, 20 bp, synthetic construct
  misc_feature 1..20: note = chemically synthesized
  source 1..20: mol_type = other DNA
gggagttcctttagccttcc

SEQ ID NO: 62125 - DNA, 20 bp, synthetic construct
  misc_feature 1..20: note = chemically synthesized
  source 1..20: mol_type = other DNA
ttcagatcttagtcaccctt

SEQ ID NO: 62126 - DNA, 20 bp, synthetic construct
  misc_feature 1..20: note = chemically synthesized
  source 1..20: mol_type = other DNA
tgatgcatttcatgaattct

SEQ ID NO: 62127 - DNA, 20 bp, synthetic construct
  misc_feature 1..20: note = chemically synthesized
  source 1..20: mol_type = other DNA
gttgtttcagtcaggatggg

SEQ ID NO: 62128 - DNA, 20 bp, synthetic construct
  misc_feature 1..20: note = chemically synthesized
  source 1..20: mol_type = other DNA
caaccgagaagctcacagct

SEQ ID NO: 62129 - DNA, 20 bp, synthetic construct
  misc_feature 1..20: note = chemically synthesized
  source 1..20: mol_type = other DNA
tgcttcaaccctttagaaag

SEQ ID NO: 62130 - DNA, 20 bp, synthetic construct
  misc_feature 1..20: note = chemically synthesized
  source 1..20: mol_type = other DNA
gacacagcaaccagactgaa

SEQ ID NO: 62131 - DNA, 20 bp, synthetic construct
  misc_feature 1..20: note = chemically synthesized
  source 1..20: mol_type = other DNA
tcctttcatcattcctgatg

SEQ ID NO: 62132 - DNA, 20 bp, synthetic construct
  misc_feature 1..20: note = chemically synthesized
  source 1..20: mol_type = other DNA
gcgtctgctgtcagcatctt

SEQ ID NO: 62133 - DNA, 20 bp, synthetic construct
  misc_feature 1..20: note = chemically synthesized
  source 1..20: mol_type = other DNA
gaaaaggacaaatgaataag

SEQ ID NO: 62134 - DNA, 20 bp, synthetic construct
  misc_feature 1..20: note = chemically synthesized
  source 1..20: mol_type = other DNA
gacaaatgaataagacatgt

SEQ ID NO: 62135 - DNA, 20 bp, synthetic construct
  misc_feature 1..20: note = chemically synthesized
  source 1..20: mol_type = other DNA
aatgaataagacatgttttt

SEQ ID NO: 62136 - DNA, 20 bp, synthetic construct
  misc_feature 1..20: note = chemically synthesized
  source 1..20: mol_type = other DNA
aataagacatgtttttgttt

SEQ ID NO: 62137 - DNA, 20 bp, synthetic construct
  misc_feature 1..20: note = chemically synthesized
  source 1..20: mol_type = other DNA
atagagctgatattggaggg

SEQ ID NO: 62138 - DNA, 20 bp, synthetic construct
  misc_feature 1..20: note = chemically synthesized
  source 1..20: mol_type = other DNA
gagggtgaggcttatgcctg

SEQ ID NO: 62139 - DNA, 20 bp, synthetic construct
  misc_feature 1..20: note = chemically synthesized
  source 1..20: mol_type = other DNA
aggcttatgcctgttgggat

SEQ ID NO: 62140 - DNA, 20 bp, synthetic construct
  misc_feature 1..20: note = chemically synthesized
  source 1..20: mol_type = other DNA
gaaactgacctctcatgctg

SEQ ID NO: 62141 - DNA, 20 bp, synthetic construct
  misc_feature 1..20: note = chemically synthesized
  source 1..20: mol_type = other DNA
ggctccacaactaggccaga

SEQ ID NO: 62142 - DNA, 20 bp, synthetic construct
  misc_feature 1..20: note = chemically synthesized
  source 1..20: mol_type = other DNA
tcattgcattgaaacctcaa

SEQ ID NO: 62143 - DNA, 20 bp, synthetic construct
  misc_feature 1..20: note = chemically synthesized
  source 1..20: mol_type = other DNA
atatgatacaatagtgacac

SEQ ID NO: 62144 - DNA, 20 bp, synthetic construct
  misc_feature 1..20: note = chemically synthesized
  source 1..20: mol_type = other DNA
gcctgggtccctgctgggga

SEQ ID NO: 62145 - DNA, 20 bp, synthetic construct
  misc_feature 1..20: note = chemically synthesized
  source 1..20: mol_type = other DNA
gttctgagtcctgtggtgtg

SEQ ID NO: 62146 - DNA, 20 bp, synthetic construct
  misc_feature 1..20: note = chemically synthesized
  source 1..20: mol_type = other DNA
agcctttcaaggagcacttg

SEQ ID NO: 62147 - DNA, 20 bp, synthetic construct
  misc_feature 1..20: note = chemically synthesized
  source 1..20: mol_type = other DNA
gtcatctgtgggtgtaggct

SEQ ID NO: 62148 - DNA, 20 bp, synthetic construct
  misc_feature 1..20: note = chemically synthesized
  source 1..20: mol_type = other DNA
gcattctccccgggatggac

SEQ ID NO: 62149 - DNA, 20 bp, synthetic construct
  misc_feature 1..20: note = chemically synthesized
  source 1..20: mol_type = other DNA
ctctatcccccatacacagc

SEQ ID NO: 62150 - DNA, 20 bp, synthetic construct
  misc_feature 1..20: note = chemically synthesized
  source 1..20: mol_type = other DNA
atcccccatacacagctcat

SEQ ID NO: 62151 - DNA, 20 bp, synthetic construct
  misc_feature 1..20: note = chemically synthesized
  source 1..20: mol_type = other DNA
cccatacacagctcatgttt

SEQ ID NO: 62152 - DNA, 20 bp, synthetic construct
  misc_feature 1..20: note = chemically synthesized
  source 1..20: mol_type = other DNA
acagctcatgtttgcttgtt

SEQ ID NO: 62153 - DNA, 20 bp, synthetic construct
  misc_feature 1..20: note = chemically synthesized
  source 1..20: mol_type = other DNA
tgcttgtttgttgtttggat

SEQ ID NO: 62154 - DNA, 20 bp, synthetic construct
  misc_feature 1..20: note = chemically synthesized
  source 1..20: mol_type = other DNA
gtttggataaatgcttcccg

SEQ ID NO: 62155 - DNA, 20 bp, synthetic construct
  misc_feature 1..20: note = chemically synthesized
  source 1..20: mol_type = other DNA
atcagtgtgaaatctgtatt

SEQ ID NO: 62156 - DNA, 20 bp, synthetic construct
  misc_feature 1..20: note = chemically synthesized
  source 1..20: mol_type = other DNA
acagggtgccccctgtccgg

SEQ ID NO: 62157 - DNA, 20 bp, synthetic construct
  misc_feature 1..20: note = chemically synthesized
  source 1..20: mol_type = other DNA
gcagagcttgcacttcaaac

SEQ ID NO: 62158 - DNA, 20 bp, synthetic construct
  misc_feature 1..20: note = chemically synthesized
  source 1..20: mol_type = other DNA
caaactaaggcttcctttat

SEQ ID NO: 62159 - DNA, 20 bp, synthetic construct
  misc_feature 1..20: note = chemically synthesized
  source 1..20: mol_type = other DNA
aggttcctggctgagctgga

SEQ ID NO: 62160 - DNA, 20 bp, synthetic construct
  misc_feature 1..20: note = chemically synthesized
  source 1..20: mol_type = other DNA
gctgagctggaagctgtttt

SEQ ID NO: 62161 - DNA, 20 bp, synthetic construct
  misc_feature 1..20: note = chemically synthesized
  source 1..20: mol_type = other DNA
gttttctgcgtttccctctc

SEQ ID NO: 62162 - DNA, 20 bp, synthetic construct
  misc_feature 1..20: note = chemically synthesized
  source 1..20: mol_type = other DNA
ttggaacacccagggtgccc

SEQ ID NO: 62163 - DNA, 20 bp, synthetic construct
  misc_feature 1..20: note = chemically synthesized
  source 1..20: mol_type = other DNA
agtgtggtcctggaggatgg

SEQ ID NO: 62164 - DNA, 20 bp, synthetic construct
  misc_feature 1..20: note = chemically synthesized
  source 1..20: mol_type = other DNA
gagcatttgacctgctgggc

SEQ ID NO: 62165 - DNA, 20 bp, synthetic construct
  misc_feature 1..20: note = chemically synthesized
  source 1..20: mol_type = other DNA
gcccatccttgactgatccc

SEQ ID NO: 62166 - DNA, 20 bp, synthetic construct
  misc_feature 1..20: note = chemically synthesized
  source 1..20: mol_type = other DNA
aattccctctgggaggttat

SEQ ID NO: 62167 - DNA, 20 bp, synthetic construct
  misc_feature 1..20: note = chemically synthesized
  source 1..20: mol_type = other DNA
gctgtgtcaacatctggtgg

SEQ ID NO: 62168 - DNA, 20 bp, synthetic construct
  misc_feature 1..20: note = chemically synthesized
  source 1..20: mol_type = other DNA
cctgctccacactgggcaca

SEQ ID NO: 62169 - DNA, 20 bp, synthetic construct
  misc_feature 1..20: note = chemically synthesized
  source 1..20: mol_type = other DNA
tgtgggccaccagcaaccct

SEQ ID NO: 62170 - DNA, 20 bp, synthetic construct
  misc_feature 1..20: note = chemically synthesized
  source 1..20: mol_type = other DNA
taaggaggaattacctctgc

SEQ ID NO: 62171 - DNA, 20 bp, synthetic construct
  misc_feature 1..20: note = chemically synthesized
  source 1..20: mol_type = other DNA
aggaacaagtagcccatcaa

SEQ ID NO: 62172 - DNA, 20 bp, synthetic construct
  misc_feature 1..20: note = chemically synthesized
  source 1..20: mol_type = other DNA
gaccagtagcctctctgagc

SEQ ID NO: 62173 - DNA, 20 bp, synthetic construct
  misc_feature 1..20: note = chemically synthesized
  source 1..20: mol_type = other DNA
cctctctgagcctcagtttc

SEQ ID NO: 62174 - DNA, 20 bp, synthetic construct
  misc_feature 1..20: note = chemically synthesized
  source 1..20: mol_type = other DNA
agcctcagtttcctcagatt

SEQ ID NO: 62175 - DNA, 20 bp, synthetic construct
  misc_feature 1..20: note = chemically synthesized
  source 1..20: mol_type = other DNA
gggaggtacttcatagggat

SEQ ID NO: 62176 - DNA, 20 bp, synthetic construct
  misc_feature 1..20: note = chemically synthesized
  source 1..20: mol_type = other DNA
tagcaatgactggggctcag

SEQ ID NO: 62177 - DNA, 20 bp, synthetic construct
  misc_feature 1..20: note = chemically synthesized
  source 1..20: mol_type = other DNA
tcaggtctggtgtcatccta

SEQ ID NO: 62178 - DNA, 20 bp, synthetic construct
  misc_feature 1..20: note = chemically synthesized
  source 1..20: mol_type = other DNA
gagtgaaaggctgtcagtga

SEQ ID NO: 62179 - DNA, 20 bp, synthetic construct
  misc_feature 1..20: note = chemically synthesized
  source 1..20: mol_type = other DNA
tgtgggaaacagtcggtatc

SEQ ID NO: 62180 - DNA, 20 bp, synthetic construct
  misc_feature 1..20: note = chemically synthesized
  source 1..20: mol_type = other DNA
catgacagtgagtggttaga

SEQ ID NO: 62181 - DNA, 20 bp, synthetic construct
  misc_feature 1..20: note = chemically synthesized
  source 1..20: mol_type = other DNA
tgagtggttagacagtgatt

SEQ ID NO: 62182 - DNA, 20 bp, synthetic construct
  misc_feature 1..20: note = chemically synthesized
  source 1..20: mol_type = other DNA
ggttagacagtgattcctag

SEQ ID NO: 62183 - DNA, 20 bp, synthetic construct
  misc_feature 1..20: note = chemically synthesized
  source 1..20: mol_type = other DNA
gttgcgggggtcaatgggtg

SEQ ID NO: 62184 - DNA, 20 bp, synthetic construct
  misc_feature 1..20: note = chemically synthesized
  source 1..20: mol_type = other DNA
tcttcatctggggagaaggg

SEQ ID NO: 62185 - DNA, 20 bp, synthetic construct
  misc_feature 1..20: note = chemically synthesized
  source 1..20: mol_type = other DNA
tgattctaaacggagatatg

SEQ ID NO: 62186 - DNA, 20 bp, synthetic construct
  misc_feature 1..20: note = chemically synthesized
  source 1..20: mol_type = other DNA
tccttgttgccccatggaga

SEQ ID NO: 62187 - DNA, 20 bp, synthetic construct
  misc_feature 1..20: note = chemically synthesized
  source 1..20: mol_type = other DNA
ggatgagcagggggacatga

SEQ ID NO: 62188 - DNA, 20 bp, synthetic construct
  misc_feature 1..20: note = chemically synthesized
  source 1..20: mol_type = other DNA
gctggtatctggttcctccc

SEQ ID NO: 62189 - DNA, 20 bp, synthetic construct
  misc_feature 1..20: note = chemically synthesized
  source 1..20: mol_type = other DNA
atgggcccaggtccgtaagc

SEQ ID NO: 62190 - DNA, 20 bp, synthetic construct
  misc_feature 1..20: note = chemically synthesized
  source 1..20: mol_type = other DNA
aagctgaggattcagtcccc

SEQ ID NO: 62191 - DNA, 20 bp, synthetic construct
  misc_feature 1..20: note = chemically synthesized
  source 1..20: mol_type = other DNA
gagactcagagaaaacatgg

SEQ ID NO: 62192 - DNA, 20 bp, synthetic construct
  misc_feature 1..20: note = chemically synthesized
  source 1..20: mol_type = other DNA
cgagaggcagttatttttgg

SEQ ID NO: 62193 - DNA, 20 bp, synthetic construct
  misc_feature 1..20: note = chemically synthesized
  source 1..20: mol_type = other DNA
gttcaatcattaagaagaca

SEQ ID NO: 62194 - DNA, 20 bp, synthetic construct
  misc_feature 1..20: note = chemically synthesized
  source 1..20: mol_type = other DNA
gcctctaaaaacatggcccc

SEQ ID NO: 62195 - DNA, 20 bp, synthetic construct
  misc_feature 1..20: note = chemically synthesized
  source 1..20: mol_type = other DNA
acataggccttgctcctcct

SEQ ID NO: 62196 - DNA, 20 bp, synthetic construct
  misc_feature 1..20: note = chemically synthesized
  source 1..20: mol_type = other DNA
gggctctctcctttctagta

SEQ ID NO: 62197 - DNA, 20 bp, synthetic construct
  misc_feature 1..20: note = chemically synthesized
  source 1..20: mol_type = other DNA
gcagttgttcattggtcgcc

SEQ ID NO: 62198 - DNA, 20 bp, synthetic construct
  misc_feature 1..20: note = chemically synthesized
  source 1..20: mol_type = other DNA
agctgcacagcagtcccctg

SEQ ID NO: 62199 - DNA, 20 bp, synthetic construct
  misc_feature 1..20: note = chemically synthesized
  source 1..20: mol_type = other DNA
agcagtcccctgcctggctt

SEQ ID NO: 62200 - DNA, 20 bp, synthetic construct
  misc_feature 1..20: note = chemically synthesized
  source 1..20: mol_type = other DNA
ggagctcagcctgggtcttc

SEQ ID NO: 62201 - DNA, 20 bp, synthetic construct
  misc_feature 1..20: note = chemically synthesized
  source 1..20: mol_type = other DNA
gtcagggtgatctcaccttg

SEQ ID NO: 62202 - DNA, 20 bp, synthetic construct
  misc_feature 1..20: note = chemically synthesized
  source 1..20: mol_type = other DNA
gatcataggttccagtaatg

SEQ ID NO: 62203 - DNA, 20 bp, synthetic construct
  misc_feature 1..20: note = chemically synthesized
  source 1..20: mol_type = other DNA
tctgggacccaccacagtgc

SEQ ID NO: 62204 - DNA, 20 bp, synthetic construct
  misc_feature 1..20: note = chemically synthesized
  source 1..20: mol_type = other DNA
cacagtgcaagtgttttctt

SEQ ID NO: 62205 - DNA, 20 bp, synthetic construct
  misc_feature 1..20: note = chemically synthesized
  source 1..20: mol_type = other DNA
cacccacactaagatgggaa

SEQ ID NO: 62206 - DNA, 20 bp, synthetic construct
  misc_feature 1..20: note = chemically synthesized
  source 1..20: mol_type = other DNA
cactaagatgggaactcggc

SEQ ID NO: 62207 - DNA, 20 bp, synthetic construct
  misc_feature 1..20: note = chemically synthesized
  source 1..20: mol_type = other DNA
gttaacatcgaatgaatcac

SEQ ID NO: 62208 - DNA, 20 bp, synthetic construct
  misc_feature 1..20: note = chemically synthesized
  source 1..20: mol_type = other DNA
tggtggcagtgcccagtgac

SEQ ID NO: 62209 - DNA, 20 bp, synthetic construct
  misc_feature 1..20: note = chemically synthesized
  source 1..20: mol_type = other DNA
caccaggctgagtgctcctc

SEQ ID NO: 62210 - DNA, 20 bp, synthetic construct
  misc_feature 1..20: note = chemically synthesized
  source 1..20: mol_type = other DNA
agcagggtctggtgtgagcg

SEQ ID NO: 62211 - DNA, 20 bp, synthetic construct
  misc_feature 1..20: note = chemically synthesized
  source 1..20: mol_type = other DNA
atggaacagagaaattccag

SEQ ID NO: 62212 - DNA, 20 bp, synthetic construct
  misc_feature 1..20: note = chemically synthesized
  source 1..20: mol_type = other DNA
gacaccttttgtattttcat

SEQ ID NO: 62213 - DNA, 20 bp, synthetic construct
  misc_feature 1..20: note = chemically synthesized
  source 1..20: mol_type = other DNA
cacatacactaatgtgtggc

SEQ ID NO: 62214 - DNA, 20 bp, synthetic construct
  misc_feature 1..20: note = chemically synthesized
  source 1..20: mol_type = other DNA
ctggctgttccaattccgaa

SEQ ID NO: 62215 - DNA, 20 bp, synthetic construct
  misc_feature 1..20: note = chemically synthesized
  source 1..20: mol_type = other DNA
tggtggcctcattctggaag

SEQ ID NO: 62216 - DNA, 20 bp, synthetic construct
  misc_feature 1..20: note = chemically synthesized
  source 1..20: mol_type = other DNA
caacatggctaagaggtgtg

SEQ ID NO: 62217 - DNA, 20 bp, synthetic construct
  misc_feature 1..20: note = chemically synthesized
  source 1..20: mol_type = other DNA
tgagttcattttccaggtgc

SEQ ID NO: 62218 - DNA, 20 bp, synthetic construct
  misc_feature 1..20: note = chemically synthesized
  source 1..20: mol_type = other DNA
tcatcagcagcacccagctg

SEQ ID NO: 62219 - DNA, 20 bp, synthetic construct
  misc_feature 1..20: note = chemically synthesized
  source 1..20: mol_type = other DNA
gctggatgttaaacatgcct

SEQ ID NO: 62220 - DNA, 20 bp, synthetic construct
  misc_feature 1..20: note = chemically synthesized
  source 1..20: mol_type = other DNA
gggcatcaccaggggtgagt

SEQ ID NO: 62221 - DNA, 20 bp, synthetic construct
  misc_feature 1..20: note = chemically synthesized
  source 1..20: mol_type = other DNA
acgacacacatccctcgagg

SEQ ID NO: 62222 - DNA, 20 bp, synthetic construct
  misc_feature 1..20: note = chemically synthesized
  source 1..20: mol_type = other DNA
ctgaccatccaagctgccga

SEQ ID NO: 62223 - DNA, 20 bp, synthetic construct
  misc_feature 1..20: note = chemically synthesized
  source 1..20: mol_type = other DNA
tgtgcatttttattggaatc

SEQ ID NO: 62224 - DNA, 20 bp, synthetic construct
  misc_feature 1..20: note = chemically synthesized
  source 1..20: mol_type = other DNA
ttattcatccagggcaaaca

SEQ ID NO: 62225 - DNA, 20 bp, synthetic construct
  misc_feature 1..20: note = chemically synthesized
  source 1..20: mol_type = other DNA
acattctgcttactattcct

SEQ ID NO: 62226 - DNA, 20 bp, synthetic construct
  misc_feature 1..20: note = chemically synthesized
  source 1..20: mol_type = other DNA
cctgagagctttcctcatcc

SEQ ID NO: 62227 - DNA, 20 bp, synthetic construct
  misc_feature 1..20: note = chemically synthesized
  source 1..20: mol_type = other DNA
cctcccctctgccataccaa

SEQ ID NO: 62228 - DNA, 20 bp, synthetic construct
  misc_feature 1..20: note = chemically synthesized
  source 1..20: mol_type = other DNA
gggcctcagggacccctgat

SEQ ID NO: 62229 - DNA, 20 bp, synthetic construct
  misc_feature 1..20: note = chemically synthesized
  source 1..20: mol_type = other DNA
ctcccacctcccctccccta

SEQ ID NO: 62230 - DNA, 20 bp, synthetic construct
  misc_feature 1..20: note = chemically synthesized
  source 1..20: mol_type = other DNA
gttttcctgggacagtggga

SEQ ID NO: 62231 - DNA, 20 bp, synthetic construct
  misc_feature 1..20: note = chemically synthesized
  source 1..20: mol_type = other DNA
ccatccccacagtctttgtc

SEQ ID NO: 62232 - DNA, 20 bp, synthetic construct
  misc_feature 1..20: note = chemically synthesized
  source 1..20: mol_type = other DNA
cacctcaaagaggtagaatg

SEQ ID NO: 62233 - DNA, 20 bp, synthetic construct
  misc_feature 1..20: note = chemically synthesized
  source 1..20: mol_type = other DNA
aaaagctaattgtgttagag

SEQ ID NO: 62234 - DNA, 20 bp, synthetic construct
  misc_feature 1..20: note = chemically synthesized
  source 1..20: mol_type = other DNA
caggatttgaacccaggtct

SEQ ID NO: 62235 - DNA, 20 bp, synthetic construct
  misc_feature 1..20: note = chemically synthesized
  source 1..20: mol_type = other DNA
ctttcagattgcaaaactga

SEQ ID NO: 62236 - DNA, 20 bp, synthetic construct
  misc_feature 1..20: note = chemically synthesized
  source 1..20: mol_type = other DNA
aaaagttctgcagagctgtc

SEQ ID NO: 62237 - DNA, 20 bp, synthetic construct
  misc_feature 1..20: note = chemically synthesized
  source 1..20: mol_type = other DNA
gcagagctgtcagtagtttt

SEQ ID NO: 62238 - DNA, 20 bp, synthetic construct
  misc_feature 1..20: note = chemically synthesized
  source 1..20: mol_type = other DNA
ctcaatgatggaaaacattt

SEQ ID NO: 62239 - DNA, 20 bp, synthetic construct
  misc_feature 1..20: note = chemically synthesized
  source 1..20: mol_type = other DNA
ccaaggagagttcaagaact

SEQ ID NO: 62240 - DNA, 20 bp, synthetic construct
  misc_feature 1..20: note = chemically synthesized
  source 1..20: mol_type = other DNA
aactgatggtttgagaatat

SEQ ID NO: 62241 - DNA, 20 bp, synthetic construct
  misc_feature 1..20: note = chemically synthesized
  source 1..20: mol_type = other DNA
gatggtttgagaatattttt

SEQ ID NO: 62242 - DNA, 20 bp, synthetic construct
  misc_feature 1..20: note = chemically synthesized
  source 1..20: mol_type = other DNA
ccttctccacgtaatcgttg

SEQ ID NO: 62243 - DNA, 20 bp, synthetic construct
  misc_feature 1..20: note = chemically synthesized
  source 1..20: mol_type = other DNA
gtgtccccgaagttgacagt

SEQ ID NO: 62244 - DNA, 20 bp, synthetic construct
  misc_feature 1..20: note = chemically synthesized
  source 1..20: mol_type = other DNA
catcctccaaaaacttatcc

SEQ ID NO: 62245 - DNA, 20 bp, synthetic construct
  misc_feature 1..20: note = chemically synthesized
  source 1..20: mol_type = other DNA
gaggttgaaattcaggccct

SEQ ID NO: 62246 - DNA, 20 bp, synthetic construct
  misc_feature 1..20: note = chemically synthesized
  source 1..20: mol_type = other DNA
acatgatgactcccagtgat

SEQ ID NO: 62247 - DNA, 20 bp, synthetic construct
  misc_feature 1..20: note = chemically synthesized
  source 1..20: mol_type = other DNA
tgacaccacgtggaagtgcc

SEQ ID NO: 62248 - DNA, 20 bp, synthetic construct
  misc_feature 1..20: note = chemically synthesized
  source 1..20: mol_type = other DNA
gaagaatagcaaaatgtacg

SEQ ID NO: 62249 - DNA, 20 bp, synthetic construct
  misc_feature 1..20: note = chemically synthesized
  source 1..20: mol_type = other DNA
cgtgctcacatgtgttaatt

SEQ ID NO: 62250 - DNA, 20 bp, synthetic construct
  misc_feature 1..20: note = chemically synthesized
  source 1..20: mol_type = other DNA
agatgaagaaaccaaagcca

SEQ ID NO: 62251 - DNA, 20 bp, synthetic construct
  misc_feature 1..20: note = chemically synthesized
  source 1..20: mol_type = other DNA
taagatgcaaatggtacagc

SEQ ID NO: 62252 - DNA, 20 bp, synthetic construct
  misc_feature 1..20: note = chemically synthesized
  source 1..20: mol_type = other DNA
aagaagaggaatgggcctgc

SEQ ID NO: 62253 - DNA, 20 bp, synthetic construct
  misc_feature 1..20: note = chemically synthesized
  source 1..20: mol_type = other DNA
tgtcaagctggaagcccttg

SEQ ID NO: 62254 - DNA, 20 bp, synthetic construct
  misc_feature 1..20: note = chemically synthesized
  source 1..20: mol_type = other DNA
agctagagagcatggagggg

SEQ ID NO: 62255 - DNA, 20 bp, synthetic construct
  misc_feature 1..20: note = chemically synthesized
  source 1..20: mol_type = other DNA
tcacaaggatcctcagccct

SEQ ID NO: 62256 - DNA, 20 bp, synthetic construct
  misc_feature 1..20: note = chemically synthesized
  source 1..20: mol_type = other DNA
aataggctgatgctcctgca

SEQ ID NO: 62257 - DNA, 20 bp, synthetic construct
  misc_feature 1..20: note = chemically synthesized
  source 1..20: mol_type = other DNA
agttctgggctcttgctgtc

SEQ ID NO: 62258 - DNA, 20 bp, synthetic construct
  misc_feature 1..20: note = chemically synthesized
  source 1..20: mol_type = other DNA
gctcatctctccttgaaagc

SEQ ID NO: 62259 - DNA, 20 bp, synthetic construct
  misc_feature 1..20: note = chemically synthesized
  source 1..20: mol_type = other DNA
tccttgaaagcaggggtttg

SEQ ID NO: 62260 - DNA, 20 bp, synthetic construct
  misc_feature 1..20: note = chemically synthesized
  source 1..20: mol_type = other DNA
attttgcctcatacataaag

SEQ ID NO: 62261 - DNA, 20 bp, synthetic construct
  misc_feature 1..20: note = chemically synthesized
  source 1..20: mol_type = other DNA
ttggcaggtgttgcaaattc

SEQ ID NO: 62262 - DNA, 20 bp, synthetic construct
  misc_feature 1..20: note = chemically synthesized
  source 1..20: mol_type = other DNA
gtgataggccagtgaggaat

SEQ ID NO: 62263 - DNA, 20 bp, synthetic construct
  misc_feature 1..20: note = chemically synthesized
  source 1..20: mol_type = other DNA
tccttctactccagatatgc

SEQ ID NO: 62264 - DNA, 20 bp, synthetic construct
  misc_feature 1..20: note = chemically synthesized
  source 1..20: mol_type = other DNA
aaagctggaaataacaaata

SEQ ID NO: 62265 - DNA, 20 bp, synthetic construct
  misc_feature 1..20: note = chemically synthesized
  source 1..20: mol_type = other DNA
ttcaacccccttggactttt

SEQ ID NO: 62266 - DNA, 20 bp, synthetic construct
  misc_feature 1..20: note = chemically synthesized
  source 1..20: mol_type = other DNA
agcaacaaatgaagtgcaaa

SEQ ID NO: 62267 - DNA, 20 bp, synthetic construct
  misc_feature 1..20: note = chemically synthesized
  source 1..20: mol_type = other DNA
cagaccacacattacataat

SEQ ID NO: 62268 - DNA, 20 bp, synthetic construct
  misc_feature 1..20: note = chemically synthesized
  source 1..20: mol_type = other DNA
ctgaactttgtgcagtcctt

SEQ ID NO: 62269 - DNA, 20 bp, synthetic construct
  misc_feature 1..20: note = chemically synthesized
  source 1..20: mol_type = other DNA
gtggcctcagggccagaggt

SEQ ID NO: 62270 - DNA, 20 bp, synthetic construct
  misc_feature 1..20: note = chemically synthesized
  source 1..20: mol_type = other DNA
ggggccctctgtacactaac

SEQ ID NO: 62271 - DNA, 20 bp, synthetic construct
  misc_feature 1..20: note = chemically synthesized
  source 1..20: mol_type = other DNA
ctgtacactaacataggttt

SEQ ID NO: 62272 - DNA, 20 bp, synthetic construct
  misc_feature 1..20: note = chemically synthesized
  source 1..20: mol_type = other DNA
gggttttttttgagacagag

SEQ ID NO: 62273 - DNA, 20 bp, synthetic construct
  misc_feature 1..20: note = chemically synthesized
  source 1..20: mol_type = other DNA
ggttcaagaaattcttctgt

SEQ ID NO: 62274 - DNA, 20 bp, synthetic construct
  misc_feature 1..20: note = chemically synthesized
  source 1..20: mol_type = other DNA
tgtctcagcttcccaaatag

SEQ ID NO: 62275 - DNA, 20 bp, synthetic construct
  misc_feature 1..20: note = chemically synthesized
  source 1..20: mol_type = other DNA
ttttgtatttttagtagagc

SEQ ID NO: 62276 - DNA, 20 bp, synthetic construct
  misc_feature 1..20: note = chemically synthesized
  source 1..20: mol_type = other DNA
gcgagagcccctgcacccag

SEQ ID NO: 62277 - DNA, 20 bp, synthetic construct
  misc_feature 1..20: note = chemically synthesized
  source 1..20: mol_type = other DNA
cctggtgtcacatcacctac

SEQ ID NO: 62278 - DNA, 20 bp, synthetic construct
  misc_feature 1..20: note = chemically synthesized
  source 1..20: mol_type = other DNA
ggtttcctcctttcacagtg

SEQ ID NO: 62279 - DNA, 20 bp, synthetic construct
  misc_feature 1..20: note = chemically synthesized
  source 1..20: mol_type = other DNA
gtgacaaagctggaacaagt

SEQ ID NO: 62280 - DNA, 20 bp, synthetic construct
  misc_feature 1..20: note = chemically synthesized
  source 1..20: mol_type = other DNA
atggtgtacggacactgagg

SEQ ID NO: 62281 - DNA, 20 bp, synthetic construct
  misc_feature 1..20: note = chemically synthesized
  source 1..20: mol_type = other DNA
aagctttaaaccaaaagaat

SEQ ID NO: 62282 - DNA, 20 bp, synthetic construct
  misc_feature 1..20: note = chemically synthesized
  source 1..20: mol_type = other DNA
atgacttcacttctttgagc

SEQ ID NO: 62283 - DNA, 20 bp, synthetic construct
  misc_feature 1..20: note = chemically synthesized
  source 1..20: mol_type = other DNA
tgagctcctgcccgagagat

SEQ ID NO: 62284 - DNA, 20 bp, synthetic construct
  misc_feature 1..20: note = chemically synthesized
  source 1..20: mol_type = other DNA
tgctcagcagtgaacagcat

SEQ ID NO: 62285 - DNA, 20 bp, synthetic construct
  misc_feature 1..20: note = chemically synthesized
  source 1..20: mol_type = other DNA
aattttccattaaattatcc

SEQ ID NO: 62286 - DNA, 20 bp, synthetic construct
  misc_feature 1..20: note = chemically synthesized
  source 1..20: mol_type = other DNA
ttgccacacttactaacacc

SEQ ID NO: 62287 - DNA, 20 bp, synthetic construct
  misc_feature 1..20: note = chemically synthesized
  source 1..20: mol_type = other DNA
cgtatcatctaatctgtcct

SEQ ID NO: 62288 - DNA, 20 bp, synthetic construct
  misc_feature 1..20: note = chemically synthesized
  source 1..20: mol_type = other DNA
tcactaaaaatcacagagct

SEQ ID NO: 62289 - DNA, 20 bp, synthetic construct
  misc_feature 1..20: note = chemically synthesized
  source 1..20: mol_type = other DNA
caaaactgagatgtaatcct

SEQ ID NO: 62290 - DNA, 20 bp, synthetic construct
  misc_feature 1..20: note = chemically synthesized
  source 1..20: mol_type = other DNA
tgtaatcctaaatgttttgt

SEQ ID NO: 62291 - DNA, 20 bp, synthetic construct
  misc_feature 1..20: note = chemically synthesized
  source 1..20: mol_type = other DNA
aaatgttttgtctgggatta

SEQ ID NO: 62292 - DNA, 20 bp, synthetic construct
  misc_feature 1..20: note = chemically synthesized
  source 1..20: mol_type = other DNA
ctaaaattaaaggctctgag

SEQ ID NO: 62293 - DNA, 20 bp, synthetic construct
  misc_feature 1..20: note = chemically synthesized
  source 1..20: mol_type = other DNA
gttacttaacctctctgaac

SEQ ID NO: 62294 - DNA, 20 bp, synthetic construct
  misc_feature 1..20: note = chemically synthesized
  source 1..20: mol_type = other DNA
gggacagaagtcaaaggtta

SEQ ID NO: 62295 - DNA, 20 bp, synthetic construct
  misc_feature 1..20: note = chemically synthesized
  source 1..20: mol_type = other DNA
agagaggcctcaagtccagc

SEQ ID NO: 62296 - DNA, 20 bp, synthetic construct
  misc_feature 1..20: note = chemically synthesized
  source 1..20: mol_type = other DNA
gtgacactagggccaggttc

SEQ ID NO: 62297 - DNA, 20 bp, synthetic construct
  misc_feature 1..20: note = chemically synthesized
  source 1..20: mol_type = other DNA
gagcccgaattatggatggt

SEQ ID NO: 62298 - DNA, 20 bp, synthetic construct
  misc_feature 1..20: note = chemically synthesized
  source 1..20: mol_type = other DNA
gtaactgccttggagggtta

SEQ ID NO: 62299 - DNA, 20 bp, synthetic construct
  misc_feature 1..20: note = chemically synthesized
  source 1..20: mol_type = other DNA
ttatgaggcttaatcacgca

SEQ ID NO: 62300 - DNA, 20 bp, synthetic construct
  misc_feature 1..20: note = chemically synthesized
  source 1..20: mol_type = other DNA
cttagccgtggcctggtgca

SEQ ID NO: 62301 - DNA, 20 bp, synthetic construct
  misc_feature 1..20: note = chemically synthesized
  source 1..20: mol_type = other DNA
cagagcgattattcaggaat

SEQ ID NO: 62302 - DNA, 20 bp, synthetic construct
  misc_feature 1..20: note = chemically synthesized
  source 1..20: mol_type = other DNA
ccctgggtgacagtgcccct

SEQ ID NO: 62303 - DNA, 20 bp, synthetic construct
  misc_feature 1..20: note = chemically synthesized
  source 1..20: mol_type = other DNA
ccaagcagtaggagaggtgg

SEQ ID NO: 62304 - DNA, 20 bp, synthetic construct
  misc_feature 1..20: note = chemically synthesized
  source 1..20: mol_type = other DNA
gtgcaaacagaaagaaatgg

SEQ ID NO: 62305 - DNA, 20 bp, synthetic construct
  misc_feature 1..20: note = chemically synthesized
  source 1..20: mol_type = other DNA
acctagacaccctcatccac

SEQ ID NO: 62306 - DNA, 20 bp, synthetic construct
  misc_feature 1..20: note = chemically synthesized
  source 1..20: mol_type = other DNA
tctcgcagtgaaaggcatac

SEQ ID NO: 62307 - DNA, 20 bp, synthetic construct
  misc_feature 1..20: note = chemically synthesized
  source 1..20: mol_type = other DNA
gtcgcccgcctacgctgccc

SEQ ID NO: 62308 - DNA, 20 bp, synthetic construct
  misc_feature 1..20: note = chemically synthesized
  source 1..20: mol_type = other DNA
gacgctttgcctgggcagtg

SEQ ID NO: 62309 - DNA, 20 bp, synthetic construct
  misc_feature 1..20: note = chemically synthesized
  source 1..20: mol_type = other DNA
gagctgtgctgcctcaggca

SEQ ID NO: 62310 - DNA, 20 bp, synthetic construct
  misc_feature 1..20: note = chemically synthesized
  source 1..20: mol_type = other DNA
cttcacctctctgaaccagg

SEQ ID NO: 62311 - DNA, 20 bp, synthetic construct
  misc_feature 1..20: note = chemically synthesized
  source 1..20: mol_type = other DNA
cacctgcatcccaaagagtt

SEQ ID NO: 62312 - DNA, 20 bp, synthetic construct
  misc_feature 1..20: note = chemically synthesized
  source 1..20: mol_type = other DNA
gttggaagtttcattcccaa

SEQ ID NO: 62313 - DNA, 20 bp, synthetic construct
  misc_feature 1..20: note = chemically synthesized
  source 1..20: mol_type = other DNA
ttatgtgggtctgcacagcc

SEQ ID NO: 62314 - DNA, 20 bp, synthetic construct
  misc_feature 1..20: note = chemically synthesized
  source 1..20: mol_type = other DNA
tcaattttgaccagcctcag

SEQ ID NO: 62315 - DNA, 20 bp, synthetic construct
  misc_feature 1..20: note = chemically synthesized
  source 1..20: mol_type = other DNA
ttgaccagcctcaggcctgt

SEQ ID NO: 62316 - DNA, 20 bp, synthetic construct
  misc_feature 1..20: note = chemically synthesized
  source 1..20: mol_type = other DNA
gaaaaccagtgtgatccgta

SEQ ID NO: 62317 - DNA, 20 bp, synthetic construct
  misc_feature 1..20: note = chemically synthesized
  source 1..20: mol_type = other DNA
agtgtgatccgtatacagct

SEQ ID NO: 62318 - DNA, 20 bp, synthetic construct
  misc_feature 1..20: note = chemically synthesized
  source 1..20: mol_type = other DNA
gttgaggctagtggggcccc

SEQ ID NO: 62319 - DNA, 20 bp, synthetic construct
  misc_feature 1..20: note = chemically synthesized
  source 1..20: mol_type = other DNA
caatccctttaaaagcctaa

SEQ ID NO: 62320 - DNA, 20 bp, synthetic construct
  misc_feature 1..20: note = chemically synthesized
  source 1..20: mol_type = other DNA
gcccgctgtgcaacccgcaa

SEQ ID NO: 62321 - DNA, 20 bp, synthetic construct
  misc_feature 1..20: note = chemically synthesized
  source 1..20: mol_type = other DNA
tggctgtgaggcctcaggtg

SEQ ID NO: 62322 - DNA, 20 bp, synthetic construct
  misc_feature 1..20: note = chemically synthesized
  source 1..20: mol_type = other DNA
tgtaccttgttgagctgctg

SEQ ID NO: 62323 - DNA, 20 bp, synthetic construct
  misc_feature 1..20: note = chemically synthesized
  source 1..20: mol_type = other DNA
ggtggggtgggccacacttg

SEQ ID NO: 62324 - DNA, 20 bp, synthetic construct
  misc_feature 1..20: note = chemically synthesized
  source 1..20: mol_type = other DNA
ccttccctgcagctccatcc

SEQ ID NO: 62325 - DNA, 20 bp, synthetic construct
  misc_feature 1..20: note = chemically synthesized
  source 1..20: mol_type = other DNA
atttcttcccctctctgggc

SEQ ID NO: 62326 - DNA, 20 bp, synthetic construct
  misc_feature 1..20: note = chemically synthesized
  source 1..20: mol_type = other DNA
cagtaggctggggaggggcg

SEQ ID NO: 62327 - DNA, 20 bp, synthetic construct
  misc_feature 1..20: note = chemically synthesized
  source 1..20: mol_type = other DNA
gaggtacagtcacactgccc

SEQ ID NO: 62328 - DNA, 20 bp, synthetic construct
  misc_feature 1..20: note = chemically synthesized
  source 1..20: mol_type = other DNA
agacctggcaccaataactg

SEQ ID NO: 62329 - DNA, 20 bp, synthetic construct
  misc_feature 1..20: note = chemically synthesized
  source 1..20: mol_type = other DNA
taggacctggctgggtgcag

SEQ ID NO: 62330 - DNA, 20 bp, synthetic construct
  misc_feature 1..20: note = chemically synthesized
  source 1..20: mol_type = other DNA
aagggattgcagtggggagc

SEQ ID NO: 62331 - DNA, 20 bp, synthetic construct
  misc_feature 1..20: note = chemically synthesized
  source 1..20: mol_type = other DNA
gctggatagggatgtgagag

SEQ ID NO: 62332 - DNA, 20 bp, synthetic construct
  misc_feature 1..20: note = chemically synthesized
  source 1..20: mol_type = other DNA
atgcaccctccttcccaggc

SEQ ID NO: 62333 - DNA, 20 bp, synthetic construct
  misc_feature 1..20: note = chemically synthesized
  source 1..20: mol_type = other DNA
gccacttaacctctctgtgc

SEQ ID NO: 62334 - DNA, 20 bp, synthetic construct
  misc_feature 1..20: note = chemically synthesized
  source 1..20: mol_type = other DNA
tctaagtgggggaacaactg

SEQ ID NO: 62335 - DNA, 20 bp, synthetic construct
  misc_feature 1..20: note = chemically synthesized
  source 1..20: mol_type = other DNA
gaacaactgctgcgtttggc

SEQ ID NO: 62336 - DNA, 20 bp, synthetic construct
  misc_feature 1..20: note = chemically synthesized
  source 1..20: mol_type = other DNA
ctgttgttgagggacacctc

SEQ ID NO: 62337 - DNA, 20 bp, synthetic construct
  misc_feature 1..20: note = chemically synthesized
  source 1..20: mol_type = other DNA
tctttaggggccgtgctcat

SEQ ID NO: 62338 - DNA, 20 bp, synthetic construct
  misc_feature 1..20: note = chemically synthesized
  source 1..20: mol_type = other DNA
aggccctcagttctctgagc

SEQ ID NO: 62339 - DNA, 20 bp, synthetic construct
  misc_feature 1..20: note = chemically synthesized
  source 1..20: mol_type = other DNA
ctcatctataaaatagggat

SEQ ID NO: 62340 - DNA, 20 bp, synthetic construct
  misc_feature 1..20: note = chemically synthesized
  source 1..20: mol_type = other DNA
tctttcccacatagctcttc

SEQ ID NO: 62341 - DNA, 20 bp, synthetic construct
  misc_feature 1..20: note = chemically synthesized
  source 1..20: mol_type = other DNA
tagatgaggcgatgctggtg

SEQ ID NO: 62342 - DNA, 20 bp, synthetic construct
  misc_feature 1..20: note = chemically synthesized
  source 1..20: mol_type = other DNA
taactcatttaatgaatgaa

SEQ ID NO: 62343 - DNA, 20 bp, synthetic construct
  misc_feature 1..20: note = chemically synthesized
  source 1..20: mol_type = other DNA
ctgtgtgttggggaggggag

SEQ ID NO: 62344 - DNA, 20 bp, synthetic construct
  misc_feature 1..20: note = chemically synthesized
  source 1..20: mol_type = other DNA
ctggaactatgtggcctact

SEQ ID NO: 62345 - DNA, 20 bp, synthetic construct
  misc_feature 1..20: note = chemically synthesized
  source 1..20: mol_type = other DNA
ctggagtacagtggcgcaat

SEQ ID NO: 62346 - DNA, 20 bp, synthetic construct
  misc_feature 1..20: note = chemically synthesized
  source 1..20: mol_type = other DNA
ctctcgaattctggaattac

SEQ ID NO: 62347 - DNA, 20 bp, synthetic construct
  misc_feature 1..20: note = chemically synthesized
  source 1..20: mol_type = other DNA
ttttgtatttttagtagtga

SEQ ID NO: 62348 - DNA, 20 bp, synthetic construct
  misc_feature 1..20: note = chemically synthesized
  source 1..20: mol_type = other DNA
agaaggaataaaaatgcatc

SEQ ID NO: 62349 - DNA, 20 bp, synthetic construct
  misc_feature 1..20: note = chemically synthesized
  source 1..20: mol_type = other DNA
cttgttaaaattactaaaac

SEQ ID NO: 62350 - DNA, 20 bp, synthetic construct
  misc_feature 1..20: note = chemically synthesized
  source 1..20: mol_type = other DNA
ttatgggccttgatggtcat

SEQ ID NO: 62351 - DNA, 20 bp, synthetic construct
  misc_feature 1..20: note = chemically synthesized
  source 1..20: mol_type = other DNA
cttgatggtcattacggatt

SEQ ID NO: 62352 - DNA, 20 bp, synthetic construct
  misc_feature 1..20: note = chemically synthesized
  source 1..20: mol_type = other DNA
tgtgtcctattgaactataa

SEQ ID NO: 62353 - DNA, 20 bp, synthetic construct
  misc_feature 1..20: note = chemically synthesized
  source 1..20: mol_type = other DNA
cctattgaactataattatg

SEQ ID NO: 62354 - DNA, 20 bp, synthetic construct
  misc_feature 1..20: note = chemically synthesized
  source 1..20: mol_type = other DNA
atccctttgacaatctctgc

SEQ ID NO: 62355 - DNA, 20 bp, synthetic construct
  misc_feature 1..20: note = chemically synthesized
  source 1..20: mol_type = other DNA
ctgatgtttcagcaacacac

SEQ ID NO: 62356 - DNA, 20 bp, synthetic construct
  misc_feature 1..20: note = chemically synthesized
  source 1..20: mol_type = other DNA
tgggagacccagcaggactt

SEQ ID NO: 62357 - DNA, 20 bp, synthetic construct
  misc_feature 1..20: note = chemically synthesized
  source 1..20: mol_type = other DNA
agaaatacatgccctgcgtg

SEQ ID NO: 62358 - DNA, 20 bp, synthetic construct
  misc_feature 1..20: note = chemically synthesized
  source 1..20: mol_type = other DNA
cccagaaggcctctgtcact

SEQ ID NO: 62359 - DNA, 20 bp, synthetic construct
  misc_feature 1..20: note = chemically synthesized
  source 1..20: mol_type = other DNA
gaaggcctctgtcactgcgt

SEQ ID NO: 62360 - DNA, 20 bp, synthetic construct
  misc_feature 1..20: note = chemically synthesized
  source 1..20: mol_type = other DNA
gtgtgttgctgaaacatcag

SEQ ID NO: 62361 - DNA, 20 bp, synthetic construct
  misc_feature 1..20: note = chemically synthesized
  source 1..20: mol_type = other DNA
taggacacattgagtctctt

SEQ ID NO: 62362 - DNA, 20 bp, synthetic construct
  misc_feature 1..20: note = chemically synthesized
  source 1..20: mol_type = other DNA
aaggttagctgcaataaaac

SEQ ID NO: 62363 - DNA, 20 bp, synthetic construct
  misc_feature 1..20: note = chemically synthesized
  source 1..20: mol_type = other DNA
ctatgttgccccttataatg

SEQ ID NO: 62364 - DNA, 20 bp, synthetic construct
  misc_feature 1..20: note = chemically synthesized
  source 1..20: mol_type = other DNA
cgggcagataacttgaggcc

SEQ ID NO: 62365 - DNA, 20 bp, synthetic construct
  misc_feature 1..20: note = chemically synthesized
  source 1..20: mol_type = other DNA
taattccagaattcgagagg

SEQ ID NO: 62366 - DNA, 20 bp, synthetic construct
  misc_feature 1..20: note = chemically synthesized
  source 1..20: mol_type = other DNA
gaggtggagtttgcagtaag

SEQ ID NO: 62367 - DNA, 20 bp, synthetic construct
  misc_feature 1..20: note = chemically synthesized
  source 1..20: mol_type = other DNA
caacacacaggaagtggctc

SEQ ID NO: 62368 - DNA, 20 bp, synthetic construct
  misc_feature 1..20: note = chemically synthesized
  source 1..20: mol_type = other DNA
cagaaggaaagtgtgtctgc

SEQ ID NO: 62369 - DNA, 20 bp, synthetic construct
  misc_feature 1..20: note = chemically synthesized
  source 1..20: mol_type = other DNA
aatgagcacggcccctaaag

SEQ ID NO: 62370 - DNA, 20 bp, synthetic construct
  misc_feature 1..20: note = chemically synthesized
  source 1..20: mol_type = other DNA
cagccttttctggaaaaaat

SEQ ID NO: 62371 - DNA, 20 bp, synthetic construct
  misc_feature 1..20: note = chemically synthesized
  source 1..20: mol_type = other DNA
agacccctgagacccatcta

SEQ ID NO: 62372 - DNA, 20 bp, synthetic construct
  misc_feature 1..20: note = chemically synthesized
  source 1..20: mol_type = other DNA
cacatgccagaggctgcccg

SEQ ID NO: 62373 - DNA, 20 bp, synthetic construct
  misc_feature 1..20: note = chemically synthesized
  source 1..20: mol_type = other DNA
accgaggcacagagaggtta

SEQ ID NO: 62374 - DNA, 20 bp, synthetic construct
  misc_feature 1..20: note = chemically synthesized
  source 1..20: mol_type = other DNA
cacaaaaagagcgatggagc

SEQ ID NO: 62375 - DNA, 20 bp, synthetic construct
  misc_feature 1..20: note = chemically synthesized
  source 1..20: mol_type = other DNA
tgagggtgtgcatggggtgt

SEQ ID NO: 62376 - DNA, 20 bp, synthetic construct
  misc_feature 1..20: note = chemically synthesized
  source 1..20: mol_type = other DNA
tctcctgaccagccactcag

SEQ ID NO: 62377 - DNA, 20 bp, synthetic construct
  misc_feature 1..20: note = chemically synthesized
  source 1..20: mol_type = other DNA
ctggcacacctcaccccctt

SEQ ID NO: 62378 - DNA, 20 bp, synthetic construct
  misc_feature 1..20: note = chemically synthesized
  source 1..20: mol_type = other DNA
cacccctcccaccacaaccc

SEQ ID NO: 62379 - DNA, 20 bp, synthetic construct
  misc_feature 1..20: note = chemically synthesized
  source 1..20: mol_type = other DNA
acccccgggattttgtcctg

SEQ ID NO: 62380 - DNA, 20 bp, synthetic construct
  misc_feature 1..20: note = chemically synthesized
  source 1..20: mol_type = other DNA
attttgtcctggtgcgtttt

SEQ ID NO: 62381 - DNA, 20 bp, synthetic construct
  misc_feature 1..20: note = chemically synthesized
  source 1..20: mol_type = other DNA
cttgcctcacctgctcccac

SEQ ID NO: 62382 - DNA, 20 bp, synthetic construct
  misc_feature 1..20: note = chemically synthesized
  source 1..20: mol_type = other DNA
caggtgacatgccgggctgt

SEQ ID NO: 62383 - DNA, 20 bp, synthetic construct
  misc_feature 1..20: note = chemically synthesized
  source 1..20: mol_type = other DNA
cctgtgcctgccagaagaga

SEQ ID NO: 62384 - DNA, 20 bp, synthetic construct
  misc_feature 1..20: note = chemically synthesized
  source 1..20: mol_type = other DNA
cagaagagacagagcttgag

SEQ ID NO: 62385 - DNA, 20 bp, synthetic construct
  misc_feature 1..20: note = chemically synthesized
  source 1..20: mol_type = other DNA
tccacaggtgggagggacag

SEQ ID NO: 62386 - DNA, 20 bp, synthetic construct
  misc_feature 1..20: note = chemically synthesized
  source 1..20: mol_type = other DNA
gaaggggaggggagtctgag

SEQ ID NO: 62387 - DNA, 20 bp, synthetic construct
  misc_feature 1..20: note = chemically synthesized
  source 1..20: mol_type = other DNA
ggagggagggcagcatcagg

SEQ ID NO: 62388 - DNA, 20 bp, synthetic construct
  misc_feature 1..20: note = chemically synthesized
  source 1..20: mol_type = other DNA
ggcacacccagtacccgtct

SEQ ID NO: 62389 - DNA, 20 bp, synthetic construct
  misc_feature 1..20: note = chemically synthesized
  source 1..20: mol_type = other DNA
gcacgtacgccagctcccaa

SEQ ID NO: 62390 - DNA, 20 bp, synthetic construct
  misc_feature 1..20: note = chemically synthesized
  source 1..20: mol_type = other DNA
gttgcacagcgggcgatgca

SEQ ID NO: 62391 - DNA, 20 bp, synthetic construct
  misc_feature 1..20: note = chemically synthesized
  source 1..20: mol_type = other DNA
agcgggcgatgcaatctgat

SEQ ID NO: 62392 - DNA, 20 bp, synthetic construct
  misc_feature 1..20: note = chemically synthesized
  source 1..20: mol_type = other DNA
caatctgatttaggctttta

SEQ ID NO: 62393 - DNA, 20 bp, synthetic construct
  misc_feature 1..20: note = chemically synthesized
  source 1..20: mol_type = other DNA
ccaagctgtatacggatcac

SEQ ID NO: 62394 - DNA, 20 bp, synthetic construct
  misc_feature 1..20: note = chemically synthesized
  source 1..20: mol_type = other DNA
tcacccgaggcacttcacaa

SEQ ID NO: 62395 - DNA, 20 bp, synthetic construct
  misc_feature 1..20: note = chemically synthesized
  source 1..20: mol_type = other DNA
agcacagctcttctttacag

SEQ ID NO: 62396 - DNA, 20 bp, synthetic construct
  misc_feature 1..20: note = chemically synthesized
  source 1..20: mol_type = other DNA
ttccatcgggaccatcaaga

SEQ ID NO: 62397 - DNA, 20 bp, synthetic construct
  misc_feature 1..20: note = chemically synthesized
  source 1..20: mol_type = other DNA
gagcggtctctccgctctga

SEQ ID NO: 62398 - DNA, 20 bp, synthetic construct
  misc_feature 1..20: note = chemically synthesized
  source 1..20: mol_type = other DNA
gctaccagtggaacagccac

SEQ ID NO: 62399 - DNA, 20 bp, synthetic construct
  misc_feature 1..20: note = chemically synthesized
  source 1..20: mol_type = other DNA
ccaccttggacacaggacgc

SEQ ID NO: 62400 - DNA, 20 bp, synthetic construct
  misc_feature 1..20: note = chemically synthesized
  source 1..20: mol_type = other DNA
tcccagccagtggacttagc

SEQ ID NO: 62401 - DNA, 20 bp, synthetic construct
  misc_feature 1..20: note = chemically synthesized
  source 1..20: mol_type = other DNA
ccccgttgcccctctggatc

SEQ ID NO: 62402 - DNA, 20 bp, synthetic construct
  misc_feature 1..20: note = chemically synthesized
  source 1..20: mol_type = other DNA
cgaggacagggccctgtctc

SEQ ID NO: 62403 - DNA, 20 bp, synthetic construct
  misc_feature 1..20: note = chemically synthesized
  source 1..20: mol_type = other DNA
ttcactgcgagaggttctgg

SEQ ID NO: 62404 - DNA, 20 bp, synthetic construct
  misc_feature 1..20: note = chemically synthesized
  source 1..20: mol_type = other DNA
cagcagccatgagggttgtg

SEQ ID NO: 62405 - DNA, 20 bp, synthetic construct
  misc_feature 1..20: note = chemically synthesized
  source 1..20: mol_type = other DNA
aacaaagcgcagccatttct

SEQ ID NO: 62406 - DNA, 20 bp, synthetic construct
  misc_feature 1..20: note = chemically synthesized
  source 1..20: mol_type = other DNA
ataagcctcaccacctctcc

SEQ ID NO: 62407 - DNA, 20 bp, synthetic construct
  misc_feature 1..20: note = chemically synthesized
  source 1..20: mol_type = other DNA
aggccacggctaagctcagt

SEQ ID NO: 62408 - DNA, 20 bp, synthetic construct
  misc_feature 1..20: note = chemically synthesized
  source 1..20: mol_type = other DNA
accctccaaggcagttacta

SEQ ID NO: 62409 - DNA, 20 bp, synthetic construct
  misc_feature 1..20: note = chemically synthesized
  source 1..20: mol_type = other DNA
cttgaacctggccctagtgt

SEQ ID NO: 62410 - DNA, 20 bp, synthetic construct
  misc_feature 1..20: note = chemically synthesized
  source 1..20: mol_type = other DNA
ccttgatctctgaagtgttg

SEQ ID NO: 62411 - DNA, 20 bp, synthetic construct
  misc_feature 1..20: note = chemically synthesized
  source 1..20: mol_type = other DNA
aggatttaatttttcctgca

SEQ ID NO: 62412 - DNA, 20 bp, synthetic construct
  misc_feature 1..20: note = chemically synthesized
  source 1..20: mol_type = other DNA
agatgaccaaggccaaggtg

SEQ ID NO: 62413 - DNA, 20 bp, synthetic construct
  misc_feature 1..20: note = chemically synthesized
  source 1..20: mol_type = other DNA
tcatttagccaggctgcctc

SEQ ID NO: 62414 - DNA, 20 bp, synthetic construct
  misc_feature 1..20: note = chemically synthesized
  source 1..20: mol_type = other DNA
gccaggctgcctctgaagtt

SEQ ID NO: 62415 - DNA, 20 bp, synthetic construct
  misc_feature 1..20: note = chemically synthesized
  source 1..20: mol_type = other DNA
aagttttctgattcaagact

SEQ ID NO: 62416 - DNA, 20 bp, synthetic construct
  misc_feature 1..20: note = chemically synthesized
  source 1..20: mol_type = other DNA
tctgattcaagacttctggc

SEQ ID NO: 62417 - DNA, 20 bp, synthetic construct
  misc_feature 1..20: note = chemically synthesized
  source 1..20: mol_type = other DNA
ggcttcagctttgtacacag

SEQ ID NO: 62418 - DNA, 20 bp, synthetic construct
  misc_feature 1..20: note = chemically synthesized
  source 1..20: mol_type = other DNA
tacacagagatgattcaatg

SEQ ID NO: 62419 - DNA, 20 bp, synthetic construct
  misc_feature 1..20: note = chemically synthesized
  source 1..20: mol_type = other DNA
atgtcaggttttggagtgaa

SEQ ID NO: 62420 - DNA, 20 bp, synthetic construct
  misc_feature 1..20: note = chemically synthesized
  source 1..20: mol_type = other DNA
tttaatcccagacaaaacat

SEQ ID NO: 62421 - DNA, 20 bp, synthetic construct
  misc_feature 1..20: note = chemically synthesized
  source 1..20: mol_type = other DNA
caaaacatttaggattacat

SEQ ID NO: 62422 - DNA, 20 bp, synthetic construct
  misc_feature 1..20: note = chemically synthesized
  source 1..20: mol_type = other DNA
agttttgtaagcaagtagct

SEQ ID NO: 62423 - DNA, 20 bp, synthetic construct
  misc_feature 1..20: note = chemically synthesized
  source 1..20: mol_type = other DNA
aataatttgcaccttatagg

SEQ ID NO: 62424 - DNA, 20 bp, synthetic construct
  misc_feature 1..20: note = chemically synthesized
  source 1..20: mol_type = other DNA
cttatagggtaagctttgag

SEQ ID NO: 62425 - DNA, 20 bp, synthetic construct
  misc_feature 1..20: note = chemically synthesized
  source 1..20: mol_type = other DNA
aatgatggtgacgctgaggc

SEQ ID NO: 62426 - DNA, 20 bp, synthetic construct
  misc_feature 1..20: note = chemically synthesized
  source 1..20: mol_type = other DNA
atggtgacgctgaggctgat

SEQ ID NO: 62427 - DNA, 20 bp, synthetic construct
  misc_feature 1..20: note = chemically synthesized
  source 1..20: mol_type = other DNA
aacctgtgtgcaggtacagg

SEQ ID NO: 62428 - DNA, 20 bp, synthetic construct
  misc_feature 1..20: note = chemically synthesized
  source 1..20: mol_type = other DNA
gttattcctcatccctgtcc

SEQ ID NO: 62429 - DNA, 20 bp, synthetic construct
  misc_feature 1..20: note = chemically synthesized
  source 1..20: mol_type = other DNA
gtgacagggcctggtcacac

SEQ ID NO: 62430 - DNA, 20 bp, synthetic construct
  misc_feature 1..20: note = chemically synthesized
  source 1..20: mol_type = other DNA
atttattgcccagttcaaca

SEQ ID NO: 62431 - DNA, 20 bp, synthetic construct
  misc_feature 1..20: note = chemically synthesized
  source 1..20: mol_type = other DNA
aacaggttgtttgaccatag

SEQ ID NO: 62432 - DNA, 20 bp, synthetic construct
  misc_feature 1..20: note = chemically synthesized
  source 1..20: mol_type = other DNA
tgctcccgggtagaaatggt

SEQ ID NO: 62433 - DNA, 20 bp, synthetic construct
  misc_feature 1..20: note = chemically synthesized
  source 1..20: mol_type = other DNA
gtgagattaggcagggagtg

SEQ ID NO: 62434 - DNA, 20 bp, synthetic construct
  misc_feature 1..20: note = chemically synthesized
  source 1..20: mol_type = other DNA
caccatgaagccttcattct

SEQ ID NO: 62435 - DNA, 20 bp, synthetic construct
  misc_feature 1..20: note = chemically synthesized
  source 1..20: mol_type = other DNA
aagccttcattcttttggtt

SEQ ID NO: 62436 - DNA, 20 bp, synthetic construct
  misc_feature 1..20: note = chemically synthesized
  source 1..20: mol_type = other DNA
ctccagtcgccctcccaggc

SEQ ID NO: 62437 - DNA, 20 bp, synthetic construct
  misc_feature 1..20: note = chemically synthesized
  source 1..20: mol_type = other DNA
gatagaagggccaggagaga

SEQ ID NO: 62438 - DNA, 20 bp, synthetic construct
  misc_feature 1..20: note = chemically synthesized
  source 1..20: mol_type = other DNA
ggagtcctgatgttataagg

SEQ ID NO: 62439 - DNA, 20 bp, synthetic construct
  misc_feature 1..20: note = chemically synthesized
  source 1..20: mol_type = other DNA
gaggcataatgaacccaaca

SEQ ID NO: 62440 - DNA, 20 bp, synthetic construct
  misc_feature 1..20: note = chemically synthesized
  source 1..20: mol_type = other DNA
ctgggaaagccaagacttgt

SEQ ID NO: 62441 - DNA, 20 bp, synthetic construct
  misc_feature 1..20: note = chemically synthesized
  source 1..20: mol_type = other DNA
caacaaggccctgaccctct

SEQ ID NO: 62442 - DNA, 20 bp, synthetic construct
  misc_feature 1..20: note = chemically synthesized
  source 1..20: mol_type = other DNA
cctagccatgggaattctcc

SEQ ID NO: 62443 - DNA, 20 bp, synthetic construct
  misc_feature 1..20: note = chemically synthesized
  source 1..20: mol_type = other DNA
atttcttgaacccgggaggt

SEQ ID NO: 62444 - DNA, 20 bp, synthetic construct
  misc_feature 1..20: note = chemically synthesized
  source 1..20: mol_type = other DNA
gagagtgaggccccaggacc

SEQ ID NO: 62445 - DNA, 20 bp, synthetic construct
  misc_feature 1..20: note = chemically synthesized
  source 1..20: mol_type = other DNA
gtaatgtgtggtctgttcca

SEQ ID NO: 62446 - DNA, 20 bp, synthetic construct
  misc_feature 1..20: note = chemically synthesized
  source 1..20: mol_type = other DNA
gagaaaggtggtggagagaa

SEQ ID NO: 62447 - DNA, 20 bp, synthetic construct
  misc_feature 1..20: note = chemically synthesized
  source 1..20: mol_type = other DNA
aaccagctttgcacttcatt

SEQ ID NO: 62448 - DNA, 20 bp, synthetic construct
  misc_feature 1..20: note = chemically synthesized
  source 1..20: mol_type = other DNA
gaatctcaatatttgttatt

SEQ ID NO: 62449 - DNA, 20 bp, synthetic construct
  misc_feature 1..20: note = chemically synthesized
  source 1..20: mol_type = other DNA
gttatttccagctttttttc

SEQ ID NO: 62450 - DNA, 20 bp, synthetic construct
  misc_feature 1..20: note = chemically synthesized
  source 1..20: mol_type = other DNA
tctttgtattttgttaagat

SEQ ID NO: 62451 - DNA, 20 bp, synthetic construct
  misc_feature 1..20: note = chemically synthesized
  source 1..20: mol_type = other DNA
tattttgttaagatgatggt

SEQ ID NO: 62452 - DNA, 20 bp, synthetic construct
  misc_feature 1..20: note = chemically synthesized
  source 1..20: mol_type = other DNA
atattctcctcagctaggac

SEQ ID NO: 62453 - DNA, 20 bp, synthetic construct
  misc_feature 1..20: note = chemically synthesized
  source 1..20: mol_type = other DNA
cctctcagatccttttgatg

SEQ ID NO: 62454 - DNA, 20 bp, synthetic construct
  misc_feature 1..20: note = chemically synthesized
  source 1..20: mol_type = other DNA
tacacctggaaagtgacaga

SEQ ID NO: 62455 - DNA, 20 bp, synthetic construct
  misc_feature 1..20: note = chemically synthesized
  source 1..20: mol_type = other DNA
tactttaaagcagcacaaac

SEQ ID NO: 62456 - DNA, 20 bp, synthetic construct
  misc_feature 1..20: note = chemically synthesized
  source 1..20: mol_type = other DNA
ttgggtgggaacagctccca

SEQ ID NO: 62457 - DNA, 20 bp, synthetic construct
  misc_feature 1..20: note = chemically synthesized
  source 1..20: mol_type = other DNA
gatgcatttcccttctgtgc

SEQ ID NO: 62458 - DNA, 20 bp, synthetic construct
  misc_feature 1..20: note = chemically synthesized
  source 1..20: mol_type = other DNA
gtttccctggccactaaata

SEQ ID NO: 62459 - DNA, 20 bp, synthetic construct
  misc_feature 1..20: note = chemically synthesized
  source 1..20: mol_type = other DNA
ggattagatagaagccctcc

SEQ ID NO: 62460 - DNA, 20 bp, synthetic construct
  misc_feature 1..20: note = chemically synthesized
  source 1..20: mol_type = other DNA
atagaagccctccaagggct

SEQ ID NO: 62461 - DNA, 20 bp, synthetic construct
  misc_feature 1..20: note = chemically synthesized
  source 1..20: mol_type = other DNA
ctccaagggcttccagcttg

SEQ ID NO: 62462 - DNA, 20 bp, synthetic construct
  misc_feature 1..20: note = chemically synthesized
  source 1..20: mol_type = other DNA
ggcttccagcttgacatgat

SEQ ID NO: 62463 - DNA, 20 bp, synthetic construct
  misc_feature 1..20: note = chemically synthesized
  source 1..20: mol_type = other DNA
tgattcttgattctgatctg

SEQ ID NO: 62464 - DNA, 20 bp, synthetic construct
  misc_feature 1..20: note = chemically synthesized
  source 1..20: mol_type = other DNA
cctgggtgcaggacctagat

SEQ ID NO: 62465 - DNA, 20 bp, synthetic construct
  misc_feature 1..20: note = chemically synthesized
  source 1..20: mol_type = other DNA
tgaatagctgacctaatctc

SEQ ID NO: 62466 - DNA, 20 bp, synthetic construct
  misc_feature 1..20: note = chemically synthesized
  source 1..20: mol_type = other DNA
gctgacctaatctctctggc

SEQ ID NO: 62467 - DNA, 20 bp, synthetic construct
  misc_feature 1..20: note = chemically synthesized
  source 1..20: mol_type = other DNA
gatattagcattagcacctc

SEQ ID NO: 62468 - DNA, 20 bp, synthetic construct
  misc_feature 1..20: note = chemically synthesized
  source 1..20: mol_type = other DNA
acacatgtgagcacggagaa

SEQ ID NO: 62469 - DNA, 20 bp, synthetic construct
  misc_feature 1..20: note = chemically synthesized
  source 1..20: mol_type = other DNA
ctacgtacattttgctattc

SEQ ID NO: 62470 - DNA, 20 bp, synthetic construct
  misc_feature 1..20: note = chemically synthesized
  source 1..20: mol_type = other DNA
tcggcaagtacttggcacag

SEQ ID NO: 62471 - DNA, 20 bp, synthetic construct
  misc_feature 1..20: note = chemically synthesized
  source 1..20: mol_type = other DNA
gggcctgaatttcaacctca

SEQ ID NO: 62472 - DNA, 20 bp, synthetic construct
  misc_feature 1..20: note = chemically synthesized
  source 1..20: mol_type = other DNA
ttccggaggctcagatccat

SEQ ID NO: 62473 - DNA, 20 bp, synthetic construct
  misc_feature 1..20: note = chemically synthesized
  source 1..20: mol_type = other DNA
cgagggcctgaagctagtgg

SEQ ID NO: 62474 - DNA, 20 bp, synthetic construct
  misc_feature 1..20: note = chemically synthesized
  source 1..20: mol_type = other DNA
gaagaggccaagaaacagat

SEQ ID NO: 62475 - DNA, 20 bp, synthetic construct
  misc_feature 1..20: note = chemically synthesized
  source 1..20: mol_type = other DNA
aagggtactcaagggaaaat

SEQ ID NO: 62476 - DNA, 20 bp, synthetic construct
  misc_feature 1..20: note = chemically synthesized
  source 1..20: mol_type = other DNA
gaaaattgtggatttggtca

SEQ ID NO: 62477 - DNA, 20 bp, synthetic construct
  misc_feature 1..20: note = chemically synthesized
  source 1..20: mol_type = other DNA
gtcaaggagcttgacagaga

SEQ ID NO: 62478 - DNA, 20 bp, synthetic construct
  misc_feature 1..20: note = chemically synthesized
  source 1..20: mol_type = other DNA
caatgcattatgggccatag

SEQ ID NO: 62479 - DNA, 20 bp, synthetic construct
  misc_feature 1..20: note = chemically synthesized
  source 1..20: mol_type = other DNA
gccatagcaatgcttttcag

SEQ ID NO: 62480 - DNA, 20 bp, synthetic construct
  misc_feature 1..20: note = chemically synthesized
  source 1..20: mol_type = other DNA
atgcttttcagcgtggattc

SEQ ID NO: 62481 - DNA, 20 bp, synthetic construct
  misc_feature 1..20: note = chemically synthesized
  source 1..20: mol_type = other DNA
ttttctacacacaaacacta

SEQ ID NO: 62482 - DNA, 20 bp, synthetic construct
  misc_feature 1..20: note = chemically synthesized
  source 1..20: mol_type = other DNA
attgagtaatttgaggaaat

SEQ ID NO: 62483 - DNA, 20 bp, synthetic construct
  misc_feature 1..20: note = chemically synthesized
  source 1..20: mol_type = other DNA
tactgtatatgtagaatata

SEQ ID NO: 62484 - DNA, 20 bp, synthetic construct
  misc_feature 1..20: note = chemically synthesized
  source 1..20: mol_type = other DNA
tgtaatacactgcataaagg

SEQ ID NO: 62485 - DNA, 20 bp, synthetic construct
  misc_feature 1..20: note = chemically synthesized
  source 1..20: mol_type = other DNA
tctagtgtcccagaatcagt

SEQ ID NO: 62486 - DNA, 20 bp, synthetic construct
  misc_feature 1..20: note = chemically synthesized
  source 1..20: mol_type = other DNA
caaatcctgcctctaacaca

SEQ ID NO: 62487 - DNA, 20 bp, synthetic construct
  misc_feature 1..20: note = chemically synthesized
  source 1..20: mol_type = other DNA
acaaaataccattcttgctg

SEQ ID NO: 62488 - DNA, 20 bp, synthetic construct
  misc_feature 1..20: note = chemically synthesized
  source 1..20: mol_type = other DNA
attcttgctgtcaggttttt

SEQ ID NO: 62489 - DNA, 20 bp, synthetic construct
  misc_feature 1..20: note = chemically synthesized
  source 1..20: mol_type = other DNA
aggtgggaggcaaggccagg

SEQ ID NO: 62490 - DNA, 20 bp, synthetic construct
  misc_feature 1..20: note = chemically synthesized
  source 1..20: mol_type = other DNA
gctctcaggaatagtaagca

SEQ ID NO: 62491 - DNA, 20 bp, synthetic construct
  misc_feature 1..20: note = chemically synthesized
  source 1..20: mol_type = other DNA
caagacaccctcaaataaac

SEQ ID NO: 62492 - DNA, 20 bp, synthetic construct
  misc_feature 1..20: note = chemically synthesized
  source 1..20: mol_type = other DNA
gtagaaattctgcatcttcc

SEQ ID NO: 62493 - DNA, 20 bp, synthetic construct
  misc_feature 1..20: note = chemically synthesized
  source 1..20: mol_type = other DNA
atccccacacaatctttttc

SEQ ID NO: 62494 - DNA, 20 bp, synthetic construct
  misc_feature 1..20: note = chemically synthesized
  source 1..20: mol_type = other DNA
ctttttcggcagcttggatg

SEQ ID NO: 62495 - DNA, 20 bp, synthetic construct
  misc_feature 1..20: note = chemically synthesized
  source 1..20: mol_type = other DNA
tgtgtgtcgtcaagggggct

SEQ ID NO: 62496 - DNA, 20 bp, synthetic construct
  misc_feature 1..20: note = chemically synthesized
  source 1..20: mol_type = other DNA
ggcttctcagggaggggact

SEQ ID NO: 62497 - DNA, 20 bp, synthetic construct
  misc_feature 1..20: note = chemically synthesized
  source 1..20: mol_type = other DNA
ccgtgaaggtgcctatgatg

SEQ ID NO: 62498 - DNA, 20 bp, synthetic construct
  misc_feature 1..20: note = chemically synthesized
  source 1..20: mol_type = other DNA
gcctatgatgaagcgtttag

SEQ ID NO: 62499 - DNA, 20 bp, synthetic construct
  misc_feature 1..20: note = chemically synthesized
  source 1..20: mol_type = other DNA
tcctggaaaatgaagacaga

SEQ ID NO: 62500 - DNA, 20 bp, synthetic construct
  misc_feature 1..20: note = chemically synthesized
  source 1..20: mol_type = other DNA
tcactgctactctgtataaa

SEQ ID NO: 62501 - DNA, 20 bp, synthetic construct
  misc_feature 1..20: note = chemically synthesized
  source 1..20: mol_type = other DNA
gcagaaccaaaaaggaacag

SEQ ID NO: 62502 - DNA, 20 bp, synthetic construct
  misc_feature 1..20: note = chemically synthesized
  source 1..20: mol_type = other DNA
acagccaggccatgttcgca

SEQ ID NO: 62503 - DNA, 20 bp, synthetic construct
  misc_feature 1..20: note = chemically synthesized
  source 1..20: mol_type = other DNA
aggccatgttcgcagaaggc

SEQ ID NO: 62504 - DNA, 20 bp, synthetic construct
  misc_feature 1..20: note = chemically synthesized
  source 1..20: mol_type = other DNA
tctgtcactttatcggtgct

SEQ ID NO: 62505 - DNA, 20 bp, synthetic construct
  misc_feature 1..20: note = chemically synthesized
  source 1..20: mol_type = other DNA
attagtgtatgtgtgtgcat

SEQ ID NO: 62506 - DNA, 20 bp, synthetic construct
  misc_feature 1..20: note = chemically synthesized
  source 1..20: mol_type = other DNA
gcccatgccctgctgatcta

SEQ ID NO: 62507 - DNA, 20 bp, synthetic construct
  misc_feature 1..20: note = chemically synthesized
  source 1..20: mol_type = other DNA
actgggcactgccaccagcc

SEQ ID NO: 62508 - DNA, 20 bp, synthetic construct
  misc_feature 1..20: note = chemically synthesized
  source 1..20: mol_type = other DNA
acactacagggcaagatgag

SEQ ID NO: 62509 - DNA, 20 bp, synthetic construct
  misc_feature 1..20: note = chemically synthesized
  source 1..20: mol_type = other DNA
atatcagaggaggtggcatt

SEQ ID NO: 62510 - DNA, 20 bp, synthetic construct
  misc_feature 1..20: note = chemically synthesized
  source 1..20: mol_type = other DNA
ggaggtggcatttcaagctt

SEQ ID NO: 62511 - DNA, 20 bp, synthetic construct
  misc_feature 1..20: note = chemically synthesized
  source 1..20: mol_type = other DNA
cttttctgcacgacaggtct

SEQ ID NO: 62512 - DNA, 20 bp, synthetic construct
  misc_feature 1..20: note = chemically synthesized
  source 1..20: mol_type = other DNA
ggctgagctcctgaagatgc

SEQ ID NO: 62513 - DNA, 20 bp, synthetic construct
  misc_feature 1..20: note = chemically synthesized
  source 1..20: mol_type = other DNA
aagaccttctagacattggg

SEQ ID NO: 62514 - DNA, 20 bp, synthetic construct
  misc_feature 1..20: note = chemically synthesized
  source 1..20: mol_type = other DNA
atttatccatactgacacag

SEQ ID NO: 62515 - DNA, 20 bp, synthetic construct
  misc_feature 1..20: note = chemically synthesized
  source 1..20: mol_type = other DNA
acacagaaaggtttgggcta

SEQ ID NO: 62516 - DNA, 20 bp, synthetic construct
  misc_feature 1..20: note = chemically synthesized
  source 1..20: mol_type = other DNA
atttctgactccttcgatct

SEQ ID NO: 62517 - DNA, 20 bp, synthetic construct
  misc_feature 1..20: note = chemically synthesized
  source 1..20: mol_type = other DNA
gatttggtgtctgaattaat

SEQ ID NO: 62518 - DNA, 20 bp, synthetic construct
  misc_feature 1..20: note = chemically synthesized
  source 1..20: mol_type = other DNA
tgccagggtccgtgtcctca

SEQ ID NO: 62519 - DNA, 20 bp, synthetic construct
  misc_feature 1..20: note = chemically synthesized
  source 1..20: mol_type = other DNA
gtgcacctgagcagggggag

SEQ ID NO: 62520 - DNA, 20 bp, synthetic construct
  misc_feature 1..20: note = chemically synthesized
  source 1..20: mol_type = other DNA
cagggccgtccagggggagt

SEQ ID NO: 62521 - DNA, 20 bp, synthetic construct
  misc_feature 1..20: note = chemically synthesized
  source 1..20: mol_type = other DNA
ggatcagccttacaacgtgt

SEQ ID NO: 62522 - DNA, 20 bp, synthetic construct
  misc_feature 1..20: note = chemically synthesized
  source 1..20: mol_type = other DNA
agggactgaagctgctgggg

SEQ ID NO: 62523 - DNA, 20 bp, synthetic construct
  misc_feature 1..20: note = chemically synthesized
  source 1..20: mol_type = other DNA
caacaaaccctttgtcttct

SEQ ID NO: 62524 - DNA, 20 bp, synthetic construct
  misc_feature 1..20: note = chemically synthesized
  source 1..20: mol_type = other DNA
catgtgactgtaaatccctc

SEQ ID NO: 62525 - DNA, 20 bp, synthetic construct
  misc_feature 1..20: note = chemically synthesized
  source 1..20: mol_type = other DNA
tctggctgggtaggcacatg

SEQ ID NO: 62526 - DNA, 20 bp, synthetic construct
  misc_feature 1..20: note = chemically synthesized
  source 1..20: mol_type = other DNA
aatccaggggggactgaatc

SEQ ID NO: 62527 - DNA, 20 bp, synthetic construct
  misc_feature 1..20: note = chemically synthesized
  source 1..20: mol_type = other DNA
cagcttacggacctgggccc

SEQ ID NO: 62528 - DNA, 20 bp, synthetic construct
  misc_feature 1..20: note = chemically synthesized
  source 1..20: mol_type = other DNA
actgcctgatcgtgccgtgg

SEQ ID NO: 62529 - DNA, 20 bp, synthetic construct
  misc_feature 1..20: note = chemically synthesized
  source 1..20: mol_type = other DNA
cacttctggaaaatgactga

SEQ ID NO: 62530 - DNA, 20 bp, synthetic construct
  misc_feature 1..20: note = chemically synthesized
  source 1..20: mol_type = other DNA
ccccagaaagcctcacatat

SEQ ID NO: 62531 - DNA, 20 bp, synthetic construct
  misc_feature 1..20: note = chemically synthesized
  source 1..20: mol_type = other DNA
ccccagatgaagaggagggt

SEQ ID NO: 62532 - DNA, 20 bp, synthetic construct
  misc_feature 1..20: note = chemically synthesized
  source 1..20: mol_type = other DNA
gatgaagaggagggtctctg

SEQ ID NO: 62533 - DNA, 20 bp, synthetic construct
  misc_feature 1..20: note = chemically synthesized
  source 1..20: mol_type = other DNA
tgaggttgagtcataccaaa

SEQ ID NO: 62534 - DNA, 20 bp, synthetic construct
  misc_feature 1..20: note = chemically synthesized
  source 1..20: mol_type = other DNA
atggtgaaattagcaattct

SEQ ID NO: 62535 - DNA, 20 bp, synthetic construct
  misc_feature 1..20: note = chemically synthesized
  source 1..20: mol_type = other DNA
cagtctaatcaatggatacc

SEQ ID NO: 62536 - DNA, 20 bp, synthetic construct
  misc_feature 1..20: note = chemically synthesized
  source 1..20: mol_type = other DNA
cacacaagtctcctgttctc

SEQ ID NO: 62537 - DNA, 20 bp, synthetic construct
  misc_feature 1..20: note = chemically synthesized
  source 1..20: mol_type = other DNA
gatgttcaagttagataaca

SEQ ID NO: 62538 - DNA, 20 bp, synthetic construct
  misc_feature 1..20: note = chemically synthesized
  source 1..20: mol_type = other DNA
gaactacatttcttgcactt

SEQ ID NO: 62539 - DNA, 20 bp, synthetic construct
  misc_feature 1..20: note = chemically synthesized
  source 1..20: mol_type = other DNA
ccctatgaagtacctcccct

SEQ ID NO: 62540 - DNA, 20 bp, synthetic construct
  misc_feature 1..20: note = chemically synthesized
  source 1..20: mol_type = other DNA
cacagctcataagtggcaaa

SEQ ID NO: 62541 - DNA, 20 bp, synthetic construct
  misc_feature 1..20: note = chemically synthesized
  source 1..20: mol_type = other DNA
aggggcagagtcaaagacaa

SEQ ID NO: 62542 - DNA, 20 bp, synthetic construct
  misc_feature 1..20: note = chemically synthesized
  source 1..20: mol_type = other DNA
agggcggtcaccttagacac

SEQ ID NO: 62543 - DNA, 20 bp, synthetic construct
  misc_feature 1..20: note = chemically synthesized
  source 1..20: mol_type = other DNA
tgatgggacaaccataagac

SEQ ID NO: 62544 - DNA, 20 bp, synthetic construct
  misc_feature 1..20: note = chemically synthesized
  source 1..20: mol_type = other DNA
ctcagcttcactgtatcttc

SEQ ID NO: 62545 - DNA, 20 bp, synthetic construct
  misc_feature 1..20: note = chemically synthesized
  source 1..20: mol_type = other DNA
gatgagagggaaacgcagaa

SEQ ID NO: 62546 - DNA, 20 bp, synthetic construct
  misc_feature 1..20: note = chemically synthesized
  source 1..20: mol_type = other DNA
cctgaccttttacctcgcct

SEQ ID NO: 62547 - DNA, 20 bp, synthetic construct
  misc_feature 1..20: note = chemically synthesized
  source 1..20: mol_type = other DNA
aggggagagaacacacgaat

SEQ ID NO: 62548 - DNA, 20 bp, synthetic construct
  misc_feature 1..20: note = chemically synthesized
  source 1..20: mol_type = other DNA
taagcctaaataaaggaagc

SEQ ID NO: 62549 - DNA, 20 bp, synthetic construct
  misc_feature 1..20: note = chemically synthesized
  source 1..20: mol_type = other DNA
tgttaagaggacaatagtca

SEQ ID NO: 62550 - DNA, 20 bp, synthetic construct
  misc_feature 1..20: note = chemically synthesized
  source 1..20: mol_type = other DNA
ctcacaccagaaacaggaaa

SEQ ID NO: 62551 - DNA, 20 bp, synthetic construct
  misc_feature 1..20: note = chemically synthesized
  source 1..20: mol_type = other DNA
ccaagtgctccttgaaaggc

SEQ ID NO: 62552 - DNA, 20 bp, synthetic construct
  misc_feature 1..20: note = chemically synthesized
  source 1..20: mol_type = other DNA
aggcttttgtgttgctcttg

SEQ ID NO: 62553 - DNA, 20 bp, synthetic construct
  misc_feature 1..20: note = chemically synthesized
  source 1..20: mol_type = other DNA
ccacaggactcagaaccagg

SEQ ID NO: 62554 - DNA, 20 bp, synthetic construct
  misc_feature 1..20: note = chemically synthesized
  source 1..20: mol_type = other DNA
gttcctcaacttctctgtgc

SEQ ID NO: 62555 - DNA, 20 bp, synthetic construct
  misc_feature 1..20: note = chemically synthesized
  source 1..20: mol_type = other DNA
tgcaaaatgtaaatcaaatt

SEQ ID NO: 62556 - DNA, 20 bp, synthetic construct
  misc_feature 1..20: note = chemically synthesized
  source 1..20: mol_type = other DNA
gaagctgaccagcatgagag

SEQ ID NO: 62557 - DNA, 20 bp, synthetic construct
  misc_feature 1..20: note = chemically synthesized
  source 1..20: mol_type = other DNA
agggcagaagggctggttat

SEQ ID NO: 62558 - DNA, 20 bp, synthetic construct
  misc_feature 1..20: note = chemically synthesized
  source 1..20: mol_type = other DNA
gcttggaagatgctgacagc

SEQ ID NO: 62559 - DNA, 20 bp, synthetic construct
  misc_feature 1..20: note = chemically synthesized
  source 1..20: mol_type = other DNA
gcagacgcttcaatggcagt

SEQ ID NO: 62560 - DNA, 20 bp, synthetic construct
  misc_feature 1..20: note = chemically synthesized
  source 1..20: mol_type = other DNA
tctgatcactgtcattggta

SEQ ID NO: 62561 - DNA, 20 bp, synthetic construct
  misc_feature 1..20: note = chemically synthesized
  source 1..20: mol_type = other DNA
aagggttgaagcattgagct

SEQ ID NO: 62562 - DNA, 20 bp, synthetic construct
  misc_feature 1..20: note = chemically synthesized
  source 1..20: mol_type = other DNA
caccccacgcactgttggcc

SEQ ID NO: 62563 - DNA, 20 bp, synthetic construct
  misc_feature 1..20: note = chemically synthesized
  source 1..20: mol_type = other DNA
catttgctctcagaagtcaa

SEQ ID NO: 62564 - DNA, 22 bp, synthetic construct
  misc_feature 1..22: note = chemically synthesized
  source 1..22: mol_type = other DNA
caattgtggaaaatcagctttg

SEQ ID NO: 62565 - DNA, 22 bp, synthetic construct
  misc_feature 1..22: note = chemically synthesized
  source 1..22: mol_type = other DNA
aattgtggaaaatcagctttga

SEQ ID NO: 62566 - DNA, 22 bp, synthetic construct
  misc_feature 1..22: note = chemically synthesized
  source 1..22: mol_type = other DNA
tggaaaatcagctttgacttct

SEQ ID NO: 62567 - DNA, 22 bp, synthetic construct
  misc_feature 1..22: note = chemically synthesized
  source 1..22: mol_type = other DNA
tgacttctgagagcaaatgccc

SEQ ID NO: 62568 - DNA, 22 bp, synthetic construct
  misc_feature 1..22: note = chemically synthesized
  source 1..22: mol_type = other DNA
gacttctgagagcaaatgcccc

SEQ ID NO: 62569 - DNA, 22 bp, synthetic construct
  misc_feature 1..22: note = chemically synthesized
  source 1..22: mol_type = other DNA
acttctgagagcaaatgcccct

SEQ ID NO: 62570 - DNA, 22 bp, synthetic construct
  misc_feature 1..22: note = chemically synthesized
  source 1..22: mol_type = other DNA
ctgagagcaaatgcccctggaa

SEQ ID NO: 62571 - DNA, 22 bp, synthetic construct
  misc_feature 1..22: note = chemically synthesized
  source 1..22: mol_type = other DNA
tgagagcaaatgcccctggaag

SEQ ID NO: 62572 - DNA, 22 bp, synthetic construct
  misc_feature 1..22: note = chemically synthesized
  source 1..22: mol_type = other DNA
agagcaaatgcccctggaagct

SEQ ID NO: 62573 - DNA, 22 bp, synthetic construct
  misc_feature 1..22: note = chemically synthesized
  source 1..22: mol_type = other DNA
gaagctgttggccaacagtgcg

SEQ ID NO: 62574 - DNA, 22 bp, synthetic construct
  misc_feature 1..22: note = chemically synthesized
  source 1..22: mol_type = other DNA
ttggccaacagtgcgtggggtg

SEQ ID NO: 62575 - DNA, 22 bp, synthetic construct
  misc_feature 1..22: note = chemically synthesized
  source 1..22: mol_type = other DNA
gccaacagtgcgtggggtggag

SEQ ID NO: 62576 - DNA, 22 bp, synthetic construct
  misc_feature 1..22: note = chemically synthesized
  source 1..22: mol_type = other DNA
gctggcttgagcccctatgagt

SEQ ID NO: 62577 - DNA, 22 bp, synthetic construct
  misc_feature 1..22: note = chemically synthesized
  source 1..22: mol_type = other DNA
ctggcttgagcccctatgagtc

SEQ ID NO: 62578 - DNA, 22 bp, synthetic construct
  misc_feature 1..22: note = chemically synthesized
  source 1..22: mol_type = other DNA
gcttgagcccctatgagtctct

SEQ ID NO: 62579 - DNA, 22 bp, synthetic construct
  misc_feature 1..22: note = chemically synthesized
  source 1..22: mol_type = other DNA
gagcccctatgagtctctcctg

SEQ ID NO: 62580 - DNA, 22 bp, synthetic construct
  misc_feature 1..22: note = chemically synthesized
  source 1..22: mol_type = other DNA
agcccctatgagtctctcctgc

SEQ ID NO: 62581 - DNA, 22 bp, synthetic construct
  misc_feature 1..22: note = chemically synthesized
  source 1..22: mol_type = other DNA
tgagtctctcctgcgtgactca

SEQ ID NO: 62582 - DNA, 22 bp, synthetic construct
  misc_feature 1..22: note = chemically synthesized
  source 1..22: mol_type = other DNA
tcctgcgtgactcagtgctcac

SEQ ID NO: 62583 - DNA, 22 bp, synthetic construct
  misc_feature 1..22: note = chemically synthesized
  source 1..22: mol_type = other DNA
ctgcgtgactcagtgctcacat

SEQ ID NO: 62584 - DNA, 22 bp, synthetic construct
  misc_feature 1..22: note = chemically synthesized
  source 1..22: mol_type = other DNA
cgtgactcagtgctcacattcc

SEQ ID NO: 62585 - DNA, 22 bp, synthetic construct
  misc_feature 1..22: note = chemically synthesized
  source 1..22: mol_type = other DNA
agtgctcacattcctaccgttc

SEQ ID NO: 62586 - DNA, 22 bp, synthetic construct
  misc_feature 1..22: note = chemically synthesized
  source 1..22: mol_type = other DNA
acattcctaccgttccttgctc

SEQ ID NO: 62587 - DNA, 22 bp, synthetic construct
  misc_feature 1..22: note = chemically synthesized
  source 1..22: mol_type = other DNA
ctaccgttccttgctcaccacc

SEQ ID NO: 62588 - DNA, 22 bp, synthetic construct
  misc_feature 1..22: note = chemically synthesized
  source 1..22: mol_type = other DNA
ccgttccttgctcaccaccgga

SEQ ID NO: 62589 - DNA, 22 bp, synthetic construct
  misc_feature 1..22: note = chemically synthesized
  source 1..22: mol_type = other DNA
cttgctcaccaccggatctggg

SEQ ID NO: 62590 - DNA, 22 bp, synthetic construct
  misc_feature 1..22: note = chemically synthesized
  source 1..22: mol_type = other DNA
gctcaccaccggatctgggcgt

SEQ ID NO: 62591 - DNA, 22 bp, synthetic construct
  misc_feature 1..22: note = chemically synthesized
  source 1..22: mol_type = other DNA
ctcaccaccggatctgggcgta

SEQ ID NO: 62592 - DNA, 22 bp, synthetic construct
  misc_feature 1..22: note = chemically synthesized
  source 1..22: mol_type = other DNA
accaccggatctgggcgtattt

SEQ ID NO: 62593 - DNA, 22 bp, synthetic construct
  misc_feature 1..22: note = chemically synthesized
  source 1..22: mol_type = other DNA
ggcgtatttctgcatggcctgt

SEQ ID NO: 62594 - DNA, 22 bp, synthetic construct
  misc_feature 1..22: note = chemically synthesized
  source 1..22: mol_type = other DNA
ctgcatggcctgtgctgagcat

SEQ ID NO: 62595 - DNA, 22 bp, synthetic construct
  misc_feature 1..22: note = chemically synthesized
  source 1..22: mol_type = other DNA
tgcatggcctgtgctgagcatc

SEQ ID NO: 62596 - DNA, 22 bp, synthetic construct
  misc_feature 1..22: note = chemically synthesized
  source 1..22: mol_type = other DNA
catggcctgtgctgagcatctt

SEQ ID NO: 62597 - DNA, 22 bp, synthetic construct
  misc_feature 1..22: note = chemically synthesized
  source 1..22: mol_type = other DNA
tgctgagcatcttgtaactaga

SEQ ID NO: 62598 - DNA, 22 bp, synthetic construct
  misc_feature 1..22: note = chemically synthesized
  source 1..22: mol_type = other DNA
agcatcttgtaactagaacttt

SEQ ID NO: 62599 - DNA, 22 bp, synthetic construct
  misc_feature 1..22: note = chemically synthesized
  source 1..22: mol_type = other DNA
gtaactagaactttctaatggg

SEQ ID NO: 62600 - DNA, 22 bp, synthetic construct
  misc_feature 1..22: note = chemically synthesized
  source 1..22: mol_type = other DNA
taactagaactttctaatgggg

SEQ ID NO: 62601 - DNA, 22 bp, synthetic construct
  misc_feature 1..22: note = chemically synthesized
  source 1..22: mol_type = other DNA
gaactttctaatggggtttcct

SEQ ID NO: 62602 - DNA, 22 bp, synthetic construct
  misc_feature 1..22: note = chemically synthesized
  source 1..22: mol_type = other DNA
tctaatggggtttccttgtggg

SEQ ID NO: 62603 - DNA, 22 bp, synthetic construct
  misc_feature 1..22: note = chemically synthesized
  source 1..22: mol_type = other DNA
ctaatggggtttccttgtggga

SEQ ID NO: 62604 - DNA, 22 bp, synthetic construct
  misc_feature 1..22: note = chemically synthesized
  source 1..22: mol_type = other DNA
taatggggtttccttgtgggag

SEQ ID NO: 62605 - DNA, 22 bp, synthetic construct
  misc_feature 1..22: note = chemically synthesized
  source 1..22: mol_type = other DNA
atggggtttccttgtgggagtt

SEQ ID NO: 62606 - DNA, 22 bp, synthetic construct
  misc_feature 1..22: note = chemically synthesized
  source 1..22: mol_type = other DNA
ccttgtgggagttcctttagcc

SEQ ID NO: 62607 - DNA, 22 bp, synthetic construct
  misc_feature 1..22: note = chemically synthesized
  source 1..22: mol_type = other DNA
cttgtgggagttcctttagcct

SEQ ID NO: 62608 - DNA, 22 bp, synthetic construct
  misc_feature 1..22: note = chemically synthesized
  source 1..22: mol_type = other DNA
gtgggagttcctttagccttcc

SEQ ID NO: 62609 - DNA, 22 bp, synthetic construct
  misc_feature 1..22: note = chemically synthesized
  source 1..22: mol_type = other DNA
tgggagttcctttagccttccc

SEQ ID NO: 62610 - DNA, 22 bp, synthetic construct
  misc_feature 1..22: note = chemically synthesized
  source 1..22: mol_type = other DNA
ctttagccttcccggtgttttt

SEQ ID NO: 62611 - DNA, 22 bp, synthetic construct
  misc_feature 1..22: note = chemically synthesized
  source 1..22: mol_type = other DNA
tagccttcccggtgtttttcag

SEQ ID NO: 62612 - DNA, 22 bp, synthetic construct
  misc_feature 1..22: note = chemically synthesized
  source 1..22: mol_type = other DNA
agccttcccggtgtttttcaga

SEQ ID NO: 62613 - DNA, 22 bp, synthetic construct
  misc_feature 1..22: note = chemically synthesized
  source 1..22: mol_type = other DNA
gccttcccggtgtttttcagat

SEQ ID NO: 62614 - DNA, 22 bp, synthetic construct
  misc_feature 1..22: note = chemically synthesized
  source 1..22: mol_type = other DNA
cccggtgtttttcagatcttag

SEQ ID NO: 62615 - DNA, 22 bp, synthetic construct
  misc_feature 1..22: note = chemically synthesized
  source 1..22: mol_type = other DNA
ccggtgtttttcagatcttagt

SEQ ID NO: 62616 - DNA, 22 bp, synthetic construct
  misc_feature 1..22: note = chemically synthesized
  source 1..22: mol_type = other DNA
ttcagatcttagtcacccttcc

SEQ ID NO: 62617 - DNA, 22 bp, synthetic construct
  misc_feature 1..22: note = chemically synthesized
  source 1..22: mol_type = other DNA
tcagatcttagtcacccttcca

SEQ ID NO: 62618 - DNA, 22 bp, synthetic construct
  misc_feature 1..22: note = chemically synthesized
  source 1..22: mol_type = other DNA
cagatcttagtcacccttccag

SEQ ID NO: 62619 - DNA, 22 bp, synthetic construct
  misc_feature 1..22: note = chemically synthesized
  source 1..22: mol_type = other DNA
agatcttagtcacccttccagg

SEQ ID NO: 62620 - DNA, 22 bp, synthetic construct
  misc_feature 1..22: note = chemically synthesized
  source 1..22: mol_type = other DNA
agtcacccttccaggcttgcgt

SEQ ID NO: 62621 - DNA, 22 bp, synthetic construct
  misc_feature 1..22: note = chemically synthesized
  source 1..22: mol_type = other DNA
gtcacccttccaggcttgcgta

SEQ ID NO: 62622 - DNA, 22 bp, synthetic construct
  misc_feature 1..22: note = chemically synthesized
  source 1..22: mol_type = other DNA
ccaggcttgcgtagtaggtgaa

SEQ ID NO: 62623 - DNA, 22 bp, synthetic construct
  misc_feature 1..22: note = chemically synthesized
  source 1..22: mol_type = other DNA
caggcttgcgtagtaggtgaag

SEQ ID NO: 62624 - DNA, 22 bp, synthetic construct
  misc_feature 1..22: note = chemically synthesized
  source 1..22: mol_type = other DNA
gcgtagtaggtgaagacttctt

SEQ ID NO: 62625 - DNA, 22 bp, synthetic construct
  misc_feature 1..22: note = chemically synthesized
  source 1..22: mol_type = other DNA
cgtagtaggtgaagacttcttt

SEQ ID NO: 62626 - DNA, 22 bp, synthetic construct
  misc_feature 1..22: note = chemically synthesized
  source 1..22: mol_type = other DNA
ctttgatgcatttcatgaattc

SEQ ID NO: 62627 - DNA, 22 bp, synthetic construct
  misc_feature 1..22: note = chemically synthesized
  source 1..22: mol_type = other DNA
tttgatgcatttcatgaattct

SEQ ID NO: 62628 - DNA, 22 bp, synthetic construct
  misc_feature 1..22: note = chemically synthesized
  source 1..22: mol_type = other DNA
tgatgcatttcatgaattctgg

SEQ ID NO: 62629 - DNA, 22 bp, synthetic construct
  misc_feature 1..22: note = chemically synthesized
  source 1..22: mol_type = other DNA
gatgcatttcatgaattctggt

SEQ ID NO: 62630 - DNA, 22 bp, synthetic construct
  misc_feature 1..22: note = chemically synthesized
  source 1..22: mol_type = other DNA
atgcatttcatgaattctggtt

SEQ ID NO: 62631 - DNA, 22 bp, synthetic construct
  misc_feature 1..22: note = chemically synthesized
  source 1..22: mol_type = other DNA
catgaattctggttgtttcagt

SEQ ID NO: 62632 - DNA, 22 bp, synthetic construct
  misc_feature 1..22: note = chemically synthesized
  source 1..22: mol_type = other DNA
atgaattctggttgtttcagtc

SEQ ID NO: 62633 - DNA, 22 bp, synthetic construct
  misc_feature 1..22: note = chemically synthesized
  source 1..22: mol_type = other DNA
tggttgtttcagtcaggatggg

SEQ ID NO: 62634 - DNA, 22 bp, synthetic construct
  misc_feature 1..22: note = chemically synthesized
  source 1..22: mol_type = other DNA
gttgtttcagtcaggatgggca

SEQ ID NO: 62635 - DNA, 22 bp, synthetic construct
  misc_feature 1..22: note = chemically synthesized
  source 1..22: mol_type = other DNA
tttcagtcaggatgggcaagga

SEQ ID NO: 62636 - DNA, 22 bp, synthetic construct
  misc_feature 1..22: note = chemically synthesized
  source 1..22: mol_type = other DNA
cagtcaggatgggcaaggattg

SEQ ID NO: 62637 - DNA, 22 bp, synthetic construct
  misc_feature 1..22: note = chemically synthesized
  source 1..22: mol_type = other DNA
agtcaggatgggcaaggattgt

SEQ ID NO: 62638 - DNA, 22 bp, synthetic construct
  misc_feature 1..22: note = chemically synthesized
  source 1..22: mol_type = other DNA
tgctgcagcaaccgagaagctc

SEQ ID NO: 62639 - DNA, 22 bp, synthetic construct
  misc_feature 1..22: note = chemically synthesized
  source 1..22: mol_type = other DNA
cagcaaccgagaagctcacagc

SEQ ID NO: 62640 - DNA, 22 bp, synthetic construct
  misc_feature 1..22: note = chemically synthesized
  source 1..22: mol_type = other DNA
acagctcaatgcttcaaccctt

SEQ ID NO: 62641 - DNA, 22 bp, synthetic construct
  misc_feature 1..22: note = chemically synthesized
  source 1..22: mol_type = other DNA
aatgcttcaaccctttagaaag

SEQ ID NO: 62642 - DNA, 22 bp, synthetic construct
  misc_feature 1..22: note = chemically synthesized
  source 1..22: mol_type = other DNA
caaccctttagaaagggttgat

SEQ ID NO: 62643 - DNA, 22 bp, synthetic construct
  misc_feature 1..22: note = chemically synthesized
  source 1..22: mol_type = other DNA
aaccctttagaaagggttgatt

SEQ ID NO: 62644 - DNA, 22 bp, synthetic construct
  misc_feature 1..22: note = chemically synthesized
  source 1..22: mol_type = other DNA
tagaaagggttgattcctctcc

SEQ ID NO: 62645 - DNA, 22 bp, synthetic construct
  misc_feature 1..22: note = chemically synthesized
  source 1..22: mol_type = other DNA
agaaagggttgattcctctccc

SEQ ID NO: 62646 - DNA, 22 bp, synthetic construct
  misc_feature 1..22: note = chemically synthesized
  source 1..22: mol_type = other DNA
gaaagggttgattcctctcccg

SEQ ID NO: 62647 - DNA, 22 bp, synthetic construct
  misc_feature 1..22: note = chemically synthesized
  source 1..22: mol_type = other DNA
attcctctcccgctctacttgt

SEQ ID NO: 62648 - DNA, 22 bp, synthetic construct
  misc_feature 1..22: note = chemically synthesized
  source 1..22: mol_type = other DNA
ctctcccgctctacttgtccca

SEQ ID NO: 62649 - DNA, 22 bp, synthetic construct
  misc_feature 1..22: note = chemically synthesized
  source 1..22: mol_type = other DNA
tcccgctctacttgtcccatgt

SEQ ID NO: 62650 - DNA, 22 bp, synthetic construct
  misc_feature 1..22: note = chemically synthesized
  source 1..22: mol_type = other DNA
ccgctctacttgtcccatgtgg

SEQ ID NO: 62651 - DNA, 22 bp, synthetic construct
  misc_feature 1..22: note = chemically synthesized
  source 1..22: mol_type = other DNA
tacttgtcccatgtgggatgaa

SEQ ID NO: 62652 - DNA, 22 bp, synthetic construct
  misc_feature 1..22: note = chemically synthesized
  source 1..22: mol_type = other DNA
cttgtcccatgtgggatgaaca

SEQ ID NO: 62653 - DNA, 22 bp, synthetic construct
  misc_feature 1..22: note = chemically synthesized
  source 1..22: mol_type = other DNA
gtcccatgtgggatgaacagag

SEQ ID NO: 62654 - DNA, 22 bp, synthetic construct
  misc_feature 1..22: note = chemically synthesized
  source 1..22: mol_type = other DNA
tcccatgtgggatgaacagagg

SEQ ID NO: 62655 - DNA, 22 bp, synthetic construct
  misc_feature 1..22: note = chemically synthesized
  source 1..22: mol_type = other DNA
cccaccctggggacacagcaac

SEQ ID NO: 62656 - DNA, 22 bp, synthetic construct
  misc_feature 1..22: note = chemically synthesized
  source 1..22: mol_type = other DNA
gggacacagcaaccagactgaa

SEQ ID NO: 62657 - DNA, 22 bp, synthetic construct
  misc_feature 1..22: note = chemically synthesized
  source 1..22: mol_type = other DNA
aaggaggtttcagctcctcact

SEQ ID NO: 62658 - DNA, 22 bp, synthetic construct
  misc_feature 1..22: note = chemically synthesized
  source 1..22: mol_type = other DNA
cagctcctcacttccccgctcc

SEQ ID NO: 62659 - DNA, 22 bp, synthetic construct
  misc_feature 1..22: note = chemically synthesized
  source 1..22: mol_type = other DNA
agctcctcacttccccgctcca

SEQ ID NO: 62660 - DNA, 22 bp, synthetic construct
  misc_feature 1..22: note = chemically synthesized
  source 1..22: mol_type = other DNA
ctcacttccccgctccagacca

SEQ ID NO: 62661 - DNA, 22 bp, synthetic construct
  misc_feature 1..22: note = chemically synthesized
  source 1..22: mol_type = other DNA
acttccccgctccagaccatct

SEQ ID NO: 62662 - DNA, 22 bp, synthetic construct
  misc_feature 1..22: note = chemically synthesized
  source 1..22: mol_type = other DNA
ccccgctccagaccatctgact

SEQ ID NO: 62663 - DNA, 22 bp, synthetic construct
  misc_feature 1..22: note = chemically synthesized
  source 1..22: mol_type = other DNA
cccgctccagaccatctgactc

SEQ ID NO: 62664 - DNA, 22 bp, synthetic construct
  misc_feature 1..22: note = chemically synthesized
  source 1..22: mol_type = other DNA
cagaccatctgactctagttcc

SEQ ID NO: 62665 - DNA, 22 bp, synthetic construct
  misc_feature 1..22: note = chemically synthesized
  source 1..22: mol_type = other DNA
actctagttcctttcatcattc

SEQ ID NO: 62666 - DNA, 22 bp, synthetic construct
  misc_feature 1..22: note = chemically synthesized
  source 1..22: mol_type = other DNA
tagttcctttcatcattcctga

SEQ ID NO: 62667 - DNA, 22 bp, synthetic construct
  misc_feature 1..22: note = chemically synthesized
  source 1..22: mol_type = other DNA
gttcctttcatcattcctgatg

SEQ ID NO: 62668 - DNA, 22 bp, synthetic construct
  misc_feature 1..22: note = chemically synthesized
  source 1..22: mol_type = other DNA
ctttcatcattcctgatgtcac

SEQ ID NO: 62669 - DNA, 22 bp, synthetic construct
  misc_feature 1..22: note = chemically synthesized
  source 1..22: mol_type = other DNA
tcatcattcctgatgtcacgat

SEQ ID NO: 62670 - DNA, 22 bp, synthetic construct
  misc_feature 1..22: note = chemically synthesized
  source 1..22: mol_type = other DNA
catcattcctgatgtcacgatt

SEQ ID NO: 62671 - DNA, 22 bp, synthetic construct
  misc_feature 1..22: note = chemically synthesized
  source 1..22: mol_type = other DNA
atcattcctgatgtcacgattt

SEQ ID NO: 62672 - DNA, 22 bp, synthetic construct
  misc_feature 1..22: note = chemically synthesized
  source 1..22: mol_type = other DNA
ctgatgtcacgatttcaacagt

SEQ ID NO: 62673 - DNA, 22 bp, synthetic construct
  misc_feature 1..22: note = chemically synthesized
  source 1..22: mol_type = other DNA
atgtcacgatttcaacagtaag

SEQ ID NO: 62674 - DNA, 22 bp, synthetic construct
  misc_feature 1..22: note = chemically synthesized
  source 1..22: mol_type = other DNA
caacagtaagcgtgataccaat

SEQ ID NO: 62675 - DNA, 22 bp, synthetic construct
  misc_feature 1..22: note = chemically synthesized
  source 1..22: mol_type = other DNA
aacagtaagcgtgataccaatg

SEQ ID NO: 62676 - DNA, 22 bp, synthetic construct
  misc_feature 1..22: note = chemically synthesized
  source 1..22: mol_type = other DNA
ctactgccattgaagcgtctgc

SEQ ID NO: 62677 - DNA, 22 bp, synthetic construct
  misc_feature 1..22: note = chemically synthesized
  source 1..22: mol_type = other DNA
ctgccattgaagcgtctgctgt

SEQ ID NO: 62678 - DNA, 22 bp, synthetic construct
  misc_feature 1..22: note = chemically synthesized
  source 1..22: mol_type = other DNA
ccattgaagcgtctgctgtcag

SEQ ID NO: 62679 - DNA, 22 bp, synthetic construct
  misc_feature 1..22: note = chemically synthesized
  source 1..22: mol_type = other DNA
aagcgtctgctgtcagcatctt

SEQ ID NO: 62680 - DNA, 22 bp, synthetic construct
  misc_feature 1..22: note = chemically synthesized
  source 1..22: mol_type = other DNA
ctgtcagcatcttccaagcttg

SEQ ID NO: 62681 - DNA, 22 bp, synthetic construct
  misc_feature 1..22: note = chemically synthesized
  source 1..22: mol_type = other DNA
tcagcatcttccaagcttggat

SEQ ID NO: 62682 - DNA, 22 bp, synthetic construct
  misc_feature 1..22: note = chemically synthesized
  source 1..22: mol_type = other DNA
ccaagcttggataaccagccct

SEQ ID NO: 62683 - DNA, 22 bp, synthetic construct
  misc_feature 1..22: note = chemically synthesized
  source 1..22: mol_type = other DNA
caagcttggataaccagccctt

SEQ ID NO: 62684 - DNA, 22 bp, synthetic construct
  misc_feature 1..22: note = chemically synthesized
  source 1..22: mol_type = other DNA
ggataaccagcccttctgccct

SEQ ID NO: 62685 - DNA, 22 bp, synthetic construct
  misc_feature 1..22: note = chemically synthesized
  source 1..22: mol_type = other DNA
gataaccagcccttctgccctg

SEQ ID NO: 62686 - DNA, 22 bp, synthetic construct
  misc_feature 1..22: note = chemically synthesized
  source 1..22: mol_type = other DNA
ctgccctgcccaagtgccaccc

SEQ ID NO: 62687 - DNA, 22 bp, synthetic construct
  misc_feature 1..22: note = chemically synthesized
  source 1..22: mol_type = other DNA
tgccctgcccaagtgccaccca

SEQ ID NO: 62688 - DNA, 22 bp, synthetic construct
  misc_feature 1..22: note = chemically synthesized
  source 1..22: mol_type = other DNA
ccctgcccaagtgccacccatt

SEQ ID NO: 62689 - DNA, 22 bp, synthetic construct
  misc_feature 1..22: note = chemically synthesized
  source 1..22: mol_type = other DNA
cccaagtgccacccatttgagg

SEQ ID NO: 62690 - DNA, 22 bp, synthetic construct
  misc_feature 1..22: note = chemically synthesized
  source 1..22: mol_type = other DNA
gaggaaaaggacaaatgaataa

SEQ ID NO: 62691 - DNA, 22 bp, synthetic construct
  misc_feature 1..22: note = chemically synthesized
  source 1..22: mol_type = other DNA
aggaaaaggacaaatgaataag

SEQ ID NO: 62692 - DNA, 22 bp, synthetic construct
  misc_feature 1..22: note = chemically synthesized
  source 1..22: mol_type = other DNA
ttgtttgtttgtttctgataga

SEQ ID NO: 62693 - DNA, 22 bp, synthetic construct
  misc_feature 1..22: note = chemically synthesized
  source 1..22: mol_type = other DNA
tgtttgtttgtttctgatagag

SEQ ID NO: 62694 - DNA, 22 bp, synthetic construct
  misc_feature 1..22: note = chemically synthesized
  source 1..22: mol_type = other DNA
gtttgtttgtttctgatagagc

SEQ ID NO: 62695 - DNA, 22 bp, synthetic construct
  misc_feature 1..22: note = chemically synthesized
  source 1..22: mol_type = other DNA
tttgtttgtttctgatagagct

SEQ ID NO: 62696 - DNA, 22 bp, synthetic construct
  misc_feature 1..22: note = chemically synthesized
  source 1..22: mol_type = other DNA
gtttgtttctgatagagctgat

SEQ ID NO: 62697 - DNA, 22 bp, synthetic construct
  misc_feature 1..22: note = chemically synthesized
  source 1..22: mol_type = other DNA
tttgtttctgatagagctgata

SEQ ID NO: 62698 - DNA, 22 bp, synthetic construct
  misc_feature 1..22: note = chemically synthesized
  source 1..22: mol_type = other DNA
gtttctgatagagctgatattg

SEQ ID NO: 62699 - DNA, 22 bp, synthetic construct
  misc_feature 1..22: note = chemically synthesized
  source 1..22: mol_type = other DNA
tttctgatagagctgatattgg

SEQ ID NO: 62700 - DNA, 22 bp, synthetic construct
  misc_feature 1..22: note = chemically synthesized
  source 1..22: mol_type = other DNA
ctgatagagctgatattggagg

SEQ ID NO: 62701 - DNA, 22 bp, synthetic construct
  misc_feature 1..22: note = chemically synthesized
  source 1..22: mol_type = other DNA
tgatagagctgatattggaggg

SEQ ID NO: 62702 - DNA, 22 bp, synthetic construct
  misc_feature 1..22: note = chemically synthesized
  source 1..22: mol_type = other DNA
atagagctgatattggagggtg

SEQ ID NO: 62703 - DNA, 22 bp, synthetic construct
  misc_feature 1..22: note = chemically synthesized
  source 1..22: mol_type = other DNA
atattggagggtgaggcttatg

SEQ ID NO: 62704 - DNA, 22 bp, synthetic construct
  misc_feature 1..22: note = chemically synthesized
  source 1..22: mol_type = other DNA
gagggtgaggcttatgcctgtt

SEQ ID NO: 62705 - DNA, 22 bp, synthetic construct
  misc_feature 1..22: note = chemically synthesized
  source 1..22: mol_type = other DNA
atgcctgttgggatttgggctt

SEQ ID NO: 62706 - DNA, 22 bp, synthetic construct
  misc_feature 1..22: note = chemically synthesized
  source 1..22: mol_type = other DNA
tgcctgttgggatttgggcttc

SEQ ID NO: 62707 - DNA, 22 bp, synthetic construct
  misc_feature 1..22: note = chemically synthesized
  source 1..22: mol_type = other DNA
ttgggatttgggcttctagaaa

SEQ ID NO: 62708 - DNA, 22 bp, synthetic construct
  misc_feature 1..22: note = chemically synthesized
  source 1..22: mol_type = other DNA
ggatttgggcttctagaaactg

SEQ ID NO: 62709 - DNA, 22 bp, synthetic construct
  misc_feature 1..22: note = chemically synthesized
  source 1..22: mol_type = other DNA
gggcttctagaaactgacctct

SEQ ID NO: 62710 - DNA, 22 bp, synthetic construct
  misc_feature 1..22: note = chemically synthesized
  source 1..22: mol_type = other DNA
ggcttctagaaactgacctctc

SEQ ID NO: 62711 - DNA, 22 bp, synthetic construct
  misc_feature 1..22: note = chemically synthesized
  source 1..22: mol_type = other DNA
ctagaaactgacctctcatgct

SEQ ID NO: 62712 - DNA, 22 bp, synthetic construct
  misc_feature 1..22: note = chemically synthesized
  source 1..22: mol_type = other DNA
tagaaactgacctctcatgctg

SEQ ID NO: 62713 - DNA, 22 bp, synthetic construct
  misc_feature 1..22: note = chemically synthesized
  source 1..22: mol_type = other DNA
gaaactgacctctcatgctggt

SEQ ID NO: 62714 - DNA, 22 bp, synthetic construct
  misc_feature 1..22: note = chemically synthesized
  source 1..22: mol_type = other DNA
acctctcatgctggtcagcttc

SEQ ID NO: 62715 - DNA, 22 bp, synthetic construct
  misc_feature 1..22: note = chemically synthesized
  source 1..22: mol_type = other DNA
tcatgctggtcagcttcaccat

SEQ ID NO: 62716 - DNA, 22 bp, synthetic construct
  misc_feature 1..22: note = chemically synthesized
  source 1..22: mol_type = other DNA
atgctggtcagcttcaccatct

SEQ ID NO: 62717 - DNA, 22 bp, synthetic construct
  misc_feature 1..22: note = chemically synthesized
  source 1..22: mol_type = other DNA
gtcagcttcaccatctccagca

SEQ ID NO: 62718 - DNA, 22 bp, synthetic construct
  misc_feature 1..22: note = chemically synthesized
  source 1..22: mol_type = other DNA
caccatctccagcaatgtgcga

SEQ ID NO: 62719 - DNA, 22 bp, synthetic construct
  misc_feature 1..22: note = chemically synthesized
  source 1..22: mol_type = other DNA
accatctccagcaatgtgcgac

SEQ ID NO: 62720 - DNA, 22 bp, synthetic construct
  misc_feature 1..22: note = chemically synthesized
  source 1..22: mol_type = other DNA
cagcaatgtgcgacttaggcca

SEQ ID NO: 62721 - DNA, 22 bp, synthetic construct
  misc_feature 1..22: note = chemically synthesized
  source 1..22: mol_type = other DNA
aggccaggctccacaactaggc

SEQ ID NO: 62722 - DNA, 22 bp, synthetic construct
  misc_feature 1..22: note = chemically synthesized
  source 1..22: mol_type = other DNA
ggccaggctccacaactaggcc

SEQ ID NO: 62723 - DNA, 22 bp, synthetic construct
  misc_feature 1..22: note = chemically synthesized
  source 1..22: mol_type = other DNA
cacaactaggccagaggaagat

SEQ ID NO: 62724 - DNA, 22 bp, synthetic construct
  misc_feature 1..22: note = chemically synthesized
  source 1..22: mol_type = other DNA
ggccagaggaagatttctgggc

SEQ ID NO: 62725 - DNA, 22 bp, synthetic construct
  misc_feature 1..22: note = chemically synthesized
  source 1..22: mol_type = other DNA
ctgggctacatgggacaaggac

SEQ ID NO: 62726 - DNA, 22 bp, synthetic construct
  misc_feature 1..22: note = chemically synthesized
  source 1..22: mol_type = other DNA
tgggctacatgggacaaggaca

SEQ ID NO: 62727 - DNA, 22 bp, synthetic construct
  misc_feature 1..22: note = chemically synthesized
  source 1..22: mol_type = other DNA
ggctacatgggacaaggacaag

SEQ ID NO: 62728 - DNA, 22 bp, synthetic construct
  misc_feature 1..22: note = chemically synthesized
  source 1..22: mol_type = other DNA
catgggacaaggacaaggaact

SEQ ID NO: 62729 - DNA, 22 bp, synthetic construct
  misc_feature 1..22: note = chemically synthesized
  source 1..22: mol_type = other DNA
tagagaaataagtcattgcatt

SEQ ID NO: 62730 - DNA, 22 bp, synthetic construct
  misc_feature 1..22: note = chemically synthesized
  source 1..22: mol_type = other DNA
agagaaataagtcattgcattg

SEQ ID NO: 62731 - DNA, 22 bp, synthetic construct
  misc_feature 1..22: note = chemically synthesized
  source 1..22: mol_type = other DNA
gagaaataagtcattgcattga

SEQ ID NO: 62732 - DNA, 22 bp, synthetic construct
  misc_feature 1..22: note = chemically synthesized
  source 1..22: mol_type = other DNA
cattgaaacctcaaatttgatt

SEQ ID NO: 62733 - DNA, 22 bp, synthetic construct
  misc_feature 1..22: note = chemically synthesized
  source 1..22: mol_type = other DNA
aaacctcaaatttgatttacat

SEQ ID NO: 62734 - DNA, 22 bp, synthetic construct
  misc_feature 1..22: note = chemically synthesized
  source 1..22: mol_type = other DNA
aaatttgatttacattttgcag

SEQ ID NO: 62735 - DNA, 22 bp, synthetic construct
  misc_feature 1..22: note = chemically synthesized
  source 1..22: mol_type = other DNA
gatttacattttgcagatgagg

SEQ ID NO: 62736 - DNA, 22 bp, synthetic construct
  misc_feature 1..22: note = chemically synthesized
  source 1..22: mol_type = other DNA
atttacattttgcagatgagga

SEQ ID NO: 62737 - DNA, 22 bp, synthetic construct
  misc_feature 1..22: note = chemically synthesized
  source 1..22: mol_type = other DNA
acattttgcagatgaggaaact

SEQ ID NO: 62738 - DNA, 22 bp, synthetic construct
  misc_feature 1..22: note = chemically synthesized
  source 1..22: mol_type = other DNA
cattttgcagatgaggaaacta

SEQ ID NO: 62739 - DNA, 22 bp, synthetic construct
  misc_feature 1..22: note = chemically synthesized
  source 1..22: mol_type = other DNA
tgcagatgaggaaactacggca

SEQ ID NO: 62740 - DNA, 22 bp, synthetic construct
  misc_feature 1..22: note = chemically synthesized
  source 1..22: mol_type = other DNA
gcagatgaggaaactacggcac

SEQ ID NO: 62741 - DNA, 22 bp, synthetic construct
  misc_feature 1..22: note = chemically synthesized
  source 1..22: mol_type = other DNA
cagatgaggaaactacggcaca

SEQ ID NO: 62742 - DNA, 22 bp, synthetic construct
  misc_feature 1..22: note = chemically synthesized
  source 1..22: mol_type = other DNA
cggcacagagaagttgaggaac

SEQ ID NO: 62743 - DNA, 22 bp, synthetic construct
  misc_feature 1..22: note = chemically synthesized
  source 1..22: mol_type = other DNA
aggaacttccctgagagcacac

SEQ ID NO: 62744 - DNA, 22 bp, synthetic construct
  misc_feature 1..22: note = chemically synthesized
  source 1..22: mol_type = other DNA
ccctgagagcacacagcctgcc

SEQ ID NO: 62745 - DNA, 22 bp, synthetic construct
  misc_feature 1..22: note = chemically synthesized
  source 1..22: mol_type = other DNA
cctgagagcacacagcctgccc

SEQ ID NO: 62746 - DNA, 22 bp, synthetic construct
  misc_feature 1..22: note = chemically synthesized
  source 1..22: mol_type = other DNA
agagcacacagcctgccctctc

SEQ ID NO: 62747 - DNA, 22 bp, synthetic construct
  misc_feature 1..22: note = chemically synthesized
  source 1..22: mol_type = other DNA
ccctctcccatatgatacaata

SEQ ID NO: 62748 - DNA, 22 bp, synthetic construct
  misc_feature 1..22: note = chemically synthesized
  source 1..22: mol_type = other DNA
tcccatatgatacaatagtgac

SEQ ID NO: 62749 - DNA, 22 bp, synthetic construct
  misc_feature 1..22: note = chemically synthesized
  source 1..22: mol_type = other DNA
ccatatgatacaatagtgacac

SEQ ID NO: 62750 - DNA, 22 bp, synthetic construct
  misc_feature 1..22: note = chemically synthesized
  source 1..22: mol_type = other DNA
ctgcttttccgagttgctgcct

SEQ ID NO: 62751 - DNA, 22 bp, synthetic construct
  misc_feature 1..22: note = chemically synthesized
  source 1..22: mol_type = other DNA
cttttccgagttgctgcctggg

SEQ ID NO: 62752 - DNA, 22 bp, synthetic construct
  misc_feature 1..22: note = chemically synthesized
  source 1..22: mol_type = other DNA
ttccgagttgctgcctgggtcc

SEQ ID NO: 62753 - DNA, 22 bp, synthetic construct
  misc_feature 1..22: note = chemically synthesized
  source 1..22: mol_type = other DNA
tccgagttgctgcctgggtccc

SEQ ID NO: 62754 - DNA, 22 bp, synthetic construct
  misc_feature 1..22: note = chemically synthesized
  source 1..22: mol_type = other DNA
ccgagttgctgcctgggtccct

SEQ ID NO: 62755 - DNA, 22 bp, synthetic construct
  misc_feature 1..22: note = chemically synthesized
  source 1..22: mol_type = other DNA
cgagttgctgcctgggtccctg

SEQ ID NO: 62756 - DNA, 22 bp, synthetic construct
  misc_feature 1..22: note = chemically synthesized
  source 1..22: mol_type = other DNA
ctgcctgggtccctgctgggga

SEQ ID NO: 62757 - DNA, 22 bp, synthetic construct
  misc_feature 1..22: note = chemically synthesized
  source 1..22: mol_type = other DNA
cctgggtccctgctggggaggg

SEQ ID NO: 62758 - DNA, 22 bp, synthetic construct
  misc_feature 1..22: note = chemically synthesized
  source 1..22: mol_type = other DNA
ggtccctgctggggagggagtt

SEQ ID NO: 62759 - DNA, 22 bp, synthetic construct
  misc_feature 1..22: note = chemically synthesized
  source 1..22: mol_type = other DNA
ctggggagggagtttgcctcag

SEQ ID NO: 62760 - DNA, 22 bp, synthetic construct
  misc_feature 1..22: note = chemically synthesized
  source 1..22: mol_type = other DNA
gggagggagtttgcctcagtga

SEQ ID NO: 62761 - DNA, 22 bp, synthetic construct
  misc_feature 1..22: note = chemically synthesized
  source 1..22: mol_type = other DNA
gcctcagtgagagtgcctttct

SEQ ID NO: 62762 - DNA, 22 bp, synthetic construct
  misc_feature 1..22: note = chemically synthesized
  source 1..22: mol_type = other DNA
cctcagtgagagtgcctttctc

SEQ ID NO: 62763 - DNA, 22 bp, synthetic construct
  misc_feature 1..22: note = chemically synthesized
  source 1..22: mol_type = other DNA
agtgagagtgcctttctctgac

SEQ ID NO: 62764 - DNA, 22 bp, synthetic construct
  misc_feature 1..22: note = chemically synthesized
  source 1..22: mol_type = other DNA
tctctgacttctctactcaggg

SEQ ID NO: 62765 - DNA, 22 bp, synthetic construct
  misc_feature 1..22: note = chemically synthesized
  source 1..22: mol_type = other DNA
ctctgacttctctactcagggt

SEQ ID NO: 62766 - DNA, 22 bp, synthetic construct
  misc_feature 1..22: note = chemically synthesized
  source 1..22: mol_type = other DNA
tctgacttctctactcagggtc

SEQ ID NO: 62767 - DNA, 22 bp, synthetic construct
  misc_feature 1..22: note = chemically synthesized
  source 1..22: mol_type = other DNA
tgacttctctactcagggtcat

SEQ ID NO: 62768 - DNA, 22 bp, synthetic construct
  misc_feature 1..22: note = chemically synthesized
  source 1..22: mol_type = other DNA
acttctctactcagggtcattc

SEQ ID NO: 62769 - DNA, 22 bp, synthetic construct
  misc_feature 1..22: note = chemically synthesized
  source 1..22: mol_type = other DNA
ctctactcagggtcattccatt

SEQ ID NO: 62770 - DNA, 22 bp, synthetic construct
  misc_feature 1..22: note = chemically synthesized
  source 1..22: mol_type = other DNA
tctactcagggtcattccattt

SEQ ID NO: 62771 - DNA, 22 bp, synthetic construct
  misc_feature 1..22: note = chemically synthesized
  source 1..22: mol_type = other DNA
tactcagggtcattccatttgt

SEQ ID NO: 62772 - DNA, 22 bp, synthetic construct
  misc_feature 1..22: note = chemically synthesized
  source 1..22: mol_type = other DNA
ctcagggtcattccatttgtcc

SEQ ID NO: 62773 - DNA, 22 bp, synthetic construct
  misc_feature 1..22: note = chemically synthesized
  source 1..22: mol_type = other DNA
agggtcattccatttgtccttt

SEQ ID NO: 62774 - DNA, 22 bp, synthetic construct
  misc_feature 1..22: note = chemically synthesized
  source 1..22: mol_type = other DNA
catttgtccttttagaactgac

SEQ ID NO: 62775 - DNA, 22 bp, synthetic construct
  misc_feature 1..22: note = chemically synthesized
  source 1..22: mol_type = other DNA
gtccttttagaactgacccagg

SEQ ID NO: 62776 - DNA, 22 bp, synthetic construct
  misc_feature 1..22: note = chemically synthesized
  source 1..22: mol_type = other DNA
tccttttagaactgacccaggt

SEQ ID NO: 62777 - DNA, 22 bp, synthetic construct
  misc_feature 1..22: note = chemically synthesized
  source 1..22: mol_type = other DNA
ttagaactgacccaggttcctg

SEQ ID NO: 62778 - DNA, 22 bp, synthetic construct
  misc_feature 1..22: note = chemically synthesized
  source 1..22: mol_type = other DNA
tagaactgacccaggttcctgc

SEQ ID NO: 62779 - DNA, 22 bp, synthetic construct
  misc_feature 1..22: note = chemically synthesized
  source 1..22: mol_type = other DNA
agaactgacccaggttcctgcg

SEQ ID NO: 62780 - DNA, 22 bp, synthetic construct
  misc_feature 1..22: note = chemically synthesized
  source 1..22: mol_type = other DNA
gaactgacccaggttcctgcgg

SEQ ID NO: 62781 - DNA, 22 bp, synthetic construct
  misc_feature 1..22: note = chemically synthesized
  source 1..22: mol_type = other DNA
acccaggttcctgcggaagctg

SEQ ID NO: 62782 - DNA, 22 bp, synthetic construct
  misc_feature 1..22: note = chemically synthesized
  source 1..22: mol_type = other DNA
ctgcggaagctgtccctggttc

SEQ ID NO: 62783 - DNA, 22 bp, synthetic construct
  misc_feature 1..22: note = chemically synthesized
  source 1..22: mol_type = other DNA
cggaagctgtccctggttctga

SEQ ID NO: 62784 - DNA, 22 bp, synthetic construct
  misc_feature 1..22: note = chemically synthesized
  source 1..22: mol_type = other DNA
tccctggttctgagtcctgtgg

SEQ ID NO: 62785 - DNA, 22 bp, synthetic construct
  misc_feature 1..22: note = chemically synthesized
  source 1..22: mol_type = other DNA
gttctgagtcctgtggtgtgcc

SEQ ID NO: 62786 - DNA, 22 bp, synthetic construct
  misc_feature 1..22: note = chemically synthesized
  source 1..22: mol_type = other DNA
tgagtcctgtggtgtgccttgt

SEQ ID NO: 62787 - DNA, 22 bp, synthetic construct
  misc_feature 1..22: note = chemically synthesized
  source 1..22: mol_type = other DNA
agtcctgtggtgtgccttgttt

SEQ ID NO: 62788 - DNA, 22 bp, synthetic construct
  misc_feature 1..22: note = chemically synthesized
  source 1..22: mol_type = other DNA
tggtgtgccttgtttacttcat

SEQ ID NO: 62789 - DNA, 22 bp, synthetic construct
  misc_feature 1..22: note = chemically synthesized
  source 1..22: mol_type = other DNA
gtttacttcattgcctgtgaat

SEQ ID NO: 62790 - DNA, 22 bp, synthetic construct
  misc_feature 1..22: note = chemically synthesized
  source 1..22: mol_type = other DNA
tttacttcattgcctgtgaata

SEQ ID NO: 62791 - DNA, 22 bp, synthetic construct
  misc_feature 1..22: note = chemically synthesized
  source 1..22: mol_type = other DNA
acttcattgcctgtgaataatc

SEQ ID NO: 62792 - DNA, 22 bp, synthetic construct
  misc_feature 1..22: note = chemically synthesized
  source 1..22: mol_type = other DNA
cttcattgcctgtgaataatcc

SEQ ID NO: 62793 - DNA, 22 bp, synthetic construct
  misc_feature 1..22: note = chemically synthesized
  source 1..22: mol_type = other DNA
cattgcctgtgaataatccaac

SEQ ID NO: 62794 - DNA, 22 bp, synthetic construct
  misc_feature 1..22: note = chemically synthesized
  source 1..22: mol_type = other DNA
attgcctgtgaataatccaacc

SEQ ID NO: 62795 - DNA, 22 bp, synthetic construct
  misc_feature 1..22: note = chemically synthesized
  source 1..22: mol_type = other DNA
cctgtgaataatccaaccaaga

SEQ ID NO: 62796 - DNA, 22 bp, synthetic construct
  misc_feature 1..22: note = chemically synthesized
  source 1..22: mol_type = other DNA
tgaataatccaaccaagagcaa

SEQ ID NO: 62797 - DNA, 22 bp, synthetic construct
  misc_feature 1..22: note = chemically synthesized
  source 1..22: mol_type = other DNA
agcctttcaaggagcacttggg

SEQ ID NO: 62798 - DNA, 22 bp, synthetic construct
  misc_feature 1..22: note = chemically synthesized
  source 1..22: mol_type = other DNA
tcaaggagcacttggggtgttt

SEQ ID NO: 62799 - DNA, 22 bp, synthetic construct
  misc_feature 1..22: note = chemically synthesized
  source 1..22: mol_type = other DNA
caaggagcacttggggtgtttg

SEQ ID NO: 62800 - DNA, 22 bp, synthetic construct
  misc_feature 1..22: note = chemically synthesized
  source 1..22: mol_type = other DNA
aaggagcacttggggtgtttga

SEQ ID NO: 62801 - DNA, 22 bp, synthetic construct
  misc_feature 1..22: note = chemically synthesized
  source 1..22: mol_type = other DNA
ggggtgtttgaggtcatctgtg

SEQ ID NO: 62802 - DNA, 22 bp, synthetic construct
  misc_feature 1..22: note = chemically synthesized
  source 1..22: mol_type = other DNA
gggtgtttgaggtcatctgtgg

SEQ ID NO: 62803 - DNA, 22 bp, synthetic construct
  misc_feature 1..22: note = chemically synthesized
  source 1..22: mol_type = other DNA
gaggtcatctgtgggtgtaggc

SEQ ID NO: 62804 - DNA, 22 bp, synthetic construct
  misc_feature 1..22: note = chemically synthesized
  source 1..22: mol_type = other DNA
aggtcatctgtgggtgtaggct

SEQ ID NO: 62805 - DNA, 22 bp, synthetic construct
  misc_feature 1..22: note = chemically synthesized
  source 1..22: mol_type = other DNA
tgggtgtaggctgactgtttct

SEQ ID NO: 62806 - DNA, 22 bp, synthetic construct
  misc_feature 1..22: note = chemically synthesized
  source 1..22: mol_type = other DNA
actgtttctcatgcctctggaa

SEQ ID NO: 62807 - DNA, 22 bp, synthetic construct
  misc_feature 1..22: note = chemically synthesized
  source 1..22: mol_type = other DNA
tttctcatgcctctggaaaggt

SEQ ID NO: 62808 - DNA, 22 bp, synthetic construct
  misc_feature 1..22: note = chemically synthesized
  source 1..22: mol_type = other DNA
ctcatgcctctggaaaggtcct

SEQ ID NO: 62809 - DNA, 22 bp, synthetic construct
  misc_feature 1..22: note = chemically synthesized
  source 1..22: mol_type = other DNA
tcatgcctctggaaaggtcctg

SEQ ID NO: 62810 - DNA, 22 bp, synthetic construct
  misc_feature 1..22: note = chemically synthesized
  source 1..22: mol_type = other DNA
atgcctctggaaaggtcctggg

SEQ ID NO: 62811 - DNA, 22 bp, synthetic construct
  misc_feature 1..22: note = chemically synthesized
  source 1..22: mol_type = other DNA
tggaaaggtcctgggttacacc

SEQ ID NO: 62812 - DNA, 22 bp, synthetic construct
  misc_feature 1..22: note = chemically synthesized
  source 1..22: mol_type = other DNA
gaaaggtcctgggttacaccct

SEQ ID NO: 62813 - DNA, 22 bp, synthetic construct
  misc_feature 1..22: note = chemically synthesized
  source 1..22: mol_type = other DNA
ggttacaccctgaccctctcca

SEQ ID NO: 62814 - DNA, 22 bp, synthetic construct
  misc_feature 1..22: note = chemically synthesized
  source 1..22: mol_type = other DNA
caccctgaccctctccacccag

SEQ ID NO: 62815 - DNA, 22 bp, synthetic construct
  misc_feature 1..22: note = chemically synthesized
  source 1..22: mol_type = other DNA
accctctccacccagatccatg

SEQ ID NO: 62816 - DNA, 22 bp, synthetic construct
  misc_feature 1..22: note = chemically synthesized
  source 1..22: mol_type = other DNA
tccacccagatccatggatgta

SEQ ID NO: 62817 - DNA, 22 bp, synthetic construct
  misc_feature 1..22: note = chemically synthesized
  source 1..22: mol_type = other DNA
cacccagatccatggatgtacg

SEQ ID NO: 62818 - DNA, 22 bp, synthetic construct
  misc_feature 1..22: note = chemically synthesized
  source 1..22: mol_type = other DNA
atttattcactgctccccactg

SEQ ID NO: 62819 - DNA, 22 bp, synthetic construct
  misc_feature 1..22: note = chemically synthesized
  source 1..22: mol_type = other DNA
attcactgctccccactgccat

SEQ ID NO: 62820 - DNA, 22 bp, synthetic construct
  misc_feature 1..22: note = chemically synthesized
  source 1..22: mol_type = other DNA
ttcactgctccccactgccata

SEQ ID NO: 62821 - DNA, 22 bp, synthetic construct
  misc_feature 1..22: note = chemically synthesized
  source 1..22: mol_type = other DNA
actgctccccactgccatagac

SEQ ID NO: 62822 - DNA, 22 bp, synthetic construct
  misc_feature 1..22: note = chemically synthesized
  source 1..22: mol_type = other DNA
ctccccactgccatagaccagc

SEQ ID NO: 62823 - DNA, 22 bp, synthetic construct
  misc_feature 1..22: note = chemically synthesized
  source 1..22: mol_type = other DNA
cccactgccatagaccagcatt

SEQ ID NO: 62824 - DNA, 22 bp, synthetic construct
  misc_feature 1..22: note = chemically synthesized
  source 1..22: mol_type = other DNA
ccatagaccagcattctccccg

SEQ ID NO: 62825 - DNA, 22 bp, synthetic construct
  misc_feature 1..22: note = chemically synthesized
  source 1..22: mol_type = other DNA
tccccgggatggacctgggttt

SEQ ID NO: 62826 - DNA, 22 bp, synthetic construct
  misc_feature 1..22: note = chemically synthesized
  source 1..22: mol_type = other DNA
cccgggatggacctgggtttca

SEQ ID NO: 62827 - DNA, 22 bp, synthetic construct
  misc_feature 1..22: note = chemically synthesized
  source 1..22: mol_type = other DNA
ggtttcattctctctatccccc

SEQ ID NO: 62828 - DNA, 22 bp, synthetic construct
  misc_feature 1..22: note = chemically synthesized
  source 1..22: mol_type = other DNA
cattctctctatcccccataca

SEQ ID NO: 62829 - DNA, 22 bp, synthetic construct
  misc_feature 1..22: note = chemically synthesized
  source 1..22: mol_type = other DNA
attctctctatcccccatacac

SEQ ID NO: 62830 - DNA, 22 bp, synthetic construct
  misc_feature 1..22: note = chemically synthesized
  source 1..22: mol_type = other DNA
tctctatcccccatacacagct

SEQ ID NO: 62831 - DNA, 22 bp, synthetic construct
  misc_feature 1..22: note = chemically synthesized
  source 1..22: mol_type = other DNA
tctatcccccatacacagctca

SEQ ID NO: 62832 - DNA, 22 bp, synthetic construct
  misc_feature 1..22: note = chemically synthesized
  source 1..22: mol_type = other DNA
tatcccccatacacagctcatg

SEQ ID NO: 62833 - DNA, 22 bp, synthetic construct
  misc_feature 1..22: note = chemically synthesized
  source 1..22: mol_type = other DNA
tcccccatacacagctcatgtt

SEQ ID NO: 62834 - DNA, 22 bp, synthetic construct
  misc_feature 1..22: note = chemically synthesized
  source 1..22: mol_type = other DNA
atgtttgcttgtttgttgtttg

SEQ ID NO: 62835 - DNA, 22 bp, synthetic construct
  misc_feature 1..22: note = chemically synthesized
  source 1..22: mol_type = other DNA
gcttgtttgttgtttggataaa

SEQ ID NO: 62836 - DNA, 22 bp, synthetic construct
  misc_feature 1..22: note = chemically synthesized
  source 1..22: mol_type = other DNA
cttgtttgttgtttggataaat

SEQ ID NO: 62837 - DNA, 22 bp, synthetic construct
  misc_feature 1..22: note = chemically synthesized
  source 1..22: mol_type = other DNA
gtttgttgtttggataaatgct

SEQ ID NO: 62838 - DNA, 22 bp, synthetic construct
  misc_feature 1..22: note = chemically synthesized
  source 1..22: mol_type = other DNA
tttgttgtttggataaatgctt

SEQ ID NO: 62839 - DNA, 22 bp, synthetic construct
  misc_feature 1..22: note = chemically synthesized
  source 1..22: mol_type = other DNA
gttgtttggataaatgcttccc

SEQ ID NO: 62840 - DNA, 22 bp, synthetic construct
  misc_feature 1..22: note = chemically synthesized
  source 1..22: mol_type = other DNA
ttgtttggataaatgcttcccg

SEQ ID NO: 62841 - DNA, 22 bp, synthetic construct
  misc_feature 1..22: note = chemically synthesized
  source 1..22: mol_type = other DNA
tttggataaatgcttcccgctc

SEQ ID NO: 62842 - DNA, 22 bp, synthetic construct
  misc_feature 1..22: note = chemically synthesized
  source 1..22: mol_type = other DNA
ggataaatgcttcccgctcgga

SEQ ID NO: 62843 - DNA, 22 bp, synthetic construct
  misc_feature 1..22: note = chemically synthesized
  source 1..22: mol_type = other DNA
gataaatgcttcccgctcggat

SEQ ID NO: 62844 - DNA, 22 bp, synthetic construct
  misc_feature 1..22: note = chemically synthesized
  source 1..22: mol_type = other DNA
cccgctcggatttatggagagg

SEQ ID NO: 62845 - DNA, 22 bp, synthetic construct
  misc_feature 1..22: note = chemically synthesized
  source 1..22: mol_type = other DNA
ccgctcggatttatggagagga

SEQ ID NO: 62846 - DNA, 22 bp, synthetic construct
  misc_feature 1..22: note = chemically synthesized
  source 1..22: mol_type = other DNA
ggatttatggagaggatcaagt

SEQ ID NO: 62847 - DNA, 22 bp, synthetic construct
  misc_feature 1..22: note = chemically synthesized
  source 1..22: mol_type = other DNA
atggagaggatcaagttgctcc

SEQ ID NO: 62848 - DNA, 22 bp, synthetic construct
  misc_feature 1..22: note = chemically synthesized
  source 1..22: mol_type = other DNA
tggagaggatcaagttgctcct

SEQ ID NO: 62849 - DNA, 22 bp, synthetic construct
  misc_feature 1..22: note = chemically synthesized
  source 1..22: mol_type = other DNA
ctcctgggaaggagatcagtgt

SEQ ID NO: 62850 - DNA, 22 bp, synthetic construct
  misc_feature 1..22: note = chemically synthesized
  source 1..22: mol_type = other DNA
ctgggaaggagatcagtgtgaa

SEQ ID NO: 62851 - DNA, 22 bp, synthetic construct
  misc_feature 1..22: note = chemically synthesized
  source 1..22: mol_type = other DNA
ggaaggagatcagtgtgaaatc

SEQ ID NO: 62852 - DNA, 22 bp, synthetic construct
  misc_feature 1..22: note = chemically synthesized
  source 1..22: mol_type = other DNA
tatttcctgtttctggtgtgag

SEQ ID NO: 62853 - DNA, 22 bp, synthetic construct
  misc_feature 1..22: note = chemically synthesized
  source 1..22: mol_type = other DNA
cctgtttctggtgtgagagcct

SEQ ID NO: 62854 - DNA, 22 bp, synthetic construct
  misc_feature 1..22: note = chemically synthesized
  source 1..22: mol_type = other DNA
ctgtttctggtgtgagagcctg

SEQ ID NO: 62855 - DNA, 22 bp, synthetic construct
  misc_feature 1..22: note = chemically synthesized
  source 1..22: mol_type = other DNA
tttctggtgtgagagcctggaa

SEQ ID NO: 62856 - DNA, 22 bp, synthetic construct
  misc_feature 1..22: note = chemically synthesized
  source 1..22: mol_type = other DNA
ctggtgtgagagcctggaagct

SEQ ID NO: 62857 - DNA, 22 bp, synthetic construct
  misc_feature 1..22: note = chemically synthesized
  source 1..22: mol_type = other DNA
tggtgtgagagcctggaagctc

SEQ ID NO: 62858 - DNA, 22 bp, synthetic construct
  misc_feature 1..22: note = chemically synthesized
  source 1..22: mol_type = other DNA
gtgtgagagcctggaagctctc

SEQ ID NO: 62859 - DNA, 22 bp, synthetic construct
  misc_feature 1..22: note = chemically synthesized
  source 1..22: mol_type = other DNA
gaagctctctgactattgtcct

SEQ ID NO: 62860 - DNA, 22 bp, synthetic construct
  misc_feature 1..22: note = chemically synthesized
  source 1..22: mol_type = other DNA
tctgactattgtcctcttaaca

SEQ ID NO: 62861 - DNA, 22 bp, synthetic construct
  misc_feature 1..22: note = chemically synthesized
  source 1..22: mol_type = other DNA
tgactattgtcctcttaacaaa

SEQ ID NO: 62862 - DNA, 22 bp, synthetic construct
  misc_feature 1..22: note = chemically synthesized
  source 1..22: mol_type = other DNA
actattgtcctcttaacaaatg

SEQ ID NO: 62863 - DNA, 22 bp, synthetic construct
  misc_feature 1..22: note = chemically synthesized
  source 1..22: mol_type = other DNA
ttgtcctcttaacaaatggggc

SEQ ID NO: 62864 - DNA, 22 bp, synthetic construct
  misc_feature 1..22: note = chemically synthesized
  source 1..22: mol_type = other DNA
tcctcttaacaaatggggctca

SEQ ID NO: 62865 - DNA, 22 bp, synthetic construct
  misc_feature 1..22: note = chemically synthesized
  source 1..22: mol_type = other DNA
ttaacaaatggggctcacaggg

SEQ ID NO: 62866 - DNA, 22 bp, synthetic construct
  misc_feature 1..22: note = chemically synthesized
  source 1..22: mol_type = other DNA
aacaaatggggctcacagggtg

SEQ ID NO: 62867 - DNA, 22 bp, synthetic construct
  misc_feature 1..22: note = chemically synthesized
  source 1..22: mol_type = other DNA
acaaatggggctcacagggtgc

SEQ ID NO: 62868 - DNA, 22 bp, synthetic construct
  misc_feature 1..22: note = chemically synthesized
  source 1..22: mol_type = other DNA
acagggtgccccctgtccggca

SEQ ID NO: 62869 - DNA, 22 bp, synthetic construct
  misc_feature 1..22: note = chemically synthesized
  source 1..22: mol_type = other DNA
tccggcagagcttgcacttcaa

SEQ ID NO: 62870 - DNA, 22 bp, synthetic construct
  misc_feature 1..22: note = chemically synthesized
  source 1..22: mol_type = other DNA
gcacttcaaactaaggcttcct

SEQ ID NO: 62871 - DNA, 22 bp, synthetic construct
  misc_feature 1..22: note = chemically synthesized
  source 1..22: mol_type = other DNA
cacttcaaactaaggcttcctt

SEQ ID NO: 62872 - DNA, 22 bp, synthetic construct
  misc_feature 1..22: note = chemically synthesized
  source 1..22: mol_type = other DNA
caaactaaggcttcctttattt

SEQ ID NO: 62873 - DNA, 22 bp, synthetic construct
  misc_feature 1..22: note = chemically synthesized
  source 1..22: mol_type = other DNA
aaactaaggcttcctttattta

SEQ ID NO: 62874 - DNA, 22 bp, synthetic construct
  misc_feature 1..22: note = chemically synthesized
  source 1..22: mol_type = other DNA
aggcttcctttatttaggctta

SEQ ID NO: 62875 - DNA, 22 bp, synthetic construct
  misc_feature 1..22: note = chemically synthesized
  source 1..22: mol_type = other DNA
cctttatttaggcttaaaatcc

SEQ ID NO: 62876 - DNA, 22 bp, synthetic construct
  misc_feature 1..22: note = chemically synthesized
  source 1..22: mol_type = other DNA
ctttatttaggcttaaaatccg

SEQ ID NO: 62877 - DNA, 22 bp, synthetic construct
  misc_feature 1..22: note = chemically synthesized
  source 1..22: mol_type = other DNA
tatttaggcttaaaatccgaaa

SEQ ID NO: 62878 - DNA, 22 bp, synthetic construct
  misc_feature 1..22: note = chemically synthesized
  source 1..22: mol_type = other DNA
atttaggcttaaaatccgaaat

SEQ ID NO: 62879 - DNA, 22 bp, synthetic construct
  misc_feature 1..22: note = chemically synthesized
  source 1..22: mol_type = other DNA
tttaggcttaaaatccgaaatt

SEQ ID NO: 62880 - DNA, 22 bp, synthetic construct
  misc_feature 1..22: note = chemically synthesized
  source 1..22: mol_type = other DNA
aggcttaaaatccgaaattcgt

SEQ ID NO: 62881 - DNA, 22 bp, synthetic construct
  misc_feature 1..22: note = chemically synthesized
  source 1..22: mol_type = other DNA
ggcttaaaatccgaaattcgtg

SEQ ID NO: 62882 - DNA, 22 bp, synthetic construct
  misc_feature 1..22: note = chemically synthesized
  source 1..22: mol_type = other DNA
aaaatccgaaattcgtgtgttc

SEQ ID NO: 62883 - DNA, 22 bp, synthetic construct
  misc_feature 1..22: note = chemically synthesized
  source 1..22: mol_type = other DNA
aaatccgaaattcgtgtgttct

SEQ ID NO: 62884 - DNA, 22 bp, synthetic construct
  misc_feature 1..22: note = chemically synthesized
  source 1..22: mol_type = other DNA
gtgtgttctctcccctgcaaac

SEQ ID NO: 62885 - DNA, 22 bp, synthetic construct
  misc_feature 1..22: note = chemically synthesized
  source 1..22: mol_type = other DNA
tctcccctgcaaactcctaggc

SEQ ID NO: 62886 - DNA, 22 bp, synthetic construct
  misc_feature 1..22: note = chemically synthesized
  source 1..22: mol_type = other DNA
tcccctgcaaactcctaggcga

SEQ ID NO: 62887 - DNA, 22 bp, synthetic construct
  misc_feature 1..22: note = chemically synthesized
  source 1..22: mol_type = other DNA
ccctgcaaactcctaggcgagg

SEQ ID NO: 62888 - DNA, 22 bp, synthetic construct
  misc_feature 1..22: note = chemically synthesized
  source 1..22: mol_type = other DNA
caaactcctaggcgaggtaaaa

SEQ ID NO: 62889 - DNA, 22 bp, synthetic construct
  misc_feature 1..22: note = chemically synthesized
  source 1..22: mol_type = other DNA
ctaggcgaggtaaaaggtcagg

SEQ ID NO: 62890 - DNA, 22 bp, synthetic construct
  misc_feature 1..22: note = chemically synthesized
  source 1..22: mol_type = other DNA
ggcgaggtaaaaggtcaggact

SEQ ID NO: 62891 - DNA, 22 bp, synthetic construct
  misc_feature 1..22: note = chemically synthesized
  source 1..22: mol_type = other DNA
taaggttcctggctgagctgga

SEQ ID NO: 62892 - DNA, 22 bp, synthetic construct
  misc_feature 1..22: note = chemically synthesized
  source 1..22: mol_type = other DNA
aggttcctggctgagctggaag

SEQ ID NO: 62893 - DNA, 22 bp, synthetic construct
  misc_feature 1..22: note = chemically synthesized
  source 1..22: mol_type = other DNA
ctggctgagctggaagctgttt

SEQ ID NO: 62894 - DNA, 22 bp, synthetic construct
  misc_feature 1..22: note = chemically synthesized
  source 1..22: mol_type = other DNA
gctgagctggaagctgttttct

SEQ ID NO: 62895 - DNA, 22 bp, synthetic construct
  misc_feature 1..22: note = chemically synthesized
  source 1..22: mol_type = other DNA
agctggaagctgttttctgcgt

SEQ ID NO: 62896 - DNA, 22 bp, synthetic construct
  misc_feature 1..22: note = chemically synthesized
  source 1..22: mol_type = other DNA
gaagctgttttctgcgtttccc

SEQ ID NO: 62897 - DNA, 22 bp, synthetic construct
  misc_feature 1..22: note = chemically synthesized
  source 1..22: mol_type = other DNA
ttttctgcgtttccctctcatc

SEQ ID NO: 62898 - DNA, 22 bp, synthetic construct
  misc_feature 1..22: note = chemically synthesized
  source 1..22: mol_type = other DNA
tctgcgtttccctctcatctgt

SEQ ID NO: 62899 - DNA, 22 bp, synthetic construct
  misc_feature 1..22: note = chemically synthesized
  source 1..22: mol_type = other DNA
ctgcgtttccctctcatctgtt

SEQ ID NO: 62900 - DNA, 22 bp, synthetic construct
  misc_feature 1..22: note = chemically synthesized
  source 1..22: mol_type = other DNA
tgcgtttccctctcatctgttt

SEQ ID NO: 62901 - DNA, 22 bp, synthetic construct
  misc_feature 1..22: note = chemically synthesized
  source 1..22: mol_type = other DNA
cgtttccctctcatctgtttca

SEQ ID NO: 62902 - DNA, 22 bp, synthetic construct
  misc_feature 1..22: note = chemically synthesized
  source 1..22: mol_type = other DNA
ccctctcatctgtttcagagca

SEQ ID NO: 62903 - DNA, 22 bp, synthetic construct
  misc_feature 1..22: note = chemically synthesized
  source 1..22: mol_type = other DNA
cctctcatctgtttcagagcag

SEQ ID NO: 62904 - DNA, 22 bp, synthetic construct
  misc_feature 1..22: note = chemically synthesized
  source 1..22: mol_type = other DNA
tcatctgtttcagagcaggatg

SEQ ID NO: 62905 - DNA, 22 bp, synthetic construct
  misc_feature 1..22: note = chemically synthesized
  source 1..22: mol_type = other DNA
atctgtttcagagcaggatgag

SEQ ID NO: 62906 - DNA, 22 bp, synthetic construct
  misc_feature 1..22: note = chemically synthesized
  source 1..22: mol_type = other DNA
tttcagagcaggatgaggttcc

SEQ ID NO: 62907 - DNA, 22 bp, synthetic construct
  misc_feature 1..22: note = chemically synthesized
  source 1..22: mol_type = other DNA
cagagcaggatgaggttcctgc

SEQ ID NO: 62908 - DNA, 22 bp, synthetic construct
  misc_feature 1..22: note = chemically synthesized
  source 1..22: mol_type = other DNA
agagcaggatgaggttcctgcc

SEQ ID NO: 62909 - DNA, 22 bp, synthetic construct
  misc_feature 1..22: note = chemically synthesized
  source 1..22: mol_type = other DNA
ctgcctgcagagggaaagtgac

SEQ ID NO: 62910 - DNA, 22 bp, synthetic construct
  misc_feature 1..22: note = chemically synthesized
  source 1..22: mol_type = other DNA
cctgcagagggaaagtgacttg

SEQ ID NO: 62911 - DNA, 22 bp, synthetic construct
  misc_feature 1..22: note = chemically synthesized
  source 1..22: mol_type = other DNA
cagagggaaagtgacttggaac

SEQ ID NO: 62912 - DNA, 22 bp, synthetic construct
  misc_feature 1..22: note = chemically synthesized
  source 1..22: mol_type = other DNA
ggaacacccagggtgccccgca

SEQ ID NO: 62913 - DNA, 22 bp, synthetic construct
  misc_feature 1..22: note = chemically synthesized
  source 1..22: mol_type = other DNA
gaacacccagggtgccccgcag

SEQ ID NO: 62914 - DNA, 22 bp, synthetic construct
  misc_feature 1..22: note = chemically synthesized
  source 1..22: mol_type = other DNA
ggccttcagctgatgttagggc

SEQ ID NO: 62915 - DNA, 22 bp, synthetic construct
  misc_feature 1..22: note = chemically synthesized
  source 1..22: mol_type = other DNA
gccttcagctgatgttagggca

SEQ ID NO: 62916 - DNA, 22 bp, synthetic construct
  misc_feature 1..22: note = chemically synthesized
  source 1..22: mol_type = other DNA
cagctgatgttagggcacagca

SEQ ID NO: 62917 - DNA, 22 bp, synthetic construct
  misc_feature 1..22: note = chemically synthesized
  source 1..22: mol_type = other DNA
agctgatgttagggcacagcag

SEQ ID NO: 62918 - DNA, 22 bp, synthetic construct
  misc_feature 1..22: note = chemically synthesized
  source 1..22: mol_type = other DNA
atgttagggcacagcaggttga

SEQ ID NO: 62919 - DNA, 22 bp, synthetic construct
  misc_feature 1..22: note = chemically synthesized
  source 1..22: mol_type = other DNA
gggcacagcaggttgatgcagt

SEQ ID NO: 62920 - DNA, 22 bp, synthetic construct
  misc_feature 1..22: note = chemically synthesized
  source 1..22: mol_type = other DNA
atgcagtgtggtcctggaggat

SEQ ID NO: 62921 - DNA, 22 bp, synthetic construct
  misc_feature 1..22: note = chemically synthesized
  source 1..22: mol_type = other DNA
gaggatggagttgtttatcgtg

SEQ ID NO: 62922 - DNA, 22 bp, synthetic construct
  misc_feature 1..22: note = chemically synthesized
  source 1..22: mol_type = other DNA
tttatcgtgatcccatatggac

SEQ ID NO: 62923 - DNA, 22 bp, synthetic construct
  misc_feature 1..22: note = chemically synthesized
  source 1..22: mol_type = other DNA
atcgtgatcccatatggactga

SEQ ID NO: 62924 - DNA, 22 bp, synthetic construct
  misc_feature 1..22: note = chemically synthesized
  source 1..22: mol_type = other DNA
tcgtgatcccatatggactgag

SEQ ID NO: 62925 - DNA, 22 bp, synthetic construct
  misc_feature 1..22: note = chemically synthesized
  source 1..22: mol_type = other DNA
aggaagtatgtgctgttgggga

SEQ ID NO: 62926 - DNA, 22 bp, synthetic construct
  misc_feature 1..22: note = chemically synthesized
  source 1..22: mol_type = other DNA
ttggggacagccaggcctaaca

SEQ ID NO: 62927 - DNA, 22 bp, synthetic construct
  misc_feature 1..22: note = chemically synthesized
  source 1..22: mol_type = other DNA
gggacagccaggcctaacagtg

SEQ ID NO: 62928 - DNA, 22 bp, synthetic construct
  misc_feature 1..22: note = chemically synthesized
  source 1..22: mol_type = other DNA
acagtggagaagacctgccttc

SEQ ID NO: 62929 - DNA, 22 bp, synthetic construct
  misc_feature 1..22: note = chemically synthesized
  source 1..22: mol_type = other DNA
ccttccaggcccacactggaca

SEQ ID NO: 62930 - DNA, 22 bp, synthetic construct
  misc_feature 1..22: note = chemically synthesized
  source 1..22: mol_type = other DNA
ccaggcccacactggacagagc

SEQ ID NO: 62931 - DNA, 22 bp, synthetic construct
  misc_feature 1..22: note = chemically synthesized
  source 1..22: mol_type = other DNA
caggcccacactggacagagca

SEQ ID NO: 62932 - DNA, 22 bp, synthetic construct
  misc_feature 1..22: note = chemically synthesized
  source 1..22: mol_type = other DNA
gacagagcatttgacctgctgg

SEQ ID NO: 62933 - DNA, 22 bp, synthetic construct
  misc_feature 1..22: note = chemically synthesized
  source 1..22: mol_type = other DNA
gacctgctgggcctgagtttcc

SEQ ID NO: 62934 - DNA, 22 bp, synthetic construct
  misc_feature 1..22: note = chemically synthesized
  source 1..22: mol_type = other DNA
acctgctgggcctgagtttccc

SEQ ID NO: 62935 - DNA, 22 bp, synthetic construct
  misc_feature 1..22: note = chemically synthesized
  source 1..22: mol_type = other DNA
ctgggcctgagtttccccatgt

SEQ ID NO: 62936 - DNA, 22 bp, synthetic construct
  misc_feature 1..22: note = chemically synthesized
  source 1..22: mol_type = other DNA
ggcctgagtttccccatgtgta

SEQ ID NO: 62937 - DNA, 22 bp, synthetic construct
  misc_feature 1..22: note = chemically synthesized
  source 1..22: mol_type = other DNA
agtttccccatgtgtactttgg

SEQ ID NO: 62938 - DNA, 22 bp, synthetic construct
  misc_feature 1..22: note = chemically synthesized
  source 1..22: mol_type = other DNA
ccccatgtgtactttggggata

SEQ ID NO: 62939 - DNA, 22 bp, synthetic construct
  misc_feature 1..22: note = chemically synthesized
  source 1..22: mol_type = other DNA
cccatgtgtactttggggataa

SEQ ID NO: 62940 - DNA, 22 bp, synthetic construct
  misc_feature 1..22: note = chemically synthesized
  source 1..22: mol_type = other DNA
tggggataatgagtcctaggct

SEQ ID NO: 62941 - DNA, 22 bp, synthetic construct
  misc_feature 1..22: note = chemically synthesized
  source 1..22: mol_type = other DNA
ggggataatgagtcctaggctg

SEQ ID NO: 62942 - DNA, 22 bp, synthetic construct
  misc_feature 1..22: note = chemically synthesized
  source 1..22: mol_type = other DNA
gggataatgagtcctaggctgc

SEQ ID NO: 62943 - DNA, 22 bp, synthetic construct
  misc_feature 1..22: note = chemically synthesized
  source 1..22: mol_type = other DNA
ggctgcgtcctgcagaacctgt

SEQ ID NO: 62944 - DNA, 22 bp, synthetic construct
  misc_feature 1..22: note = chemically synthesized
  source 1..22: mol_type = other DNA
cgtcctgcagaacctgtctgga

SEQ ID NO: 62945 - DNA, 22 bp, synthetic construct
  misc_feature 1..22: note = chemically synthesized
  source 1..22: mol_type = other DNA
cagaacctgtctggaggatcac

SEQ ID NO: 62946 - DNA, 22 bp, synthetic construct
  misc_feature 1..22: note = chemically synthesized
  source 1..22: mol_type = other DNA
tctggaggatcacgttggacag

SEQ ID NO: 62947 - DNA, 22 bp, synthetic construct
  misc_feature 1..22: note = chemically synthesized
  source 1..22: mol_type = other DNA
gaggatcacgttggacagtgaa

SEQ ID NO: 62948 - DNA, 22 bp, synthetic construct
  misc_feature 1..22: note = chemically synthesized
  source 1..22: mol_type = other DNA
gacagtgaatacatttttttaa

SEQ ID NO: 62949 - DNA, 22 bp, synthetic construct
  misc_feature 1..22: note = chemically synthesized
  source 1..22: mol_type = other DNA
ttttaaaactctggaagataca

SEQ ID NO: 62950 - DNA, 22 bp, synthetic construct
  misc_feature 1..22: note = chemically synthesized
  source 1..22: mol_type = other DNA
tttaaaactctggaagatacag

SEQ ID NO: 62951 - DNA, 22 bp, synthetic construct
  misc_feature 1..22: note = chemically synthesized
  source 1..22: mol_type = other DNA
ttaaaactctggaagatacagt

SEQ ID NO: 62952 - DNA, 22 bp, synthetic construct
  misc_feature 1..22: note = chemically synthesized
  source 1..22: mol_type = other DNA
taaaactctggaagatacagtg

SEQ ID NO: 62953 - DNA, 22 bp, synthetic construct
  misc_feature 1..22: note = chemically synthesized
  source 1..22: mol_type = other DNA
aaaactctggaagatacagtga

SEQ ID NO: 62954 - DNA, 22 bp, synthetic construct
  misc_feature 1..22: note = chemically synthesized
  source 1..22: mol_type = other DNA
aaactctggaagatacagtgaa

SEQ ID NO: 62955 - DNA, 22 bp, synthetic construct
  misc_feature 1..22: note = chemically synthesized
  source 1..22: mol_type = other DNA
tggaagatacagtgaagctgag

SEQ ID NO: 62956 - DNA, 22 bp, synthetic construct
  misc_feature 1..22: note = chemically synthesized
  source 1..22: mol_type = other DNA
gaagatacagtgaagctgaggt

SEQ ID NO: 62957 - DNA, 22 bp, synthetic construct
  misc_feature 1..22: note = chemically synthesized
  source 1..22: mol_type = other DNA
aggtcttatggttgtcccatca

SEQ ID NO: 62958 - DNA, 22 bp, synthetic construct
  misc_feature 1..22: note = chemically synthesized
  source 1..22: mol_type = other DNA
atggttgtcccatcacggactt

SEQ ID NO: 62959 - DNA, 22 bp, synthetic construct
  misc_feature 1..22: note = chemically synthesized
  source 1..22: mol_type = other DNA
tggttgtcccatcacggacttg

SEQ ID NO: 62960 - DNA, 22 bp, synthetic construct
  misc_feature 1..22: note = chemically synthesized
  source 1..22: mol_type = other DNA
tcccatcacggacttgtgacat

SEQ ID NO: 62961 - DNA, 22 bp, synthetic construct
  misc_feature 1..22: note = chemically synthesized
  source 1..22: mol_type = other DNA
gtgacatatatttgtcttcctc

SEQ ID NO: 62962 - DNA, 22 bp, synthetic construct
  misc_feature 1..22: note = chemically synthesized
  source 1..22: mol_type = other DNA
tgacatatatttgtcttcctca

SEQ ID NO: 62963 - DNA, 22 bp, synthetic construct
  misc_feature 1..22: note = chemically synthesized
  source 1..22: mol_type = other DNA
gtcttcctcataatgaggttgt

SEQ ID NO: 62964 - DNA, 22 bp, synthetic construct
  misc_feature 1..22: note = chemically synthesized
  source 1..22: mol_type = other DNA
tcttcctcataatgaggttgtc

SEQ ID NO: 62965 - DNA, 22 bp, synthetic construct
  misc_feature 1..22: note = chemically synthesized
  source 1..22: mol_type = other DNA
cctcataatgaggttgtcatga

SEQ ID NO: 62966 - DNA, 22 bp, synthetic construct
  misc_feature 1..22: note = chemically synthesized
  source 1..22: mol_type = other DNA
ctcataatgaggttgtcatgac

SEQ ID NO: 62967 - DNA, 22 bp, synthetic construct
  misc_feature 1..22: note = chemically synthesized
  source 1..22: mol_type = other DNA
ataatgaggttgtcatgacact

SEQ ID NO: 62968 - DNA, 22 bp, synthetic construct
  misc_feature 1..22: note = chemically synthesized
  source 1..22: mol_type = other DNA
tcatgacactctgcccatcctt

SEQ ID NO: 62969 - DNA, 22 bp, synthetic construct
  misc_feature 1..22: note = chemically synthesized
  source 1..22: mol_type = other DNA
tgcccatccttgactgatccct

SEQ ID NO: 62970 - DNA, 22 bp, synthetic construct
  misc_feature 1..22: note = chemically synthesized
  source 1..22: mol_type = other DNA
cccatccttgactgatccctgt

SEQ ID NO: 62971 - DNA, 22 bp, synthetic construct
  misc_feature 1..22: note = chemically synthesized
  source 1..22: mol_type = other DNA
gactgatccctgttgattccca

SEQ ID NO: 62972 - DNA, 22 bp, synthetic construct
  misc_feature 1..22: note = chemically synthesized
  source 1..22: mol_type = other DNA
actgatccctgttgattcccag

SEQ ID NO: 62973 - DNA, 22 bp, synthetic construct
  misc_feature 1..22: note = chemically synthesized
  source 1..22: mol_type = other DNA
atccctgttgattcccagggga

SEQ ID NO: 62974 - DNA, 22 bp, synthetic construct
  misc_feature 1..22: note = chemically synthesized
  source 1..22: mol_type = other DNA
ttgattcccaggggagcccagg

SEQ ID NO: 62975 - DNA, 22 bp, synthetic construct
  misc_feature 1..22: note = chemically synthesized
  source 1..22: mol_type = other DNA
attcccaggggagcccaggaat

SEQ ID NO: 62976 - DNA, 22 bp, synthetic construct
  misc_feature 1..22: note = chemically synthesized
  source 1..22: mol_type = other DNA
ccaggggagcccaggaattccc

SEQ ID NO: 62977 - DNA, 22 bp, synthetic construct
  misc_feature 1..22: note = chemically synthesized
  source 1..22: mol_type = other DNA
cctctgggaggttatgctagtt

SEQ ID NO: 62978 - DNA, 22 bp, synthetic construct
  misc_feature 1..22: note = chemically synthesized
  source 1..22: mol_type = other DNA
tgggaggttatgctagtttgaa

SEQ ID NO: 62979 - DNA, 22 bp, synthetic construct
  misc_feature 1..22: note = chemically synthesized
  source 1..22: mol_type = other DNA
ggaggttatgctagtttgaatg

SEQ ID NO: 62980 - DNA, 22 bp, synthetic construct
  misc_feature 1..22: note = chemically synthesized
  source 1..22: mol_type = other DNA
tgctagtttgaatggggtctct

SEQ ID NO: 62981 - DNA, 22 bp, synthetic construct
  misc_feature 1..22: note = chemically synthesized
  source 1..22: mol_type = other DNA
gtttgaatggggtctctcccat

SEQ ID NO: 62982 - DNA, 22 bp, synthetic construct
  misc_feature 1..22: note = chemically synthesized
  source 1..22: mol_type = other DNA
gaatggggtctctcccatcctg

SEQ ID NO: 62983 - DNA, 22 bp, synthetic construct
  misc_feature 1..22: note = chemically synthesized
  source 1..22: mol_type = other DNA
aatggggtctctcccatcctga

SEQ ID NO: 62984 - DNA, 22 bp, synthetic construct
  misc_feature 1..22: note = chemically synthesized
  source 1..22: mol_type = other DNA
tcccatcctgactgtcaactcg

SEQ ID NO: 62985 - DNA, 22 bp, synthetic construct
  misc_feature 1..22: note = chemically synthesized
  source 1..22: mol_type = other DNA
ccatcctgactgtcaactcgtg

SEQ ID NO: 62986 - DNA, 22 bp, synthetic construct
  misc_feature 1..22: note = chemically synthesized
  source 1..22: mol_type = other DNA
actgtcaactcgtgtgtgacag

SEQ ID NO: 62987 - DNA, 22 bp, synthetic construct
  misc_feature 1..22: note = chemically synthesized
  source 1..22: mol_type = other DNA
tcaactcgtgtgtgacagacaa

SEQ ID NO: 62988 - DNA, 22 bp, synthetic construct
  misc_feature 1..22: note = chemically synthesized
  source 1..22: mol_type = other DNA
gtgtgtgacagacaattcttca

SEQ ID NO: 62989 - DNA, 22 bp, synthetic construct
  misc_feature 1..22: note = chemically synthesized
  source 1..22: mol_type = other DNA
ttcaaagtaaaacgatggtgtc

SEQ ID NO: 62990 - DNA, 22 bp, synthetic construct
  misc_feature 1..22: note = chemically synthesized
  source 1..22: mol_type = other DNA
caaagtaaaacgatggtgtcta

SEQ ID NO: 62991 - DNA, 22 bp, synthetic construct
  misc_feature 1..22: note = chemically synthesized
  source 1..22: mol_type = other DNA
aaagtaaaacgatggtgtctaa

SEQ ID NO: 62992 - DNA, 22 bp, synthetic construct
  misc_feature 1..22: note = chemically synthesized
  source 1..22: mol_type = other DNA
aggtgaccgccctcagcgctgc

SEQ ID NO: 62993 - DNA, 22 bp, synthetic construct
  misc_feature 1..22: note = chemically synthesized
  source 1..22: mol_type = other DNA
agcgctgccacctccttccctg

SEQ ID NO: 62994 - DNA, 22 bp, synthetic construct
  misc_feature 1..22: note = chemically synthesized
  source 1..22: mol_type = other DNA
ccacctccttccctgccctggg

SEQ ID NO: 62995 - DNA, 22 bp, synthetic construct
  misc_feature 1..22: note = chemically synthesized
  source 1..22: mol_type = other DNA
cttccctgccctgggctctcca

SEQ ID NO: 62996 - DNA, 22 bp, synthetic construct
  misc_feature 1..22: note = chemically synthesized
  source 1..22: mol_type = other DNA
ccctgccctgggctctccagaa

SEQ ID NO: 62997 - DNA, 22 bp, synthetic construct
  misc_feature 1..22: note = chemically synthesized
  source 1..22: mol_type = other DNA
cctgccctgggctctccagaaa

SEQ ID NO: 62998 - DNA, 22 bp, synthetic construct
  misc_feature 1..22: note = chemically synthesized
  source 1..22: mol_type = other DNA
ccctgggctctccagaaagcca

SEQ ID NO: 62999 - DNA, 22 bp, synthetic construct
  misc_feature 1..22: note = chemically synthesized
  source 1..22: mol_type = other DNA
ggctctccagaaagccaacttg

SEQ ID NO: 63000 - DNA, 22 bp, synthetic construct
  misc_feature 1..22: note = chemically synthesized
  source 1..22: mol_type = other DNA
tccagaaagccaacttgtcttt

SEQ ID NO: 63001 - DNA, 22 bp, synthetic construct
  misc_feature 1..22: note = chemically synthesized
  source 1..22: mol_type = other DNA
cagaaagccaacttgtctttga

SEQ ID NO: 63002 - DNA, 22 bp, synthetic construct
  misc_feature 1..22: note = chemically synthesized
  source 1..22: mol_type = other DNA
gtctttgactctgcccctgttc

SEQ ID NO: 63003 - DNA, 22 bp, synthetic construct
  misc_feature 1..22: note = chemically synthesized
  source 1..22: mol_type = other DNA
tctttgactctgcccctgttct

SEQ ID NO: 63004 - DNA, 22 bp, synthetic construct
  misc_feature 1..22: note = chemically synthesized
  source 1..22: mol_type = other DNA
tgactctgcccctgttctccta

SEQ ID NO: 63005 - DNA, 22 bp, synthetic construct
  misc_feature 1..22: note = chemically synthesized
  source 1..22: mol_type = other DNA
gactctgcccctgttctcctac

SEQ ID NO: 63006 - DNA, 22 bp, synthetic construct
  misc_feature 1..22: note = chemically synthesized
  source 1..22: mol_type = other DNA
actctgcccctgttctcctacc

SEQ ID NO: 63007 - DNA, 22 bp, synthetic construct
  misc_feature 1..22: note = chemically synthesized
  source 1..22: mol_type = other DNA
tgcccctgttctcctaccaaat

SEQ ID NO: 63008 - DNA, 22 bp, synthetic construct
  misc_feature 1..22: note = chemically synthesized
  source 1..22: mol_type = other DNA
cccctgttctcctaccaaatgc

SEQ ID NO: 63009 - DNA, 22 bp, synthetic construct
  misc_feature 1..22: note = chemically synthesized
  source 1..22: mol_type = other DNA
ttctcctaccaaatgccagtta

SEQ ID NO: 63010 - DNA, 22 bp, synthetic construct
  misc_feature 1..22: note = chemically synthesized
  source 1..22: mol_type = other DNA
tcctaccaaatgccagttaaat

SEQ ID NO: 63011 - DNA, 22 bp, synthetic construct
  misc_feature 1..22: note = chemically synthesized
  source 1..22: mol_type = other DNA
ctaccaaatgccagttaaataa

SEQ ID NO: 63012 - DNA, 22 bp, synthetic construct
  misc_feature 1..22: note = chemically synthesized
  source 1..22: mol_type = other DNA
ccaaatgccagttaaataagag

SEQ ID NO: 63013 - DNA, 22 bp, synthetic construct
  misc_feature 1..22: note = chemically synthesized
  source 1..22: mol_type = other DNA
aataagaggagtcctgtgggtc

SEQ ID NO: 63014 - DNA, 22 bp, synthetic construct
  misc_feature 1..22: note = chemically synthesized
  source 1..22: mol_type = other DNA
tgggtcgcccaaggctgcgggc

SEQ ID NO: 63015 - DNA, 22 bp, synthetic construct
  misc_feature 1..22: note = chemically synthesized
  source 1..22: mol_type = other DNA
cgggctgtgtcaacatctggtg

SEQ ID NO: 63016 - DNA, 22 bp, synthetic construct
  misc_feature 1..22: note = chemically synthesized
  source 1..22: mol_type = other DNA
tgtcaacatctggtggatgagc

SEQ ID NO: 63017 - DNA, 22 bp, synthetic construct
  misc_feature 1..22: note = chemically synthesized
  source 1..22: mol_type = other DNA
gtggatgagcttctgctcacca

SEQ ID NO: 63018 - DNA, 22 bp, synthetic construct
  misc_feature 1..22: note = chemically synthesized
  source 1..22: mol_type = other DNA
ctgctcaccaccttcagctcaa

SEQ ID NO: 63019 - DNA, 22 bp, synthetic construct
  misc_feature 1..22: note = chemically synthesized
  source 1..22: mol_type = other DNA
tgctcaccaccttcagctcaat

SEQ ID NO: 63020 - DNA, 22 bp, synthetic construct
  misc_feature 1..22: note = chemically synthesized
  source 1..22: mol_type = other DNA
ctcaccaccttcagctcaatgc

SEQ ID NO: 63021 - DNA, 22 bp, synthetic construct
  misc_feature 1..22: note = chemically synthesized
  source 1..22: mol_type = other DNA
accaccttcagctcaatgcctg

SEQ ID NO: 63022 - DNA, 22 bp, synthetic construct
  misc_feature 1..22: note = chemically synthesized
  source 1..22: mol_type = other DNA
cagctcaatgcctgctccacac

SEQ ID NO: 63023 - DNA, 22 bp, synthetic construct
  misc_feature 1..22: note = chemically synthesized
  source 1..22: mol_type = other DNA
agctcaatgcctgctccacact

SEQ ID NO: 63024 - DNA, 22 bp, synthetic construct
  misc_feature 1..22: note = chemically synthesized
  source 1..22: mol_type = other DNA
aatgcctgctccacactgggca

SEQ ID NO: 63025 - DNA, 22 bp, synthetic construct
  misc_feature 1..22: note = chemically synthesized
  source 1..22: mol_type = other DNA
ctccacactgggcacagggtgt

SEQ ID NO: 63026 - DNA, 22 bp, synthetic construct
  misc_feature 1..22: note = chemically synthesized
  source 1..22: mol_type = other DNA
cacactgggcacagggtgtttt

SEQ ID NO: 63027 - DNA, 22 bp, synthetic construct
  misc_feature 1..22: note = chemically synthesized
  source 1..22: mol_type = other DNA
ggcacagggtgtttttctcatg

SEQ ID NO: 63028 - DNA, 22 bp, synthetic construct
  misc_feature 1..22: note = chemically synthesized
  source 1..22: mol_type = other DNA
ttctcatgaagtgtgctaggcg

SEQ ID NO: 63029 - DNA, 22 bp, synthetic construct
  misc_feature 1..22: note = chemically synthesized
  source 1..22: mol_type = other DNA
tctcatgaagtgtgctaggcgt

SEQ ID NO: 63030 - DNA, 22 bp, synthetic construct
  misc_feature 1..22: note = chemically synthesized
  source 1..22: mol_type = other DNA
ctcatgaagtgtgctaggcgtg

SEQ ID NO: 63031 - DNA, 22 bp, synthetic construct
  misc_feature 1..22: note = chemically synthesized
  source 1..22: mol_type = other DNA
tcatgaagtgtgctaggcgtga

SEQ ID NO: 63032 - DNA, 22 bp, synthetic construct
  misc_feature 1..22: note = chemically synthesized
  source 1..22: mol_type = other DNA
atgaagtgtgctaggcgtgagc

SEQ ID NO: 63033 - DNA, 22 bp, synthetic construct
  misc_feature 1..22: note = chemically synthesized
  source 1..22: mol_type = other DNA
ggcgtgagctgtgggccaccag

SEQ ID NO: 63034 - DNA, 22 bp, synthetic construct
  misc_feature 1..22: note = chemically synthesized
  source 1..22: mol_type = other DNA
tgggccaccagcaacccttctg

SEQ ID NO: 63035 - DNA, 22 bp, synthetic construct
  misc_feature 1..22: note = chemically synthesized
  source 1..22: mol_type = other DNA
ctggtttaaggaggaattacct

SEQ ID NO: 63036 - DNA, 22 bp, synthetic construct
  misc_feature 1..22: note = chemically synthesized
  source 1..22: mol_type = other DNA
tggtttaaggaggaattacctc

SEQ ID NO: 63037 - DNA, 22 bp, synthetic construct
  misc_feature 1..22: note = chemically synthesized
  source 1..22: mol_type = other DNA
gtttaaggaggaattacctctg

SEQ ID NO: 63038 - DNA, 22 bp, synthetic construct
  misc_feature 1..22: note = chemically synthesized
  source 1..22: mol_type = other DNA
aaggaggaattacctctgcaga

SEQ ID NO: 63039 - DNA, 22 bp, synthetic construct
  misc_feature 1..22: note = chemically synthesized
  source 1..22: mol_type = other DNA
aggaggaattacctctgcagaa

SEQ ID NO: 63040 - DNA, 22 bp, synthetic construct
  misc_feature 1..22: note = chemically synthesized
  source 1..22: mol_type = other DNA
cctctgcagaagtttagcgtga

SEQ ID NO: 63041 - DNA, 22 bp, synthetic construct
  misc_feature 1..22: note = chemically synthesized
  source 1..22: mol_type = other DNA
tgcagaagtttagcgtgaccct

SEQ ID NO: 63042 - DNA, 22 bp, synthetic construct
  misc_feature 1..22: note = chemically synthesized
  source 1..22: mol_type = other DNA
cagaagtttagcgtgaccctcg

SEQ ID NO: 63043 - DNA, 22 bp, synthetic construct
  misc_feature 1..22: note = chemically synthesized
  source 1..22: mol_type = other DNA
agcgtgaccctcgaaggggaga

SEQ ID NO: 63044 - DNA, 22 bp, synthetic construct
  misc_feature 1..22: note = chemically synthesized
  source 1..22: mol_type = other DNA
gcgtgaccctcgaaggggagag

SEQ ID NO: 63045 - DNA, 22 bp, synthetic construct
  misc_feature 1..22: note = chemically synthesized
  source 1..22: mol_type = other DNA
gaaggggagagtgtggtgaggt

SEQ ID NO: 63046 - DNA, 22 bp, synthetic construct
  misc_feature 1..22: note = chemically synthesized
  source 1..22: mol_type = other DNA
agaggaacaagtagcccatcaa

SEQ ID NO: 63047 - DNA, 22 bp, synthetic construct
  misc_feature 1..22: note = chemically synthesized
  source 1..22: mol_type = other DNA
tgccacttatgagctgtgtgac

SEQ ID NO: 63048 - DNA, 22 bp, synthetic construct
  misc_feature 1..22: note = chemically synthesized
  source 1..22: mol_type = other DNA
gccacttatgagctgtgtgaca

SEQ ID NO: 63049 - DNA, 22 bp, synthetic construct
  misc_feature 1..22: note = chemically synthesized
  source 1..22: mol_type = other DNA
ccacttatgagctgtgtgacat

SEQ ID NO: 63050 - DNA, 22 bp, synthetic construct
  misc_feature 1..22: note = chemically synthesized
  source 1..22: mol_type = other DNA
atgagctgtgtgacattgtggg

SEQ ID NO: 63051 - DNA, 22 bp, synthetic construct
  misc_feature 1..22: note = chemically synthesized
  source 1..22: mol_type = other DNA
tgagctgtgtgacattgtggga

SEQ ID NO: 63052 - DNA, 22 bp, synthetic construct
  misc_feature 1..22: note = chemically synthesized
  source 1..22: mol_type = other DNA
tgtgacattgtgggagaccagt

SEQ ID NO: 63053 - DNA, 22 bp, synthetic construct
  misc_feature 1..22: note = chemically synthesized
  source 1..22: mol_type = other DNA
tgggagaccagtagcctctctg

SEQ ID NO: 63054 - DNA, 22 bp, synthetic construct
  misc_feature 1..22: note = chemically synthesized
  source 1..22: mol_type = other DNA
tctgagcctcagtttcctcaga

SEQ ID NO: 63055 - DNA, 22 bp, synthetic construct
  misc_feature 1..22: note = chemically synthesized
  source 1..22: mol_type = other DNA
tgagcctcagtttcctcagatt

SEQ ID NO: 63056 - DNA, 22 bp, synthetic construct
  misc_feature 1..22: note = chemically synthesized
  source 1..22: mol_type = other DNA
agcctcagtttcctcagatttg

SEQ ID NO: 63057 - DNA, 22 bp, synthetic construct
  misc_feature 1..22: note = chemically synthesized
  source 1..22: mol_type = other DNA
agtttcctcagatttggagttt

SEQ ID NO: 63058 - DNA, 22 bp, synthetic construct
  misc_feature 1..22: note = chemically synthesized
  source 1..22: mol_type = other DNA
cctcagatttggagtttaagag

SEQ ID NO: 63059 - DNA, 22 bp, synthetic construct
  misc_feature 1..22: note = chemically synthesized
  source 1..22: mol_type = other DNA
ctcagatttggagtttaagagc

SEQ ID NO: 63060 - DNA, 22 bp, synthetic construct
  misc_feature 1..22: note = chemically synthesized
  source 1..22: mol_type = other DNA
agatttggagtttaagagcaca

SEQ ID NO: 63061 - DNA, 22 bp, synthetic construct
  misc_feature 1..22: note = chemically synthesized
  source 1..22: mol_type = other DNA
ggagtttaagagcacagcagat

SEQ ID NO: 63062 - DNA, 22 bp, synthetic construct
  misc_feature 1..22: note = chemically synthesized
  source 1..22: mol_type = other DNA
gagtttaagagcacagcagata

SEQ ID NO: 63063 - DNA, 22 bp, synthetic construct
  misc_feature 1..22: note = chemically synthesized
  source 1..22: mol_type = other DNA
aagagcacagcagatatactca

SEQ ID NO: 63064 - DNA, 22 bp, synthetic construct
  misc_feature 1..22: note = chemically synthesized
  source 1..22: mol_type = other DNA
agagcacagcagatatactcac

SEQ ID NO: 63065 - DNA, 22 bp, synthetic construct
  misc_feature 1..22: note = chemically synthesized
  source 1..22: mol_type = other DNA
acacatcgcagtgctgctacag

SEQ ID NO: 63066 - DNA, 22 bp, synthetic construct
  misc_feature 1..22: note = chemically synthesized
  source 1..22: mol_type = other DNA
ctacagtgagtaaatgagaaac

SEQ ID NO: 63067 - DNA, 22 bp, synthetic construct
  misc_feature 1..22: note = chemically synthesized
  source 1..22: mol_type = other DNA
cagtgagtaaatgagaaacagc

SEQ ID NO: 63068 - DNA, 22 bp, synthetic construct
  misc_feature 1..22: note = chemically synthesized
  source 1..22: mol_type = other DNA
catagggatgtctgattcacag

SEQ ID NO: 63069 - DNA, 22 bp, synthetic construct
  misc_feature 1..22: note = chemically synthesized
  source 1..22: mol_type = other DNA
atagggatgtctgattcacaga

SEQ ID NO: 63070 - DNA, 22 bp, synthetic construct
  misc_feature 1..22: note = chemically synthesized
  source 1..22: mol_type = other DNA
attcacagaaagctcataagtg

SEQ ID NO: 63071 - DNA, 22 bp, synthetic construct
  misc_feature 1..22: note = chemically synthesized
  source 1..22: mol_type = other DNA
acagaaagctcataagtgcaag

SEQ ID NO: 63072 - DNA, 22 bp, synthetic construct
  misc_feature 1..22: note = chemically synthesized
  source 1..22: mol_type = other DNA
ataagtgcaagaaatgtagttc

SEQ ID NO: 63073 - DNA, 22 bp, synthetic construct
  misc_feature 1..22: note = chemically synthesized
  source 1..22: mol_type = other DNA
tatttattctctgttctaatgg

SEQ ID NO: 63074 - DNA, 22 bp, synthetic construct
  misc_feature 1..22: note = chemically synthesized
  source 1..22: mol_type = other DNA
tttattctctgttctaatgggt

SEQ ID NO: 63075 - DNA, 22 bp, synthetic construct
  misc_feature 1..22: note = chemically synthesized
  source 1..22: mol_type = other DNA
attctctgttctaatgggtata

SEQ ID NO: 63076 - DNA, 22 bp, synthetic construct
  misc_feature 1..22: note = chemically synthesized
  source 1..22: mol_type = other DNA
ttctctgttctaatgggtataa

SEQ ID NO: 63077 - DNA, 22 bp, synthetic construct
  misc_feature 1..22: note = chemically synthesized
  source 1..22: mol_type = other DNA
tctgttctaatgggtataaaca

SEQ ID NO: 63078 - DNA, 22 bp, synthetic construct
  misc_feature 1..22: note = chemically synthesized
  source 1..22: mol_type = other DNA
tgttctaatgggtataaacatt

SEQ ID NO: 63079 - DNA, 22 bp, synthetic construct
  misc_feature 1..22: note = chemically synthesized
  source 1..22: mol_type = other DNA
ttctaatgggtataaacatttt

SEQ ID NO: 63080 - DNA, 22 bp, synthetic construct
  misc_feature 1..22: note = chemically synthesized
  source 1..22: mol_type = other DNA
taatgggtataaacattttgtt

SEQ ID NO: 63081 - DNA, 22 bp, synthetic construct
  misc_feature 1..22: note = chemically synthesized
  source 1..22: mol_type = other DNA
atgggtataaacattttgttat

SEQ ID NO: 63082 - DNA, 22 bp, synthetic construct
  misc_feature 1..22: note = chemically synthesized
  source 1..22: mol_type = other DNA
tgttatctaacttgaacatcat

SEQ ID NO: 63083 - DNA, 22 bp, synthetic construct
  misc_feature 1..22: note = chemically synthesized
  source 1..22: mol_type = other DNA
gttatctaacttgaacatcata

SEQ ID NO: 63084 - DNA, 22 bp, synthetic construct
  misc_feature 1..22: note = chemically synthesized
  source 1..22: mol_type = other DNA
ttatctaacttgaacatcatac

SEQ ID NO: 63085 - DNA, 22 bp, synthetic construct
  misc_feature 1..22: note = chemically synthesized
  source 1..22: mol_type = other DNA
tctaacttgaacatcataccaa

SEQ ID NO: 63086 - DNA, 22 bp, synthetic construct
  misc_feature 1..22: note = chemically synthesized
  source 1..22: mol_type = other DNA
acttgaacatcataccaactca

SEQ ID NO: 63087 - DNA, 22 bp, synthetic construct
  misc_feature 1..22: note = chemically synthesized
  source 1..22: mol_type = other DNA
gaacatcataccaactcaaagg

SEQ ID NO: 63088 - DNA, 22 bp, synthetic construct
  misc_feature 1..22: note = chemically synthesized
  source 1..22: mol_type = other DNA
aacatcataccaactcaaaggc

SEQ ID NO: 63089 - DNA, 22 bp, synthetic construct
  misc_feature 1..22: note = chemically synthesized
  source 1..22: mol_type = other DNA
aaaggcaggtcttactagcaat

SEQ ID NO: 63090 - DNA, 22 bp, synthetic construct
  misc_feature 1..22: note = chemically synthesized
  source 1..22: mol_type = other DNA
actagcaatgactggggctcag

SEQ ID NO: 63091 - DNA, 22 bp, synthetic construct
  misc_feature 1..22: note = chemically synthesized
  source 1..22: mol_type = other DNA
ctagcaatgactggggctcaga

SEQ ID NO: 63092 - DNA, 22 bp, synthetic construct
  misc_feature 1..22: note = chemically synthesized
  source 1..22: mol_type = other DNA
gcaatgactggggctcagagag

SEQ ID NO: 63093 - DNA, 22 bp, synthetic construct
  misc_feature 1..22: note = chemically synthesized
  source 1..22: mol_type = other DNA
gggctcagagaggtttggcgac

SEQ ID NO: 63094 - DNA, 22 bp, synthetic construct
  misc_feature 1..22: note = chemically synthesized
  source 1..22: mol_type = other DNA
agagaggtttggcgacttcacg

SEQ ID NO: 63095 - DNA, 22 bp, synthetic construct
  misc_feature 1..22: note = chemically synthesized
  source 1..22: mol_type = other DNA
ggcgacttcacgaaggtcacac

SEQ ID NO: 63096 - DNA, 22 bp, synthetic construct
  misc_feature 1..22: note = chemically synthesized
  source 1..22: mol_type = other DNA
gcgacttcacgaaggtcacaca

SEQ ID NO: 63097 - DNA, 22 bp, synthetic construct
  misc_feature 1..22: note = chemically synthesized
  source 1..22: mol_type = other DNA
cacgaaggtcacacagctgtca

SEQ ID NO: 63098 - DNA, 22 bp, synthetic construct
  misc_feature 1..22: note = chemically synthesized
  source 1..22: mol_type = other DNA
acgaaggtcacacagctgtcag

SEQ ID NO: 63099 - DNA, 22 bp, synthetic construct
  misc_feature 1..22: note = chemically synthesized
  source 1..22: mol_type = other DNA
tcagggggaaaagtcagaactt

SEQ ID NO: 63100 - DNA, 22 bp, synthetic construct
  misc_feature 1..22: note = chemically synthesized
  source 1..22: mol_type = other DNA
ggatccaggtcttcagactctc

SEQ ID NO: 63101 - DNA, 22 bp, synthetic construct
  misc_feature 1..22: note = chemically synthesized
  source 1..22: mol_type = other DNA
gatccaggtcttcagactctca

SEQ ID NO: 63102 - DNA, 22 bp, synthetic construct
  misc_feature 1..22: note = chemically synthesized
  source 1..22: mol_type = other DNA
cagactctcaggtctggtgtca

SEQ ID NO: 63103 - DNA, 22 bp, synthetic construct
  misc_feature 1..22: note = chemically synthesized
  source 1..22: mol_type = other DNA
agactctcaggtctggtgtcat

SEQ ID NO: 63104 - DNA, 22 bp, synthetic construct
  misc_feature 1..22: note = chemically synthesized
  source 1..22: mol_type = other DNA
tcaggtctggtgtcatcctagg

SEQ ID NO: 63105 - DNA, 22 bp, synthetic construct
  misc_feature 1..22: note = chemically synthesized
  source 1..22: mol_type = other DNA
aggtctggtgtcatcctagggg

SEQ ID NO: 63106 - DNA, 22 bp, synthetic construct
  misc_feature 1..22: note = chemically synthesized
  source 1..22: mol_type = other DNA
gtgtcatcctagggggcttggt

SEQ ID NO: 63107 - DNA, 22 bp, synthetic construct
  misc_feature 1..22: note = chemically synthesized
  source 1..22: mol_type = other DNA
gggggcttggtgatggccatat

SEQ ID NO: 63108 - DNA, 22 bp, synthetic construct
  misc_feature 1..22: note = chemically synthesized
  source 1..22: mol_type = other DNA
ggtgatggccatatctttaatg

SEQ ID NO: 63109 - DNA, 22 bp, synthetic construct
  misc_feature 1..22: note = chemically synthesized
  source 1..22: mol_type = other DNA
gtgatggccatatctttaatgt

SEQ ID NO: 63110 - DNA, 22 bp, synthetic construct
  misc_feature 1..22: note = chemically synthesized
  source 1..22: mol_type = other DNA
taatgtatttgtggagagtgaa

SEQ ID NO: 63111 - DNA, 22 bp, synthetic construct
  misc_feature 1..22: note = chemically synthesized
  source 1..22: mol_type = other DNA
aatgtatttgtggagagtgaaa

SEQ ID NO: 63112 - DNA, 22 bp, synthetic construct
  misc_feature 1..22: note = chemically synthesized
  source 1..22: mol_type = other DNA
atgtatttgtggagagtgaaag

SEQ ID NO: 63113 - DNA, 22 bp, synthetic construct
  misc_feature 1..22: note = chemically synthesized
  source 1..22: mol_type = other DNA
gtggagagtgaaaggctgtcag

SEQ ID NO: 63114 - DNA, 22 bp, synthetic construct
  misc_feature 1..22: note = chemically synthesized
  source 1..22: mol_type = other DNA
tggagagtgaaaggctgtcagt

SEQ ID NO: 63115 - DNA, 22 bp, synthetic construct
  misc_feature 1..22: note = chemically synthesized
  source 1..22: mol_type = other DNA
tcagtgagtaagcttaagagaa

SEQ ID NO: 63116 - DNA, 22 bp, synthetic construct
  misc_feature 1..22: note = chemically synthesized
  source 1..22: mol_type = other DNA
aagagaacaggagacttgtgtg

SEQ ID NO: 63117 - DNA, 22 bp, synthetic construct
  misc_feature 1..22: note = chemically synthesized
  source 1..22: mol_type = other DNA
agagaacaggagacttgtgtgg

SEQ ID NO: 63118 - DNA, 22 bp, synthetic construct
  misc_feature 1..22: note = chemically synthesized
  source 1..22: mol_type = other DNA
gtgtgggaaacagtcggtatcc

SEQ ID NO: 63119 - DNA, 22 bp, synthetic construct
  misc_feature 1..22: note = chemically synthesized
  source 1..22: mol_type = other DNA
tgtgggaaacagtcggtatcca

SEQ ID NO: 63120 - DNA, 22 bp, synthetic construct
  misc_feature 1..22: note = chemically synthesized
  source 1..22: mol_type = other DNA
attagactgaatcatgtagaat

SEQ ID NO: 63121 - DNA, 22 bp, synthetic construct
  misc_feature 1..22: note = chemically synthesized
  source 1..22: mol_type = other DNA
gactgaatcatgtagaattgct

SEQ ID NO: 63122 - DNA, 22 bp, synthetic construct
  misc_feature 1..22: note = chemically synthesized
  source 1..22: mol_type = other DNA
aatcatgtagaattgctaattt

SEQ ID NO: 63123 - DNA, 22 bp, synthetic construct
  misc_feature 1..22: note = chemically synthesized
  source 1..22: mol_type = other DNA
ctaatttcaccattttgaacta

SEQ ID NO: 63124 - DNA, 22 bp, synthetic construct
  misc_feature 1..22: note = chemically synthesized
  source 1..22: mol_type = other DNA
atttcaccattttgaactatcg

SEQ ID NO: 63125 - DNA, 22 bp, synthetic construct
  misc_feature 1..22: note = chemically synthesized
  source 1..22: mol_type = other DNA
caccattttgaactatcgaaat

SEQ ID NO: 63126 - DNA, 22 bp, synthetic construct
  misc_feature 1..22: note = chemically synthesized
  source 1..22: mol_type = other DNA
accattttgaactatcgaaatc

SEQ ID NO: 63127 - DNA, 22 bp, synthetic construct
  misc_feature 1..22: note = chemically synthesized
  source 1..22: mol_type = other DNA
tgaactatcgaaatcactattt

SEQ ID NO: 63128 - DNA, 22 bp, synthetic construct
  misc_feature 1..22: note = chemically synthesized
  source 1..22: mol_type = other DNA
gaactatcgaaatcactatttg

SEQ ID NO: 63129 - DNA, 22 bp, synthetic construct
  misc_feature 1..22: note = chemically synthesized
  source 1..22: mol_type = other DNA
aactatcgaaatcactatttgg

SEQ ID NO: 63130 - DNA, 22 bp, synthetic construct
  misc_feature 1..22: note = chemically synthesized
  source 1..22: mol_type = other DNA
tcgaaatcactatttggtatga

SEQ ID NO: 63131 - DNA, 22 bp, synthetic construct
  misc_feature 1..22: note = chemically synthesized
  source 1..22: mol_type = other DNA
tttggtatgactcaacctcatc

SEQ ID NO: 63132 - DNA, 22 bp, synthetic construct
  misc_feature 1..22: note = chemically synthesized
  source 1..22: mol_type = other DNA
ggtatgactcaacctcatcctt

SEQ ID NO: 63133 - DNA, 22 bp, synthetic construct
  misc_feature 1..22: note = chemically synthesized
  source 1..22: mol_type = other DNA
gtatgactcaacctcatccttt

SEQ ID NO: 63134 - DNA, 22 bp, synthetic construct
  misc_feature 1..22: note = chemically synthesized
  source 1..22: mol_type = other DNA
aacctcatcctttaagtacaca

SEQ ID NO: 63135 - DNA, 22 bp, synthetic construct
  misc_feature 1..22: note = chemically synthesized
  source 1..22: mol_type = other DNA
atcctttaagtacacattcatg

SEQ ID NO: 63136 - DNA, 22 bp, synthetic construct
  misc_feature 1..22: note = chemically synthesized
  source 1..22: mol_type = other DNA
taagtacacattcatgacagtg

SEQ ID NO: 63137 - DNA, 22 bp, synthetic construct
  misc_feature 1..22: note = chemically synthesized
  source 1..22: mol_type = other DNA
aagtacacattcatgacagtga

SEQ ID NO: 63138 - DNA, 22 bp, synthetic construct
  misc_feature 1..22: note = chemically synthesized
  source 1..22: mol_type = other DNA
agtacacattcatgacagtgag

SEQ ID NO: 63139 - DNA, 22 bp, synthetic construct
  misc_feature 1..22: note = chemically synthesized
  source 1..22: mol_type = other DNA
atgacagtgagtggttagacag

SEQ ID NO: 63140 - DNA, 22 bp, synthetic construct
  misc_feature 1..22: note = chemically synthesized
  source 1..22: mol_type = other DNA
gacagtgattcctagattagtt

SEQ ID NO: 63141 - DNA, 22 bp, synthetic construct
  misc_feature 1..22: note = chemically synthesized
  source 1..22: mol_type = other DNA
ctagattagtttgggatggggc

SEQ ID NO: 63142 - DNA, 22 bp, synthetic construct
  misc_feature 1..22: note = chemically synthesized
  source 1..22: mol_type = other DNA
gattagtttgggatggggcagt

SEQ ID NO: 63143 - DNA, 22 bp, synthetic construct
  misc_feature 1..22: note = chemically synthesized
  source 1..22: mol_type = other DNA
gtttgggatggggcagtgcctt

SEQ ID NO: 63144 - DNA, 22 bp, synthetic construct
  misc_feature 1..22: note = chemically synthesized
  source 1..22: mol_type = other DNA
gggatggggcagtgccttccat

SEQ ID NO: 63145 - DNA, 22 bp, synthetic construct
  misc_feature 1..22: note = chemically synthesized
  source 1..22: mol_type = other DNA
ggatggggcagtgccttccata

SEQ ID NO: 63146 - DNA, 22 bp, synthetic construct
  misc_feature 1..22: note = chemically synthesized
  source 1..22: mol_type = other DNA
ccataggacaaggccattcctg

SEQ ID NO: 63147 - DNA, 22 bp, synthetic construct
  misc_feature 1..22: note = chemically synthesized
  source 1..22: mol_type = other DNA
cataggacaaggccattcctgg

SEQ ID NO: 63148 - DNA, 22 bp, synthetic construct
  misc_feature 1..22: note = chemically synthesized
  source 1..22: mol_type = other DNA
ctggtagagacggagggagcag

SEQ ID NO: 63149 - DNA, 22 bp, synthetic construct
  misc_feature 1..22: note = chemically synthesized
  source 1..22: mol_type = other DNA
gtagagacggagggagcaggct

SEQ ID NO: 63150 - DNA, 22 bp, synthetic construct
  misc_feature 1..22: note = chemically synthesized
  source 1..22: mol_type = other DNA
tccttcagctaggggcccaggg

SEQ ID NO: 63151 - DNA, 22 bp, synthetic construct
  misc_feature 1..22: note = chemically synthesized
  source 1..22: mol_type = other DNA
cagctaggggcccaggggactt

SEQ ID NO: 63152 - DNA, 22 bp, synthetic construct
  misc_feature 1..22: note = chemically synthesized
  source 1..22: mol_type = other DNA
agctaggggcccaggggacttc

SEQ ID NO: 63153 - DNA, 22 bp, synthetic construct
  misc_feature 1..22: note = chemically synthesized
  source 1..22: mol_type = other DNA
ggggcccaggggacttcctggc

SEQ ID NO: 63154 - DNA, 22 bp, synthetic construct
  misc_feature 1..22: note = chemically synthesized
  source 1..22: mol_type = other DNA
cctggctgctgtgtcctttagc

SEQ ID NO: 63155 - DNA, 22 bp, synthetic construct
  misc_feature 1..22: note = chemically synthesized
  source 1..22: mol_type = other DNA
ctggctgctgtgtcctttagca

SEQ ID NO: 63156 - DNA, 22 bp, synthetic construct
  misc_feature 1..22: note = chemically synthesized
  source 1..22: mol_type = other DNA
gctgctgtgtcctttagcaggg

SEQ ID NO: 63157 - DNA, 22 bp, synthetic construct
  misc_feature 1..22: note = chemically synthesized
  source 1..22: mol_type = other DNA
ctgtgtcctttagcagggcctt

SEQ ID NO: 63158 - DNA, 22 bp, synthetic construct
  misc_feature 1..22: note = chemically synthesized
  source 1..22: mol_type = other DNA
tgtcctttagcagggccttgga

SEQ ID NO: 63159 - DNA, 22 bp, synthetic construct
  misc_feature 1..22: note = chemically synthesized
  source 1..22: mol_type = other DNA
tagcagggccttggaggatgga

SEQ ID NO: 63160 - DNA, 22 bp, synthetic construct
  misc_feature 1..22: note = chemically synthesized
  source 1..22: mol_type = other DNA
agcagggccttggaggatggaa

SEQ ID NO: 63161 - DNA, 22 bp, synthetic construct
  misc_feature 1..22: note = chemically synthesized
  source 1..22: mol_type = other DNA
gcagggccttggaggatggaag

SEQ ID NO: 63162 - DNA, 22 bp, synthetic construct
  misc_feature 1..22: note = chemically synthesized
  source 1..22: mol_type = other DNA
ggaggatggaaggactctcctg

SEQ ID NO: 63163 - DNA, 22 bp, synthetic construct
  misc_feature 1..22: note = chemically synthesized
  source 1..22: mol_type = other DNA
gaggatggaaggactctcctgg

SEQ ID NO: 63164 - DNA, 22 bp, synthetic construct
  misc_feature 1..22: note = chemically synthesized
  source 1..22: mol_type = other DNA
tcctggcccttaccacaggggc

SEQ ID NO: 63165 - DNA, 22 bp, synthetic construct
  misc_feature 1..22: note = chemically synthesized
  source 1..22: mol_type = other DNA
ctggcccttaccacaggggcta

SEQ ID NO: 63166 - DNA, 22 bp, synthetic construct
  misc_feature 1..22: note = chemically synthesized
  source 1..22: mol_type = other DNA
gcccttaccacaggggctattc

SEQ ID NO: 63167 - DNA, 22 bp, synthetic construct
  misc_feature 1..22: note = chemically synthesized
  source 1..22: mol_type = other DNA
accacaggggctattcaggaac

SEQ ID NO: 63168 - DNA, 22 bp, synthetic construct
  misc_feature 1..22: note = chemically synthesized
  source 1..22: mol_type = other DNA
ccacaggggctattcaggaaca

SEQ ID NO: 63169 - DNA, 22 bp, synthetic construct
  misc_feature 1..22: note = chemically synthesized
  source 1..22: mol_type = other DNA
ttcaggaacagcctcctgccgt

SEQ ID NO: 63170 - DNA, 22 bp, synthetic construct
  misc_feature 1..22: note = chemically synthesized
  source 1..22: mol_type = other DNA
aggaacagcctcctgccgtggc

SEQ ID NO: 63171 - DNA, 22 bp, synthetic construct
  misc_feature 1..22: note = chemically synthesized
  source 1..22: mol_type = other DNA
ctgccgtggcactggagctgcg

SEQ ID NO: 63172 - DNA, 22 bp, synthetic construct
  misc_feature 1..22: note = chemically synthesized
  source 1..22: mol_type = other DNA
ccgtggcactggagctgcggtg

SEQ ID NO: 63173 - DNA, 22 bp, synthetic construct
  misc_feature 1..22: note = chemically synthesized
  source 1..22: mol_type = other DNA
gagctgcggtggccctctgaag

SEQ ID NO: 63174 - DNA, 22 bp, synthetic construct
  misc_feature 1..22: note = chemically synthesized
  source 1..22: mol_type = other DNA
cggtggccctctgaagactgca

SEQ ID NO: 63175 - DNA, 22 bp, synthetic construct
  misc_feature 1..22: note = chemically synthesized
  source 1..22: mol_type = other DNA
tgaagactgcagggacagcaac

SEQ ID NO: 63176 - DNA, 22 bp, synthetic construct
  misc_feature 1..22: note = chemically synthesized
  source 1..22: mol_type = other DNA
aagactgcagggacagcaacag

SEQ ID NO: 63177 - DNA, 22 bp, synthetic construct
  misc_feature 1..22: note = chemically synthesized
  source 1..22: mol_type = other DNA
cagggacagcaacaggcacaaa

SEQ ID NO: 63178 - DNA, 22 bp, synthetic construct
  misc_feature 1..22: note = chemically synthesized
  source 1..22: mol_type = other DNA
catgtggccccagtcgggactc

SEQ ID NO: 63179 - DNA, 22 bp, synthetic construct
  misc_feature 1..22: note = chemically synthesized
  source 1..22: mol_type = other DNA
agaggaggaaagggaggggttg

SEQ ID NO: 63180 - DNA, 22 bp, synthetic construct
  misc_feature 1..22: note = chemically synthesized
  source 1..22: mol_type = other DNA
cgggggtcaatgggtgatgtgc

SEQ ID NO: 63181 - DNA, 22 bp, synthetic construct
  misc_feature 1..22: note = chemically synthesized
  source 1..22: mol_type = other DNA
cctctcccatagctgaggagtc

SEQ ID NO: 63182 - DNA, 22 bp, synthetic construct
  misc_feature 1..22: note = chemically synthesized
  source 1..22: mol_type = other DNA
ctctcccatagctgaggagtcc

SEQ ID NO: 63183 - DNA, 22 bp, synthetic construct
  misc_feature 1..22: note = chemically synthesized
  source 1..22: mol_type = other DNA
tcccatagctgaggagtccttg

SEQ ID NO: 63184 - DNA, 22 bp, synthetic construct
  misc_feature 1..22: note = chemically synthesized
  source 1..22: mol_type = other DNA
ccatagctgaggagtccttgca

SEQ ID NO: 63185 - DNA, 22 bp, synthetic construct
  misc_feature 1..22: note = chemically synthesized
  source 1..22: mol_type = other DNA
aggagtccttgcaatggccttc

SEQ ID NO: 63186 - DNA, 22 bp, synthetic construct
  misc_feature 1..22: note = chemically synthesized
  source 1..22: mol_type = other DNA
gcaatggccttcctgagccatc

SEQ ID NO: 63187 - DNA, 22 bp, synthetic construct
  misc_feature 1..22: note = chemically synthesized
  source 1..22: mol_type = other DNA
caatggccttcctgagccatca

SEQ ID NO: 63188 - DNA, 22 bp, synthetic construct
  misc_feature 1..22: note = chemically synthesized
  source 1..22: mol_type = other DNA
cctgagccatcagcaggcctat

SEQ ID NO: 63189 - DNA, 22 bp, synthetic construct
  misc_feature 1..22: note = chemically synthesized
  source 1..22: mol_type = other DNA
ctgagccatcagcaggcctatg

SEQ ID NO: 63190 - DNA, 22 bp, synthetic construct
  misc_feature 1..22: note = chemically synthesized
  source 1..22: mol_type = other DNA
agccatcagcaggcctatggcc

SEQ ID NO: 63191 - DNA, 22 bp, synthetic construct
  misc_feature 1..22: note = chemically synthesized
  source 1..22: mol_type = other DNA
tggccatgtgactagggaggag

SEQ ID NO: 63192 - DNA, 22 bp, synthetic construct
  misc_feature 1..22: note = chemically synthesized
  source 1..22: mol_type = other DNA
gggaggagaagggatatagggt

SEQ ID NO: 63193 - DNA, 22 bp, synthetic construct
  misc_feature 1..22: note = chemically synthesized
  source 1..22: mol_type = other DNA
ctggggcctgctgggcctggtc

SEQ ID NO: 63194 - DNA, 22 bp, synthetic construct
  misc_feature 1..22: note = chemically synthesized
  source 1..22: mol_type = other DNA
tggggcctgctgggcctggtca

SEQ ID NO: 63195 - DNA, 22 bp, synthetic construct
  misc_feature 1..22: note = chemically synthesized
  source 1..22: mol_type = other DNA
gggcctgctgggcctggtcaag

SEQ ID NO: 63196 - DNA, 22 bp, synthetic construct
  misc_feature 1..22: note = chemically synthesized
  source 1..22: mol_type = other DNA
ctgggcctggtcaagtctgagg

SEQ ID NO: 63197 - DNA, 22 bp, synthetic construct
  misc_feature 1..22: note = chemically synthesized
  source 1..22: mol_type = other DNA
ggcctggtcaagtctgaggagg

SEQ ID NO: 63198 - DNA, 22 bp, synthetic construct
  misc_feature 1..22: note = chemically synthesized
  source 1..22: mol_type = other DNA
gtcaagtctgaggaggagatag

SEQ ID NO: 63199 - DNA, 22 bp, synthetic construct
  misc_feature 1..22: note = chemically synthesized
  source 1..22: mol_type = other DNA
aggaggagatagagaaaacaaa

SEQ ID NO: 63200 - DNA, 22 bp, synthetic construct
  misc_feature 1..22: note = chemically synthesized
  source 1..22: mol_type = other DNA
ctcttcatctggggagaaggga

SEQ ID NO: 63201 - DNA, 22 bp, synthetic construct
  misc_feature 1..22: note = chemically synthesized
  source 1..22: mol_type = other DNA
ttcatctggggagaagggacct

SEQ ID NO: 63202 - DNA, 22 bp, synthetic construct
  misc_feature 1..22: note = chemically synthesized
  source 1..22: mol_type = other DNA
catctggggagaagggacctga

SEQ ID NO: 63203 - DNA, 22 bp, synthetic construct
  misc_feature 1..22: note = chemically synthesized
  source 1..22: mol_type = other DNA
atctggggagaagggacctgat

SEQ ID NO: 63204 - DNA, 22 bp, synthetic construct
  misc_feature 1..22: note = chemically synthesized
  source 1..22: mol_type = other DNA
gggagaagggacctgattctaa

SEQ ID NO: 63205 - DNA, 22 bp, synthetic construct
  misc_feature 1..22: note = chemically synthesized
  source 1..22: mol_type = other DNA
attctaaacggagatatgtgag

SEQ ID NO: 63206 - DNA, 22 bp, synthetic construct
  misc_feature 1..22: note = chemically synthesized
  source 1..22: mol_type = other DNA
taaacggagatatgtgaggctt

SEQ ID NO: 63207 - DNA, 22 bp, synthetic construct
  misc_feature 1..22: note = chemically synthesized
  source 1..22: mol_type = other DNA
aacggagatatgtgaggctttc

SEQ ID NO: 63208 - DNA, 22 bp, synthetic construct
  misc_feature 1..22: note = chemically synthesized
  source 1..22: mol_type = other DNA
tctggggcagcgatggaaggac

SEQ ID NO: 63209 - DNA, 22 bp, synthetic construct
  misc_feature 1..22: note = chemically synthesized
  source 1..22: mol_type = other DNA
ctggggcagcgatggaaggaca

SEQ ID NO: 63210 - DNA, 22 bp, synthetic construct
  misc_feature 1..22: note = chemically synthesized
  source 1..22: mol_type = other DNA
tggggcagcgatggaaggacaa

SEQ ID NO: 63211 - DNA, 22 bp, synthetic construct
  misc_feature 1..22: note = chemically synthesized
  source 1..22: mol_type = other DNA
gggcagcgatggaaggacaagg

SEQ ID NO: 63212 - DNA, 22 bp, synthetic construct
  misc_feature 1..22: note = chemically synthesized
  source 1..22: mol_type = other DNA
gttgccccatggagaatgggct

SEQ ID NO: 63213 - DNA, 22 bp, synthetic construct
  misc_feature 1..22: note = chemically synthesized
  source 1..22: mol_type = other DNA
ttgccccatggagaatgggctt

SEQ ID NO: 63214 - DNA, 22 bp, synthetic construct
  misc_feature 1..22: note = chemically synthesized
  source 1..22: mol_type = other DNA
ccccatggagaatgggcttcag

SEQ ID NO: 63215 - DNA, 22 bp, synthetic construct
  misc_feature 1..22: note = chemically synthesized
  source 1..22: mol_type = other DNA
caggaagaatctgcctcagtca

SEQ ID NO: 63216 - DNA, 22 bp, synthetic construct
  misc_feature 1..22: note = chemically synthesized
  source 1..22: mol_type = other DNA
aggaagaatctgcctcagtcat

SEQ ID NO: 63217 - DNA, 22 bp, synthetic construct
  misc_feature 1..22: note = chemically synthesized
  source 1..22: mol_type = other DNA
cctcagtcattttccagaagtg

SEQ ID NO: 63218 - DNA, 22 bp, synthetic construct
  misc_feature 1..22: note = chemically synthesized
  source 1..22: mol_type = other DNA
agtcattttccagaagtgcctg

SEQ ID NO: 63219 - DNA, 22 bp, synthetic construct
  misc_feature 1..22: note = chemically synthesized
  source 1..22: mol_type = other DNA
tccagaagtgcctgagaggtgc

SEQ ID NO: 63220 - DNA, 22 bp, synthetic construct
  misc_feature 1..22: note = chemically synthesized
  source 1..22: mol_type = other DNA
ccagaagtgcctgagaggtgca

SEQ ID NO: 63221 - DNA, 22 bp, synthetic construct
  misc_feature 1..22: note = chemically synthesized
  source 1..22: mol_type = other DNA
cagaagtgcctgagaggtgcag

SEQ ID NO: 63222 - DNA, 22 bp, synthetic construct
  misc_feature 1..22: note = chemically synthesized
  source 1..22: mol_type = other DNA
agaggtgcagggcccgagtctg

SEQ ID NO: 63223 - DNA, 22 bp, synthetic construct
  misc_feature 1..22: note = chemically synthesized
  source 1..22: mol_type = other DNA
gttaggtgacagcgggtcaaga

SEQ ID NO: 63224 - DNA, 22 bp, synthetic construct
  misc_feature 1..22: note = chemically synthesized
  source 1..22: mol_type = other DNA
ggtgacagcgggtcaagaggag

SEQ ID NO: 63225 - DNA, 22 bp, synthetic construct
  misc_feature 1..22: note = chemically synthesized
  source 1..22: mol_type = other DNA
tcctctctcttgtgttgctgca

SEQ ID NO: 63226 - DNA, 22 bp, synthetic construct
  misc_feature 1..22: note = chemically synthesized
  source 1..22: mol_type = other DNA
tctcttgtgttgctgcagatgc

SEQ ID NO: 63227 - DNA, 22 bp, synthetic construct
  misc_feature 1..22: note = chemically synthesized
  source 1..22: mol_type = other DNA
tcttgtgttgctgcagatgcca

SEQ ID NO: 63228 - DNA, 22 bp, synthetic construct
  misc_feature 1..22: note = chemically synthesized
  source 1..22: mol_type = other DNA
ttgtgttgctgcagatgccaca

SEQ ID NO: 63229 - DNA, 22 bp, synthetic construct
  misc_feature 1..22: note = chemically synthesized
  source 1..22: mol_type = other DNA
gtgttgctgcagatgccacaaa

SEQ ID NO: 63230 - DNA, 22 bp, synthetic construct
  misc_feature 1..22: note = chemically synthesized
  source 1..22: mol_type = other DNA
tgttgctgcagatgccacaaaa

SEQ ID NO: 63231 - DNA, 22 bp, synthetic construct
  misc_feature 1..22: note = chemically synthesized
  source 1..22: mol_type = other DNA
ctgcagatgccacaaaactggg

SEQ ID NO: 63232 - DNA, 22 bp, synthetic construct
  misc_feature 1..22: note = chemically synthesized
  source 1..22: mol_type = other DNA
cagatgccacaaaactgggcca

SEQ ID NO: 63233 - DNA, 22 bp, synthetic construct
  misc_feature 1..22: note = chemically synthesized
  source 1..22: mol_type = other DNA
ggccacggcacgatcaggcagt

SEQ ID NO: 63234 - DNA, 22 bp, synthetic construct
  misc_feature 1..22: note = chemically synthesized
  source 1..22: mol_type = other DNA
tggggcccccaggagggcagcc

SEQ ID NO: 63235 - DNA, 22 bp, synthetic construct
  misc_feature 1..22: note = chemically synthesized
  source 1..22: mol_type = other DNA
gggcccccaggagggcagcctt

SEQ ID NO: 63236 - DNA, 22 bp, synthetic construct
  misc_feature 1..22: note = chemically synthesized
  source 1..22: mol_type = other DNA
ggggtgggcacagccagccctg

SEQ ID NO: 63237 - DNA, 22 bp, synthetic construct
  misc_feature 1..22: note = chemically synthesized
  source 1..22: mol_type = other DNA
gggtgggcacagccagccctgg

SEQ ID NO: 63238 - DNA, 22 bp, synthetic construct
  misc_feature 1..22: note = chemically synthesized
  source 1..22: mol_type = other DNA
gcaggatgagcaactctgggtg

SEQ ID NO: 63239 - DNA, 22 bp, synthetic construct
  misc_feature 1..22: note = chemically synthesized
  source 1..22: mol_type = other DNA
tgggtgggggggagtgggggat

SEQ ID NO: 63240 - DNA, 22 bp, synthetic construct
  misc_feature 1..22: note = chemically synthesized
  source 1..22: mol_type = other DNA
ggtgggggggagtgggggatga

SEQ ID NO: 63241 - DNA, 22 bp, synthetic construct
  misc_feature 1..22: note = chemically synthesized
  source 1..22: mol_type = other DNA
ggtggagcctggggtcatggct

SEQ ID NO: 63242 - DNA, 22 bp, synthetic construct
  misc_feature 1..22: note = chemically synthesized
  source 1..22: mol_type = other DNA
gtggagcctggggtcatggctg

SEQ ID NO: 63243 - DNA, 22 bp, synthetic construct
  misc_feature 1..22: note = chemically synthesized
  source 1..22: mol_type = other DNA
gggtcatggctggtatctggtt

SEQ ID NO: 63244 - DNA, 22 bp, synthetic construct
  misc_feature 1..22: note = chemically synthesized
  source 1..22: mol_type = other DNA
gtatctggttcctcccctgtga

SEQ ID NO: 63245 - DNA, 22 bp, synthetic construct
  misc_feature 1..22: note = chemically synthesized
  source 1..22: mol_type = other DNA
gttcctcccctgtgattccttc

SEQ ID NO: 63246 - DNA, 22 bp, synthetic construct
  misc_feature 1..22: note = chemically synthesized
  source 1..22: mol_type = other DNA
ctcccctgtgattccttcttgg

SEQ ID NO: 63247 - DNA, 22 bp, synthetic construct
  misc_feature 1..22: note = chemically synthesized
  source 1..22: mol_type = other DNA
ccctgtgattccttcttgggga

SEQ ID NO: 63248 - DNA, 22 bp, synthetic construct
  misc_feature 1..22: note = chemically synthesized
  source 1..22: mol_type = other DNA
tgattccttcttggggactcca

SEQ ID NO: 63249 - DNA, 22 bp, synthetic construct
  misc_feature 1..22: note = chemically synthesized
  source 1..22: mol_type = other DNA
cttcttggggactccaagacag

SEQ ID NO: 63250 - DNA, 22 bp, synthetic construct
  misc_feature 1..22: note = chemically synthesized
  source 1..22: mol_type = other DNA
cttggggactccaagacaggac

SEQ ID NO: 63251 - DNA, 22 bp, synthetic construct
  misc_feature 1..22: note = chemically synthesized
  source 1..22: mol_type = other DNA
ttggggactccaagacaggaca

SEQ ID NO: 63252 - DNA, 22 bp, synthetic construct
  misc_feature 1..22: note = chemically synthesized
  source 1..22: mol_type = other DNA
ggggactccaagacaggacaag

SEQ ID NO: 63253 - DNA, 22 bp, synthetic construct
  misc_feature 1..22: note = chemically synthesized
  source 1..22: mol_type = other DNA
gggactccaagacaggacaagg

SEQ ID NO: 63254 - DNA, 22 bp, synthetic construct
  misc_feature 1..22: note = chemically synthesized
  source 1..22: mol_type = other DNA
caagacaggacaaggaagactg

SEQ ID NO: 63255 - DNA, 22 bp, synthetic construct
  misc_feature 1..22: note = chemically synthesized
  source 1..22: mol_type = other DNA
gagccctccagaaacagatggg

SEQ ID NO: 63256 - DNA, 22 bp, synthetic construct
  misc_feature 1..22: note = chemically synthesized
  source 1..22: mol_type = other DNA
cagaaacagatgggcccaggtc

SEQ ID NO: 63257 - DNA, 22 bp, synthetic construct
  misc_feature 1..22: note = chemically synthesized
  source 1..22: mol_type = other DNA
aggattcagtcccccctggatt

SEQ ID NO: 63258 - DNA, 22 bp, synthetic construct
  misc_feature 1..22: note = chemically synthesized
  source 1..22: mol_type = other DNA
agtcccccctggattcaagccc

SEQ ID NO: 63259 - DNA, 22 bp, synthetic construct
  misc_feature 1..22: note = chemically synthesized
  source 1..22: mol_type = other DNA
gattcaagcccagcatgtgcct

SEQ ID NO: 63260 - DNA, 22 bp, synthetic construct
  misc_feature 1..22: note = chemically synthesized
  source 1..22: mol_type = other DNA
aagcccagcatgtgcctaccca

SEQ ID NO: 63261 - DNA, 22 bp, synthetic construct
  misc_feature 1..22: note = chemically synthesized
  source 1..22: mol_type = other DNA
cccagccagatgctccatgaac

SEQ ID NO: 63262 - DNA, 22 bp, synthetic construct
  misc_feature 1..22: note = chemically synthesized
  source 1..22: mol_type = other DNA
catgaacacagttcagggggcc

SEQ ID NO: 63263 - DNA, 22 bp, synthetic construct
  misc_feature 1..22: note = chemically synthesized
  source 1..22: mol_type = other DNA
agggggcccgaagacagcactg

SEQ ID NO: 63264 - DNA, 22 bp, synthetic construct
  misc_feature 1..22: note = chemically synthesized
  source 1..22: mol_type = other DNA
ttacctggagcccacatacagc

SEQ ID NO: 63265 - DNA, 22 bp, synthetic construct
  misc_feature 1..22: note = chemically synthesized
  source 1..22: mol_type = other DNA
cctggagcccacatacagcctc

SEQ ID NO: 63266 - DNA, 22 bp, synthetic construct
  misc_feature 1..22: note = chemically synthesized
  source 1..22: mol_type = other DNA
gagcccacatacagcctcagca

SEQ ID NO: 63267 - DNA, 22 bp, synthetic construct
  misc_feature 1..22: note = chemically synthesized
  source 1..22: mol_type = other DNA
agcaggcaaagggagactcaga

SEQ ID NO: 63268 - DNA, 22 bp, synthetic construct
  misc_feature 1..22: note = chemically synthesized
  source 1..22: mol_type = other DNA
agagaaaacatgggagggattt

SEQ ID NO: 63269 - DNA, 22 bp, synthetic construct
  misc_feature 1..22: note = chemically synthesized
  source 1..22: mol_type = other DNA
acagtcacatgcaggcagggac

SEQ ID NO: 63270 - DNA, 22 bp, synthetic construct
  misc_feature 1..22: note = chemically synthesized
  source 1..22: mol_type = other DNA
cagtcacatgcaggcagggacc

SEQ ID NO: 63271 - DNA, 22 bp, synthetic construct
  misc_feature 1..22: note = chemically synthesized
  source 1..22: mol_type = other DNA
aacccttctttaatgtcatcca

SEQ ID NO: 63272 - DNA, 22 bp, synthetic construct
  misc_feature 1..22: note = chemically synthesized
  source 1..22: mol_type = other DNA
ctttaatgtcatccagggaggg

SEQ ID NO: 63273 - DNA, 22 bp, synthetic construct
  misc_feature 1..22: note = chemically synthesized
  source 1..22: mol_type = other DNA
tttaatgtcatccagggagggg

SEQ ID NO: 63274 - DNA, 22 bp, synthetic construct
  misc_feature 1..22: note = chemically synthesized
  source 1..22: mol_type = other DNA
taatgtcatccagggagggggc

SEQ ID NO: 63275 - DNA, 22 bp, synthetic construct
  misc_feature 1..22: note = chemically synthesized
  source 1..22: mol_type = other DNA
aatgtcatccagggagggggcc

SEQ ID NO: 63276 - DNA, 22 bp, synthetic construct
  misc_feature 1..22: note = chemically synthesized
  source 1..22: mol_type = other DNA
atgtcatccagggagggggcca

SEQ ID NO: 63277 - DNA, 22 bp, synthetic construct
  misc_feature 1..22: note = chemically synthesized
  source 1..22: mol_type = other DNA
aggagcgagaggcagttatttt

SEQ ID NO: 63278 - DNA, 22 bp, synthetic construct
  misc_feature 1..22: note = chemically synthesized
  source 1..22: mol_type = other DNA
tttttgggtgggattcaccact

SEQ ID NO: 63279 - DNA, 22 bp, synthetic construct
  misc_feature 1..22: note = chemically synthesized
  source 1..22: mol_type = other DNA
ttgggtgggattcaccactttt

SEQ ID NO: 63280 - DNA, 22 bp, synthetic construct
  misc_feature 1..22: note = chemically synthesized
  source 1..22: mol_type = other DNA
tgggtgggattcaccacttttc

SEQ ID NO: 63281 - DNA, 22 bp, synthetic construct
  misc_feature 1..22: note = chemically synthesized
  source 1..22: mol_type = other DNA
gggtgggattcaccacttttcc

SEQ ID NO: 63282 - DNA, 22 bp, synthetic construct
  misc_feature 1..22: note = chemically synthesized
  source 1..22: mol_type = other DNA
ggtgggattcaccacttttccc

SEQ ID NO: 63283 - DNA, 22 bp, synthetic construct
  misc_feature 1..22: note = chemically synthesized
  source 1..22: mol_type = other DNA
accacttttcccatgaagaggg

SEQ ID NO: 63284 - DNA, 22 bp, synthetic construct
  misc_feature 1..22: note = chemically synthesized
  source 1..22: mol_type = other DNA
ttcccatgaagaggggagactt

SEQ ID NO: 63285 - DNA, 22 bp, synthetic construct
  misc_feature 1..22: note = chemically synthesized
  source 1..22: mol_type = other DNA
tcccatgaagaggggagacttg

SEQ ID NO: 63286 - DNA, 22 bp, synthetic construct
  misc_feature 1..22: note = chemically synthesized
  source 1..22: mol_type = other DNA
cccatgaagaggggagacttgg

SEQ ID NO: 63287 - DNA, 22 bp, synthetic construct
  misc_feature 1..22: note = chemically synthesized
  source 1..22: mol_type = other DNA
ccatgaagaggggagacttggt

SEQ ID NO: 63288 - DNA, 22 bp, synthetic construct
  misc_feature 1..22: note = chemically synthesized
  source 1..22: mol_type = other DNA
ggtattttgttcaatcattaag

SEQ ID NO: 63289 - DNA, 22 bp, synthetic construct
  misc_feature 1..22: note = chemically synthesized
  source 1..22: mol_type = other DNA
gtattttgttcaatcattaaga

SEQ ID NO: 63290 - DNA, 22 bp, synthetic construct
  misc_feature 1..22: note = chemically synthesized
  source 1..22: mol_type = other DNA
tgttcaatcattaagaagacaa

SEQ ID NO: 63291 - DNA, 22 bp, synthetic construct
  misc_feature 1..22: note = chemically synthesized
  source 1..22: mol_type = other DNA
gttcaatcattaagaagacaaa

SEQ ID NO: 63292 - DNA, 22 bp, synthetic construct
  misc_feature 1..22: note = chemically synthesized
  source 1..22: mol_type = other DNA
ttcaatcattaagaagacaaag

SEQ ID NO: 63293 - DNA, 22 bp, synthetic construct
  misc_feature 1..22: note = chemically synthesized
  source 1..22: mol_type = other DNA
aatcattaagaagacaaagggt

SEQ ID NO: 63294 - DNA, 22 bp, synthetic construct
  misc_feature 1..22: note = chemically synthesized
  source 1..22: mol_type = other DNA
agaagacaaagggtttgttgaa

SEQ ID NO: 63295 - DNA, 22 bp, synthetic construct
  misc_feature 1..22: note = chemically synthesized
  source 1..22: mol_type = other DNA
gttgaacttgacctcggggggg

SEQ ID NO: 63296 - DNA, 22 bp, synthetic construct
  misc_feature 1..22: note = chemically synthesized
  source 1..22: mol_type = other DNA
ttgaacttgacctcggggggga

SEQ ID NO: 63297 - DNA, 22 bp, synthetic construct
  misc_feature 1..22: note = chemically synthesized
  source 1..22: mol_type = other DNA
aacttgacctcgggggggatag

SEQ ID NO: 63298 - DNA, 22 bp, synthetic construct
  misc_feature 1..22: note = chemically synthesized
  source 1..22: mol_type = other DNA
gacctcgggggggatagacatg

SEQ ID NO: 63299 - DNA, 22 bp, synthetic construct
  misc_feature 1..22: note = chemically synthesized
  source 1..22: mol_type = other DNA
acctcgggggggatagacatgg

SEQ ID NO: 63300 - DNA, 22 bp, synthetic construct
  misc_feature 1..22: note = chemically synthesized
  source 1..22: mol_type = other DNA
gggggggatagacatgggtatg

SEQ ID NO: 63301 - DNA, 22 bp, synthetic construct
  misc_feature 1..22: note = chemically synthesized
  source 1..22: mol_type = other DNA
taaaaacatggccccagcagct

SEQ ID NO: 63302 - DNA, 22 bp, synthetic construct
  misc_feature 1..22: note = chemically synthesized
  source 1..22: mol_type = other DNA
aaaacatggccccagcagcttc

SEQ ID NO: 63303 - DNA, 22 bp, synthetic construct
  misc_feature 1..22: note = chemically synthesized
  source 1..22: mol_type = other DNA
cagtccctttctcgtcgatggt

SEQ ID NO: 63304 - DNA, 22 bp, synthetic construct
  misc_feature 1..22: note = chemically synthesized
  source 1..22: mol_type = other DNA
agtccctttctcgtcgatggtc

SEQ ID NO: 63305 - DNA, 22 bp, synthetic construct
  misc_feature 1..22: note = chemically synthesized
  source 1..22: mol_type = other DNA
tctcgtcgatggtcagcacagc

SEQ ID NO: 63306 - DNA, 22 bp, synthetic construct
  misc_feature 1..22: note = chemically synthesized
  source 1..22: mol_type = other DNA
ctcgtcgatggtcagcacagcc

SEQ ID NO: 63307 - DNA, 22 bp, synthetic construct
  misc_feature 1..22: note = chemically synthesized
  source 1..22: mol_type = other DNA
tcgtcgatggtcagcacagcct

SEQ ID NO: 63308 - DNA, 22 bp, synthetic construct
  misc_feature 1..22: note = chemically synthesized
  source 1..22: mol_type = other DNA
gtcgatggtcagcacagcctta

SEQ ID NO: 63309 - DNA, 22 bp, synthetic construct
  misc_feature 1..22: note = chemically synthesized
  source 1..22: mol_type = other DNA
atgcacggcctggaggggagag

SEQ ID NO: 63310 - DNA, 22 bp, synthetic construct
  misc_feature 1..22: note = chemically synthesized
  source 1..22: mol_type = other DNA
tgcacggcctggaggggagaga

SEQ ID NO: 63311 - DNA, 22 bp, synthetic construct
  misc_feature 1..22: note = chemically synthesized
  source 1..22: mol_type = other DNA
gaggggagagaagcagagacac

SEQ ID NO: 63312 - DNA, 22 bp, synthetic construct
  misc_feature 1..22: note = chemically synthesized
  source 1..22: mol_type = other DNA
taaggctgatcccaggcctcga

SEQ ID NO: 63313 - DNA, 22 bp, synthetic construct
  misc_feature 1..22: note = chemically synthesized
  source 1..22: mol_type = other DNA
atcccaggcctcgagcaaggct

SEQ ID NO: 63314 - DNA, 22 bp, synthetic construct
  misc_feature 1..22: note = chemically synthesized
  source 1..22: mol_type = other DNA
gagcaaggctcacgtggacacc

SEQ ID NO: 63315 - DNA, 22 bp, synthetic construct
  misc_feature 1..22: note = chemically synthesized
  source 1..22: mol_type = other DNA
acgtggacacctcccaggaagc

SEQ ID NO: 63316 - DNA, 22 bp, synthetic construct
  misc_feature 1..22: note = chemically synthesized
  source 1..22: mol_type = other DNA
ccaggaagcgctcactccccct

SEQ ID NO: 63317 - DNA, 22 bp, synthetic construct
  misc_feature 1..22: note = chemically synthesized
  source 1..22: mol_type = other DNA
actccccctggacggccctggc

SEQ ID NO: 63318 - DNA, 22 bp, synthetic construct
  misc_feature 1..22: note = chemically synthesized
  source 1..22: mol_type = other DNA
cccctggacggccctggccctg

SEQ ID NO: 63319 - DNA, 22 bp, synthetic construct
  misc_feature 1..22: note = chemically synthesized
  source 1..22: mol_type = other DNA
gacggccctggccctgcacatc

SEQ ID NO: 63320 - DNA, 22 bp, synthetic construct
  misc_feature 1..22: note = chemically synthesized
  source 1..22: mol_type = other DNA
gccctgcacatcctctccctcc

SEQ ID NO: 63321 - DNA, 22 bp, synthetic construct
  misc_feature 1..22: note = chemically synthesized
  source 1..22: mol_type = other DNA
cacatcctctccctccctgtca

SEQ ID NO: 63322 - DNA, 22 bp, synthetic construct
  misc_feature 1..22: note = chemically synthesized
  source 1..22: mol_type = other DNA
tccctccctgtcacataggcct

SEQ ID NO: 63323 - DNA, 22 bp, synthetic construct
  misc_feature 1..22: note = chemically synthesized
  source 1..22: mol_type = other DNA
cctccctgtcacataggccttg

SEQ ID NO: 63324 - DNA, 22 bp, synthetic construct
  misc_feature 1..22: note = chemically synthesized
  source 1..22: mol_type = other DNA
cctgtcacataggccttgctcc

SEQ ID NO: 63325 - DNA, 22 bp, synthetic construct
  misc_feature 1..22: note = chemically synthesized
  source 1..22: mol_type = other DNA
tcacataggccttgctcctcct

SEQ ID NO: 63326 - DNA, 22 bp, synthetic construct
  misc_feature 1..22: note = chemically synthesized
  source 1..22: mol_type = other DNA
gctcctcctcaaggctttggct

SEQ ID NO: 63327 - DNA, 22 bp, synthetic construct
  misc_feature 1..22: note = chemically synthesized
  source 1..22: mol_type = other DNA
ctcctcctcaaggctttggctg

SEQ ID NO: 63328 - DNA, 22 bp, synthetic construct
  misc_feature 1..22: note = chemically synthesized
  source 1..22: mol_type = other DNA
ctcctcaaggctttggctgatg

SEQ ID NO: 63329 - DNA, 22 bp, synthetic construct
  misc_feature 1..22: note = chemically synthesized
  source 1..22: mol_type = other DNA
ctcaaggctttggctgatgggg

SEQ ID NO: 63330 - DNA, 22 bp, synthetic construct
  misc_feature 1..22: note = chemically synthesized
  source 1..22: mol_type = other DNA
aaggctttggctgatggggctg

SEQ ID NO: 63331 - DNA, 22 bp, synthetic construct
  misc_feature 1..22: note = chemically synthesized
  source 1..22: mol_type = other DNA
tggctgatggggctggctcccc

SEQ ID NO: 63332 - DNA, 22 bp, synthetic construct
  misc_feature 1..22: note = chemically synthesized
  source 1..22: mol_type = other DNA
ggctgatggggctggctcccct

SEQ ID NO: 63333 - DNA, 22 bp, synthetic construct
  misc_feature 1..22: note = chemically synthesized
  source 1..22: mol_type = other DNA
gctgatggggctggctcccctc

SEQ ID NO: 63334 - DNA, 22 bp, synthetic construct
  misc_feature 1..22: note = chemically synthesized
  source 1..22: mol_type = other DNA
atggggctggctcccctctgtc

SEQ ID NO: 63335 - DNA, 22 bp, synthetic construct
  misc_feature 1..22: note = chemically synthesized
  source 1..22: mol_type = other DNA
gctcccctctgtccatcttcct

SEQ ID NO: 63336 - DNA, 22 bp, synthetic construct
  misc_feature 1..22: note = chemically synthesized
  source 1..22: mol_type = other DNA
ccctctgtccatcttcctgaca

SEQ ID NO: 63337 - DNA, 22 bp, synthetic construct
  misc_feature 1..22: note = chemically synthesized
  source 1..22: mol_type = other DNA
tgtccatcttcctgacaagcgc

SEQ ID NO: 63338 - DNA, 22 bp, synthetic construct
  misc_feature 1..22: note = chemically synthesized
  source 1..22: mol_type = other DNA
tccatcttcctgacaagcgcct

SEQ ID NO: 63339 - DNA, 22 bp, synthetic construct
  misc_feature 1..22: note = chemically synthesized
  source 1..22: mol_type = other DNA
cctgacaagcgcctctccccct

SEQ ID NO: 63340 - DNA, 22 bp, synthetic construct
  misc_feature 1..22: note = chemically synthesized
  source 1..22: mol_type = other DNA
ctgacaagcgcctctccccctg

SEQ ID NO: 63341 - DNA, 22 bp, synthetic construct
  misc_feature 1..22: note = chemically synthesized
  source 1..22: mol_type = other DNA
acaagcgcctctccccctgctc

SEQ ID NO: 63342 - DNA, 22 bp, synthetic construct
  misc_feature 1..22: note = chemically synthesized
  source 1..22: mol_type = other DNA
tccccctgctcaggtgcaccca

SEQ ID NO: 63343 - DNA, 22 bp, synthetic construct
  misc_feature 1..22: note = chemically synthesized
  source 1..22: mol_type = other DNA
cccctgctcaggtgcacccaca

SEQ ID NO: 63344 - DNA, 22 bp, synthetic construct
  misc_feature 1..22: note = chemically synthesized
  source 1..22: mol_type = other DNA
ctcaggtgcacccacaactcag

SEQ ID NO: 63345 - DNA, 22 bp, synthetic construct
  misc_feature 1..22: note = chemically synthesized
  source 1..22: mol_type = other DNA
aggtgcacccacaactcagaac

SEQ ID NO: 63346 - DNA, 22 bp, synthetic construct
  misc_feature 1..22: note = chemically synthesized
  source 1..22: mol_type = other DNA
agaacagggaagagcatcgtca

SEQ ID NO: 63347 - DNA, 22 bp, synthetic construct
  misc_feature 1..22: note = chemically synthesized
  source 1..22: mol_type = other DNA
cacgtctgcctccagggctctc

SEQ ID NO: 63348 - DNA, 22 bp, synthetic construct
  misc_feature 1..22: note = chemically synthesized
  source 1..22: mol_type = other DNA
cctccagggctctctcctttct

SEQ ID NO: 63349 - DNA, 22 bp, synthetic construct
  misc_feature 1..22: note = chemically synthesized
  source 1..22: mol_type = other DNA
cagggctctctcctttctagta

SEQ ID NO: 63350 - DNA, 22 bp, synthetic construct
  misc_feature 1..22: note = chemically synthesized
  source 1..22: mol_type = other DNA
tctcctttctagtacacggctt

SEQ ID NO: 63351 - DNA, 22 bp, synthetic construct
  misc_feature 1..22: note = chemically synthesized
  source 1..22: mol_type = other DNA
tcctttctagtacacggcttga

SEQ ID NO: 63352 - DNA, 22 bp, synthetic construct
  misc_feature 1..22: note = chemically synthesized
  source 1..22: mol_type = other DNA
ctttctagtacacggcttgaag

SEQ ID NO: 63353 - DNA, 22 bp, synthetic construct
  misc_feature 1..22: note = chemically synthesized
  source 1..22: mol_type = other DNA
tctagtacacggcttgaagctc

SEQ ID NO: 63354 - DNA, 22 bp, synthetic construct
  misc_feature 1..22: note = chemically synthesized
  source 1..22: mol_type = other DNA
ctagtacacggcttgaagctcc

SEQ ID NO: 63355 - DNA, 22 bp, synthetic construct
  misc_feature 1..22: note = chemically synthesized
  source 1..22: mol_type = other DNA
tagtacacggcttgaagctcct

SEQ ID NO: 63356 - DNA, 22 bp, synthetic construct
  misc_feature 1..22: note = chemically synthesized
  source 1..22: mol_type = other DNA
gtacacggcttgaagctccttg

SEQ ID NO: 63357 - DNA, 22 bp, synthetic construct
  misc_feature 1..22: note = chemically synthesized
  source 1..22: mol_type = other DNA
gaagctccttgaggacacggac

SEQ ID NO: 63358 - DNA, 22 bp, synthetic construct
  misc_feature 1..22: note = chemically synthesized
  source 1..22: mol_type = other DNA
aagctccttgaggacacggacc

SEQ ID NO: 63359 - DNA, 22 bp, synthetic construct
  misc_feature 1..22: note = chemically synthesized
  source 1..22: mol_type = other DNA
cttgaggacacggaccctggca

SEQ ID NO: 63360 - DNA, 22 bp, synthetic construct
  misc_feature 1..22: note = chemically synthesized
  source 1..22: mol_type = other DNA
gaggacacggaccctggcagtg

SEQ ID NO: 63361 - DNA, 22 bp, synthetic construct
  misc_feature 1..22: note = chemically synthesized
  source 1..22: mol_type = other DNA
aggacacggaccctggcagtga

SEQ ID NO: 63362 - DNA, 22 bp, synthetic construct
  misc_feature 1..22: note = chemically synthesized
  source 1..22: mol_type = other DNA
gcagtgaccttcacagtgccca

SEQ ID NO: 63363 - DNA, 22 bp, synthetic construct
  misc_feature 1..22: note = chemically synthesized
  source 1..22: mol_type = other DNA
cacagtgcccagaccccaagat

SEQ ID NO: 63364 - DNA, 22 bp, synthetic construct
  misc_feature 1..22: note = chemically synthesized
  source 1..22: mol_type = other DNA
acagtgcccagaccccaagata

SEQ ID NO: 63365 - DNA, 22 bp, synthetic construct
  misc_feature 1..22: note = chemically synthesized
  source 1..22: mol_type = other DNA
atggaactgcagttgttcattg

SEQ ID NO: 63366 - DNA, 22 bp, synthetic construct
  misc_feature 1..22: note = chemically synthesized
  source 1..22: mol_type = other DNA
cagttgttcattggtcgccttt

SEQ ID NO: 63367 - DNA, 22 bp, synthetic construct
  misc_feature 1..22: note = chemically synthesized
  source 1..22: mol_type = other DNA
ttcattggtcgcctttagtttt

SEQ ID NO: 63368 - DNA, 22 bp, synthetic construct
  misc_feature 1..22: note = chemically synthesized
  source 1..22: mol_type = other DNA
attggtcgcctttagttttcca

SEQ ID NO: 63369 - DNA, 22 bp, synthetic construct
  misc_feature 1..22: note = chemically synthesized
  source 1..22: mol_type = other DNA
gtcgcctttagttttccaaaat

SEQ ID NO: 63370 - DNA, 22 bp, synthetic construct
  misc_feature 1..22: note = chemically synthesized
  source 1..22: mol_type = other DNA
tagttttccaaaataagtgtca

SEQ ID NO: 63371 - DNA, 22 bp, synthetic construct
  misc_feature 1..22: note = chemically synthesized
  source 1..22: mol_type = other DNA
agttttccaaaataagtgtcat

SEQ ID NO: 63372 - DNA, 22 bp, synthetic construct
  misc_feature 1..22: note = chemically synthesized
  source 1..22: mol_type = other DNA
gttttccaaaataagtgtcatc

SEQ ID NO: 63373 - DNA, 22 bp, synthetic construct
  misc_feature 1..22: note = chemically synthesized
  source 1..22: mol_type = other DNA
tccaaaataagtgtcatcttta

SEQ ID NO: 63374 - DNA, 22 bp, synthetic construct
  misc_feature 1..22: note = chemically synthesized
  source 1..22: mol_type = other DNA
ccaaaataagtgtcatctttag

SEQ ID NO: 63375 - DNA, 22 bp, synthetic construct
  misc_feature 1..22: note = chemically synthesized
  source 1..22: mol_type = other DNA
caaaataagtgtcatctttagc

SEQ ID NO: 63376 - DNA, 22 bp, synthetic construct
  misc_feature 1..22: note = chemically synthesized
  source 1..22: mol_type = other DNA
tagctgaaatcattcattaatt

SEQ ID NO: 63377 - DNA, 22 bp, synthetic construct
  misc_feature 1..22: note = chemically synthesized
  source 1..22: mol_type = other DNA
agctgaaatcattcattaattc

SEQ ID NO: 63378 - DNA, 22 bp, synthetic construct
  misc_feature 1..22: note = chemically synthesized
  source 1..22: mol_type = other DNA
gctgaaatcattcattaattca

SEQ ID NO: 63379 - DNA, 22 bp, synthetic construct
  misc_feature 1..22: note = chemically synthesized
  source 1..22: mol_type = other DNA
aaatcattcattaattcagaca

SEQ ID NO: 63380 - DNA, 22 bp, synthetic construct
  misc_feature 1..22: note = chemically synthesized
  source 1..22: mol_type = other DNA
attaattcagacaccaaatctc

SEQ ID NO: 63381 - DNA, 22 bp, synthetic construct
  misc_feature 1..22: note = chemically synthesized
  source 1..22: mol_type = other DNA
attcagacaccaaatctcacag

SEQ ID NO: 63382 - DNA, 22 bp, synthetic construct
  misc_feature 1..22: note = chemically synthesized
  source 1..22: mol_type = other DNA
agacaccaaatctcacagatcg

SEQ ID NO: 63383 - DNA, 22 bp, synthetic construct
  misc_feature 1..22: note = chemically synthesized
  source 1..22: mol_type = other DNA
acagatcgaaggagtcagaaat

SEQ ID NO: 63384 - DNA, 22 bp, synthetic construct
  misc_feature 1..22: note = chemically synthesized
  source 1..22: mol_type = other DNA
ctttgaaacaacttagcccaaa

SEQ ID NO: 63385 - DNA, 22 bp, synthetic construct
  misc_feature 1..22: note = chemically synthesized
  source 1..22: mol_type = other DNA
tgaaacaacttagcccaaacct

SEQ ID NO: 63386 - DNA, 22 bp, synthetic construct
  misc_feature 1..22: note = chemically synthesized
  source 1..22: mol_type = other DNA
gaaacaacttagcccaaacctt

SEQ ID NO: 63387 - DNA, 22 bp, synthetic construct
  misc_feature 1..22: note = chemically synthesized
  source 1..22: mol_type = other DNA
aaacaacttagcccaaaccttt

SEQ ID NO: 63388 - DNA, 22 bp, synthetic construct
  misc_feature 1..22: note = chemically synthesized
  source 1..22: mol_type = other DNA
agcccaaacctttctgtgtcag

SEQ ID NO: 63389 - DNA, 22 bp, synthetic construct
  misc_feature 1..22: note = chemically synthesized
  source 1..22: mol_type = other DNA
gcccaaacctttctgtgtcagt

SEQ ID NO: 63390 - DNA, 22 bp, synthetic construct
  misc_feature 1..22: note = chemically synthesized
  source 1..22: mol_type = other DNA
tctgtgtcagtatggataaatc

SEQ ID NO: 63391 - DNA, 22 bp, synthetic construct
  misc_feature 1..22: note = chemically synthesized
  source 1..22: mol_type = other DNA
ctgtgtcagtatggataaatca

SEQ ID NO: 63392 - DNA, 22 bp, synthetic construct
  misc_feature 1..22: note = chemically synthesized
  source 1..22: mol_type = other DNA
tgtgtcagtatggataaatcaa

SEQ ID NO: 63393 - DNA, 22 bp, synthetic construct
  misc_feature 1..22: note = chemically synthesized
  source 1..22: mol_type = other DNA
tgtcagtatggataaatcaagg

SEQ ID NO: 63394 - DNA, 22 bp, synthetic construct
  misc_feature 1..22: note = chemically synthesized
  source 1..22: mol_type = other DNA
gaaggtcttgggcaaagttgaa

SEQ ID NO: 63395 - DNA, 22 bp, synthetic construct
  misc_feature 1..22: note = chemically synthesized
  source 1..22: mol_type = other DNA
gggcaaagttgaaattcagggt

SEQ ID NO: 63396 - DNA, 22 bp, synthetic construct
  misc_feature 1..22: note = chemically synthesized
  source 1..22: mol_type = other DNA
ggcaaagttgaaattcagggtc

SEQ ID NO: 63397 - DNA, 22 bp, synthetic construct
  misc_feature 1..22: note = chemically synthesized
  source 1..22: mol_type = other DNA
aaattcagggtcagtgacacaa

SEQ ID NO: 63398 - DNA, 22 bp, synthetic construct
  misc_feature 1..22: note = chemically synthesized
  source 1..22: mol_type = other DNA
agggtcagtgacacaacctcaa

SEQ ID NO: 63399 - DNA, 22 bp, synthetic construct
  misc_feature 1..22: note = chemically synthesized
  source 1..22: mol_type = other DNA
aagggaggccccgaaagtgcca

SEQ ID NO: 63400 - DNA, 22 bp, synthetic construct
  misc_feature 1..22: note = chemically synthesized
  source 1..22: mol_type = other DNA
cacagcagtcccctgcctggct

SEQ ID NO: 63401 - DNA, 22 bp, synthetic construct
  misc_feature 1..22: note = chemically synthesized
  source 1..22: mol_type = other DNA
cctggctttgctgtttgaccac

SEQ ID NO: 63402 - DNA, 22 bp, synthetic construct
  misc_feature 1..22: note = chemically synthesized
  source 1..22: mol_type = other DNA
gctttgctgtttgaccacgtcc

SEQ ID NO: 63403 - DNA, 22 bp, synthetic construct
  misc_feature 1..22: note = chemically synthesized
  source 1..22: mol_type = other DNA
tgctgtttgaccacgtcccgtg

SEQ ID NO: 63404 - DNA, 22 bp, synthetic construct
  misc_feature 1..22: note = chemically synthesized
  source 1..22: mol_type = other DNA
gctgtttgaccacgtcccgtgt

SEQ ID NO: 63405 - DNA, 22 bp, synthetic construct
  misc_feature 1..22: note = chemically synthesized
  source 1..22: mol_type = other DNA
ctgtttgaccacgtcccgtgtc

SEQ ID NO: 63406 - DNA, 22 bp, synthetic construct
  misc_feature 1..22: note = chemically synthesized
  source 1..22: mol_type = other DNA
tttgaccacgtcccgtgtcagt

SEQ ID NO: 63407 - DNA, 22 bp, synthetic construct
  misc_feature 1..22: note = chemically synthesized
  source 1..22: mol_type = other DNA
gaccacgtcccgtgtcagtgaa

SEQ ID NO: 63408 - DNA, 22 bp, synthetic construct
  misc_feature 1..22: note = chemically synthesized
  source 1..22: mol_type = other DNA
accacgtcccgtgtcagtgaat

SEQ ID NO: 63409 - DNA, 22 bp, synthetic construct
  misc_feature 1..22: note = chemically synthesized
  source 1..22: mol_type = other DNA
caggagctcagcctgggtcttc

SEQ ID NO: 63410 - DNA, 22 bp, synthetic construct
  misc_feature 1..22: note = chemically synthesized
  source 1..22: mol_type = other DNA
aggagctcagcctgggtcttca

SEQ ID NO: 63411 - DNA, 22 bp, synthetic construct
  misc_feature 1..22: note = chemically synthesized
  source 1..22: mol_type = other DNA
agcctgggtcttcatttgtttc

SEQ ID NO: 63412 - DNA, 22 bp, synthetic construct
  misc_feature 1..22: note = chemically synthesized
  source 1..22: mol_type = other DNA
ggtcttcatttgtttccctcgg

SEQ ID NO: 63413 - DNA, 22 bp, synthetic construct
  misc_feature 1..22: note = chemically synthesized
  source 1..22: mol_type = other DNA
catttgtttccctcggcccctt

SEQ ID NO: 63414 - DNA, 22 bp, synthetic construct
  misc_feature 1..22: note = chemically synthesized
  source 1..22: mol_type = other DNA
atttgtttccctcggccccttc

SEQ ID NO: 63415 - DNA, 22 bp, synthetic construct
  misc_feature 1..22: note = chemically synthesized
  source 1..22: mol_type = other DNA
gtttccctcggccccttcctca

SEQ ID NO: 63416 - DNA, 22 bp, synthetic construct
  misc_feature 1..22: note = chemically synthesized
  source 1..22: mol_type = other DNA
tttccctcggccccttcctcag

SEQ ID NO: 63417 - DNA, 22 bp, synthetic construct
  misc_feature 1..22: note = chemically synthesized
  source 1..22: mol_type = other DNA
ccctcggccccttcctcagcct

SEQ ID NO: 63418 - DNA, 22 bp, synthetic construct
  misc_feature 1..22: note = chemically synthesized
  source 1..22: mol_type = other DNA
cctcggccccttcctcagcctc

SEQ ID NO: 63419 - DNA, 22 bp, synthetic construct
  misc_feature 1..22: note = chemically synthesized
  source 1..22: mol_type = other DNA
ggccccttcctcagcctcagga

SEQ ID NO: 63420 - DNA, 22 bp, synthetic construct
  misc_feature 1..22: note = chemically synthesized
  source 1..22: mol_type = other DNA
cctcagcctcaggacagagctg

SEQ ID NO: 63421 - DNA, 22 bp, synthetic construct
  misc_feature 1..22: note = chemically synthesized
  source 1..22: mol_type = other DNA
ctcagcctcaggacagagctgc

SEQ ID NO: 63422 - DNA, 22 bp, synthetic construct
  misc_feature 1..22: note = chemically synthesized
  source 1..22: mol_type = other DNA
agcctcaggacagagctgcagc

SEQ ID NO: 63423 - DNA, 22 bp, synthetic construct
  misc_feature 1..22: note = chemically synthesized
  source 1..22: mol_type = other DNA
aggacagagctgcagcccccac

SEQ ID NO: 63424 - DNA, 22 bp, synthetic construct
  misc_feature 1..22: note = chemically synthesized
  source 1..22: mol_type = other DNA
cagcccccacacattcttccct

SEQ ID NO: 63425 - DNA, 22 bp, synthetic construct
  misc_feature 1..22: note = chemically synthesized
  source 1..22: mol_type = other DNA
ttccctacagataccagggtgc

SEQ ID NO: 63426 - DNA, 22 bp, synthetic construct
  misc_feature 1..22: note = chemically synthesized
  source 1..22: mol_type = other DNA
ccctacagataccagggtgcaa

SEQ ID NO: 63427 - DNA, 22 bp, synthetic construct
  misc_feature 1..22: note = chemically synthesized
  source 1..22: mol_type = other DNA
cctacagataccagggtgcaac

SEQ ID NO: 63428 - DNA, 22 bp, synthetic construct
  misc_feature 1..22: note = chemically synthesized
  source 1..22: mol_type = other DNA
cagataccagggtgcaacaagg

SEQ ID NO: 63429 - DNA, 22 bp, synthetic construct
  misc_feature 1..22: note = chemically synthesized
  source 1..22: mol_type = other DNA
accttggagagcttcaggggtg

SEQ ID NO: 63430 - DNA, 22 bp, synthetic construct
  misc_feature 1..22: note = chemically synthesized
  source 1..22: mol_type = other DNA
ggagagcttcaggggtgcctcc

SEQ ID NO: 63431 - DNA, 22 bp, synthetic construct
  misc_feature 1..22: note = chemically synthesized
  source 1..22: mol_type = other DNA
gagagcttcaggggtgcctcct

SEQ ID NO: 63432 - DNA, 22 bp, synthetic construct
  misc_feature 1..22: note = chemically synthesized
  source 1..22: mol_type = other DNA
caggggtgcctcctctgtgacc

SEQ ID NO: 63433 - DNA, 22 bp, synthetic construct
  misc_feature 1..22: note = chemically synthesized
  source 1..22: mol_type = other DNA
aggggtgcctcctctgtgaccc

SEQ ID NO: 63434 - DNA, 22 bp, synthetic construct
  misc_feature 1..22: note = chemically synthesized
  source 1..22: mol_type = other DNA
ctctgtgaccccggagaggtca

SEQ ID NO: 63435 - DNA, 22 bp, synthetic construct
  misc_feature 1..22: note = chemically synthesized
  source 1..22: mol_type = other DNA
tgtgaccccggagaggtcagcc

SEQ ID NO: 63436 - DNA, 22 bp, synthetic construct
  misc_feature 1..22: note = chemically synthesized
  source 1..22: mol_type = other DNA
tgaccccggagaggtcagcccc

SEQ ID NO: 63437 - DNA, 22 bp, synthetic construct
  misc_feature 1..22: note = chemically synthesized
  source 1..22: mol_type = other DNA
ctgaagaccttagtgatgccca

SEQ ID NO: 63438 - DNA, 22 bp, synthetic construct
  misc_feature 1..22: note = chemically synthesized
  source 1..22: mol_type = other DNA
aagaccttagtgatgcccagtt

SEQ ID NO: 63439 - DNA, 22 bp, synthetic construct
  misc_feature 1..22: note = chemically synthesized
  source 1..22: mol_type = other DNA
agtgatgcccagttgacccagg

SEQ ID NO: 63440 - DNA, 22 bp, synthetic construct
  misc_feature 1..22: note = chemically synthesized
  source 1..22: mol_type = other DNA
gtgatgcccagttgacccagga

SEQ ID NO: 63441 - DNA, 22 bp, synthetic construct
  misc_feature 1..22: note = chemically synthesized
  source 1..22: mol_type = other DNA
acccaggacgctcttcagatca

SEQ ID NO: 63442 - DNA, 22 bp, synthetic construct
  misc_feature 1..22: note = chemically synthesized
  source 1..22: mol_type = other DNA
ttcagatcataggttccagtaa

SEQ ID NO: 63443 - DNA, 22 bp, synthetic construct
  misc_feature 1..22: note = chemically synthesized
  source 1..22: mol_type = other DNA
cagatcataggttccagtaatg

SEQ ID NO: 63444 - DNA, 22 bp, synthetic construct
  misc_feature 1..22: note = chemically synthesized
  source 1..22: mol_type = other DNA
agatcataggttccagtaatgg

SEQ ID NO: 63445 - DNA, 22 bp, synthetic construct
  misc_feature 1..22: note = chemically synthesized
  source 1..22: mol_type = other DNA
cagtaatggacagtttgggtaa

SEQ ID NO: 63446 - DNA, 22 bp, synthetic construct
  misc_feature 1..22: note = chemically synthesized
  source 1..22: mol_type = other DNA
gggtaaatgtaagctggcagac

SEQ ID NO: 63447 - DNA, 22 bp, synthetic construct
  misc_feature 1..22: note = chemically synthesized
  source 1..22: mol_type = other DNA
ggtaaatgtaagctggcagacc

SEQ ID NO: 63448 - DNA, 22 bp, synthetic construct
  misc_feature 1..22: note = chemically synthesized
  source 1..22: mol_type = other DNA
gcagacctgtcgtgcagaaaag

SEQ ID NO: 63449 - DNA, 22 bp, synthetic construct
  misc_feature 1..22: note = chemically synthesized
  source 1..22: mol_type = other DNA
tcgtgcagaaaagaaattcaag

SEQ ID NO: 63450 - DNA, 22 bp, synthetic construct
  misc_feature 1..22: note = chemically synthesized
  source 1..22: mol_type = other DNA
aaggcatggcacagcattcctc

SEQ ID NO: 63451 - DNA, 22 bp, synthetic construct
  misc_feature 1..22: note = chemically synthesized
  source 1..22: mol_type = other DNA
ctcttgttcttctgggacccac

SEQ ID NO: 63452 - DNA, 22 bp, synthetic construct
  misc_feature 1..22: note = chemically synthesized
  source 1..22: mol_type = other DNA
ttgttcttctgggacccaccac

SEQ ID NO: 63453 - DNA, 22 bp, synthetic construct
  misc_feature 1..22: note = chemically synthesized
  source 1..22: mol_type = other DNA
gttcttctgggacccaccacag

SEQ ID NO: 63454 - DNA, 22 bp, synthetic construct
  misc_feature 1..22: note = chemically synthesized
  source 1..22: mol_type = other DNA
ttcttctgggacccaccacagt

SEQ ID NO: 63455 - DNA, 22 bp, synthetic construct
  misc_feature 1..22: note = chemically synthesized
  source 1..22: mol_type = other DNA
ttctgggacccaccacagtgca

SEQ ID NO: 63456 - DNA, 22 bp, synthetic construct
  misc_feature 1..22: note = chemically synthesized
  source 1..22: mol_type = other DNA
ctgggacccaccacagtgcaag

SEQ ID NO: 63457 - DNA, 22 bp, synthetic construct
  misc_feature 1..22: note = chemically synthesized
  source 1..22: mol_type = other DNA
tgggacccaccacagtgcaagt

SEQ ID NO: 63458 - DNA, 22 bp, synthetic construct
  misc_feature 1..22: note = chemically synthesized
  source 1..22: mol_type = other DNA
ggacccaccacagtgcaagtgt

SEQ ID NO: 63459 - DNA, 22 bp, synthetic construct
  misc_feature 1..22: note = chemically synthesized
  source 1..22: mol_type = other DNA
tcttttctgattatttctgcca

SEQ ID NO: 63460 - DNA, 22 bp, synthetic construct
  misc_feature 1..22: note = chemically synthesized
  source 1..22: mol_type = other DNA
cttttctgattatttctgccac

SEQ ID NO: 63461 - DNA, 22 bp, synthetic construct
  misc_feature 1..22: note = chemically synthesized
  source 1..22: mol_type = other DNA
ttttctgattatttctgccact

SEQ ID NO: 63462 - DNA, 22 bp, synthetic construct
  misc_feature 1..22: note = chemically synthesized
  source 1..22: mol_type = other DNA
ttctgattatttctgccactta

SEQ ID NO: 63463 - DNA, 22 bp, synthetic construct
  misc_feature 1..22: note = chemically synthesized
  source 1..22: mol_type = other DNA
tctgattatttctgccacttac

SEQ ID NO: 63464 - DNA, 22 bp, synthetic construct
  misc_feature 1..22: note = chemically synthesized
  source 1..22: mol_type = other DNA
ctgattatttctgccacttact

SEQ ID NO: 63465 - DNA, 22 bp, synthetic construct
  misc_feature 1..22: note = chemically synthesized
  source 1..22: mol_type = other DNA
tgattatttctgccacttactc

SEQ ID NO: 63466 - DNA, 22 bp, synthetic construct
  misc_feature 1..22: note = chemically synthesized
  source 1..22: mol_type = other DNA
attatttctgccacttactcct

SEQ ID NO: 63467 - DNA, 22 bp, synthetic construct
  misc_feature 1..22: note = chemically synthesized
  source 1..22: mol_type = other DNA
tttctgccacttactcctgtgt

SEQ ID NO: 63468 - DNA, 22 bp, synthetic construct
  misc_feature 1..22: note = chemically synthesized
  source 1..22: mol_type = other DNA
ctgccacttactcctgtgtcct

SEQ ID NO: 63469 - DNA, 22 bp, synthetic construct
  misc_feature 1..22: note = chemically synthesized
  source 1..22: mol_type = other DNA
tgccacttactcctgtgtcctc

SEQ ID NO: 63470 - DNA, 22 bp, synthetic construct
  misc_feature 1..22: note = chemically synthesized
  source 1..22: mol_type = other DNA
ccacttactcctgtgtcctcca

SEQ ID NO: 63471 - DNA, 22 bp, synthetic construct
  misc_feature 1..22: note = chemically synthesized
  source 1..22: mol_type = other DNA
actcctgtgtcctccacccaca

SEQ ID NO: 63472 - DNA, 22 bp, synthetic construct
  misc_feature 1..22: note = chemically synthesized
  source 1..22: mol_type = other DNA
ctcctgtgtcctccacccacac

SEQ ID NO: 63473 - DNA, 22 bp, synthetic construct
  misc_feature 1..22: note = chemically synthesized
  source 1..22: mol_type = other DNA
ctgtgtcctccacccacactaa

SEQ ID NO: 63474 - DNA, 22 bp, synthetic construct
  misc_feature 1..22: note = chemically synthesized
  source 1..22: mol_type = other DNA
tgtcctccacccacactaagat

SEQ ID NO: 63475 - DNA, 22 bp, synthetic construct
  misc_feature 1..22: note = chemically synthesized
  source 1..22: mol_type = other DNA
cacccacactaagatgggaact

SEQ ID NO: 63476 - DNA, 22 bp, synthetic construct
  misc_feature 1..22: note = chemically synthesized
  source 1..22: mol_type = other DNA
agatgggaactcggctttggtt

SEQ ID NO: 63477 - DNA, 22 bp, synthetic construct
  misc_feature 1..22: note = chemically synthesized
  source 1..22: mol_type = other DNA
ggctttggtttgttctactttt

SEQ ID NO: 63478 - DNA, 22 bp, synthetic construct
  misc_feature 1..22: note = chemically synthesized
  source 1..22: mol_type = other DNA
tggtttgttctacttttagctc

SEQ ID NO: 63479 - DNA, 22 bp, synthetic construct
  misc_feature 1..22: note = chemically synthesized
  source 1..22: mol_type = other DNA
ggtttgttctacttttagctct

SEQ ID NO: 63480 - DNA, 22 bp, synthetic construct
  misc_feature 1..22: note = chemically synthesized
  source 1..22: mol_type = other DNA
gtttgttctacttttagctctt

SEQ ID NO: 63481 - DNA, 22 bp, synthetic construct
  misc_feature 1..22: note = chemically synthesized
  source 1..22: mol_type = other DNA
gttctacttttagctcttctac

SEQ ID NO: 63482 - DNA, 22 bp, synthetic construct
  misc_feature 1..22: note = chemically synthesized
  source 1..22: mol_type = other DNA
ttctacttttagctcttctaca

SEQ ID NO: 63483 - DNA, 22 bp, synthetic construct
  misc_feature 1..22: note = chemically synthesized
  source 1..22: mol_type = other DNA
tacttttagctcttctacattg

SEQ ID NO: 63484 - DNA, 22 bp, synthetic construct
  misc_feature 1..22: note = chemically synthesized
  source 1..22: mol_type = other DNA
cttttagctcttctacattgag

SEQ ID NO: 63485 - DNA, 22 bp, synthetic construct
  misc_feature 1..22: note = chemically synthesized
  source 1..22: mol_type = other DNA
ttagctcttctacattgagtca

SEQ ID NO: 63486 - DNA, 22 bp, synthetic construct
  misc_feature 1..22: note = chemically synthesized
  source 1..22: mol_type = other DNA
tagctcttctacattgagtcaa

SEQ ID NO: 63487 - DNA, 22 bp, synthetic construct
  misc_feature 1..22: note = chemically synthesized
  source 1..22: mol_type = other DNA
agctcttctacattgagtcaaa

SEQ ID NO: 63488 - DNA, 22 bp, synthetic construct
  misc_feature 1..22: note = chemically synthesized
  source 1..22: mol_type = other DNA
gctcttctacattgagtcaaag

SEQ ID NO: 63489 - DNA, 22 bp, synthetic construct
  misc_feature 1..22: note = chemically synthesized
  source 1..22: mol_type = other DNA
ttctacattgagtcaaagaatg

SEQ ID NO: 63490 - DNA, 22 bp, synthetic construct
  misc_feature 1..22: note = chemically synthesized
  source 1..22: mol_type = other DNA
ctacattgagtcaaagaatgtt

SEQ ID NO: 63491 - DNA, 22 bp, synthetic construct
  misc_feature 1..22: note = chemically synthesized
  source 1..22: mol_type = other DNA
tacattgagtcaaagaatgtta

SEQ ID NO: 63492 - DNA, 22 bp, synthetic construct
  misc_feature 1..22: note = chemically synthesized
  source 1..22: mol_type = other DNA
cattgagtcaaagaatgttaac

SEQ ID NO: 63493 - DNA, 22 bp, synthetic construct
  misc_feature 1..22: note = chemically synthesized
  source 1..22: mol_type = other DNA
agtcaaagaatgttaacatcga

SEQ ID NO: 63494 - DNA, 22 bp, synthetic construct
  misc_feature 1..22: note = chemically synthesized
  source 1..22: mol_type = other DNA
acatcgaatgaatcacaaaagc

SEQ ID NO: 63495 - DNA, 22 bp, synthetic construct
  misc_feature 1..22: note = chemically synthesized
  source 1..22: mol_type = other DNA
gaaatgccacctcctctgatat

SEQ ID NO: 63496 - DNA, 22 bp, synthetic construct
  misc_feature 1..22: note = chemically synthesized
  source 1..22: mol_type = other DNA
aaatgccacctcctctgatatt

SEQ ID NO: 63497 - DNA, 22 bp, synthetic construct
  misc_feature 1..22: note = chemically synthesized
  source 1..22: mol_type = other DNA
ctctgatattctaggtgtcctg

SEQ ID NO: 63498 - DNA, 22 bp, synthetic construct
  misc_feature 1..22: note = chemically synthesized
  source 1..22: mol_type = other DNA
tgatattctaggtgtcctggaa

SEQ ID NO: 63499 - DNA, 22 bp, synthetic construct
  misc_feature 1..22: note = chemically synthesized
  source 1..22: mol_type = other DNA
atattctaggtgtcctggaagc

SEQ ID NO: 63500 - DNA, 22 bp, synthetic construct
  misc_feature 1..22: note = chemically synthesized
  source 1..22: mol_type = other DNA
taggtgtcctggaagcctgtct

SEQ ID NO: 63501 - DNA, 22 bp, synthetic construct
  misc_feature 1..22: note = chemically synthesized
  source 1..22: mol_type = other DNA
ggtgtcctggaagcctgtctca

SEQ ID NO: 63502 - DNA, 22 bp, synthetic construct
  misc_feature 1..22: note = chemically synthesized
  source 1..22: mol_type = other DNA
gaagcctgtctcatcttgccct

SEQ ID NO: 63503 - DNA, 22 bp, synthetic construct
  misc_feature 1..22: note = chemically synthesized
  source 1..22: mol_type = other DNA
tctcatcttgccctgtagtgtt

SEQ ID NO: 63504 - DNA, 22 bp, synthetic construct
  misc_feature 1..22: note = chemically synthesized
  source 1..22: mol_type = other DNA
atcttgccctgtagtgttgggt

SEQ ID NO: 63505 - DNA, 22 bp, synthetic construct
  misc_feature 1..22: note = chemically synthesized
  source 1..22: mol_type = other DNA
gccctgtagtgttgggtcacct

SEQ ID NO: 63506 - DNA, 22 bp, synthetic construct
  misc_feature 1..22: note = chemically synthesized
  source 1..22: mol_type = other DNA
ccctgtagtgttgggtcacctg

SEQ ID NO: 63507 - DNA, 22 bp, synthetic construct
  misc_feature 1..22: note = chemically synthesized
  source 1..22: mol_type = other DNA
tagtgttgggtcacctggcccc

SEQ ID NO: 63508 - DNA, 22 bp, synthetic construct
  misc_feature 1..22: note = chemically synthesized
  source 1..22: mol_type = other DNA
ggtcacctggcccccagcctgt

SEQ ID NO: 63509 - DNA, 22 bp, synthetic construct
  misc_feature 1..22: note = chemically synthesized
  source 1..22: mol_type = other DNA
gcccccagcctgtaacatcccc

SEQ ID NO: 63510 - DNA, 22 bp, synthetic construct
  misc_feature 1..22: note = chemically synthesized
  source 1..22: mol_type = other DNA
taacatccccagggccctacac

SEQ ID NO: 63511 - DNA, 22 bp, synthetic construct
  misc_feature 1..22: note = chemically synthesized
  source 1..22: mol_type = other DNA
cacccagagaaacacggggctg

SEQ ID NO: 63512 - DNA, 22 bp, synthetic construct
  misc_feature 1..22: note = chemically synthesized
  source 1..22: mol_type = other DNA
gtggcagtgcccagtgacaacc

SEQ ID NO: 63513 - DNA, 22 bp, synthetic construct
  misc_feature 1..22: note = chemically synthesized
  source 1..22: mol_type = other DNA
agtggataagagaagagtgacc

SEQ ID NO: 63514 - DNA, 22 bp, synthetic construct
  misc_feature 1..22: note = chemically synthesized
  source 1..22: mol_type = other DNA
gtggataagagaagagtgacca

SEQ ID NO: 63515 - DNA, 22 bp, synthetic construct
  misc_feature 1..22: note = chemically synthesized
  source 1..22: mol_type = other DNA
agtgctcctctctggttttcca

SEQ ID NO: 63516 - DNA, 22 bp, synthetic construct
  misc_feature 1..22: note = chemically synthesized
  source 1..22: mol_type = other DNA
ctctctggttttccatggggag

SEQ ID NO: 63517 - DNA, 22 bp, synthetic construct
  misc_feature 1..22: note = chemically synthesized
  source 1..22: mol_type = other DNA
tctggttttccatggggagaca

SEQ ID NO: 63518 - DNA, 22 bp, synthetic construct
  misc_feature 1..22: note = chemically synthesized
  source 1..22: mol_type = other DNA
tggttttccatggggagacaat

SEQ ID NO: 63519 - DNA, 22 bp, synthetic construct
  misc_feature 1..22: note = chemically synthesized
  source 1..22: mol_type = other DNA
gttttccatggggagacaatgc

SEQ ID NO: 63520 - DNA, 22 bp, synthetic construct
  misc_feature 1..22: note = chemically synthesized
  source 1..22: mol_type = other DNA
tccatggggagacaatgccacc

SEQ ID NO: 63521 - DNA, 22 bp, synthetic construct
  misc_feature 1..22: note = chemically synthesized
  source 1..22: mol_type = other DNA
ccatggggagacaatgccaccc

SEQ ID NO: 63522 - DNA, 22 bp, synthetic construct
  misc_feature 1..22: note = chemically synthesized
  source 1..22: mol_type = other DNA
catggggagacaatgccaccct

SEQ ID NO: 63523 - DNA, 22 bp, synthetic construct
  misc_feature 1..22: note = chemically synthesized
  source 1..22: mol_type = other DNA
agcagggtctggtgtgagcggg

SEQ ID NO: 63524 - DNA, 22 bp, synthetic construct
  misc_feature 1..22: note = chemically synthesized
  source 1..22: mol_type = other DNA
gtgtgagcgggcagcttggctc

SEQ ID NO: 63525 - DNA, 22 bp, synthetic construct
  misc_feature 1..22: note = chemically synthesized
  source 1..22: mol_type = other DNA
ggctctgggctctctgatccgt

SEQ ID NO: 63526 - DNA, 22 bp, synthetic construct
  misc_feature 1..22: note = chemically synthesized
  source 1..22: mol_type = other DNA
gctctgggctctctgatccgtt

SEQ ID NO: 63527 - DNA, 22 bp, synthetic construct
  misc_feature 1..22: note = chemically synthesized
  source 1..22: mol_type = other DNA
tgggctctctgatccgttaccc

SEQ ID NO: 63528 - DNA, 22 bp, synthetic construct
  misc_feature 1..22: note = chemically synthesized
  source 1..22: mol_type = other DNA
ggctctctgatccgttaccctc

SEQ ID NO: 63529 - DNA, 22 bp, synthetic construct
  misc_feature 1..22: note = chemically synthesized
  source 1..22: mol_type = other DNA
tctgatccgttaccctctcagc

SEQ ID NO: 63530 - DNA, 22 bp, synthetic construct
  misc_feature 1..22: note = chemically synthesized
  source 1..22: mol_type = other DNA
tgatccgttaccctctcagcct

SEQ ID NO: 63531 - DNA, 22 bp, synthetic construct
  misc_feature 1..22: note = chemically synthesized
  source 1..22: mol_type = other DNA
atccgttaccctctcagcctct

SEQ ID NO: 63532 - DNA, 22 bp, synthetic construct
  misc_feature 1..22: note = chemically synthesized
  source 1..22: mol_type = other DNA
ccctctcagcctctttgttctt

SEQ ID NO: 63533 - DNA, 22 bp, synthetic construct
  misc_feature 1..22: note = chemically synthesized
  source 1..22: mol_type = other DNA
tcagcctctttgttctttctca

SEQ ID NO: 63534 - DNA, 22 bp, synthetic construct
  misc_feature 1..22: note = chemically synthesized
  source 1..22: mol_type = other DNA
agcctctttgttctttctcaac

SEQ ID NO: 63535 - DNA, 22 bp, synthetic construct
  misc_feature 1..22: note = chemically synthesized
  source 1..22: mol_type = other DNA
tttgttctttctcaacccctgg

SEQ ID NO: 63536 - DNA, 22 bp, synthetic construct
  misc_feature 1..22: note = chemically synthesized
  source 1..22: mol_type = other DNA
tgttctttctcaacccctggag

SEQ ID NO: 63537 - DNA, 22 bp, synthetic construct
  misc_feature 1..22: note = chemically synthesized
  source 1..22: mol_type = other DNA
gttctttctcaacccctggagc

SEQ ID NO: 63538 - DNA, 22 bp, synthetic construct
  misc_feature 1..22: note = chemically synthesized
  source 1..22: mol_type = other DNA
ttctttctcaacccctggagca

SEQ ID NO: 63539 - DNA, 22 bp, synthetic construct
  misc_feature 1..22: note = chemically synthesized
  source 1..22: mol_type = other DNA
tttctcaacccctggagcagag

SEQ ID NO: 63540 - DNA, 22 bp, synthetic construct
  misc_feature 1..22: note = chemically synthesized
  source 1..22: mol_type = other DNA
tctcaacccctggagcagagac

SEQ ID NO: 63541 - DNA, 22 bp, synthetic construct
  misc_feature 1..22: note = chemically synthesized
  source 1..22: mol_type = other DNA
ctcaacccctggagcagagacc

SEQ ID NO: 63542 - DNA, 22 bp, synthetic construct
  misc_feature 1..22: note = chemically synthesized
  source 1..22: mol_type = other DNA
tcaacccctggagcagagacct

SEQ ID NO: 63543 - DNA, 22 bp, synthetic construct
  misc_feature 1..22: note = chemically synthesized
  source 1..22: mol_type = other DNA
aacccctggagcagagacctca

SEQ ID NO: 63544 - DNA, 22 bp, synthetic construct
  misc_feature 1..22: note = chemically synthesized
  source 1..22: mol_type = other DNA
gagcagagacctcaggaggtgc

SEQ ID NO: 63545 - DNA, 22 bp, synthetic construct
  misc_feature 1..22: note = chemically synthesized
  source 1..22: mol_type = other DNA
aggaggtgctggcatggaacag

SEQ ID NO: 63546 - DNA, 22 bp, synthetic construct
  misc_feature 1..22: note = chemically synthesized
  source 1..22: mol_type = other DNA
gcatggaacagagaaattccag

SEQ ID NO: 63547 - DNA, 22 bp, synthetic construct
  misc_feature 1..22: note = chemically synthesized
  source 1..22: mol_type = other DNA
cagcctcgattcctattatgaa

SEQ ID NO: 63548 - DNA, 22 bp, synthetic construct
  misc_feature 1..22: note = chemically synthesized
  source 1..22: mol_type = other DNA
gattcctattatgaacccgaca

SEQ ID NO: 63549 - DNA, 22 bp, synthetic construct
  misc_feature 1..22: note = chemically synthesized
  source 1..22: mol_type = other DNA
ctattatgaacccgacaccttt

SEQ ID NO: 63550 - DNA, 22 bp, synthetic construct
  misc_feature 1..22: note = chemically synthesized
  source 1..22: mol_type = other DNA
ttatgaacccgacaccttttgt

SEQ ID NO: 63551 - DNA, 22 bp, synthetic construct
  misc_feature 1..22: note = chemically synthesized
  source 1..22: mol_type = other DNA
tgaacccgacaccttttgtatt

SEQ ID NO: 63552 - DNA, 22 bp, synthetic construct
  misc_feature 1..22: note = chemically synthesized
  source 1..22: mol_type = other DNA
ttgtattttcatcttggtttta

SEQ ID NO: 63553 - DNA, 22 bp, synthetic construct
  misc_feature 1..22: note = chemically synthesized
  source 1..22: mol_type = other DNA
tgtattttcatcttggttttac

SEQ ID NO: 63554 - DNA, 22 bp, synthetic construct
  misc_feature 1..22: note = chemically synthesized
  source 1..22: mol_type = other DNA
gtattttcatcttggttttaca

SEQ ID NO: 63555 - DNA, 22 bp, synthetic construct
  misc_feature 1..22: note = chemically synthesized
  source 1..22: mol_type = other DNA
tattttcatcttggttttacag

SEQ ID NO: 63556 - DNA, 22 bp, synthetic construct
  misc_feature 1..22: note = chemically synthesized
  source 1..22: mol_type = other DNA
tcatcttggttttacagtgtac

SEQ ID NO: 63557 - DNA, 22 bp, synthetic construct
  misc_feature 1..22: note = chemically synthesized
  source 1..22: mol_type = other DNA
catcttggttttacagtgtaca

SEQ ID NO: 63558 - DNA, 22 bp, synthetic construct
  misc_feature 1..22: note = chemically synthesized
  source 1..22: mol_type = other DNA
atcttggttttacagtgtacaa

SEQ ID NO: 63559 - DNA, 22 bp, synthetic construct
  misc_feature 1..22: note = chemically synthesized
  source 1..22: mol_type = other DNA
ggttttacagtgtacaaaacga

SEQ ID NO: 63560 - DNA, 22 bp, synthetic construct
  misc_feature 1..22: note = chemically synthesized
  source 1..22: mol_type = other DNA
gttttacagtgtacaaaacgaa

SEQ ID NO: 63561 - DNA, 22 bp, synthetic construct
  misc_feature 1..22: note = chemically synthesized
  source 1..22: mol_type = other DNA
tacagtgtacaaaacgaactag

SEQ ID NO: 63562 - DNA, 22 bp, synthetic construct
  misc_feature 1..22: note = chemically synthesized
  source 1..22: mol_type = other DNA
acagtgtacaaaacgaactaga

SEQ ID NO: 63563 - DNA, 22 bp, synthetic construct
  misc_feature 1..22: note = chemically synthesized
  source 1..22: mol_type = other DNA
cagtgtacaaaacgaactagat

SEQ ID NO: 63564 - DNA, 22 bp, synthetic construct
  misc_feature 1..22: note = chemically synthesized
  source 1..22: mol_type = other DNA
gatcagcagggcatgggcataa

SEQ ID NO: 63565 - DNA, 22 bp, synthetic construct
  misc_feature 1..22: note = chemically synthesized
  source 1..22: mol_type = other DNA
atgtgtggctcatgtttaagta

SEQ ID NO: 63566 - DNA, 22 bp, synthetic construct
  misc_feature 1..22: note = chemically synthesized
  source 1..22: mol_type = other DNA
atgtttaagtatcacttactac

SEQ ID NO: 63567 - DNA, 22 bp, synthetic construct
  misc_feature 1..22: note = chemically synthesized
  source 1..22: mol_type = other DNA
aagtatcacttactacaggaca

SEQ ID NO: 63568 - DNA, 22 bp, synthetic construct
  misc_feature 1..22: note = chemically synthesized
  source 1..22: mol_type = other DNA
agtatcacttactacaggacac

SEQ ID NO: 63569 - DNA, 22 bp, synthetic construct
  misc_feature 1..22: note = chemically synthesized
  source 1..22: mol_type = other DNA
actacaggacacccaatctaac

SEQ ID NO: 63570 - DNA, 22 bp, synthetic construct
  misc_feature 1..22: note = chemically synthesized
  source 1..22: mol_type = other DNA
ctacaggacacccaatctaaca

SEQ ID NO: 63571 - DNA, 22 bp, synthetic construct
  misc_feature 1..22: note = chemically synthesized
  source 1..22: mol_type = other DNA
caggacacccaatctaacagca

SEQ ID NO: 63572 - DNA, 22 bp, synthetic construct
  misc_feature 1..22: note = chemically synthesized
  source 1..22: mol_type = other DNA
acagcaccgataaagtgacaga

SEQ ID NO: 63573 - DNA, 22 bp, synthetic construct
  misc_feature 1..22: note = chemically synthesized
  source 1..22: mol_type = other DNA
ctgcgaacatggcctggctgtt

SEQ ID NO: 63574 - DNA, 22 bp, synthetic construct
  misc_feature 1..22: note = chemically synthesized
  source 1..22: mol_type = other DNA
tgcgaacatggcctggctgttc

SEQ ID NO: 63575 - DNA, 22 bp, synthetic construct
  misc_feature 1..22: note = chemically synthesized
  source 1..22: mol_type = other DNA
cgaacatggcctggctgttcca

SEQ ID NO: 63576 - DNA, 22 bp, synthetic construct
  misc_feature 1..22: note = chemically synthesized
  source 1..22: mol_type = other DNA
gctgttccaattccgaaccttg

SEQ ID NO: 63577 - DNA, 22 bp, synthetic construct
  misc_feature 1..22: note = chemically synthesized
  source 1..22: mol_type = other DNA
ttccaattccgaaccttgcttt

SEQ ID NO: 63578 - DNA, 22 bp, synthetic construct
  misc_feature 1..22: note = chemically synthesized
  source 1..22: mol_type = other DNA
caattccgaaccttgcttttct

SEQ ID NO: 63579 - DNA, 22 bp, synthetic construct
  misc_feature 1..22: note = chemically synthesized
  source 1..22: mol_type = other DNA
cgaaccttgcttttctgggcct

SEQ ID NO: 63580 - DNA, 22 bp, synthetic construct
  misc_feature 1..22: note = chemically synthesized
  source 1..22: mol_type = other DNA
gcttttctgggccttgccacac

SEQ ID NO: 63581 - DNA, 22 bp, synthetic construct
  misc_feature 1..22: note = chemically synthesized
  source 1..22: mol_type = other DNA
cttttctgggccttgccacaca

SEQ ID NO: 63582 - DNA, 22 bp, synthetic construct
  misc_feature 1..22: note = chemically synthesized
  source 1..22: mol_type = other DNA
ttctgggccttgccacacaggc

SEQ ID NO: 63583 - DNA, 22 bp, synthetic construct
  misc_feature 1..22: note = chemically synthesized
  source 1..22: mol_type = other DNA
tctgggccttgccacacaggct

SEQ ID NO: 63584 - DNA, 22 bp, synthetic construct
  misc_feature 1..22: note = chemically synthesized
  source 1..22: mol_type = other DNA
ctgggccttgccacacaggctc

SEQ ID NO: 63585 - DNA, 22 bp, synthetic construct
  misc_feature 1..22: note = chemically synthesized
  source 1..22: mol_type = other DNA
tgggccttgccacacaggctct

SEQ ID NO: 63586 - DNA, 22 bp, synthetic construct
  misc_feature 1..22: note = chemically synthesized
  source 1..22: mol_type = other DNA
ggccttgccacacaggctcttc

SEQ ID NO: 63587 - DNA, 22 bp, synthetic construct
  misc_feature 1..22: note = chemically synthesized
  source 1..22: mol_type = other DNA
gccacacaggctcttcccccgt

SEQ ID NO: 63588 - DNA, 22 bp, synthetic construct
  misc_feature 1..22: note = chemically synthesized
  source 1..22: mol_type = other DNA
ccacacaggctcttcccccgtc

SEQ ID NO: 63589 - DNA, 22 bp, synthetic construct
  misc_feature 1..22: note = chemically synthesized
  source 1..22: mol_type = other DNA
ttcccccgtccccccagggaca

SEQ ID NO: 63590 - DNA, 22 bp, synthetic construct
  misc_feature 1..22: note = chemically synthesized
  source 1..22: mol_type = other DNA
cccccgtccccccagggacatt

SEQ ID NO: 63591 - DNA, 22 bp, synthetic construct
  misc_feature 1..22: note = chemically synthesized
  source 1..22: mol_type = other DNA
ccccgtccccccagggacattc

SEQ ID NO: 63592 - DNA, 22 bp, synthetic construct
  misc_feature 1..22: note = chemically synthesized
  source 1..22: mol_type = other DNA
tacccttgaactccacactcca

SEQ ID NO: 63593 - DNA, 22 bp, synthetic construct
  misc_feature 1..22: note = chemically synthesized
  source 1..22: mol_type = other DNA
cccttgaactccacactccact

SEQ ID NO: 63594 - DNA, 22 bp, synthetic construct
  misc_feature 1..22: note = chemically synthesized
  source 1..22: mol_type = other DNA
gaactccacactccactgctgc

SEQ ID NO: 63595 - DNA, 22 bp, synthetic construct
  misc_feature 1..22: note = chemically synthesized
  source 1..22: mol_type = other DNA
aactccacactccactgctgcc

SEQ ID NO: 63596 - DNA, 22 bp, synthetic construct
  misc_feature 1..22: note = chemically synthesized
  source 1..22: mol_type = other DNA
cacactccactgctgcctttgc

SEQ ID NO: 63597 - DNA, 22 bp, synthetic construct
  misc_feature 1..22: note = chemically synthesized
  source 1..22: mol_type = other DNA
cactgctgcctttgccaggaag

SEQ ID NO: 63598 - DNA, 22 bp, synthetic construct
  misc_feature 1..22: note = chemically synthesized
  source 1..22: mol_type = other DNA
ctgcctttgccaggaagcccat

SEQ ID NO: 63599 - DNA, 22 bp, synthetic construct
  misc_feature 1..22: note = chemically synthesized
  source 1..22: mol_type = other DNA
cctttgccaggaagcccatctg

SEQ ID NO: 63600 - DNA, 22 bp, synthetic construct
  misc_feature 1..22: note = chemically synthesized
  source 1..22: mol_type = other DNA
tgccaggaagcccatctgttcc

SEQ ID NO: 63601 - DNA, 22 bp, synthetic construct
  misc_feature 1..22: note = chemically synthesized
  source 1..22: mol_type = other DNA
gccaggaagcccatctgttcct

SEQ ID NO: 63602 - DNA, 22 bp, synthetic construct
  misc_feature 1..22: note = chemically synthesized
  source 1..22: mol_type = other DNA
ccaggaagcccatctgttcctt

SEQ ID NO: 63603 - DNA, 22 bp, synthetic construct
  misc_feature 1..22: note = chemically synthesized
  source 1..22: mol_type = other DNA
ttcctttttggttctgccagaa

SEQ ID NO: 63604 - DNA, 22 bp, synthetic construct
  misc_feature 1..22: note = chemically synthesized
  source 1..22: mol_type = other DNA
ctttttggttctgccagaacgt

SEQ ID NO: 63605 - DNA, 22 bp, synthetic construct
  misc_feature 1..22: note = chemically synthesized
  source 1..22: mol_type = other DNA
tttggttctgccagaacgtgtg

SEQ ID NO: 63606 - DNA, 22 bp, synthetic construct
  misc_feature 1..22: note = chemically synthesized
  source 1..22: mol_type = other DNA
ttggttctgccagaacgtgtgg

SEQ ID NO: 63607 - DNA, 22 bp, synthetic construct
  misc_feature 1..22: note = chemically synthesized
  source 1..22: mol_type = other DNA
tggttctgccagaacgtgtggt

SEQ ID NO: 63608 - DNA, 22 bp, synthetic construct
  misc_feature 1..22: note = chemically synthesized
  source 1..22: mol_type = other DNA
ggttctgccagaacgtgtggtg

SEQ ID NO: 63609 - DNA, 22 bp, synthetic construct
  misc_feature 1..22: note = chemically synthesized
  source 1..22: mol_type = other DNA
gttctgccagaacgtgtggtgg

SEQ ID NO: 63610 - DNA, 22 bp, synthetic construct
  misc_feature 1..22: note = chemically synthesized
  source 1..22: mol_type = other DNA
tgccagaacgtgtggtggtgct

SEQ ID NO: 63611 - DNA, 22 bp, synthetic construct
  misc_feature 1..22: note = chemically synthesized
  source 1..22: mol_type = other DNA
ccagaacgtgtggtggtgctgc

SEQ ID NO: 63612 - DNA, 22 bp, synthetic construct
  misc_feature 1..22: note = chemically synthesized
  source 1..22: mol_type = other DNA
ctgtccctgccctgggcactgg

SEQ ID NO: 63613 - DNA, 22 bp, synthetic construct
  misc_feature 1..22: note = chemically synthesized
  source 1..22: mol_type = other DNA
tccctgccctgggcactggata

SEQ ID NO: 63614 - DNA, 22 bp, synthetic construct
  misc_feature 1..22: note = chemically synthesized
  source 1..22: mol_type = other DNA
ccctgggcactggatattggga

SEQ ID NO: 63615 - DNA, 22 bp, synthetic construct
  misc_feature 1..22: note = chemically synthesized
  source 1..22: mol_type = other DNA
ggcactggatattgggaaggga

SEQ ID NO: 63616 - DNA, 22 bp, synthetic construct
  misc_feature 1..22: note = chemically synthesized
  source 1..22: mol_type = other DNA
gatattgggaagggacagtgtc

SEQ ID NO: 63617 - DNA, 22 bp, synthetic construct
  misc_feature 1..22: note = chemically synthesized
  source 1..22: mol_type = other DNA
ggaagggacagtgtccacactg

SEQ ID NO: 63618 - DNA, 22 bp, synthetic construct
  misc_feature 1..22: note = chemically synthesized
  source 1..22: mol_type = other DNA
gagtgggaagtccccagggacg

SEQ ID NO: 63619 - DNA, 22 bp, synthetic construct
  misc_feature 1..22: note = chemically synthesized
  source 1..22: mol_type = other DNA
tacctcctcacccctgggtact

SEQ ID NO: 63620 - DNA, 22 bp, synthetic construct
  misc_feature 1..22: note = chemically synthesized
  source 1..22: mol_type = other DNA
acctcctcacccctgggtactg

SEQ ID NO: 63621 - DNA, 22 bp, synthetic construct
  misc_feature 1..22: note = chemically synthesized
  source 1..22: mol_type = other DNA
cctcctcacccctgggtactgt

SEQ ID NO: 63622 - DNA, 22 bp, synthetic construct
  misc_feature 1..22: note = chemically synthesized
  source 1..22: mol_type = other DNA
ctcacccctgggtactgtcctc

SEQ ID NO: 63623 - DNA, 22 bp, synthetic construct
  misc_feature 1..22: note = chemically synthesized
  source 1..22: mol_type = other DNA
acccctgggtactgtcctcctc

SEQ ID NO: 63624 - DNA, 22 bp, synthetic construct
  misc_feature 1..22: note = chemically synthesized
  source 1..22: mol_type = other DNA
ggtactgtcctcctcatggagc

SEQ ID NO: 63625 - DNA, 22 bp, synthetic construct
  misc_feature 1..22: note = chemically synthesized
  source 1..22: mol_type = other DNA
tcctcctcatggagcatggatg

SEQ ID NO: 63626 - DNA, 22 bp, synthetic construct
  misc_feature 1..22: note = chemically synthesized
  source 1..22: mol_type = other DNA
ctcatggagcatggatggcgct

SEQ ID NO: 63627 - DNA, 22 bp, synthetic construct
  misc_feature 1..22: note = chemically synthesized
  source 1..22: mol_type = other DNA
atggagcatggatggcgctgcc

SEQ ID NO: 63628 - DNA, 22 bp, synthetic construct
  misc_feature 1..22: note = chemically synthesized
  source 1..22: mol_type = other DNA
cctgaactcagtggtggcctca

SEQ ID NO: 63629 - DNA, 22 bp, synthetic construct
  misc_feature 1..22: note = chemically synthesized
  source 1..22: mol_type = other DNA
aactcagtggtggcctcattct

SEQ ID NO: 63630 - DNA, 22 bp, synthetic construct
  misc_feature 1..22: note = chemically synthesized
  source 1..22: mol_type = other DNA
agtggtggcctcattctggaag

SEQ ID NO: 63631 - DNA, 22 bp, synthetic construct
  misc_feature 1..22: note = chemically synthesized
  source 1..22: mol_type = other DNA
attctggaagccaagtttatac

SEQ ID NO: 63632 - DNA, 22 bp, synthetic construct
  misc_feature 1..22: note = chemically synthesized
  source 1..22: mol_type = other DNA
tggaagccaagtttatacagag

SEQ ID NO: 63633 - DNA, 22 bp, synthetic construct
  misc_feature 1..22: note = chemically synthesized
  source 1..22: mol_type = other DNA
gaagccaagtttatacagagta

SEQ ID NO: 63634 - DNA, 22 bp, synthetic construct
  misc_feature 1..22: note = chemically synthesized
  source 1..22: mol_type = other DNA
atacagagtagcagtgacccag

SEQ ID NO: 63635 - DNA, 22 bp, synthetic construct
  misc_feature 1..22: note = chemically synthesized
  source 1..22: mol_type = other DNA
tacagagtagcagtgacccagg

SEQ ID NO: 63636 - DNA, 22 bp, synthetic construct
  misc_feature 1..22: note = chemically synthesized
  source 1..22: mol_type = other DNA
accctcctcagccctctggcca

SEQ ID NO: 63637 - DNA, 22 bp, synthetic construct
  misc_feature 1..22: note = chemically synthesized
  source 1..22: mol_type = other DNA
ctcagccctctggccagtcctg

SEQ ID NO: 63638 - DNA, 22 bp, synthetic construct
  misc_feature 1..22: note = chemically synthesized
  source 1..22: mol_type = other DNA
agccctctggccagtcctgatg

SEQ ID NO: 63639 - DNA, 22 bp, synthetic construct
  misc_feature 1..22: note = chemically synthesized
  source 1..22: mol_type = other DNA
tggccagtcctgatgggcctca

SEQ ID NO: 63640 - DNA, 22 bp, synthetic construct
  misc_feature 1..22: note = chemically synthesized
  source 1..22: mol_type = other DNA
gccagtcctgatgggcctcagt

SEQ ID NO: 63641 - DNA, 22 bp, synthetic construct
  misc_feature 1..22: note = chemically synthesized
  source 1..22: mol_type = other DNA
atgggcctcagtcccaacatgg

SEQ ID NO: 63642 - DNA, 22 bp, synthetic construct
  misc_feature 1..22: note = chemically synthesized
  source 1..22: mol_type = other DNA
agtcccaacatggctaagaggt

SEQ ID NO: 63643 - DNA, 22 bp, synthetic construct
  misc_feature 1..22: note = chemically synthesized
  source 1..22: mol_type = other DNA
agaggtgtgggcagcttcttgg

SEQ ID NO: 63644 - DNA, 22 bp, synthetic construct
  misc_feature 1..22: note = chemically synthesized
  source 1..22: mol_type = other DNA
cttggtcaccctcaggttgggg

SEQ ID NO: 63645 - DNA, 22 bp, synthetic construct
  misc_feature 1..22: note = chemically synthesized
  source 1..22: mol_type = other DNA
ttggtcaccctcaggttgggga

SEQ ID NO: 63646 - DNA, 22 bp, synthetic construct
  misc_feature 1..22: note = chemically synthesized
  source 1..22: mol_type = other DNA
ggtcaccctcaggttggggaat

SEQ ID NO: 63647 - DNA, 22 bp, synthetic construct
  misc_feature 1..22: note = chemically synthesized
  source 1..22: mol_type = other DNA
gtcaccctcaggttggggaatc

SEQ ID NO: 63648 - DNA, 22 bp, synthetic construct
  misc_feature 1..22: note = chemically synthesized
  source 1..22: mol_type = other DNA
aggttggggaatcaccttctgt

SEQ ID NO: 63649 - DNA, 22 bp, synthetic construct
  misc_feature 1..22: note = chemically synthesized
  source 1..22: mol_type = other DNA
gggaatcaccttctgtcttcat

SEQ ID NO: 63650 - DNA, 22 bp, synthetic construct
  misc_feature 1..22: note = chemically synthesized
  source 1..22: mol_type = other DNA
ctgtcttcattttccaggaact

SEQ ID NO: 63651 - DNA, 22 bp, synthetic construct
  misc_feature 1..22: note = chemically synthesized
  source 1..22: mol_type = other DNA
tgtcttcattttccaggaactt

SEQ ID NO: 63652 - DNA, 22 bp, synthetic construct
  misc_feature 1..22: note = chemically synthesized
  source 1..22: mol_type = other DNA
tcttcattttccaggaacttgg

SEQ ID NO: 63653 - DNA, 22 bp, synthetic construct
  misc_feature 1..22: note = chemically synthesized
  source 1..22: mol_type = other DNA
cattttccaggaacttggtgat

SEQ ID NO: 63654 - DNA, 22 bp, synthetic construct
  misc_feature 1..22: note = chemically synthesized
  source 1..22: mol_type = other DNA
attttccaggaacttggtgatg

SEQ ID NO: 63655 - DNA, 22 bp, synthetic construct
  misc_feature 1..22: note = chemically synthesized
  source 1..22: mol_type = other DNA
tccaggaacttggtgatgatat

SEQ ID NO: 63656 - DNA, 22 bp, synthetic construct
  misc_feature 1..22: note = chemically synthesized
  source 1..22: mol_type = other DNA
ccaggaacttggtgatgatatc

SEQ ID NO: 63657 - DNA, 22 bp, synthetic construct
  misc_feature 1..22: note = chemically synthesized
  source 1..22: mol_type = other DNA
caggaacttggtgatgatatcg

SEQ ID NO: 63658 - DNA, 22 bp, synthetic construct
  misc_feature 1..22: note = chemically synthesized
  source 1..22: mol_type = other DNA
ggtgatgatatcgtgggtgagt

SEQ ID NO: 63659 - DNA, 22 bp, synthetic construct
  misc_feature 1..22: note = chemically synthesized
  source 1..22: mol_type = other DNA
gtgatgatatcgtgggtgagtt

SEQ ID NO: 63660 - DNA, 22 bp, synthetic construct
  misc_feature 1..22: note = chemically synthesized
  source 1..22: mol_type = other DNA
attttccaggtgctgtagtttc

SEQ ID NO: 63661 - DNA, 22 bp, synthetic construct
  misc_feature 1..22: note = chemically synthesized
  source 1..22: mol_type = other DNA
tccaggtgctgtagtttcccct

SEQ ID NO: 63662 - DNA, 22 bp, synthetic construct
  misc_feature 1..22: note = chemically synthesized
  source 1..22: mol_type = other DNA
ccaggtgctgtagtttcccctc

SEQ ID NO: 63663 - DNA, 22 bp, synthetic construct
  misc_feature 1..22: note = chemically synthesized
  source 1..22: mol_type = other DNA
caggtgctgtagtttcccctca

SEQ ID NO: 63664 - DNA, 22 bp, synthetic construct
  misc_feature 1..22: note = chemically synthesized
  source 1..22: mol_type = other DNA
tagtttcccctcatcaggcagg

SEQ ID NO: 63665 - DNA, 22 bp, synthetic construct
  misc_feature 1..22: note = chemically synthesized
  source 1..22: mol_type = other DNA
cccctcatcaggcaggaagaag

SEQ ID NO: 63666 - DNA, 22 bp, synthetic construct
  misc_feature 1..22: note = chemically synthesized
  source 1..22: mol_type = other DNA
ccctcatcaggcaggaagaaga

SEQ ID NO: 63667 - DNA, 22 bp, synthetic construct
  misc_feature 1..22: note = chemically synthesized
  source 1..22: mol_type = other DNA
atcaggcaggaagaagatggcg

SEQ ID NO: 63668 - DNA, 22 bp, synthetic construct
  misc_feature 1..22: note = chemically synthesized
  source 1..22: mol_type = other DNA
cccaggtatttcatcagcagca

SEQ ID NO: 63669 - DNA, 22 bp, synthetic construct
  misc_feature 1..22: note = chemically synthesized
  source 1..22: mol_type = other DNA
catcagcagcacccagctggac

SEQ ID NO: 63670 - DNA, 22 bp, synthetic construct
  misc_feature 1..22: note = chemically synthesized
  source 1..22: mol_type = other DNA
atcagcagcacccagctggaca

SEQ ID NO: 63671 - DNA, 22 bp, synthetic construct
  misc_feature 1..22: note = chemically synthesized
  source 1..22: mol_type = other DNA
gacagcttcttacagtgctgga

SEQ ID NO: 63672 - DNA, 22 bp, synthetic construct
  misc_feature 1..22: note = chemically synthesized
  source 1..22: mol_type = other DNA
cttacagtgctggatgttaaac

SEQ ID NO: 63673 - DNA, 22 bp, synthetic construct
  misc_feature 1..22: note = chemically synthesized
  source 1..22: mol_type = other DNA
ttacagtgctggatgttaaaca

SEQ ID NO: 63674 - DNA, 22 bp, synthetic construct
  misc_feature 1..22: note = chemically synthesized
  source 1..22: mol_type = other DNA
acagtgctggatgttaaacatg

SEQ ID NO: 63675 - DNA, 22 bp, synthetic construct
  misc_feature 1..22: note = chemically synthesized
  source 1..22: mol_type = other DNA
cagtgctggatgttaaacatgc

SEQ ID NO: 63676 - DNA, 22 bp, synthetic construct
  misc_feature 1..22: note = chemically synthesized
  source 1..22: mol_type = other DNA
gatgttaaacatgcctaaacgc

SEQ ID NO: 63677 - DNA, 22 bp, synthetic construct
  misc_feature 1..22: note = chemically synthesized
  source 1..22: mol_type = other DNA
aacatgcctaaacgcttcatca

SEQ ID NO: 63678 - DNA, 22 bp, synthetic construct
  misc_feature 1..22: note = chemically synthesized
  source 1..22: mol_type = other DNA
aacgcttcatcataggcacctt

SEQ ID NO: 63679 - DNA, 22 bp, synthetic construct
  misc_feature 1..22: note = chemically synthesized
  source 1..22: mol_type = other DNA
catcataggcaccttcacggtg

SEQ ID NO: 63680 - DNA, 22 bp, synthetic construct
  misc_feature 1..22: note = chemically synthesized
  source 1..22: mol_type = other DNA
atcataggcaccttcacggtgg

SEQ ID NO: 63681 - DNA, 22 bp, synthetic construct
  misc_feature 1..22: note = chemically synthesized
  source 1..22: mol_type = other DNA
cacggtggtcacctggtccacg

SEQ ID NO: 63682 - DNA, 22 bp, synthetic construct
  misc_feature 1..22: note = chemically synthesized
  source 1..22: mol_type = other DNA
acggtggtcacctggtccacgt

SEQ ID NO: 63683 - DNA, 22 bp, synthetic construct
  misc_feature 1..22: note = chemically synthesized
  source 1..22: mol_type = other DNA
gtccacgtggaagtcctcttcc

SEQ ID NO: 63684 - DNA, 22 bp, synthetic construct
  misc_feature 1..22: note = chemically synthesized
  source 1..22: mol_type = other DNA
ttcctcggtgtccttgacttca

SEQ ID NO: 63685 - DNA, 22 bp, synthetic construct
  misc_feature 1..22: note = chemically synthesized
  source 1..22: mol_type = other DNA
cctcggtgtccttgacttcaaa

SEQ ID NO: 63686 - DNA, 22 bp, synthetic construct
  misc_feature 1..22: note = chemically synthesized
  source 1..22: mol_type = other DNA
ctcggtgtccttgacttcaaag

SEQ ID NO: 63687 - DNA, 22 bp, synthetic construct
  misc_feature 1..22: note = chemically synthesized
  source 1..22: mol_type = other DNA
ggtgtccttgacttcaaagggt

SEQ ID NO: 63688 - DNA, 22 bp, synthetic construct
  misc_feature 1..22: note = chemically synthesized
  source 1..22: mol_type = other DNA
gacttcaaagggtctctcccat

SEQ ID NO: 63689 - DNA, 22 bp, synthetic construct
  misc_feature 1..22: note = chemically synthesized
  source 1..22: mol_type = other DNA
acttcaaagggtctctcccatt

SEQ ID NO: 63690 - DNA, 22 bp, synthetic construct
  misc_feature 1..22: note = chemically synthesized
  source 1..22: mol_type = other DNA
caaagggtctctcccatttgcc

SEQ ID NO: 63691 - DNA, 22 bp, synthetic construct
  misc_feature 1..22: note = chemically synthesized
  source 1..22: mol_type = other DNA
aaagggtctctcccatttgcct

SEQ ID NO: 63692 - DNA, 22 bp, synthetic construct
  misc_feature 1..22: note = chemically synthesized
  source 1..22: mol_type = other DNA
tcccatttgcctggagagaggg

SEQ ID NO: 63693 - DNA, 22 bp, synthetic construct
  misc_feature 1..22: note = chemically synthesized
  source 1..22: mol_type = other DNA
ccatttgcctggagagagggga

SEQ ID NO: 63694 - DNA, 22 bp, synthetic construct
  misc_feature 1..22: note = chemically synthesized
  source 1..22: mol_type = other DNA
gcctggagagaggggaaggtgg

SEQ ID NO: 63695 - DNA, 22 bp, synthetic construct
  misc_feature 1..22: note = chemically synthesized
  source 1..22: mol_type = other DNA
cctggagagaggggaaggtggg

SEQ ID NO: 63696 - DNA, 22 bp, synthetic construct
  misc_feature 1..22: note = chemically synthesized
  source 1..22: mol_type = other DNA
gagagaggggaaggtgggcatc

SEQ ID NO: 63697 - DNA, 22 bp, synthetic construct
  misc_feature 1..22: note = chemically synthesized
  source 1..22: mol_type = other DNA
ggaagagtgtagcagaataaag

SEQ ID NO: 63698 - DNA, 22 bp, synthetic construct
  misc_feature 1..22: note = chemically synthesized
  source 1..22: mol_type = other DNA
gaagagtgtagcagaataaaga

SEQ ID NO: 63699 - DNA, 22 bp, synthetic construct
  misc_feature 1..22: note = chemically synthesized
  source 1..22: mol_type = other DNA
cctgagaagccctgagccccct

SEQ ID NO: 63700 - DNA, 22 bp, synthetic construct
  misc_feature 1..22: note = chemically synthesized
  source 1..22: mol_type = other DNA
agaagccctgagcccccttgac

SEQ ID NO: 63701 - DNA, 22 bp, synthetic construct
  misc_feature 1..22: note = chemically synthesized
  source 1..22: mol_type = other DNA
agcccccttgacgacacacatc

SEQ ID NO: 63702 - DNA, 22 bp, synthetic construct
  misc_feature 1..22: note = chemically synthesized
  source 1..22: mol_type = other DNA
gacgacacacatccctcgaggc

SEQ ID NO: 63703 - DNA, 22 bp, synthetic construct
  misc_feature 1..22: note = chemically synthesized
  source 1..22: mol_type = other DNA
acgacacacatccctcgaggct

SEQ ID NO: 63704 - DNA, 22 bp, synthetic construct
  misc_feature 1..22: note = chemically synthesized
  source 1..22: mol_type = other DNA
gaggctcagcttcatcatctgt

SEQ ID NO: 63705 - DNA, 22 bp, synthetic construct
  misc_feature 1..22: note = chemically synthesized
  source 1..22: mol_type = other DNA
agcttcatcatctgtaaaaggt

SEQ ID NO: 63706 - DNA, 22 bp, synthetic construct
  misc_feature 1..22: note = chemically synthesized
  source 1..22: mol_type = other DNA
catcatctgtaaaaggtgctga

SEQ ID NO: 63707 - DNA, 22 bp, synthetic construct
  misc_feature 1..22: note = chemically synthesized
  source 1..22: mol_type = other DNA
atcatctgtaaaaggtgctgaa

SEQ ID NO: 63708 - DNA, 22 bp, synthetic construct
  misc_feature 1..22: note = chemically synthesized
  source 1..22: mol_type = other DNA
taaaaggtgctgaaactgacca

SEQ ID NO: 63709 - DNA, 22 bp, synthetic construct
  misc_feature 1..22: note = chemically synthesized
  source 1..22: mol_type = other DNA
aaactgaccatccaagctgccg

SEQ ID NO: 63710 - DNA, 22 bp, synthetic construct
  misc_feature 1..22: note = chemically synthesized
  source 1..22: mol_type = other DNA
accatccaagctgccgaaaaag

SEQ ID NO: 63711 - DNA, 22 bp, synthetic construct
  misc_feature 1..22: note = chemically synthesized
  source 1..22: mol_type = other DNA
ccgaaaaagattgtgtggggat

SEQ ID NO: 63712 - DNA, 22 bp, synthetic construct
  misc_feature 1..22: note = chemically synthesized
  source 1..22: mol_type = other DNA
tgtggggataattcaaaactag

SEQ ID NO: 63713 - DNA, 22 bp, synthetic construct
  misc_feature 1..22: note = chemically synthesized
  source 1..22: mol_type = other DNA
aaaactagaggaagatgcagaa

SEQ ID NO: 63714 - DNA, 22 bp, synthetic construct
  misc_feature 1..22: note = chemically synthesized
  source 1..22: mol_type = other DNA
gaggaagatgcagaatttctac

SEQ ID NO: 63715 - DNA, 22 bp, synthetic construct
  misc_feature 1..22: note = chemically synthesized
  source 1..22: mol_type = other DNA
ctacatcgtggcgatgtcaggc

SEQ ID NO: 63716 - DNA, 22 bp, synthetic construct
  misc_feature 1..22: note = chemically synthesized
  source 1..22: mol_type = other DNA
tacatcgtggcgatgtcaggct

SEQ ID NO: 63717 - DNA, 22 bp, synthetic construct
  misc_feature 1..22: note = chemically synthesized
  source 1..22: mol_type = other DNA
catcgtggcgatgtcaggctaa

SEQ ID NO: 63718 - DNA, 22 bp, synthetic construct
  misc_feature 1..22: note = chemically synthesized
  source 1..22: mol_type = other DNA
agagatgccatcgtggctgtgc

SEQ ID NO: 63719 - DNA, 22 bp, synthetic construct
  misc_feature 1..22: note = chemically synthesized
  source 1..22: mol_type = other DNA
tgcatttttattggaatcatat

SEQ ID NO: 63720 - DNA, 22 bp, synthetic construct
  misc_feature 1..22: note = chemically synthesized
  source 1..22: mol_type = other DNA
ttattggaatcatatgtttatt

SEQ ID NO: 63721 - DNA, 22 bp, synthetic construct
  misc_feature 1..22: note = chemically synthesized
  source 1..22: mol_type = other DNA
tattggaatcatatgtttattt

SEQ ID NO: 63722 - DNA, 22 bp, synthetic construct
  misc_feature 1..22: note = chemically synthesized
  source 1..22: mol_type = other DNA
attggaatcatatgtttatttg

SEQ ID NO: 63723 - DNA, 22 bp, synthetic construct
  misc_feature 1..22: note = chemically synthesized
  source 1..22: mol_type = other DNA
ttggaatcatatgtttatttga

SEQ ID NO: 63724 - DNA, 22 bp, synthetic construct
  misc_feature 1..22: note = chemically synthesized
  source 1..22: mol_type = other DNA
gaatcatatgtttatttgaggg

SEQ ID NO: 63725 - DNA, 22 bp, synthetic construct
  misc_feature 1..22: note = chemically synthesized
  source 1..22: mol_type = other DNA
atttgagggtgtcttggatatt

SEQ ID NO: 63726 - DNA, 22 bp, synthetic construct
  misc_feature 1..22: note = chemically synthesized
  source 1..22: mol_type = other DNA
tttgagggtgtcttggatatta

SEQ ID NO: 63727 - DNA, 22 bp, synthetic construct
  misc_feature 1..22: note = chemically synthesized
  source 1..22: mol_type = other DNA
gagggtgtcttggatattacaa

SEQ ID NO: 63728 - DNA, 22 bp, synthetic construct
  misc_feature 1..22: note = chemically synthesized
  source 1..22: mol_type = other DNA
agggtgtcttggatattacaaa

SEQ ID NO: 63729 - DNA, 22 bp, synthetic construct
  misc_feature 1..22: note = chemically synthesized
  source 1..22: mol_type = other DNA
ggatattacaaataaaatgttg

SEQ ID NO: 63730 - DNA, 22 bp, synthetic construct
  misc_feature 1..22: note = chemically synthesized
  source 1..22: mol_type = other DNA
gatattacaaataaaatgttgg

SEQ ID NO: 63731 - DNA, 22 bp, synthetic construct
  misc_feature 1..22: note = chemically synthesized
  source 1..22: mol_type = other DNA
caaataaaatgttggagcatca

SEQ ID NO: 63732 - DNA, 22 bp, synthetic construct
  misc_feature 1..22: note = chemically synthesized
  source 1..22: mol_type = other DNA
gagcatcaggcatatttggtac

SEQ ID NO: 63733 - DNA, 22 bp, synthetic construct
  misc_feature 1..22: note = chemically synthesized
  source 1..22: mol_type = other DNA
ggtaccttctgtctaaggctcc

SEQ ID NO: 63734 - DNA, 22 bp, synthetic construct
  misc_feature 1..22: note = chemically synthesized
  source 1..22: mol_type = other DNA
gtaccttctgtctaaggctccc

SEQ ID NO: 63735 - DNA, 22 bp, synthetic construct
  misc_feature 1..22: note = chemically synthesized
  source 1..22: mol_type = other DNA
ctgtctaaggctccctgcccct

SEQ ID NO: 63736 - DNA, 22 bp, synthetic construct
  misc_feature 1..22: note = chemically synthesized
  source 1..22: mol_type = other DNA
tgtctaaggctccctgcccctt

SEQ ID NO: 63737 - DNA, 22 bp, synthetic construct
  misc_feature 1..22: note = chemically synthesized
  source 1..22: mol_type = other DNA
tctaaggctccctgccccttgt

SEQ ID NO: 63738 - DNA, 22 bp, synthetic construct
  misc_feature 1..22: note = chemically synthesized
  source 1..22: mol_type = other DNA
aggctccctgccccttgttaat

SEQ ID NO: 63739 - DNA, 22 bp, synthetic construct
  misc_feature 1..22: note = chemically synthesized
  source 1..22: mol_type = other DNA
cctgccccttgttaattggcag

SEQ ID NO: 63740 - DNA, 22 bp, synthetic construct
  misc_feature 1..22: note = chemically synthesized
  source 1..22: mol_type = other DNA
ccccttgttaattggcagctca

SEQ ID NO: 63741 - DNA, 22 bp, synthetic construct
  misc_feature 1..22: note = chemically synthesized
  source 1..22: mol_type = other DNA
gttaattggcagctcagttatt

SEQ ID NO: 63742 - DNA, 22 bp, synthetic construct
  misc_feature 1..22: note = chemically synthesized
  source 1..22: mol_type = other DNA
ttaattggcagctcagttattc

SEQ ID NO: 63743 - DNA, 22 bp, synthetic construct
  misc_feature 1..22: note = chemically synthesized
  source 1..22: mol_type = other DNA
attggcagctcagttattcatc

SEQ ID NO: 63744 - DNA, 22 bp, synthetic construct
  misc_feature 1..22: note = chemically synthesized
  source 1..22: mol_type = other DNA
gcagctcagttattcatccagg

SEQ ID NO: 63745 - DNA, 22 bp, synthetic construct
  misc_feature 1..22: note = chemically synthesized
  source 1..22: mol_type = other DNA
agttattcatccagggcaaaca

SEQ ID NO: 63746 - DNA, 22 bp, synthetic construct
  misc_feature 1..22: note = chemically synthesized
  source 1..22: mol_type = other DNA
ttcatccagggcaaacattctg

SEQ ID NO: 63747 - DNA, 22 bp, synthetic construct
  misc_feature 1..22: note = chemically synthesized
  source 1..22: mol_type = other DNA
atccagggcaaacattctgctt

SEQ ID NO: 63748 - DNA, 22 bp, synthetic construct
  misc_feature 1..22: note = chemically synthesized
  source 1..22: mol_type = other DNA
tgcttactattcctgagagctt

SEQ ID NO: 63749 - DNA, 22 bp, synthetic construct
  misc_feature 1..22: note = chemically synthesized
  source 1..22: mol_type = other DNA
cttactattcctgagagctttc

SEQ ID NO: 63750 - DNA, 22 bp, synthetic construct
  misc_feature 1..22: note = chemically synthesized
  source 1..22: mol_type = other DNA
actattcctgagagctttcctc

SEQ ID NO: 63751 - DNA, 22 bp, synthetic construct
  misc_feature 1..22: note = chemically synthesized
  source 1..22: mol_type = other DNA
ctattcctgagagctttcctca

SEQ ID NO: 63752 - DNA, 22 bp, synthetic construct
  misc_feature 1..22: note = chemically synthesized
  source 1..22: mol_type = other DNA
ttcctgagagctttcctcatcc

SEQ ID NO: 63753 - DNA, 22 bp, synthetic construct
  misc_feature 1..22: note = chemically synthesized
  source 1..22: mol_type = other DNA
ctgagagctttcctcatcctct

SEQ ID NO: 63754 - DNA, 22 bp, synthetic construct
  misc_feature 1..22: note = chemically synthesized
  source 1..22: mol_type = other DNA
agagctttcctcatcctctaga

SEQ ID NO: 63755 - DNA, 22 bp, synthetic construct
  misc_feature 1..22: note = chemically synthesized
  source 1..22: mol_type = other DNA
tcctcatcctctagattggcag

SEQ ID NO: 63756 - DNA, 22 bp, synthetic construct
  misc_feature 1..22: note = chemically synthesized
  source 1..22: mol_type = other DNA
cctcatcctctagattggcagg

SEQ ID NO: 63757 - DNA, 22 bp, synthetic construct
  misc_feature 1..22: note = chemically synthesized
  source 1..22: mol_type = other DNA
ctcatcctctagattggcaggg

SEQ ID NO: 63758 - DNA, 22 bp, synthetic construct
  misc_feature 1..22: note = chemically synthesized
  source 1..22: mol_type = other DNA
atcctctagattggcaggggaa

SEQ ID NO: 63759 - DNA, 22 bp, synthetic construct
  misc_feature 1..22: note = chemically synthesized
  source 1..22: mol_type = other DNA
tagattggcaggggaaatgcag

SEQ ID NO: 63760 - DNA, 22 bp, synthetic construct
  misc_feature 1..22: note = chemically synthesized
  source 1..22: mol_type = other DNA
gattggcaggggaaatgcagat

SEQ ID NO: 63761 - DNA, 22 bp, synthetic construct
  misc_feature 1..22: note = chemically synthesized
  source 1..22: mol_type = other DNA
gcaggggaaatgcagatgcctg

SEQ ID NO: 63762 - DNA, 22 bp, synthetic construct
  misc_feature 1..22: note = chemically synthesized
  source 1..22: mol_type = other DNA
agcagcctcccctctgccatac

SEQ ID NO: 63763 - DNA, 22 bp, synthetic construct
  misc_feature 1..22: note = chemically synthesized
  source 1..22: mol_type = other DNA
ccctctgccataccaacagagc

SEQ ID NO: 63764 - DNA, 22 bp, synthetic construct
  misc_feature 1..22: note = chemically synthesized
  source 1..22: mol_type = other DNA
tgccataccaacagagcttcac

SEQ ID NO: 63765 - DNA, 22 bp, synthetic construct
  misc_feature 1..22: note = chemically synthesized
  source 1..22: mol_type = other DNA
ccataccaacagagcttcacca

SEQ ID NO: 63766 - DNA, 22 bp, synthetic construct
  misc_feature 1..22: note = chemically synthesized
  source 1..22: mol_type = other DNA
caccatcgaggcatgcagagtg

SEQ ID NO: 63767 - DNA, 22 bp, synthetic construct
  misc_feature 1..22: note = chemically synthesized
  source 1..22: mol_type = other DNA
accatcgaggcatgcagagtgg

SEQ ID NO: 63768 - DNA, 22 bp, synthetic construct
  misc_feature 1..22: note = chemically synthesized
  source 1..22: mol_type = other DNA
agggacccctgatcccagcttt

SEQ ID NO: 63769 - DNA, 22 bp, synthetic construct
  misc_feature 1..22: note = chemically synthesized
  source 1..22: mol_type = other DNA
atcccagctttctcattggaca

SEQ ID NO: 63770 - DNA, 22 bp, synthetic construct
  misc_feature 1..22: note = chemically synthesized
  source 1..22: mol_type = other DNA
tctcattggacagaaggaggag

SEQ ID NO: 63771 - DNA, 22 bp, synthetic construct
  misc_feature 1..22: note = chemically synthesized
  source 1..22: mol_type = other DNA
ctcattggacagaaggaggaga

SEQ ID NO: 63772 - DNA, 22 bp, synthetic construct
  misc_feature 1..22: note = chemically synthesized
  source 1..22: mol_type = other DNA
tcattggacagaaggaggagac

SEQ ID NO: 63773 - DNA, 22 bp, synthetic construct
  misc_feature 1..22: note = chemically synthesized
  source 1..22: mol_type = other DNA
attggacagaaggaggagactg

SEQ ID NO: 63774 - DNA, 22 bp, synthetic construct
  misc_feature 1..22: note = chemically synthesized
  source 1..22: mol_type = other DNA
gacagaaggaggagactggggc

SEQ ID NO: 63775 - DNA, 22 bp, synthetic construct
  misc_feature 1..22: note = chemically synthesized
  source 1..22: mol_type = other DNA
gggctggagagggacctgggcc

SEQ ID NO: 63776 - DNA, 22 bp, synthetic construct
  misc_feature 1..22: note = chemically synthesized
  source 1..22: mol_type = other DNA
gagagggacctgggcccccact

SEQ ID NO: 63777 - DNA, 22 bp, synthetic construct
  misc_feature 1..22: note = chemically synthesized
  source 1..22: mol_type = other DNA
ggcccccactaaggccacagca

SEQ ID NO: 63778 - DNA, 22 bp, synthetic construct
  misc_feature 1..22: note = chemically synthesized
  source 1..22: mol_type = other DNA
aggccacagcagagccaggact

SEQ ID NO: 63779 - DNA, 22 bp, synthetic construct
  misc_feature 1..22: note = chemically synthesized
  source 1..22: mol_type = other DNA
tagctgtgctgactgcagcctg

SEQ ID NO: 63780 - DNA, 22 bp, synthetic construct
  misc_feature 1..22: note = chemically synthesized
  source 1..22: mol_type = other DNA
agctgtgctgactgcagcctgg

SEQ ID NO: 63781 - DNA, 22 bp, synthetic construct
  misc_feature 1..22: note = chemically synthesized
  source 1..22: mol_type = other DNA
gctgtgctgactgcagcctggc

SEQ ID NO: 63782 - DNA, 22 bp, synthetic construct
  misc_feature 1..22: note = chemically synthesized
  source 1..22: mol_type = other DNA
tgctgactgcagcctggctgct

SEQ ID NO: 63783 - DNA, 22 bp, synthetic construct
  misc_feature 1..22: note = chemically synthesized
  source 1..22: mol_type = other DNA
actgcagcctggctgctctcca

SEQ ID NO: 63784 - DNA, 22 bp, synthetic construct
  misc_feature 1..22: note = chemically synthesized
  source 1..22: mol_type = other DNA
cagcctggctgctctccactgc

SEQ ID NO: 63785 - DNA, 22 bp, synthetic construct
  misc_feature 1..22: note = chemically synthesized
  source 1..22: mol_type = other DNA
gctgctctccactgccctcctt

SEQ ID NO: 63786 - DNA, 22 bp, synthetic construct
  misc_feature 1..22: note = chemically synthesized
  source 1..22: mol_type = other DNA
ctctccactgccctcctttgcc

SEQ ID NO: 63787 - DNA, 22 bp, synthetic construct
  misc_feature 1..22: note = chemically synthesized
  source 1..22: mol_type = other DNA
tccactgccctcctttgcctca

SEQ ID NO: 63788 - DNA, 22 bp, synthetic construct
  misc_feature 1..22: note = chemically synthesized
  source 1..22: mol_type = other DNA
cactgccctcctttgcctcaag

SEQ ID NO: 63789 - DNA, 22 bp, synthetic construct
  misc_feature 1..22: note = chemically synthesized
  source 1..22: mol_type = other DNA
ccctcctttgcctcaagagcaa

SEQ ID NO: 63790 - DNA, 22 bp, synthetic construct
  misc_feature 1..22: note = chemically synthesized
  source 1..22: mol_type = other DNA
ctttgcctcaagagcaagggag

SEQ ID NO: 63791 - DNA, 22 bp, synthetic construct
  misc_feature 1..22: note = chemically synthesized
  source 1..22: mol_type = other DNA
tgcctcaagagcaagggagcct

SEQ ID NO: 63792 - DNA, 22 bp, synthetic construct
  misc_feature 1..22: note = chemically synthesized
  source 1..22: mol_type = other DNA
gcctcaagagcaagggagcctc

SEQ ID NO: 63793 - DNA, 22 bp, synthetic construct
  misc_feature 1..22: note = chemically synthesized
  source 1..22: mol_type = other DNA
cctcaagagcaagggagcctca

SEQ ID NO: 63794 - DNA, 22 bp, synthetic construct
  misc_feature 1..22: note = chemically synthesized
  source 1..22: mol_type = other DNA
aagagcaagggagcctcagagt

SEQ ID NO: 63795 - DNA, 22 bp, synthetic construct
  misc_feature 1..22: note = chemically synthesized
  source 1..22: mol_type = other DNA
agagtggaggaagcagcccctg

SEQ ID NO: 63796 - DNA, 22 bp, synthetic construct
  misc_feature 1..22: note = chemically synthesized
  source 1..22: mol_type = other DNA
gccttgcctcccacctcccctc

SEQ ID NO: 63797 - DNA, 22 bp, synthetic construct
  misc_feature 1..22: note = chemically synthesized
  source 1..22: mol_type = other DNA
gcctcccacctcccctccccta

SEQ ID NO: 63798 - DNA, 22 bp, synthetic construct
  misc_feature 1..22: note = chemically synthesized
  source 1..22: mol_type = other DNA
cctcccacctcccctcccctat

SEQ ID NO: 63799 - DNA, 22 bp, synthetic construct
  misc_feature 1..22: note = chemically synthesized
  source 1..22: mol_type = other DNA
ccacctcccctcccctatgctg

SEQ ID NO: 63800 - DNA, 22 bp, synthetic construct
  misc_feature 1..22: note = chemically synthesized
  source 1..22: mol_type = other DNA
ccctcccctatgctgttttcct

SEQ ID NO: 63801 - DNA, 22 bp, synthetic construct
  misc_feature 1..22: note = chemically synthesized
  source 1..22: mol_type = other DNA
ccctatgctgttttcctgggac

SEQ ID NO: 63802 - DNA, 22 bp, synthetic construct
  misc_feature 1..22: note = chemically synthesized
  source 1..22: mol_type = other DNA
tgctgttttcctgggacagtgg

SEQ ID NO: 63803 - DNA, 22 bp, synthetic construct
  misc_feature 1..22: note = chemically synthesized
  source 1..22: mol_type = other DNA
ttttcctgggacagtgggagct

SEQ ID NO: 63804 - DNA, 22 bp, synthetic construct
  misc_feature 1..22: note = chemically synthesized
  source 1..22: mol_type = other DNA
tcctgggacagtgggagctggc

SEQ ID NO: 63805 - DNA, 22 bp, synthetic construct
  misc_feature 1..22: note = chemically synthesized
  source 1..22: mol_type = other DNA
cctgggacagtgggagctggct

SEQ ID NO: 63806 - DNA, 22 bp, synthetic construct
  misc_feature 1..22: note = chemically synthesized
  source 1..22: mol_type = other DNA
ctgggacagtgggagctggctt

SEQ ID NO: 63807 - DNA, 22 bp, synthetic construct
  misc_feature 1..22: note = chemically synthesized
  source 1..22: mol_type = other DNA
ggacagtgggagctggcttaga

SEQ ID NO: 63808 - DNA, 22 bp, synthetic construct
  misc_feature 1..22: note = chemically synthesized
  source 1..22: mol_type = other DNA
gcttagaatgccctggggcccc

SEQ ID NO: 63809 - DNA, 22 bp, synthetic construct
  misc_feature 1..22: note = chemically synthesized
  source 1..22: mol_type = other DNA
agaatgccctggggcccccagg

SEQ ID NO: 63810 - DNA, 22 bp, synthetic construct
  misc_feature 1..22: note = chemically synthesized
  source 1..22: mol_type = other DNA
gaatgccctggggcccccagga

SEQ ID NO: 63811 - DNA, 22 bp, synthetic construct
  misc_feature 1..22: note = chemically synthesized
  source 1..22: mol_type = other DNA
gggcccccaggaccctggcatt

SEQ ID NO: 63812 - DNA, 22 bp, synthetic construct
  misc_feature 1..22: note = chemically synthesized
  source 1..22: mol_type = other DNA
gcattttaacccctcaggggca

SEQ ID NO: 63813 - DNA, 22 bp, synthetic construct
  misc_feature 1..22: note = chemically synthesized
  source 1..22: mol_type = other DNA
taacccctcaggggcaggaagg

SEQ ID NO: 63814 - DNA, 22 bp, synthetic construct
  misc_feature 1..22: note = chemically synthesized
  source 1..22: mol_type = other DNA
aacccctcaggggcaggaaggc

SEQ ID NO: 63815 - DNA, 22 bp, synthetic construct
  misc_feature 1..22: note = chemically synthesized
  source 1..22: mol_type = other DNA
acccctcaggggcaggaaggca

SEQ ID NO: 63816 - DNA, 22 bp, synthetic construct
  misc_feature 1..22: note = chemically synthesized
  source 1..22: mol_type = other DNA
aggggcaggaaggcagcctgag

SEQ ID NO: 63817 - DNA, 22 bp, synthetic construct
  misc_feature 1..22: note = chemically synthesized
  source 1..22: mol_type = other DNA
agatacagaagagtccatcacc

SEQ ID NO: 63818 - DNA, 22 bp, synthetic construct
  misc_feature 1..22: note = chemically synthesized
  source 1..22: mol_type = other DNA
ctgtatgccacacaccatcccc

SEQ ID NO: 63819 - DNA, 22 bp, synthetic construct
  misc_feature 1..22: note = chemically synthesized
  source 1..22: mol_type = other DNA
tatgccacacaccatccccaca

SEQ ID NO: 63820 - DNA, 22 bp, synthetic construct
  misc_feature 1..22: note = chemically synthesized
  source 1..22: mol_type = other DNA
tgtcatttgtttaatcctaaaa

SEQ ID NO: 63821 - DNA, 22 bp, synthetic construct
  misc_feature 1..22: note = chemically synthesized
  source 1..22: mol_type = other DNA
gtcatttgtttaatcctaaaaa

SEQ ID NO: 63822 - DNA, 22 bp, synthetic construct
  misc_feature 1..22: note = chemically synthesized
  source 1..22: mol_type = other DNA
tcatttgtttaatcctaaaaaa

SEQ ID NO: 63823 - DNA, 22 bp, synthetic construct
  misc_feature 1..22: note = chemically synthesized
  source 1..22: mol_type = other DNA
gtttaatcctaaaaaaacctga

SEQ ID NO: 63824 - DNA, 22 bp, synthetic construct
  misc_feature 1..22: note = chemically synthesized
  source 1..22: mol_type = other DNA
tttaatcctaaaaaaacctgac

SEQ ID NO: 63825 - DNA, 22 bp, synthetic construct
  misc_feature 1..22: note = chemically synthesized
  source 1..22: mol_type = other DNA
aatcctaaaaaaacctgacagc

SEQ ID NO: 63826 - DNA, 22 bp, synthetic construct
  misc_feature 1..22: note = chemically synthesized
  source 1..22: mol_type = other DNA
atcctaaaaaaacctgacagca

SEQ ID NO: 63827 - DNA, 22 bp, synthetic construct
  misc_feature 1..22: note = chemically synthesized
  source 1..22: mol_type = other DNA
aaaaaacctgacagcaagaatg

SEQ ID NO: 63828 - DNA, 22 bp, synthetic construct
  misc_feature 1..22: note = chemically synthesized
  source 1..22: mol_type = other DNA
acagcaagaatggtattttgtc

SEQ ID NO: 63829 - DNA, 22 bp, synthetic construct
  misc_feature 1..22: note = chemically synthesized
  source 1..22: mol_type = other DNA
tgtccatgctaagatgagaaat

SEQ ID NO: 63830 - DNA, 22 bp, synthetic construct
  misc_feature 1..22: note = chemically synthesized
  source 1..22: mol_type = other DNA
gtccatgctaagatgagaaatt

SEQ ID NO: 63831 - DNA, 22 bp, synthetic construct
  misc_feature 1..22: note = chemically synthesized
  source 1..22: mol_type = other DNA
tccatgctaagatgagaaatta

SEQ ID NO: 63832 - DNA, 22 bp, synthetic construct
  misc_feature 1..22: note = chemically synthesized
  source 1..22: mol_type = other DNA
agatgagaaattagcacctcaa

SEQ ID NO: 63833 - DNA, 22 bp, synthetic construct
  misc_feature 1..22: note = chemically synthesized
  source 1..22: mol_type = other DNA
gcacctcaaagaggtagaatgc

SEQ ID NO: 63834 - DNA, 22 bp, synthetic construct
  misc_feature 1..22: note = chemically synthesized
  source 1..22: mol_type = other DNA
aaagaggtagaatgcattgttt

SEQ ID NO: 63835 - DNA, 22 bp, synthetic construct
  misc_feature 1..22: note = chemically synthesized
  source 1..22: mol_type = other DNA
tttttgtcaaaagctaattgtg

SEQ ID NO: 63836 - DNA, 22 bp, synthetic construct
  misc_feature 1..22: note = chemically synthesized
  source 1..22: mol_type = other DNA
ttgtcaaaagctaattgtgtta

SEQ ID NO: 63837 - DNA, 22 bp, synthetic construct
  misc_feature 1..22: note = chemically synthesized
  source 1..22: mol_type = other DNA
tgtcaaaagctaattgtgttag

SEQ ID NO: 63838 - DNA, 22 bp, synthetic construct
  misc_feature 1..22: note = chemically synthesized
  source 1..22: mol_type = other DNA
gtcaaaagctaattgtgttaga

SEQ ID NO: 63839 - DNA, 22 bp, synthetic construct
  misc_feature 1..22: note = chemically synthesized
  source 1..22: mol_type = other DNA
tcaaaagctaattgtgttagag

SEQ ID NO: 63840 - DNA, 22 bp, synthetic construct
  misc_feature 1..22: note = chemically synthesized
  source 1..22: mol_type = other DNA
attgtgttagaggcaggatttg

SEQ ID NO: 63841 - DNA, 22 bp, synthetic construct
  misc_feature 1..22: note = chemically synthesized
  source 1..22: mol_type = other DNA
tgttagaggcaggatttgaacc

SEQ ID NO: 63842 - DNA, 22 bp, synthetic construct
  misc_feature 1..22: note = chemically synthesized
  source 1..22: mol_type = other DNA
gaggcaggatttgaacccaggt

SEQ ID NO: 63843 - DNA, 22 bp, synthetic construct
  misc_feature 1..22: note = chemically synthesized
  source 1..22: mol_type = other DNA
gaacccaggtctttcagattgc

SEQ ID NO: 63844 - DNA, 22 bp, synthetic construct
  misc_feature 1..22: note = chemically synthesized
  source 1..22: mol_type = other DNA
aacccaggtctttcagattgca

SEQ ID NO: 63845 - DNA, 22 bp, synthetic construct
  misc_feature 1..22: note = chemically synthesized
  source 1..22: mol_type = other DNA
tcagattgcaaaactgatactg

SEQ ID NO: 63846 - DNA, 22 bp, synthetic construct
  misc_feature 1..22: note = chemically synthesized
  source 1..22: mol_type = other DNA
cagattgcaaaactgatactga

SEQ ID NO: 63847 - DNA, 22 bp, synthetic construct
  misc_feature 1..22: note = chemically synthesized
  source 1..22: mol_type = other DNA
agattgcaaaactgatactgat

SEQ ID NO: 63848 - DNA, 22 bp, synthetic construct
  misc_feature 1..22: note = chemically synthesized
  source 1..22: mol_type = other DNA
caaaactgatactgattctggg

SEQ ID NO: 63849 - DNA, 22 bp, synthetic construct
  misc_feature 1..22: note = chemically synthesized
  source 1..22: mol_type = other DNA
atactgattctgggacactaga

SEQ ID NO: 63850 - DNA, 22 bp, synthetic construct
  misc_feature 1..22: note = chemically synthesized
  source 1..22: mol_type = other DNA
attctgggacactagagtcgtg

SEQ ID NO: 63851 - DNA, 22 bp, synthetic construct
  misc_feature 1..22: note = chemically synthesized
  source 1..22: mol_type = other DNA
tgggacactagagtcgtgtaaa

SEQ ID NO: 63852 - DNA, 22 bp, synthetic construct
  misc_feature 1..22: note = chemically synthesized
  source 1..22: mol_type = other DNA
ggacactagagtcgtgtaaagt

SEQ ID NO: 63853 - DNA, 22 bp, synthetic construct
  misc_feature 1..22: note = chemically synthesized
  source 1..22: mol_type = other DNA
gagtcgtgtaaagtatgttcca

SEQ ID NO: 63854 - DNA, 22 bp, synthetic construct
  misc_feature 1..22: note = chemically synthesized
  source 1..22: mol_type = other DNA
catgaaactatccctttatgca

SEQ ID NO: 63855 - DNA, 22 bp, synthetic construct
  misc_feature 1..22: note = chemically synthesized
  source 1..22: mol_type = other DNA
tccctttatgcagtgtattaca

SEQ ID NO: 63856 - DNA, 22 bp, synthetic construct
  misc_feature 1..22: note = chemically synthesized
  source 1..22: mol_type = other DNA
tatgcagtgtattacaatttgt

SEQ ID NO: 63857 - DNA, 22 bp, synthetic construct
  misc_feature 1..22: note = chemically synthesized
  source 1..22: mol_type = other DNA
atgcagtgtattacaatttgtt

SEQ ID NO: 63858 - DNA, 22 bp, synthetic construct
  misc_feature 1..22: note = chemically synthesized
  source 1..22: mol_type = other DNA
tgcagtgtattacaatttgttc

SEQ ID NO: 63859 - DNA, 22 bp, synthetic construct
  misc_feature 1..22: note = chemically synthesized
  source 1..22: mol_type = other DNA
caatttgttctatagttctaag

SEQ ID NO: 63860 - DNA, 22 bp, synthetic construct
  misc_feature 1..22: note = chemically synthesized
  source 1..22: mol_type = other DNA
gttctatagttctaagcattat

SEQ ID NO: 63861 - DNA, 22 bp, synthetic construct
  misc_feature 1..22: note = chemically synthesized
  source 1..22: mol_type = other DNA
ttctatagttctaagcattata

SEQ ID NO: 63862 - DNA, 22 bp, synthetic construct
  misc_feature 1..22: note = chemically synthesized
  source 1..22: mol_type = other DNA
tatagttctaagcattatatat

SEQ ID NO: 63863 - DNA, 22 bp, synthetic construct
  misc_feature 1..22: note = chemically synthesized
  source 1..22: mol_type = other DNA
tagttctaagcattatatattc

SEQ ID NO: 63864 - DNA, 22 bp, synthetic construct
  misc_feature 1..22: note = chemically synthesized
  source 1..22: mol_type = other DNA
taagcattatatattctacata

SEQ ID NO: 63865 - DNA, 22 bp, synthetic construct
  misc_feature 1..22: note = chemically synthesized
  source 1..22: mol_type = other DNA
agcattatatattctacatata

SEQ ID NO: 63866 - DNA, 22 bp, synthetic construct
  misc_feature 1..22: note = chemically synthesized
  source 1..22: mol_type = other DNA
tatattctacatatacagtata

SEQ ID NO: 63867 - DNA, 22 bp, synthetic construct
  misc_feature 1..22: note = chemically synthesized
  source 1..22: mol_type = other DNA
tacatatacagtatacacaagg

SEQ ID NO: 63868 - DNA, 22 bp, synthetic construct
  misc_feature 1..22: note = chemically synthesized
  source 1..22: mol_type = other DNA
catatacagtatacacaaggac

SEQ ID NO: 63869 - DNA, 22 bp, synthetic construct
  misc_feature 1..22: note = chemically synthesized
  source 1..22: mol_type = other DNA
aaggctctgaaaagttctgcag

SEQ ID NO: 63870 - DNA, 22 bp, synthetic construct
  misc_feature 1..22: note = chemically synthesized
  source 1..22: mol_type = other DNA
tgaaaagttctgcagagctgtc

SEQ ID NO: 63871 - DNA, 22 bp, synthetic construct
  misc_feature 1..22: note = chemically synthesized
  source 1..22: mol_type = other DNA
aaaagttctgcagagctgtcag

SEQ ID NO: 63872 - DNA, 22 bp, synthetic construct
  misc_feature 1..22: note = chemically synthesized
  source 1..22: mol_type = other DNA
tgcagagctgtcagtagttttg

SEQ ID NO: 63873 - DNA, 22 bp, synthetic construct
  misc_feature 1..22: note = chemically synthesized
  source 1..22: mol_type = other DNA
cagagctgtcagtagttttgac

SEQ ID NO: 63874 - DNA, 22 bp, synthetic construct
  misc_feature 1..22: note = chemically synthesized
  source 1..22: mol_type = other DNA
tcagtagttttgacagtttaat

SEQ ID NO: 63875 - DNA, 22 bp, synthetic construct
  misc_feature 1..22: note = chemically synthesized
  source 1..22: mol_type = other DNA
tgacagtttaatctattatttc

SEQ ID NO: 63876 - DNA, 22 bp, synthetic construct
  misc_feature 1..22: note = chemically synthesized
  source 1..22: mol_type = other DNA
gacagtttaatctattatttcc

SEQ ID NO: 63877 - DNA, 22 bp, synthetic construct
  misc_feature 1..22: note = chemically synthesized
  source 1..22: mol_type = other DNA
acagtttaatctattatttcct

SEQ ID NO: 63878 - DNA, 22 bp, synthetic construct
  misc_feature 1..22: note = chemically synthesized
  source 1..22: mol_type = other DNA
aatctattatttcctcaaatta

SEQ ID NO: 63879 - DNA, 22 bp, synthetic construct
  misc_feature 1..22: note = chemically synthesized
  source 1..22: mol_type = other DNA
atctattatttcctcaaattac

SEQ ID NO: 63880 - DNA, 22 bp, synthetic construct
  misc_feature 1..22: note = chemically synthesized
  source 1..22: mol_type = other DNA
ttatttcctcaaattactcaat

SEQ ID NO: 63881 - DNA, 22 bp, synthetic construct
  misc_feature 1..22: note = chemically synthesized
  source 1..22: mol_type = other DNA
tttcctcaaattactcaatgat

SEQ ID NO: 63882 - DNA, 22 bp, synthetic construct
  misc_feature 1..22: note = chemically synthesized
  source 1..22: mol_type = other DNA
cctcaaattactcaatgatgga

SEQ ID NO: 63883 - DNA, 22 bp, synthetic construct
  misc_feature 1..22: note = chemically synthesized
  source 1..22: mol_type = other DNA
ctcaaattactcaatgatggaa

SEQ ID NO: 63884 - DNA, 22 bp, synthetic construct
  misc_feature 1..22: note = chemically synthesized
  source 1..22: mol_type = other DNA
aaattactcaatgatggaaaac

SEQ ID NO: 63885 - DNA, 22 bp, synthetic construct
  misc_feature 1..22: note = chemically synthesized
  source 1..22: mol_type = other DNA
ctcaatgatggaaaacatttta

SEQ ID NO: 63886 - DNA, 22 bp, synthetic construct
  misc_feature 1..22: note = chemically synthesized
  source 1..22: mol_type = other DNA
aatgatggaaaacattttagtg

SEQ ID NO: 63887 - DNA, 22 bp, synthetic construct
  misc_feature 1..22: note = chemically synthesized
  source 1..22: mol_type = other DNA
tagtgtttgtgtgtagaaaact

SEQ ID NO: 63888 - DNA, 22 bp, synthetic construct
  misc_feature 1..22: note = chemically synthesized
  source 1..22: mol_type = other DNA
agtgtttgtgtgtagaaaactg

SEQ ID NO: 63889 - DNA, 22 bp, synthetic construct
  misc_feature 1..22: note = chemically synthesized
  source 1..22: mol_type = other DNA
gtgtttgtgtgtagaaaactga

SEQ ID NO: 63890 - DNA, 22 bp, synthetic construct
  misc_feature 1..22: note = chemically synthesized
  source 1..22: mol_type = other DNA
gtgtgtagaaaactgaagaatc

SEQ ID NO: 63891 - DNA, 22 bp, synthetic construct
  misc_feature 1..22: note = chemically synthesized
  source 1..22: mol_type = other DNA
tgtgtagaaaactgaagaatcc

SEQ ID NO: 63892 - DNA, 22 bp, synthetic construct
  misc_feature 1..22: note = chemically synthesized
  source 1..22: mol_type = other DNA
aagaatccacgctgaaaagcat

SEQ ID NO: 63893 - DNA, 22 bp, synthetic construct
  misc_feature 1..22: note = chemically synthesized
  source 1..22: mol_type = other DNA
aaaagcattgctatggcccata

SEQ ID NO: 63894 - DNA, 22 bp, synthetic construct
  misc_feature 1..22: note = chemically synthesized
  source 1..22: mol_type = other DNA
ctatggcccataatgcattgcc

SEQ ID NO: 63895 - DNA, 22 bp, synthetic construct
  misc_feature 1..22: note = chemically synthesized
  source 1..22: mol_type = other DNA
tggcccataatgcattgccaag

SEQ ID NO: 63896 - DNA, 22 bp, synthetic construct
  misc_feature 1..22: note = chemically synthesized
  source 1..22: mol_type = other DNA
ccaaggagagttcaagaactga

SEQ ID NO: 63897 - DNA, 22 bp, synthetic construct
  misc_feature 1..22: note = chemically synthesized
  source 1..22: mol_type = other DNA
aagaactgatggtttgagaata

SEQ ID NO: 63898 - DNA, 22 bp, synthetic construct
  misc_feature 1..22: note = chemically synthesized
  source 1..22: mol_type = other DNA
atggtttgagaatatttttgct

SEQ ID NO: 63899 - DNA, 22 bp, synthetic construct
  misc_feature 1..22: note = chemically synthesized
  source 1..22: mol_type = other DNA
gagaatatttttgcttgtttct

SEQ ID NO: 63900 - DNA, 22 bp, synthetic construct
  misc_feature 1..22: note = chemically synthesized
  source 1..22: mol_type = other DNA
agaatatttttgcttgtttcta

SEQ ID NO: 63901 - DNA, 22 bp, synthetic construct
  misc_feature 1..22: note = chemically synthesized
  source 1..22: mol_type = other DNA
ttgcttgtttctatgggaacag

SEQ ID NO: 63902 - DNA, 22 bp, synthetic construct
  misc_feature 1..22: note = chemically synthesized
  source 1..22: mol_type = other DNA
tgcttgtttctatgggaacagc

SEQ ID NO: 63903 - DNA, 22 bp, synthetic construct
  misc_feature 1..22: note = chemically synthesized
  source 1..22: mol_type = other DNA
gcttgtttctatgggaacagct

SEQ ID NO: 63904 - DNA, 22 bp, synthetic construct
  misc_feature 1..22: note = chemically synthesized
  source 1..22: mol_type = other DNA
cttgtttctatgggaacagctc

SEQ ID NO: 63905 - DNA, 22 bp, synthetic construct
  misc_feature 1..22: note = chemically synthesized
  source 1..22: mol_type = other DNA
gtttctatgggaacagctcagg

SEQ ID NO: 63906 - DNA, 22 bp, synthetic construct
  misc_feature 1..22: note = chemically synthesized
  source 1..22: mol_type = other DNA
tttctatgggaacagctcaggc

SEQ ID NO: 63907 - DNA, 22 bp, synthetic construct
  misc_feature 1..22: note = chemically synthesized
  source 1..22: mol_type = other DNA
ctatgggaacagctcaggctgg

SEQ ID NO: 63908 - DNA, 22 bp, synthetic construct
  misc_feature 1..22: note = chemically synthesized
  source 1..22: mol_type = other DNA
tatgggaacagctcaggctggt

SEQ ID NO: 63909 - DNA, 22 bp, synthetic construct
  misc_feature 1..22: note = chemically synthesized
  source 1..22: mol_type = other DNA
tgggaacagctcaggctggttg

SEQ ID NO: 63910 - DNA, 22 bp, synthetic construct
  misc_feature 1..22: note = chemically synthesized
  source 1..22: mol_type = other DNA
aggctggttgagcaaccttacc

SEQ ID NO: 63911 - DNA, 22 bp, synthetic construct
  misc_feature 1..22: note = chemically synthesized
  source 1..22: mol_type = other DNA
gttgagcaaccttacctttaaa

SEQ ID NO: 63912 - DNA, 22 bp, synthetic construct
  misc_feature 1..22: note = chemically synthesized
  source 1..22: mol_type = other DNA
agcaaccttacctttaaagaag

SEQ ID NO: 63913 - DNA, 22 bp, synthetic construct
  misc_feature 1..22: note = chemically synthesized
  source 1..22: mol_type = other DNA
acctttaaagaagatgtaattc

SEQ ID NO: 63914 - DNA, 22 bp, synthetic construct
  misc_feature 1..22: note = chemically synthesized
  source 1..22: mol_type = other DNA
cctttaaagaagatgtaattca

SEQ ID NO: 63915 - DNA, 22 bp, synthetic construct
  misc_feature 1..22: note = chemically synthesized
  source 1..22: mol_type = other DNA
taaagaagatgtaattcaccag

SEQ ID NO: 63916 - DNA, 22 bp, synthetic construct
  misc_feature 1..22: note = chemically synthesized
  source 1..22: mol_type = other DNA
aaagaagatgtaattcaccaga

SEQ ID NO: 63917 - DNA, 22 bp, synthetic construct
  misc_feature 1..22: note = chemically synthesized
  source 1..22: mol_type = other DNA
aagaagatgtaattcaccagag

SEQ ID NO: 63918 - DNA, 22 bp, synthetic construct
  misc_feature 1..22: note = chemically synthesized
  source 1..22: mol_type = other DNA
accagagcaaaaactgtgtctc

SEQ ID NO: 63919 - DNA, 22 bp, synthetic construct
  misc_feature 1..22: note = chemically synthesized
  source 1..22: mol_type = other DNA
tgtctctgtcaagctccttgac

SEQ ID NO: 63920 - DNA, 22 bp, synthetic construct
  misc_feature 1..22: note = chemically synthesized
  source 1..22: mol_type = other DNA
tgtcaagctccttgaccaaatc

SEQ ID NO: 63921 - DNA, 22 bp, synthetic construct
  misc_feature 1..22: note = chemically synthesized
  source 1..22: mol_type = other DNA
tcaagctccttgaccaaatcca

SEQ ID NO: 63922 - DNA, 22 bp, synthetic construct
  misc_feature 1..22: note = chemically synthesized
  source 1..22: mol_type = other DNA
cttgaccaaatccacaattttc

SEQ ID NO: 63923 - DNA, 22 bp, synthetic construct
  misc_feature 1..22: note = chemically synthesized
  source 1..22: mol_type = other DNA
gaccaaatccacaattttccct

SEQ ID NO: 63924 - DNA, 22 bp, synthetic construct
  misc_feature 1..22: note = chemically synthesized
  source 1..22: mol_type = other DNA
accaaatccacaattttccctt

SEQ ID NO: 63925 - DNA, 22 bp, synthetic construct
  misc_feature 1..22: note = chemically synthesized
  source 1..22: mol_type = other DNA
tcccttgagtacccttctccac

SEQ ID NO: 63926 - DNA, 22 bp, synthetic construct
  misc_feature 1..22: note = chemically synthesized
  source 1..22: mol_type = other DNA
cccttgagtacccttctccacg

SEQ ID NO: 63927 - DNA, 22 bp, synthetic construct
  misc_feature 1..22: note = chemically synthesized
  source 1..22: mol_type = other DNA
ccttgagtacccttctccacgt

SEQ ID NO: 63928 - DNA, 22 bp, synthetic construct
  misc_feature 1..22: note = chemically synthesized
  source 1..22: mol_type = other DNA
gagtacccttctccacgtaatc

SEQ ID NO: 63929 - DNA, 22 bp, synthetic construct
  misc_feature 1..22: note = chemically synthesized
  source 1..22: mol_type = other DNA
agtacccttctccacgtaatcg

SEQ ID NO: 63930 - DNA, 22 bp, synthetic construct
  misc_feature 1..22: note = chemically synthesized
  source 1..22: mol_type = other DNA
ctccacgtaatcgttgatctgt

SEQ ID NO: 63931 - DNA, 22 bp, synthetic construct
  misc_feature 1..22: note = chemically synthesized
  source 1..22: mol_type = other DNA
tccacgtaatcgttgatctgtt

SEQ ID NO: 63932 - DNA, 22 bp, synthetic construct
  misc_feature 1..22: note = chemically synthesized
  source 1..22: mol_type = other DNA
cacgtaatcgttgatctgtttc

SEQ ID NO: 63933 - DNA, 22 bp, synthetic construct
  misc_feature 1..22: note = chemically synthesized
  source 1..22: mol_type = other DNA
atctgtttcttggcctcttcgg

SEQ ID NO: 63934 - DNA, 22 bp, synthetic construct
  misc_feature 1..22: note = chemically synthesized
  source 1..22: mol_type = other DNA
tttcttggcctcttcggtgtcc

SEQ ID NO: 63935 - DNA, 22 bp, synthetic construct
  misc_feature 1..22: note = chemically synthesized
  source 1..22: mol_type = other DNA
cttggcctcttcggtgtccccg

SEQ ID NO: 63936 - DNA, 22 bp, synthetic construct
  misc_feature 1..22: note = chemically synthesized
  source 1..22: mol_type = other DNA
ttggcctcttcggtgtccccga

SEQ ID NO: 63937 - DNA, 22 bp, synthetic construct
  misc_feature 1..22: note = chemically synthesized
  source 1..22: mol_type = other DNA
ggcctcttcggtgtccccgaag

SEQ ID NO: 63938 - DNA, 22 bp, synthetic construct
  misc_feature 1..22: note = chemically synthesized
  source 1..22: mol_type = other DNA
gcctcttcggtgtccccgaagt

SEQ ID NO: 63939 - DNA, 22 bp, synthetic construct
  misc_feature 1..22: note = chemically synthesized
  source 1..22: mol_type = other DNA
ttcggtgtccccgaagttgaca

SEQ ID NO: 63940 - DNA, 22 bp, synthetic construct
  misc_feature 1..22: note = chemically synthesized
  source 1..22: mol_type = other DNA
cggtgtccccgaagttgacagt

SEQ ID NO: 63941 - DNA, 22 bp, synthetic construct
  misc_feature 1..22: note = chemically synthesized
  source 1..22: mol_type = other DNA
ggtgtccccgaagttgacagtg

SEQ ID NO: 63942 - DNA, 22 bp, synthetic construct
  misc_feature 1..22: note = chemically synthesized
  source 1..22: mol_type = other DNA
acagtgaaggcttctgagtggt

SEQ ID NO: 63943 - DNA, 22 bp, synthetic construct
  misc_feature 1..22: note = chemically synthesized
  source 1..22: mol_type = other DNA
ctgagtggtacaactttttaac

SEQ ID NO: 63944 - DNA, 22 bp, synthetic construct
  misc_feature 1..22: note = chemically synthesized
  source 1..22: mol_type = other DNA
tgagtggtacaactttttaaca

SEQ ID NO: 63945 - DNA, 22 bp, synthetic construct
  misc_feature 1..22: note = chemically synthesized
  source 1..22: mol_type = other DNA
agtggtacaactttttaacatc

SEQ ID NO: 63946 - DNA, 22 bp, synthetic construct
  misc_feature 1..22: note = chemically synthesized
  source 1..22: mol_type = other DNA
tttaacatcctccaaaaactta

SEQ ID NO: 63947 - DNA, 22 bp, synthetic construct
  misc_feature 1..22: note = chemically synthesized
  source 1..22: mol_type = other DNA
ttaacatcctccaaaaacttat

SEQ ID NO: 63948 - DNA, 22 bp, synthetic construct
  misc_feature 1..22: note = chemically synthesized
  source 1..22: mol_type = other DNA
taacatcctccaaaaacttatc

SEQ ID NO: 63949 - DNA, 22 bp, synthetic construct
  misc_feature 1..22: note = chemically synthesized
  source 1..22: mol_type = other DNA
aacatcctccaaaaacttatcc

SEQ ID NO: 63950 - DNA, 22 bp, synthetic construct
  misc_feature 1..22: note = chemically synthesized
  source 1..22: mol_type = other DNA
acatcctccaaaaacttatcca

SEQ ID NO: 63951 - DNA, 22 bp, synthetic construct
  misc_feature 1..22: note = chemically synthesized
  source 1..22: mol_type = other DNA
caaaaacttatccactagcttc

SEQ ID NO: 63952 - DNA, 22 bp, synthetic construct
  misc_feature 1..22: note = chemically synthesized
  source 1..22: mol_type = other DNA
atccactagcttcaggccctcg

SEQ ID NO: 63953 - DNA, 22 bp, synthetic construct
  misc_feature 1..22: note = chemically synthesized
  source 1..22: mol_type = other DNA
tccactagcttcaggccctcgc

SEQ ID NO: 63954 - DNA, 22 bp, synthetic construct
  misc_feature 1..22: note = chemically synthesized
  source 1..22: mol_type = other DNA
gcttcaggccctcgctgaggaa

SEQ ID NO: 63955 - DNA, 22 bp, synthetic construct
  misc_feature 1..22: note = chemically synthesized
  source 1..22: mol_type = other DNA
caggccctcgctgaggaacagg

SEQ ID NO: 63956 - DNA, 22 bp, synthetic construct
  misc_feature 1..22: note = chemically synthesized
  source 1..22: mol_type = other DNA
aggccctcgctgaggaacaggc

SEQ ID NO: 63957 - DNA, 22 bp, synthetic construct
  misc_feature 1..22: note = chemically synthesized
  source 1..22: mol_type = other DNA
gctgaggaacaggccattgccg

SEQ ID NO: 63958 - DNA, 22 bp, synthetic construct
  misc_feature 1..22: note = chemically synthesized
  source 1..22: mol_type = other DNA
aggaacaggccattgccggtgg

SEQ ID NO: 63959 - DNA, 22 bp, synthetic construct
  misc_feature 1..22: note = chemically synthesized
  source 1..22: mol_type = other DNA
ccggtggtcagctggagctggc

SEQ ID NO: 63960 - DNA, 22 bp, synthetic construct
  misc_feature 1..22: note = chemically synthesized
  source 1..22: mol_type = other DNA
gagctggctgtctggctggttg

SEQ ID NO: 63961 - DNA, 22 bp, synthetic construct
  misc_feature 1..22: note = chemically synthesized
  source 1..22: mol_type = other DNA
gctgtctggctggttgagggta

SEQ ID NO: 63962 - DNA, 22 bp, synthetic construct
  misc_feature 1..22: note = chemically synthesized
  source 1..22: mol_type = other DNA
tctggctggttgagggtacgga

SEQ ID NO: 63963 - DNA, 22 bp, synthetic construct
  misc_feature 1..22: note = chemically synthesized
  source 1..22: mol_type = other DNA
gctggttgagggtacggaggag

SEQ ID NO: 63964 - DNA, 22 bp, synthetic construct
  misc_feature 1..22: note = chemically synthesized
  source 1..22: mol_type = other DNA
gttgagggtacggaggagttcc

SEQ ID NO: 63965 - DNA, 22 bp, synthetic construct
  misc_feature 1..22: note = chemically synthesized
  source 1..22: mol_type = other DNA
agggtacggaggagttcctgga

SEQ ID NO: 63966 - DNA, 22 bp, synthetic construct
  misc_feature 1..22: note = chemically synthesized
  source 1..22: mol_type = other DNA
ctggaagccttcatggatctga

SEQ ID NO: 63967 - DNA, 22 bp, synthetic construct
  misc_feature 1..22: note = chemically synthesized
  source 1..22: mol_type = other DNA
gaagccttcatggatctgagcc

SEQ ID NO: 63968 - DNA, 22 bp, synthetic construct
  misc_feature 1..22: note = chemically synthesized
  source 1..22: mol_type = other DNA
catggatctgagcctccggaat

SEQ ID NO: 63969 - DNA, 22 bp, synthetic construct
  misc_feature 1..22: note = chemically synthesized
  source 1..22: mol_type = other DNA
atggatctgagcctccggaatc

SEQ ID NO: 63970 - DNA, 22 bp, synthetic construct
  misc_feature 1..22: note = chemically synthesized
  source 1..22: mol_type = other DNA
agcctccggaatctccgtgagg

SEQ ID NO: 63971 - DNA, 22 bp, synthetic construct
  misc_feature 1..22: note = chemically synthesized
  source 1..22: mol_type = other DNA
cggaatctccgtgaggttgaaa

SEQ ID NO: 63972 - DNA, 22 bp, synthetic construct
  misc_feature 1..22: note = chemically synthesized
  source 1..22: mol_type = other DNA
cgtgaggttgaaattcaggccc

SEQ ID NO: 63973 - DNA, 22 bp, synthetic construct
  misc_feature 1..22: note = chemically synthesized
  source 1..22: mol_type = other DNA
aaattcaggccctccaggattt

SEQ ID NO: 63974 - DNA, 22 bp, synthetic construct
  misc_feature 1..22: note = chemically synthesized
  source 1..22: mol_type = other DNA
aggccctccaggatttcatcgt

SEQ ID NO: 63975 - DNA, 22 bp, synthetic construct
  misc_feature 1..22: note = chemically synthesized
  source 1..22: mol_type = other DNA
caggatttcatcgtgagtgtca

SEQ ID NO: 63976 - DNA, 22 bp, synthetic construct
  misc_feature 1..22: note = chemically synthesized
  source 1..22: mol_type = other DNA
catcgtgagtgtcagccttggt

SEQ ID NO: 63977 - DNA, 22 bp, synthetic construct
  misc_feature 1..22: note = chemically synthesized
  source 1..22: mol_type = other DNA
atcgtgagtgtcagccttggtc

SEQ ID NO: 63978 - DNA, 22 bp, synthetic construct
  misc_feature 1..22: note = chemically synthesized
  source 1..22: mol_type = other DNA
ggtccccagggagagcattgca

SEQ ID NO: 63979 - DNA, 22 bp, synthetic construct
  misc_feature 1..22: note = chemically synthesized
  source 1..22: mol_type = other DNA
gtccccagggagagcattgcaa

SEQ ID NO: 63980 - DNA, 22 bp, synthetic construct
  misc_feature 1..22: note = chemically synthesized
  source 1..22: mol_type = other DNA
caaaggctgtagcgatgctcac

SEQ ID NO: 63981 - DNA, 22 bp, synthetic construct
  misc_feature 1..22: note = chemically synthesized
  source 1..22: mol_type = other DNA
tagcgatgctcactggggagaa

SEQ ID NO: 63982 - DNA, 22 bp, synthetic construct
  misc_feature 1..22: note = chemically synthesized
  source 1..22: mol_type = other DNA
actggggagaagaagatattgg

SEQ ID NO: 63983 - DNA, 22 bp, synthetic construct
  misc_feature 1..22: note = chemically synthesized
  source 1..22: mol_type = other DNA
gggagaagaagatattggtgct

SEQ ID NO: 63984 - DNA, 22 bp, synthetic construct
  misc_feature 1..22: note = chemically synthesized
  source 1..22: mol_type = other DNA
gtgctgttggactggtgtgcca

SEQ ID NO: 63985 - DNA, 22 bp, synthetic construct
  misc_feature 1..22: note = chemically synthesized
  source 1..22: mol_type = other DNA
ttggactggtgtgccagctggc

SEQ ID NO: 63986 - DNA, 22 bp, synthetic construct
  misc_feature 1..22: note = chemically synthesized
  source 1..22: mol_type = other DNA
gactggtgtgccagctggcggt

SEQ ID NO: 63987 - DNA, 22 bp, synthetic construct
  misc_feature 1..22: note = chemically synthesized
  source 1..22: mol_type = other DNA
gtgtgccagctggcggtatagg

SEQ ID NO: 63988 - DNA, 22 bp, synthetic construct
  misc_feature 1..22: note = chemically synthesized
  source 1..22: mol_type = other DNA
gcggtataggctgaaggcgaac

SEQ ID NO: 63989 - DNA, 22 bp, synthetic construct
  misc_feature 1..22: note = chemically synthesized
  source 1..22: mol_type = other DNA
aaggcgaactcagccaggttgg

SEQ ID NO: 63990 - DNA, 22 bp, synthetic construct
  misc_feature 1..22: note = chemically synthesized
  source 1..22: mol_type = other DNA
agccaggttgggggtgatcttg

SEQ ID NO: 63991 - DNA, 22 bp, synthetic construct
  misc_feature 1..22: note = chemically synthesized
  source 1..22: mol_type = other DNA
ggggtgatcttgttgaaggttg

SEQ ID NO: 63992 - DNA, 22 bp, synthetic construct
  misc_feature 1..22: note = chemically synthesized
  source 1..22: mol_type = other DNA
gttgaaggttgggtgatcctga

SEQ ID NO: 63993 - DNA, 22 bp, synthetic construct
  misc_feature 1..22: note = chemically synthesized
  source 1..22: mol_type = other DNA
ttgaaggttgggtgatcctgat

SEQ ID NO: 63994 - DNA, 22 bp, synthetic construct
  misc_feature 1..22: note = chemically synthesized
  source 1..22: mol_type = other DNA
aaggttgggtgatcctgatcat

SEQ ID NO: 63995 - DNA, 22 bp, synthetic construct
  misc_feature 1..22: note = chemically synthesized
  source 1..22: mol_type = other DNA
ggtgatcctgatcatggtggga

SEQ ID NO: 63996 - DNA, 22 bp, synthetic construct
  misc_feature 1..22: note = chemically synthesized
  source 1..22: mol_type = other DNA
atcatggtgggatgtatctgtc

SEQ ID NO: 63997 - DNA, 22 bp, synthetic construct
  misc_feature 1..22: note = chemically synthesized
  source 1..22: mol_type = other DNA
tcttctgggcagcatctccctg

SEQ ID NO: 63998 - DNA, 22 bp, synthetic construct
  misc_feature 1..22: note = chemically synthesized
  source 1..22: mol_type = other DNA
ctgggcagcatctccctgggga

SEQ ID NO: 63999 - DNA, 22 bp, synthetic construct
  misc_feature 1..22: note = chemically synthesized
  source 1..22: mol_type = other DNA
tgggcagcatctccctggggat

SEQ ID NO: 64000 - DNA, 22 bp, synthetic construct
  misc_feature 1..22: note = chemically synthesized
  source 1..22: mol_type = other DNA
ggcagcatctccctggggatcc

SEQ ID NO: 64001 - DNA, 22 bp, synthetic construct
  misc_feature 1..22: note = chemically synthesized
  source 1..22: mol_type = other DNA
cctggggatcctcagccaggga

SEQ ID NO: 64002 - DNA, 22 bp, synthetic construct
  misc_feature 1..22: note = chemically synthesized
  source 1..22: mol_type = other DNA
gggatcctcagccagggagaca

SEQ ID NO: 64003 - DNA, 22 bp, synthetic construct
  misc_feature 1..22: note = chemically synthesized
  source 1..22: mol_type = other DNA
agccagggagacagggaccagg

SEQ ID NO: 64004 - DNA, 22 bp, synthetic construct
  misc_feature 1..22: note = chemically synthesized
  source 1..22: mol_type = other DNA
ccagcaggaggatgccccacga

SEQ ID NO: 64005 - DNA, 22 bp, synthetic construct
  misc_feature 1..22: note = chemically synthesized
  source 1..22: mol_type = other DNA
tcctgcaagacagagatggggg

SEQ ID NO: 64006 - DNA, 22 bp, synthetic construct
  misc_feature 1..22: note = chemically synthesized
  source 1..22: mol_type = other DNA
caagacagagatgggggggcca

SEQ ID NO: 64007 - DNA, 22 bp, synthetic construct
  misc_feature 1..22: note = chemically synthesized
  source 1..22: mol_type = other DNA
ccagtgatcagggattgacacc

SEQ ID NO: 64008 - DNA, 22 bp, synthetic construct
  misc_feature 1..22: note = chemically synthesized
  source 1..22: mol_type = other DNA
acaccacgtggaagtgcctagg

SEQ ID NO: 64009 - DNA, 22 bp, synthetic construct
  misc_feature 1..22: note = chemically synthesized
  source 1..22: mol_type = other DNA
gggattattaaaccagcctgtg

SEQ ID NO: 64010 - DNA, 22 bp, synthetic construct
  misc_feature 1..22: note = chemically synthesized
  source 1..22: mol_type = other DNA
ttaaaccagcctgtgccaagta

SEQ ID NO: 64011 - DNA, 22 bp, synthetic construct
  misc_feature 1..22: note = chemically synthesized
  source 1..22: mol_type = other DNA
aaccagcctgtgccaagtactt

SEQ ID NO: 64012 - DNA, 22 bp, synthetic construct
  misc_feature 1..22: note = chemically synthesized
  source 1..22: mol_type = other DNA
tgccaagtacttgccgacatca

SEQ ID NO: 64013 - DNA, 22 bp, synthetic construct
  misc_feature 1..22: note = chemically synthesized
  source 1..22: mol_type = other DNA
gccgacatcagtaacactgaaa

SEQ ID NO: 64014 - DNA, 22 bp, synthetic construct
  misc_feature 1..22: note = chemically synthesized
  source 1..22: mol_type = other DNA
ccgacatcagtaacactgaaag

SEQ ID NO: 64015 - DNA, 22 bp, synthetic construct
  misc_feature 1..22: note = chemically synthesized
  source 1..22: mol_type = other DNA
aaagaatcagaagaatagcaaa

SEQ ID NO: 64016 - DNA, 22 bp, synthetic construct
  misc_feature 1..22: note = chemically synthesized
  source 1..22: mol_type = other DNA
accatatgccaagcactgttct

SEQ ID NO: 64017 - DNA, 22 bp, synthetic construct
  misc_feature 1..22: note = chemically synthesized
  source 1..22: mol_type = other DNA
ccatatgccaagcactgttctc

SEQ ID NO: 64018 - DNA, 22 bp, synthetic construct
  misc_feature 1..22: note = chemically synthesized
  source 1..22: mol_type = other DNA
ttctccgtgctcacatgtgtta

SEQ ID NO: 64019 - DNA, 22 bp, synthetic construct
  misc_feature 1..22: note = chemically synthesized
  source 1..22: mol_type = other DNA
tccgtgctcacatgtgttaatt

SEQ ID NO: 64020 - DNA, 22 bp, synthetic construct
  misc_feature 1..22: note = chemically synthesized
  source 1..22: mol_type = other DNA
cgtgctcacatgtgttaattca

SEQ ID NO: 64021 - DNA, 22 bp, synthetic construct
  misc_feature 1..22: note = chemically synthesized
  source 1..22: mol_type = other DNA
acatgtgttaattcattgcttt

SEQ ID NO: 64022 - DNA, 22 bp, synthetic construct
  misc_feature 1..22: note = chemically synthesized
  source 1..22: mol_type = other DNA
attcattgctttcttgtaacaa

SEQ ID NO: 64023 - DNA, 22 bp, synthetic construct
  misc_feature 1..22: note = chemically synthesized
  source 1..22: mol_type = other DNA
attgctttcttgtaacaatccc

SEQ ID NO: 64024 - DNA, 22 bp, synthetic construct
  misc_feature 1..22: note = chemically synthesized
  source 1..22: mol_type = other DNA
ctttcttgtaacaatcccgtga

SEQ ID NO: 64025 - DNA, 22 bp, synthetic construct
  misc_feature 1..22: note = chemically synthesized
  source 1..22: mol_type = other DNA
tcttgtaacaatcccgtgaggt

SEQ ID NO: 64026 - DNA, 22 bp, synthetic construct
  misc_feature 1..22: note = chemically synthesized
  source 1..22: mol_type = other DNA
cttgtaacaatcccgtgaggtg

SEQ ID NO: 64027 - DNA, 22 bp, synthetic construct
  misc_feature 1..22: note = chemically synthesized
  source 1..22: mol_type = other DNA
ttgtaacaatcccgtgaggtgc

SEQ ID NO: 64028 - DNA, 22 bp, synthetic construct
  misc_feature 1..22: note = chemically synthesized
  source 1..22: mol_type = other DNA
gtaacaatcccgtgaggtgcta

SEQ ID NO: 64029 - DNA, 22 bp, synthetic construct
  misc_feature 1..22: note = chemically synthesized
  source 1..22: mol_type = other DNA
taacaatcccgtgaggtgctaa

SEQ ID NO: 64030 - DNA, 22 bp, synthetic construct
  misc_feature 1..22: note = chemically synthesized
  source 1..22: mol_type = other DNA
atgctaatatccttcttttaca

SEQ ID NO: 64031 - DNA, 22 bp, synthetic construct
  misc_feature 1..22: note = chemically synthesized
  source 1..22: mol_type = other DNA
atatccttcttttacagatgaa

SEQ ID NO: 64032 - DNA, 22 bp, synthetic construct
  misc_feature 1..22: note = chemically synthesized
  source 1..22: mol_type = other DNA
cttttacagatgaagaaaccaa

SEQ ID NO: 64033 - DNA, 22 bp, synthetic construct
  misc_feature 1..22: note = chemically synthesized
  source 1..22: mol_type = other DNA
ttttacagatgaagaaaccaaa

SEQ ID NO: 64034 - DNA, 22 bp, synthetic construct
  misc_feature 1..22: note = chemically synthesized
  source 1..22: mol_type = other DNA
ttacagatgaagaaaccaaagc

SEQ ID NO: 64035 - DNA, 22 bp, synthetic construct
  misc_feature 1..22: note = chemically synthesized
  source 1..22: mol_type = other DNA
tacagatgaagaaaccaaagcc

SEQ ID NO: 64036 - DNA, 22 bp, synthetic construct
  misc_feature 1..22: note = chemically synthesized
  source 1..22: mol_type = other DNA
acagatgaagaaaccaaagcca

SEQ ID NO: 64037 - DNA, 22 bp, synthetic construct
  misc_feature 1..22: note = chemically synthesized
  source 1..22: mol_type = other DNA
cagatgaagaaaccaaagccag

SEQ ID NO: 64038 - DNA, 22 bp, synthetic construct
  misc_feature 1..22: note = chemically synthesized
  source 1..22: mol_type = other DNA
ggtcagctattcaatgtcactg

SEQ ID NO: 64039 - DNA, 22 bp, synthetic construct
  misc_feature 1..22: note = chemically synthesized
  source 1..22: mol_type = other DNA
ttcaatgtcactgaggaagtag

SEQ ID NO: 64040 - DNA, 22 bp, synthetic construct
  misc_feature 1..22: note = chemically synthesized
  source 1..22: mol_type = other DNA
aatgtcactgaggaagtagcag

SEQ ID NO: 64041 - DNA, 22 bp, synthetic construct
  misc_feature 1..22: note = chemically synthesized
  source 1..22: mol_type = other DNA
aggaagtagcagaaccagaatc

SEQ ID NO: 64042 - DNA, 22 bp, synthetic construct
  misc_feature 1..22: note = chemically synthesized
  source 1..22: mol_type = other DNA
catctaggtcctgcacccaggc

SEQ ID NO: 64043 - DNA, 22 bp, synthetic construct
  misc_feature 1..22: note = chemically synthesized
  source 1..22: mol_type = other DNA
ggtcctgcacccaggctctgga

SEQ ID NO: 64044 - DNA, 22 bp, synthetic construct
  misc_feature 1..22: note = chemically synthesized
  source 1..22: mol_type = other DNA
cacccaggctctggacagcaac

SEQ ID NO: 64045 - DNA, 22 bp, synthetic construct
  misc_feature 1..22: note = chemically synthesized
  source 1..22: mol_type = other DNA
tggacagcaacacttacatctg

SEQ ID NO: 64046 - DNA, 22 bp, synthetic construct
  misc_feature 1..22: note = chemically synthesized
  source 1..22: mol_type = other DNA
gacagcaacacttacatctgca

SEQ ID NO: 64047 - DNA, 22 bp, synthetic construct
  misc_feature 1..22: note = chemically synthesized
  source 1..22: mol_type = other DNA
acatctgcaatgaccctaagat

SEQ ID NO: 64048 - DNA, 22 bp, synthetic construct
  misc_feature 1..22: note = chemically synthesized
  source 1..22: mol_type = other DNA
catctgcaatgaccctaagatg

SEQ ID NO: 64049 - DNA, 22 bp, synthetic construct
  misc_feature 1..22: note = chemically synthesized
  source 1..22: mol_type = other DNA
caatgaccctaagatgcaaatg

SEQ ID NO: 64050 - DNA, 22 bp, synthetic construct
  misc_feature 1..22: note = chemically synthesized
  source 1..22: mol_type = other DNA
agatgcaaatggtacagccatt

SEQ ID NO: 64051 - DNA, 22 bp, synthetic construct
  misc_feature 1..22: note = chemically synthesized
  source 1..22: mol_type = other DNA
ttttacaaaagaagaaaatgag

SEQ ID NO: 64052 - DNA, 22 bp, synthetic construct
  misc_feature 1..22: note = chemically synthesized
  source 1..22: mol_type = other DNA
tacaaaagaagaaaatgaggca

SEQ ID NO: 64053 - DNA, 22 bp, synthetic construct
  misc_feature 1..22: note = chemically synthesized
  source 1..22: mol_type = other DNA
acaaaagaagaaaatgaggcac

SEQ ID NO: 64054 - DNA, 22 bp, synthetic construct
  misc_feature 1..22: note = chemically synthesized
  source 1..22: mol_type = other DNA
caaaagaagaaaatgaggcaca

SEQ ID NO: 64055 - DNA, 22 bp, synthetic construct
  misc_feature 1..22: note = chemically synthesized
  source 1..22: mol_type = other DNA
cccacgattatccaggaatcgg

SEQ ID NO: 64056 - DNA, 22 bp, synthetic construct
  misc_feature 1..22: note = chemically synthesized
  source 1..22: mol_type = other DNA
tccaggaatcgggccagatcag

SEQ ID NO: 64057 - DNA, 22 bp, synthetic construct
  misc_feature 1..22: note = chemically synthesized
  source 1..22: mol_type = other DNA
gaagcccttggagggcttctat

SEQ ID NO: 64058 - DNA, 22 bp, synthetic construct
  misc_feature 1..22: note = chemically synthesized
  source 1..22: mol_type = other DNA
ggagggcttctatctaatccca

SEQ ID NO: 64059 - DNA, 22 bp, synthetic construct
  misc_feature 1..22: note = chemically synthesized
  source 1..22: mol_type = other DNA
gagggcttctatctaatcccac

SEQ ID NO: 64060 - DNA, 22 bp, synthetic construct
  misc_feature 1..22: note = chemically synthesized
  source 1..22: mol_type = other DNA
ctatctaatcccactatttagt

SEQ ID NO: 64061 - DNA, 22 bp, synthetic construct
  misc_feature 1..22: note = chemically synthesized
  source 1..22: mol_type = other DNA
tatctaatcccactatttagtg

SEQ ID NO: 64062 - DNA, 22 bp, synthetic construct
  misc_feature 1..22: note = chemically synthesized
  source 1..22: mol_type = other DNA
tctaatcccactatttagtggc

SEQ ID NO: 64063 - DNA, 22 bp, synthetic construct
  misc_feature 1..22: note = chemically synthesized
  source 1..22: mol_type = other DNA
atcccactatttagtggccagg

SEQ ID NO: 64064 - DNA, 22 bp, synthetic construct
  misc_feature 1..22: note = chemically synthesized
  source 1..22: mol_type = other DNA
tttagtggccagggaaactgct

SEQ ID NO: 64065 - DNA, 22 bp, synthetic construct
  misc_feature 1..22: note = chemically synthesized
  source 1..22: mol_type = other DNA
agtggccagggaaactgctgca

SEQ ID NO: 64066 - DNA, 22 bp, synthetic construct
  misc_feature 1..22: note = chemically synthesized
  source 1..22: mol_type = other DNA
gtggccagggaaactgctgcac

SEQ ID NO: 64067 - DNA, 22 bp, synthetic construct
  misc_feature 1..22: note = chemically synthesized
  source 1..22: mol_type = other DNA
ctgcacagaagggaaatgcatc

SEQ ID NO: 64068 - DNA, 22 bp, synthetic construct
  misc_feature 1..22: note = chemically synthesized
  source 1..22: mol_type = other DNA
cacagaagggaaatgcatcttg

SEQ ID NO: 64069 - DNA, 22 bp, synthetic construct
  misc_feature 1..22: note = chemically synthesized
  source 1..22: mol_type = other DNA
gcacaatggcaacagctagaga

SEQ ID NO: 64070 - DNA, 22 bp, synthetic construct
  misc_feature 1..22: note = chemically synthesized
  source 1..22: mol_type = other DNA
cacaatggcaacagctagagag

SEQ ID NO: 64071 - DNA, 22 bp, synthetic construct
  misc_feature 1..22: note = chemically synthesized
  source 1..22: mol_type = other DNA
gagagcatggaggggctgtgat

SEQ ID NO: 64072 - DNA, 22 bp, synthetic construct
  misc_feature 1..22: note = chemically synthesized
  source 1..22: mol_type = other DNA
tgattaaacctcctgggagctg

SEQ ID NO: 64073 - DNA, 22 bp, synthetic construct
  misc_feature 1..22: note = chemically synthesized
  source 1..22: mol_type = other DNA
aacctcctgggagctgttccca

SEQ ID NO: 64074 - DNA, 22 bp, synthetic construct
  misc_feature 1..22: note = chemically synthesized
  source 1..22: mol_type = other DNA
ctgggagctgttcccacccaac

SEQ ID NO: 64075 - DNA, 22 bp, synthetic construct
  misc_feature 1..22: note = chemically synthesized
  source 1..22: mol_type = other DNA
ggagctgttcccacccaacact

SEQ ID NO: 64076 - DNA, 22 bp, synthetic construct
  misc_feature 1..22: note = chemically synthesized
  source 1..22: mol_type = other DNA
ttcccacccaacactcacaagg

SEQ ID NO: 64077 - DNA, 22 bp, synthetic construct
  misc_feature 1..22: note = chemically synthesized
  source 1..22: mol_type = other DNA
ccacccaacactcacaaggatc

SEQ ID NO: 64078 - DNA, 22 bp, synthetic construct
  misc_feature 1..22: note = chemically synthesized
  source 1..22: mol_type = other DNA
acaaggatcctcagcccttagg

SEQ ID NO: 64079 - DNA, 22 bp, synthetic construct
  misc_feature 1..22: note = chemically synthesized
  source 1..22: mol_type = other DNA
agcccttagggtttttttccca

SEQ ID NO: 64080 - DNA, 22 bp, synthetic construct
  misc_feature 1..22: note = chemically synthesized
  source 1..22: mol_type = other DNA
agggtttttttcccaagagacg

SEQ ID NO: 64081 - DNA, 22 bp, synthetic construct
  misc_feature 1..22: note = chemically synthesized
  source 1..22: mol_type = other DNA
gggtttttttcccaagagacgg

SEQ ID NO: 64082 - DNA, 22 bp, synthetic construct
  misc_feature 1..22: note = chemically synthesized
  source 1..22: mol_type = other DNA
ttttcccaagagacggggctgt

SEQ ID NO: 64083 - DNA, 22 bp, synthetic construct
  misc_feature 1..22: note = chemically synthesized
  source 1..22: mol_type = other DNA
tttcccaagagacggggctgtc

SEQ ID NO: 64084 - DNA, 22 bp, synthetic construct
  misc_feature 1..22: note = chemically synthesized
  source 1..22: mol_type = other DNA
ttcccaagagacggggctgtcc

SEQ ID NO: 64085 - DNA, 22 bp, synthetic construct
  misc_feature 1..22: note = chemically synthesized
  source 1..22: mol_type = other DNA
tcccaagagacggggctgtccc

SEQ ID NO: 64086 - DNA, 22 bp, synthetic construct
  misc_feature 1..22: note = chemically synthesized
  source 1..22: mol_type = other DNA
cccaagagacggggctgtcccc

SEQ ID NO: 64087 - DNA, 22 bp, synthetic construct
  misc_feature 1..22: note = chemically synthesized
  source 1..22: mol_type = other DNA
ccaagagacggggctgtcccca

SEQ ID NO: 64088 - DNA, 22 bp, synthetic construct
  misc_feature 1..22: note = chemically synthesized
  source 1..22: mol_type = other DNA
tccccacaatgctctgtggtcc

SEQ ID NO: 64089 - DNA, 22 bp, synthetic construct
  misc_feature 1..22: note = chemically synthesized
  source 1..22: mol_type = other DNA
tgtggtcccagacacaagaata

SEQ ID NO: 64090 - DNA, 22 bp, synthetic construct
  misc_feature 1..22: note = chemically synthesized
  source 1..22: mol_type = other DNA
tggtcccagacacaagaatagg

SEQ ID NO: 64091 - DNA, 22 bp, synthetic construct
  misc_feature 1..22: note = chemically synthesized
  source 1..22: mol_type = other DNA
atgctcctgcagtcagcttacc

SEQ ID NO: 64092 - DNA, 22 bp, synthetic construct
  misc_feature 1..22: note = chemically synthesized
  source 1..22: mol_type = other DNA
ctgcagtcagcttacctgccgt

SEQ ID NO: 64093 - DNA, 22 bp, synthetic construct
  misc_feature 1..22: note = chemically synthesized
  source 1..22: mol_type = other DNA
cagtcagcttacctgccgtctg

SEQ ID NO: 64094 - DNA, 22 bp, synthetic construct
  misc_feature 1..22: note = chemically synthesized
  source 1..22: mol_type = other DNA
acctgccgtctgggtcactaat

SEQ ID NO: 64095 - DNA, 22 bp, synthetic construct
  misc_feature 1..22: note = chemically synthesized
  source 1..22: mol_type = other DNA
cctgccgtctgggtcactaatg

SEQ ID NO: 64096 - DNA, 22 bp, synthetic construct
  misc_feature 1..22: note = chemically synthesized
  source 1..22: mol_type = other DNA
ccgtctgggtcactaatggtgt

SEQ ID NO: 64097 - DNA, 22 bp, synthetic construct
  misc_feature 1..22: note = chemically synthesized
  source 1..22: mol_type = other DNA
ggtcactaatggtgtcccagtt

SEQ ID NO: 64098 - DNA, 22 bp, synthetic construct
  misc_feature 1..22: note = chemically synthesized
  source 1..22: mol_type = other DNA
atggtgtcccagttctgggctc

SEQ ID NO: 64099 - DNA, 22 bp, synthetic construct
  misc_feature 1..22: note = chemically synthesized
  source 1..22: mol_type = other DNA
tgggctcttgctgtcaggggct

SEQ ID NO: 64100 - DNA, 22 bp, synthetic construct
  misc_feature 1..22: note = chemically synthesized
  source 1..22: mol_type = other DNA
ggctcttgctgtcaggggcttt

SEQ ID NO: 64101 - DNA, 22 bp, synthetic construct
  misc_feature 1..22: note = chemically synthesized
  source 1..22: mol_type = other DNA
ttgctgtcaggggctttagaga

SEQ ID NO: 64102 - DNA, 22 bp, synthetic construct
  misc_feature 1..22: note = chemically synthesized
  source 1..22: mol_type = other DNA
gctgtcaggggctttagagacg

SEQ ID NO: 64103 - DNA, 22 bp, synthetic construct
  misc_feature 1..22: note = chemically synthesized
  source 1..22: mol_type = other DNA
ctgtcaggggctttagagacgc

SEQ ID NO: 64104 - DNA, 22 bp, synthetic construct
  misc_feature 1..22: note = chemically synthesized
  source 1..22: mol_type = other DNA
tcaggggctttagagacgctca

SEQ ID NO: 64105 - DNA, 22 bp, synthetic construct
  misc_feature 1..22: note = chemically synthesized
  source 1..22: mol_type = other DNA
tagagacgctcatctctccttg

SEQ ID NO: 64106 - DNA, 22 bp, synthetic construct
  misc_feature 1..22: note = chemically synthesized
  source 1..22: mol_type = other DNA
agagacgctcatctctccttga

SEQ ID NO: 64107 - DNA, 22 bp, synthetic construct
  misc_feature 1..22: note = chemically synthesized
  source 1..22: mol_type = other DNA
gagacgctcatctctccttgaa

SEQ ID NO: 64108 - DNA, 22 bp, synthetic construct
  misc_feature 1..22: note = chemically synthesized
  source 1..22: mol_type = other DNA
atctctccttgaaagcaggggt

SEQ ID NO: 64109 - DNA, 22 bp, synthetic construct
  misc_feature 1..22: note = chemically synthesized
  source 1..22: mol_type = other DNA
tccttgaaagcaggggtttgtg

SEQ ID NO: 64110 - DNA, 22 bp, synthetic construct
  misc_feature 1..22: note = chemically synthesized
  source 1..22: mol_type = other DNA
cttgaaagcaggggtttgtgct

SEQ ID NO: 64111 - DNA, 22 bp, synthetic construct
  misc_feature 1..22: note = chemically synthesized
  source 1..22: mol_type = other DNA
gaaagcaggggtttgtgctgct

SEQ ID NO: 64112 - DNA, 22 bp, synthetic construct
  misc_feature 1..22: note = chemically synthesized
  source 1..22: mol_type = other DNA
aaagcaggggtttgtgctgctt

SEQ ID NO: 64113 - DNA, 22 bp, synthetic construct
  misc_feature 1..22: note = chemically synthesized
  source 1..22: mol_type = other DNA
gtgctgctttaaagtagatgga

SEQ ID NO: 64114 - DNA, 22 bp, synthetic construct
  misc_feature 1..22: note = chemically synthesized
  source 1..22: mol_type = other DNA
tgctgctttaaagtagatggag

SEQ ID NO: 64115 - DNA, 22 bp, synthetic construct
  misc_feature 1..22: note = chemically synthesized
  source 1..22: mol_type = other DNA
ctttaaagtagatggaggaggt

SEQ ID NO: 64116 - DNA, 22 bp, synthetic construct
  misc_feature 1..22: note = chemically synthesized
  source 1..22: mol_type = other DNA
taaagtagatggaggaggtggg

SEQ ID NO: 64117 - DNA, 22 bp, synthetic construct
  misc_feature 1..22: note = chemically synthesized
  source 1..22: mol_type = other DNA
aaagtagatggaggaggtggga

SEQ ID NO: 64118 - DNA, 22 bp, synthetic construct
  misc_feature 1..22: note = chemically synthesized
  source 1..22: mol_type = other DNA
aagtagatggaggaggtgggaa

SEQ ID NO: 64119 - DNA, 22 bp, synthetic construct
  misc_feature 1..22: note = chemically synthesized
  source 1..22: mol_type = other DNA
ttttaacttcagatagacctgg

SEQ ID NO: 64120 - DNA, 22 bp, synthetic construct
  misc_feature 1..22: note = chemically synthesized
  source 1..22: mol_type = other DNA
ttaacttcagatagacctggga

SEQ ID NO: 64121 - DNA, 22 bp, synthetic construct
  misc_feature 1..22: note = chemically synthesized
  source 1..22: mol_type = other DNA
taacttcagatagacctgggat

SEQ ID NO: 64122 - DNA, 22 bp, synthetic construct
  misc_feature 1..22: note = chemically synthesized
  source 1..22: mol_type = other DNA
aacttcagatagacctgggatc

SEQ ID NO: 64123 - DNA, 22 bp, synthetic construct
  misc_feature 1..22: note = chemically synthesized
  source 1..22: mol_type = other DNA
acttcagatagacctgggatct

SEQ ID NO: 64124 - DNA, 22 bp, synthetic construct
  misc_feature 1..22: note = chemically synthesized
  source 1..22: mol_type = other DNA
cagatagacctgggatctaatc

SEQ ID NO: 64125 - DNA, 22 bp, synthetic construct
  misc_feature 1..22: note = chemically synthesized
  source 1..22: mol_type = other DNA
agatagacctgggatctaatct

SEQ ID NO: 64126 - DNA, 22 bp, synthetic construct
  misc_feature 1..22: note = chemically synthesized
  source 1..22: mol_type = other DNA
ggatctaatctgactctgtcac

SEQ ID NO: 64127 - DNA, 22 bp, synthetic construct
  misc_feature 1..22: note = chemically synthesized
  source 1..22: mol_type = other DNA
atctgactctgtcactttccag

SEQ ID NO: 64128 - DNA, 22 bp, synthetic construct
  misc_feature 1..22: note = chemically synthesized
  source 1..22: mol_type = other DNA
actctgtcactttccaggtgta

SEQ ID NO: 64129 - DNA, 22 bp, synthetic construct
  misc_feature 1..22: note = chemically synthesized
  source 1..22: mol_type = other DNA
tgtcactttccaggtgtatgag

SEQ ID NO: 64130 - DNA, 22 bp, synthetic construct
  misc_feature 1..22: note = chemically synthesized
  source 1..22: mol_type = other DNA
tcactttccaggtgtatgagcc

SEQ ID NO: 64131 - DNA, 22 bp, synthetic construct
  misc_feature 1..22: note = chemically synthesized
  source 1..22: mol_type = other DNA
tccaggtgtatgagccaggaca

SEQ ID NO: 64132 - DNA, 22 bp, synthetic construct
  misc_feature 1..22: note = chemically synthesized
  source 1..22: mol_type = other DNA
ccaggtgtatgagccaggacaa

SEQ ID NO: 64133 - DNA, 22 bp, synthetic construct
  misc_feature 1..22: note = chemically synthesized
  source 1..22: mol_type = other DNA
caggtgtatgagccaggacaag

SEQ ID NO: 64134 - DNA, 22 bp, synthetic construct
  misc_feature 1..22: note = chemically synthesized
  source 1..22: mol_type = other DNA
atctccctggtcctcattttgc

SEQ ID NO: 64135 - DNA, 22 bp, synthetic construct
  misc_feature 1..22: note = chemically synthesized
  source 1..22: mol_type = other DNA
cctggtcctcattttgcctcat

SEQ ID NO: 64136 - DNA, 22 bp, synthetic construct
  misc_feature 1..22: note = chemically synthesized
  source 1..22: mol_type = other DNA
gtcctcattttgcctcatacat

SEQ ID NO: 64137 - DNA, 22 bp, synthetic construct
  misc_feature 1..22: note = chemically synthesized
  source 1..22: mol_type = other DNA
attttgcctcatacataaagtg

SEQ ID NO: 64138 - DNA, 22 bp, synthetic construct
  misc_feature 1..22: note = chemically synthesized
  source 1..22: mol_type = other DNA
tgcctcatacataaagtgatgt

SEQ ID NO: 64139 - DNA, 22 bp, synthetic construct
  misc_feature 1..22: note = chemically synthesized
  source 1..22: mol_type = other DNA
gcctcatacataaagtgatgtt

SEQ ID NO: 64140 - DNA, 22 bp, synthetic construct
  misc_feature 1..22: note = chemically synthesized
  source 1..22: mol_type = other DNA
cctcatacataaagtgatgttt

SEQ ID NO: 64141 - DNA, 22 bp, synthetic construct
  misc_feature 1..22: note = chemically synthesized
  source 1..22: mol_type = other DNA
atacataaagtgatgtttatgt

SEQ ID NO: 64142 - DNA, 22 bp, synthetic construct
  misc_feature 1..22: note = chemically synthesized
  source 1..22: mol_type = other DNA
atgtatgagaatttagtgaaat

SEQ ID NO: 64143 - DNA, 22 bp, synthetic construct
  misc_feature 1..22: note = chemically synthesized
  source 1..22: mol_type = other DNA
tgtatgagaatttagtgaaata

SEQ ID NO: 64144 - DNA, 22 bp, synthetic construct
  misc_feature 1..22: note = chemically synthesized
  source 1..22: mol_type = other DNA
agtgaaataagtctcaacacca

SEQ ID NO: 64145 - DNA, 22 bp, synthetic construct
  misc_feature 1..22: note = chemically synthesized
  source 1..22: mol_type = other DNA
gtgaaataagtctcaacaccaa

SEQ ID NO: 64146 - DNA, 22 bp, synthetic construct
  misc_feature 1..22: note = chemically synthesized
  source 1..22: mol_type = other DNA
aacaccaaaccttacatcaaaa

SEQ ID NO: 64147 - DNA, 22 bp, synthetic construct
  misc_feature 1..22: note = chemically synthesized
  source 1..22: mol_type = other DNA
acatcaaaaggatctgagaggg

SEQ ID NO: 64148 - DNA, 22 bp, synthetic construct
  misc_feature 1..22: note = chemically synthesized
  source 1..22: mol_type = other DNA
catcaaaaggatctgagagggc

SEQ ID NO: 64149 - DNA, 22 bp, synthetic construct
  misc_feature 1..22: note = chemically synthesized
  source 1..22: mol_type = other DNA
agagggcaactcttttgaggga

SEQ ID NO: 64150 - DNA, 22 bp, synthetic construct
  misc_feature 1..22: note = chemically synthesized
  source 1..22: mol_type = other DNA
ttttgagggaggggttggcagg

SEQ ID NO: 64151 - DNA, 22 bp, synthetic construct
  misc_feature 1..22: note = chemically synthesized
  source 1..22: mol_type = other DNA
ttgagggaggggttggcaggtg

SEQ ID NO: 64152 - DNA, 22 bp, synthetic construct
  misc_feature 1..22: note = chemically synthesized
  source 1..22: mol_type = other DNA
tgagggaggggttggcaggtgt

SEQ ID NO: 64153 - DNA, 22 bp, synthetic construct
  misc_feature 1..22: note = chemically synthesized
  source 1..22: mol_type = other DNA
gagggaggggttggcaggtgtt

SEQ ID NO: 64154 - DNA, 22 bp, synthetic construct
  misc_feature 1..22: note = chemically synthesized
  source 1..22: mol_type = other DNA
agggaggggttggcaggtgttg

SEQ ID NO: 64155 - DNA, 22 bp, synthetic construct
  misc_feature 1..22: note = chemically synthesized
  source 1..22: mol_type = other DNA
gcaggtgttgcaaattcaaagg

SEQ ID NO: 64156 - DNA, 22 bp, synthetic construct
  misc_feature 1..22: note = chemically synthesized
  source 1..22: mol_type = other DNA
caaattcaaaggcttcaggtga

SEQ ID NO: 64157 - DNA, 22 bp, synthetic construct
  misc_feature 1..22: note = chemically synthesized
  source 1..22: mol_type = other DNA
aaaggcttcaggtgataggcca

SEQ ID NO: 64158 - DNA, 22 bp, synthetic construct
  misc_feature 1..22: note = chemically synthesized
  source 1..22: mol_type = other DNA
caggtgataggccagtgaggaa

SEQ ID NO: 64159 - DNA, 22 bp, synthetic construct
  misc_feature 1..22: note = chemically synthesized
  source 1..22: mol_type = other DNA
aggtgataggccagtgaggaat

SEQ ID NO: 64160 - DNA, 22 bp, synthetic construct
  misc_feature 1..22: note = chemically synthesized
  source 1..22: mol_type = other DNA
catacccggggctgagacaata

SEQ ID NO: 64161 - DNA, 22 bp, synthetic construct
  misc_feature 1..22: note = chemically synthesized
  source 1..22: mol_type = other DNA
atacccggggctgagacaatag

SEQ ID NO: 64162 - DNA, 22 bp, synthetic construct
  misc_feature 1..22: note = chemically synthesized
  source 1..22: mol_type = other DNA
agacaatagggagtggtggggc

SEQ ID NO: 64163 - DNA, 22 bp, synthetic construct
  misc_feature 1..22: note = chemically synthesized
  source 1..22: mol_type = other DNA
tggctgaaccagcgagagcagg

SEQ ID NO: 64164 - DNA, 22 bp, synthetic construct
  misc_feature 1..22: note = chemically synthesized
  source 1..22: mol_type = other DNA
aaccagcgagagcaggctctgc

SEQ ID NO: 64165 - DNA, 22 bp, synthetic construct
  misc_feature 1..22: note = chemically synthesized
  source 1..22: mol_type = other DNA
tgccgagcaatggtcaaagtca

SEQ ID NO: 64166 - DNA, 22 bp, synthetic construct
  misc_feature 1..22: note = chemically synthesized
  source 1..22: mol_type = other DNA
ccgagcaatggtcaaagtcaac

SEQ ID NO: 64167 - DNA, 22 bp, synthetic construct
  misc_feature 1..22: note = chemically synthesized
  source 1..22: mol_type = other DNA
ccctgccccacagtgatccttc

SEQ ID NO: 64168 - DNA, 22 bp, synthetic construct
  misc_feature 1..22: note = chemically synthesized
  source 1..22: mol_type = other DNA
ccccacagtgatccttctactc

SEQ ID NO: 64169 - DNA, 22 bp, synthetic construct
  misc_feature 1..22: note = chemically synthesized
  source 1..22: mol_type = other DNA
ctactccagatatgcccaggct

SEQ ID NO: 64170 - DNA, 22 bp, synthetic construct
  misc_feature 1..22: note = chemically synthesized
  source 1..22: mol_type = other DNA
tactccagatatgcccaggctt

SEQ ID NO: 64171 - DNA, 22 bp, synthetic construct
  misc_feature 1..22: note = chemically synthesized
  source 1..22: mol_type = other DNA
ctccagatatgcccaggcttcg

SEQ ID NO: 64172 - DNA, 22 bp, synthetic construct
  misc_feature 1..22: note = chemically synthesized
  source 1..22: mol_type = other DNA
cagatatgcccaggcttcggac

SEQ ID NO: 64173 - DNA, 22 bp, synthetic construct
  misc_feature 1..22: note = chemically synthesized
  source 1..22: mol_type = other DNA
cggaccaccagcctgcagcccc

SEQ ID NO: 64174 - DNA, 22 bp, synthetic construct
  misc_feature 1..22: note = chemically synthesized
  source 1..22: mol_type = other DNA
ggaccaccagcctgcagccccc

SEQ ID NO: 64175 - DNA, 22 bp, synthetic construct
  misc_feature 1..22: note = chemically synthesized
  source 1..22: mol_type = other DNA
cagccccctaggtagaacctgc

SEQ ID NO: 64176 - DNA, 22 bp, synthetic construct
  misc_feature 1..22: note = chemically synthesized
  source 1..22: mol_type = other DNA
ggtagaacctgccgtcttcaca

SEQ ID NO: 64177 - DNA, 22 bp, synthetic construct
  misc_feature 1..22: note = chemically synthesized
  source 1..22: mol_type = other DNA
ccgtcttcacagatgggaaaac

SEQ ID NO: 64178 - DNA, 22 bp, synthetic construct
  misc_feature 1..22: note = chemically synthesized
  source 1..22: mol_type = other DNA
cacagatgggaaaactgaggtc

SEQ ID NO: 64179 - DNA, 22 bp, synthetic construct
  misc_feature 1..22: note = chemically synthesized
  source 1..22: mol_type = other DNA
acagatgggaaaactgaggtcc

SEQ ID NO: 64180 - DNA, 22 bp, synthetic construct
  misc_feature 1..22: note = chemically synthesized
  source 1..22: mol_type = other DNA
aggtcctagctgaggagaatat

SEQ ID NO: 64181 - DNA, 22 bp, synthetic construct
  misc_feature 1..22: note = chemically synthesized
  source 1..22: mol_type = other DNA
gctgaggagaatatgcccggca

SEQ ID NO: 64182 - DNA, 22 bp, synthetic construct
  misc_feature 1..22: note = chemically synthesized
  source 1..22: mol_type = other DNA
aggagaatatgcccggcagcca

SEQ ID NO: 64183 - DNA, 22 bp, synthetic construct
  misc_feature 1..22: note = chemically synthesized
  source 1..22: mol_type = other DNA
ttaactactagtcacaaaacca

SEQ ID NO: 64184 - DNA, 22 bp, synthetic construct
  misc_feature 1..22: note = chemically synthesized
  source 1..22: mol_type = other DNA
actactagtcacaaaaccaaaa

SEQ ID NO: 64185 - DNA, 22 bp, synthetic construct
  misc_feature 1..22: note = chemically synthesized
  source 1..22: mol_type = other DNA
ctagtcacaaaaccaaaaccat

SEQ ID NO: 64186 - DNA, 22 bp, synthetic construct
  misc_feature 1..22: note = chemically synthesized
  source 1..22: mol_type = other DNA
gtcacaaaaccaaaaccatcat

SEQ ID NO: 64187 - DNA, 22 bp, synthetic construct
  misc_feature 1..22: note = chemically synthesized
  source 1..22: mol_type = other DNA
aacaaaatacaaagaaaaaggt

SEQ ID NO: 64188 - DNA, 22 bp, synthetic construct
  misc_feature 1..22: note = chemically synthesized
  source 1..22: mol_type = other DNA
acaaaatacaaagaaaaaggtg

SEQ ID NO: 64189 - DNA, 22 bp, synthetic construct
  misc_feature 1..22: note = chemically synthesized
  source 1..22: mol_type = other DNA
gaatttgggaaatgaaaaactg

SEQ ID NO: 64190 - DNA, 22 bp, synthetic construct
  misc_feature 1..22: note = chemically synthesized
  source 1..22: mol_type = other DNA
aatttgggaaatgaaaaactgg

SEQ ID NO: 64191 - DNA, 22 bp, synthetic construct
  misc_feature 1..22: note = chemically synthesized
  source 1..22: mol_type = other DNA
gggaaatgaaaaactggagaaa

SEQ ID NO: 64192 - DNA, 22 bp, synthetic construct
  misc_feature 1..22: note = chemically synthesized
  source 1..22: mol_type = other DNA
ggaaatgaaaaactggagaaaa

SEQ ID NO: 64193 - DNA, 22 bp, synthetic construct
  misc_feature 1..22: note = chemically synthesized
  source 1..22: mol_type = other DNA
gagaaaaaaagctggaaataac

SEQ ID NO: 64194 - DNA, 22 bp, synthetic construct
  misc_feature 1..22: note = chemically synthesized
  source 1..22: mol_type = other DNA
gaaataacaaatattgagattc

SEQ ID NO: 64195 - DNA, 22 bp, synthetic construct
  misc_feature 1..22: note = chemically synthesized
  source 1..22: mol_type = other DNA
agattcttcaacccccttggac

SEQ ID NO: 64196 - DNA, 22 bp, synthetic construct
  misc_feature 1..22: note = chemically synthesized
  source 1..22: mol_type = other DNA
ttcaacccccttggacttttaa

SEQ ID NO: 64197 - DNA, 22 bp, synthetic construct
  misc_feature 1..22: note = chemically synthesized
  source 1..22: mol_type = other DNA
caacccccttggacttttaaaa

SEQ ID NO: 64198 - DNA, 22 bp, synthetic construct
  misc_feature 1..22: note = chemically synthesized
  source 1..22: mol_type = other DNA
aacccccttggacttttaaaag

SEQ ID NO: 64199 - DNA, 22 bp, synthetic construct
  misc_feature 1..22: note = chemically synthesized
  source 1..22: mol_type = other DNA
ggacttttaaaagtttccttcc

SEQ ID NO: 64200 - DNA, 22 bp, synthetic construct
  misc_feature 1..22: note = chemically synthesized
  source 1..22: mol_type = other DNA
gacttttaaaagtttccttcca

SEQ ID NO: 64201 - DNA, 22 bp, synthetic construct
  misc_feature 1..22: note = chemically synthesized
  source 1..22: mol_type = other DNA
ttaaaagtttccttccaataaa

SEQ ID NO: 64202 - DNA, 22 bp, synthetic construct
  misc_feature 1..22: note = chemically synthesized
  source 1..22: mol_type = other DNA
taaaagtttccttccaataaag

SEQ ID NO: 64203 - DNA, 22 bp, synthetic construct
  misc_feature 1..22: note = chemically synthesized
  source 1..22: mol_type = other DNA
aaaagtttccttccaataaagc

SEQ ID NO: 64204 - DNA, 22 bp, synthetic construct
  misc_feature 1..22: note = chemically synthesized
  source 1..22: mol_type = other DNA
aaagtttccttccaataaagca

SEQ ID NO: 64205 - DNA, 22 bp, synthetic construct
  misc_feature 1..22: note = chemically synthesized
  source 1..22: mol_type = other DNA
ccttccaataaagcaacaaatg

SEQ ID NO: 64206 - DNA, 22 bp, synthetic construct
  misc_feature 1..22: note = chemically synthesized
  source 1..22: mol_type = other DNA
cttccaataaagcaacaaatga

SEQ ID NO: 64207 - DNA, 22 bp, synthetic construct
  misc_feature 1..22: note = chemically synthesized
  source 1..22: mol_type = other DNA
ccaataaagcaacaaatgaagt

SEQ ID NO: 64208 - DNA, 22 bp, synthetic construct
  misc_feature 1..22: note = chemically synthesized
  source 1..22: mol_type = other DNA
caataaagcaacaaatgaagtg

SEQ ID NO: 64209 - DNA, 22 bp, synthetic construct
  misc_feature 1..22: note = chemically synthesized
  source 1..22: mol_type = other DNA
gtttctctccaccacctttctc

SEQ ID NO: 64210 - DNA, 22 bp, synthetic construct
  misc_feature 1..22: note = chemically synthesized
  source 1..22: mol_type = other DNA
ctctccaccacctttctcctgg

SEQ ID NO: 64211 - DNA, 22 bp, synthetic construct
  misc_feature 1..22: note = chemically synthesized
  source 1..22: mol_type = other DNA
tctccaccacctttctcctggc

SEQ ID NO: 64212 - DNA, 22 bp, synthetic construct
  misc_feature 1..22: note = chemically synthesized
  source 1..22: mol_type = other DNA
tccaccacctttctcctggccc

SEQ ID NO: 64213 - DNA, 22 bp, synthetic construct
  misc_feature 1..22: note = chemically synthesized
  source 1..22: mol_type = other DNA
caccacctttctcctggccctc

SEQ ID NO: 64214 - DNA, 22 bp, synthetic construct
  misc_feature 1..22: note = chemically synthesized
  source 1..22: mol_type = other DNA
tctcctggccctcgtgcctcta

SEQ ID NO: 64215 - DNA, 22 bp, synthetic construct
  misc_feature 1..22: note = chemically synthesized
  source 1..22: mol_type = other DNA
ctcctggccctcgtgcctctaa

SEQ ID NO: 64216 - DNA, 22 bp, synthetic construct
  misc_feature 1..22: note = chemically synthesized
  source 1..22: mol_type = other DNA
tcctggccctcgtgcctctaag

SEQ ID NO: 64217 - DNA, 22 bp, synthetic construct
  misc_feature 1..22: note = chemically synthesized
  source 1..22: mol_type = other DNA
ctggccctcgtgcctctaagta

SEQ ID NO: 64218 - DNA, 22 bp, synthetic construct
  misc_feature 1..22: note = chemically synthesized
  source 1..22: mol_type = other DNA
gccctcgtgcctctaagtaatc

SEQ ID NO: 64219 - DNA, 22 bp, synthetic construct
  misc_feature 1..22: note = chemically synthesized
  source 1..22: mol_type = other DNA
gtgcctctaagtaatccaaatg

SEQ ID NO: 64220 - DNA, 22 bp, synthetic construct
  misc_feature 1..22: note = chemically synthesized
  source 1..22: mol_type = other DNA
taagtaatccaaatggaacaga

SEQ ID NO: 64221 - DNA, 22 bp, synthetic construct
  misc_feature 1..22: note = chemically synthesized
  source 1..22: mol_type = other DNA
agtaatccaaatggaacagacc

SEQ ID NO: 64222 - DNA, 22 bp, synthetic construct
  misc_feature 1..22: note = chemically synthesized
  source 1..22: mol_type = other DNA
cataatacatgtttgtattttt

SEQ ID NO: 64223 - DNA, 22 bp, synthetic construct
  misc_feature 1..22: note = chemically synthesized
  source 1..22: mol_type = other DNA
gtatttttcttcagctagctag

SEQ ID NO: 64224 - DNA, 22 bp, synthetic construct
  misc_feature 1..22: note = chemically synthesized
  source 1..22: mol_type = other DNA
tatttttcttcagctagctagt

SEQ ID NO: 64225 - DNA, 22 bp, synthetic construct
  misc_feature 1..22: note = chemically synthesized
  source 1..22: mol_type = other DNA
ttcttcagctagctagtgttgt

SEQ ID NO: 64226 - DNA, 22 bp, synthetic construct
  misc_feature 1..22: note = chemically synthesized
  source 1..22: mol_type = other DNA
tcttcagctagctagtgttgtt

SEQ ID NO: 64227 - DNA, 22 bp, synthetic construct
  misc_feature 1..22: note = chemically synthesized
  source 1..22: mol_type = other DNA
cttcagctagctagtgttgtta

SEQ ID NO: 64228 - DNA, 22 bp, synthetic construct
  misc_feature 1..22: note = chemically synthesized
  source 1..22: mol_type = other DNA
ttcagctagctagtgttgttag

SEQ ID NO: 64229 - DNA, 22 bp, synthetic construct
  misc_feature 1..22: note = chemically synthesized
  source 1..22: mol_type = other DNA
cagctagctagtgttgttagaa

SEQ ID NO: 64230 - DNA, 22 bp, synthetic construct
  misc_feature 1..22: note = chemically synthesized
  source 1..22: mol_type = other DNA
agctagctagtgttgttagaac

SEQ ID NO: 64231 - DNA, 22 bp, synthetic construct
  misc_feature 1..22: note = chemically synthesized
  source 1..22: mol_type = other DNA
gctagtgttgttagaactaaag

SEQ ID NO: 64232 - DNA, 22 bp, synthetic construct
  misc_feature 1..22: note = chemically synthesized
  source 1..22: mol_type = other DNA
gtgttgttagaactaaagacgg

SEQ ID NO: 64233 - DNA, 22 bp, synthetic construct
  misc_feature 1..22: note = chemically synthesized
  source 1..22: mol_type = other DNA
ttagaactaaagacggtgctaa

SEQ ID NO: 64234 - DNA, 22 bp, synthetic construct
  misc_feature 1..22: note = chemically synthesized
  source 1..22: mol_type = other DNA
gaactaaagacggtgctaaaat

SEQ ID NO: 64235 - DNA, 22 bp, synthetic construct
  misc_feature 1..22: note = chemically synthesized
  source 1..22: mol_type = other DNA
aagacggtgctaaaattagtgc

SEQ ID NO: 64236 - DNA, 22 bp, synthetic construct
  misc_feature 1..22: note = chemically synthesized
  source 1..22: mol_type = other DNA
aaattagtgctgtatatttcca

SEQ ID NO: 64237 - DNA, 22 bp, synthetic construct
  misc_feature 1..22: note = chemically synthesized
  source 1..22: mol_type = other DNA
gtgctgtatatttccatctccc

SEQ ID NO: 64238 - DNA, 22 bp, synthetic construct
  misc_feature 1..22: note = chemically synthesized
  source 1..22: mol_type = other DNA
tatatttccatctccctttaat

SEQ ID NO: 64239 - DNA, 22 bp, synthetic construct
  misc_feature 1..22: note = chemically synthesized
  source 1..22: mol_type = other DNA
ccatctccctttaatttctctt

SEQ ID NO: 64240 - DNA, 22 bp, synthetic construct
  misc_feature 1..22: note = chemically synthesized
  source 1..22: mol_type = other DNA
catctccctttaatttctcttt

SEQ ID NO: 64241 - DNA, 22 bp, synthetic construct
  misc_feature 1..22: note = chemically synthesized
  source 1..22: mol_type = other DNA
cctttaatttctctttcacttc

SEQ ID NO: 64242 - DNA, 22 bp, synthetic construct
  misc_feature 1..22: note = chemically synthesized
  source 1..22: mol_type = other DNA
taatttctctttcacttcccaa

SEQ ID NO: 64243 - DNA, 22 bp, synthetic construct
  misc_feature 1..22: note = chemically synthesized
  source 1..22: mol_type = other DNA
aatttctctttcacttcccaac

SEQ ID NO: 64244 - DNA, 22 bp, synthetic construct
  misc_feature 1..22: note = chemically synthesized
  source 1..22: mol_type = other DNA
atttctctttcacttcccaact

SEQ ID NO: 64245 - DNA, 22 bp, synthetic construct
  misc_feature 1..22: note = chemically synthesized
  source 1..22: mol_type = other DNA
ctctttcacttcccaactgaac

SEQ ID NO: 64246 - DNA, 22 bp, synthetic construct
  misc_feature 1..22: note = chemically synthesized
  source 1..22: mol_type = other DNA
tctttcacttcccaactgaact

SEQ ID NO: 64247 - DNA, 22 bp, synthetic construct
  misc_feature 1..22: note = chemically synthesized
  source 1..22: mol_type = other DNA
tttcacttcccaactgaacttt

SEQ ID NO: 64248 - DNA, 22 bp, synthetic construct
  misc_feature 1..22: note = chemically synthesized
  source 1..22: mol_type = other DNA
tcacttcccaactgaactttgt

SEQ ID NO: 64249 - DNA, 22 bp, synthetic construct
  misc_feature 1..22: note = chemically synthesized
  source 1..22: mol_type = other DNA
cacttcccaactgaactttgtg

SEQ ID NO: 64250 - DNA, 22 bp, synthetic construct
  misc_feature 1..22: note = chemically synthesized
  source 1..22: mol_type = other DNA
acttcccaactgaactttgtgc

SEQ ID NO: 64251 - DNA, 22 bp, synthetic construct
  misc_feature 1..22: note = chemically synthesized
  source 1..22: mol_type = other DNA
cccaactgaactttgtgcagtc

SEQ ID NO: 64252 - DNA, 22 bp, synthetic construct
  misc_feature 1..22: note = chemically synthesized
  source 1..22: mol_type = other DNA
ccaactgaactttgtgcagtcc

SEQ ID NO: 64253 - DNA, 22 bp, synthetic construct
  misc_feature 1..22: note = chemically synthesized
  source 1..22: mol_type = other DNA
aactttgtgcagtccttcatgg

SEQ ID NO: 64254 - DNA, 22 bp, synthetic construct
  misc_feature 1..22: note = chemically synthesized
  source 1..22: mol_type = other DNA
tgtgcagtccttcatggcttat

SEQ ID NO: 64255 - DNA, 22 bp, synthetic construct
  misc_feature 1..22: note = chemically synthesized
  source 1..22: mol_type = other DNA
gtgcagtccttcatggcttatg

SEQ ID NO: 64256 - DNA, 22 bp, synthetic construct
  misc_feature 1..22: note = chemically synthesized
  source 1..22: mol_type = other DNA
tgcagtccttcatggcttatgg

SEQ ID NO: 64257 - DNA, 22 bp, synthetic construct
  misc_feature 1..22: note = chemically synthesized
  source 1..22: mol_type = other DNA
catggcttatggaaattccccc

SEQ ID NO: 64258 - DNA, 22 bp, synthetic construct
  misc_feature 1..22: note = chemically synthesized
  source 1..22: mol_type = other DNA
atggcttatggaaattccccca

SEQ ID NO: 64259 - DNA, 22 bp, synthetic construct
  misc_feature 1..22: note = chemically synthesized
  source 1..22: mol_type = other DNA
atggaaattcccccatcattac

SEQ ID NO: 64260 - DNA, 22 bp, synthetic construct
  misc_feature 1..22: note = chemically synthesized
  source 1..22: mol_type = other DNA
tggaaattcccccatcattaca

SEQ ID NO: 64261 - DNA, 22 bp, synthetic construct
  misc_feature 1..22: note = chemically synthesized
  source 1..22: mol_type = other DNA
ccccatcattacagggctcagt

SEQ ID NO: 64262 - DNA, 22 bp, synthetic construct
  misc_feature 1..22: note = chemically synthesized
  source 1..22: mol_type = other DNA
cagggctcagtggtcaggaggg

SEQ ID NO: 64263 - DNA, 22 bp, synthetic construct
  misc_feature 1..22: note = chemically synthesized
  source 1..22: mol_type = other DNA
agtggtcaggagggagttgggc

SEQ ID NO: 64264 - DNA, 22 bp, synthetic construct
  misc_feature 1..22: note = chemically synthesized
  source 1..22: mol_type = other DNA
ggcctctgcagggtggggacac

SEQ ID NO: 64265 - DNA, 22 bp, synthetic construct
  misc_feature 1..22: note = chemically synthesized
  source 1..22: mol_type = other DNA
tgcagggtggggacactaaata

SEQ ID NO: 64266 - DNA, 22 bp, synthetic construct
  misc_feature 1..22: note = chemically synthesized
  source 1..22: mol_type = other DNA
cagggtggggacactaaatatg

SEQ ID NO: 64267 - DNA, 22 bp, synthetic construct
  misc_feature 1..22: note = chemically synthesized
  source 1..22: mol_type = other DNA
aatatgctgagtggcctcaggg

SEQ ID NO: 64268 - DNA, 22 bp, synthetic construct
  misc_feature 1..22: note = chemically synthesized
  source 1..22: mol_type = other DNA
agtggcctcagggccagaggtt

SEQ ID NO: 64269 - DNA, 22 bp, synthetic construct
  misc_feature 1..22: note = chemically synthesized
  source 1..22: mol_type = other DNA
agggccagaggttgtggcttct

SEQ ID NO: 64270 - DNA, 22 bp, synthetic construct
  misc_feature 1..22: note = chemically synthesized
  source 1..22: mol_type = other DNA
tggcttctagccctggcagggc

SEQ ID NO: 64271 - DNA, 22 bp, synthetic construct
  misc_feature 1..22: note = chemically synthesized
  source 1..22: mol_type = other DNA
ctagccctggcagggccatcac

SEQ ID NO: 64272 - DNA, 22 bp, synthetic construct
  misc_feature 1..22: note = chemically synthesized
  source 1..22: mol_type = other DNA
tagccctggcagggccatcact

SEQ ID NO: 64273 - DNA, 22 bp, synthetic construct
  misc_feature 1..22: note = chemically synthesized
  source 1..22: mol_type = other DNA
gccctggcagggccatcactat

SEQ ID NO: 64274 - DNA, 22 bp, synthetic construct
  misc_feature 1..22: note = chemically synthesized
  source 1..22: mol_type = other DNA
gcagggccatcactatccactt

SEQ ID NO: 64275 - DNA, 22 bp, synthetic construct
  misc_feature 1..22: note = chemically synthesized
  source 1..22: mol_type = other DNA
tccacttggcctttagcaagaa

SEQ ID NO: 64276 - DNA, 22 bp, synthetic construct
  misc_feature 1..22: note = chemically synthesized
  source 1..22: mol_type = other DNA
ggcctttagcaagaatcctctg

SEQ ID NO: 64277 - DNA, 22 bp, synthetic construct
  misc_feature 1..22: note = chemically synthesized
  source 1..22: mol_type = other DNA
gcctttagcaagaatcctctgg

SEQ ID NO: 64278 - DNA, 22 bp, synthetic construct
  misc_feature 1..22: note = chemically synthesized
  source 1..22: mol_type = other DNA
tagcaagaatcctctggtcctg

SEQ ID NO: 64279 - DNA, 22 bp, synthetic construct
  misc_feature 1..22: note = chemically synthesized
  source 1..22: mol_type = other DNA
agcaagaatcctctggtcctgg

SEQ ID NO: 64280 - DNA, 22 bp, synthetic construct
  misc_feature 1..22: note = chemically synthesized
  source 1..22: mol_type = other DNA
gcaagaatcctctggtcctggg

SEQ ID NO: 64281 - DNA, 22 bp, synthetic construct
  misc_feature 1..22: note = chemically synthesized
  source 1..22: mol_type = other DNA
tggtcctggggcctcactctcc

SEQ ID NO: 64282 - DNA, 22 bp, synthetic construct
  misc_feature 1..22: note = chemically synthesized
  source 1..22: mol_type = other DNA
gtcctggggcctcactctcccc

SEQ ID NO: 64283 - DNA, 22 bp, synthetic construct
  misc_feature 1..22: note = chemically synthesized
  source 1..22: mol_type = other DNA
gggcctcactctccccagttgt

SEQ ID NO: 64284 - DNA, 22 bp, synthetic construct
  misc_feature 1..22: note = chemically synthesized
  source 1..22: mol_type = other DNA
actctccccagttgtgcaaagt

SEQ ID NO: 64285 - DNA, 22 bp, synthetic construct
  misc_feature 1..22: note = chemically synthesized
  source 1..22: mol_type = other DNA
tccccagttgtgcaaagtgggg

SEQ ID NO: 64286 - DNA, 22 bp, synthetic construct
  misc_feature 1..22: note = chemically synthesized
  source 1..22: mol_type = other DNA
cccagttgtgcaaagtggggct

SEQ ID NO: 64287 - DNA, 22 bp, synthetic construct
  misc_feature 1..22: note = chemically synthesized
  source 1..22: mol_type = other DNA
tgcaaagtggggctgggagaag

SEQ ID NO: 64288 - DNA, 22 bp, synthetic construct
  misc_feature 1..22: note = chemically synthesized
  source 1..22: mol_type = other DNA
ggagaagacttcactggggccc

SEQ ID NO: 64289 - DNA, 22 bp, synthetic construct
  misc_feature 1..22: note = chemically synthesized
  source 1..22: mol_type = other DNA
cactggggccctctgtacacta

SEQ ID NO: 64290 - DNA, 22 bp, synthetic construct
  misc_feature 1..22: note = chemically synthesized
  source 1..22: mol_type = other DNA
actggggccctctgtacactaa

SEQ ID NO: 64291 - DNA, 22 bp, synthetic construct
  misc_feature 1..22: note = chemically synthesized
  source 1..22: mol_type = other DNA
gggccctctgtacactaacata

SEQ ID NO: 64292 - DNA, 22 bp, synthetic construct
  misc_feature 1..22: note = chemically synthesized
  source 1..22: mol_type = other DNA
tgtacactaacataggtttttg

SEQ ID NO: 64293 - DNA, 22 bp, synthetic construct
  misc_feature 1..22: note = chemically synthesized
  source 1..22: mol_type = other DNA
tacactaacataggtttttggg

SEQ ID NO: 64294 - DNA, 22 bp, synthetic construct
  misc_feature 1..22: note = chemically synthesized
  source 1..22: mol_type = other DNA
acataggtttttgggttttttt

SEQ ID NO: 64295 - DNA, 22 bp, synthetic construct
  misc_feature 1..22: note = chemically synthesized
  source 1..22: mol_type = other DNA
ttgggttttttttgagacagag

SEQ ID NO: 64296 - DNA, 22 bp, synthetic construct
  misc_feature 1..22: note = chemically synthesized
  source 1..22: mol_type = other DNA
tgggttttttttgagacagagt

SEQ ID NO: 64297 - DNA, 22 bp, synthetic construct
  misc_feature 1..22: note = chemically synthesized
  source 1..22: mol_type = other DNA
gggttttttttgagacagagtc

SEQ ID NO: 64298 - DNA, 22 bp, synthetic construct
  misc_feature 1..22: note = chemically synthesized
  source 1..22: mol_type = other DNA
ggttttttttgagacagagtct

SEQ ID NO: 64299 - DNA, 22 bp, synthetic construct
  misc_feature 1..22: note = chemically synthesized
  source 1..22: mol_type = other DNA
tttttgagacagagtctcgctt

SEQ ID NO: 64300 - DNA, 22 bp, synthetic construct
  misc_feature 1..22: note = chemically synthesized
  source 1..22: mol_type = other DNA
ttttgagacagagtctcgcttt

SEQ ID NO: 64301 - DNA, 22 bp, synthetic construct
  misc_feature 1..22: note = chemically synthesized
  source 1..22: mol_type = other DNA
tttgagacagagtctcgcttta

SEQ ID NO: 64302 - DNA, 22 bp, synthetic construct
  misc_feature 1..22: note = chemically synthesized
  source 1..22: mol_type = other DNA
ttgagacagagtctcgctttat

SEQ ID NO: 64303 - DNA, 22 bp, synthetic construct
  misc_feature 1..22: note = chemically synthesized
  source 1..22: mol_type = other DNA
tgagacagagtctcgctttatc

SEQ ID NO: 64304 - DNA, 22 bp, synthetic construct
  misc_feature 1..22: note = chemically synthesized
  source 1..22: mol_type = other DNA
gagacagagtctcgctttatct

SEQ ID NO: 64305 - DNA, 22 bp, synthetic construct
  misc_feature 1..22: note = chemically synthesized
  source 1..22: mol_type = other DNA
agacagagtctcgctttatctg

SEQ ID NO: 64306 - DNA, 22 bp, synthetic construct
  misc_feature 1..22: note = chemically synthesized
  source 1..22: mol_type = other DNA
gctttatctgccagggtggagt

SEQ ID NO: 64307 - DNA, 22 bp, synthetic construct
  misc_feature 1..22: note = chemically synthesized
  source 1..22: mol_type = other DNA
tatctgccagggtggagtgcag

SEQ ID NO: 64308 - DNA, 22 bp, synthetic construct
  misc_feature 1..22: note = chemically synthesized
  source 1..22: mol_type = other DNA
atctgccagggtggagtgcagt

SEQ ID NO: 64309 - DNA, 22 bp, synthetic construct
  misc_feature 1..22: note = chemically synthesized
  source 1..22: mol_type = other DNA
tctgccagggtggagtgcagtg

SEQ ID NO: 64310 - DNA, 22 bp, synthetic construct
  misc_feature 1..22: note = chemically synthesized
  source 1..22: mol_type = other DNA
ccagggtggagtgcagtggcgt

SEQ ID NO: 64311 - DNA, 22 bp, synthetic construct
  misc_feature 1..22: note = chemically synthesized
  source 1..22: mol_type = other DNA
ggctcactgaaacctccacctc

SEQ ID NO: 64312 - DNA, 22 bp, synthetic construct
  misc_feature 1..22: note = chemically synthesized
  source 1..22: mol_type = other DNA
actgaaacctccacctcccggg

SEQ ID NO: 64313 - DNA, 22 bp, synthetic construct
  misc_feature 1..22: note = chemically synthesized
  source 1..22: mol_type = other DNA
aaacctccacctcccgggttca

SEQ ID NO: 64314 - DNA, 22 bp, synthetic construct
  misc_feature 1..22: note = chemically synthesized
  source 1..22: mol_type = other DNA
cacctcccgggttcaagaaatt

SEQ ID NO: 64315 - DNA, 22 bp, synthetic construct
  misc_feature 1..22: note = chemically synthesized
  source 1..22: mol_type = other DNA
ccgggttcaagaaattcttctg

SEQ ID NO: 64316 - DNA, 22 bp, synthetic construct
  misc_feature 1..22: note = chemically synthesized
  source 1..22: mol_type = other DNA
aagaaattcttctgtctcagct

SEQ ID NO: 64317 - DNA, 22 bp, synthetic construct
  misc_feature 1..22: note = chemically synthesized
  source 1..22: mol_type = other DNA
ttctgtctcagcttcccaaata

SEQ ID NO: 64318 - DNA, 22 bp, synthetic construct
  misc_feature 1..22: note = chemically synthesized
  source 1..22: mol_type = other DNA
ctgtctcagcttcccaaatagc

SEQ ID NO: 64319 - DNA, 22 bp, synthetic construct
  misc_feature 1..22: note = chemically synthesized
  source 1..22: mol_type = other DNA
tgtctcagcttcccaaatagct

SEQ ID NO: 64320 - DNA, 22 bp, synthetic construct
  misc_feature 1..22: note = chemically synthesized
  source 1..22: mol_type = other DNA
tctcagcttcccaaatagctgg

SEQ ID NO: 64321 - DNA, 22 bp, synthetic construct
  misc_feature 1..22: note = chemically synthesized
  source 1..22: mol_type = other DNA
agcttcccaaatagctgggatt

SEQ ID NO: 64322 - DNA, 22 bp, synthetic construct
  misc_feature 1..22: note = chemically synthesized
  source 1..22: mol_type = other DNA
cccaaatagctgggattacagg

SEQ ID NO: 64323 - DNA, 22 bp, synthetic construct
  misc_feature 1..22: note = chemically synthesized
  source 1..22: mol_type = other DNA
ccaaatagctgggattacaggc

SEQ ID NO: 64324 - DNA, 22 bp, synthetic construct
  misc_feature 1..22: note = chemically synthesized
  source 1..22: mol_type = other DNA
ggattacaggcgtgtgccacca

SEQ ID NO: 64325 - DNA, 22 bp, synthetic construct
  misc_feature 1..22: note = chemically synthesized
  source 1..22: mol_type = other DNA
caggcgtgtgccaccacgcctg

SEQ ID NO: 64326 - DNA, 22 bp, synthetic construct
  misc_feature 1..22: note = chemically synthesized
  source 1..22: mol_type = other DNA
gctaatttttgtatttttagta

SEQ ID NO: 64327 - DNA, 22 bp, synthetic construct
  misc_feature 1..22: note = chemically synthesized
  source 1..22: mol_type = other DNA
atttttgtatttttagtagagc

SEQ ID NO: 64328 - DNA, 22 bp, synthetic construct
  misc_feature 1..22: note = chemically synthesized
  source 1..22: mol_type = other DNA
ttgtatttttagtagagctgag

SEQ ID NO: 64329 - DNA, 22 bp, synthetic construct
  misc_feature 1..22: note = chemically synthesized
  source 1..22: mol_type = other DNA
tgtatttttagtagagctgagg

SEQ ID NO: 64330 - DNA, 22 bp, synthetic construct
  misc_feature 1..22: note = chemically synthesized
  source 1..22: mol_type = other DNA
gtatttttagtagagctgaggt

SEQ ID NO: 64331 - DNA, 22 bp, synthetic construct
  misc_feature 1..22: note = chemically synthesized
  source 1..22: mol_type = other DNA
tatttttagtagagctgaggtt

SEQ ID NO: 64332 - DNA, 22 bp, synthetic construct
  misc_feature 1..22: note = chemically synthesized
  source 1..22: mol_type = other DNA
ttagtagagctgaggtttcacc

SEQ ID NO: 64333 - DNA, 22 bp, synthetic construct
  misc_feature 1..22: note = chemically synthesized
  source 1..22: mol_type = other DNA
tagtagagctgaggtttcaccg

SEQ ID NO: 64334 - DNA, 22 bp, synthetic construct
  misc_feature 1..22: note = chemically synthesized
  source 1..22: mol_type = other DNA
agtagagctgaggtttcaccgt

SEQ ID NO: 64335 - DNA, 22 bp, synthetic construct
  misc_feature 1..22: note = chemically synthesized
  source 1..22: mol_type = other DNA
gtagagctgaggtttcaccgtg

SEQ ID NO: 64336 - DNA, 22 bp, synthetic construct
  misc_feature 1..22: note = chemically synthesized
  source 1..22: mol_type = other DNA
aggtttcaccgtgttggccagg

SEQ ID NO: 64337 - DNA, 22 bp, synthetic construct
  misc_feature 1..22: note = chemically synthesized
  source 1..22: mol_type = other DNA
caccgtgttggccaggcaggtc

SEQ ID NO: 64338 - DNA, 22 bp, synthetic construct
  misc_feature 1..22: note = chemically synthesized
  source 1..22: mol_type = other DNA
accgtgttggccaggcaggtct

SEQ ID NO: 64339 - DNA, 22 bp, synthetic construct
  misc_feature 1..22: note = chemically synthesized
  source 1..22: mol_type = other DNA
gccaggcaggtcttgaactcct

SEQ ID NO: 64340 - DNA, 22 bp, synthetic construct
  misc_feature 1..22: note = chemically synthesized
  source 1..22: mol_type = other DNA
gaactcctgacctcttgatccg

SEQ ID NO: 64341 - DNA, 22 bp, synthetic construct
  misc_feature 1..22: note = chemically synthesized
  source 1..22: mol_type = other DNA
aactcctgacctcttgatccgc

SEQ ID NO: 64342 - DNA, 22 bp, synthetic construct
  misc_feature 1..22: note = chemically synthesized
  source 1..22: mol_type = other DNA
ctgacctcttgatccgcctgcc

SEQ ID NO: 64343 - DNA, 22 bp, synthetic construct
  misc_feature 1..22: note = chemically synthesized
  source 1..22: mol_type = other DNA
acctcttgatccgcctgccttg

SEQ ID NO: 64344 - DNA, 22 bp, synthetic construct
  misc_feature 1..22: note = chemically synthesized
  source 1..22: mol_type = other DNA
ttgatccgcctgccttggcctc

SEQ ID NO: 64345 - DNA, 22 bp, synthetic construct
  misc_feature 1..22: note = chemically synthesized
  source 1..22: mol_type = other DNA
gatccgcctgccttggcctccc

SEQ ID NO: 64346 - DNA, 22 bp, synthetic construct
  misc_feature 1..22: note = chemically synthesized
  source 1..22: mol_type = other DNA
atccgcctgccttggcctccca

SEQ ID NO: 64347 - DNA, 22 bp, synthetic construct
  misc_feature 1..22: note = chemically synthesized
  source 1..22: mol_type = other DNA
ccttggcctcccaaagtgctgg

SEQ ID NO: 64348 - DNA, 22 bp, synthetic construct
  misc_feature 1..22: note = chemically synthesized
  source 1..22: mol_type = other DNA
ggcctcccaaagtgctggggtt

SEQ ID NO: 64349 - DNA, 22 bp, synthetic construct
  misc_feature 1..22: note = chemically synthesized
  source 1..22: mol_type = other DNA
gcctcccaaagtgctggggtta

SEQ ID NO: 64350 - DNA, 22 bp, synthetic construct
  misc_feature 1..22: note = chemically synthesized
  source 1..22: mol_type = other DNA
ccaaagtgctggggttacaggc

SEQ ID NO: 64351 - DNA, 22 bp, synthetic construct
  misc_feature 1..22: note = chemically synthesized
  source 1..22: mol_type = other DNA
gggttacaggcgagagcccctg

SEQ ID NO: 64352 - DNA, 22 bp, synthetic construct
  misc_feature 1..22: note = chemically synthesized
  source 1..22: mol_type = other DNA
caggcgagagcccctgcaccca

SEQ ID NO: 64353 - DNA, 22 bp, synthetic construct
  misc_feature 1..22: note = chemically synthesized
  source 1..22: mol_type = other DNA
cacccagccaggattcttggtt

SEQ ID NO: 64354 - DNA, 22 bp, synthetic construct
  misc_feature 1..22: note = chemically synthesized
  source 1..22: mol_type = other DNA
ttggttagaatggcatctgggt

SEQ ID NO: 64355 - DNA, 22 bp, synthetic construct
  misc_feature 1..22: note = chemically synthesized
  source 1..22: mol_type = other DNA
ggttagaatggcatctgggttc

SEQ ID NO: 64356 - DNA, 22 bp, synthetic construct
  misc_feature 1..22: note = chemically synthesized
  source 1..22: mol_type = other DNA
gttagaatggcatctgggttca

SEQ ID NO: 64357 - DNA, 22 bp, synthetic construct
  misc_feature 1..22: note = chemically synthesized
  source 1..22: mol_type = other DNA
gaatggcatctgggttcaatgt

SEQ ID NO: 64358 - DNA, 22 bp, synthetic construct
  misc_feature 1..22: note = chemically synthesized
  source 1..22: mol_type = other DNA
ggttcaatgtagcaaaacagat

SEQ ID NO: 64359 - DNA, 22 bp, synthetic construct
  misc_feature 1..22: note = chemically synthesized
  source 1..22: mol_type = other DNA
aatgtagcaaaacagatggaga

SEQ ID NO: 64360 - DNA, 22 bp, synthetic construct
  misc_feature 1..22: note = chemically synthesized
  source 1..22: mol_type = other DNA
ccatggctaggcatgagacagg

SEQ ID NO: 64361 - DNA, 22 bp, synthetic construct
  misc_feature 1..22: note = chemically synthesized
  source 1..22: mol_type = other DNA
ggcatgagacaggtgccctcct

SEQ ID NO: 64362 - DNA, 22 bp, synthetic construct
  misc_feature 1..22: note = chemically synthesized
  source 1..22: mol_type = other DNA
ctagacaggggaattctgggct

SEQ ID NO: 64363 - DNA, 22 bp, synthetic construct
  misc_feature 1..22: note = chemically synthesized
  source 1..22: mol_type = other DNA
gacaggggaattctgggctcaa

SEQ ID NO: 64364 - DNA, 22 bp, synthetic construct
  misc_feature 1..22: note = chemically synthesized
  source 1..22: mol_type = other DNA
tgggctcaaaggaggtggagag

SEQ ID NO: 64365 - DNA, 22 bp, synthetic construct
  misc_feature 1..22: note = chemically synthesized
  source 1..22: mol_type = other DNA
ggctcaaaggaggtggagaggc

SEQ ID NO: 64366 - DNA, 22 bp, synthetic construct
  misc_feature 1..22: note = chemically synthesized
  source 1..22: mol_type = other DNA
aaaggaggtggagaggctggtg

SEQ ID NO: 64367 - DNA, 22 bp, synthetic construct
  misc_feature 1..22: note = chemically synthesized
  source 1..22: mol_type = other DNA
gtgcagggagggtggcgagggg

SEQ ID NO: 64368 - DNA, 22 bp, synthetic construct
  misc_feature 1..22: note = chemically synthesized
  source 1..22: mol_type = other DNA
ggaggagcacattcccccacac

SEQ ID NO: 64369 - DNA, 22 bp, synthetic construct
  misc_feature 1..22: note = chemically synthesized
  source 1..22: mol_type = other DNA
ccccacacccatccatctttcc

SEQ ID NO: 64370 - DNA, 22 bp, synthetic construct
  misc_feature 1..22: note = chemically synthesized
  source 1..22: mol_type = other DNA
tcctggtgtcacatcacctact

SEQ ID NO: 64371 - DNA, 22 bp, synthetic construct
  misc_feature 1..22: note = chemically synthesized
  source 1..22: mol_type = other DNA
cctggtgtcacatcacctactc

SEQ ID NO: 64372 - DNA, 22 bp, synthetic construct
  misc_feature 1..22: note = chemically synthesized
  source 1..22: mol_type = other DNA
ctggtgtcacatcacctactct

SEQ ID NO: 64373 - DNA, 22 bp, synthetic construct
  misc_feature 1..22: note = chemically synthesized
  source 1..22: mol_type = other DNA
gtgtcacatcacctactctggt

SEQ ID NO: 64374 - DNA, 22 bp, synthetic construct
  misc_feature 1..22: note = chemically synthesized
  source 1..22: mol_type = other DNA
ctctggtttcctcctttcacag

SEQ ID NO: 64375 - DNA, 22 bp, synthetic construct
  misc_feature 1..22: note = chemically synthesized
  source 1..22: mol_type = other DNA
tggtttcctcctttcacagtga

SEQ ID NO: 64376 - DNA, 22 bp, synthetic construct
  misc_feature 1..22: note = chemically synthesized
  source 1..22: mol_type = other DNA
gtttcctcctttcacagtgaag

SEQ ID NO: 64377 - DNA, 22 bp, synthetic construct
  misc_feature 1..22: note = chemically synthesized
  source 1..22: mol_type = other DNA
cctcctttcacagtgaagagtt

SEQ ID NO: 64378 - DNA, 22 bp, synthetic construct
  misc_feature 1..22: note = chemically synthesized
  source 1..22: mol_type = other DNA
ctcctttcacagtgaagagttt

SEQ ID NO: 64379 - DNA, 22 bp, synthetic construct
  misc_feature 1..22: note = chemically synthesized
  source 1..22: mol_type = other DNA
ctttcacagtgaagagtttgaa

SEQ ID NO: 64380 - DNA, 22 bp, synthetic construct
  misc_feature 1..22: note = chemically synthesized
  source 1..22: mol_type = other DNA
tcacagtgaagagtttgaagcc

SEQ ID NO: 64381 - DNA, 22 bp, synthetic construct
  misc_feature 1..22: note = chemically synthesized
  source 1..22: mol_type = other DNA
cacagtgaagagtttgaagccc

SEQ ID NO: 64382 - DNA, 22 bp, synthetic construct
  misc_feature 1..22: note = chemically synthesized
  source 1..22: mol_type = other DNA
acagtgaagagtttgaagccca

SEQ ID NO: 64383 - DNA, 22 bp, synthetic construct
  misc_feature 1..22: note = chemically synthesized
  source 1..22: mol_type = other DNA
gaagcccagagagggtcagggc

SEQ ID NO: 64384 - DNA, 22 bp, synthetic construct
  misc_feature 1..22: note = chemically synthesized
  source 1..22: mol_type = other DNA
aagcccagagagggtcagggcc

SEQ ID NO: 64385 - DNA, 22 bp, synthetic construct
  misc_feature 1..22: note = chemically synthesized
  source 1..22: mol_type = other DNA
gttgaggctatacagcaagtca

SEQ ID NO: 64386 - DNA, 22 bp, synthetic construct
  misc_feature 1..22: note = chemically synthesized
  source 1..22: mol_type = other DNA
ttgaggctatacagcaagtcag

SEQ ID NO: 64387 - DNA, 22 bp, synthetic construct
  misc_feature 1..22: note = chemically synthesized
  source 1..22: mol_type = other DNA
aggctatacagcaagtcagtga

SEQ ID NO: 64388 - DNA, 22 bp, synthetic construct
  misc_feature 1..22: note = chemically synthesized
  source 1..22: mol_type = other DNA
tacagcaagtcagtgacaaagc

SEQ ID NO: 64389 - DNA, 22 bp, synthetic construct
  misc_feature 1..22: note = chemically synthesized
  source 1..22: mol_type = other DNA
gaacaagtcttggctttcccag

SEQ ID NO: 64390 - DNA, 22 bp, synthetic construct
  misc_feature 1..22: note = chemically synthesized
  source 1..22: mol_type = other DNA
ggctttcccagcactcagatca

SEQ ID NO: 64391 - DNA, 22 bp, synthetic construct
  misc_feature 1..22: note = chemically synthesized
  source 1..22: mol_type = other DNA
gctttcccagcactcagatcat

SEQ ID NO: 64392 - DNA, 22 bp, synthetic construct
  misc_feature 1..22: note = chemically synthesized
  source 1..22: mol_type = other DNA
tcccagcactcagatcatgaac

SEQ ID NO: 64393 - DNA, 22 bp, synthetic construct
  misc_feature 1..22: note = chemically synthesized
  source 1..22: mol_type = other DNA
cccagcactcagatcatgaact

SEQ ID NO: 64394 - DNA, 22 bp, synthetic construct
  misc_feature 1..22: note = chemically synthesized
  source 1..22: mol_type = other DNA
ccagcactcagatcatgaactg

SEQ ID NO: 64395 - DNA, 22 bp, synthetic construct
  misc_feature 1..22: note = chemically synthesized
  source 1..22: mol_type = other DNA
agatcatgaactgagacagctg

SEQ ID NO: 64396 - DNA, 22 bp, synthetic construct
  misc_feature 1..22: note = chemically synthesized
  source 1..22: mol_type = other DNA
agacagctgtgtcctcagatct

SEQ ID NO: 64397 - DNA, 22 bp, synthetic construct
  misc_feature 1..22: note = chemically synthesized
  source 1..22: mol_type = other DNA
tgtcctcagatctcagatgatg

SEQ ID NO: 64398 - DNA, 22 bp, synthetic construct
  misc_feature 1..22: note = chemically synthesized
  source 1..22: mol_type = other DNA
agatctcagatgatgaatgtca

SEQ ID NO: 64399 - DNA, 22 bp, synthetic construct
  misc_feature 1..22: note = chemically synthesized
  source 1..22: mol_type = other DNA
agatgatgaatgtcagaattgg

SEQ ID NO: 64400 - DNA, 22 bp, synthetic construct
  misc_feature 1..22: note = chemically synthesized
  source 1..22: mol_type = other DNA
ggctgtgacattggtctcaagc

SEQ ID NO: 64401 - DNA, 22 bp, synthetic construct
  misc_feature 1..22: note = chemically synthesized
  source 1..22: mol_type = other DNA
tgacattggtctcaagcatcat

SEQ ID NO: 64402 - DNA, 22 bp, synthetic construct
  misc_feature 1..22: note = chemically synthesized
  source 1..22: mol_type = other DNA
gtctcaagcatcatgttgggtt

SEQ ID NO: 64403 - DNA, 22 bp, synthetic construct
  misc_feature 1..22: note = chemically synthesized
  source 1..22: mol_type = other DNA
aagcatcatgttgggttcatta

SEQ ID NO: 64404 - DNA, 22 bp, synthetic construct
  misc_feature 1..22: note = chemically synthesized
  source 1..22: mol_type = other DNA
ggttcattatgcctcccaagct

SEQ ID NO: 64405 - DNA, 22 bp, synthetic construct
  misc_feature 1..22: note = chemically synthesized
  source 1..22: mol_type = other DNA
attatgcctcccaagctgttcc

SEQ ID NO: 64406 - DNA, 22 bp, synthetic construct
  misc_feature 1..22: note = chemically synthesized
  source 1..22: mol_type = other DNA
tgcctcccaagctgttccttat

SEQ ID NO: 64407 - DNA, 22 bp, synthetic construct
  misc_feature 1..22: note = chemically synthesized
  source 1..22: mol_type = other DNA
ccaagctgttccttataacatc

SEQ ID NO: 64408 - DNA, 22 bp, synthetic construct
  misc_feature 1..22: note = chemically synthesized
  source 1..22: mol_type = other DNA
ttccttataacatcaggactcc

SEQ ID NO: 64409 - DNA, 22 bp, synthetic construct
  misc_feature 1..22: note = chemically synthesized
  source 1..22: mol_type = other DNA
cttataacatcaggactccaaa

SEQ ID NO: 64410 - DNA, 22 bp, synthetic construct
  misc_feature 1..22: note = chemically synthesized
  source 1..22: mol_type = other DNA
ataacatcaggactccaaaacc

SEQ ID NO: 64411 - DNA, 22 bp, synthetic construct
  misc_feature 1..22: note = chemically synthesized
  source 1..22: mol_type = other DNA
taacatcaggactccaaaacct

SEQ ID NO: 64412 - DNA, 22 bp, synthetic construct
  misc_feature 1..22: note = chemically synthesized
  source 1..22: mol_type = other DNA
caaaacctgctctctcctggcc

SEQ ID NO: 64413 - DNA, 22 bp, synthetic construct
  misc_feature 1..22: note = chemically synthesized
  source 1..22: mol_type = other DNA
ctctctcctggcccttctatca

SEQ ID NO: 64414 - DNA, 22 bp, synthetic construct
  misc_feature 1..22: note = chemically synthesized
  source 1..22: mol_type = other DNA
tctcctggcccttctatcagag

SEQ ID NO: 64415 - DNA, 22 bp, synthetic construct
  misc_feature 1..22: note = chemically synthesized
  source 1..22: mol_type = other DNA
tcctggcccttctatcagaggc

SEQ ID NO: 64416 - DNA, 22 bp, synthetic construct
  misc_feature 1..22: note = chemically synthesized
  source 1..22: mol_type = other DNA
ctggcccttctatcagaggcag

SEQ ID NO: 64417 - DNA, 22 bp, synthetic construct
  misc_feature 1..22: note = chemically synthesized
  source 1..22: mol_type = other DNA
gcccttctatcagaggcagcac

SEQ ID NO: 64418 - DNA, 22 bp, synthetic construct
  misc_feature 1..22: note = chemically synthesized
  source 1..22: mol_type = other DNA
ctatcagaggcagcaccctgca

SEQ ID NO: 64419 - DNA, 22 bp, synthetic construct
  misc_feature 1..22: note = chemically synthesized
  source 1..22: mol_type = other DNA
tatcagaggcagcaccctgcac

SEQ ID NO: 64420 - DNA, 22 bp, synthetic construct
  misc_feature 1..22: note = chemically synthesized
  source 1..22: mol_type = other DNA
tcagaggcagcaccctgcactc

SEQ ID NO: 64421 - DNA, 22 bp, synthetic construct
  misc_feature 1..22: note = chemically synthesized
  source 1..22: mol_type = other DNA
cactcctaaaagctagtgcctg

SEQ ID NO: 64422 - DNA, 22 bp, synthetic construct
  misc_feature 1..22: note = chemically synthesized
  source 1..22: mol_type = other DNA
ctaaaagctagtgcctgggagg

SEQ ID NO: 64423 - DNA, 22 bp, synthetic construct
  misc_feature 1..22: note = chemically synthesized
  source 1..22: mol_type = other DNA
aaagctagtgcctgggagggcg

SEQ ID NO: 64424 - DNA, 22 bp, synthetic construct
  misc_feature 1..22: note = chemically synthesized
  source 1..22: mol_type = other DNA
gtgcctgggagggcgactggag

SEQ ID NO: 64425 - DNA, 22 bp, synthetic construct
  misc_feature 1..22: note = chemically synthesized
  source 1..22: mol_type = other DNA
ggagggcgactggagaggagaa

SEQ ID NO: 64426 - DNA, 22 bp, synthetic construct
  misc_feature 1..22: note = chemically synthesized
  source 1..22: mol_type = other DNA
gagaggagaaagtcgccatctg

SEQ ID NO: 64427 - DNA, 22 bp, synthetic construct
  misc_feature 1..22: note = chemically synthesized
  source 1..22: mol_type = other DNA
gccaagtaccccatggtgtacg

SEQ ID NO: 64428 - DNA, 22 bp, synthetic construct
  misc_feature 1..22: note = chemically synthesized
  source 1..22: mol_type = other DNA
aggccaagctttaaaccaaaag

SEQ ID NO: 64429 - DNA, 22 bp, synthetic construct
  misc_feature 1..22: note = chemically synthesized
  source 1..22: mol_type = other DNA
taaaccaaaagaatgaaggctt

SEQ ID NO: 64430 - DNA, 22 bp, synthetic construct
  misc_feature 1..22: note = chemically synthesized
  source 1..22: mol_type = other DNA
aaaccaaaagaatgaaggcttc

SEQ ID NO: 64431 - DNA, 22 bp, synthetic construct
  misc_feature 1..22: note = chemically synthesized
  source 1..22: mol_type = other DNA
aaccaaaagaatgaaggcttca

SEQ ID NO: 64432 - DNA, 22 bp, synthetic construct
  misc_feature 1..22: note = chemically synthesized
  source 1..22: mol_type = other DNA
catggtgacatttctgggatcg

SEQ ID NO: 64433 - DNA, 22 bp, synthetic construct
  misc_feature 1..22: note = chemically synthesized
  source 1..22: mol_type = other DNA
atggtgacatttctgggatcgg

SEQ ID NO: 64434 - DNA, 22 bp, synthetic construct
  misc_feature 1..22: note = chemically synthesized
  source 1..22: mol_type = other DNA
ctgggatcggggcaggtgggag

SEQ ID NO: 64435 - DNA, 22 bp, synthetic construct
  misc_feature 1..22: note = chemically synthesized
  source 1..22: mol_type = other DNA
tgggatcggggcaggtgggagc

SEQ ID NO: 64436 - DNA, 22 bp, synthetic construct
  misc_feature 1..22: note = chemically synthesized
  source 1..22: mol_type = other DNA
ggatcggggcaggtgggagcac

SEQ ID NO: 64437 - DNA, 22 bp, synthetic construct
  misc_feature 1..22: note = chemically synthesized
  source 1..22: mol_type = other DNA
tttgcggggccagggacaggga

SEQ ID NO: 64438 - DNA, 22 bp, synthetic construct
  misc_feature 1..22: note = chemically synthesized
  source 1..22: mol_type = other DNA
tgcggggccagggacagggaag

SEQ ID NO: 64439 - DNA, 22 bp, synthetic construct
  misc_feature 1..22: note = chemically synthesized
  source 1..22: mol_type = other DNA
gcggggccagggacagggaagc

SEQ ID NO: 64440 - DNA, 22 bp, synthetic construct
  misc_feature 1..22: note = chemically synthesized
  source 1..22: mol_type = other DNA
cggggccagggacagggaagcg

SEQ ID NO: 64441 - DNA, 22 bp, synthetic construct
  misc_feature 1..22: note = chemically synthesized
  source 1..22: mol_type = other DNA
cctgcctaatctcacaccattt

SEQ ID NO: 64442 - DNA, 22 bp, synthetic construct
  misc_feature 1..22: note = chemically synthesized
  source 1..22: mol_type = other DNA
cctaatctcacaccatttctac

SEQ ID NO: 64443 - DNA, 22 bp, synthetic construct
  misc_feature 1..22: note = chemically synthesized
  source 1..22: mol_type = other DNA
atctcacaccatttctacccgg

SEQ ID NO: 64444 - DNA, 22 bp, synthetic construct
  misc_feature 1..22: note = chemically synthesized
  source 1..22: mol_type = other DNA
acaccatttctacccgggagca

SEQ ID NO: 64445 - DNA, 22 bp, synthetic construct
  misc_feature 1..22: note = chemically synthesized
  source 1..22: mol_type = other DNA
ctacccgggagcataaaataag

SEQ ID NO: 64446 - DNA, 22 bp, synthetic construct
  misc_feature 1..22: note = chemically synthesized
  source 1..22: mol_type = other DNA
tacccgggagcataaaataagg

SEQ ID NO: 64447 - DNA, 22 bp, synthetic construct
  misc_feature 1..22: note = chemically synthesized
  source 1..22: mol_type = other DNA
cccgggagcataaaataaggga

SEQ ID NO: 64448 - DNA, 22 bp, synthetic construct
  misc_feature 1..22: note = chemically synthesized
  source 1..22: mol_type = other DNA
gcctatggtcaaacaacctgtt

SEQ ID NO: 64449 - DNA, 22 bp, synthetic construct
  misc_feature 1..22: note = chemically synthesized
  source 1..22: mol_type = other DNA
tggtcaaacaacctgttgaact

SEQ ID NO: 64450 - DNA, 22 bp, synthetic construct
  misc_feature 1..22: note = chemically synthesized
  source 1..22: mol_type = other DNA
ttgaactgggcaataaataaac

SEQ ID NO: 64451 - DNA, 22 bp, synthetic construct
  misc_feature 1..22: note = chemically synthesized
  source 1..22: mol_type = other DNA
aactgggcaataaataaaccca

SEQ ID NO: 64452 - DNA, 22 bp, synthetic construct
  misc_feature 1..22: note = chemically synthesized
  source 1..22: mol_type = other DNA
ggcaataaataaacccaagtgt

SEQ ID NO: 64453 - DNA, 22 bp, synthetic construct
  misc_feature 1..22: note = chemically synthesized
  source 1..22: mol_type = other DNA
tcacttactggcagggggcctg

SEQ ID NO: 64454 - DNA, 22 bp, synthetic construct
  misc_feature 1..22: note = chemically synthesized
  source 1..22: mol_type = other DNA
actggcagggggcctggggtaa

SEQ ID NO: 64455 - DNA, 22 bp, synthetic construct
  misc_feature 1..22: note = chemically synthesized
  source 1..22: mol_type = other DNA
ctggcagggggcctggggtaaa

SEQ ID NO: 64456 - DNA, 22 bp, synthetic construct
  misc_feature 1..22: note = chemically synthesized
  source 1..22: mol_type = other DNA
gcagggggcctggggtaaatga

SEQ ID NO: 64457 - DNA, 22 bp, synthetic construct
  misc_feature 1..22: note = chemically synthesized
  source 1..22: mol_type = other DNA
gggtaaatgacttcacttcttt

SEQ ID NO: 64458 - DNA, 22 bp, synthetic construct
  misc_feature 1..22: note = chemically synthesized
  source 1..22: mol_type = other DNA
cacttctttgagcactagcttc

SEQ ID NO: 64459 - DNA, 22 bp, synthetic construct
  misc_feature 1..22: note = chemically synthesized
  source 1..22: mol_type = other DNA
acttctttgagcactagcttca

SEQ ID NO: 64460 - DNA, 22 bp, synthetic construct
  misc_feature 1..22: note = chemically synthesized
  source 1..22: mol_type = other DNA
ctttgagcactagcttcatagc

SEQ ID NO: 64461 - DNA, 22 bp, synthetic construct
  misc_feature 1..22: note = chemically synthesized
  source 1..22: mol_type = other DNA
tttgagcactagcttcatagct

SEQ ID NO: 64462 - DNA, 22 bp, synthetic construct
  misc_feature 1..22: note = chemically synthesized
  source 1..22: mol_type = other DNA
tgagcactagcttcatagctgt

SEQ ID NO: 64463 - DNA, 22 bp, synthetic construct
  misc_feature 1..22: note = chemically synthesized
  source 1..22: mol_type = other DNA
gagcactagcttcatagctgta

SEQ ID NO: 64464 - DNA, 22 bp, synthetic construct
  misc_feature 1..22: note = chemically synthesized
  source 1..22: mol_type = other DNA
agcactagcttcatagctgtac

SEQ ID NO: 64465 - DNA, 22 bp, synthetic construct
  misc_feature 1..22: note = chemically synthesized
  source 1..22: mol_type = other DNA
gcttcatagctgtacaatggag

SEQ ID NO: 64466 - DNA, 22 bp, synthetic construct
  misc_feature 1..22: note = chemically synthesized
  source 1..22: mol_type = other DNA
catagctgtacaatggagaaaa

SEQ ID NO: 64467 - DNA, 22 bp, synthetic construct
  misc_feature 1..22: note = chemically synthesized
  source 1..22: mol_type = other DNA
atagctgtacaatggagaaaag

SEQ ID NO: 64468 - DNA, 22 bp, synthetic construct
  misc_feature 1..22: note = chemically synthesized
  source 1..22: mol_type = other DNA
tacaatggagaaaagaatcctt

SEQ ID NO: 64469 - DNA, 22 bp, synthetic construct
  misc_feature 1..22: note = chemically synthesized
  source 1..22: mol_type = other DNA
tggacagggatgaggaataact

SEQ ID NO: 64470 - DNA, 22 bp, synthetic construct
  misc_feature 1..22: note = chemically synthesized
  source 1..22: mol_type = other DNA
ggacagggatgaggaataactg

SEQ ID NO: 64471 - DNA, 22 bp, synthetic construct
  misc_feature 1..22: note = chemically synthesized
  source 1..22: mol_type = other DNA
gacagggatgaggaataactga

SEQ ID NO: 64472 - DNA, 22 bp, synthetic construct
  misc_feature 1..22: note = chemically synthesized
  source 1..22: mol_type = other DNA
acgtaatgcatgagtgggcacc

SEQ ID NO: 64473 - DNA, 22 bp, synthetic construct
  misc_feature 1..22: note = chemically synthesized
  source 1..22: mol_type = other DNA
cctgtacctgcacacaggttga

SEQ ID NO: 64474 - DNA, 22 bp, synthetic construct
  misc_feature 1..22: note = chemically synthesized
  source 1..22: mol_type = other DNA
tacctgcacacaggttgagctc

SEQ ID NO: 64475 - DNA, 22 bp, synthetic construct
  misc_feature 1..22: note = chemically synthesized
  source 1..22: mol_type = other DNA
cacacaggttgagctcctgccc

SEQ ID NO: 64476 - DNA, 22 bp, synthetic construct
  misc_feature 1..22: note = chemically synthesized
  source 1..22: mol_type = other DNA
agctcctgcccgagagatggta

SEQ ID NO: 64477 - DNA, 22 bp, synthetic construct
  misc_feature 1..22: note = chemically synthesized
  source 1..22: mol_type = other DNA
ctgcccgagagatggtagattt

SEQ ID NO: 64478 - DNA, 22 bp, synthetic construct
  misc_feature 1..22: note = chemically synthesized
  source 1..22: mol_type = other DNA
cccgagagatggtagatttctt

SEQ ID NO: 64479 - DNA, 22 bp, synthetic construct
  misc_feature 1..22: note = chemically synthesized
  source 1..22: mol_type = other DNA
cttcccggagagcctgctgcac

SEQ ID NO: 64480 - DNA, 22 bp, synthetic construct
  misc_feature 1..22: note = chemically synthesized
  source 1..22: mol_type = other DNA
ttcccggagagcctgctgcact

SEQ ID NO: 64481 - DNA, 22 bp, synthetic construct
  misc_feature 1..22: note = chemically synthesized
  source 1..22: mol_type = other DNA
cccggagagcctgctgcactcc

SEQ ID NO: 64482 - DNA, 22 bp, synthetic construct
  misc_feature 1..22: note = chemically synthesized
  source 1..22: mol_type = other DNA
ccggagagcctgctgcactccc

SEQ ID NO: 64483 - DNA, 22 bp, synthetic construct
  misc_feature 1..22: note = chemically synthesized
  source 1..22: mol_type = other DNA
ctgcactccccaggaccatttc

SEQ ID NO: 64484 - DNA, 22 bp, synthetic construct
  misc_feature 1..22: note = chemically synthesized
  source 1..22: mol_type = other DNA
cactccccaggaccatttcagc

SEQ ID NO: 64485 - DNA, 22 bp, synthetic construct
  misc_feature 1..22: note = chemically synthesized
  source 1..22: mol_type = other DNA
cccaggaccatttcagcaggaa

SEQ ID NO: 64486 - DNA, 22 bp, synthetic construct
  misc_feature 1..22: note = chemically synthesized
  source 1..22: mol_type = other DNA
cagcaggaaggggctcctgctc

SEQ ID NO: 64487 - DNA, 22 bp, synthetic construct
  misc_feature 1..22: note = chemically synthesized
  source 1..22: mol_type = other DNA
agcaggaaggggctcctgctca

SEQ ID NO: 64488 - DNA, 22 bp, synthetic construct
  misc_feature 1..22: note = chemically synthesized
  source 1..22: mol_type = other DNA
ctgctcagcagtgaacagcatc

SEQ ID NO: 64489 - DNA, 22 bp, synthetic construct
  misc_feature 1..22: note = chemically synthesized
  source 1..22: mol_type = other DNA
ctcagcagtgaacagcatctga

SEQ ID NO: 64490 - DNA, 22 bp, synthetic construct
  misc_feature 1..22: note = chemically synthesized
  source 1..22: mol_type = other DNA
agcagtgaacagcatctgagtt

SEQ ID NO: 64491 - DNA, 22 bp, synthetic construct
  misc_feature 1..22: note = chemically synthesized
  source 1..22: mol_type = other DNA
agtttggcaaattttccattaa

SEQ ID NO: 64492 - DNA, 22 bp, synthetic construct
  misc_feature 1..22: note = chemically synthesized
  source 1..22: mol_type = other DNA
ggcaaattttccattaaattat

SEQ ID NO: 64493 - DNA, 22 bp, synthetic construct
  misc_feature 1..22: note = chemically synthesized
  source 1..22: mol_type = other DNA
gcaaattttccattaaattatc

SEQ ID NO: 64494 - DNA, 22 bp, synthetic construct
  misc_feature 1..22: note = chemically synthesized
  source 1..22: mol_type = other DNA
tccattaaattatccaactgtt

SEQ ID NO: 64495 - DNA, 22 bp, synthetic construct
  misc_feature 1..22: note = chemically synthesized
  source 1..22: mol_type = other DNA
ccattaaattatccaactgttt

SEQ ID NO: 64496 - DNA, 22 bp, synthetic construct
  misc_feature 1..22: note = chemically synthesized
  source 1..22: mol_type = other DNA
cattaaattatccaactgttta

SEQ ID NO: 64497 - DNA, 22 bp, synthetic construct
  misc_feature 1..22: note = chemically synthesized
  source 1..22: mol_type = other DNA
aattatccaactgtttactgcc

SEQ ID NO: 64498 - DNA, 22 bp, synthetic construct
  misc_feature 1..22: note = chemically synthesized
  source 1..22: mol_type = other DNA
tccaactgtttactgcctgcca

SEQ ID NO: 64499 - DNA, 22 bp, synthetic construct
  misc_feature 1..22: note = chemically synthesized
  source 1..22: mol_type = other DNA
tttactgcctgccagctgccta

SEQ ID NO: 64500 - DNA, 22 bp, synthetic construct
  misc_feature 1..22: note = chemically synthesized
  source 1..22: mol_type = other DNA
actgcctgccagctgcctaacc

SEQ ID NO: 64501 - DNA, 22 bp, synthetic construct
  misc_feature 1..22: note = chemically synthesized
  source 1..22: mol_type = other DNA
ctgcctgccagctgcctaaccc

SEQ ID NO: 64502 - DNA, 22 bp, synthetic construct
  misc_feature 1..22: note = chemically synthesized
  source 1..22: mol_type = other DNA
cctgccagctgcctaaccctat

SEQ ID NO: 64503 - DNA, 22 bp, synthetic construct
  misc_feature 1..22: note = chemically synthesized
  source 1..22: mol_type = other DNA
ccagctgcctaaccctatgcta

SEQ ID NO: 64504 - DNA, 22 bp, synthetic construct
  misc_feature 1..22: note = chemically synthesized
  source 1..22: mol_type = other DNA
cctaaccctatgctaagcaaac

SEQ ID NO: 64505 - DNA, 22 bp, synthetic construct
  misc_feature 1..22: note = chemically synthesized
  source 1..22: mol_type = other DNA
accctatgctaagcaaacatca

SEQ ID NO: 64506 - DNA, 22 bp, synthetic construct
  misc_feature 1..22: note = chemically synthesized
  source 1..22: mol_type = other DNA
tgctaagcaaacatcagcctca

SEQ ID NO: 64507 - DNA, 22 bp, synthetic construct
  misc_feature 1..22: note = chemically synthesized
  source 1..22: mol_type = other DNA
agcaaacatcagcctcagcgtc

SEQ ID NO: 64508 - DNA, 22 bp, synthetic construct
  misc_feature 1..22: note = chemically synthesized
  source 1..22: mol_type = other DNA
agcgtcaccatcattgccacac

SEQ ID NO: 64509 - DNA, 22 bp, synthetic construct
  misc_feature 1..22: note = chemically synthesized
  source 1..22: mol_type = other DNA
ccacacttactaacacctggtg

SEQ ID NO: 64510 - DNA, 22 bp, synthetic construct
  misc_feature 1..22: note = chemically synthesized
  source 1..22: mol_type = other DNA
actaacacctggtgttttacag

SEQ ID NO: 64511 - DNA, 22 bp, synthetic construct
  misc_feature 1..22: note = chemically synthesized
  source 1..22: mol_type = other DNA
ctaacacctggtgttttacagg

SEQ ID NO: 64512 - DNA, 22 bp, synthetic construct
  misc_feature 1..22: note = chemically synthesized
  source 1..22: mol_type = other DNA
acacctggtgttttacaggcac

SEQ ID NO: 64513 - DNA, 22 bp, synthetic construct
  misc_feature 1..22: note = chemically synthesized
  source 1..22: mol_type = other DNA
gtgttttacaggcaccgtatca

SEQ ID NO: 64514 - DNA, 22 bp, synthetic construct
  misc_feature 1..22: note = chemically synthesized
  source 1..22: mol_type = other DNA
tacaggcaccgtatcatctaat

SEQ ID NO: 64515 - DNA, 22 bp, synthetic construct
  misc_feature 1..22: note = chemically synthesized
  source 1..22: mol_type = other DNA
acaggcaccgtatcatctaatc

SEQ ID NO: 64516 - DNA, 22 bp, synthetic construct
  misc_feature 1..22: note = chemically synthesized
  source 1..22: mol_type = other DNA
caggcaccgtatcatctaatct

SEQ ID NO: 64517 - DNA, 22 bp, synthetic construct
  misc_feature 1..22: note = chemically synthesized
  source 1..22: mol_type = other DNA
atctgtcctcaaagcttaccct

SEQ ID NO: 64518 - DNA, 22 bp, synthetic construct
  misc_feature 1..22: note = chemically synthesized
  source 1..22: mol_type = other DNA
tcctcaaagcttaccctataag

SEQ ID NO: 64519 - DNA, 22 bp, synthetic construct
  misc_feature 1..22: note = chemically synthesized
  source 1..22: mol_type = other DNA
aaagcttaccctataaggtgca

SEQ ID NO: 64520 - DNA, 22 bp, synthetic construct
  misc_feature 1..22: note = chemically synthesized
  source 1..22: mol_type = other DNA
accctataaggtgcaaattatt

SEQ ID NO: 64521 - DNA, 22 bp, synthetic construct
  misc_feature 1..22: note = chemically synthesized
  source 1..22: mol_type = other DNA
ccctataaggtgcaaattatta

SEQ ID NO: 64522 - DNA, 22 bp, synthetic construct
  misc_feature 1..22: note = chemically synthesized
  source 1..22: mol_type = other DNA
taaggtgcaaattattagccct

SEQ ID NO: 64523 - DNA, 22 bp, synthetic construct
  misc_feature 1..22: note = chemically synthesized
  source 1..22: mol_type = other DNA
ttagccctattttatagataga

SEQ ID NO: 64524 - DNA, 22 bp, synthetic construct
  misc_feature 1..22: note = chemically synthesized
  source 1..22: mol_type = other DNA
gccctattttatagatagaaaa

SEQ ID NO: 64525 - DNA, 22 bp, synthetic construct
  misc_feature 1..22: note = chemically synthesized
  source 1..22: mol_type = other DNA
ttttatagatagaaaaattgag

SEQ ID NO: 64526 - DNA, 22 bp, synthetic construct
  misc_feature 1..22: note = chemically synthesized
  source 1..22: mol_type = other DNA
tatagatagaaaaattgagccc

SEQ ID NO: 64527 - DNA, 22 bp, synthetic construct
  misc_feature 1..22: note = chemically synthesized
  source 1..22: mol_type = other DNA
atagatagaaaaattgagcccc

SEQ ID NO: 64528 - DNA, 22 bp, synthetic construct
  misc_feature 1..22: note = chemically synthesized
  source 1..22: mol_type = other DNA
tagatagaaaaattgagcccca

SEQ ID NO: 64529 - DNA, 22 bp, synthetic construct
  misc_feature 1..22: note = chemically synthesized
  source 1..22: mol_type = other DNA
agccccaaagagcattaaataa

SEQ ID NO: 64530 - DNA, 22 bp, synthetic construct
  misc_feature 1..22: note = chemically synthesized
  source 1..22: mol_type = other DNA
aataactcactaaaaatcacag

SEQ ID NO: 64531 - DNA, 22 bp, synthetic construct
  misc_feature 1..22: note = chemically synthesized
  source 1..22: mol_type = other DNA
actaaaaatcacagagctactt

SEQ ID NO: 64532 - DNA, 22 bp, synthetic construct
  misc_feature 1..22: note = chemically synthesized
  source 1..22: mol_type = other DNA
aaaatcacagagctacttgctt

SEQ ID NO: 64533 - DNA, 22 bp, synthetic construct
  misc_feature 1..22: note = chemically synthesized
  source 1..22: mol_type = other DNA
cttgcttacaaaactgagatgt

SEQ ID NO: 64534 - DNA, 22 bp, synthetic construct
  misc_feature 1..22: note = chemically synthesized
  source 1..22: mol_type = other DNA
gcttacaaaactgagatgtaat

SEQ ID NO: 64535 - DNA, 22 bp, synthetic construct
  misc_feature 1..22: note = chemically synthesized
  source 1..22: mol_type = other DNA
cttacaaaactgagatgtaatc

SEQ ID NO: 64536 - DNA, 22 bp, synthetic construct
  misc_feature 1..22: note = chemically synthesized
  source 1..22: mol_type = other DNA
acaaaactgagatgtaatccta

SEQ ID NO: 64537 - DNA, 22 bp, synthetic construct
  misc_feature 1..22: note = chemically synthesized
  source 1..22: mol_type = other DNA
caaaactgagatgtaatcctaa

SEQ ID NO: 64538 - DNA, 22 bp, synthetic construct
  misc_feature 1..22: note = chemically synthesized
  source 1..22: mol_type = other DNA
agatgtaatcctaaatgttttg

SEQ ID NO: 64539 - DNA, 22 bp, synthetic construct
  misc_feature 1..22: note = chemically synthesized
  source 1..22: mol_type = other DNA
aatgttttgtctgggattaaac

SEQ ID NO: 64540 - DNA, 22 bp, synthetic construct
  misc_feature 1..22: note = chemically synthesized
  source 1..22: mol_type = other DNA
tgtctgggattaaacagatttc

SEQ ID NO: 64541 - DNA, 22 bp, synthetic construct
  misc_feature 1..22: note = chemically synthesized
  source 1..22: mol_type = other DNA
gtctgggattaaacagatttca

SEQ ID NO: 64542 - DNA, 22 bp, synthetic construct
  misc_feature 1..22: note = chemically synthesized
  source 1..22: mol_type = other DNA
tctgggattaaacagatttcac

SEQ ID NO: 64543 - DNA, 22 bp, synthetic construct
  misc_feature 1..22: note = chemically synthesized
  source 1..22: mol_type = other DNA
ggattaaacagatttcactcca

SEQ ID NO: 64544 - DNA, 22 bp, synthetic construct
  misc_feature 1..22: note = chemically synthesized
  source 1..22: mol_type = other DNA
aacagatttcactccaaaacct

SEQ ID NO: 64545 - DNA, 22 bp, synthetic construct
  misc_feature 1..22: note = chemically synthesized
  source 1..22: mol_type = other DNA
cactccaaaacctgacattgaa

SEQ ID NO: 64546 - DNA, 22 bp, synthetic construct
  misc_feature 1..22: note = chemically synthesized
  source 1..22: mol_type = other DNA
actccaaaacctgacattgaat

SEQ ID NO: 64547 - DNA, 22 bp, synthetic construct
  misc_feature 1..22: note = chemically synthesized
  source 1..22: mol_type = other DNA
caaaacctgacattgaatcatc

SEQ ID NO: 64548 - DNA, 22 bp, synthetic construct
  misc_feature 1..22: note = chemically synthesized
  source 1..22: mol_type = other DNA
acattgaatcatctctgtgtac

SEQ ID NO: 64549 - DNA, 22 bp, synthetic construct
  misc_feature 1..22: note = chemically synthesized
  source 1..22: mol_type = other DNA
aatcatctctgtgtacaaagct

SEQ ID NO: 64550 - DNA, 22 bp, synthetic construct
  misc_feature 1..22: note = chemically synthesized
  source 1..22: mol_type = other DNA
tgtgtacaaagctgaagccaga

SEQ ID NO: 64551 - DNA, 22 bp, synthetic construct
  misc_feature 1..22: note = chemically synthesized
  source 1..22: mol_type = other DNA
tgtacaaagctgaagccagaag

SEQ ID NO: 64552 - DNA, 22 bp, synthetic construct
  misc_feature 1..22: note = chemically synthesized
  source 1..22: mol_type = other DNA
aagccagaagtcttgaatcaga

SEQ ID NO: 64553 - DNA, 22 bp, synthetic construct
  misc_feature 1..22: note = chemically synthesized
  source 1..22: mol_type = other DNA
gaatcagaaaacttcagaggca

SEQ ID NO: 64554 - DNA, 22 bp, synthetic construct
  misc_feature 1..22: note = chemically synthesized
  source 1..22: mol_type = other DNA
aatcagaaaacttcagaggcag

SEQ ID NO: 64555 - DNA, 22 bp, synthetic construct
  misc_feature 1..22: note = chemically synthesized
  source 1..22: mol_type = other DNA
cagaggcagcctggctaaatga

SEQ ID NO: 64556 - DNA, 22 bp, synthetic construct
  misc_feature 1..22: note = chemically synthesized
  source 1..22: mol_type = other DNA
agaggcagcctggctaaatgaa

SEQ ID NO: 64557 - DNA, 22 bp, synthetic construct
  misc_feature 1..22: note = chemically synthesized
  source 1..22: mol_type = other DNA
gctaaatgaagaggggagcatc

SEQ ID NO: 64558 - DNA, 22 bp, synthetic construct
  misc_feature 1..22: note = chemically synthesized
  source 1..22: mol_type = other DNA
aatgaagaggggagcatcagtc

SEQ ID NO: 64559 - DNA, 22 bp, synthetic construct
  misc_feature 1..22: note = chemically synthesized
  source 1..22: mol_type = other DNA
tggctaaaattaaaggctctga

SEQ ID NO: 64560 - DNA, 22 bp, synthetic construct
  misc_feature 1..22: note = chemically synthesized
  source 1..22: mol_type = other DNA
aaattaaaggctctgaggccag

SEQ ID NO: 64561 - DNA, 22 bp, synthetic construct
  misc_feature 1..22: note = chemically synthesized
  source 1..22: mol_type = other DNA
aaggctctgaggccagattgct

SEQ ID NO: 64562 - DNA, 22 bp, synthetic construct
  misc_feature 1..22: note = chemically synthesized
  source 1..22: mol_type = other DNA
tgaggccagattgctccacgtc

SEQ ID NO: 64563 - DNA, 22 bp, synthetic construct
  misc_feature 1..22: note = chemically synthesized
  source 1..22: mol_type = other DNA
aggccagattgctccacgtcaa

SEQ ID NO: 64564 - DNA, 22 bp, synthetic construct
  misc_feature 1..22: note = chemically synthesized
  source 1..22: mol_type = other DNA
ctccacgtcaacttgctattag

SEQ ID NO: 64565 - DNA, 22 bp, synthetic construct
  misc_feature 1..22: note = chemically synthesized
  source 1..22: mol_type = other DNA
cacgtcaacttgctattagctg

SEQ ID NO: 64566 - DNA, 22 bp, synthetic construct
  misc_feature 1..22: note = chemically synthesized
  source 1..22: mol_type = other DNA
gctattagctgtgtgaccttgg

SEQ ID NO: 64567 - DNA, 22 bp, synthetic construct
  misc_feature 1..22: note = chemically synthesized
  source 1..22: mol_type = other DNA
ctattagctgtgtgaccttgga

SEQ ID NO: 64568 - DNA, 22 bp, synthetic construct
  misc_feature 1..22: note = chemically synthesized
  source 1..22: mol_type = other DNA
ttagctgtgtgaccttggacaa

SEQ ID NO: 64569 - DNA, 22 bp, synthetic construct
  misc_feature 1..22: note = chemically synthesized
  source 1..22: mol_type = other DNA
gctgtgtgaccttggacaagtt

SEQ ID NO: 64570 - DNA, 22 bp, synthetic construct
  misc_feature 1..22: note = chemically synthesized
  source 1..22: mol_type = other DNA
tgtgaccttggacaagttactt

SEQ ID NO: 64571 - DNA, 22 bp, synthetic construct
  misc_feature 1..22: note = chemically synthesized
  source 1..22: mol_type = other DNA
ggacaagttacttaacctctct

SEQ ID NO: 64572 - DNA, 22 bp, synthetic construct
  misc_feature 1..22: note = chemically synthesized
  source 1..22: mol_type = other DNA
gacaagttacttaacctctctg

SEQ ID NO: 64573 - DNA, 22 bp, synthetic construct
  misc_feature 1..22: note = chemically synthesized
  source 1..22: mol_type = other DNA
cttaacctctctgaacctcagt

SEQ ID NO: 64574 - DNA, 22 bp, synthetic construct
  misc_feature 1..22: note = chemically synthesized
  source 1..22: mol_type = other DNA
aacctctctgaacctcagtttc

SEQ ID NO: 64575 - DNA, 22 bp, synthetic construct
  misc_feature 1..22: note = chemically synthesized
  source 1..22: mol_type = other DNA
acctctctgaacctcagtttcc

SEQ ID NO: 64576 - DNA, 22 bp, synthetic construct
  misc_feature 1..22: note = chemically synthesized
  source 1..22: mol_type = other DNA
tctgaacctcagtttcctggag

SEQ ID NO: 64577 - DNA, 22 bp, synthetic construct
  misc_feature 1..22: note = chemically synthesized
  source 1..22: mol_type = other DNA
tgaacctcagtttcctggagat

SEQ ID NO: 64578 - DNA, 22 bp, synthetic construct
  misc_feature 1..22: note = chemically synthesized
  source 1..22: mol_type = other DNA
aacctcagtttcctggagatga

SEQ ID NO: 64579 - DNA, 22 bp, synthetic construct
  misc_feature 1..22: note = chemically synthesized
  source 1..22: mol_type = other DNA
agtttcctggagatgagaaagg

SEQ ID NO: 64580 - DNA, 22 bp, synthetic construct
  misc_feature 1..22: note = chemically synthesized
  source 1..22: mol_type = other DNA
cctggagatgagaaaggtggac

SEQ ID NO: 64581 - DNA, 22 bp, synthetic construct
  misc_feature 1..22: note = chemically synthesized
  source 1..22: mol_type = other DNA
ctggagatgagaaaggtggact

SEQ ID NO: 64582 - DNA, 22 bp, synthetic construct
  misc_feature 1..22: note = chemically synthesized
  source 1..22: mol_type = other DNA
gagatgagaaaggtggactttg

SEQ ID NO: 64583 - DNA, 22 bp, synthetic construct
  misc_feature 1..22: note = chemically synthesized
  source 1..22: mol_type = other DNA
tgtcatagagctattgtgaaat

SEQ ID NO: 64584 - DNA, 22 bp, synthetic construct
  misc_feature 1..22: note = chemically synthesized
  source 1..22: mol_type = other DNA
gtcatagagctattgtgaaatt

SEQ ID NO: 64585 - DNA, 22 bp, synthetic construct
  misc_feature 1..22: note = chemically synthesized
  source 1..22: mol_type = other DNA
tcatagagctattgtgaaatta

SEQ ID NO: 64586 - DNA, 22 bp, synthetic construct
  misc_feature 1..22: note = chemically synthesized
  source 1..22: mol_type = other DNA
ttgtgaaattaaatacacataa

SEQ ID NO: 64587 - DNA, 22 bp, synthetic construct
  misc_feature 1..22: note = chemically synthesized
  source 1..22: mol_type = other DNA
tgaaattaaatacacataaaat

SEQ ID NO: 64588 - DNA, 22 bp, synthetic construct
  misc_feature 1..22: note = chemically synthesized
  source 1..22: mol_type = other DNA
aatacacataaaatgccaagaa

SEQ ID NO: 64589 - DNA, 22 bp, synthetic construct
  misc_feature 1..22: note = chemically synthesized
  source 1..22: mol_type = other DNA
ctgcgcagcaagttctcgagaa

SEQ ID NO: 64590 - DNA, 22 bp, synthetic construct
  misc_feature 1..22: note = chemically synthesized
  source 1..22: mol_type = other DNA
cgcagcaagttctcgagaatac

SEQ ID NO: 64591 - DNA, 22 bp, synthetic construct
  misc_feature 1..22: note = chemically synthesized
  source 1..22: mol_type = other DNA
tcgagaataccagttcttgctg

SEQ ID NO: 64592 - DNA, 22 bp, synthetic construct
  misc_feature 1..22: note = chemically synthesized
  source 1..22: mol_type = other DNA
gagaataccagttcttgctgct

SEQ ID NO: 64593 - DNA, 22 bp, synthetic construct
  misc_feature 1..22: note = chemically synthesized
  source 1..22: mol_type = other DNA
ttgctgctattgctgcaggtct

SEQ ID NO: 64594 - DNA, 22 bp, synthetic construct
  misc_feature 1..22: note = chemically synthesized
  source 1..22: mol_type = other DNA
gctgctattgctgcaggtcttt

SEQ ID NO: 64595 - DNA, 22 bp, synthetic construct
  misc_feature 1..22: note = chemically synthesized
  source 1..22: mol_type = other DNA
ctgctattgctgcaggtctttt

SEQ ID NO: 64596 - DNA, 22 bp, synthetic construct
  misc_feature 1..22: note = chemically synthesized
  source 1..22: mol_type = other DNA
ctattgctgcaggtcttttaga

SEQ ID NO: 64597 - DNA, 22 bp, synthetic construct
  misc_feature 1..22: note = chemically synthesized
  source 1..22: mol_type = other DNA
ttgctgcaggtcttttagaggc

SEQ ID NO: 64598 - DNA, 22 bp, synthetic construct
  misc_feature 1..22: note = chemically synthesized
  source 1..22: mol_type = other DNA
ctgcaggtcttttagaggcgtt

SEQ ID NO: 64599 - DNA, 22 bp, synthetic construct
  misc_feature 1..22: note = chemically synthesized
  source 1..22: mol_type = other DNA
caggtcttttagaggcgttcta

SEQ ID NO: 64600 - DNA, 22 bp, synthetic construct
  misc_feature 1..22: note = chemically synthesized
  source 1..22: mol_type = other DNA
ttagaggcgttctataggaaac

SEQ ID NO: 64601 - DNA, 22 bp, synthetic construct
  misc_feature 1..22: note = chemically synthesized
  source 1..22: mol_type = other DNA
tagaggcgttctataggaaact

SEQ ID NO: 64602 - DNA, 22 bp, synthetic construct
  misc_feature 1..22: note = chemically synthesized
  source 1..22: mol_type = other DNA
agaggcgttctataggaaactg

SEQ ID NO: 64603 - DNA, 22 bp, synthetic construct
  misc_feature 1..22: note = chemically synthesized
  source 1..22: mol_type = other DNA
gaggcgttctataggaaactgg

SEQ ID NO: 64604 - DNA, 22 bp, synthetic construct
  misc_feature 1..22: note = chemically synthesized
  source 1..22: mol_type = other DNA
tataggaaactggccaccttgg

SEQ ID NO: 64605 - DNA, 22 bp, synthetic construct
  misc_feature 1..22: note = chemically synthesized
  source 1..22: mol_type = other DNA
taggaaactggccaccttggcc

SEQ ID NO: 64606 - DNA, 22 bp, synthetic construct
  misc_feature 1..22: note = chemically synthesized
  source 1..22: mol_type = other DNA
gccaccttggccttggtcatct

SEQ ID NO: 64607 - DNA, 22 bp, synthetic construct
  misc_feature 1..22: note = chemically synthesized
  source 1..22: mol_type = other DNA
ggccttggtcatctttttgacc

SEQ ID NO: 64608 - DNA, 22 bp, synthetic construct
  misc_feature 1..22: note = chemically synthesized
  source 1..22: mol_type = other DNA
gccttggtcatctttttgacct

SEQ ID NO: 64609 - DNA, 22 bp, synthetic construct
  misc_feature 1..22: note = chemically synthesized
  source 1..22: mol_type = other DNA
ggtcatctttttgacctgtctc

SEQ ID NO: 64610 - DNA, 22 bp, synthetic construct
  misc_feature 1..22: note = chemically synthesized
  source 1..22: mol_type = other DNA
gtcatctttttgacctgtctcc

SEQ ID NO: 64611 - DNA, 22 bp, synthetic construct
  misc_feature 1..22: note = chemically synthesized
  source 1..22: mol_type = other DNA
tttgacctgtctccaaaactca

SEQ ID NO: 64612 - DNA, 22 bp, synthetic construct
  misc_feature 1..22: note = chemically synthesized
  source 1..22: mol_type = other DNA
ttgacctgtctccaaaactcag

SEQ ID NO: 64613 - DNA, 22 bp, synthetic construct
  misc_feature 1..22: note = chemically synthesized
  source 1..22: mol_type = other DNA
tgacctgtctccaaaactcagt

SEQ ID NO: 64614 - DNA, 22 bp, synthetic construct
  misc_feature 1..22: note = chemically synthesized
  source 1..22: mol_type = other DNA
gacctgtctccaaaactcagtg

SEQ ID NO: 64615 - DNA, 22 bp, synthetic construct
  misc_feature 1..22: note = chemically synthesized
  source 1..22: mol_type = other DNA
acctgtctccaaaactcagtgc

SEQ ID NO: 64616 - DNA, 22 bp, synthetic construct
  misc_feature 1..22: note = chemically synthesized
  source 1..22: mol_type = other DNA
tctccaaaactcagtgcaggaa

SEQ ID NO: 64617 - DNA, 22 bp, synthetic construct
  misc_feature 1..22: note = chemically synthesized
  source 1..22: mol_type = other DNA
caaaactcagtgcaggaaaaat

SEQ ID NO: 64618 - DNA, 22 bp, synthetic construct
  misc_feature 1..22: note = chemically synthesized
  source 1..22: mol_type = other DNA
agtgcaggaaaaattaaatcct

SEQ ID NO: 64619 - DNA, 22 bp, synthetic construct
  misc_feature 1..22: note = chemically synthesized
  source 1..22: mol_type = other DNA
aatccttccaacacttcagaga

SEQ ID NO: 64620 - DNA, 22 bp, synthetic construct
  misc_feature 1..22: note = chemically synthesized
  source 1..22: mol_type = other DNA
ccaacacttcagagatcaaggt

SEQ ID NO: 64621 - DNA, 22 bp, synthetic construct
  misc_feature 1..22: note = chemically synthesized
  source 1..22: mol_type = other DNA
caacacttcagagatcaaggtc

SEQ ID NO: 64622 - DNA, 22 bp, synthetic construct
  misc_feature 1..22: note = chemically synthesized
  source 1..22: mol_type = other DNA
cagagatcaaggtcgggtgggg

SEQ ID NO: 64623 - DNA, 22 bp, synthetic construct
  misc_feature 1..22: note = chemically synthesized
  source 1..22: mol_type = other DNA
agagatcaaggtcgggtggggt

SEQ ID NO: 64624 - DNA, 22 bp, synthetic construct
  misc_feature 1..22: note = chemically synthesized
  source 1..22: mol_type = other DNA
tcatgttttgcccaagagaaca

SEQ ID NO: 64625 - DNA, 22 bp, synthetic construct
  misc_feature 1..22: note = chemically synthesized
  source 1..22: mol_type = other DNA
tgcccaagagaacagagaggtt

SEQ ID NO: 64626 - DNA, 22 bp, synthetic construct
  misc_feature 1..22: note = chemically synthesized
  source 1..22: mol_type = other DNA
gcccaagagaacagagaggttg

SEQ ID NO: 64627 - DNA, 22 bp, synthetic construct
  misc_feature 1..22: note = chemically synthesized
  source 1..22: mol_type = other DNA
cccaagagaacagagaggttga

SEQ ID NO: 64628 - DNA, 22 bp, synthetic construct
  misc_feature 1..22: note = chemically synthesized
  source 1..22: mol_type = other DNA
agcaactgtctgaagtcaccga

SEQ ID NO: 64629 - DNA, 22 bp, synthetic construct
  misc_feature 1..22: note = chemically synthesized
  source 1..22: mol_type = other DNA
tctgaagtcaccgagcatcaga

SEQ ID NO: 64630 - DNA, 22 bp, synthetic construct
  misc_feature 1..22: note = chemically synthesized
  source 1..22: mol_type = other DNA
aagtcaccgagcatcagagagg

SEQ ID NO: 64631 - DNA, 22 bp, synthetic construct
  misc_feature 1..22: note = chemically synthesized
  source 1..22: mol_type = other DNA
aagtccagcccaggtttcctgt

SEQ ID NO: 64632 - DNA, 22 bp, synthetic construct
  misc_feature 1..22: note = chemically synthesized
  source 1..22: mol_type = other DNA
cctgttccccatccagcgcctg

SEQ ID NO: 64633 - DNA, 22 bp, synthetic construct
  misc_feature 1..22: note = chemically synthesized
  source 1..22: mol_type = other DNA
ctgttccccatccagcgcctga

SEQ ID NO: 64634 - DNA, 22 bp, synthetic construct
  misc_feature 1..22: note = chemically synthesized
  source 1..22: mol_type = other DNA
ttccccatccagcgcctgagac

SEQ ID NO: 64635 - DNA, 22 bp, synthetic construct
  misc_feature 1..22: note = chemically synthesized
  source 1..22: mol_type = other DNA
cccatccagcgcctgagaccca

SEQ ID NO: 64636 - DNA, 22 bp, synthetic construct
  misc_feature 1..22: note = chemically synthesized
  source 1..22: mol_type = other DNA
agacccaagagaaacagtgaca

SEQ ID NO: 64637 - DNA, 22 bp, synthetic construct
  misc_feature 1..22: note = chemically synthesized
  source 1..22: mol_type = other DNA
gggccaggttcaagagtttggg

SEQ ID NO: 64638 - DNA, 22 bp, synthetic construct
  misc_feature 1..22: note = chemically synthesized
  source 1..22: mol_type = other DNA
aagagtttggggactggagcca

SEQ ID NO: 64639 - DNA, 22 bp, synthetic construct
  misc_feature 1..22: note = chemically synthesized
  source 1..22: mol_type = other DNA
ggggactggagccaggtgcctg

SEQ ID NO: 64640 - DNA, 22 bp, synthetic construct
  misc_feature 1..22: note = chemically synthesized
  source 1..22: mol_type = other DNA
gggactggagccaggtgcctga

SEQ ID NO: 64641 - DNA, 22 bp, synthetic construct
  misc_feature 1..22: note = chemically synthesized
  source 1..22: mol_type = other DNA
gagccaggtgcctgagcccgaa

SEQ ID NO: 64642 - DNA, 22 bp, synthetic construct
  misc_feature 1..22: note = chemically synthesized
  source 1..22: mol_type = other DNA
agcccgaattatggatggtgtg

SEQ ID NO: 64643 - DNA, 22 bp, synthetic construct
  misc_feature 1..22: note = chemically synthesized
  source 1..22: mol_type = other DNA
tggatggtgtgtgatttggggc

SEQ ID NO: 64644 - DNA, 22 bp, synthetic construct
  misc_feature 1..22: note = chemically synthesized
  source 1..22: mol_type = other DNA
ggggccagttattcacctctct

SEQ ID NO: 64645 - DNA, 22 bp, synthetic construct
  misc_feature 1..22: note = chemically synthesized
  source 1..22: mol_type = other DNA
gggccagttattcacctctctg

SEQ ID NO: 64646 - DNA, 22 bp, synthetic construct
  misc_feature 1..22: note = chemically synthesized
  source 1..22: mol_type = other DNA
ttcacctctctgtccccatctt

SEQ ID NO: 64647 - DNA, 22 bp, synthetic construct
  misc_feature 1..22: note = chemically synthesized
  source 1..22: mol_type = other DNA
acctctctgtccccatcttcct

SEQ ID NO: 64648 - DNA, 22 bp, synthetic construct
  misc_feature 1..22: note = chemically synthesized
  source 1..22: mol_type = other DNA
tctgtccccatcttcctcatct

SEQ ID NO: 64649 - DNA, 22 bp, synthetic construct
  misc_feature 1..22: note = chemically synthesized
  source 1..22: mol_type = other DNA
tgtccccatcttcctcatctgt

SEQ ID NO: 64650 - DNA, 22 bp, synthetic construct
  misc_feature 1..22: note = chemically synthesized
  source 1..22: mol_type = other DNA
tccccatcttcctcatctgtaa

SEQ ID NO: 64651 - DNA, 22 bp, synthetic construct
  misc_feature 1..22: note = chemically synthesized
  source 1..22: mol_type = other DNA
cctcatctgtaaaatgggaatc

SEQ ID NO: 64652 - DNA, 22 bp, synthetic construct
  misc_feature 1..22: note = chemically synthesized
  source 1..22: mol_type = other DNA
ctcatctgtaaaatgggaatca

SEQ ID NO: 64653 - DNA, 22 bp, synthetic construct
  misc_feature 1..22: note = chemically synthesized
  source 1..22: mol_type = other DNA
atctgtaaaatgggaatcacac

SEQ ID NO: 64654 - DNA, 22 bp, synthetic construct
  misc_feature 1..22: note = chemically synthesized
  source 1..22: mol_type = other DNA
taaaatgggaatcacactagta

SEQ ID NO: 64655 - DNA, 22 bp, synthetic construct
  misc_feature 1..22: note = chemically synthesized
  source 1..22: mol_type = other DNA
gtaactgccttggagggttatg

SEQ ID NO: 64656 - DNA, 22 bp, synthetic construct
  misc_feature 1..22: note = chemically synthesized
  source 1..22: mol_type = other DNA
ccttggagggttatgaggctta

SEQ ID NO: 64657 - DNA, 22 bp, synthetic construct
  misc_feature 1..22: note = chemically synthesized
  source 1..22: mol_type = other DNA
ggagggttatgaggcttaatca

SEQ ID NO: 64658 - DNA, 22 bp, synthetic construct
  misc_feature 1..22: note = chemically synthesized
  source 1..22: mol_type = other DNA
gagggttatgaggcttaatcac

SEQ ID NO: 64659 - DNA, 22 bp, synthetic construct
  misc_feature 1..22: note = chemically synthesized
  source 1..22: mol_type = other DNA
tgaggcttaatcacgcactgag

SEQ ID NO: 64660 - DNA, 22 bp, synthetic construct
  misc_feature 1..22: note = chemically synthesized
  source 1..22: mol_type = other DNA
aatcacgcactgagcttagccg

SEQ ID NO: 64661 - DNA, 22 bp, synthetic construct
  misc_feature 1..22: note = chemically synthesized
  source 1..22: mol_type = other DNA
atcacgcactgagcttagccgt

SEQ ID NO: 64662 - DNA, 22 bp, synthetic construct
  misc_feature 1..22: note = chemically synthesized
  source 1..22: mol_type = other DNA
agcttagccgtggcctggtgca

SEQ ID NO: 64663 - DNA, 22 bp, synthetic construct
  misc_feature 1..22: note = chemically synthesized
  source 1..22: mol_type = other DNA
agccgtggcctggtgcagagcg

SEQ ID NO: 64664 - DNA, 22 bp, synthetic construct
  misc_feature 1..22: note = chemically synthesized
  source 1..22: mol_type = other DNA
gccgtggcctggtgcagagcga

SEQ ID NO: 64665 - DNA, 22 bp, synthetic construct
  misc_feature 1..22: note = chemically synthesized
  source 1..22: mol_type = other DNA
gtgcagagcgattattcaggaa

SEQ ID NO: 64666 - DNA, 22 bp, synthetic construct
  misc_feature 1..22: note = chemically synthesized
  source 1..22: mol_type = other DNA
ttcaggaatgccagcttgagcc

SEQ ID NO: 64667 - DNA, 22 bp, synthetic construct
  misc_feature 1..22: note = chemically synthesized
  source 1..22: mol_type = other DNA
aggaatgccagcttgagccctg

SEQ ID NO: 64668 - DNA, 22 bp, synthetic construct
  misc_feature 1..22: note = chemically synthesized
  source 1..22: mol_type = other DNA
gagccctgggtgacagtgcccc

SEQ ID NO: 64669 - DNA, 22 bp, synthetic construct
  misc_feature 1..22: note = chemically synthesized
  source 1..22: mol_type = other DNA
agccctgggtgacagtgcccct

SEQ ID NO: 64670 - DNA, 22 bp, synthetic construct
  misc_feature 1..22: note = chemically synthesized
  source 1..22: mol_type = other DNA
ggtgacagtgcccctcacagct

SEQ ID NO: 64671 - DNA, 22 bp, synthetic construct
  misc_feature 1..22: note = chemically synthesized
  source 1..22: mol_type = other DNA
acagcttcctgtcctccactgg

SEQ ID NO: 64672 - DNA, 22 bp, synthetic construct
  misc_feature 1..22: note = chemically synthesized
  source 1..22: mol_type = other DNA
cctgtcctccactgggacagga

SEQ ID NO: 64673 - DNA, 22 bp, synthetic construct
  misc_feature 1..22: note = chemically synthesized
  source 1..22: mol_type = other DNA
ctgtcctccactgggacaggag

SEQ ID NO: 64674 - DNA, 22 bp, synthetic construct
  misc_feature 1..22: note = chemically synthesized
  source 1..22: mol_type = other DNA
tcctccactgggacaggagggc

SEQ ID NO: 64675 - DNA, 22 bp, synthetic construct
  misc_feature 1..22: note = chemically synthesized
  source 1..22: mol_type = other DNA
cactgggacaggagggcccaga

SEQ ID NO: 64676 - DNA, 22 bp, synthetic construct
  misc_feature 1..22: note = chemically synthesized
  source 1..22: mol_type = other DNA
ggacaggagggcccagaggtcc

SEQ ID NO: 64677 - DNA, 22 bp, synthetic construct
  misc_feature 1..22: note = chemically synthesized
  source 1..22: mol_type = other DNA
tgatgtaaggctgaggcctggc

SEQ ID NO: 64678 - DNA, 22 bp, synthetic construct
  misc_feature 1..22: note = chemically synthesized
  source 1..22: mol_type = other DNA
gatgtaaggctgaggcctggca

SEQ ID NO: 64679 - DNA, 22 bp, synthetic construct
  misc_feature 1..22: note = chemically synthesized
  source 1..22: mol_type = other DNA
atgtaaggctgaggcctggcac

SEQ ID NO: 64680 - DNA, 22 bp, synthetic construct
  misc_feature 1..22: note = chemically synthesized
  source 1..22: mol_type = other DNA
aggcctggcacaggtctgttcc

SEQ ID NO: 64681 - DNA, 22 bp, synthetic construct
  misc_feature 1..22: note = chemically synthesized
  source 1..22: mol_type = other DNA
gcacaggtctgttcctggtcat

SEQ ID NO: 64682 - DNA, 22 bp, synthetic construct
  misc_feature 1..22: note = chemically synthesized
  source 1..22: mol_type = other DNA
ttcctggtcatatctggagggg

SEQ ID NO: 64683 - DNA, 22 bp, synthetic construct
  misc_feature 1..22: note = chemically synthesized
  source 1..22: mol_type = other DNA
ctggtcatatctggaggggatg

SEQ ID NO: 64684 - DNA, 22 bp, synthetic construct
  misc_feature 1..22: note = chemically synthesized
  source 1..22: mol_type = other DNA
gtcatatctggaggggatggag

SEQ ID NO: 64685 - DNA, 22 bp, synthetic construct
  misc_feature 1..22: note = chemically synthesized
  source 1..22: mol_type = other DNA
gaggggatggagaatgtgagcc

SEQ ID NO: 64686 - DNA, 22 bp, synthetic construct
  misc_feature 1..22: note = chemically synthesized
  source 1..22: mol_type = other DNA
ctccccacccctctctggacct

SEQ ID NO: 64687 - DNA, 22 bp, synthetic construct
  misc_feature 1..22: note = chemically synthesized
  source 1..22: mol_type = other DNA
cccacccctctctggaccttaa

SEQ ID NO: 64688 - DNA, 22 bp, synthetic construct
  misc_feature 1..22: note = chemically synthesized
  source 1..22: mol_type = other DNA
tctggaccttaacctcctcatc

SEQ ID NO: 64689 - DNA, 22 bp, synthetic construct
  misc_feature 1..22: note = chemically synthesized
  source 1..22: mol_type = other DNA
tggaccttaacctcctcatcta

SEQ ID NO: 64690 - DNA, 22 bp, synthetic construct
  misc_feature 1..22: note = chemically synthesized
  source 1..22: mol_type = other DNA
gaccttaacctcctcatctata

SEQ ID NO: 64691 - DNA, 22 bp, synthetic construct
  misc_feature 1..22: note = chemically synthesized
  source 1..22: mol_type = other DNA
aacctcctcatctatagaaggg

SEQ ID NO: 64692 - DNA, 22 bp, synthetic construct
  misc_feature 1..22: note = chemically synthesized
  source 1..22: mol_type = other DNA
acctcctcatctatagaagggg

SEQ ID NO: 64693 - DNA, 22 bp, synthetic construct
  misc_feature 1..22: note = chemically synthesized
  source 1..22: mol_type = other DNA
ctcatctatagaaggggagaaa

SEQ ID NO: 64694 - DNA, 22 bp, synthetic construct
  misc_feature 1..22: note = chemically synthesized
  source 1..22: mol_type = other DNA
atctatagaaggggagaaagat

SEQ ID NO: 64695 - DNA, 22 bp, synthetic construct
  misc_feature 1..22: note = chemically synthesized
  source 1..22: mol_type = other DNA
tagaaggggagaaagatgcatg

SEQ ID NO: 64696 - DNA, 22 bp, synthetic construct
  misc_feature 1..22: note = chemically synthesized
  source 1..22: mol_type = other DNA
ataggagacaacagacaggagc

SEQ ID NO: 64697 - DNA, 22 bp, synthetic construct
  misc_feature 1..22: note = chemically synthesized
  source 1..22: mol_type = other DNA
taggagacaacagacaggagcc

SEQ ID NO: 64698 - DNA, 22 bp, synthetic construct
  misc_feature 1..22: note = chemically synthesized
  source 1..22: mol_type = other DNA
tgcaaacagaaagaaatggctg

SEQ ID NO: 64699 - DNA, 22 bp, synthetic construct
  misc_feature 1..22: note = chemically synthesized
  source 1..22: mol_type = other DNA
cgctttgttgctgttgctgtat

SEQ ID NO: 64700 - DNA, 22 bp, synthetic construct
  misc_feature 1..22: note = chemically synthesized
  source 1..22: mol_type = other DNA
tgttgctgttgctgtatcttgg

SEQ ID NO: 64701 - DNA, 22 bp, synthetic construct
  misc_feature 1..22: note = chemically synthesized
  source 1..22: mol_type = other DNA
gttgctgttgctgtatcttggc

SEQ ID NO: 64702 - DNA, 22 bp, synthetic construct
  misc_feature 1..22: note = chemically synthesized
  source 1..22: mol_type = other DNA
ttgctgttgctgtatcttggct

SEQ ID NO: 64703 - DNA, 22 bp, synthetic construct
  misc_feature 1..22: note = chemically synthesized
  source 1..22: mol_type = other DNA
ctgttgctgtatcttggctggt

SEQ ID NO: 64704 - DNA, 22 bp, synthetic construct
  misc_feature 1..22: note = chemically synthesized
  source 1..22: mol_type = other DNA
ttgctgtatcttggctggtgtc

SEQ ID NO: 64705 - DNA, 22 bp, synthetic construct
  misc_feature 1..22: note = chemically synthesized
  source 1..22: mol_type = other DNA
ctgtatcttggctggtgtcccc

SEQ ID NO: 64706 - DNA, 22 bp, synthetic construct
  misc_feature 1..22: note = chemically synthesized
  source 1..22: mol_type = other DNA
tatcttggctggtgtcccccat

SEQ ID NO: 64707 - DNA, 22 bp, synthetic construct
  misc_feature 1..22: note = chemically synthesized
  source 1..22: mol_type = other DNA
ggctggtgtcccccatcctggg

SEQ ID NO: 64708 - DNA, 22 bp, synthetic construct
  misc_feature 1..22: note = chemically synthesized
  source 1..22: mol_type = other DNA
gctggtgtcccccatcctgggg

SEQ ID NO: 64709 - DNA, 22 bp, synthetic construct
  misc_feature 1..22: note = chemically synthesized
  source 1..22: mol_type = other DNA
gtgtcccccatcctggggtgcc

SEQ ID NO: 64710 - DNA, 22 bp, synthetic construct
  misc_feature 1..22: note = chemically synthesized
  source 1..22: mol_type = other DNA
gggtgccaggactgcagaccta

SEQ ID NO: 64711 - DNA, 22 bp, synthetic construct
  misc_feature 1..22: note = chemically synthesized
  source 1..22: mol_type = other DNA
cagacctagacaccctcatcca

SEQ ID NO: 64712 - DNA, 22 bp, synthetic construct
  misc_feature 1..22: note = chemically synthesized
  source 1..22: mol_type = other DNA
gacaccctcatccacttctgct

SEQ ID NO: 64713 - DNA, 22 bp, synthetic construct
  misc_feature 1..22: note = chemically synthesized
  source 1..22: mol_type = other DNA
atccacttctgcttacaggaac

SEQ ID NO: 64714 - DNA, 22 bp, synthetic construct
  misc_feature 1..22: note = chemically synthesized
  source 1..22: mol_type = other DNA
ctgcttacaggaaccagtgtat

SEQ ID NO: 64715 - DNA, 22 bp, synthetic construct
  misc_feature 1..22: note = chemically synthesized
  source 1..22: mol_type = other DNA
tgcttacaggaaccagtgtatc

SEQ ID NO: 64716 - DNA, 22 bp, synthetic construct
  misc_feature 1..22: note = chemically synthesized
  source 1..22: mol_type = other DNA
cttacaggaaccagtgtatcca

SEQ ID NO: 64717 - DNA, 22 bp, synthetic construct
  misc_feature 1..22: note = chemically synthesized
  source 1..22: mol_type = other DNA
acaggaaccagtgtatccacca

SEQ ID NO: 64718 - DNA, 22 bp, synthetic construct
  misc_feature 1..22: note = chemically synthesized
  source 1..22: mol_type = other DNA
caggaaccagtgtatccaccag

SEQ ID NO: 64719 - DNA, 22 bp, synthetic construct
  misc_feature 1..22: note = chemically synthesized
  source 1..22: mol_type = other DNA
ggaaacaggacacaaccctcat

SEQ ID NO: 64720 - DNA, 22 bp, synthetic construct
  misc_feature 1..22: note = chemically synthesized
  source 1..22: mol_type = other DNA
atggctgctgttattatgaaaa

SEQ ID NO: 64721 - DNA, 22 bp, synthetic construct
  misc_feature 1..22: note = chemically synthesized
  source 1..22: mol_type = other DNA
ctgttattatgaaaataggagc

SEQ ID NO: 64722 - DNA, 22 bp, synthetic construct
  misc_feature 1..22: note = chemically synthesized
  source 1..22: mol_type = other DNA
ttattatgaaaataggagctca

SEQ ID NO: 64723 - DNA, 22 bp, synthetic construct
  misc_feature 1..22: note = chemically synthesized
  source 1..22: mol_type = other DNA
ttatgaaaataggagctcagct

SEQ ID NO: 64724 - DNA, 22 bp, synthetic construct
  misc_feature 1..22: note = chemically synthesized
  source 1..22: mol_type = other DNA
tgaaaataggagctcagctgca

SEQ ID NO: 64725 - DNA, 22 bp, synthetic construct
  misc_feature 1..22: note = chemically synthesized
  source 1..22: mol_type = other DNA
agctgcagcctctccatctgcc

SEQ ID NO: 64726 - DNA, 22 bp, synthetic construct
  misc_feature 1..22: note = chemically synthesized
  source 1..22: mol_type = other DNA
cagcctctccatctgccctgca

SEQ ID NO: 64727 - DNA, 22 bp, synthetic construct
  misc_feature 1..22: note = chemically synthesized
  source 1..22: mol_type = other DNA
tccatctgccctgcacctcagc

SEQ ID NO: 64728 - DNA, 22 bp, synthetic construct
  misc_feature 1..22: note = chemically synthesized
  source 1..22: mol_type = other DNA
catctgccctgcacctcagcag

SEQ ID NO: 64729 - DNA, 22 bp, synthetic construct
  misc_feature 1..22: note = chemically synthesized
  source 1..22: mol_type = other DNA
ccctgcacctcagcaggcggat

SEQ ID NO: 64730 - DNA, 22 bp, synthetic construct
  misc_feature 1..22: note = chemically synthesized
  source 1..22: mol_type = other DNA
cacctcagcaggcggataccca

SEQ ID NO: 64731 - DNA, 22 bp, synthetic construct
  misc_feature 1..22: note = chemically synthesized
  source 1..22: mol_type = other DNA
agcaggcggatacccactccac

SEQ ID NO: 64732 - DNA, 22 bp, synthetic construct
  misc_feature 1..22: note = chemically synthesized
  source 1..22: mol_type = other DNA
cacaacccccctcctgccccag

SEQ ID NO: 64733 - DNA, 22 bp, synthetic construct
  misc_feature 1..22: note = chemically synthesized
  source 1..22: mol_type = other DNA
ctgccccagacctgctgcctgc

SEQ ID NO: 64734 - DNA, 22 bp, synthetic construct
  misc_feature 1..22: note = chemically synthesized
  source 1..22: mol_type = other DNA
ccccagacctgctgcctgcctg

SEQ ID NO: 64735 - DNA, 22 bp, synthetic construct
  misc_feature 1..22: note = chemically synthesized
  source 1..22: mol_type = other DNA
ctgcctgcctgggccatgggga

SEQ ID NO: 64736 - DNA, 22 bp, synthetic construct
  misc_feature 1..22: note = chemically synthesized
  source 1..22: mol_type = other DNA
cctgcctgggccatggggagct

SEQ ID NO: 64737 - DNA, 22 bp, synthetic construct
  misc_feature 1..22: note = chemically synthesized
  source 1..22: mol_type = other DNA
cctgggccatggggagctcaga

SEQ ID NO: 64738 - DNA, 22 bp, synthetic construct
  misc_feature 1..22: note = chemically synthesized
  source 1..22: mol_type = other DNA
ggccatggggagctcagaagcc

SEQ ID NO: 64739 - DNA, 22 bp, synthetic construct
  misc_feature 1..22: note = chemically synthesized
  source 1..22: mol_type = other DNA
agaagcctctccagaacctctc

SEQ ID NO: 64740 - DNA, 22 bp, synthetic construct
  misc_feature 1..22: note = chemically synthesized
  source 1..22: mol_type = other DNA
tccagaacctctcgcagtgaaa

SEQ ID NO: 64741 - DNA, 22 bp, synthetic construct
  misc_feature 1..22: note = chemically synthesized
  source 1..22: mol_type = other DNA
cagaacctctcgcagtgaaagg

SEQ ID NO: 64742 - DNA, 22 bp, synthetic construct
  misc_feature 1..22: note = chemically synthesized
  source 1..22: mol_type = other DNA
tcgcagtgaaaggcatacttac

SEQ ID NO: 64743 - DNA, 22 bp, synthetic construct
  misc_feature 1..22: note = chemically synthesized
  source 1..22: mol_type = other DNA
gcagtgaaaggcatacttacga

SEQ ID NO: 64744 - DNA, 22 bp, synthetic construct
  misc_feature 1..22: note = chemically synthesized
  source 1..22: mol_type = other DNA
acgattcactgtcccaggtcag

SEQ ID NO: 64745 - DNA, 22 bp, synthetic construct
  misc_feature 1..22: note = chemically synthesized
  source 1..22: mol_type = other DNA
cgattcactgtcccaggtcagt

SEQ ID NO: 64746 - DNA, 22 bp, synthetic construct
  misc_feature 1..22: note = chemically synthesized
  source 1..22: mol_type = other DNA
actgtcccaggtcagtggtggt

SEQ ID NO: 64747 - DNA, 22 bp, synthetic construct
  misc_feature 1..22: note = chemically synthesized
  source 1..22: mol_type = other DNA
tcccaggtcagtggtggtgcct

SEQ ID NO: 64748 - DNA, 22 bp, synthetic construct
  misc_feature 1..22: note = chemically synthesized
  source 1..22: mol_type = other DNA
aagctgaggagacagggccctg

SEQ ID NO: 64749 - DNA, 22 bp, synthetic construct
  misc_feature 1..22: note = chemically synthesized
  source 1..22: mol_type = other DNA
aggagacagggccctgtcctcg

SEQ ID NO: 64750 - DNA, 22 bp, synthetic construct
  misc_feature 1..22: note = chemically synthesized
  source 1..22: mol_type = other DNA
tcctcgtccgtatttaagcagt

SEQ ID NO: 64751 - DNA, 22 bp, synthetic construct
  misc_feature 1..22: note = chemically synthesized
  source 1..22: mol_type = other DNA
gtccgtatttaagcagtggatc

SEQ ID NO: 64752 - DNA, 22 bp, synthetic construct
  misc_feature 1..22: note = chemically synthesized
  source 1..22: mol_type = other DNA
aagcagtggatccagaggggca

SEQ ID NO: 64753 - DNA, 22 bp, synthetic construct
  misc_feature 1..22: note = chemically synthesized
  source 1..22: mol_type = other DNA
agcagtggatccagaggggcaa

SEQ ID NO: 64754 - DNA, 22 bp, synthetic construct
  misc_feature 1..22: note = chemically synthesized
  source 1..22: mol_type = other DNA
ctggtgaatattaaccaaggtc

SEQ ID NO: 64755 - DNA, 22 bp, synthetic construct
  misc_feature 1..22: note = chemically synthesized
  source 1..22: mol_type = other DNA
gtgaatattaaccaaggtcacc

SEQ ID NO: 64756 - DNA, 22 bp, synthetic construct
  misc_feature 1..22: note = chemically synthesized
  source 1..22: mol_type = other DNA
accaaggtcaccccagttatcg

SEQ ID NO: 64757 - DNA, 22 bp, synthetic construct
  misc_feature 1..22: note = chemically synthesized
  source 1..22: mol_type = other DNA
tcggaggagcaaacaggggcta

SEQ ID NO: 64758 - DNA, 22 bp, synthetic construct
  misc_feature 1..22: note = chemically synthesized
  source 1..22: mol_type = other DNA
agtccactggctgggatctgag

SEQ ID NO: 64759 - DNA, 22 bp, synthetic construct
  misc_feature 1..22: note = chemically synthesized
  source 1..22: mol_type = other DNA
gctgggatctgagtcgcccgcc

SEQ ID NO: 64760 - DNA, 22 bp, synthetic construct
  misc_feature 1..22: note = chemically synthesized
  source 1..22: mol_type = other DNA
ggatctgagtcgcccgcctacg

SEQ ID NO: 64761 - DNA, 22 bp, synthetic construct
  misc_feature 1..22: note = chemically synthesized
  source 1..22: mol_type = other DNA
agtcgcccgcctacgctgcccg

SEQ ID NO: 64762 - DNA, 22 bp, synthetic construct
  misc_feature 1..22: note = chemically synthesized
  source 1..22: mol_type = other DNA
cgctgcccggacgctttgcctg

SEQ ID NO: 64763 - DNA, 22 bp, synthetic construct
  misc_feature 1..22: note = chemically synthesized
  source 1..22: mol_type = other DNA
cccggacgctttgcctgggcag

SEQ ID NO: 64764 - DNA, 22 bp, synthetic construct
  misc_feature 1..22: note = chemically synthesized
  source 1..22: mol_type = other DNA
tgcctgggcagtgtacagcttc

SEQ ID NO: 64765 - DNA, 22 bp, synthetic construct
  misc_feature 1..22: note = chemically synthesized
  source 1..22: mol_type = other DNA
gcctgggcagtgtacagcttcc

SEQ ID NO: 64766 - DNA, 22 bp, synthetic construct
  misc_feature 1..22: note = chemically synthesized
  source 1..22: mol_type = other DNA
cctgggcagtgtacagcttcca

SEQ ID NO: 64767 - DNA, 22 bp, synthetic construct
  misc_feature 1..22: note = chemically synthesized
  source 1..22: mol_type = other DNA
ggcagtgtacagcttccactgc

SEQ ID NO: 64768 - DNA, 22 bp, synthetic construct
  misc_feature 1..22: note = chemically synthesized
  source 1..22: mol_type = other DNA
ccactgcacttaccgaaaggag

SEQ ID NO: 64769 - DNA, 22 bp, synthetic construct
  misc_feature 1..22: note = chemically synthesized
  source 1..22: mol_type = other DNA
cactgcacttaccgaaaggagt

SEQ ID NO: 64770 - DNA, 22 bp, synthetic construct
  misc_feature 1..22: note = chemically synthesized
  source 1..22: mol_type = other DNA
cacttaccgaaaggagtcattg

SEQ ID NO: 64771 - DNA, 22 bp, synthetic construct
  misc_feature 1..22: note = chemically synthesized
  source 1..22: mol_type = other DNA
accgaaaggagtcattgtacct

SEQ ID NO: 64772 - DNA, 22 bp, synthetic construct
  misc_feature 1..22: note = chemically synthesized
  source 1..22: mol_type = other DNA
ccgaaaggagtcattgtacctg

SEQ ID NO: 64773 - DNA, 22 bp, synthetic construct
  misc_feature 1..22: note = chemically synthesized
  source 1..22: mol_type = other DNA
tacctggctcagaaaccacagc

SEQ ID NO: 64774 - DNA, 22 bp, synthetic construct
  misc_feature 1..22: note = chemically synthesized
  source 1..22: mol_type = other DNA
gctcagaaaccacagcgtcctg

SEQ ID NO: 64775 - DNA, 22 bp, synthetic construct
  misc_feature 1..22: note = chemically synthesized
  source 1..22: mol_type = other DNA
agaaaccacagcgtcctgtgtc

SEQ ID NO: 64776 - DNA, 22 bp, synthetic construct
  misc_feature 1..22: note = chemically synthesized
  source 1..22: mol_type = other DNA
tgtccaaggtggagggggtggc

SEQ ID NO: 64777 - DNA, 22 bp, synthetic construct
  misc_feature 1..22: note = chemically synthesized
  source 1..22: mol_type = other DNA
tgggagagtaccacttagctgg

SEQ ID NO: 64778 - DNA, 22 bp, synthetic construct
  misc_feature 1..22: note = chemically synthesized
  source 1..22: mol_type = other DNA
ggagagtaccacttagctggcc

SEQ ID NO: 64779 - DNA, 22 bp, synthetic construct
  misc_feature 1..22: note = chemically synthesized
  source 1..22: mol_type = other DNA
agctggccctctgctctcactg

SEQ ID NO: 64780 - DNA, 22 bp, synthetic construct
  misc_feature 1..22: note = chemically synthesized
  source 1..22: mol_type = other DNA
gctggccctctgctctcactgc

SEQ ID NO: 64781 - DNA, 22 bp, synthetic construct
  misc_feature 1..22: note = chemically synthesized
  source 1..22: mol_type = other DNA
gccctctgctctcactgcagaa

SEQ ID NO: 64782 - DNA, 22 bp, synthetic construct
  misc_feature 1..22: note = chemically synthesized
  source 1..22: mol_type = other DNA
tgctctcactgcagaatcctta

SEQ ID NO: 64783 - DNA, 22 bp, synthetic construct
  misc_feature 1..22: note = chemically synthesized
  source 1..22: mol_type = other DNA
ctctcactgcagaatccttagt

SEQ ID NO: 64784 - DNA, 22 bp, synthetic construct
  misc_feature 1..22: note = chemically synthesized
  source 1..22: mol_type = other DNA
tcactgcagaatccttagtggc

SEQ ID NO: 64785 - DNA, 22 bp, synthetic construct
  misc_feature 1..22: note = chemically synthesized
  source 1..22: mol_type = other DNA
actgcagaatccttagtggctg

SEQ ID NO: 64786 - DNA, 22 bp, synthetic construct
  misc_feature 1..22: note = chemically synthesized
  source 1..22: mol_type = other DNA
cagaatccttagtggctgttcc

SEQ ID NO: 64787 - DNA, 22 bp, synthetic construct
  misc_feature 1..22: note = chemically synthesized
  source 1..22: mol_type = other DNA
agtggctgttccactggtagca

SEQ ID NO: 64788 - DNA, 22 bp, synthetic construct
  misc_feature 1..22: note = chemically synthesized
  source 1..22: mol_type = other DNA
gtggctgttccactggtagcaa

SEQ ID NO: 64789 - DNA, 22 bp, synthetic construct
  misc_feature 1..22: note = chemically synthesized
  source 1..22: mol_type = other DNA
ttccactggtagcaagatctac

SEQ ID NO: 64790 - DNA, 22 bp, synthetic construct
  misc_feature 1..22: note = chemically synthesized
  source 1..22: mol_type = other DNA
cactggtagcaagatctaccat

SEQ ID NO: 64791 - DNA, 22 bp, synthetic construct
  misc_feature 1..22: note = chemically synthesized
  source 1..22: mol_type = other DNA
gtagcaagatctaccatttact

SEQ ID NO: 64792 - DNA, 22 bp, synthetic construct
  misc_feature 1..22: note = chemically synthesized
  source 1..22: mol_type = other DNA
ccatttactgagtcaccccaaa

SEQ ID NO: 64793 - DNA, 22 bp, synthetic construct
  misc_feature 1..22: note = chemically synthesized
  source 1..22: mol_type = other DNA
actgagtcaccccaaaatgcct

SEQ ID NO: 64794 - DNA, 22 bp, synthetic construct
  misc_feature 1..22: note = chemically synthesized
  source 1..22: mol_type = other DNA
ctgagtcaccccaaaatgcctg

SEQ ID NO: 64795 - DNA, 22 bp, synthetic construct
  misc_feature 1..22: note = chemically synthesized
  source 1..22: mol_type = other DNA
agtcaccccaaaatgcctgatg

SEQ ID NO: 64796 - DNA, 22 bp, synthetic construct
  misc_feature 1..22: note = chemically synthesized
  source 1..22: mol_type = other DNA
atgctgaagacttactgccgcc

SEQ ID NO: 64797 - DNA, 22 bp, synthetic construct
  misc_feature 1..22: note = chemically synthesized
  source 1..22: mol_type = other DNA
aagacttactgccgccctggga

SEQ ID NO: 64798 - DNA, 22 bp, synthetic construct
  misc_feature 1..22: note = chemically synthesized
  source 1..22: mol_type = other DNA
actgccgccctgggagatcaga

SEQ ID NO: 64799 - DNA, 22 bp, synthetic construct
  misc_feature 1..22: note = chemically synthesized
  source 1..22: mol_type = other DNA
ctgccgccctgggagatcagag

SEQ ID NO: 64800 - DNA, 22 bp, synthetic construct
  misc_feature 1..22: note = chemically synthesized
  source 1..22: mol_type = other DNA
ccgccctgggagatcagagtgg

SEQ ID NO: 64801 - DNA, 22 bp, synthetic construct
  misc_feature 1..22: note = chemically synthesized
  source 1..22: mol_type = other DNA
ggagatcagagtgggttagagc

SEQ ID NO: 64802 - DNA, 22 bp, synthetic construct
  misc_feature 1..22: note = chemically synthesized
  source 1..22: mol_type = other DNA
gagcccatttgacagatgagga

SEQ ID NO: 64803 - DNA, 22 bp, synthetic construct
  misc_feature 1..22: note = chemically synthesized
  source 1..22: mol_type = other DNA
gacagatgaggaaacaggctca

SEQ ID NO: 64804 - DNA, 22 bp, synthetic construct
  misc_feature 1..22: note = chemically synthesized
  source 1..22: mol_type = other DNA
acagatgaggaaacaggctcag

SEQ ID NO: 64805 - DNA, 22 bp, synthetic construct
  misc_feature 1..22: note = chemically synthesized
  source 1..22: mol_type = other DNA
agagcggagagaccgctcatcc

SEQ ID NO: 64806 - DNA, 22 bp, synthetic construct
  misc_feature 1..22: note = chemically synthesized
  source 1..22: mol_type = other DNA
atccaaagttacccagtcagcc

SEQ ID NO: 64807 - DNA, 22 bp, synthetic construct
  misc_feature 1..22: note = chemically synthesized
  source 1..22: mol_type = other DNA
cccagtcagccttagacacaaa

SEQ ID NO: 64808 - DNA, 22 bp, synthetic construct
  misc_feature 1..22: note = chemically synthesized
  source 1..22: mol_type = other DNA
agacacaaacaccctcttgatg

SEQ ID NO: 64809 - DNA, 22 bp, synthetic construct
  misc_feature 1..22: note = chemically synthesized
  source 1..22: mol_type = other DNA
gacacaaacaccctcttgatgg

SEQ ID NO: 64810 - DNA, 22 bp, synthetic construct
  misc_feature 1..22: note = chemically synthesized
  source 1..22: mol_type = other DNA
ttgatggtcccgatggaaaaat

SEQ ID NO: 64811 - DNA, 22 bp, synthetic construct
  misc_feature 1..22: note = chemically synthesized
  source 1..22: mol_type = other DNA
gatggtcccgatggaaaaatgg

SEQ ID NO: 64812 - DNA, 22 bp, synthetic construct
  misc_feature 1..22: note = chemically synthesized
  source 1..22: mol_type = other DNA
atggtcccgatggaaaaatgga

SEQ ID NO: 64813 - DNA, 22 bp, synthetic construct
  misc_feature 1..22: note = chemically synthesized
  source 1..22: mol_type = other DNA
aggcagacacaaccgtcaggct

SEQ ID NO: 64814 - DNA, 22 bp, synthetic construct
  misc_feature 1..22: note = chemically synthesized
  source 1..22: mol_type = other DNA
gcatggggggccgtgagacagg

SEQ ID NO: 64815 - DNA, 22 bp, synthetic construct
  misc_feature 1..22: note = chemically synthesized
  source 1..22: mol_type = other DNA
taaagaagagctgtgctgcctc

SEQ ID NO: 64816 - DNA, 22 bp, synthetic construct
  misc_feature 1..22: note = chemically synthesized
  source 1..22: mol_type = other DNA
tgctgcctcaggcaggccgctt

SEQ ID NO: 64817 - DNA, 22 bp, synthetic construct
  misc_feature 1..22: note = chemically synthesized
  source 1..22: mol_type = other DNA
cctcaggcaggccgcttcacct

SEQ ID NO: 64818 - DNA, 22 bp, synthetic construct
  misc_feature 1..22: note = chemically synthesized
  source 1..22: mol_type = other DNA
aggcaggccgcttcacctctct

SEQ ID NO: 64819 - DNA, 22 bp, synthetic construct
  misc_feature 1..22: note = chemically synthesized
  source 1..22: mol_type = other DNA
cacctctctgaaccaggaactg

SEQ ID NO: 64820 - DNA, 22 bp, synthetic construct
  misc_feature 1..22: note = chemically synthesized
  source 1..22: mol_type = other DNA
acctctctgaaccaggaactgt

SEQ ID NO: 64821 - DNA, 22 bp, synthetic construct
  misc_feature 1..22: note = chemically synthesized
  source 1..22: mol_type = other DNA
tctgaaccaggaactgtttcac

SEQ ID NO: 64822 - DNA, 22 bp, synthetic construct
  misc_feature 1..22: note = chemically synthesized
  source 1..22: mol_type = other DNA
tgaaccaggaactgtttcacct

SEQ ID NO: 64823 - DNA, 22 bp, synthetic construct
  misc_feature 1..22: note = chemically synthesized
  source 1..22: mol_type = other DNA
aaccaggaactgtttcacctgc

SEQ ID NO: 64824 - DNA, 22 bp, synthetic construct
  misc_feature 1..22: note = chemically synthesized
  source 1..22: mol_type = other DNA
tttcacctgcatcccaaagagt

SEQ ID NO: 64825 - DNA, 22 bp, synthetic construct
  misc_feature 1..22: note = chemically synthesized
  source 1..22: mol_type = other DNA
cacctgcatcccaaagagttgg

SEQ ID NO: 64826 - DNA, 22 bp, synthetic construct
  misc_feature 1..22: note = chemically synthesized
  source 1..22: mol_type = other DNA
acctgcatcccaaagagttgga

SEQ ID NO: 64827 - DNA, 22 bp, synthetic construct
  misc_feature 1..22: note = chemically synthesized
  source 1..22: mol_type = other DNA
catcccaaagagttggaagttt

SEQ ID NO: 64828 - DNA, 22 bp, synthetic construct
  misc_feature 1..22: note = chemically synthesized
  source 1..22: mol_type = other DNA
gaagtttcattcccaagcatgc

SEQ ID NO: 64829 - DNA, 22 bp, synthetic construct
  misc_feature 1..22: note = chemically synthesized
  source 1..22: mol_type = other DNA
cattcccaagcatgcttgtgaa

SEQ ID NO: 64830 - DNA, 22 bp, synthetic construct
  misc_feature 1..22: note = chemically synthesized
  source 1..22: mol_type = other DNA
attcccaagcatgcttgtgaag

SEQ ID NO: 64831 - DNA, 22 bp, synthetic construct
  misc_feature 1..22: note = chemically synthesized
  source 1..22: mol_type = other DNA
ccaagcatgcttgtgaagtgcc

SEQ ID NO: 64832 - DNA, 22 bp, synthetic construct
  misc_feature 1..22: note = chemically synthesized
  source 1..22: mol_type = other DNA
gtgaagtgcctcgggtgaagtg

SEQ ID NO: 64833 - DNA, 22 bp, synthetic construct
  misc_feature 1..22: note = chemically synthesized
  source 1..22: mol_type = other DNA
tgaagtgcctcgggtgaagtgc

SEQ ID NO: 64834 - DNA, 22 bp, synthetic construct
  misc_feature 1..22: note = chemically synthesized
  source 1..22: mol_type = other DNA
gggtgaagtgcctggcacacag

SEQ ID NO: 64835 - DNA, 22 bp, synthetic construct
  misc_feature 1..22: note = chemically synthesized
  source 1..22: mol_type = other DNA
gcacacagtaggctctttatgt

SEQ ID NO: 64836 - DNA, 22 bp, synthetic construct
  misc_feature 1..22: note = chemically synthesized
  source 1..22: mol_type = other DNA
tttatgtgggtctgcacagccc

SEQ ID NO: 64837 - DNA, 22 bp, synthetic construct
  misc_feature 1..22: note = chemically synthesized
  source 1..22: mol_type = other DNA
tatgtgggtctgcacagccctc

SEQ ID NO: 64838 - DNA, 22 bp, synthetic construct
  misc_feature 1..22: note = chemically synthesized
  source 1..22: mol_type = other DNA
atgtgggtctgcacagccctct

SEQ ID NO: 64839 - DNA, 22 bp, synthetic construct
  misc_feature 1..22: note = chemically synthesized
  source 1..22: mol_type = other DNA
tgtgggtctgcacagccctctg

SEQ ID NO: 64840 - DNA, 22 bp, synthetic construct
  misc_feature 1..22: note = chemically synthesized
  source 1..22: mol_type = other DNA
cacagccctctgcttagtctgc

SEQ ID NO: 64841 - DNA, 22 bp, synthetic construct
  misc_feature 1..22: note = chemically synthesized
  source 1..22: mol_type = other DNA
tgcttagtctgccccccaggct

SEQ ID NO: 64842 - DNA, 22 bp, synthetic construct
  misc_feature 1..22: note = chemically synthesized
  source 1..22: mol_type = other DNA
cttagtctgccccccaggctgc

SEQ ID NO: 64843 - DNA, 22 bp, synthetic construct
  misc_feature 1..22: note = chemically synthesized
  source 1..22: mol_type = other DNA
agtctgccccccaggctgctca

SEQ ID NO: 64844 - DNA, 22 bp, synthetic construct
  misc_feature 1..22: note = chemically synthesized
  source 1..22: mol_type = other DNA
gtctgccccccaggctgctcag

SEQ ID NO: 64845 - DNA, 22 bp, synthetic construct
  misc_feature 1..22: note = chemically synthesized
  source 1..22: mol_type = other DNA
ccccccaggctgctcagagcag

SEQ ID NO: 64846 - DNA, 22 bp, synthetic construct
  misc_feature 1..22: note = chemically synthesized
  source 1..22: mol_type = other DNA
ctcagagcaggaggaggttcaa

SEQ ID NO: 64847 - DNA, 22 bp, synthetic construct
  misc_feature 1..22: note = chemically synthesized
  source 1..22: mol_type = other DNA
agagcaggaggaggttcaattt

SEQ ID NO: 64848 - DNA, 22 bp, synthetic construct
  misc_feature 1..22: note = chemically synthesized
  source 1..22: mol_type = other DNA
aattttgaccagcctcaggcct

SEQ ID NO: 64849 - DNA, 22 bp, synthetic construct
  misc_feature 1..22: note = chemically synthesized
  source 1..22: mol_type = other DNA
tgaccagcctcaggcctgtttc

SEQ ID NO: 64850 - DNA, 22 bp, synthetic construct
  misc_feature 1..22: note = chemically synthesized
  source 1..22: mol_type = other DNA
gaccagcctcaggcctgtttct

SEQ ID NO: 64851 - DNA, 22 bp, synthetic construct
  misc_feature 1..22: note = chemically synthesized
  source 1..22: mol_type = other DNA
accagcctcaggcctgtttctg

SEQ ID NO: 64852 - DNA, 22 bp, synthetic construct
  misc_feature 1..22: note = chemically synthesized
  source 1..22: mol_type = other DNA
aggcctgtttctgtttttgctc

SEQ ID NO: 64853 - DNA, 22 bp, synthetic construct
  misc_feature 1..22: note = chemically synthesized
  source 1..22: mol_type = other DNA
tttctgtttttgctcctggaaa

SEQ ID NO: 64854 - DNA, 22 bp, synthetic construct
  misc_feature 1..22: note = chemically synthesized
  source 1..22: mol_type = other DNA
ctgtttttgctcctggaaaacc

SEQ ID NO: 64855 - DNA, 22 bp, synthetic construct
  misc_feature 1..22: note = chemically synthesized
  source 1..22: mol_type = other DNA
tgtttttgctcctggaaaacca

SEQ ID NO: 64856 - DNA, 22 bp, synthetic construct
  misc_feature 1..22: note = chemically synthesized
  source 1..22: mol_type = other DNA
tttttgctcctggaaaaccagt

SEQ ID NO: 64857 - DNA, 22 bp, synthetic construct
  misc_feature 1..22: note = chemically synthesized
  source 1..22: mol_type = other DNA
ttgctcctggaaaaccagtgtg

SEQ ID NO: 64858 - DNA, 22 bp, synthetic construct
  misc_feature 1..22: note = chemically synthesized
  source 1..22: mol_type = other DNA
tgctcctggaaaaccagtgtga

SEQ ID NO: 64859 - DNA, 22 bp, synthetic construct
  misc_feature 1..22: note = chemically synthesized
  source 1..22: mol_type = other DNA
gctcctggaaaaccagtgtgat

SEQ ID NO: 64860 - DNA, 22 bp, synthetic construct
  misc_feature 1..22: note = chemically synthesized
  source 1..22: mol_type = other DNA
ctcctggaaaaccagtgtgatc

SEQ ID NO: 64861 - DNA, 22 bp, synthetic construct
  misc_feature 1..22: note = chemically synthesized
  source 1..22: mol_type = other DNA
ctggaaaaccagtgtgatccgt

SEQ ID NO: 64862 - DNA, 22 bp, synthetic construct
  misc_feature 1..22: note = chemically synthesized
  source 1..22: mol_type = other DNA
gaaaaccagtgtgatccgtata

SEQ ID NO: 64863 - DNA, 22 bp, synthetic construct
  misc_feature 1..22: note = chemically synthesized
  source 1..22: mol_type = other DNA
ggagtttctttggatacatggc

SEQ ID NO: 64864 - DNA, 22 bp, synthetic construct
  misc_feature 1..22: note = chemically synthesized
  source 1..22: mol_type = other DNA
gagtttctttggatacatggcc

SEQ ID NO: 64865 - DNA, 22 bp, synthetic construct
  misc_feature 1..22: note = chemically synthesized
  source 1..22: mol_type = other DNA
ctttggatacatggcccccact

SEQ ID NO: 64866 - DNA, 22 bp, synthetic construct
  misc_feature 1..22: note = chemically synthesized
  source 1..22: mol_type = other DNA
tttggatacatggcccccactc

SEQ ID NO: 64867 - DNA, 22 bp, synthetic construct
  misc_feature 1..22: note = chemically synthesized
  source 1..22: mol_type = other DNA
tggatacatggcccccactctg

SEQ ID NO: 64868 - DNA, 22 bp, synthetic construct
  misc_feature 1..22: note = chemically synthesized
  source 1..22: mol_type = other DNA
ggatacatggcccccactctgg

SEQ ID NO: 64869 - DNA, 22 bp, synthetic construct
  misc_feature 1..22: note = chemically synthesized
  source 1..22: mol_type = other DNA
gatacatggcccccactctggg

SEQ ID NO: 64870 - DNA, 22 bp, synthetic construct
  misc_feature 1..22: note = chemically synthesized
  source 1..22: mol_type = other DNA
tggggttgttggaggcctttgg

SEQ ID NO: 64871 - DNA, 22 bp, synthetic construct
  misc_feature 1..22: note = chemically synthesized
  source 1..22: mol_type = other DNA
gggttgttggaggcctttggag

SEQ ID NO: 64872 - DNA, 22 bp, synthetic construct
  misc_feature 1..22: note = chemically synthesized
  source 1..22: mol_type = other DNA
ttggaggcctttggagactgct

SEQ ID NO: 64873 - DNA, 22 bp, synthetic construct
  misc_feature 1..22: note = chemically synthesized
  source 1..22: mol_type = other DNA
gaggcctttggagactgctggg

SEQ ID NO: 64874 - DNA, 22 bp, synthetic construct
  misc_feature 1..22: note = chemically synthesized
  source 1..22: mol_type = other DNA
tggagactgctgggggtggagg

SEQ ID NO: 64875 - DNA, 22 bp, synthetic construct
  misc_feature 1..22: note = chemically synthesized
  source 1..22: mol_type = other DNA
ggagactgctgggggtggaggg

SEQ ID NO: 64876 - DNA, 22 bp, synthetic construct
  misc_feature 1..22: note = chemically synthesized
  source 1..22: mol_type = other DNA
gagactgctgggggtggagggg

SEQ ID NO: 64877 - DNA, 22 bp, synthetic construct
  misc_feature 1..22: note = chemically synthesized
  source 1..22: mol_type = other DNA
ctgggggtggaggggaggggag

SEQ ID NO: 64878 - DNA, 22 bp, synthetic construct
  misc_feature 1..22: note = chemically synthesized
  source 1..22: mol_type = other DNA
ggggtggaggggaggggaggta

SEQ ID NO: 64879 - DNA, 22 bp, synthetic construct
  misc_feature 1..22: note = chemically synthesized
  source 1..22: mol_type = other DNA
aggctagtggggccccacttga

SEQ ID NO: 64880 - DNA, 22 bp, synthetic construct
  misc_feature 1..22: note = chemically synthesized
  source 1..22: mol_type = other DNA
gtggggccccacttgattgcaa

SEQ ID NO: 64881 - DNA, 22 bp, synthetic construct
  misc_feature 1..22: note = chemically synthesized
  source 1..22: mol_type = other DNA
gattgcaatccctttaaaagcc

SEQ ID NO: 64882 - DNA, 22 bp, synthetic construct
  misc_feature 1..22: note = chemically synthesized
  source 1..22: mol_type = other DNA
attgcaatccctttaaaagcct

SEQ ID NO: 64883 - DNA, 22 bp, synthetic construct
  misc_feature 1..22: note = chemically synthesized
  source 1..22: mol_type = other DNA
caatccctttaaaagcctaaat

SEQ ID NO: 64884 - DNA, 22 bp, synthetic construct
  misc_feature 1..22: note = chemically synthesized
  source 1..22: mol_type = other DNA
taaaagcctaaatcagattgca

SEQ ID NO: 64885 - DNA, 22 bp, synthetic construct
  misc_feature 1..22: note = chemically synthesized
  source 1..22: mol_type = other DNA
aaaagcctaaatcagattgcat

SEQ ID NO: 64886 - DNA, 22 bp, synthetic construct
  misc_feature 1..22: note = chemically synthesized
  source 1..22: mol_type = other DNA
aaagcctaaatcagattgcatc

SEQ ID NO: 64887 - DNA, 22 bp, synthetic construct
  misc_feature 1..22: note = chemically synthesized
  source 1..22: mol_type = other DNA
aatcagattgcatcgcccgctg

SEQ ID NO: 64888 - DNA, 22 bp, synthetic construct
  misc_feature 1..22: note = chemically synthesized
  source 1..22: mol_type = other DNA
catcgcccgctgtgcaacccgc

SEQ ID NO: 64889 - DNA, 22 bp, synthetic construct
  misc_feature 1..22: note = chemically synthesized
  source 1..22: mol_type = other DNA
tgcaacccgcaaacctgcttgg

SEQ ID NO: 64890 - DNA, 22 bp, synthetic construct
  misc_feature 1..22: note = chemically synthesized
  source 1..22: mol_type = other DNA
cttgggagctggcgtacgtgcc

SEQ ID NO: 64891 - DNA, 22 bp, synthetic construct
  misc_feature 1..22: note = chemically synthesized
  source 1..22: mol_type = other DNA
gggagctggcgtacgtgccgta

SEQ ID NO: 64892 - DNA, 22 bp, synthetic construct
  misc_feature 1..22: note = chemically synthesized
  source 1..22: mol_type = other DNA
ggagctggcgtacgtgccgtag

SEQ ID NO: 64893 - DNA, 22 bp, synthetic construct
  misc_feature 1..22: note = chemically synthesized
  source 1..22: mol_type = other DNA
gcgtacgtgccgtagatacttg

SEQ ID NO: 64894 - DNA, 22 bp, synthetic construct
  misc_feature 1..22: note = chemically synthesized
  source 1..22: mol_type = other DNA
gcagagtgaatggatgagtgca

SEQ ID NO: 64895 - DNA, 22 bp, synthetic construct
  misc_feature 1..22: note = chemically synthesized
  source 1..22: mol_type = other DNA
cagagtgaatggatgagtgcat

SEQ ID NO: 64896 - DNA, 22 bp, synthetic construct
  misc_feature 1..22: note = chemically synthesized
  source 1..22: mol_type = other DNA
ttgccccttctgtcattcacca

SEQ ID NO: 64897 - DNA, 22 bp, synthetic construct
  misc_feature 1..22: note = chemically synthesized
  source 1..22: mol_type = other DNA
tgccccttctgtcattcaccag

SEQ ID NO: 64898 - DNA, 22 bp, synthetic construct
  misc_feature 1..22: note = chemically synthesized
  source 1..22: mol_type = other DNA
gccccttctgtcattcaccagt

SEQ ID NO: 64899 - DNA, 22 bp, synthetic construct
  misc_feature 1..22: note = chemically synthesized
  source 1..22: mol_type = other DNA
ccccttctgtcattcaccagtc

SEQ ID NO: 64900 - DNA, 22 bp, synthetic construct
  misc_feature 1..22: note = chemically synthesized
  source 1..22: mol_type = other DNA
ctgtcattcaccagtcccattt

SEQ ID NO: 64901 - DNA, 22 bp, synthetic construct
  misc_feature 1..22: note = chemically synthesized
  source 1..22: mol_type = other DNA
tgtcattcaccagtcccattta

SEQ ID NO: 64902 - DNA, 22 bp, synthetic construct
  misc_feature 1..22: note = chemically synthesized
  source 1..22: mol_type = other DNA
tcattcaccagtcccatttatg

SEQ ID NO: 64903 - DNA, 22 bp, synthetic construct
  misc_feature 1..22: note = chemically synthesized
  source 1..22: mol_type = other DNA
accagtcccatttatgcctcca

SEQ ID NO: 64904 - DNA, 22 bp, synthetic construct
  misc_feature 1..22: note = chemically synthesized
  source 1..22: mol_type = other DNA
atgcctccaccttggggctcta

SEQ ID NO: 64905 - DNA, 22 bp, synthetic construct
  misc_feature 1..22: note = chemically synthesized
  source 1..22: mol_type = other DNA
tgcctccaccttggggctctac

SEQ ID NO: 64906 - DNA, 22 bp, synthetic construct
  misc_feature 1..22: note = chemically synthesized
  source 1..22: mol_type = other DNA
caccttggggctctaccaggcg

SEQ ID NO: 64907 - DNA, 22 bp, synthetic construct
  misc_feature 1..22: note = chemically synthesized
  source 1..22: mol_type = other DNA
ggggctctaccaggcgagtgac

SEQ ID NO: 64908 - DNA, 22 bp, synthetic construct
  misc_feature 1..22: note = chemically synthesized
  source 1..22: mol_type = other DNA
gggctctaccaggcgagtgacc

SEQ ID NO: 64909 - DNA, 22 bp, synthetic construct
  misc_feature 1..22: note = chemically synthesized
  source 1..22: mol_type = other DNA
taccaggcgagtgacccacagg

SEQ ID NO: 64910 - DNA, 22 bp, synthetic construct
  misc_feature 1..22: note = chemically synthesized
  source 1..22: mol_type = other DNA
ccaggcgagtgacccacaggat

SEQ ID NO: 64911 - DNA, 22 bp, synthetic construct
  misc_feature 1..22: note = chemically synthesized
  source 1..22: mol_type = other DNA
cagcacacacattcagaccagg

SEQ ID NO: 64912 - DNA, 22 bp, synthetic construct
  misc_feature 1..22: note = chemically synthesized
  source 1..22: mol_type = other DNA
agaccagggaacccacttactg

SEQ ID NO: 64913 - DNA, 22 bp, synthetic construct
  misc_feature 1..22: note = chemically synthesized
  source 1..22: mol_type = other DNA
actggctgtgaggcctcaggtg

SEQ ID NO: 64914 - DNA, 22 bp, synthetic construct
  misc_feature 1..22: note = chemically synthesized
  source 1..22: mol_type = other DNA
ctggctgtgaggcctcaggtga

SEQ ID NO: 64915 - DNA, 22 bp, synthetic construct
  misc_feature 1..22: note = chemically synthesized
  source 1..22: mol_type = other DNA
gctgtgaggcctcaggtgagtt

SEQ ID NO: 64916 - DNA, 22 bp, synthetic construct
  misc_feature 1..22: note = chemically synthesized
  source 1..22: mol_type = other DNA
tgaggcctcaggtgagttgttt

SEQ ID NO: 64917 - DNA, 22 bp, synthetic construct
  misc_feature 1..22: note = chemically synthesized
  source 1..22: mol_type = other DNA
aggtgagttgtttaaccgctcc

SEQ ID NO: 64918 - DNA, 22 bp, synthetic construct
  misc_feature 1..22: note = chemically synthesized
  source 1..22: mol_type = other DNA
tttaaccgctccgagcctcaat

SEQ ID NO: 64919 - DNA, 22 bp, synthetic construct
  misc_feature 1..22: note = chemically synthesized
  source 1..22: mol_type = other DNA
aaccgctccgagcctcaatttc

SEQ ID NO: 64920 - DNA, 22 bp, synthetic construct
  misc_feature 1..22: note = chemically synthesized
  source 1..22: mol_type = other DNA
accgctccgagcctcaatttcc

SEQ ID NO: 64921 - DNA, 22 bp, synthetic construct
  misc_feature 1..22: note = chemically synthesized
  source 1..22: mol_type = other DNA
cgagcctcaatttccctatctg

SEQ ID NO: 64922 - DNA, 22 bp, synthetic construct
  misc_feature 1..22: note = chemically synthesized
  source 1..22: mol_type = other DNA
aatttccctatctgtaaaatgg

SEQ ID NO: 64923 - DNA, 22 bp, synthetic construct
  misc_feature 1..22: note = chemically synthesized
  source 1..22: mol_type = other DNA
ccctatctgtaaaatggggatg

SEQ ID NO: 64924 - DNA, 22 bp, synthetic construct
  misc_feature 1..22: note = chemically synthesized
  source 1..22: mol_type = other DNA
cctatctgtaaaatggggatgg

SEQ ID NO: 64925 - DNA, 22 bp, synthetic construct
  misc_feature 1..22: note = chemically synthesized
  source 1..22: mol_type = other DNA
tctgtaaaatggggatggtgac

SEQ ID NO: 64926 - DNA, 22 bp, synthetic construct
  misc_feature 1..22: note = chemically synthesized
  source 1..22: mol_type = other DNA
taaaatggggatggtgacggta

SEQ ID NO: 64927 - DNA, 22 bp, synthetic construct
  misc_feature 1..22: note = chemically synthesized
  source 1..22: mol_type = other DNA
gttgagctgctgtgaggattaa

SEQ ID NO: 64928 - DNA, 22 bp, synthetic construct
  misc_feature 1..22: note = chemically synthesized
  source 1..22: mol_type = other DNA
ttgagctgctgtgaggattaaa

SEQ ID NO: 64929 - DNA, 22 bp, synthetic construct
  misc_feature 1..22: note = chemically synthesized
  source 1..22: mol_type = other DNA
agctgctgtgaggattaaaatg

SEQ ID NO: 64930 - DNA, 22 bp, synthetic construct
  misc_feature 1..22: note = chemically synthesized
  source 1..22: mol_type = other DNA
ctgtgaggattaaaatgcaaca

SEQ ID NO: 64931 - DNA, 22 bp, synthetic construct
  misc_feature 1..22: note = chemically synthesized
  source 1..22: mol_type = other DNA
tgaggattaaaatgcaacagtt

SEQ ID NO: 64932 - DNA, 22 bp, synthetic construct
  misc_feature 1..22: note = chemically synthesized
  source 1..22: mol_type = other DNA
aaatgcaacagttcaaggaaag

SEQ ID NO: 64933 - DNA, 22 bp, synthetic construct
  misc_feature 1..22: note = chemically synthesized
  source 1..22: mol_type = other DNA
aaggaaagctcagagacgggta

SEQ ID NO: 64934 - DNA, 22 bp, synthetic construct
  misc_feature 1..22: note = chemically synthesized
  source 1..22: mol_type = other DNA
agagacgggtactgggtgtgcc

SEQ ID NO: 64935 - DNA, 22 bp, synthetic construct
  misc_feature 1..22: note = chemically synthesized
  source 1..22: mol_type = other DNA
ggtgtgcccagaaagcccctcc

SEQ ID NO: 64936 - DNA, 22 bp, synthetic construct
  misc_feature 1..22: note = chemically synthesized
  source 1..22: mol_type = other DNA
ctgatgctgccctccctccccc

SEQ ID NO: 64937 - DNA, 22 bp, synthetic construct
  misc_feature 1..22: note = chemically synthesized
  source 1..22: mol_type = other DNA
atgctgccctccctcccccgtg

SEQ ID NO: 64938 - DNA, 22 bp, synthetic construct
  misc_feature 1..22: note = chemically synthesized
  source 1..22: mol_type = other DNA
ccctccctcccccgtgtcaggg

SEQ ID NO: 64939 - DNA, 22 bp, synthetic construct
  misc_feature 1..22: note = chemically synthesized
  source 1..22: mol_type = other DNA
cctcccccgtgtcaggggctgg

SEQ ID NO: 64940 - DNA, 22 bp, synthetic construct
  misc_feature 1..22: note = chemically synthesized
  source 1..22: mol_type = other DNA
ccccgtgtcaggggctggtgtc

SEQ ID NO: 64941 - DNA, 22 bp, synthetic construct
  misc_feature 1..22: note = chemically synthesized
  source 1..22: mol_type = other DNA
gtgtcactggggtggggtgggc

SEQ ID NO: 64942 - DNA, 22 bp, synthetic construct
  misc_feature 1..22: note = chemically synthesized
  source 1..22: mol_type = other DNA
gggtggggtgggccacacttga

SEQ ID NO: 64943 - DNA, 22 bp, synthetic construct
  misc_feature 1..22: note = chemically synthesized
  source 1..22: mol_type = other DNA
gaagagctttcctccaggcagt

SEQ ID NO: 64944 - DNA, 22 bp, synthetic construct
  misc_feature 1..22: note = chemically synthesized
  source 1..22: mol_type = other DNA
aagagctttcctccaggcagtc

SEQ ID NO: 64945 - DNA, 22 bp, synthetic construct
  misc_feature 1..22: note = chemically synthesized
  source 1..22: mol_type = other DNA
tcctccaggcagtctctcattc

SEQ ID NO: 64946 - DNA, 22 bp, synthetic construct
  misc_feature 1..22: note = chemically synthesized
  source 1..22: mol_type = other DNA
cctccaggcagtctctcattca

SEQ ID NO: 64947 - DNA, 22 bp, synthetic construct
  misc_feature 1..22: note = chemically synthesized
  source 1..22: mol_type = other DNA
ctccaggcagtctctcattcag

SEQ ID NO: 64948 - DNA, 22 bp, synthetic construct
  misc_feature 1..22: note = chemically synthesized
  source 1..22: mol_type = other DNA
caggcagtctctcattcagtta

SEQ ID NO: 64949 - DNA, 22 bp, synthetic construct
  misc_feature 1..22: note = chemically synthesized
  source 1..22: mol_type = other DNA
tcattcagttaccctgtgaagg

SEQ ID NO: 64950 - DNA, 22 bp, synthetic construct
  misc_feature 1..22: note = chemically synthesized
  source 1..22: mol_type = other DNA
attcagttaccctgtgaaggga

SEQ ID NO: 64951 - DNA, 22 bp, synthetic construct
  misc_feature 1..22: note = chemically synthesized
  source 1..22: mol_type = other DNA
agttaccctgtgaagggagtag

SEQ ID NO: 64952 - DNA, 22 bp, synthetic construct
  misc_feature 1..22: note = chemically synthesized
  source 1..22: mol_type = other DNA
ccctgtgaagggagtaggtacc

SEQ ID NO: 64953 - DNA, 22 bp, synthetic construct
  misc_feature 1..22: note = chemically synthesized
  source 1..22: mol_type = other DNA
tgaagggagtaggtaccaccct

SEQ ID NO: 64954 - DNA, 22 bp, synthetic construct
  misc_feature 1..22: note = chemically synthesized
  source 1..22: mol_type = other DNA
ctttcaggcagcgggaaactga

SEQ ID NO: 64955 - DNA, 22 bp, synthetic construct
  misc_feature 1..22: note = chemically synthesized
  source 1..22: mol_type = other DNA
tcaggcagcgggaaactgagct

SEQ ID NO: 64956 - DNA, 22 bp, synthetic construct
  misc_feature 1..22: note = chemically synthesized
  source 1..22: mol_type = other DNA
caggcagcgggaaactgagctc

SEQ ID NO: 64957 - DNA, 22 bp, synthetic construct
  misc_feature 1..22: note = chemically synthesized
  source 1..22: mol_type = other DNA
aggcagcgggaaactgagctca

SEQ ID NO: 64958 - DNA, 22 bp, synthetic construct
  misc_feature 1..22: note = chemically synthesized
  source 1..22: mol_type = other DNA
agctcagactcccctccccttc

SEQ ID NO: 64959 - DNA, 22 bp, synthetic construct
  misc_feature 1..22: note = chemically synthesized
  source 1..22: mol_type = other DNA
agactcccctccccttctctct

SEQ ID NO: 64960 - DNA, 22 bp, synthetic construct
  misc_feature 1..22: note = chemically synthesized
  source 1..22: mol_type = other DNA
ccctccccttctctctgagctc

SEQ ID NO: 64961 - DNA, 22 bp, synthetic construct
  misc_feature 1..22: note = chemically synthesized
  source 1..22: mol_type = other DNA
cccttctctctgagctcccttc

SEQ ID NO: 64962 - DNA, 22 bp, synthetic construct
  misc_feature 1..22: note = chemically synthesized
  source 1..22: mol_type = other DNA
ctctctgagctcccttccctgc

SEQ ID NO: 64963 - DNA, 22 bp, synthetic construct
  misc_feature 1..22: note = chemically synthesized
  source 1..22: mol_type = other DNA
tctctgagctcccttccctgca

SEQ ID NO: 64964 - DNA, 22 bp, synthetic construct
  misc_feature 1..22: note = chemically synthesized
  source 1..22: mol_type = other DNA
tctgagctcccttccctgcagc

SEQ ID NO: 64965 - DNA, 22 bp, synthetic construct
  misc_feature 1..22: note = chemically synthesized
  source 1..22: mol_type = other DNA
tgagctcccttccctgcagctc

SEQ ID NO: 64966 - DNA, 22 bp, synthetic construct
  misc_feature 1..22: note = chemically synthesized
  source 1..22: mol_type = other DNA
agctcccttccctgcagctcca

SEQ ID NO: 64967 - DNA, 22 bp, synthetic construct
  misc_feature 1..22: note = chemically synthesized
  source 1..22: mol_type = other DNA
ccttccctgcagctccatcccc

SEQ ID NO: 64968 - DNA, 22 bp, synthetic construct
  misc_feature 1..22: note = chemically synthesized
  source 1..22: mol_type = other DNA
ccctgcagctccatcccctggc

SEQ ID NO: 64969 - DNA, 22 bp, synthetic construct
  misc_feature 1..22: note = chemically synthesized
  source 1..22: mol_type = other DNA
cctgcagctccatcccctggct

SEQ ID NO: 64970 - DNA, 22 bp, synthetic construct
  misc_feature 1..22: note = chemically synthesized
  source 1..22: mol_type = other DNA
cagctccatcccctggcttcag

SEQ ID NO: 64971 - DNA, 22 bp, synthetic construct
  misc_feature 1..22: note = chemically synthesized
  source 1..22: mol_type = other DNA
catcccctggcttcagggcccc

SEQ ID NO: 64972 - DNA, 22 bp, synthetic construct
  misc_feature 1..22: note = chemically synthesized
  source 1..22: mol_type = other DNA
gcttcagggcccctgtccttcc

SEQ ID NO: 64973 - DNA, 22 bp, synthetic construct
  misc_feature 1..22: note = chemically synthesized
  source 1..22: mol_type = other DNA
cagggcccctgtccttcccctg

SEQ ID NO: 64974 - DNA, 22 bp, synthetic construct
  misc_feature 1..22: note = chemically synthesized
  source 1..22: mol_type = other DNA
agggcccctgtccttcccctga

SEQ ID NO: 64975 - DNA, 22 bp, synthetic construct
  misc_feature 1..22: note = chemically synthesized
  source 1..22: mol_type = other DNA
tccttcccctgagctggctgaa

SEQ ID NO: 64976 - DNA, 22 bp, synthetic construct
  misc_feature 1..22: note = chemically synthesized
  source 1..22: mol_type = other DNA
cccctgagctggctgaatggat

SEQ ID NO: 64977 - DNA, 22 bp, synthetic construct
  misc_feature 1..22: note = chemically synthesized
  source 1..22: mol_type = other DNA
ccctgagctggctgaatggata

SEQ ID NO: 64978 - DNA, 22 bp, synthetic construct
  misc_feature 1..22: note = chemically synthesized
  source 1..22: mol_type = other DNA
agctggctgaatggatattccg

SEQ ID NO: 64979 - DNA, 22 bp, synthetic construct
  misc_feature 1..22: note = chemically synthesized
  source 1..22: mol_type = other DNA
gctgaatggatattccgctgct

SEQ ID NO: 64980 - DNA, 22 bp, synthetic construct
  misc_feature 1..22: note = chemically synthesized
  source 1..22: mol_type = other DNA
aatggatattccgctgctctac

SEQ ID NO: 64981 - DNA, 22 bp, synthetic construct
  misc_feature 1..22: note = chemically synthesized
  source 1..22: mol_type = other DNA
cgctgctctacatccactcaca

SEQ ID NO: 64982 - DNA, 22 bp, synthetic construct
  misc_feature 1..22: note = chemically synthesized
  source 1..22: mol_type = other DNA
ctctacatccactcacagctcc

SEQ ID NO: 64983 - DNA, 22 bp, synthetic construct
  misc_feature 1..22: note = chemically synthesized
  source 1..22: mol_type = other DNA
tacatccactcacagctccagc

SEQ ID NO: 64984 - DNA, 22 bp, synthetic construct
  misc_feature 1..22: note = chemically synthesized
  source 1..22: mol_type = other DNA
catccactcacagctccagcac

SEQ ID NO: 64985 - DNA, 22 bp, synthetic construct
  misc_feature 1..22: note = chemically synthesized
  source 1..22: mol_type = other DNA
acagctccagcactgggctgtg

SEQ ID NO: 64986 - DNA, 22 bp, synthetic construct
  misc_feature 1..22: note = chemically synthesized
  source 1..22: mol_type = other DNA
cagcactgggctgtggttgagg

SEQ ID NO: 64987 - DNA, 22 bp, synthetic construct
  misc_feature 1..22: note = chemically synthesized
  source 1..22: mol_type = other DNA
ggctgtggttgaggtcgcctgc

SEQ ID NO: 64988 - DNA, 22 bp, synthetic construct
  misc_feature 1..22: note = chemically synthesized
  source 1..22: mol_type = other DNA
tggttgaggtcgcctgccctcg

SEQ ID NO: 64989 - DNA, 22 bp, synthetic construct
  misc_feature 1..22: note = chemically synthesized
  source 1..22: mol_type = other DNA
aggtcgcctgccctcggtagct

SEQ ID NO: 64990 - DNA, 22 bp, synthetic construct
  misc_feature 1..22: note = chemically synthesized
  source 1..22: mol_type = other DNA
ccctcggtagctcctgggcatt

SEQ ID NO: 64991 - DNA, 22 bp, synthetic construct
  misc_feature 1..22: note = chemically synthesized
  source 1..22: mol_type = other DNA
ggtagctcctgggcatttcttc

SEQ ID NO: 64992 - DNA, 22 bp, synthetic construct
  misc_feature 1..22: note = chemically synthesized
  source 1..22: mol_type = other DNA
ctgggcatttcttcccctctct

SEQ ID NO: 64993 - DNA, 22 bp, synthetic construct
  misc_feature 1..22: note = chemically synthesized
  source 1..22: mol_type = other DNA
ggcatttcttcccctctctggg

SEQ ID NO: 64994 - DNA, 22 bp, synthetic construct
  misc_feature 1..22: note = chemically synthesized
  source 1..22: mol_type = other DNA
cttcccctctctgggcctttgt

SEQ ID NO: 64995 - DNA, 22 bp, synthetic construct
  misc_feature 1..22: note = chemically synthesized
  source 1..22: mol_type = other DNA
ttcccctctctgggcctttgtt

SEQ ID NO: 64996 - DNA, 22 bp, synthetic construct
  misc_feature 1..22: note = chemically synthesized
  source 1..22: mol_type = other DNA
cccctctctgggcctttgtttt

SEQ ID NO: 64997 - DNA, 22 bp, synthetic construct
  misc_feature 1..22: note = chemically synthesized
  source 1..22: mol_type = other DNA
ccctctctgggcctttgttttc

SEQ ID NO: 64998 - DNA, 22 bp, synthetic construct
  misc_feature 1..22: note = chemically synthesized
  source 1..22: mol_type = other DNA
tctgggcctttgttttcccatc

SEQ ID NO: 64999 - DNA, 22 bp, synthetic construct
  misc_feature 1..22: note = chemically synthesized
  source 1..22: mol_type = other DNA
tgggcctttgttttcccatctg

SEQ ID NO: 65000 - DNA, 22 bp, synthetic construct
  misc_feature 1..22: note = chemically synthesized
  source 1..22: mol_type = other DNA
ggcctttgttttcccatctgca

SEQ ID NO: 65001 - DNA, 22 bp, synthetic construct
  misc_feature 1..22: note = chemically synthesized
  source 1..22: mol_type = other DNA
tgttttcccatctgcacaatga

SEQ ID NO: 65002 - DNA, 22 bp, synthetic construct
  misc_feature 1..22: note = chemically synthesized
  source 1..22: mol_type = other DNA
gttttcccatctgcacaatgac

SEQ ID NO: 65003 - DNA, 22 bp, synthetic construct
  misc_feature 1..22: note = chemically synthesized
  source 1..22: mol_type = other DNA
ttttcccatctgcacaatgacc

SEQ ID NO: 65004 - DNA, 22 bp, synthetic construct
  misc_feature 1..22: note = chemically synthesized
  source 1..22: mol_type = other DNA
tcccatctgcacaatgaccccc

SEQ ID NO: 65005 - DNA, 22 bp, synthetic construct
  misc_feature 1..22: note = chemically synthesized
  source 1..22: mol_type = other DNA
cccatctgcacaatgaccccca

SEQ ID NO: 65006 - DNA, 22 bp, synthetic construct
  misc_feature 1..22: note = chemically synthesized
  source 1..22: mol_type = other DNA
ccatctgcacaatgacccccac

SEQ ID NO: 65007 - DNA, 22 bp, synthetic construct
  misc_feature 1..22: note = chemically synthesized
  source 1..22: mol_type = other DNA
cacaatgacccccactctaagc

SEQ ID NO: 65008 - DNA, 22 bp, synthetic construct
  misc_feature 1..22: note = chemically synthesized
  source 1..22: mol_type = other DNA
taagccctgctgtccctcccac

SEQ ID NO: 65009 - DNA, 22 bp, synthetic construct
  misc_feature 1..22: note = chemically synthesized
  source 1..22: mol_type = other DNA
agccctgctgtccctcccacct

SEQ ID NO: 65010 - DNA, 22 bp, synthetic construct
  misc_feature 1..22: note = chemically synthesized
  source 1..22: mol_type = other DNA
ctgtccctcccacctgtggaac

SEQ ID NO: 65011 - DNA, 22 bp, synthetic construct
  misc_feature 1..22: note = chemically synthesized
  source 1..22: mol_type = other DNA
tccctcccacctgtggaactga

SEQ ID NO: 65012 - DNA, 22 bp, synthetic construct
  misc_feature 1..22: note = chemically synthesized
  source 1..22: mol_type = other DNA
ccacctgtggaactgagtgagc

SEQ ID NO: 65013 - DNA, 22 bp, synthetic construct
  misc_feature 1..22: note = chemically synthesized
  source 1..22: mol_type = other DNA
tggaactgagtgagcagcagca

SEQ ID NO: 65014 - DNA, 22 bp, synthetic construct
  misc_feature 1..22: note = chemically synthesized
  source 1..22: mol_type = other DNA
agtgagcagcagcagcaatgtc

SEQ ID NO: 65015 - DNA, 22 bp, synthetic construct
  misc_feature 1..22: note = chemically synthesized
  source 1..22: mol_type = other DNA
tcctgctctcctcaagctctcc

SEQ ID NO: 65016 - DNA, 22 bp, synthetic construct
  misc_feature 1..22: note = chemically synthesized
  source 1..22: mol_type = other DNA
cctgctctcctcaagctctcct

SEQ ID NO: 65017 - DNA, 22 bp, synthetic construct
  misc_feature 1..22: note = chemically synthesized
  source 1..22: mol_type = other DNA
ctgctctcctcaagctctcctc

SEQ ID NO: 65018 - DNA, 22 bp, synthetic construct
  misc_feature 1..22: note = chemically synthesized
  source 1..22: mol_type = other DNA
ctctcctcaagctctcctcaag

SEQ ID NO: 65019 - DNA, 22 bp, synthetic construct
  misc_feature 1..22: note = chemically synthesized
  source 1..22: mol_type = other DNA
tcctcaagctctcctcaagctc

SEQ ID NO: 65020 - DNA, 22 bp, synthetic construct
  misc_feature 1..22: note = chemically synthesized
  source 1..22: mol_type = other DNA
ctcaagctctcctcaagctctg

SEQ ID NO: 65021 - DNA, 22 bp, synthetic construct
  misc_feature 1..22: note = chemically synthesized
  source 1..22: mol_type = other DNA
aagctctcctcaagctctgtct

SEQ ID NO: 65022 - DNA, 22 bp, synthetic construct
  misc_feature 1..22: note = chemically synthesized
  source 1..22: mol_type = other DNA
tcctcaagctctgtctcttctg

SEQ ID NO: 65023 - DNA, 22 bp, synthetic construct
  misc_feature 1..22: note = chemically synthesized
  source 1..22: mol_type = other DNA
ctcaagctctgtctcttctggc

SEQ ID NO: 65024 - DNA, 22 bp, synthetic construct
  misc_feature 1..22: note = chemically synthesized
  source 1..22: mol_type = other DNA
aagctctgtctcttctggcagg

SEQ ID NO: 65025 - DNA, 22 bp, synthetic construct
  misc_feature 1..22: note = chemically synthesized
  source 1..22: mol_type = other DNA
tgtctcttctggcaggcacagg

SEQ ID NO: 65026 - DNA, 22 bp, synthetic construct
  misc_feature 1..22: note = chemically synthesized
  source 1..22: mol_type = other DNA
tctcttctggcaggcacaggag

SEQ ID NO: 65027 - DNA, 22 bp, synthetic construct
  misc_feature 1..22: note = chemically synthesized
  source 1..22: mol_type = other DNA
ttctggcaggcacaggagagtg

SEQ ID NO: 65028 - DNA, 22 bp, synthetic construct
  misc_feature 1..22: note = chemically synthesized
  source 1..22: mol_type = other DNA
ctggcaggcacaggagagtggc

SEQ ID NO: 65029 - DNA, 22 bp, synthetic construct
  misc_feature 1..22: note = chemically synthesized
  source 1..22: mol_type = other DNA
tggcaggcacaggagagtggcc

SEQ ID NO: 65030 - DNA, 22 bp, synthetic construct
  misc_feature 1..22: note = chemically synthesized
  source 1..22: mol_type = other DNA
gcaggcacaggagagtggcctg

SEQ ID NO: 65031 - DNA, 22 bp, synthetic construct
  misc_feature 1..22: note = chemically synthesized
  source 1..22: mol_type = other DNA
aaggctggcaggaggttgccgc

SEQ ID NO: 65032 - DNA, 22 bp, synthetic construct
  misc_feature 1..22: note = chemically synthesized
  source 1..22: mol_type = other DNA
gcaggaggttgccgcccctcca

SEQ ID NO: 65033 - DNA, 22 bp, synthetic construct
  misc_feature 1..22: note = chemically synthesized
  source 1..22: mol_type = other DNA
ccgcccctccaacctggaattc

SEQ ID NO: 65034 - DNA, 22 bp, synthetic construct
  misc_feature 1..22: note = chemically synthesized
  source 1..22: mol_type = other DNA
caacctggaattcctggcagca

SEQ ID NO: 65035 - DNA, 22 bp, synthetic construct
  misc_feature 1..22: note = chemically synthesized
  source 1..22: mol_type = other DNA
gaattcctggcagcagcagcgg

SEQ ID NO: 65036 - DNA, 22 bp, synthetic construct
  misc_feature 1..22: note = chemically synthesized
  source 1..22: mol_type = other DNA
ctggcagcagcagcggctaggc

SEQ ID NO: 65037 - DNA, 22 bp, synthetic construct
  misc_feature 1..22: note = chemically synthesized
  source 1..22: mol_type = other DNA
gcagcagcagcggctaggcctt

SEQ ID NO: 65038 - DNA, 22 bp, synthetic construct
  misc_feature 1..22: note = chemically synthesized
  source 1..22: mol_type = other DNA
ggccttcctcggaggcccgacc

SEQ ID NO: 65039 - DNA, 22 bp, synthetic construct
  misc_feature 1..22: note = chemically synthesized
  source 1..22: mol_type = other DNA
cctcggaggcccgaccccctcc

SEQ ID NO: 65040 - DNA, 22 bp, synthetic construct
  misc_feature 1..22: note = chemically synthesized
  source 1..22: mol_type = other DNA
ctcggaggcccgaccccctcct

SEQ ID NO: 65041 - DNA, 22 bp, synthetic construct
  misc_feature 1..22: note = chemically synthesized
  source 1..22: mol_type = other DNA
ggaggcccgaccccctcctcct

SEQ ID NO: 65042 - DNA, 22 bp, synthetic construct
  misc_feature 1..22: note = chemically synthesized
  source 1..22: mol_type = other DNA
ctccttcttggttcagctcagg

SEQ ID NO: 65043 - DNA, 22 bp, synthetic construct
  misc_feature 1..22: note = chemically synthesized
  source 1..22: mol_type = other DNA
cttcttggttcagctcaggact

SEQ ID NO: 65044 - DNA, 22 bp, synthetic construct
  misc_feature 1..22: note = chemically synthesized
  source 1..22: mol_type = other DNA
cttggttcagctcaggactctg

SEQ ID NO: 65045 - DNA, 22 bp, synthetic construct
  misc_feature 1..22: note = chemically synthesized
  source 1..22: mol_type = other DNA
ttggttcagctcaggactctga

SEQ ID NO: 65046 - DNA, 22 bp, synthetic construct
  misc_feature 1..22: note = chemically synthesized
  source 1..22: mol_type = other DNA
ggttcagctcaggactctgagg

SEQ ID NO: 65047 - DNA, 22 bp, synthetic construct
  misc_feature 1..22: note = chemically synthesized
  source 1..22: mol_type = other DNA
gttcagctcaggactctgaggg

SEQ ID NO: 65048 - DNA, 22 bp, synthetic construct
  misc_feature 1..22: note = chemically synthesized
  source 1..22: mol_type = other DNA
agctcaggactctgagggttgc

SEQ ID NO: 65049 - DNA, 22 bp, synthetic construct
  misc_feature 1..22: note = chemically synthesized
  source 1..22: mol_type = other DNA
aggactctgagggttgctgcgt

SEQ ID NO: 65050 - DNA, 22 bp, synthetic construct
  misc_feature 1..22: note = chemically synthesized
  source 1..22: mol_type = other DNA
tgagggttgctgcgtggaggca

SEQ ID NO: 65051 - DNA, 22 bp, synthetic construct
  misc_feature 1..22: note = chemically synthesized
  source 1..22: mol_type = other DNA
agggttgctgcgtggaggcagt

SEQ ID NO: 65052 - DNA, 22 bp, synthetic construct
  misc_feature 1..22: note = chemically synthesized
  source 1..22: mol_type = other DNA
ctgcgtggaggcagtgcatgcc

SEQ ID NO: 65053 - DNA, 22 bp, synthetic construct
  misc_feature 1..22: note = chemically synthesized
  source 1..22: mol_type = other DNA
cgtggaggcagtgcatgccctg

SEQ ID NO: 65054 - DNA, 22 bp, synthetic construct
  misc_feature 1..22: note = chemically synthesized
  source 1..22: mol_type = other DNA
ggcacagtgcccagttcctgcc

SEQ ID NO: 65055 - DNA, 22 bp, synthetic construct
  misc_feature 1..22: note = chemically synthesized
  source 1..22: mol_type = other DNA
ctgcccacccaggaagtagact

SEQ ID NO: 65056 - DNA, 22 bp, synthetic construct
  misc_feature 1..22: note = chemically synthesized
  source 1..22: mol_type = other DNA
cccacccaggaagtagacttcg

SEQ ID NO: 65057 - DNA, 22 bp, synthetic construct
  misc_feature 1..22: note = chemically synthesized
  source 1..22: mol_type = other DNA
cgggtggaggcagtaggctggg

SEQ ID NO: 65058 - DNA, 22 bp, synthetic construct
  misc_feature 1..22: note = chemically synthesized
  source 1..22: mol_type = other DNA
gggtggaggcagtaggctgggg

SEQ ID NO: 65059 - DNA, 22 bp, synthetic construct
  misc_feature 1..22: note = chemically synthesized
  source 1..22: mol_type = other DNA
gggaggggcggggagcttggac

SEQ ID NO: 65060 - DNA, 22 bp, synthetic construct
  misc_feature 1..22: note = chemically synthesized
  source 1..22: mol_type = other DNA
ggacaggaaggagccttgctca

SEQ ID NO: 65061 - DNA, 22 bp, synthetic construct
  misc_feature 1..22: note = chemically synthesized
  source 1..22: mol_type = other DNA
gacaggaaggagccttgctcat

SEQ ID NO: 65062 - DNA, 22 bp, synthetic construct
  misc_feature 1..22: note = chemically synthesized
  source 1..22: mol_type = other DNA
gctcattgcccggcagacacaa

SEQ ID NO: 65063 - DNA, 22 bp, synthetic construct
  misc_feature 1..22: note = chemically synthesized
  source 1..22: mol_type = other DNA
ctcattgcccggcagacacaag

SEQ ID NO: 65064 - DNA, 22 bp, synthetic construct
  misc_feature 1..22: note = chemically synthesized
  source 1..22: mol_type = other DNA
attgcccggcagacacaagact

SEQ ID NO: 65065 - DNA, 22 bp, synthetic construct
  misc_feature 1..22: note = chemically synthesized
  source 1..22: mol_type = other DNA
cccggcagacacaagactgggc

SEQ ID NO: 65066 - DNA, 22 bp, synthetic construct
  misc_feature 1..22: note = chemically synthesized
  source 1..22: mol_type = other DNA
ggccctcataaactcagacagc

SEQ ID NO: 65067 - DNA, 22 bp, synthetic construct
  misc_feature 1..22: note = chemically synthesized
  source 1..22: mol_type = other DNA
ataaactcagacagcccggcat

SEQ ID NO: 65068 - DNA, 22 bp, synthetic construct
  misc_feature 1..22: note = chemically synthesized
  source 1..22: mol_type = other DNA
agacagcccggcatgtcacctg

SEQ ID NO: 65069 - DNA, 22 bp, synthetic construct
  misc_feature 1..22: note = chemically synthesized
  source 1..22: mol_type = other DNA
ttgtacctgccctttcagctct

SEQ ID NO: 65070 - DNA, 22 bp, synthetic construct
  misc_feature 1..22: note = chemically synthesized
  source 1..22: mol_type = other DNA
tacctgccctttcagctctgtg

SEQ ID NO: 65071 - DNA, 22 bp, synthetic construct
  misc_feature 1..22: note = chemically synthesized
  source 1..22: mol_type = other DNA
ccctttcagctctgtgacccgg

SEQ ID NO: 65072 - DNA, 22 bp, synthetic construct
  misc_feature 1..22: note = chemically synthesized
  source 1..22: mol_type = other DNA
tcagctctgtgacccgggacaa

SEQ ID NO: 65073 - DNA, 22 bp, synthetic construct
  misc_feature 1..22: note = chemically synthesized
  source 1..22: mol_type = other DNA
cagctctgtgacccgggacaag

SEQ ID NO: 65074 - DNA, 22 bp, synthetic construct
  misc_feature 1..22: note = chemically synthesized
  source 1..22: mol_type = other DNA
agctctgtgacccgggacaagt

SEQ ID NO: 65075 - DNA, 22 bp, synthetic construct
  misc_feature 1..22: note = chemically synthesized
  source 1..22: mol_type = other DNA
tgtgacccgggacaagtcaccc

SEQ ID NO: 65076 - DNA, 22 bp, synthetic construct
  misc_feature 1..22: note = chemically synthesized
  source 1..22: mol_type = other DNA
tgacccgggacaagtcaccctc

SEQ ID NO: 65077 - DNA, 22 bp, synthetic construct
  misc_feature 1..22: note = chemically synthesized
  source 1..22: mol_type = other DNA
tccctttgagttgccgcaagag

SEQ ID NO: 65078 - DNA, 22 bp, synthetic construct
  misc_feature 1..22: note = chemically synthesized
  source 1..22: mol_type = other DNA
cctttgagttgccgcaagaggt

SEQ ID NO: 65079 - DNA, 22 bp, synthetic construct
  misc_feature 1..22: note = chemically synthesized
  source 1..22: mol_type = other DNA
tgagttgccgcaagaggtacag

SEQ ID NO: 65080 - DNA, 22 bp, synthetic construct
  misc_feature 1..22: note = chemically synthesized
  source 1..22: mol_type = other DNA
gagttgccgcaagaggtacagt

SEQ ID NO: 65081 - DNA, 22 bp, synthetic construct
  misc_feature 1..22: note = chemically synthesized
  source 1..22: mol_type = other DNA
agttgccgcaagaggtacagtc

SEQ ID NO: 65082 - DNA, 22 bp, synthetic construct
  misc_feature 1..22: note = chemically synthesized
  source 1..22: mol_type = other DNA
ccgcaagaggtacagtcacact

SEQ ID NO: 65083 - DNA, 22 bp, synthetic construct
  misc_feature 1..22: note = chemically synthesized
  source 1..22: mol_type = other DNA
cccagaggattactagaaatga

SEQ ID NO: 65084 - DNA, 22 bp, synthetic construct
  misc_feature 1..22: note = chemically synthesized
  source 1..22: mol_type = other DNA
ctagaaatgacaggcctcgccc

SEQ ID NO: 65085 - DNA, 22 bp, synthetic construct
  misc_feature 1..22: note = chemically synthesized
  source 1..22: mol_type = other DNA
gaaatgacaggcctcgccctcc

SEQ ID NO: 65086 - DNA, 22 bp, synthetic construct
  misc_feature 1..22: note = chemically synthesized
  source 1..22: mol_type = other DNA
gccctcctggcacagacctggc

SEQ ID NO: 65087 - DNA, 22 bp, synthetic construct
  misc_feature 1..22: note = chemically synthesized
  source 1..22: mol_type = other DNA
ctggcacagacctggcaccaat

SEQ ID NO: 65088 - DNA, 22 bp, synthetic construct
  misc_feature 1..22: note = chemically synthesized
  source 1..22: mol_type = other DNA
gcacagacctggcaccaataac

SEQ ID NO: 65089 - DNA, 22 bp, synthetic construct
  misc_feature 1..22: note = chemically synthesized
  source 1..22: mol_type = other DNA
gcaccaataactggcaggtttc

SEQ ID NO: 65090 - DNA, 22 bp, synthetic construct
  misc_feature 1..22: note = chemically synthesized
  source 1..22: mol_type = other DNA
gcaggtttctggggccagctgc

SEQ ID NO: 65091 - DNA, 22 bp, synthetic construct
  misc_feature 1..22: note = chemically synthesized
  source 1..22: mol_type = other DNA
ctggggccagctgcagagggaa

SEQ ID NO: 65092 - DNA, 22 bp, synthetic construct
  misc_feature 1..22: note = chemically synthesized
  source 1..22: mol_type = other DNA
tggggccagctgcagagggaag

SEQ ID NO: 65093 - DNA, 22 bp, synthetic construct
  misc_feature 1..22: note = chemically synthesized
  source 1..22: mol_type = other DNA
gggccagctgcagagggaagag

SEQ ID NO: 65094 - DNA, 22 bp, synthetic construct
  misc_feature 1..22: note = chemically synthesized
  source 1..22: mol_type = other DNA
cagagggaagaggactgagcca

SEQ ID NO: 65095 - DNA, 22 bp, synthetic construct
  misc_feature 1..22: note = chemically synthesized
  source 1..22: mol_type = other DNA
agccacctatgaaatgcccagt

SEQ ID NO: 65096 - DNA, 22 bp, synthetic construct
  misc_feature 1..22: note = chemically synthesized
  source 1..22: mol_type = other DNA
tgaaatgcccagtgggcagccc

SEQ ID NO: 65097 - DNA, 22 bp, synthetic construct
  misc_feature 1..22: note = chemically synthesized
  source 1..22: mol_type = other DNA
ggcaggtctgtgtgcactgggg

SEQ ID NO: 65098 - DNA, 22 bp, synthetic construct
  misc_feature 1..22: note = chemically synthesized
  source 1..22: mol_type = other DNA
tgtgcactggggaggtgtgtgt

SEQ ID NO: 65099 - DNA, 22 bp, synthetic construct
  misc_feature 1..22: note = chemically synthesized
  source 1..22: mol_type = other DNA
gggaggtgtgtgtcataggacc

SEQ ID NO: 65100 - DNA, 22 bp, synthetic construct
  misc_feature 1..22: note = chemically synthesized
  source 1..22: mol_type = other DNA
gctgggtgcagaagggattgca

SEQ ID NO: 65101 - DNA, 22 bp, synthetic construct
  misc_feature 1..22: note = chemically synthesized
  source 1..22: mol_type = other DNA
ggtgcagaagggattgcagtgg

SEQ ID NO: 65102 - DNA, 22 bp, synthetic construct
  misc_feature 1..22: note = chemically synthesized
  source 1..22: mol_type = other DNA
cagtggggagctggggcttttg

SEQ ID NO: 65103 - DNA, 22 bp, synthetic construct
  misc_feature 1..22: note = chemically synthesized
  source 1..22: mol_type = other DNA
gggcttttggaggaggaatgaa

SEQ ID NO: 65104 - DNA, 22 bp, synthetic construct
  misc_feature 1..22: note = chemically synthesized
  source 1..22: mol_type = other DNA
ttggaggaggaatgaagaaagc

SEQ ID NO: 65105 - DNA, 22 bp, synthetic construct
  misc_feature 1..22: note = chemically synthesized
  source 1..22: mol_type = other DNA
tggaggaggaatgaagaaagca

SEQ ID NO: 65106 - DNA, 22 bp, synthetic construct
  misc_feature 1..22: note = chemically synthesized
  source 1..22: mol_type = other DNA
ggaggaggaatgaagaaagcat

SEQ ID NO: 65107 - DNA, 22 bp, synthetic construct
  misc_feature 1..22: note = chemically synthesized
  source 1..22: mol_type = other DNA
gaggaggaatgaagaaagcatg

SEQ ID NO: 65108 - DNA, 22 bp, synthetic construct
  misc_feature 1..22: note = chemically synthesized
  source 1..22: mol_type = other DNA
agaatttggggtcctgctcttt

SEQ ID NO: 65109 - DNA, 22 bp, synthetic construct
  misc_feature 1..22: note = chemically synthesized
  source 1..22: mol_type = other DNA
ggggtcctgctcttttggcagg

SEQ ID NO: 65110 - DNA, 22 bp, synthetic construct
  misc_feature 1..22: note = chemically synthesized
  source 1..22: mol_type = other DNA
gggtcctgctcttttggcaggg

SEQ ID NO: 65111 - DNA, 22 bp, synthetic construct
  misc_feature 1..22: note = chemically synthesized
  source 1..22: mol_type = other DNA
ctcttttggcagggctctaggc

SEQ ID NO: 65112 - DNA, 22 bp, synthetic construct
  misc_feature 1..22: note = chemically synthesized
  source 1..22: mol_type = other DNA
ttttggcagggctctaggctca

SEQ ID NO: 65113 - DNA, 22 bp, synthetic construct
  misc_feature 1..22: note = chemically synthesized
  source 1..22: mol_type = other DNA
ttggcagggctctaggctcagc

SEQ ID NO: 65114 - DNA, 22 bp, synthetic construct
  misc_feature 1..22: note = chemically synthesized
  source 1..22: mol_type = other DNA
tggcagggctctaggctcagcc

SEQ ID NO: 65115 - DNA, 22 bp, synthetic construct
  misc_feature 1..22: note = chemically synthesized
  source 1..22: mol_type = other DNA
ggcagggctctaggctcagccc

SEQ ID NO: 65116 - DNA, 22 bp, synthetic construct
  misc_feature 1..22: note = chemically synthesized
  source 1..22: mol_type = other DNA
gcagggctctaggctcagcccc

SEQ ID NO: 65117 - DNA, 22 bp, synthetic construct
  misc_feature 1..22: note = chemically synthesized
  source 1..22: mol_type = other DNA
taggctcagcccccgccctgct

SEQ ID NO: 65118 - DNA, 22 bp, synthetic construct
  misc_feature 1..22: note = chemically synthesized
  source 1..22: mol_type = other DNA
ggctcagcccccgccctgctct

SEQ ID NO: 65119 - DNA, 22 bp, synthetic construct
  misc_feature 1..22: note = chemically synthesized
  source 1..22: mol_type = other DNA
agcccccgccctgctctggaca

SEQ ID NO: 65120 - DNA, 22 bp, synthetic construct
  misc_feature 1..22: note = chemically synthesized
  source 1..22: mol_type = other DNA
ctctggacatccatcctgggag

SEQ ID NO: 65121 - DNA, 22 bp, synthetic construct
  misc_feature 1..22: note = chemically synthesized
  source 1..22: mol_type = other DNA
tggacatccatcctgggaggaa

SEQ ID NO: 65122 - DNA, 22 bp, synthetic construct
  misc_feature 1..22: note = chemically synthesized
  source 1..22: mol_type = other DNA
gacatccatcctgggaggaagg

SEQ ID NO: 65123 - DNA, 22 bp, synthetic construct
  misc_feature 1..22: note = chemically synthesized
  source 1..22: mol_type = other DNA
ggaggaagggctaggataatct

SEQ ID NO: 65124 - DNA, 22 bp, synthetic construct
  misc_feature 1..22: note = chemically synthesized
  source 1..22: mol_type = other DNA
ggataatctggaaaaacgcacc

SEQ ID NO: 65125 - DNA, 22 bp, synthetic construct
  misc_feature 1..22: note = chemically synthesized
  source 1..22: mol_type = other DNA
gaaaaacgcaccaggacaaaat

SEQ ID NO: 65126 - DNA, 22 bp, synthetic construct
  misc_feature 1..22: note = chemically synthesized
  source 1..22: mol_type = other DNA
tggtgggaggggtgggagtact

SEQ ID NO: 65127 - DNA, 22 bp, synthetic construct
  misc_feature 1..22: note = chemically synthesized
  source 1..22: mol_type = other DNA
agtggccattcacaaggatact

SEQ ID NO: 65128 - DNA, 22 bp, synthetic construct
  misc_feature 1..22: note = chemically synthesized
  source 1..22: mol_type = other DNA
acaaggatactgtgcccccagg

SEQ ID NO: 65129 - DNA, 22 bp, synthetic construct
  misc_feature 1..22: note = chemically synthesized
  source 1..22: mol_type = other DNA
tgcccccaggaaccccaggaca

SEQ ID NO: 65130 - DNA, 22 bp, synthetic construct
  misc_feature 1..22: note = chemically synthesized
  source 1..22: mol_type = other DNA
gtccacctggttacttccacaa

SEQ ID NO: 65131 - DNA, 22 bp, synthetic construct
  misc_feature 1..22: note = chemically synthesized
  source 1..22: mol_type = other DNA
tccacctggttacttccacaat

SEQ ID NO: 65132 - DNA, 22 bp, synthetic construct
  misc_feature 1..22: note = chemically synthesized
  source 1..22: mol_type = other DNA
gttacttccacaattgtctatt

SEQ ID NO: 65133 - DNA, 22 bp, synthetic construct
  misc_feature 1..22: note = chemically synthesized
  source 1..22: mol_type = other DNA
cttccacaattgtctattgcag

SEQ ID NO: 65134 - DNA, 22 bp, synthetic construct
  misc_feature 1..22: note = chemically synthesized
  source 1..22: mol_type = other DNA
ccacaattgtctattgcagcat

SEQ ID NO: 65135 - DNA, 22 bp, synthetic construct
  misc_feature 1..22: note = chemically synthesized
  source 1..22: mol_type = other DNA
cacaattgtctattgcagcatc

SEQ ID NO: 65136 - DNA, 22 bp, synthetic construct
  misc_feature 1..22: note = chemically synthesized
  source 1..22: mol_type = other DNA
tctattgcagcatctgggctga

SEQ ID NO: 65137 - DNA, 22 bp, synthetic construct
  misc_feature 1..22: note = chemically synthesized
  source 1..22: mol_type = other DNA
ttgcagcatctgggctgatccc

SEQ ID NO: 65138 - DNA, 22 bp, synthetic construct
  misc_feature 1..22: note = chemically synthesized
  source 1..22: mol_type = other DNA
cagcatctgggctgatcccccc

SEQ ID NO: 65139 - DNA, 22 bp, synthetic construct
  misc_feature 1..22: note = chemically synthesized
  source 1..22: mol_type = other DNA
ggctgatccccccagaggaaat

SEQ ID NO: 65140 - DNA, 22 bp, synthetic construct
  misc_feature 1..22: note = chemically synthesized
  source 1..22: mol_type = other DNA
atccccccagaggaaatgcatc

SEQ ID NO: 65141 - DNA, 22 bp, synthetic construct
  misc_feature 1..22: note = chemically synthesized
  source 1..22: mol_type = other DNA
tgagctggtcatgagtaagggg

SEQ ID NO: 65142 - DNA, 22 bp, synthetic construct
  misc_feature 1..22: note = chemically synthesized
  source 1..22: mol_type = other DNA
gtcatgagtaaggggcatctgg

SEQ ID NO: 65143 - DNA, 22 bp, synthetic construct
  misc_feature 1..22: note = chemically synthesized
  source 1..22: mol_type = other DNA
ggggaggccctgccccaccaca

SEQ ID NO: 65144 - DNA, 22 bp, synthetic construct
  misc_feature 1..22: note = chemically synthesized
  source 1..22: mol_type = other DNA
ccccaccacagggccctgcctg

SEQ ID NO: 65145 - DNA, 22 bp, synthetic construct
  misc_feature 1..22: note = chemically synthesized
  source 1..22: mol_type = other DNA
cctggagatgggagcctcgtgg

SEQ ID NO: 65146 - DNA, 22 bp, synthetic construct
  misc_feature 1..22: note = chemically synthesized
  source 1..22: mol_type = other DNA
gagatgggagcctcgtggtatg

SEQ ID NO: 65147 - DNA, 22 bp, synthetic construct
  misc_feature 1..22: note = chemically synthesized
  source 1..22: mol_type = other DNA
gtggtatgggctggatagggat

SEQ ID NO: 65148 - DNA, 22 bp, synthetic construct
  misc_feature 1..22: note = chemically synthesized
  source 1..22: mol_type = other DNA
gatagggatgtgagagtcgaga

SEQ ID NO: 65149 - DNA, 22 bp, synthetic construct
  misc_feature 1..22: note = chemically synthesized
  source 1..22: mol_type = other DNA
ggggtctgcagcaaggaatcgg

SEQ ID NO: 65150 - DNA, 22 bp, synthetic construct
  misc_feature 1..22: note = chemically synthesized
  source 1..22: mol_type = other DNA
gggtctgcagcaaggaatcggg

SEQ ID NO: 65151 - DNA, 22 bp, synthetic construct
  misc_feature 1..22: note = chemically synthesized
  source 1..22: mol_type = other DNA
cagcaaggaatcgggtaagggg

SEQ ID NO: 65152 - DNA, 22 bp, synthetic construct
  misc_feature 1..22: note = chemically synthesized
  source 1..22: mol_type = other DNA
ggccaagtaaatcaagactgag

SEQ ID NO: 65153 - DNA, 22 bp, synthetic construct
  misc_feature 1..22: note = chemically synthesized
  source 1..22: mol_type = other DNA
agtggctggtcaggagaacaac

SEQ ID NO: 65154 - DNA, 22 bp, synthetic construct
  misc_feature 1..22: note = chemically synthesized
  source 1..22: mol_type = other DNA
gtcaggagaacaacagtggact

SEQ ID NO: 65155 - DNA, 22 bp, synthetic construct
  misc_feature 1..22: note = chemically synthesized
  source 1..22: mol_type = other DNA
catgggagctgaactcattggc

SEQ ID NO: 65156 - DNA, 22 bp, synthetic construct
  misc_feature 1..22: note = chemically synthesized
  source 1..22: mol_type = other DNA
atgggagctgaactcattggca

SEQ ID NO: 65157 - DNA, 22 bp, synthetic construct
  misc_feature 1..22: note = chemically synthesized
  source 1..22: mol_type = other DNA
aactcattggcaaagtgccccc

SEQ ID NO: 65158 - DNA, 22 bp, synthetic construct
  misc_feature 1..22: note = chemically synthesized
  source 1..22: mol_type = other DNA
attggcaaagtgcccccggaga

SEQ ID NO: 65159 - DNA, 22 bp, synthetic construct
  misc_feature 1..22: note = chemically synthesized
  source 1..22: mol_type = other DNA
gcaaagtgcccccggagagtgc

SEQ ID NO: 65160 - DNA, 22 bp, synthetic construct
  misc_feature 1..22: note = chemically synthesized
  source 1..22: mol_type = other DNA
gccaccccacaaacacacacac

SEQ ID NO: 65161 - DNA, 22 bp, synthetic construct
  misc_feature 1..22: note = chemically synthesized
  source 1..22: mol_type = other DNA
actatgcaccctccttcccagg

SEQ ID NO: 65162 - DNA, 22 bp, synthetic construct
  misc_feature 1..22: note = chemically synthesized
  source 1..22: mol_type = other DNA
tgcaccctccttcccaggcacc

SEQ ID NO: 65163 - DNA, 22 bp, synthetic construct
  misc_feature 1..22: note = chemically synthesized
  source 1..22: mol_type = other DNA
cttcccaggcaccagcttcctt

SEQ ID NO: 65164 - DNA, 22 bp, synthetic construct
  misc_feature 1..22: note = chemically synthesized
  source 1..22: mol_type = other DNA
cccaggcaccagcttccttctt

SEQ ID NO: 65165 - DNA, 22 bp, synthetic construct
  misc_feature 1..22: note = chemically synthesized
  source 1..22: mol_type = other DNA
ccaggcaccagcttccttcttt

SEQ ID NO: 65166 - DNA, 22 bp, synthetic construct
  misc_feature 1..22: note = chemically synthesized
  source 1..22: mol_type = other DNA
ccttctttgagagtcagtgcag

SEQ ID NO: 65167 - DNA, 22 bp, synthetic construct
  misc_feature 1..22: note = chemically synthesized
  source 1..22: mol_type = other DNA
cttctttgagagtcagtgcagg

SEQ ID NO: 65168 - DNA, 22 bp, synthetic construct
  misc_feature 1..22: note = chemically synthesized
  source 1..22: mol_type = other DNA
ctttgagagtcagtgcaggtca

SEQ ID NO: 65169 - DNA, 22 bp, synthetic construct
  misc_feature 1..22: note = chemically synthesized
  source 1..22: mol_type = other DNA
tttgagagtcagtgcaggtcac

SEQ ID NO: 65170 - DNA, 22 bp, synthetic construct
  misc_feature 1..22: note = chemically synthesized
  source 1..22: mol_type = other DNA
tgagagtcagtgcaggtcactg

SEQ ID NO: 65171 - DNA, 22 bp, synthetic construct
  misc_feature 1..22: note = chemically synthesized
  source 1..22: mol_type = other DNA
gagagtcagtgcaggtcactgg

SEQ ID NO: 65172 - DNA, 22 bp, synthetic construct
  misc_feature 1..22: note = chemically synthesized
  source 1..22: mol_type = other DNA
agagtcagtgcaggtcactggt

SEQ ID NO: 65173 - DNA, 22 bp, synthetic construct
  misc_feature 1..22: note = chemically synthesized
  source 1..22: mol_type = other DNA
gttaaggcgtgggttcgggatc

SEQ ID NO: 65174 - DNA, 22 bp, synthetic construct
  misc_feature 1..22: note = chemically synthesized
  source 1..22: mol_type = other DNA
aggcgtgggttcgggatctaat

SEQ ID NO: 65175 - DNA, 22 bp, synthetic construct
  misc_feature 1..22: note = chemically synthesized
  source 1..22: mol_type = other DNA
gggatctaatatctggggccaa

SEQ ID NO: 65176 - DNA, 22 bp, synthetic construct
  misc_feature 1..22: note = chemically synthesized
  source 1..22: mol_type = other DNA
atatctggggccaagccttagc

SEQ ID NO: 65177 - DNA, 22 bp, synthetic construct
  misc_feature 1..22: note = chemically synthesized
  source 1..22: mol_type = other DNA
gggccaagccttagctccatcg

SEQ ID NO: 65178 - DNA, 22 bp, synthetic construct
  misc_feature 1..22: note = chemically synthesized
  source 1..22: mol_type = other DNA
agctccatcgctctttttgtga

SEQ ID NO: 65179 - DNA, 22 bp, synthetic construct
  misc_feature 1..22: note = chemically synthesized
  source 1..22: mol_type = other DNA
gctccatcgctctttttgtgag

SEQ ID NO: 65180 - DNA, 22 bp, synthetic construct
  misc_feature 1..22: note = chemically synthesized
  source 1..22: mol_type = other DNA
catcgctctttttgtgagctct

SEQ ID NO: 65181 - DNA, 22 bp, synthetic construct
  misc_feature 1..22: note = chemically synthesized
  source 1..22: mol_type = other DNA
tttttgtgagctcttagacaag

SEQ ID NO: 65182 - DNA, 22 bp, synthetic construct
  misc_feature 1..22: note = chemically synthesized
  source 1..22: mol_type = other DNA
tttgtgagctcttagacaagcc

SEQ ID NO: 65183 - DNA, 22 bp, synthetic construct
  misc_feature 1..22: note = chemically synthesized
  source 1..22: mol_type = other DNA
ttgtgagctcttagacaagcca

SEQ ID NO: 65184 - DNA, 22 bp, synthetic construct
  misc_feature 1..22: note = chemically synthesized
  source 1..22: mol_type = other DNA
tgtgagctcttagacaagccac

SEQ ID NO: 65185 - DNA, 22 bp, synthetic construct
  misc_feature 1..22: note = chemically synthesized
  source 1..22: mol_type = other DNA
gtgagctcttagacaagccact

SEQ ID NO: 65186 - DNA, 22 bp, synthetic construct
  misc_feature 1..22: note = chemically synthesized
  source 1..22: mol_type = other DNA
tgagctcttagacaagccactt

SEQ ID NO: 65187 - DNA, 22 bp, synthetic construct
  misc_feature 1..22: note = chemically synthesized
  source 1..22: mol_type = other DNA
ttagacaagccacttaacctct

SEQ ID NO: 65188 - DNA, 22 bp, synthetic construct
  misc_feature 1..22: note = chemically synthesized
  source 1..22: mol_type = other DNA
agacaagccacttaacctctct

SEQ ID NO: 65189 - DNA, 22 bp, synthetic construct
  misc_feature 1..22: note = chemically synthesized
  source 1..22: mol_type = other DNA
gacaagccacttaacctctctg

SEQ ID NO: 65190 - DNA, 22 bp, synthetic construct
  misc_feature 1..22: note = chemically synthesized
  source 1..22: mol_type = other DNA
aacctctctgtgcctcggtttc

SEQ ID NO: 65191 - DNA, 22 bp, synthetic construct
  misc_feature 1..22: note = chemically synthesized
  source 1..22: mol_type = other DNA
acctctctgtgcctcggtttcc

SEQ ID NO: 65192 - DNA, 22 bp, synthetic construct
  misc_feature 1..22: note = chemically synthesized
  source 1..22: mol_type = other DNA
tctgtgcctcggtttcctcatc

SEQ ID NO: 65193 - DNA, 22 bp, synthetic construct
  misc_feature 1..22: note = chemically synthesized
  source 1..22: mol_type = other DNA
tgtgcctcggtttcctcatctg

SEQ ID NO: 65194 - DNA, 22 bp, synthetic construct
  misc_feature 1..22: note = chemically synthesized
  source 1..22: mol_type = other DNA
tgcctcggtttcctcatctgtg

SEQ ID NO: 65195 - DNA, 22 bp, synthetic construct
  misc_feature 1..22: note = chemically synthesized
  source 1..22: mol_type = other DNA
ggtttcctcatctgtgagatag

SEQ ID NO: 65196 - DNA, 22 bp, synthetic construct
  misc_feature 1..22: note = chemically synthesized
  source 1..22: mol_type = other DNA
cctcatctgtgagataggaaga

SEQ ID NO: 65197 - DNA, 22 bp, synthetic construct
  misc_feature 1..22: note = chemically synthesized
  source 1..22: mol_type = other DNA
ctcatctgtgagataggaagac

SEQ ID NO: 65198 - DNA, 22 bp, synthetic construct
  misc_feature 1..22: note = chemically synthesized
  source 1..22: mol_type = other DNA
atctgtgagataggaagactct

SEQ ID NO: 65199 - DNA, 22 bp, synthetic construct
  misc_feature 1..22: note = chemically synthesized
  source 1..22: mol_type = other DNA
tgagataggaagactctaagaa

SEQ ID NO: 65200 - DNA, 22 bp, synthetic construct
  misc_feature 1..22: note = chemically synthesized
  source 1..22: mol_type = other DNA
taagaagagtcacttccatcag

SEQ ID NO: 65201 - DNA, 22 bp, synthetic construct
  misc_feature 1..22: note = chemically synthesized
  source 1..22: mol_type = other DNA
agaagagtcacttccatcagga

SEQ ID NO: 65202 - DNA, 22 bp, synthetic construct
  misc_feature 1..22: note = chemically synthesized
  source 1..22: mol_type = other DNA
ccatcaggactgtgaagatcga

SEQ ID NO: 65203 - DNA, 22 bp, synthetic construct
  misc_feature 1..22: note = chemically synthesized
  source 1..22: mol_type = other DNA
catcaggactgtgaagatcgaa

SEQ ID NO: 65204 - DNA, 22 bp, synthetic construct
  misc_feature 1..22: note = chemically synthesized
  source 1..22: mol_type = other DNA
tgaagatcgaatgagataataa

SEQ ID NO: 65205 - DNA, 22 bp, synthetic construct
  misc_feature 1..22: note = chemically synthesized
  source 1..22: mol_type = other DNA
aagcacttcgggcagcctctgg

SEQ ID NO: 65206 - DNA, 22 bp, synthetic construct
  misc_feature 1..22: note = chemically synthesized
  source 1..22: mol_type = other DNA
agcacttcgggcagcctctggc

SEQ ID NO: 65207 - DNA, 22 bp, synthetic construct
  misc_feature 1..22: note = chemically synthesized
  source 1..22: mol_type = other DNA
cgggcagcctctggcatgtgat

SEQ ID NO: 65208 - DNA, 22 bp, synthetic construct
  misc_feature 1..22: note = chemically synthesized
  source 1..22: mol_type = other DNA
gggcagcctctggcatgtgatg

SEQ ID NO: 65209 - DNA, 22 bp, synthetic construct
  misc_feature 1..22: note = chemically synthesized
  source 1..22: mol_type = other DNA
tggcatgtgatgggccccaagt

SEQ ID NO: 65210 - DNA, 22 bp, synthetic construct
  misc_feature 1..22: note = chemically synthesized
  source 1..22: mol_type = other DNA
gcatgtgatgggccccaagtca

SEQ ID NO: 65211 - DNA, 22 bp, synthetic construct
  misc_feature 1..22: note = chemically synthesized
  source 1..22: mol_type = other DNA
accaccaaaggccatgaccttt

SEQ ID NO: 65212 - DNA, 22 bp, synthetic construct
  misc_feature 1..22: note = chemically synthesized
  source 1..22: mol_type = other DNA
tggggatgtgtcctggctctga

SEQ ID NO: 65213 - DNA, 22 bp, synthetic construct
  misc_feature 1..22: note = chemically synthesized
  source 1..22: mol_type = other DNA
ggggatgtgtcctggctctgaa

SEQ ID NO: 65214 - DNA, 22 bp, synthetic construct
  misc_feature 1..22: note = chemically synthesized
  source 1..22: mol_type = other DNA
gggatgtgtcctggctctgaaa

SEQ ID NO: 65215 - DNA, 22 bp, synthetic construct
  misc_feature 1..22: note = chemically synthesized
  source 1..22: mol_type = other DNA
gctctgaaaaaccatatagatg

SEQ ID NO: 65216 - DNA, 22 bp, synthetic construct
  misc_feature 1..22: note = chemically synthesized
  source 1..22: mol_type = other DNA
tgaaaaaccatatagatgggtc

SEQ ID NO: 65217 - DNA, 22 bp, synthetic construct
  misc_feature 1..22: note = chemically synthesized
  source 1..22: mol_type = other DNA
aaaaaccatatagatgggtctc

SEQ ID NO: 65218 - DNA, 22 bp, synthetic construct
  misc_feature 1..22: note = chemically synthesized
  source 1..22: mol_type = other DNA
aggggtctaagtgggggaacaa

SEQ ID NO: 65219 - DNA, 22 bp, synthetic construct
  misc_feature 1..22: note = chemically synthesized
  source 1..22: mol_type = other DNA
agtgggggaacaactgctgcgt

SEQ ID NO: 65220 - DNA, 22 bp, synthetic construct
  misc_feature 1..22: note = chemically synthesized
  source 1..22: mol_type = other DNA
ctgcgtttggccccagatttgg

SEQ ID NO: 65221 - DNA, 22 bp, synthetic construct
  misc_feature 1..22: note = chemically synthesized
  source 1..22: mol_type = other DNA
cgtttggccccagatttgggga

SEQ ID NO: 65222 - DNA, 22 bp, synthetic construct
  misc_feature 1..22: note = chemically synthesized
  source 1..22: mol_type = other DNA
ggccccagatttggggagcagc

SEQ ID NO: 65223 - DNA, 22 bp, synthetic construct
  misc_feature 1..22: note = chemically synthesized
  source 1..22: mol_type = other DNA
gccccagatttggggagcagca

SEQ ID NO: 65224 - DNA, 22 bp, synthetic construct
  misc_feature 1..22: note = chemically synthesized
  source 1..22: mol_type = other DNA
ggggagcagcacctgttgttga

SEQ ID NO: 65225 - DNA, 22 bp, synthetic construct
  misc_feature 1..22: note = chemically synthesized
  source 1..22: mol_type = other DNA
gggagcagcacctgttgttgag

SEQ ID NO: 65226 - DNA, 22 bp, synthetic construct
  misc_feature 1..22: note = chemically synthesized
  source 1..22: mol_type = other DNA
ttgttgagggacacctcctcag

SEQ ID NO: 65227 - DNA, 22 bp, synthetic construct
  misc_feature 1..22: note = chemically synthesized
  source 1..22: mol_type = other DNA
ttgagggacacctcctcagatt

SEQ ID NO: 65228 - DNA, 22 bp, synthetic construct
  misc_feature 1..22: note = chemically synthesized
  source 1..22: mol_type = other DNA
agggacacctcctcagattcaa

SEQ ID NO: 65229 - DNA, 22 bp, synthetic construct
  misc_feature 1..22: note = chemically synthesized
  source 1..22: mol_type = other DNA
ctcagattcaaacttccatttt

SEQ ID NO: 65230 - DNA, 22 bp, synthetic construct
  misc_feature 1..22: note = chemically synthesized
  source 1..22: mol_type = other DNA
agattcaaacttccattttttc

SEQ ID NO: 65231 - DNA, 22 bp, synthetic construct
  misc_feature 1..22: note = chemically synthesized
  source 1..22: mol_type = other DNA
aaacttccattttttccagaaa

SEQ ID NO: 65232 - DNA, 22 bp, synthetic construct
  misc_feature 1..22: note = chemically synthesized
  source 1..22: mol_type = other DNA
ccattttttccagaaaaggctg

SEQ ID NO: 65233 - DNA, 22 bp, synthetic construct
  misc_feature 1..22: note = chemically synthesized
  source 1..22: mol_type = other DNA
cattttttccagaaaaggctgt

SEQ ID NO: 65234 - DNA, 22 bp, synthetic construct
  misc_feature 1..22: note = chemically synthesized
  source 1..22: mol_type = other DNA
tttccagaaaaggctgtcaatc

SEQ ID NO: 65235 - DNA, 22 bp, synthetic construct
  misc_feature 1..22: note = chemically synthesized
  source 1..22: mol_type = other DNA
ttccagaaaaggctgtcaatcc

SEQ ID NO: 65236 - DNA, 22 bp, synthetic construct
  misc_feature 1..22: note = chemically synthesized
  source 1..22: mol_type = other DNA
tccagaaaaggctgtcaatccc

SEQ ID NO: 65237 - DNA, 22 bp, synthetic construct
  misc_feature 1..22: note = chemically synthesized
  source 1..22: mol_type = other DNA
ccagaaaaggctgtcaatcccc

SEQ ID NO: 65238 - DNA, 22 bp, synthetic construct
  misc_feature 1..22: note = chemically synthesized
  source 1..22: mol_type = other DNA
cagaaaaggctgtcaatcccct

SEQ ID NO: 65239 - DNA, 22 bp, synthetic construct
  misc_feature 1..22: note = chemically synthesized
  source 1..22: mol_type = other DNA
tcaatcccctctttaggggccg

SEQ ID NO: 65240 - DNA, 22 bp, synthetic construct
  misc_feature 1..22: note = chemically synthesized
  source 1..22: mol_type = other DNA
tttaggggccgtgctcattttg

SEQ ID NO: 65241 - DNA, 22 bp, synthetic construct
  misc_feature 1..22: note = chemically synthesized
  source 1..22: mol_type = other DNA
taggggccgtgctcattttggc

SEQ ID NO: 65242 - DNA, 22 bp, synthetic construct
  misc_feature 1..22: note = chemically synthesized
  source 1..22: mol_type = other DNA
aggggccgtgctcattttggct

SEQ ID NO: 65243 - DNA, 22 bp, synthetic construct
  misc_feature 1..22: note = chemically synthesized
  source 1..22: mol_type = other DNA
ggggccgtgctcattttggctt

SEQ ID NO: 65244 - DNA, 22 bp, synthetic construct
  misc_feature 1..22: note = chemically synthesized
  source 1..22: mol_type = other DNA
attttggctttccgaaggtgaa

SEQ ID NO: 65245 - DNA, 22 bp, synthetic construct
  misc_feature 1..22: note = chemically synthesized
  source 1..22: mol_type = other DNA
tggctttccgaaggtgaagggc

SEQ ID NO: 65246 - DNA, 22 bp, synthetic construct
  misc_feature 1..22: note = chemically synthesized
  source 1..22: mol_type = other DNA
ggctttccgaaggtgaagggcc

SEQ ID NO: 65247 - DNA, 22 bp, synthetic construct
  misc_feature 1..22: note = chemically synthesized
  source 1..22: mol_type = other DNA
gctttccgaaggtgaagggcca

SEQ ID NO: 65248 - DNA, 22 bp, synthetic construct
  misc_feature 1..22: note = chemically synthesized
  source 1..22: mol_type = other DNA
tccgaaggtgaagggccaggtg

SEQ ID NO: 65249 - DNA, 22 bp, synthetic construct
  misc_feature 1..22: note = chemically synthesized
  source 1..22: mol_type = other DNA
ccgaaggtgaagggccaggtgc

SEQ ID NO: 65250 - DNA, 22 bp, synthetic construct
  misc_feature 1..22: note = chemically synthesized
  source 1..22: mol_type = other DNA
cgaaggtgaagggccaggtgcc

SEQ ID NO: 65251 - DNA, 22 bp, synthetic construct
  misc_feature 1..22: note = chemically synthesized
  source 1..22: mol_type = other DNA
cagcatctttctgagcacctgt

SEQ ID NO: 65252 - DNA, 22 bp, synthetic construct
  misc_feature 1..22: note = chemically synthesized
  source 1..22: mol_type = other DNA
agcatctttctgagcacctgtg

SEQ ID NO: 65253 - DNA, 22 bp, synthetic construct
  misc_feature 1..22: note = chemically synthesized
  source 1..22: mol_type = other DNA
tctgagcacctgtgacatgcag

SEQ ID NO: 65254 - DNA, 22 bp, synthetic construct
  misc_feature 1..22: note = chemically synthesized
  source 1..22: mol_type = other DNA
ctgagcacctgtgacatgcaga

SEQ ID NO: 65255 - DNA, 22 bp, synthetic construct
  misc_feature 1..22: note = chemically synthesized
  source 1..22: mol_type = other DNA
tgagcacctgtgacatgcagag

SEQ ID NO: 65256 - DNA, 22 bp, synthetic construct
  misc_feature 1..22: note = chemically synthesized
  source 1..22: mol_type = other DNA
agcacctgtgacatgcagagga

SEQ ID NO: 65257 - DNA, 22 bp, synthetic construct
  misc_feature 1..22: note = chemically synthesized
  source 1..22: mol_type = other DNA
tgacatgcagaggatgtggggt

SEQ ID NO: 65258 - DNA, 22 bp, synthetic construct
  misc_feature 1..22: note = chemically synthesized
  source 1..22: mol_type = other DNA
cagctaggtggacttggatccg

SEQ ID NO: 65259 - DNA, 22 bp, synthetic construct
  misc_feature 1..22: note = chemically synthesized
  source 1..22: mol_type = other DNA
ggtggacttggatccgggggag

SEQ ID NO: 65260 - DNA, 22 bp, synthetic construct
  misc_feature 1..22: note = chemically synthesized
  source 1..22: mol_type = other DNA
ggatccgggggaggccctcagt

SEQ ID NO: 65261 - DNA, 22 bp, synthetic construct
  misc_feature 1..22: note = chemically synthesized
  source 1..22: mol_type = other DNA
gatccgggggaggccctcagtt

SEQ ID NO: 65262 - DNA, 22 bp, synthetic construct
  misc_feature 1..22: note = chemically synthesized
  source 1..22: mol_type = other DNA
agttctctgagccttggtttcc

SEQ ID NO: 65263 - DNA, 22 bp, synthetic construct
  misc_feature 1..22: note = chemically synthesized
  source 1..22: mol_type = other DNA
tctgagccttggtttcctcatc

SEQ ID NO: 65264 - DNA, 22 bp, synthetic construct
  misc_feature 1..22: note = chemically synthesized
  source 1..22: mol_type = other DNA
tgagccttggtttcctcatcta

SEQ ID NO: 65265 - DNA, 22 bp, synthetic construct
  misc_feature 1..22: note = chemically synthesized
  source 1..22: mol_type = other DNA
agccttggtttcctcatctata

SEQ ID NO: 65266 - DNA, 22 bp, synthetic construct
  misc_feature 1..22: note = chemically synthesized
  source 1..22: mol_type = other DNA
ggtttcctcatctataaaatag

SEQ ID NO: 65267 - DNA, 22 bp, synthetic construct
  misc_feature 1..22: note = chemically synthesized
  source 1..22: mol_type = other DNA
gtttcctcatctataaaatagg

SEQ ID NO: 65268 - DNA, 22 bp, synthetic construct
  misc_feature 1..22: note = chemically synthesized
  source 1..22: mol_type = other DNA
cctcatctataaaatagggata

SEQ ID NO: 65269 - DNA, 22 bp, synthetic construct
  misc_feature 1..22: note = chemically synthesized
  source 1..22: mol_type = other DNA
ctcatctataaaatagggataa

SEQ ID NO: 65270 - DNA, 22 bp, synthetic construct
  misc_feature 1..22: note = chemically synthesized
  source 1..22: mol_type = other DNA
atctataaaatagggataaaag

SEQ ID NO: 65271 - DNA, 22 bp, synthetic construct
  misc_feature 1..22: note = chemically synthesized
  source 1..22: mol_type = other DNA
taaaatagggataaaagtttct

SEQ ID NO: 65272 - DNA, 22 bp, synthetic construct
  misc_feature 1..22: note = chemically synthesized
  source 1..22: mol_type = other DNA
ctttcccacatagctcttctga

SEQ ID NO: 65273 - DNA, 22 bp, synthetic construct
  misc_feature 1..22: note = chemically synthesized
  source 1..22: mol_type = other DNA
tttcccacatagctcttctgag

SEQ ID NO: 65274 - DNA, 22 bp, synthetic construct
  misc_feature 1..22: note = chemically synthesized
  source 1..22: mol_type = other DNA
tcccacatagctcttctgaggc

SEQ ID NO: 65275 - DNA, 22 bp, synthetic construct
  misc_feature 1..22: note = chemically synthesized
  source 1..22: mol_type = other DNA
cccacatagctcttctgaggct

SEQ ID NO: 65276 - DNA, 22 bp, synthetic construct
  misc_feature 1..22: note = chemically synthesized
  source 1..22: mol_type = other DNA
ccacatagctcttctgaggctt

SEQ ID NO: 65277 - DNA, 22 bp, synthetic construct
  misc_feature 1..22: note = chemically synthesized
  source 1..22: mol_type = other DNA
ttctgaggcttagatgaggcga

SEQ ID NO: 65278 - DNA, 22 bp, synthetic construct
  misc_feature 1..22: note = chemically synthesized
  source 1..22: mol_type = other DNA
ctgaggcttagatgaggcgatg

SEQ ID NO: 65279 - DNA, 22 bp, synthetic construct
  misc_feature 1..22: note = chemically synthesized
  source 1..22: mol_type = other DNA
tgaggcttagatgaggcgatgc

SEQ ID NO: 65280 - DNA, 22 bp, synthetic construct
  misc_feature 1..22: note = chemically synthesized
  source 1..22: mol_type = other DNA
aggcttagatgaggcgatgctg

SEQ ID NO: 65281 - DNA, 22 bp, synthetic construct
  misc_feature 1..22: note = chemically synthesized
  source 1..22: mol_type = other DNA
agatgaggcgatgctggtgggg

SEQ ID NO: 65282 - DNA, 22 bp, synthetic construct
  misc_feature 1..22: note = chemically synthesized
  source 1..22: mol_type = other DNA
gatgaggcgatgctggtggggt

SEQ ID NO: 65283 - DNA, 22 bp, synthetic construct
  misc_feature 1..22: note = chemically synthesized
  source 1..22: mol_type = other DNA
gtggggtgtttaacacagagct

SEQ ID NO: 65284 - DNA, 22 bp, synthetic construct
  misc_feature 1..22: note = chemically synthesized
  source 1..22: mol_type = other DNA
aacacagagctctgttagcata

SEQ ID NO: 65285 - DNA, 22 bp, synthetic construct
  misc_feature 1..22: note = chemically synthesized
  source 1..22: mol_type = other DNA
acacagagctctgttagcataa

SEQ ID NO: 65286 - DNA, 22 bp, synthetic construct
  misc_feature 1..22: note = chemically synthesized
  source 1..22: mol_type = other DNA
tgttagcataatggacacttgt

SEQ ID NO: 65287 - DNA, 22 bp, synthetic construct
  misc_feature 1..22: note = chemically synthesized
  source 1..22: mol_type = other DNA
ttagcataatggacacttgtgt

SEQ ID NO: 65288 - DNA, 22 bp, synthetic construct
  misc_feature 1..22: note = chemically synthesized
  source 1..22: mol_type = other DNA
gcataatggacacttgtgtctg

SEQ ID NO: 65289 - DNA, 22 bp, synthetic construct
  misc_feature 1..22: note = chemically synthesized
  source 1..22: mol_type = other DNA
gtgtctgtcttcttataactca

SEQ ID NO: 65290 - DNA, 22 bp, synthetic construct
  misc_feature 1..22: note = chemically synthesized
  source 1..22: mol_type = other DNA
tgtctgtcttcttataactcat

SEQ ID NO: 65291 - DNA, 22 bp, synthetic construct
  misc_feature 1..22: note = chemically synthesized
  source 1..22: mol_type = other DNA
tcttcttataactcatttaatg

SEQ ID NO: 65292 - DNA, 22 bp, synthetic construct
  misc_feature 1..22: note = chemically synthesized
  source 1..22: mol_type = other DNA
cttataactcatttaatgaatg

SEQ ID NO: 65293 - DNA, 22 bp, synthetic construct
  misc_feature 1..22: note = chemically synthesized
  source 1..22: mol_type = other DNA
ttataactcatttaatgaatga

SEQ ID NO: 65294 - DNA, 22 bp, synthetic construct
  misc_feature 1..22: note = chemically synthesized
  source 1..22: mol_type = other DNA
ataactcatttaatgaatgaat

SEQ ID NO: 65295 - DNA, 22 bp, synthetic construct
  misc_feature 1..22: note = chemically synthesized
  source 1..22: mol_type = other DNA
taactcatttaatgaatgaatg

SEQ ID NO: 65296 - DNA, 22 bp, synthetic construct
  misc_feature 1..22: note = chemically synthesized
  source 1..22: mol_type = other DNA
atttaatgaatgaatgaagttt

SEQ ID NO: 65297 - DNA, 22 bp, synthetic construct
  misc_feature 1..22: note = chemically synthesized
  source 1..22: mol_type = other DNA
aatgaatgaatgaagtttgcac

SEQ ID NO: 65298 - DNA, 22 bp, synthetic construct
  misc_feature 1..22: note = chemically synthesized
  source 1..22: mol_type = other DNA
atgaatgaatgaagtttgcacc

SEQ ID NO: 65299 - DNA, 22 bp, synthetic construct
  misc_feature 1..22: note = chemically synthesized
  source 1..22: mol_type = other DNA
gcaccattttttcacctcctcc

SEQ ID NO: 65300 - DNA, 22 bp, synthetic construct
  misc_feature 1..22: note = chemically synthesized
  source 1..22: mol_type = other DNA
caccattttttcacctcctcca

SEQ ID NO: 65301 - DNA, 22 bp, synthetic construct
  misc_feature 1..22: note = chemically synthesized
  source 1..22: mol_type = other DNA
tttcacctcctccagtcacctt

SEQ ID NO: 65302 - DNA, 22 bp, synthetic construct
  misc_feature 1..22: note = chemically synthesized
  source 1..22: mol_type = other DNA
ttcacctcctccagtcaccttt

SEQ ID NO: 65303 - DNA, 22 bp, synthetic construct
  misc_feature 1..22: note = chemically synthesized
  source 1..22: mol_type = other DNA
tcacctcctccagtcacctttc

SEQ ID NO: 65304 - DNA, 22 bp, synthetic construct
  misc_feature 1..22: note = chemically synthesized
  source 1..22: mol_type = other DNA
cacctcctccagtcacctttca

SEQ ID NO: 65305 - DNA, 22 bp, synthetic construct
  misc_feature 1..22: note = chemically synthesized
  source 1..22: mol_type = other DNA
acctcctccagtcacctttcaa

SEQ ID NO: 65306 - DNA, 22 bp, synthetic construct
  misc_feature 1..22: note = chemically synthesized
  source 1..22: mol_type = other DNA
ctccagtcacctttcaaattag

SEQ ID NO: 65307 - DNA, 22 bp, synthetic construct
  misc_feature 1..22: note = chemically synthesized
  source 1..22: mol_type = other DNA
cagtcacctttcaaattagcca

SEQ ID NO: 65308 - DNA, 22 bp, synthetic construct
  misc_feature 1..22: note = chemically synthesized
  source 1..22: mol_type = other DNA
tcaaattagccaacttgcaaaa

SEQ ID NO: 65309 - DNA, 22 bp, synthetic construct
  misc_feature 1..22: note = chemically synthesized
  source 1..22: mol_type = other DNA
caaattagccaacttgcaaaac

SEQ ID NO: 65310 - DNA, 22 bp, synthetic construct
  misc_feature 1..22: note = chemically synthesized
  source 1..22: mol_type = other DNA
aaattagccaacttgcaaaacc

SEQ ID NO: 65311 - DNA, 22 bp, synthetic construct
  misc_feature 1..22: note = chemically synthesized
  source 1..22: mol_type = other DNA
gccaacttgcaaaaccccagca

SEQ ID NO: 65312 - DNA, 22 bp, synthetic construct
  misc_feature 1..22: note = chemically synthesized
  source 1..22: mol_type = other DNA
gcaaaaccccagcagacacact

SEQ ID NO: 65313 - DNA, 22 bp, synthetic construct
  misc_feature 1..22: note = chemically synthesized
  source 1..22: mol_type = other DNA
caaaaccccagcagacacactt

SEQ ID NO: 65314 - DNA, 22 bp, synthetic construct
  misc_feature 1..22: note = chemically synthesized
  source 1..22: mol_type = other DNA
tccttctgtgtgtaatctcctg

SEQ ID NO: 65315 - DNA, 22 bp, synthetic construct
  misc_feature 1..22: note = chemically synthesized
  source 1..22: mol_type = other DNA
ccttctgtgtgtaatctcctga

SEQ ID NO: 65316 - DNA, 22 bp, synthetic construct
  misc_feature 1..22: note = chemically synthesized
  source 1..22: mol_type = other DNA
cttctgtgtgtaatctcctgag

SEQ ID NO: 65317 - DNA, 22 bp, synthetic construct
  misc_feature 1..22: note = chemically synthesized
  source 1..22: mol_type = other DNA
ctgtgtgtaatctcctgagcca

SEQ ID NO: 65318 - DNA, 22 bp, synthetic construct
  misc_feature 1..22: note = chemically synthesized
  source 1..22: mol_type = other DNA
tgtgtgtaatctcctgagccac

SEQ ID NO: 65319 - DNA, 22 bp, synthetic construct
  misc_feature 1..22: note = chemically synthesized
  source 1..22: mol_type = other DNA
tgtgtaatctcctgagccactt

SEQ ID NO: 65320 - DNA, 22 bp, synthetic construct
  misc_feature 1..22: note = chemically synthesized
  source 1..22: mol_type = other DNA
ctgagccacttcctgtgtgttg

SEQ ID NO: 65321 - DNA, 22 bp, synthetic construct
  misc_feature 1..22: note = chemically synthesized
  source 1..22: mol_type = other DNA
agccacttcctgtgtgttgggg

SEQ ID NO: 65322 - DNA, 22 bp, synthetic construct
  misc_feature 1..22: note = chemically synthesized
  source 1..22: mol_type = other DNA
cctgtgtgttggggaggggagg

SEQ ID NO: 65323 - DNA, 22 bp, synthetic construct
  misc_feature 1..22: note = chemically synthesized
  source 1..22: mol_type = other DNA
ctgtgtgttggggaggggaggg

SEQ ID NO: 65324 - DNA, 22 bp, synthetic construct
  misc_feature 1..22: note = chemically synthesized
  source 1..22: mol_type = other DNA
tgtgttggggaggggagggggg

SEQ ID NO: 65325 - DNA, 22 bp, synthetic construct
  misc_feature 1..22: note = chemically synthesized
  source 1..22: mol_type = other DNA
gggaggggaggggggatttctg

SEQ ID NO: 65326 - DNA, 22 bp, synthetic construct
  misc_feature 1..22: note = chemically synthesized
  source 1..22: mol_type = other DNA
ctgcattttctggaactatgtg

SEQ ID NO: 65327 - DNA, 22 bp, synthetic construct
  misc_feature 1..22: note = chemically synthesized
  source 1..22: mol_type = other DNA
tgcattttctggaactatgtgg

SEQ ID NO: 65328 - DNA, 22 bp, synthetic construct
  misc_feature 1..22: note = chemically synthesized
  source 1..22: mol_type = other DNA
cattttctggaactatgtggcc

SEQ ID NO: 65329 - DNA, 22 bp, synthetic construct
  misc_feature 1..22: note = chemically synthesized
  source 1..22: mol_type = other DNA
tctggaactatgtggcctactc

SEQ ID NO: 65330 - DNA, 22 bp, synthetic construct
  misc_feature 1..22: note = chemically synthesized
  source 1..22: mol_type = other DNA
ctggaactatgtggcctactca

SEQ ID NO: 65331 - DNA, 22 bp, synthetic construct
  misc_feature 1..22: note = chemically synthesized
  source 1..22: mol_type = other DNA
tggaactatgtggcctactcac

SEQ ID NO: 65332 - DNA, 22 bp, synthetic construct
  misc_feature 1..22: note = chemically synthesized
  source 1..22: mol_type = other DNA
gaactatgtggcctactcacag

SEQ ID NO: 65333 - DNA, 22 bp, synthetic construct
  misc_feature 1..22: note = chemically synthesized
  source 1..22: mol_type = other DNA
tgtggcctactcacagcttctt

SEQ ID NO: 65334 - DNA, 22 bp, synthetic construct
  misc_feature 1..22: note = chemically synthesized
  source 1..22: mol_type = other DNA
ctcacagcttcttctttttttt

SEQ ID NO: 65335 - DNA, 22 bp, synthetic construct
  misc_feature 1..22: note = chemically synthesized
  source 1..22: mol_type = other DNA
acagcttcttcttttttttttt

SEQ ID NO: 65336 - DNA, 22 bp, synthetic construct
  misc_feature 1..22: note = chemically synthesized
  source 1..22: mol_type = other DNA
cttctttttttttttttttttg

SEQ ID NO: 65337 - DNA, 22 bp, synthetic construct
  misc_feature 1..22: note = chemically synthesized
  source 1..22: mol_type = other DNA
ttctttttttttttttttttga

SEQ ID NO: 65338 - DNA, 22 bp, synthetic construct
  misc_feature 1..22: note = chemically synthesized
  source 1..22: mol_type = other DNA
ctttttttttttttttttgaga

SEQ ID NO: 65339 - DNA, 22 bp, synthetic construct
  misc_feature 1..22: note = chemically synthesized
  source 1..22: mol_type = other DNA
tttttttttttttttttgagac

SEQ ID NO: 65340 - DNA, 22 bp, synthetic construct
  misc_feature 1..22: note = chemically synthesized
  source 1..22: mol_type = other DNA
tttttttttttttttgagacag

SEQ ID NO: 65341 - DNA, 22 bp, synthetic construct
  misc_feature 1..22: note = chemically synthesized
  source 1..22: mol_type = other DNA
ttttttttttttttgagacaga

SEQ ID NO: 65342 - DNA, 22 bp, synthetic construct
  misc_feature 1..22: note = chemically synthesized
  source 1..22: mol_type = other DNA
tttttttttttttgagacagag

SEQ ID NO: 65343 - DNA, 22 bp, synthetic construct
  misc_feature 1..22: note = chemically synthesized
  source 1..22: mol_type = other DNA
ttttttttttttgagacagagt

SEQ ID NO: 65344 - DNA, 22 bp, synthetic construct
  misc_feature 1..22: note = chemically synthesized
  source 1..22: mol_type = other DNA
tttttttttttgagacagagtc

SEQ ID NO: 65345 - DNA, 22 bp, synthetic construct
  misc_feature 1..22: note = chemically synthesized
  source 1..22: mol_type = other DNA
ttttttttttgagacagagtct

SEQ ID NO: 65346 - DNA, 22 bp, synthetic construct
  misc_feature 1..22: note = chemically synthesized
  source 1..22: mol_type = other DNA
tttttttttgagacagagtctc

SEQ ID NO: 65347 - DNA, 22 bp, synthetic construct
  misc_feature 1..22: note = chemically synthesized
  source 1..22: mol_type = other DNA
ttttttttgagacagagtctca

SEQ ID NO: 65348 - DNA, 22 bp, synthetic construct
  misc_feature 1..22: note = chemically synthesized
  source 1..22: mol_type = other DNA
tttttttgagacagagtctcac

SEQ ID NO: 65349 - DNA, 22 bp, synthetic construct
  misc_feature 1..22: note = chemically synthesized
  source 1..22: mol_type = other DNA
ttttttgagacagagtctcact

SEQ ID NO: 65350 - DNA, 22 bp, synthetic construct
  misc_feature 1..22: note = chemically synthesized
  source 1..22: mol_type = other DNA
tttttgagacagagtctcactc

SEQ ID NO: 65351 - DNA, 22 bp, synthetic construct
  misc_feature 1..22: note = chemically synthesized
  source 1..22: mol_type = other DNA
ttttgagacagagtctcactca

SEQ ID NO: 65352 - DNA, 22 bp, synthetic construct
  misc_feature 1..22: note = chemically synthesized
  source 1..22: mol_type = other DNA
tttgagacagagtctcactcag

SEQ ID NO: 65353 - DNA, 22 bp, synthetic construct
  misc_feature 1..22: note = chemically synthesized
  source 1..22: mol_type = other DNA
ttgagacagagtctcactcagt

SEQ ID NO: 65354 - DNA, 22 bp, synthetic construct
  misc_feature 1..22: note = chemically synthesized
  source 1..22: mol_type = other DNA
tgagacagagtctcactcagtc

SEQ ID NO: 65355 - DNA, 22 bp, synthetic construct
  misc_feature 1..22: note = chemically synthesized
  source 1..22: mol_type = other DNA
gagacagagtctcactcagtca

SEQ ID NO: 65356 - DNA, 22 bp, synthetic construct
  misc_feature 1..22: note = chemically synthesized
  source 1..22: mol_type = other DNA
agacagagtctcactcagtcac

SEQ ID NO: 65357 - DNA, 22 bp, synthetic construct
  misc_feature 1..22: note = chemically synthesized
  source 1..22: mol_type = other DNA
actcagtcacccaggctggagt

SEQ ID NO: 65358 - DNA, 22 bp, synthetic construct
  misc_feature 1..22: note = chemically synthesized
  source 1..22: mol_type = other DNA
agtcacccaggctggagtacag

SEQ ID NO: 65359 - DNA, 22 bp, synthetic construct
  misc_feature 1..22: note = chemically synthesized
  source 1..22: mol_type = other DNA
gagtacagtggcgcaatcttgg

SEQ ID NO: 65360 - DNA, 22 bp, synthetic construct
  misc_feature 1..22: note = chemically synthesized
  source 1..22: mol_type = other DNA
ggcttactgcaaactccacctc

SEQ ID NO: 65361 - DNA, 22 bp, synthetic construct
  misc_feature 1..22: note = chemically synthesized
  source 1..22: mol_type = other DNA
gcttactgcaaactccacctct

SEQ ID NO: 65362 - DNA, 22 bp, synthetic construct
  misc_feature 1..22: note = chemically synthesized
  source 1..22: mol_type = other DNA
actgcaaactccacctctcgaa

SEQ ID NO: 65363 - DNA, 22 bp, synthetic construct
  misc_feature 1..22: note = chemically synthesized
  source 1..22: mol_type = other DNA
ctgcaaactccacctctcgaat

SEQ ID NO: 65364 - DNA, 22 bp, synthetic construct
  misc_feature 1..22: note = chemically synthesized
  source 1..22: mol_type = other DNA
caaactccacctctcgaattct

SEQ ID NO: 65365 - DNA, 22 bp, synthetic construct
  misc_feature 1..22: note = chemically synthesized
  source 1..22: mol_type = other DNA
cacctctcgaattctggaatta

SEQ ID NO: 65366 - DNA, 22 bp, synthetic construct
  misc_feature 1..22: note = chemically synthesized
  source 1..22: mol_type = other DNA
tcgaattctggaattacgagcg

SEQ ID NO: 65367 - DNA, 22 bp, synthetic construct
  misc_feature 1..22: note = chemically synthesized
  source 1..22: mol_type = other DNA
gaattctggaattacgagcgat

SEQ ID NO: 65368 - DNA, 22 bp, synthetic construct
  misc_feature 1..22: note = chemically synthesized
  source 1..22: mol_type = other DNA
tggaattacgagcgattctcgt

SEQ ID NO: 65369 - DNA, 22 bp, synthetic construct
  misc_feature 1..22: note = chemically synthesized
  source 1..22: mol_type = other DNA
gaattacgagcgattctcgtgc

SEQ ID NO: 65370 - DNA, 22 bp, synthetic construct
  misc_feature 1..22: note = chemically synthesized
  source 1..22: mol_type = other DNA
cgagcgattctcgtgcctcagc

SEQ ID NO: 65371 - DNA, 22 bp, synthetic construct
  misc_feature 1..22: note = chemically synthesized
  source 1..22: mol_type = other DNA
tcgtgcctcagcctccagagta

SEQ ID NO: 65372 - DNA, 22 bp, synthetic construct
  misc_feature 1..22: note = chemically synthesized
  source 1..22: mol_type = other DNA
gtgcctcagcctccagagtagc

SEQ ID NO: 65373 - DNA, 22 bp, synthetic construct
  misc_feature 1..22: note = chemically synthesized
  source 1..22: mol_type = other DNA
agcctccagagtagctggcatt

SEQ ID NO: 65374 - DNA, 22 bp, synthetic construct
  misc_feature 1..22: note = chemically synthesized
  source 1..22: mol_type = other DNA
cagagtagctggcattacaggc

SEQ ID NO: 65375 - DNA, 22 bp, synthetic construct
  misc_feature 1..22: note = chemically synthesized
  source 1..22: mol_type = other DNA
gcattacaggcatgtgctacca

SEQ ID NO: 65376 - DNA, 22 bp, synthetic construct
  misc_feature 1..22: note = chemically synthesized
  source 1..22: mol_type = other DNA
caggcatgtgctaccaattcca

SEQ ID NO: 65377 - DNA, 22 bp, synthetic construct
  misc_feature 1..22: note = chemically synthesized
  source 1..22: mol_type = other DNA
ccaattccagttaatttttgta

SEQ ID NO: 65378 - DNA, 22 bp, synthetic construct
  misc_feature 1..22: note = chemically synthesized
  source 1..22: mol_type = other DNA
cagttaatttttgtatttttag

SEQ ID NO: 65379 - DNA, 22 bp, synthetic construct
  misc_feature 1..22: note = chemically synthesized
  source 1..22: mol_type = other DNA
atttttgtatttttagtagtga

SEQ ID NO: 65380 - DNA, 22 bp, synthetic construct
  misc_feature 1..22: note = chemically synthesized
  source 1..22: mol_type = other DNA
ttgtatttttagtagtgacagg

SEQ ID NO: 65381 - DNA, 22 bp, synthetic construct
  misc_feature 1..22: note = chemically synthesized
  source 1..22: mol_type = other DNA
tgtatttttagtagtgacaggg

SEQ ID NO: 65382 - DNA, 22 bp, synthetic construct
  misc_feature 1..22: note = chemically synthesized
  source 1..22: mol_type = other DNA
gtatttttagtagtgacagggt

SEQ ID NO: 65383 - DNA, 22 bp, synthetic construct
  misc_feature 1..22: note = chemically synthesized
  source 1..22: mol_type = other DNA
tatttttagtagtgacagggtt

SEQ ID NO: 65384 - DNA, 22 bp, synthetic construct
  misc_feature 1..22: note = chemically synthesized
  source 1..22: mol_type = other DNA
ttagtagtgacagggtttcacc

SEQ ID NO: 65385 - DNA, 22 bp, synthetic construct
  misc_feature 1..22: note = chemically synthesized
  source 1..22: mol_type = other DNA
tagtagtgacagggtttcacca

SEQ ID NO: 65386 - DNA, 22 bp, synthetic construct
  misc_feature 1..22: note = chemically synthesized
  source 1..22: mol_type = other DNA
agtagtgacagggtttcaccat

SEQ ID NO: 65387 - DNA, 22 bp, synthetic construct
  misc_feature 1..22: note = chemically synthesized
  source 1..22: mol_type = other DNA
gtagtgacagggtttcaccatg

SEQ ID NO: 65388 - DNA, 22 bp, synthetic construct
  misc_feature 1..22: note = chemically synthesized
  source 1..22: mol_type = other DNA
caccatgttggccaggctggtc

SEQ ID NO: 65389 - DNA, 22 bp, synthetic construct
  misc_feature 1..22: note = chemically synthesized
  source 1..22: mol_type = other DNA
accatgttggccaggctggtct

SEQ ID NO: 65390 - DNA, 22 bp, synthetic construct
  misc_feature 1..22: note = chemically synthesized
  source 1..22: mol_type = other DNA
gccaggctggtctcaaactcct

SEQ ID NO: 65391 - DNA, 22 bp, synthetic construct
  misc_feature 1..22: note = chemically synthesized
  source 1..22: mol_type = other DNA
gtctcaaactcctggcctcaag

SEQ ID NO: 65392 - DNA, 22 bp, synthetic construct
  misc_feature 1..22: note = chemically synthesized
  source 1..22: mol_type = other DNA
aaactcctggcctcaagttatc

SEQ ID NO: 65393 - DNA, 22 bp, synthetic construct
  misc_feature 1..22: note = chemically synthesized
  source 1..22: mol_type = other DNA
ctggcctcaagttatctgcccg

SEQ ID NO: 65394 - DNA, 22 bp, synthetic construct
  misc_feature 1..22: note = chemically synthesized
  source 1..22: mol_type = other DNA
gcctcaagttatctgcccgcct

SEQ ID NO: 65395 - DNA, 22 bp, synthetic construct
  misc_feature 1..22: note = chemically synthesized
  source 1..22: mol_type = other DNA
aagttatctgcccgcctcggcc

SEQ ID NO: 65396 - DNA, 22 bp, synthetic construct
  misc_feature 1..22: note = chemically synthesized
  source 1..22: mol_type = other DNA
tctgcccgcctcggcctcccaa

SEQ ID NO: 65397 - DNA, 22 bp, synthetic construct
  misc_feature 1..22: note = chemically synthesized
  source 1..22: mol_type = other DNA
cccgcctcggcctcccaaagtg

SEQ ID NO: 65398 - DNA, 22 bp, synthetic construct
  misc_feature 1..22: note = chemically synthesized
  source 1..22: mol_type = other DNA
ggcctcccaaagtgctggaatt

SEQ ID NO: 65399 - DNA, 22 bp, synthetic construct
  misc_feature 1..22: note = chemically synthesized
  source 1..22: mol_type = other DNA
ccaaagtgctggaattacaggt

SEQ ID NO: 65400 - DNA, 22 bp, synthetic construct
  misc_feature 1..22: note = chemically synthesized
  source 1..22: mol_type = other DNA
gaattacaggtgtgagccactg

SEQ ID NO: 65401 - DNA, 22 bp, synthetic construct
  misc_feature 1..22: note = chemically synthesized
  source 1..22: mol_type = other DNA
caggtgtgagccactgtgcctg

SEQ ID NO: 65402 - DNA, 22 bp, synthetic construct
  misc_feature 1..22: note = chemically synthesized
  source 1..22: mol_type = other DNA
tgcctggcctttactctttatc

SEQ ID NO: 65403 - DNA, 22 bp, synthetic construct
  misc_feature 1..22: note = chemically synthesized
  source 1..22: mol_type = other DNA
gcctttactctttatccttact

SEQ ID NO: 65404 - DNA, 22 bp, synthetic construct
  misc_feature 1..22: note = chemically synthesized
  source 1..22: mol_type = other DNA
tactctttatccttactcagac

SEQ ID NO: 65405 - DNA, 22 bp, synthetic construct
  misc_feature 1..22: note = chemically synthesized
  source 1..22: mol_type = other DNA
actctttatccttactcagaca

SEQ ID NO: 65406 - DNA, 22 bp, synthetic construct
  misc_feature 1..22: note = chemically synthesized
  source 1..22: mol_type = other DNA
ctctttatccttactcagacag

SEQ ID NO: 65407 - DNA, 22 bp, synthetic construct
  misc_feature 1..22: note = chemically synthesized
  source 1..22: mol_type = other DNA
tttatccttactcagacagaga

SEQ ID NO: 65408 - DNA, 22 bp, synthetic construct
  misc_feature 1..22: note = chemically synthesized
  source 1..22: mol_type = other DNA
tatccttactcagacagagaaa

SEQ ID NO: 65409 - DNA, 22 bp, synthetic construct
  misc_feature 1..22: note = chemically synthesized
  source 1..22: mol_type = other DNA
atccttactcagacagagaaaa

SEQ ID NO: 65410 - DNA, 22 bp, synthetic construct
  misc_feature 1..22: note = chemically synthesized
  source 1..22: mol_type = other DNA
tccttactcagacagagaaaaa

SEQ ID NO: 65411 - DNA, 22 bp, synthetic construct
  misc_feature 1..22: note = chemically synthesized
  source 1..22: mol_type = other DNA
actcagacagagaaaaataagg

SEQ ID NO: 65412 - DNA, 22 bp, synthetic construct
  misc_feature 1..22: note = chemically synthesized
  source 1..22: mol_type = other DNA
ctcagacagagaaaaataaggc

SEQ ID NO: 65413 - DNA, 22 bp, synthetic construct
  misc_feature 1..22: note = chemically synthesized
  source 1..22: mol_type = other DNA
agacagagaaaaataaggcaaa

SEQ ID NO: 65414 - DNA, 22 bp, synthetic construct
  misc_feature 1..22: note = chemically synthesized
  source 1..22: mol_type = other DNA
tacattataaggggcaacatag

SEQ ID NO: 65415 - DNA, 22 bp, synthetic construct
  misc_feature 1..22: note = chemically synthesized
  source 1..22: mol_type = other DNA
taaggggcaacatagttaaaag

SEQ ID NO: 65416 - DNA, 22 bp, synthetic construct
  misc_feature 1..22: note = chemically synthesized
  source 1..22: mol_type = other DNA
aaagaaggaataaaaatgcatc

SEQ ID NO: 65417 - DNA, 22 bp, synthetic construct
  misc_feature 1..22: note = chemically synthesized
  source 1..22: mol_type = other DNA
tagcttcatccccttcttgtta

SEQ ID NO: 65418 - DNA, 22 bp, synthetic construct
  misc_feature 1..22: note = chemically synthesized
  source 1..22: mol_type = other DNA
catccccttcttgttaaaatta

SEQ ID NO: 65419 - DNA, 22 bp, synthetic construct
  misc_feature 1..22: note = chemically synthesized
  source 1..22: mol_type = other DNA
atccccttcttgttaaaattac

SEQ ID NO: 65420 - DNA, 22 bp, synthetic construct
  misc_feature 1..22: note = chemically synthesized
  source 1..22: mol_type = other DNA
cttgttaaaattactaaaactc

SEQ ID NO: 65421 - DNA, 22 bp, synthetic construct
  misc_feature 1..22: note = chemically synthesized
  source 1..22: mol_type = other DNA
ttgttaaaattactaaaactca

SEQ ID NO: 65422 - DNA, 22 bp, synthetic construct
  misc_feature 1..22: note = chemically synthesized
  source 1..22: mol_type = other DNA
gttaaaattactaaaactcatg

SEQ ID NO: 65423 - DNA, 22 bp, synthetic construct
  misc_feature 1..22: note = chemically synthesized
  source 1..22: mol_type = other DNA
ttaaaattactaaaactcatgt

SEQ ID NO: 65424 - DNA, 22 bp, synthetic construct
  misc_feature 1..22: note = chemically synthesized
  source 1..22: mol_type = other DNA
aaattactaaaactcatgtttt

SEQ ID NO: 65425 - DNA, 22 bp, synthetic construct
  misc_feature 1..22: note = chemically synthesized
  source 1..22: mol_type = other DNA
ctaaaactcatgttttattgca

SEQ ID NO: 65426 - DNA, 22 bp, synthetic construct
  misc_feature 1..22: note = chemically synthesized
  source 1..22: mol_type = other DNA
aaactcatgttttattgcagct

SEQ ID NO: 65427 - DNA, 22 bp, synthetic construct
  misc_feature 1..22: note = chemically synthesized
  source 1..22: mol_type = other DNA
atgttttattgcagctaacctt

SEQ ID NO: 65428 - DNA, 22 bp, synthetic construct
  misc_feature 1..22: note = chemically synthesized
  source 1..22: mol_type = other DNA
tattgcagctaaccttttctga

SEQ ID NO: 65429 - DNA, 22 bp, synthetic construct
  misc_feature 1..22: note = chemically synthesized
  source 1..22: mol_type = other DNA
attgcagctaaccttttctgaa

SEQ ID NO: 65430 - DNA, 22 bp, synthetic construct
  misc_feature 1..22: note = chemically synthesized
  source 1..22: mol_type = other DNA
ttgcagctaaccttttctgaac

SEQ ID NO: 65431 - DNA, 22 bp, synthetic construct
  misc_feature 1..22: note = chemically synthesized
  source 1..22: mol_type = other DNA
cagctaaccttttctgaacttt

SEQ ID NO: 65432 - DNA, 22 bp, synthetic construct
  misc_feature 1..22: note = chemically synthesized
  source 1..22: mol_type = other DNA
accttttctgaactttatttta

SEQ ID NO: 65433 - DNA, 22 bp, synthetic construct
  misc_feature 1..22: note = chemically synthesized
  source 1..22: mol_type = other DNA
ttctgaactttattttaacttt

SEQ ID NO: 65434 - DNA, 22 bp, synthetic construct
  misc_feature 1..22: note = chemically synthesized
  source 1..22: mol_type = other DNA
tctgaactttattttaacttta

SEQ ID NO: 65435 - DNA, 22 bp, synthetic construct
  misc_feature 1..22: note = chemically synthesized
  source 1..22: mol_type = other DNA
ctgaactttattttaactttac

SEQ ID NO: 65436 - DNA, 22 bp, synthetic construct
  misc_feature 1..22: note = chemically synthesized
  source 1..22: mol_type = other DNA
tgaactttattttaactttact

SEQ ID NO: 65437 - DNA, 22 bp, synthetic construct
  misc_feature 1..22: note = chemically synthesized
  source 1..22: mol_type = other DNA
aactttattttaactttactct

SEQ ID NO: 65438 - DNA, 22 bp, synthetic construct
  misc_feature 1..22: note = chemically synthesized
  source 1..22: mol_type = other DNA
tattttaactttactcttttga

SEQ ID NO: 65439 - DNA, 22 bp, synthetic construct
  misc_feature 1..22: note = chemically synthesized
  source 1..22: mol_type = other DNA
attttaactttactcttttgag

SEQ ID NO: 65440 - DNA, 22 bp, synthetic construct
  misc_feature 1..22: note = chemically synthesized
  source 1..22: mol_type = other DNA
ttttaactttactcttttgagg

SEQ ID NO: 65441 - DNA, 22 bp, synthetic construct
  misc_feature 1..22: note = chemically synthesized
  source 1..22: mol_type = other DNA
taactttactcttttgaggtta

SEQ ID NO: 65442 - DNA, 22 bp, synthetic construct
  misc_feature 1..22: note = chemically synthesized
  source 1..22: mol_type = other DNA
aactttactcttttgaggttat

SEQ ID NO: 65443 - DNA, 22 bp, synthetic construct
  misc_feature 1..22: note = chemically synthesized
  source 1..22: mol_type = other DNA
actttactcttttgaggttatg

SEQ ID NO: 65444 - DNA, 22 bp, synthetic construct
  misc_feature 1..22: note = chemically synthesized
  source 1..22: mol_type = other DNA
tactcttttgaggttatgggcc

SEQ ID NO: 65445 - DNA, 22 bp, synthetic construct
  misc_feature 1..22: note = chemically synthesized
  source 1..22: mol_type = other DNA
actcttttgaggttatgggcct

SEQ ID NO: 65446 - DNA, 22 bp, synthetic construct
  misc_feature 1..22: note = chemically synthesized
  source 1..22: mol_type = other DNA
ctcttttgaggttatgggcctt

SEQ ID NO: 65447 - DNA, 22 bp, synthetic construct
  misc_feature 1..22: note = chemically synthesized
  source 1..22: mol_type = other DNA
ttttgaggttatgggccttgat

SEQ ID NO: 65448 - DNA, 22 bp, synthetic construct
  misc_feature 1..22: note = chemically synthesized
  source 1..22: mol_type = other DNA
ttgaggttatgggccttgatgg

SEQ ID NO: 65449 - DNA, 22 bp, synthetic construct
  misc_feature 1..22: note = chemically synthesized
  source 1..22: mol_type = other DNA
tgaggttatgggccttgatggt

SEQ ID NO: 65450 - DNA, 22 bp, synthetic construct
  misc_feature 1..22: note = chemically synthesized
  source 1..22: mol_type = other DNA
gaggttatgggccttgatggtc

SEQ ID NO: 65451 - DNA, 22 bp, synthetic construct
  misc_feature 1..22: note = chemically synthesized
  source 1..22: mol_type = other DNA
aggttatgggccttgatggtca

SEQ ID NO: 65452 - DNA, 22 bp, synthetic construct
  misc_feature 1..22: note = chemically synthesized
  source 1..22: mol_type = other DNA
tgggccttgatggtcattacgg

SEQ ID NO: 65453 - DNA, 22 bp, synthetic construct
  misc_feature 1..22: note = chemically synthesized
  source 1..22: mol_type = other DNA
gatggtcattacggattggaag

SEQ ID NO: 65454 - DNA, 22 bp, synthetic construct
  misc_feature 1..22: note = chemically synthesized
  source 1..22: mol_type = other DNA
atggtcattacggattggaagc

SEQ ID NO: 65455 - DNA, 22 bp, synthetic construct
  misc_feature 1..22: note = chemically synthesized
  source 1..22: mol_type = other DNA
cggattggaagcttttaagaga

SEQ ID NO: 65456 - DNA, 22 bp, synthetic construct
  misc_feature 1..22: note = chemically synthesized
  source 1..22: mol_type = other DNA
gaagcttttaagagactcaatg

SEQ ID NO: 65457 - DNA, 22 bp, synthetic construct
  misc_feature 1..22: note = chemically synthesized
  source 1..22: mol_type = other DNA
ttaagagactcaatgtgtccta

SEQ ID NO: 65458 - DNA, 22 bp, synthetic construct
  misc_feature 1..22: note = chemically synthesized
  source 1..22: mol_type = other DNA
taagagactcaatgtgtcctat

SEQ ID NO: 65459 - DNA, 22 bp, synthetic construct
  misc_feature 1..22: note = chemically synthesized
  source 1..22: mol_type = other DNA
aagagactcaatgtgtcctatt

SEQ ID NO: 65460 - DNA, 22 bp, synthetic construct
  misc_feature 1..22: note = chemically synthesized
  source 1..22: mol_type = other DNA
agagactcaatgtgtcctattg

SEQ ID NO: 65461 - DNA, 22 bp, synthetic construct
  misc_feature 1..22: note = chemically synthesized
  source 1..22: mol_type = other DNA
aatgtgtcctattgaactataa

SEQ ID NO: 65462 - DNA, 22 bp, synthetic construct
  misc_feature 1..22: note = chemically synthesized
  source 1..22: mol_type = other DNA
ttgaactataattatgatttga

SEQ ID NO: 65463 - DNA, 22 bp, synthetic construct
  misc_feature 1..22: note = chemically synthesized
  source 1..22: mol_type = other DNA
aactataattatgatttgattt

SEQ ID NO: 65464 - DNA, 22 bp, synthetic construct
  misc_feature 1..22: note = chemically synthesized
  source 1..22: mol_type = other DNA
taattatgatttgattttagat

SEQ ID NO: 65465 - DNA, 22 bp, synthetic construct
  misc_feature 1..22: note = chemically synthesized
  source 1..22: mol_type = other DNA
tgatttgattttagatggtcaa

SEQ ID NO: 65466 - DNA, 22 bp, synthetic construct
  misc_feature 1..22: note = chemically synthesized
  source 1..22: mol_type = other DNA
gattttagatggtcaacttgtc

SEQ ID NO: 65467 - DNA, 22 bp, synthetic construct
  misc_feature 1..22: note = chemically synthesized
  source 1..22: mol_type = other DNA
attttagatggtcaacttgtcg

SEQ ID NO: 65468 - DNA, 22 bp, synthetic construct
  misc_feature 1..22: note = chemically synthesized
  source 1..22: mol_type = other DNA
tagatggtcaacttgtcgcatt

SEQ ID NO: 65469 - DNA, 22 bp, synthetic construct
  misc_feature 1..22: note = chemically synthesized
  source 1..22: mol_type = other DNA
agatggtcaacttgtcgcattt

SEQ ID NO: 65470 - DNA, 22 bp, synthetic construct
  misc_feature 1..22: note = chemically synthesized
  source 1..22: mol_type = other DNA
gatggtcaacttgtcgcatttt

SEQ ID NO: 65471 - DNA, 22 bp, synthetic construct
  misc_feature 1..22: note = chemically synthesized
  source 1..22: mol_type = other DNA
gtcgcattttggtcaataggaa

SEQ ID NO: 65472 - DNA, 22 bp, synthetic construct
  misc_feature 1..22: note = chemically synthesized
  source 1..22: mol_type = other DNA
tcgcattttggtcaataggaac

SEQ ID NO: 65473 - DNA, 22 bp, synthetic construct
  misc_feature 1..22: note = chemically synthesized
  source 1..22: mol_type = other DNA
tggtcaataggaacccttttaa

SEQ ID NO: 65474 - DNA, 22 bp, synthetic construct
  misc_feature 1..22: note = chemically synthesized
  source 1..22: mol_type = other DNA
ggtcaataggaacccttttaag

SEQ ID NO: 65475 - DNA, 22 bp, synthetic construct
  misc_feature 1..22: note = chemically synthesized
  source 1..22: mol_type = other DNA
gtcaataggaacccttttaagt

SEQ ID NO: 65476 - DNA, 22 bp, synthetic construct
  misc_feature 1..22: note = chemically synthesized
  source 1..22: mol_type = other DNA
ttaagttatctctttatccctt

SEQ ID NO: 65477 - DNA, 22 bp, synthetic construct
  misc_feature 1..22: note = chemically synthesized
  source 1..22: mol_type = other DNA
taagttatctctttatcccttt

SEQ ID NO: 65478 - DNA, 22 bp, synthetic construct
  misc_feature 1..22: note = chemically synthesized
  source 1..22: mol_type = other DNA
aagttatctctttatccctttg

SEQ ID NO: 65479 - DNA, 22 bp, synthetic construct
  misc_feature 1..22: note = chemically synthesized
  source 1..22: mol_type = other DNA
agttatctctttatccctttga

SEQ ID NO: 65480 - DNA, 22 bp, synthetic construct
  misc_feature 1..22: note = chemically synthesized
  source 1..22: mol_type = other DNA
tctctttatccctttgacaatc

SEQ ID NO: 65481 - DNA, 22 bp, synthetic construct
  misc_feature 1..22: note = chemically synthesized
  source 1..22: mol_type = other DNA
tttatccctttgacaatctctg

SEQ ID NO: 65482 - DNA, 22 bp, synthetic construct
  misc_feature 1..22: note = chemically synthesized
  source 1..22: mol_type = other DNA
tatccctttgacaatctctgct

SEQ ID NO: 65483 - DNA, 22 bp, synthetic construct
  misc_feature 1..22: note = chemically synthesized
  source 1..22: mol_type = other DNA
atccctttgacaatctctgctg

SEQ ID NO: 65484 - DNA, 22 bp, synthetic construct
  misc_feature 1..22: note = chemically synthesized
  source 1..22: mol_type = other DNA
tccctttgacaatctctgctga

SEQ ID NO: 65485 - DNA, 22 bp, synthetic construct
  misc_feature 1..22: note = chemically synthesized
  source 1..22: mol_type = other DNA
tgacaatctctgctgatgtttc

SEQ ID NO: 65486 - DNA, 22 bp, synthetic construct
  misc_feature 1..22: note = chemically synthesized
  source 1..22: mol_type = other DNA
gacaatctctgctgatgtttca

SEQ ID NO: 65487 - DNA, 22 bp, synthetic construct
  misc_feature 1..22: note = chemically synthesized
  source 1..22: mol_type = other DNA
acaatctctgctgatgtttcag

SEQ ID NO: 65488 - DNA, 22 bp, synthetic construct
  misc_feature 1..22: note = chemically synthesized
  source 1..22: mol_type = other DNA
tgctgatgtttcagcaacacac

SEQ ID NO: 65489 - DNA, 22 bp, synthetic construct
  misc_feature 1..22: note = chemically synthesized
  source 1..22: mol_type = other DNA
ctgatgtttcagcaacacacac

SEQ ID NO: 65490 - DNA, 22 bp, synthetic construct
  misc_feature 1..22: note = chemically synthesized
  source 1..22: mol_type = other DNA
atgtttcagcaacacacacttg

SEQ ID NO: 65491 - DNA, 22 bp, synthetic construct
  misc_feature 1..22: note = chemically synthesized
  source 1..22: mol_type = other DNA
cagcaacacacacttgctttct

SEQ ID NO: 65492 - DNA, 22 bp, synthetic construct
  misc_feature 1..22: note = chemically synthesized
  source 1..22: mol_type = other DNA
agcaacacacacttgctttctg

SEQ ID NO: 65493 - DNA, 22 bp, synthetic construct
  misc_feature 1..22: note = chemically synthesized
  source 1..22: mol_type = other DNA
gctttctggcaaggccaccatg

SEQ ID NO: 65494 - DNA, 22 bp, synthetic construct
  misc_feature 1..22: note = chemically synthesized
  source 1..22: mol_type = other DNA
ctttctggcaaggccaccatgt

SEQ ID NO: 65495 - DNA, 22 bp, synthetic construct
  misc_feature 1..22: note = chemically synthesized
  source 1..22: mol_type = other DNA
tctggcaaggccaccatgttca

SEQ ID NO: 65496 - DNA, 22 bp, synthetic construct
  misc_feature 1..22: note = chemically synthesized
  source 1..22: mol_type = other DNA
ctggcaaggccaccatgttcat

SEQ ID NO: 65497 - DNA, 22 bp, synthetic construct
  misc_feature 1..22: note = chemically synthesized
  source 1..22: mol_type = other DNA
tggcaaggccaccatgttcatg

SEQ ID NO: 65498 - DNA, 22 bp, synthetic construct
  misc_feature 1..22: note = chemically synthesized
  source 1..22: mol_type = other DNA
gcaaggccaccatgttcatgtt

SEQ ID NO: 65499 - DNA, 22 bp, synthetic construct
  misc_feature 1..22: note = chemically synthesized
  source 1..22: mol_type = other DNA
atgttccaggtctgtcttcatt

SEQ ID NO: 65500 - DNA, 22 bp, synthetic construct
  misc_feature 1..22: note = chemically synthesized
  source 1..22: mol_type = other DNA
caggtctgtcttcattttctct

SEQ ID NO: 65501 - DNA, 22 bp, synthetic construct
  misc_feature 1..22: note = chemically synthesized
  source 1..22: mol_type = other DNA
tcttcattttctcttgccccaa

SEQ ID NO: 65502 - DNA, 22 bp, synthetic construct
  misc_feature 1..22: note = chemically synthesized
  source 1..22: mol_type = other DNA
cattttctcttgccccaagaca

SEQ ID NO: 65503 - DNA, 22 bp, synthetic construct
  misc_feature 1..22: note = chemically synthesized
  source 1..22: mol_type = other DNA
attttctcttgccccaagacat

SEQ ID NO: 65504 - DNA, 22 bp, synthetic construct
  misc_feature 1..22: note = chemically synthesized
  source 1..22: mol_type = other DNA
tctcttgccccaagacatggca

SEQ ID NO: 65505 - DNA, 22 bp, synthetic construct
  misc_feature 1..22: note = chemically synthesized
  source 1..22: mol_type = other DNA
ctcttgccccaagacatggcac

SEQ ID NO: 65506 - DNA, 22 bp, synthetic construct
  misc_feature 1..22: note = chemically synthesized
  source 1..22: mol_type = other DNA
tcttgccccaagacatggcact

SEQ ID NO: 65507 - DNA, 22 bp, synthetic construct
  misc_feature 1..22: note = chemically synthesized
  source 1..22: mol_type = other DNA
ttgccccaagacatggcactgg

SEQ ID NO: 65508 - DNA, 22 bp, synthetic construct
  misc_feature 1..22: note = chemically synthesized
  source 1..22: mol_type = other DNA
gccccaagacatggcactgggg

SEQ ID NO: 65509 - DNA, 22 bp, synthetic construct
  misc_feature 1..22: note = chemically synthesized
  source 1..22: mol_type = other DNA
ccccaagacatggcactggggt

SEQ ID NO: 65510 - DNA, 22 bp, synthetic construct
  misc_feature 1..22: note = chemically synthesized
  source 1..22: mol_type = other DNA
gggtatcttccctgggagagaa

SEQ ID NO: 65511 - DNA, 22 bp, synthetic construct
  misc_feature 1..22: note = chemically synthesized
  source 1..22: mol_type = other DNA
ccctgggagagaaagcaagcac

SEQ ID NO: 65512 - DNA, 22 bp, synthetic construct
  misc_feature 1..22: note = chemically synthesized
  source 1..22: mol_type = other DNA
cctgggagagaaagcaagcacg

SEQ ID NO: 65513 - DNA, 22 bp, synthetic construct
  misc_feature 1..22: note = chemically synthesized
  source 1..22: mol_type = other DNA
ggagagaaagcaagcacgcagt

SEQ ID NO: 65514 - DNA, 22 bp, synthetic construct
  misc_feature 1..22: note = chemically synthesized
  source 1..22: mol_type = other DNA
ctgggaaccacaggcagggctg

SEQ ID NO: 65515 - DNA, 22 bp, synthetic construct
  misc_feature 1..22: note = chemically synthesized
  source 1..22: mol_type = other DNA
tgggaaccacaggcagggctga

SEQ ID NO: 65516 - DNA, 22 bp, synthetic construct
  misc_feature 1..22: note = chemically synthesized
  source 1..22: mol_type = other DNA
ggaaccacaggcagggctgagc

SEQ ID NO: 65517 - DNA, 22 bp, synthetic construct
  misc_feature 1..22: note = chemically synthesized
  source 1..22: mol_type = other DNA
agcgtgcaagactcacccttgc

SEQ ID NO: 65518 - DNA, 22 bp, synthetic construct
  misc_feature 1..22: note = chemically synthesized
  source 1..22: mol_type = other DNA
acccttgcgtggggactatggg

SEQ ID NO: 65519 - DNA, 22 bp, synthetic construct
  misc_feature 1..22: note = chemically synthesized
  source 1..22: mol_type = other DNA
gcgtggggactatgggagaccc

SEQ ID NO: 65520 - DNA, 22 bp, synthetic construct
  misc_feature 1..22: note = chemically synthesized
  source 1..22: mol_type = other DNA
cgtggggactatgggagaccca

SEQ ID NO: 65521 - DNA, 22 bp, synthetic construct
  misc_feature 1..22: note = chemically synthesized
  source 1..22: mol_type = other DNA
tgggagacccagcaggacttga

SEQ ID NO: 65522 - DNA, 22 bp, synthetic construct
  misc_feature 1..22: note = chemically synthesized
  source 1..22: mol_type = other DNA
gagggcttattattcagaaata

SEQ ID NO: 65523 - DNA, 22 bp, synthetic construct
  misc_feature 1..22: note = chemically synthesized
  source 1..22: mol_type = other DNA
agggcttattattcagaaatac

SEQ ID NO: 65524 - DNA, 22 bp, synthetic construct
  misc_feature 1..22: note = chemically synthesized
  source 1..22: mol_type = other DNA
attattcagaaatacatgccct

SEQ ID NO: 65525 - DNA, 22 bp, synthetic construct
  misc_feature 1..22: note = chemically synthesized
  source 1..22: mol_type = other DNA
ttattcagaaatacatgccctg

SEQ ID NO: 65526 - DNA, 22 bp, synthetic construct
  misc_feature 1..22: note = chemically synthesized
  source 1..22: mol_type = other DNA
ttcagaaatacatgccctgcgt

SEQ ID NO: 65527 - DNA, 22 bp, synthetic construct
  misc_feature 1..22: note = chemically synthesized
  source 1..22: mol_type = other DNA
agaaatacatgccctgcgtggg

SEQ ID NO: 65528 - DNA, 22 bp, synthetic construct
  misc_feature 1..22: note = chemically synthesized
  source 1..22: mol_type = other DNA
cgtgggtggcttagataacaga

SEQ ID NO: 65529 - DNA, 22 bp, synthetic construct
  misc_feature 1..22: note = chemically synthesized
  source 1..22: mol_type = other DNA
agataacagagagcaatagggc

SEQ ID NO: 65530 - DNA, 22 bp, synthetic construct
  misc_feature 1..22: note = chemically synthesized
  source 1..22: mol_type = other DNA
gataacagagagcaatagggct

SEQ ID NO: 65531 - DNA, 22 bp, synthetic construct
  misc_feature 1..22: note = chemically synthesized
  source 1..22: mol_type = other DNA
agagccctattgctctctgtta

SEQ ID NO: 65532 - DNA, 22 bp, synthetic construct
  misc_feature 1..22: note = chemically synthesized
  source 1..22: mol_type = other DNA
ttgctctctgttatctaagcca

SEQ ID NO: 65533 - DNA, 22 bp, synthetic construct
  misc_feature 1..22: note = chemically synthesized
  source 1..22: mol_type = other DNA
ctctctgttatctaagccaccc

SEQ ID NO: 65534 - DNA, 22 bp, synthetic construct
  misc_feature 1..22: note = chemically synthesized
  source 1..22: mol_type = other DNA
tctgttatctaagccacccacg

SEQ ID NO: 65535 - DNA, 22 bp, synthetic construct
  misc_feature 1..22: note = chemically synthesized
  source 1..22: mol_type = other DNA
tgttatctaagccacccacgca

SEQ ID NO: 65536 - DNA, 22 bp, synthetic construct
  misc_feature 1..22: note = chemically synthesized
  source 1..22: mol_type = other DNA
ttatctaagccacccacgcagg

SEQ ID NO: 65537 - DNA, 22 bp, synthetic construct
  misc_feature 1..22: note = chemically synthesized
  source 1..22: mol_type = other DNA
tctaagccacccacgcagggca

SEQ ID NO: 65538 - DNA, 22 bp, synthetic construct
  misc_feature 1..22: note = chemically synthesized
  source 1..22: mol_type = other DNA
agccacccacgcagggcatgta

SEQ ID NO: 65539 - DNA, 22 bp, synthetic construct
  misc_feature 1..22: note = chemically synthesized
  source 1..22: mol_type = other DNA
ctgaataataagccctcaagtc

SEQ ID NO: 65540 - DNA, 22 bp, synthetic construct
  misc_feature 1..22: note = chemically synthesized
  source 1..22: mol_type = other DNA
tgaataataagccctcaagtcc

SEQ ID NO: 65541 - DNA, 22 bp, synthetic construct
  misc_feature 1..22: note = chemically synthesized
  source 1..22: mol_type = other DNA
aataataagccctcaagtcctg

SEQ ID NO: 65542 - DNA, 22 bp, synthetic construct
  misc_feature 1..22: note = chemically synthesized
  source 1..22: mol_type = other DNA
aagtcctgctgggtctcccata

SEQ ID NO: 65543 - DNA, 22 bp, synthetic construct
  misc_feature 1..22: note = chemically synthesized
  source 1..22: mol_type = other DNA
ctgggtctcccatagtccccac

SEQ ID NO: 65544 - DNA, 22 bp, synthetic construct
  misc_feature 1..22: note = chemically synthesized
  source 1..22: mol_type = other DNA
ggtctcccatagtccccacgca

SEQ ID NO: 65545 - DNA, 22 bp, synthetic construct
  misc_feature 1..22: note = chemically synthesized
  source 1..22: mol_type = other DNA
ccatagtccccacgcaagggtg

SEQ ID NO: 65546 - DNA, 22 bp, synthetic construct
  misc_feature 1..22: note = chemically synthesized
  source 1..22: mol_type = other DNA
gcacgctcagccctgcctgtgg

SEQ ID NO: 65547 - DNA, 22 bp, synthetic construct
  misc_feature 1..22: note = chemically synthesized
  source 1..22: mol_type = other DNA
cacgctcagccctgcctgtggt

SEQ ID NO: 65548 - DNA, 22 bp, synthetic construct
  misc_feature 1..22: note = chemically synthesized
  source 1..22: mol_type = other DNA
agccctgcctgtggttcccaga

SEQ ID NO: 65549 - DNA, 22 bp, synthetic construct
  misc_feature 1..22: note = chemically synthesized
  source 1..22: mol_type = other DNA
cctgtggttcccagaaggcctc

SEQ ID NO: 65550 - DNA, 22 bp, synthetic construct
  misc_feature 1..22: note = chemically synthesized
  source 1..22: mol_type = other DNA
tggttcccagaaggcctctgtc

SEQ ID NO: 65551 - DNA, 22 bp, synthetic construct
  misc_feature 1..22: note = chemically synthesized
  source 1..22: mol_type = other DNA
ccagaaggcctctgtcactgcg

SEQ ID NO: 65552 - DNA, 22 bp, synthetic construct
  misc_feature 1..22: note = chemically synthesized
  source 1..22: mol_type = other DNA
tgtcactgcgtgcttgctttct

SEQ ID NO: 65553 - DNA, 22 bp, synthetic construct
  misc_feature 1..22: note = chemically synthesized
  source 1..22: mol_type = other DNA
tcactgcgtgcttgctttctct

SEQ ID NO: 65554 - DNA, 22 bp, synthetic construct
  misc_feature 1..22: note = chemically synthesized
  source 1..22: mol_type = other DNA
cgtgcttgctttctctcccagg

SEQ ID NO: 65555 - DNA, 22 bp, synthetic construct
  misc_feature 1..22: note = chemically synthesized
  source 1..22: mol_type = other DNA
gctttctctcccagggaagata

SEQ ID NO: 65556 - DNA, 22 bp, synthetic construct
  misc_feature 1..22: note = chemically synthesized
  source 1..22: mol_type = other DNA
ctttctctcccagggaagatac

SEQ ID NO: 65557 - DNA, 22 bp, synthetic construct
  misc_feature 1..22: note = chemically synthesized
  source 1..22: mol_type = other DNA
tctctcccagggaagatacccc

SEQ ID NO: 65558 - DNA, 22 bp, synthetic construct
  misc_feature 1..22: note = chemically synthesized
  source 1..22: mol_type = other DNA
ctctcccagggaagatacccca

SEQ ID NO: 65559 - DNA, 22 bp, synthetic construct
  misc_feature 1..22: note = chemically synthesized
  source 1..22: mol_type = other DNA
tctcccagggaagataccccag

SEQ ID NO: 65560 - DNA, 22 bp, synthetic construct
  misc_feature 1..22: note = chemically synthesized
  source 1..22: mol_type = other DNA
tcccagggaagataccccagtg

SEQ ID NO: 65561 - DNA, 22 bp, synthetic construct
  misc_feature 1..22: note = chemically synthesized
  source 1..22: mol_type = other DNA
ccagggaagataccccagtgcc

SEQ ID NO: 65562 - DNA, 22 bp, synthetic construct
  misc_feature 1..22: note = chemically synthesized
  source 1..22: mol_type = other DNA
ggggcaagagaaaatgaagaca

SEQ ID NO: 65563 - DNA, 22 bp, synthetic construct
  misc_feature 1..22: note = chemically synthesized
  source 1..22: mol_type = other DNA
gggcaagagaaaatgaagacag

SEQ ID NO: 65564 - DNA, 22 bp, synthetic construct
  misc_feature 1..22: note = chemically synthesized
  source 1..22: mol_type = other DNA
gaacatgaacatggtggccttg

SEQ ID NO: 65565 - DNA, 22 bp, synthetic construct
  misc_feature 1..22: note = chemically synthesized
  source 1..22: mol_type = other DNA
gccagaaagcaagtgtgtgttg

SEQ ID NO: 65566 - DNA, 22 bp, synthetic construct
  misc_feature 1..22: note = chemically synthesized
  source 1..22: mol_type = other DNA
ccagaaagcaagtgtgtgttgc

SEQ ID NO: 65567 - DNA, 22 bp, synthetic construct
  misc_feature 1..22: note = chemically synthesized
  source 1..22: mol_type = other DNA
ctgaaacatcagcagagattgt

SEQ ID NO: 65568 - DNA, 22 bp, synthetic construct
  misc_feature 1..22: note = chemically synthesized
  source 1..22: mol_type = other DNA
aaacatcagcagagattgtcaa

SEQ ID NO: 65569 - DNA, 22 bp, synthetic construct
  misc_feature 1..22: note = chemically synthesized
  source 1..22: mol_type = other DNA
tcaaagggataaagagataact

SEQ ID NO: 65570 - DNA, 22 bp, synthetic construct
  misc_feature 1..22: note = chemically synthesized
  source 1..22: mol_type = other DNA
aaaagggttcctattgaccaaa

SEQ ID NO: 65571 - DNA, 22 bp, synthetic construct
  misc_feature 1..22: note = chemically synthesized
  source 1..22: mol_type = other DNA
aaagggttcctattgaccaaaa

SEQ ID NO: 65572 - DNA, 22 bp, synthetic construct
  misc_feature 1..22: note = chemically synthesized
  source 1..22: mol_type = other DNA
ctattgaccaaaatgcgacaag

SEQ ID NO: 65573 - DNA, 22 bp, synthetic construct
  misc_feature 1..22: note = chemically synthesized
  source 1..22: mol_type = other DNA
ttgaccaaaatgcgacaagttg

SEQ ID NO: 65574 - DNA, 22 bp, synthetic construct
  misc_feature 1..22: note = chemically synthesized
  source 1..22: mol_type = other DNA
accaaaatgcgacaagttgacc

SEQ ID NO: 65575 - DNA, 22 bp, synthetic construct
  misc_feature 1..22: note = chemically synthesized
  source 1..22: mol_type = other DNA
accatctaaaatcaaatcataa

SEQ ID NO: 65576 - DNA, 22 bp, synthetic construct
  misc_feature 1..22: note = chemically synthesized
  source 1..22: mol_type = other DNA
aaatcaaatcataattatagtt

SEQ ID NO: 65577 - DNA, 22 bp, synthetic construct
  misc_feature 1..22: note = chemically synthesized
  source 1..22: mol_type = other DNA
tagttcaataggacacattgag

SEQ ID NO: 65578 - DNA, 22 bp, synthetic construct
  misc_feature 1..22: note = chemically synthesized
  source 1..22: mol_type = other DNA
aataggacacattgagtctctt

SEQ ID NO: 65579 - DNA, 22 bp, synthetic construct
  misc_feature 1..22: note = chemically synthesized
  source 1..22: mol_type = other DNA
agtctcttaaaagcttccaatc

SEQ ID NO: 65580 - DNA, 22 bp, synthetic construct
  misc_feature 1..22: note = chemically synthesized
  source 1..22: mol_type = other DNA
ttaaaagcttccaatccgtaat

SEQ ID NO: 65581 - DNA, 22 bp, synthetic construct
  misc_feature 1..22: note = chemically synthesized
  source 1..22: mol_type = other DNA
aaaagcttccaatccgtaatga

SEQ ID NO: 65582 - DNA, 22 bp, synthetic construct
  misc_feature 1..22: note = chemically synthesized
  source 1..22: mol_type = other DNA
aaagcttccaatccgtaatgac

SEQ ID NO: 65583 - DNA, 22 bp, synthetic construct
  misc_feature 1..22: note = chemically synthesized
  source 1..22: mol_type = other DNA
ccaatccgtaatgaccatcaag

SEQ ID NO: 65584 - DNA, 22 bp, synthetic construct
  misc_feature 1..22: note = chemically synthesized
  source 1..22: mol_type = other DNA
caatccgtaatgaccatcaagg

SEQ ID NO: 65585 - DNA, 22 bp, synthetic construct
  misc_feature 1..22: note = chemically synthesized
  source 1..22: mol_type = other DNA
aaaagagtaaagttaaaataaa

SEQ ID NO: 65586 - DNA, 22 bp, synthetic construct
  misc_feature 1..22: note = chemically synthesized
  source 1..22: mol_type = other DNA
aaataaagttcagaaaaggtta

SEQ ID NO: 65587 - DNA, 22 bp, synthetic construct
  misc_feature 1..22: note = chemically synthesized
  source 1..22: mol_type = other DNA
agaaaaggttagctgcaataaa

SEQ ID NO: 65588 - DNA, 22 bp, synthetic construct
  misc_feature 1..22: note = chemically synthesized
  source 1..22: mol_type = other DNA
gctgcaataaaacatgagtttt

SEQ ID NO: 65589 - DNA, 22 bp, synthetic construct
  misc_feature 1..22: note = chemically synthesized
  source 1..22: mol_type = other DNA
caataaaacatgagttttagta

SEQ ID NO: 65590 - DNA, 22 bp, synthetic construct
  misc_feature 1..22: note = chemically synthesized
  source 1..22: mol_type = other DNA
tagtaattttaacaagaagggg

SEQ ID NO: 65591 - DNA, 22 bp, synthetic construct
  misc_feature 1..22: note = chemically synthesized
  source 1..22: mol_type = other DNA
agtaattttaacaagaagggga

SEQ ID NO: 65592 - DNA, 22 bp, synthetic construct
  misc_feature 1..22: note = chemically synthesized
  source 1..22: mol_type = other DNA
gtaattttaacaagaaggggat

SEQ ID NO: 65593 - DNA, 22 bp, synthetic construct
  misc_feature 1..22: note = chemically synthesized
  source 1..22: mol_type = other DNA
taacaagaaggggatgaagcta

SEQ ID NO: 65594 - DNA, 22 bp, synthetic construct
  misc_feature 1..22: note = chemically synthesized
  source 1..22: mol_type = other DNA
aacaagaaggggatgaagctat

SEQ ID NO: 65595 - DNA, 22 bp, synthetic construct
  misc_feature 1..22: note = chemically synthesized
  source 1..22: mol_type = other DNA
acaagaaggggatgaagctata

SEQ ID NO: 65596 - DNA, 22 bp, synthetic construct
  misc_feature 1..22: note = chemically synthesized
  source 1..22: mol_type = other DNA
tagatgcatttttattccttct

SEQ ID NO: 65597 - DNA, 22 bp, synthetic construct
  misc_feature 1..22: note = chemically synthesized
  source 1..22: mol_type = other DNA
ttattccttcttttaactatgt

SEQ ID NO: 65598 - DNA, 22 bp, synthetic construct
  misc_feature 1..22: note = chemically synthesized
  source 1..22: mol_type = other DNA
tattccttcttttaactatgtt

SEQ ID NO: 65599 - DNA, 22 bp, synthetic construct
  misc_feature 1..22: note = chemically synthesized
  source 1..22: mol_type = other DNA
attccttcttttaactatgttg

SEQ ID NO: 65600 - DNA, 22 bp, synthetic construct
  misc_feature 1..22: note = chemically synthesized
  source 1..22: mol_type = other DNA
ttccttcttttaactatgttgc

SEQ ID NO: 65601 - DNA, 22 bp, synthetic construct
  misc_feature 1..22: note = chemically synthesized
  source 1..22: mol_type = other DNA
cttcttttaactatgttgcccc

SEQ ID NO: 65602 - DNA, 22 bp, synthetic construct
  misc_feature 1..22: note = chemically synthesized
  source 1..22: mol_type = other DNA
cttttaactatgttgcccctta

SEQ ID NO: 65603 - DNA, 22 bp, synthetic construct
  misc_feature 1..22: note = chemically synthesized
  source 1..22: mol_type = other DNA
ttttaactatgttgccccttat

SEQ ID NO: 65604 - DNA, 22 bp, synthetic construct
  misc_feature 1..22: note = chemically synthesized
  source 1..22: mol_type = other DNA
ttaactatgttgccccttataa

SEQ ID NO: 65605 - DNA, 22 bp, synthetic construct
  misc_feature 1..22: note = chemically synthesized
  source 1..22: mol_type = other DNA
taactatgttgccccttataat

SEQ ID NO: 65606 - DNA, 22 bp, synthetic construct
  misc_feature 1..22: note = chemically synthesized
  source 1..22: mol_type = other DNA
aactatgttgccccttataatg

SEQ ID NO: 65607 - DNA, 22 bp, synthetic construct
  misc_feature 1..22: note = chemically synthesized
  source 1..22: mol_type = other DNA
actatgttgccccttataatgt

SEQ ID NO: 65608 - DNA, 22 bp, synthetic construct
  misc_feature 1..22: note = chemically synthesized
  source 1..22: mol_type = other DNA
tgttgccccttataatgtatag

SEQ ID NO: 65609 - DNA, 22 bp, synthetic construct
  misc_feature 1..22: note = chemically synthesized
  source 1..22: mol_type = other DNA
ccccttataatgtatagctttg

SEQ ID NO: 65610 - DNA, 22 bp, synthetic construct
  misc_feature 1..22: note = chemically synthesized
  source 1..22: mol_type = other DNA
ataatgtatagctttgccttat

SEQ ID NO: 65611 - DNA, 22 bp, synthetic construct
  misc_feature 1..22: note = chemically synthesized
  source 1..22: mol_type = other DNA
taatgtatagctttgccttatt

SEQ ID NO: 65612 - DNA, 22 bp, synthetic construct
  misc_feature 1..22: note = chemically synthesized
  source 1..22: mol_type = other DNA
tgccttatttttctctgtctga

SEQ ID NO: 65613 - DNA, 22 bp, synthetic construct
  misc_feature 1..22: note = chemically synthesized
  source 1..22: mol_type = other DNA
gccttatttttctctgtctgag

SEQ ID NO: 65614 - DNA, 22 bp, synthetic construct
  misc_feature 1..22: note = chemically synthesized
  source 1..22: mol_type = other DNA
ccttatttttctctgtctgagt

SEQ ID NO: 65615 - DNA, 22 bp, synthetic construct
  misc_feature 1..22: note = chemically synthesized
  source 1..22: mol_type = other DNA
atttttctctgtctgagtaagg

SEQ ID NO: 65616 - DNA, 22 bp, synthetic construct
  misc_feature 1..22: note = chemically synthesized
  source 1..22: mol_type = other DNA
tttttctctgtctgagtaagga

SEQ ID NO: 65617 - DNA, 22 bp, synthetic construct
  misc_feature 1..22: note = chemically synthesized
  source 1..22: mol_type = other DNA
ttctctgtctgagtaaggataa

SEQ ID NO: 65618 - DNA, 22 bp, synthetic construct
  misc_feature 1..22: note = chemically synthesized
  source 1..22: mol_type = other DNA
tctctgtctgagtaaggataaa

SEQ ID NO: 65619 - DNA, 22 bp, synthetic construct
  misc_feature 1..22: note = chemically synthesized
  source 1..22: mol_type = other DNA
ctctgtctgagtaaggataaag

SEQ ID NO: 65620 - DNA, 22 bp, synthetic construct
  misc_feature 1..22: note = chemically synthesized
  source 1..22: mol_type = other DNA
tctgtctgagtaaggataaaga

SEQ ID NO: 65621 - DNA, 22 bp, synthetic construct
  misc_feature 1..22: note = chemically synthesized
  source 1..22: mol_type = other DNA
tgtctgagtaaggataaagagt

SEQ ID NO: 65622 - DNA, 22 bp, synthetic construct
  misc_feature 1..22: note = chemically synthesized
  source 1..22: mol_type = other DNA
tctgagtaaggataaagagtaa

SEQ ID NO: 65623 - DNA, 22 bp, synthetic construct
  misc_feature 1..22: note = chemically synthesized
  source 1..22: mol_type = other DNA
agtaaggataaagagtaaaggc

SEQ ID NO: 65624 - DNA, 22 bp, synthetic construct
  misc_feature 1..22: note = chemically synthesized
  source 1..22: mol_type = other DNA
acacctgtaattccagcacttt

SEQ ID NO: 65625 - DNA, 22 bp, synthetic construct
  misc_feature 1..22: note = chemically synthesized
  source 1..22: mol_type = other DNA
taattccagcactttgggaggc

SEQ ID NO: 65626 - DNA, 22 bp, synthetic construct
  misc_feature 1..22: note = chemically synthesized
  source 1..22: mol_type = other DNA
cagcactttgggaggccgaggc

SEQ ID NO: 65627 - DNA, 22 bp, synthetic construct
  misc_feature 1..22: note = chemically synthesized
  source 1..22: mol_type = other DNA
tgggaggccgaggcgggcagat

SEQ ID NO: 65628 - DNA, 22 bp, synthetic construct
  misc_feature 1..22: note = chemically synthesized
  source 1..22: mol_type = other DNA
gggaggccgaggcgggcagata

SEQ ID NO: 65629 - DNA, 22 bp, synthetic construct
  misc_feature 1..22: note = chemically synthesized
  source 1..22: mol_type = other DNA
ggaggccgaggcgggcagataa

SEQ ID NO: 65630 - DNA, 22 bp, synthetic construct
  misc_feature 1..22: note = chemically synthesized
  source 1..22: mol_type = other DNA
gaggccaggagtttgagaccag

SEQ ID NO: 65631 - DNA, 22 bp, synthetic construct
  misc_feature 1..22: note = chemically synthesized
  source 1..22: mol_type = other DNA
aggccaggagtttgagaccagc

SEQ ID NO: 65632 - DNA, 22 bp, synthetic construct
  misc_feature 1..22: note = chemically synthesized
  source 1..22: mol_type = other DNA
gagaccagcctggccaacatgg

SEQ ID NO: 65633 - DNA, 22 bp, synthetic construct
  misc_feature 1..22: note = chemically synthesized
  source 1..22: mol_type = other DNA
agaccagcctggccaacatggt

SEQ ID NO: 65634 - DNA, 22 bp, synthetic construct
  misc_feature 1..22: note = chemically synthesized
  source 1..22: mol_type = other DNA
gccaacatggtgaaaccctgtc

SEQ ID NO: 65635 - DNA, 22 bp, synthetic construct
  misc_feature 1..22: note = chemically synthesized
  source 1..22: mol_type = other DNA
tcactactaaaaatacaaaaat

SEQ ID NO: 65636 - DNA, 22 bp, synthetic construct
  misc_feature 1..22: note = chemically synthesized
  source 1..22: mol_type = other DNA
ctaaaaatacaaaaattaactg

SEQ ID NO: 65637 - DNA, 22 bp, synthetic construct
  misc_feature 1..22: note = chemically synthesized
  source 1..22: mol_type = other DNA
aaaatacaaaaattaactggaa

SEQ ID NO: 65638 - DNA, 22 bp, synthetic construct
  misc_feature 1..22: note = chemically synthesized
  source 1..22: mol_type = other DNA
actggaattggtagcacatgcc

SEQ ID NO: 65639 - DNA, 22 bp, synthetic construct
  misc_feature 1..22: note = chemically synthesized
  source 1..22: mol_type = other DNA
gaattggtagcacatgcctgta

SEQ ID NO: 65640 - DNA, 22 bp, synthetic construct
  misc_feature 1..22: note = chemically synthesized
  source 1..22: mol_type = other DNA
gtagcacatgcctgtaatgcca

SEQ ID NO: 65641 - DNA, 22 bp, synthetic construct
  misc_feature 1..22: note = chemically synthesized
  source 1..22: mol_type = other DNA
taatgccagctactctggaggc

SEQ ID NO: 65642 - DNA, 22 bp, synthetic construct
  misc_feature 1..22: note = chemically synthesized
  source 1..22: mol_type = other DNA
ctctggaggctgaggcacgaga

SEQ ID NO: 65643 - DNA, 22 bp, synthetic construct
  misc_feature 1..22: note = chemically synthesized
  source 1..22: mol_type = other DNA
tggaggctgaggcacgagaatc

SEQ ID NO: 65644 - DNA, 22 bp, synthetic construct
  misc_feature 1..22: note = chemically synthesized
  source 1..22: mol_type = other DNA
gaggctgaggcacgagaatcgc

SEQ ID NO: 65645 - DNA, 22 bp, synthetic construct
  misc_feature 1..22: note = chemically synthesized
  source 1..22: mol_type = other DNA
aggcacgagaatcgctcgtaat

SEQ ID NO: 65646 - DNA, 22 bp, synthetic construct
  misc_feature 1..22: note = chemically synthesized
  source 1..22: mol_type = other DNA
gtaattccagaattcgagaggt

SEQ ID NO: 65647 - DNA, 22 bp, synthetic construct
  misc_feature 1..22: note = chemically synthesized
  source 1..22: mol_type = other DNA
cagaattcgagaggtggagttt

SEQ ID NO: 65648 - DNA, 22 bp, synthetic construct
  misc_feature 1..22: note = chemically synthesized
  source 1..22: mol_type = other DNA
gagaggtggagtttgcagtaag

SEQ ID NO: 65649 - DNA, 22 bp, synthetic construct
  misc_feature 1..22: note = chemically synthesized
  source 1..22: mol_type = other DNA
gcagtaagccaagattgcgcca

SEQ ID NO: 65650 - DNA, 22 bp, synthetic construct
  misc_feature 1..22: note = chemically synthesized
  source 1..22: mol_type = other DNA
cagtaagccaagattgcgccac

SEQ ID NO: 65651 - DNA, 22 bp, synthetic construct
  misc_feature 1..22: note = chemically synthesized
  source 1..22: mol_type = other DNA
cgccactgtactccagcctggg

SEQ ID NO: 65652 - DNA, 22 bp, synthetic construct
  misc_feature 1..22: note = chemically synthesized
  source 1..22: mol_type = other DNA
tactccagcctgggtgactgag

SEQ ID NO: 65653 - DNA, 22 bp, synthetic construct
  misc_feature 1..22: note = chemically synthesized
  source 1..22: mol_type = other DNA
cagcctgggtgactgagtgaga

SEQ ID NO: 65654 - DNA, 22 bp, synthetic construct
  misc_feature 1..22: note = chemically synthesized
  source 1..22: mol_type = other DNA
ggtgactgagtgagactctgtc

SEQ ID NO: 65655 - DNA, 22 bp, synthetic construct
  misc_feature 1..22: note = chemically synthesized
  source 1..22: mol_type = other DNA
agtgagactctgtctcaaaaaa

SEQ ID NO: 65656 - DNA, 22 bp, synthetic construct
  misc_feature 1..22: note = chemically synthesized
  source 1..22: mol_type = other DNA
tgtctcaaaaaaaaaaaaaaaa

SEQ ID NO: 65657 - DNA, 22 bp, synthetic construct
  misc_feature 1..22: note = chemically synthesized
  source 1..22: mol_type = other DNA
tctcaaaaaaaaaaaaaaaaag

SEQ ID NO: 65658 - DNA, 22 bp, synthetic construct
  misc_feature 1..22: note = chemically synthesized
  source 1..22: mol_type = other DNA
aaaaaaaaaaaaaaaaagaaga

SEQ ID NO: 65659 - DNA, 22 bp, synthetic construct
  misc_feature 1..22: note = chemically synthesized
  source 1..22: mol_type = other DNA
tgagtaggccacatagttccag

SEQ ID NO: 65660 - DNA, 22 bp, synthetic construct
  misc_feature 1..22: note = chemically synthesized
  source 1..22: mol_type = other DNA
cagaaaatgcagaaatcccccc

SEQ ID NO: 65661 - DNA, 22 bp, synthetic construct
  misc_feature 1..22: note = chemically synthesized
  source 1..22: mol_type = other DNA
ccctccccaacacacaggaagt

SEQ ID NO: 65662 - DNA, 22 bp, synthetic construct
  misc_feature 1..22: note = chemically synthesized
  source 1..22: mol_type = other DNA
cccaacacacaggaagtggctc

SEQ ID NO: 65663 - DNA, 22 bp, synthetic construct
  misc_feature 1..22: note = chemically synthesized
  source 1..22: mol_type = other DNA
aggagattacacacagaaggaa

SEQ ID NO: 65664 - DNA, 22 bp, synthetic construct
  misc_feature 1..22: note = chemically synthesized
  source 1..22: mol_type = other DNA
cacacagaaggaaagtgtgtct

SEQ ID NO: 65665 - DNA, 22 bp, synthetic construct
  misc_feature 1..22: note = chemically synthesized
  source 1..22: mol_type = other DNA
ctggggttttgcaagttggcta

SEQ ID NO: 65666 - DNA, 22 bp, synthetic construct
  misc_feature 1..22: note = chemically synthesized
  source 1..22: mol_type = other DNA
gggttttgcaagttggctaatt

SEQ ID NO: 65667 - DNA, 22 bp, synthetic construct
  misc_feature 1..22: note = chemically synthesized
  source 1..22: mol_type = other DNA
tgcaagttggctaatttgaaag

SEQ ID NO: 65668 - DNA, 22 bp, synthetic construct
  misc_feature 1..22: note = chemically synthesized
  source 1..22: mol_type = other DNA
gcaagttggctaatttgaaagg

SEQ ID NO: 65669 - DNA, 22 bp, synthetic construct
  misc_feature 1..22: note = chemically synthesized
  source 1..22: mol_type = other DNA
caagttggctaatttgaaaggt

SEQ ID NO: 65670 - DNA, 22 bp, synthetic construct
  misc_feature 1..22: note = chemically synthesized
  source 1..22: mol_type = other DNA
gctaatttgaaaggtgactgga

SEQ ID NO: 65671 - DNA, 22 bp, synthetic construct
  misc_feature 1..22: note = chemically synthesized
  source 1..22: mol_type = other DNA
atttgaaaggtgactggaggag

SEQ ID NO: 65672 - DNA, 22 bp, synthetic construct
  misc_feature 1..22: note = chemically synthesized
  source 1..22: mol_type = other DNA
gaaaggtgactggaggaggtga

SEQ ID NO: 65673 - DNA, 22 bp, synthetic construct
  misc_feature 1..22: note = chemically synthesized
  source 1..22: mol_type = other DNA
aaaggtgactggaggaggtgaa

SEQ ID NO: 65674 - DNA, 22 bp, synthetic construct
  misc_feature 1..22: note = chemically synthesized
  source 1..22: mol_type = other DNA
gaggaggtgaaaaaatggtgca

SEQ ID NO: 65675 - DNA, 22 bp, synthetic construct
  misc_feature 1..22: note = chemically synthesized
  source 1..22: mol_type = other DNA
cattcattcattaaatgagtta

SEQ ID NO: 65676 - DNA, 22 bp, synthetic construct
  misc_feature 1..22: note = chemically synthesized
  source 1..22: mol_type = other DNA
attcattcattaaatgagttat

SEQ ID NO: 65677 - DNA, 22 bp, synthetic construct
  misc_feature 1..22: note = chemically synthesized
  source 1..22: mol_type = other DNA
attcattaaatgagttataaga

SEQ ID NO: 65678 - DNA, 22 bp, synthetic construct
  misc_feature 1..22: note = chemically synthesized
  source 1..22: mol_type = other DNA
attaaatgagttataagaagac

SEQ ID NO: 65679 - DNA, 22 bp, synthetic construct
  misc_feature 1..22: note = chemically synthesized
  source 1..22: mol_type = other DNA
aatgagttataagaagacagac

SEQ ID NO: 65680 - DNA, 22 bp, synthetic construct
  misc_feature 1..22: note = chemically synthesized
  source 1..22: mol_type = other DNA
taagaagacagacacaagtgtc

SEQ ID NO: 65681 - DNA, 22 bp, synthetic construct
  misc_feature 1..22: note = chemically synthesized
  source 1..22: mol_type = other DNA
tgctaacagagctctgtgttaa

SEQ ID NO: 65682 - DNA, 22 bp, synthetic construct
  misc_feature 1..22: note = chemically synthesized
  source 1..22: mol_type = other DNA
acagagctctgtgttaaacacc

SEQ ID NO: 65683 - DNA, 22 bp, synthetic construct
  misc_feature 1..22: note = chemically synthesized
  source 1..22: mol_type = other DNA
tgtgttaaacaccccaccagca

SEQ ID NO: 65684 - DNA, 22 bp, synthetic construct
  misc_feature 1..22: note = chemically synthesized
  source 1..22: mol_type = other DNA
tgttaaacaccccaccagcatc

SEQ ID NO: 65685 - DNA, 22 bp, synthetic construct
  misc_feature 1..22: note = chemically synthesized
  source 1..22: mol_type = other DNA
aacaccccaccagcatcgcctc

SEQ ID NO: 65686 - DNA, 22 bp, synthetic construct
  misc_feature 1..22: note = chemically synthesized
  source 1..22: mol_type = other DNA
atctaagcctcagaagagctat

SEQ ID NO: 65687 - DNA, 22 bp, synthetic construct
  misc_feature 1..22: note = chemically synthesized
  source 1..22: mol_type = other DNA
agcctcagaagagctatgtggg

SEQ ID NO: 65688 - DNA, 22 bp, synthetic construct
  misc_feature 1..22: note = chemically synthesized
  source 1..22: mol_type = other DNA
agaagagctatgtgggaaagaa

SEQ ID NO: 65689 - DNA, 22 bp, synthetic construct
  misc_feature 1..22: note = chemically synthesized
  source 1..22: mol_type = other DNA
tgtgggaaagaaacttttatcc

SEQ ID NO: 65690 - DNA, 22 bp, synthetic construct
  misc_feature 1..22: note = chemically synthesized
  source 1..22: mol_type = other DNA
ttatccctattttatagatgag

SEQ ID NO: 65691 - DNA, 22 bp, synthetic construct
  misc_feature 1..22: note = chemically synthesized
  source 1..22: mol_type = other DNA
tatccctattttatagatgagg

SEQ ID NO: 65692 - DNA, 22 bp, synthetic construct
  misc_feature 1..22: note = chemically synthesized
  source 1..22: mol_type = other DNA
atccctattttatagatgagga

SEQ ID NO: 65693 - DNA, 22 bp, synthetic construct
  misc_feature 1..22: note = chemically synthesized
  source 1..22: mol_type = other DNA
tccctattttatagatgaggaa

SEQ ID NO: 65694 - DNA, 22 bp, synthetic construct
  misc_feature 1..22: note = chemically synthesized
  source 1..22: mol_type = other DNA
ttttatagatgaggaaaccaag

SEQ ID NO: 65695 - DNA, 22 bp, synthetic construct
  misc_feature 1..22: note = chemically synthesized
  source 1..22: mol_type = other DNA
tatagatgaggaaaccaaggct

SEQ ID NO: 65696 - DNA, 22 bp, synthetic construct
  misc_feature 1..22: note = chemically synthesized
  source 1..22: mol_type = other DNA
atagatgaggaaaccaaggctc

SEQ ID NO: 65697 - DNA, 22 bp, synthetic construct
  misc_feature 1..22: note = chemically synthesized
  source 1..22: mol_type = other DNA
tagatgaggaaaccaaggctca

SEQ ID NO: 65698 - DNA, 22 bp, synthetic construct
  misc_feature 1..22: note = chemically synthesized
  source 1..22: mol_type = other DNA
agagaactgagggcctcccccg

SEQ ID NO: 65699 - DNA, 22 bp, synthetic construct
  misc_feature 1..22: note = chemically synthesized
  source 1..22: mol_type = other DNA
agggcctcccccggatccaagt

SEQ ID NO: 65700 - DNA, 22 bp, synthetic construct
  misc_feature 1..22: note = chemically synthesized
  source 1..22: mol_type = other DNA
ccccggatccaagtccacctag

SEQ ID NO: 65701 - DNA, 22 bp, synthetic construct
  misc_feature 1..22: note = chemically synthesized
  source 1..22: mol_type = other DNA
gctgcagtcaccccacatcctc

SEQ ID NO: 65702 - DNA, 22 bp, synthetic construct
  misc_feature 1..22: note = chemically synthesized
  source 1..22: mol_type = other DNA
cagtcaccccacatcctctgca

SEQ ID NO: 65703 - DNA, 22 bp, synthetic construct
  misc_feature 1..22: note = chemically synthesized
  source 1..22: mol_type = other DNA
tgcatgtcacaggtgctcagaa

SEQ ID NO: 65704 - DNA, 22 bp, synthetic construct
  misc_feature 1..22: note = chemically synthesized
  source 1..22: mol_type = other DNA
catgtcacaggtgctcagaaag

SEQ ID NO: 65705 - DNA, 22 bp, synthetic construct
  misc_feature 1..22: note = chemically synthesized
  source 1..22: mol_type = other DNA
agaaagatgctgaaggcacctg

SEQ ID NO: 65706 - DNA, 22 bp, synthetic construct
  misc_feature 1..22: note = chemically synthesized
  source 1..22: mol_type = other DNA
aaggcacctggcccttcacctt

SEQ ID NO: 65707 - DNA, 22 bp, synthetic construct
  misc_feature 1..22: note = chemically synthesized
  source 1..22: mol_type = other DNA
gcccttcaccttcggaaagcca

SEQ ID NO: 65708 - DNA, 22 bp, synthetic construct
  misc_feature 1..22: note = chemically synthesized
  source 1..22: mol_type = other DNA
caccttcggaaagccaaaatga

SEQ ID NO: 65709 - DNA, 22 bp, synthetic construct
  misc_feature 1..22: note = chemically synthesized
  source 1..22: mol_type = other DNA
accttcggaaagccaaaatgag

SEQ ID NO: 65710 - DNA, 22 bp, synthetic construct
  misc_feature 1..22: note = chemically synthesized
  source 1..22: mol_type = other DNA
cggaaagccaaaatgagcacgg

SEQ ID NO: 65711 - DNA, 22 bp, synthetic construct
  misc_feature 1..22: note = chemically synthesized
  source 1..22: mol_type = other DNA
ggaaagccaaaatgagcacggc

SEQ ID NO: 65712 - DNA, 22 bp, synthetic construct
  misc_feature 1..22: note = chemically synthesized
  source 1..22: mol_type = other DNA
aagaggggattgacagcctttt

SEQ ID NO: 65713 - DNA, 22 bp, synthetic construct
  misc_feature 1..22: note = chemically synthesized
  source 1..22: mol_type = other DNA
acagccttttctggaaaaaatg

SEQ ID NO: 65714 - DNA, 22 bp, synthetic construct
  misc_feature 1..22: note = chemically synthesized
  source 1..22: mol_type = other DNA
ttctggaaaaaatggaagtttg

SEQ ID NO: 65715 - DNA, 22 bp, synthetic construct
  misc_feature 1..22: note = chemically synthesized
  source 1..22: mol_type = other DNA
tctggaaaaaatggaagtttga

SEQ ID NO: 65716 - DNA, 22 bp, synthetic construct
  misc_feature 1..22: note = chemically synthesized
  source 1..22: mol_type = other DNA
ctggaaaaaatggaagtttgaa

SEQ ID NO: 65717 - DNA, 22 bp, synthetic construct
  misc_feature 1..22: note = chemically synthesized
  source 1..22: mol_type = other DNA
tggaaaaaatggaagtttgaat

SEQ ID NO: 65718 - DNA, 22 bp, synthetic construct
  misc_feature 1..22: note = chemically synthesized
  source 1..22: mol_type = other DNA
gaaaaaatggaagtttgaatct

SEQ ID NO: 65719 - DNA, 22 bp, synthetic construct
  misc_feature 1..22: note = chemically synthesized
  source 1..22: mol_type = other DNA
gaatctgaggaggtgtccctca

SEQ ID NO: 65720 - DNA, 22 bp, synthetic construct
  misc_feature 1..22: note = chemically synthesized
  source 1..22: mol_type = other DNA
aatctgaggaggtgtccctcaa

SEQ ID NO: 65721 - DNA, 22 bp, synthetic construct
  misc_feature 1..22: note = chemically synthesized
  source 1..22: mol_type = other DNA
aggaggtgtccctcaacaacag

SEQ ID NO: 65722 - DNA, 22 bp, synthetic construct
  misc_feature 1..22: note = chemically synthesized
  source 1..22: mol_type = other DNA
aacaacaggtgctgctccccaa

SEQ ID NO: 65723 - DNA, 22 bp, synthetic construct
  misc_feature 1..22: note = chemically synthesized
  source 1..22: mol_type = other DNA
ctccccaaatctggggccaaac

SEQ ID NO: 65724 - DNA, 22 bp, synthetic construct
  misc_feature 1..22: note = chemically synthesized
  source 1..22: mol_type = other DNA
cccaaatctggggccaaacgca

SEQ ID NO: 65725 - DNA, 22 bp, synthetic construct
  misc_feature 1..22: note = chemically synthesized
  source 1..22: mol_type = other DNA
gggccaaacgcagcagttgttc

SEQ ID NO: 65726 - DNA, 22 bp, synthetic construct
  misc_feature 1..22: note = chemically synthesized
  source 1..22: mol_type = other DNA
ttcccccacttagacccctgag

SEQ ID NO: 65727 - DNA, 22 bp, synthetic construct
  misc_feature 1..22: note = chemically synthesized
  source 1..22: mol_type = other DNA
ccccacttagacccctgagacc

SEQ ID NO: 65728 - DNA, 22 bp, synthetic construct
  misc_feature 1..22: note = chemically synthesized
  source 1..22: mol_type = other DNA
agacccctgagacccatctata

SEQ ID NO: 65729 - DNA, 22 bp, synthetic construct
  misc_feature 1..22: note = chemically synthesized
  source 1..22: mol_type = other DNA
gacccctgagacccatctatat

SEQ ID NO: 65730 - DNA, 22 bp, synthetic construct
  misc_feature 1..22: note = chemically synthesized
  source 1..22: mol_type = other DNA
agacccatctatatggtttttc

SEQ ID NO: 65731 - DNA, 22 bp, synthetic construct
  misc_feature 1..22: note = chemically synthesized
  source 1..22: mol_type = other DNA
tatggtttttcagagccaggac

SEQ ID NO: 65732 - DNA, 22 bp, synthetic construct
  misc_feature 1..22: note = chemically synthesized
  source 1..22: mol_type = other DNA
ttcagagccaggacacatcccc

SEQ ID NO: 65733 - DNA, 22 bp, synthetic construct
  misc_feature 1..22: note = chemically synthesized
  source 1..22: mol_type = other DNA
tcagagccaggacacatcccca

SEQ ID NO: 65734 - DNA, 22 bp, synthetic construct
  misc_feature 1..22: note = chemically synthesized
  source 1..22: mol_type = other DNA
cagagccaggacacatccccaa

SEQ ID NO: 65735 - DNA, 22 bp, synthetic construct
  misc_feature 1..22: note = chemically synthesized
  source 1..22: mol_type = other DNA
agagccaggacacatccccaaa

SEQ ID NO: 65736 - DNA, 22 bp, synthetic construct
  misc_feature 1..22: note = chemically synthesized
  source 1..22: mol_type = other DNA
tggtggttagcattgacttggg

SEQ ID NO: 65737 - DNA, 22 bp, synthetic construct
  misc_feature 1..22: note = chemically synthesized
  source 1..22: mol_type = other DNA
ggtggttagcattgacttgggg

SEQ ID NO: 65738 - DNA, 22 bp, synthetic construct
  misc_feature 1..22: note = chemically synthesized
  source 1..22: mol_type = other DNA
gtggttagcattgacttggggc

SEQ ID NO: 65739 - DNA, 22 bp, synthetic construct
  misc_feature 1..22: note = chemically synthesized
  source 1..22: mol_type = other DNA
gcattgacttggggcccatcac

SEQ ID NO: 65740 - DNA, 22 bp, synthetic construct
  misc_feature 1..22: note = chemically synthesized
  source 1..22: mol_type = other DNA
acttggggcccatcacatgcca

SEQ ID NO: 65741 - DNA, 22 bp, synthetic construct
  misc_feature 1..22: note = chemically synthesized
  source 1..22: mol_type = other DNA
ggggcccatcacatgccagagg

SEQ ID NO: 65742 - DNA, 22 bp, synthetic construct
  misc_feature 1..22: note = chemically synthesized
  source 1..22: mol_type = other DNA
gggcccatcacatgccagaggc

SEQ ID NO: 65743 - DNA, 22 bp, synthetic construct
  misc_feature 1..22: note = chemically synthesized
  source 1..22: mol_type = other DNA
cccgaagtgcttaaatgttatt

SEQ ID NO: 65744 - DNA, 22 bp, synthetic construct
  misc_feature 1..22: note = chemically synthesized
  source 1..22: mol_type = other DNA
aaatgttattatctcattcgat

SEQ ID NO: 65745 - DNA, 22 bp, synthetic construct
  misc_feature 1..22: note = chemically synthesized
  source 1..22: mol_type = other DNA
aatgttattatctcattcgatc

SEQ ID NO: 65746 - DNA, 22 bp, synthetic construct
  misc_feature 1..22: note = chemically synthesized
  source 1..22: mol_type = other DNA
ttatctcattcgatcttcacag

SEQ ID NO: 65747 - DNA, 22 bp, synthetic construct
  misc_feature 1..22: note = chemically synthesized
  source 1..22: mol_type = other DNA
tctcattcgatcttcacagtcc

SEQ ID NO: 65748 - DNA, 22 bp, synthetic construct
  misc_feature 1..22: note = chemically synthesized
  source 1..22: mol_type = other DNA
attcgatcttcacagtcctgat

SEQ ID NO: 65749 - DNA, 22 bp, synthetic construct
  misc_feature 1..22: note = chemically synthesized
  source 1..22: mol_type = other DNA
gatcttcacagtcctgatggaa

SEQ ID NO: 65750 - DNA, 22 bp, synthetic construct
  misc_feature 1..22: note = chemically synthesized
  source 1..22: mol_type = other DNA
cacagtcctgatggaagtgact

SEQ ID NO: 65751 - DNA, 22 bp, synthetic construct
  misc_feature 1..22: note = chemically synthesized
  source 1..22: mol_type = other DNA
acagtcctgatggaagtgactc

SEQ ID NO: 65752 - DNA, 22 bp, synthetic construct
  misc_feature 1..22: note = chemically synthesized
  source 1..22: mol_type = other DNA
atggaagtgactcttcttagag

SEQ ID NO: 65753 - DNA, 22 bp, synthetic construct
  misc_feature 1..22: note = chemically synthesized
  source 1..22: mol_type = other DNA
ttcttagagtcttcctatctca

SEQ ID NO: 65754 - DNA, 22 bp, synthetic construct
  misc_feature 1..22: note = chemically synthesized
  source 1..22: mol_type = other DNA
cttagagtcttcctatctcaca

SEQ ID NO: 65755 - DNA, 22 bp, synthetic construct
  misc_feature 1..22: note = chemically synthesized
  source 1..22: mol_type = other DNA
ttagagtcttcctatctcacag

SEQ ID NO: 65756 - DNA, 22 bp, synthetic construct
  misc_feature 1..22: note = chemically synthesized
  source 1..22: mol_type = other DNA
agagtcttcctatctcacagat

SEQ ID NO: 65757 - DNA, 22 bp, synthetic construct
  misc_feature 1..22: note = chemically synthesized
  source 1..22: mol_type = other DNA
gagtcttcctatctcacagatg

SEQ ID NO: 65758 - DNA, 22 bp, synthetic construct
  misc_feature 1..22: note = chemically synthesized
  source 1..22: mol_type = other DNA
cctatctcacagatgaggaaac

SEQ ID NO: 65759 - DNA, 22 bp, synthetic construct
  misc_feature 1..22: note = chemically synthesized
  source 1..22: mol_type = other DNA
ctatctcacagatgaggaaacc

SEQ ID NO: 65760 - DNA, 22 bp, synthetic construct
  misc_feature 1..22: note = chemically synthesized
  source 1..22: mol_type = other DNA
tctcacagatgaggaaaccgag

SEQ ID NO: 65761 - DNA, 22 bp, synthetic construct
  misc_feature 1..22: note = chemically synthesized
  source 1..22: mol_type = other DNA
acagatgaggaaaccgaggcac

SEQ ID NO: 65762 - DNA, 22 bp, synthetic construct
  misc_feature 1..22: note = chemically synthesized
  source 1..22: mol_type = other DNA
agtggcttgtctaagagctcac

SEQ ID NO: 65763 - DNA, 22 bp, synthetic construct
  misc_feature 1..22: note = chemically synthesized
  source 1..22: mol_type = other DNA
gtctaagagctcacaaaaagag

SEQ ID NO: 65764 - DNA, 22 bp, synthetic construct
  misc_feature 1..22: note = chemically synthesized
  source 1..22: mol_type = other DNA
tctaagagctcacaaaaagagc

SEQ ID NO: 65765 - DNA, 22 bp, synthetic construct
  misc_feature 1..22: note = chemically synthesized
  source 1..22: mol_type = other DNA
agagctcacaaaaagagcgatg

SEQ ID NO: 65766 - DNA, 22 bp, synthetic construct
  misc_feature 1..22: note = chemically synthesized
  source 1..22: mol_type = other DNA
acaaaaagagcgatggagctaa

SEQ ID NO: 65767 - DNA, 22 bp, synthetic construct
  misc_feature 1..22: note = chemically synthesized
  source 1..22: mol_type = other DNA
aggcttggccccagatattaga

SEQ ID NO: 65768 - DNA, 22 bp, synthetic construct
  misc_feature 1..22: note = chemically synthesized
  source 1..22: mol_type = other DNA
ggccccagatattagatcccga

SEQ ID NO: 65769 - DNA, 22 bp, synthetic construct
  misc_feature 1..22: note = chemically synthesized
  source 1..22: mol_type = other DNA
gccccagatattagatcccgaa

SEQ ID NO: 65770 - DNA, 22 bp, synthetic construct
  misc_feature 1..22: note = chemically synthesized
  source 1..22: mol_type = other DNA
gatcccgaacccacgccttaac

SEQ ID NO: 65771 - DNA, 22 bp, synthetic construct
  misc_feature 1..22: note = chemically synthesized
  source 1..22: mol_type = other DNA
aaccagtgacctgcactgactc

SEQ ID NO: 65772 - DNA, 22 bp, synthetic construct
  misc_feature 1..22: note = chemically synthesized
  source 1..22: mol_type = other DNA
accagtgacctgcactgactct

SEQ ID NO: 65773 - DNA, 22 bp, synthetic construct
  misc_feature 1..22: note = chemically synthesized
  source 1..22: mol_type = other DNA
cactgactctcaaagaaggaag

SEQ ID NO: 65774 - DNA, 22 bp, synthetic construct
  misc_feature 1..22: note = chemically synthesized
  source 1..22: mol_type = other DNA
actctcaaagaaggaagctggt

SEQ ID NO: 65775 - DNA, 22 bp, synthetic construct
  misc_feature 1..22: note = chemically synthesized
  source 1..22: mol_type = other DNA
tcaaagaaggaagctggtgcct

SEQ ID NO: 65776 - DNA, 22 bp, synthetic construct
  misc_feature 1..22: note = chemically synthesized
  source 1..22: mol_type = other DNA
aaagaaggaagctggtgcctgg

SEQ ID NO: 65777 - DNA, 22 bp, synthetic construct
  misc_feature 1..22: note = chemically synthesized
  source 1..22: mol_type = other DNA
gtgcctgggaaggagggtgcat

SEQ ID NO: 65778 - DNA, 22 bp, synthetic construct
  misc_feature 1..22: note = chemically synthesized
  source 1..22: mol_type = other DNA
ggaaggagggtgcatagtgagg

SEQ ID NO: 65779 - DNA, 22 bp, synthetic construct
  misc_feature 1..22: note = chemically synthesized
  source 1..22: mol_type = other DNA
gtggggtggccagcactctccg

SEQ ID NO: 65780 - DNA, 22 bp, synthetic construct
  misc_feature 1..22: note = chemically synthesized
  source 1..22: mol_type = other DNA
tggggtggccagcactctccgg

SEQ ID NO: 65781 - DNA, 22 bp, synthetic construct
  misc_feature 1..22: note = chemically synthesized
  source 1..22: mol_type = other DNA
tccgggggcactttgccaatga

SEQ ID NO: 65782 - DNA, 22 bp, synthetic construct
  misc_feature 1..22: note = chemically synthesized
  source 1..22: mol_type = other DNA
cgggggcactttgccaatgagt

SEQ ID NO: 65783 - DNA, 22 bp, synthetic construct
  misc_feature 1..22: note = chemically synthesized
  source 1..22: mol_type = other DNA
tgccaatgagttcagctcccat

SEQ ID NO: 65784 - DNA, 22 bp, synthetic construct
  misc_feature 1..22: note = chemically synthesized
  source 1..22: mol_type = other DNA
gccaatgagttcagctcccatg

SEQ ID NO: 65785 - DNA, 22 bp, synthetic construct
  misc_feature 1..22: note = chemically synthesized
  source 1..22: mol_type = other DNA
ccaatgagttcagctcccatga

SEQ ID NO: 65786 - DNA, 22 bp, synthetic construct
  misc_feature 1..22: note = chemically synthesized
  source 1..22: mol_type = other DNA
agctcccatgaagtccactgtt

SEQ ID NO: 65787 - DNA, 22 bp, synthetic construct
  misc_feature 1..22: note = chemically synthesized
  source 1..22: mol_type = other DNA
ccatgaagtccactgttgttct

SEQ ID NO: 65788 - DNA, 22 bp, synthetic construct
  misc_feature 1..22: note = chemically synthesized
  source 1..22: mol_type = other DNA
ttgttctcctgaccagccactc

SEQ ID NO: 65789 - DNA, 22 bp, synthetic construct
  misc_feature 1..22: note = chemically synthesized
  source 1..22: mol_type = other DNA
ttctcctgaccagccactcagt

SEQ ID NO: 65790 - DNA, 22 bp, synthetic construct
  misc_feature 1..22: note = chemically synthesized
  source 1..22: mol_type = other DNA
tcctgaccagccactcagtctt

SEQ ID NO: 65791 - DNA, 22 bp, synthetic construct
  misc_feature 1..22: note = chemically synthesized
  source 1..22: mol_type = other DNA
ctgaccagccactcagtcttga

SEQ ID NO: 65792 - DNA, 22 bp, synthetic construct
  misc_feature 1..22: note = chemically synthesized
  source 1..22: mol_type = other DNA
accagccactcagtcttgattt

SEQ ID NO: 65793 - DNA, 22 bp, synthetic construct
  misc_feature 1..22: note = chemically synthesized
  source 1..22: mol_type = other DNA
agtcttgatttacttggcccag

SEQ ID NO: 65794 - DNA, 22 bp, synthetic construct
  misc_feature 1..22: note = chemically synthesized
  source 1..22: mol_type = other DNA
gatttacttggcccagggccac

SEQ ID NO: 65795 - DNA, 22 bp, synthetic construct
  misc_feature 1..22: note = chemically synthesized
  source 1..22: mol_type = other DNA
atttacttggcccagggccact

SEQ ID NO: 65796 - DNA, 22 bp, synthetic construct
  misc_feature 1..22: note = chemically synthesized
  source 1..22: mol_type = other DNA
acttggcccagggccactggca

SEQ ID NO: 65797 - DNA, 22 bp, synthetic construct
  misc_feature 1..22: note = chemically synthesized
  source 1..22: mol_type = other DNA
cttggcccagggccactggcac

SEQ ID NO: 65798 - DNA, 22 bp, synthetic construct
  misc_feature 1..22: note = chemically synthesized
  source 1..22: mol_type = other DNA
ggcccagggccactggcacacc

SEQ ID NO: 65799 - DNA, 22 bp, synthetic construct
  misc_feature 1..22: note = chemically synthesized
  source 1..22: mol_type = other DNA
gcccagggccactggcacacct

SEQ ID NO: 65800 - DNA, 22 bp, synthetic construct
  misc_feature 1..22: note = chemically synthesized
  source 1..22: mol_type = other DNA
gcacacctcacccccttacccg

SEQ ID NO: 65801 - DNA, 22 bp, synthetic construct
  misc_feature 1..22: note = chemically synthesized
  source 1..22: mol_type = other DNA
acccccttacccgattccttgc

SEQ ID NO: 65802 - DNA, 22 bp, synthetic construct
  misc_feature 1..22: note = chemically synthesized
  source 1..22: mol_type = other DNA
acccgattccttgctgcagacc

SEQ ID NO: 65803 - DNA, 22 bp, synthetic construct
  misc_feature 1..22: note = chemically synthesized
  source 1..22: mol_type = other DNA
cccgattccttgctgcagaccc

SEQ ID NO: 65804 - DNA, 22 bp, synthetic construct
  misc_feature 1..22: note = chemically synthesized
  source 1..22: mol_type = other DNA
cttgctgcagaccccaaatctc

SEQ ID NO: 65805 - DNA, 22 bp, synthetic construct
  misc_feature 1..22: note = chemically synthesized
  source 1..22: mol_type = other DNA
gctgcagaccccaaatctcgac

SEQ ID NO: 65806 - DNA, 22 bp, synthetic construct
  misc_feature 1..22: note = chemically synthesized
  source 1..22: mol_type = other DNA
ctgcagaccccaaatctcgact

SEQ ID NO: 65807 - DNA, 22 bp, synthetic construct
  misc_feature 1..22: note = chemically synthesized
  source 1..22: mol_type = other DNA
cagaccccaaatctcgactctc

SEQ ID NO: 65808 - DNA, 22 bp, synthetic construct
  misc_feature 1..22: note = chemically synthesized
  source 1..22: mol_type = other DNA
gactctcacatccctatccagc

SEQ ID NO: 65809 - DNA, 22 bp, synthetic construct
  misc_feature 1..22: note = chemically synthesized
  source 1..22: mol_type = other DNA
tcacatccctatccagcccata

SEQ ID NO: 65810 - DNA, 22 bp, synthetic construct
  misc_feature 1..22: note = chemically synthesized
  source 1..22: mol_type = other DNA
acatccctatccagcccatacc

SEQ ID NO: 65811 - DNA, 22 bp, synthetic construct
  misc_feature 1..22: note = chemically synthesized
  source 1..22: mol_type = other DNA
tccagcccataccacgaggctc

SEQ ID NO: 65812 - DNA, 22 bp, synthetic construct
  misc_feature 1..22: note = chemically synthesized
  source 1..22: mol_type = other DNA
ccatctccaggcagggccctgt

SEQ ID NO: 65813 - DNA, 22 bp, synthetic construct
  misc_feature 1..22: note = chemically synthesized
  source 1..22: mol_type = other DNA
caggcagggccctgtggtgggg

SEQ ID NO: 65814 - DNA, 22 bp, synthetic construct
  misc_feature 1..22: note = chemically synthesized
  source 1..22: mol_type = other DNA
tggtggggcagggcctccccca

SEQ ID NO: 65815 - DNA, 22 bp, synthetic construct
  misc_feature 1..22: note = chemically synthesized
  source 1..22: mol_type = other DNA
ccccagatgccccttactcatg

SEQ ID NO: 65816 - DNA, 22 bp, synthetic construct
  misc_feature 1..22: note = chemically synthesized
  source 1..22: mol_type = other DNA
actcatgaccagctcacaggat

SEQ ID NO: 65817 - DNA, 22 bp, synthetic construct
  misc_feature 1..22: note = chemically synthesized
  source 1..22: mol_type = other DNA
ctcatgaccagctcacaggatc

SEQ ID NO: 65818 - DNA, 22 bp, synthetic construct
  misc_feature 1..22: note = chemically synthesized
  source 1..22: mol_type = other DNA
atgaccagctcacaggatcttc

SEQ ID NO: 65819 - DNA, 22 bp, synthetic construct
  misc_feature 1..22: note = chemically synthesized
  source 1..22: mol_type = other DNA
acaggatcttcccatgatgcat

SEQ ID NO: 65820 - DNA, 22 bp, synthetic construct
  misc_feature 1..22: note = chemically synthesized
  source 1..22: mol_type = other DNA
cccatgatgcatttcctctggg

SEQ ID NO: 65821 - DNA, 22 bp, synthetic construct
  misc_feature 1..22: note = chemically synthesized
  source 1..22: mol_type = other DNA
ccatgatgcatttcctctgggg

SEQ ID NO: 65822 - DNA, 22 bp, synthetic construct
  misc_feature 1..22: note = chemically synthesized
  source 1..22: mol_type = other DNA
cctctggggggatcagcccaga

SEQ ID NO: 65823 - DNA, 22 bp, synthetic construct
  misc_feature 1..22: note = chemically synthesized
  source 1..22: mol_type = other DNA
ctctggggggatcagcccagat

SEQ ID NO: 65824 - DNA, 22 bp, synthetic construct
  misc_feature 1..22: note = chemically synthesized
  source 1..22: mol_type = other DNA
tggggggatcagcccagatgct

SEQ ID NO: 65825 - DNA, 22 bp, synthetic construct
  misc_feature 1..22: note = chemically synthesized
  source 1..22: mol_type = other DNA
gggggatcagcccagatgctgc

SEQ ID NO: 65826 - DNA, 22 bp, synthetic construct
  misc_feature 1..22: note = chemically synthesized
  source 1..22: mol_type = other DNA
caatagacaattgtggaagtaa

SEQ ID NO: 65827 - DNA, 22 bp, synthetic construct
  misc_feature 1..22: note = chemically synthesized
  source 1..22: mol_type = other DNA
tggaagtaaccaggtggacaag

SEQ ID NO: 65828 - DNA, 22 bp, synthetic construct
  misc_feature 1..22: note = chemically synthesized
  source 1..22: mol_type = other DNA
tccccctcatgtcctggggttc

SEQ ID NO: 65829 - DNA, 22 bp, synthetic construct
  misc_feature 1..22: note = chemically synthesized
  source 1..22: mol_type = other DNA
ccccctcatgtcctggggttcc

SEQ ID NO: 65830 - DNA, 22 bp, synthetic construct
  misc_feature 1..22: note = chemically synthesized
  source 1..22: mol_type = other DNA
cccctcatgtcctggggttcct

SEQ ID NO: 65831 - DNA, 22 bp, synthetic construct
  misc_feature 1..22: note = chemically synthesized
  source 1..22: mol_type = other DNA
atgtcctggggttcctgggggc

SEQ ID NO: 65832 - DNA, 22 bp, synthetic construct
  misc_feature 1..22: note = chemically synthesized
  source 1..22: mol_type = other DNA
gggttcctgggggcacagtatc

SEQ ID NO: 65833 - DNA, 22 bp, synthetic construct
  misc_feature 1..22: note = chemically synthesized
  source 1..22: mol_type = other DNA
ctgggggcacagtatccttgtg

SEQ ID NO: 65834 - DNA, 22 bp, synthetic construct
  misc_feature 1..22: note = chemically synthesized
  source 1..22: mol_type = other DNA
ggggcacagtatccttgtgaat

SEQ ID NO: 65835 - DNA, 22 bp, synthetic construct
  misc_feature 1..22: note = chemically synthesized
  source 1..22: mol_type = other DNA
gtgaatggccactgagtactcc

SEQ ID NO: 65836 - DNA, 22 bp, synthetic construct
  misc_feature 1..22: note = chemically synthesized
  source 1..22: mol_type = other DNA
tgaatggccactgagtactccc

SEQ ID NO: 65837 - DNA, 22 bp, synthetic construct
  misc_feature 1..22: note = chemically synthesized
  source 1..22: mol_type = other DNA
agtactcccacccctcccacca

SEQ ID NO: 65838 - DNA, 22 bp, synthetic construct
  misc_feature 1..22: note = chemically synthesized
  source 1..22: mol_type = other DNA
ccacccctcccaccacaacccc

SEQ ID NO: 65839 - DNA, 22 bp, synthetic construct
  misc_feature 1..22: note = chemically synthesized
  source 1..22: mol_type = other DNA
ccaccacaacccccgggatttt

SEQ ID NO: 65840 - DNA, 22 bp, synthetic construct
  misc_feature 1..22: note = chemically synthesized
  source 1..22: mol_type = other DNA
tgtcctggtgcgtttttccaga

SEQ ID NO: 65841 - DNA, 22 bp, synthetic construct
  misc_feature 1..22: note = chemically synthesized
  source 1..22: mol_type = other DNA
gtcctggtgcgtttttccagat

SEQ ID NO: 65842 - DNA, 22 bp, synthetic construct
  misc_feature 1..22: note = chemically synthesized
  source 1..22: mol_type = other DNA
tcctggtgcgtttttccagatt

SEQ ID NO: 65843 - DNA, 22 bp, synthetic construct
  misc_feature 1..22: note = chemically synthesized
  source 1..22: mol_type = other DNA
gtgcgtttttccagattatcct

SEQ ID NO: 65844 - DNA, 22 bp, synthetic construct
  misc_feature 1..22: note = chemically synthesized
  source 1..22: mol_type = other DNA
ttccagattatcctagcccttc

SEQ ID NO: 65845 - DNA, 22 bp, synthetic construct
  misc_feature 1..22: note = chemically synthesized
  source 1..22: mol_type = other DNA
tccagattatcctagcccttcc

SEQ ID NO: 65846 - DNA, 22 bp, synthetic construct
  misc_feature 1..22: note = chemically synthesized
  source 1..22: mol_type = other DNA
ccagattatcctagcccttcct

SEQ ID NO: 65847 - DNA, 22 bp, synthetic construct
  misc_feature 1..22: note = chemically synthesized
  source 1..22: mol_type = other DNA
cagattatcctagcccttcctc

SEQ ID NO: 65848 - DNA, 22 bp, synthetic construct
  misc_feature 1..22: note = chemically synthesized
  source 1..22: mol_type = other DNA
tcctagcccttcctcccaggat

SEQ ID NO: 65849 - DNA, 22 bp, synthetic construct
  misc_feature 1..22: note = chemically synthesized
  source 1..22: mol_type = other DNA
gcccttcctcccaggatggatg

SEQ ID NO: 65850 - DNA, 22 bp, synthetic construct
  misc_feature 1..22: note = chemically synthesized
  source 1..22: mol_type = other DNA
cctcccaggatggatgtccaga

SEQ ID NO: 65851 - DNA, 22 bp, synthetic construct
  misc_feature 1..22: note = chemically synthesized
  source 1..22: mol_type = other DNA
ctcccaggatggatgtccagag

SEQ ID NO: 65852 - DNA, 22 bp, synthetic construct
  misc_feature 1..22: note = chemically synthesized
  source 1..22: mol_type = other DNA
ccaggatggatgtccagagcag

SEQ ID NO: 65853 - DNA, 22 bp, synthetic construct
  misc_feature 1..22: note = chemically synthesized
  source 1..22: mol_type = other DNA
agcctagagccctgccaaaaga

SEQ ID NO: 65854 - DNA, 22 bp, synthetic construct
  misc_feature 1..22: note = chemically synthesized
  source 1..22: mol_type = other DNA
gagccctgccaaaagagcagga

SEQ ID NO: 65855 - DNA, 22 bp, synthetic construct
  misc_feature 1..22: note = chemically synthesized
  source 1..22: mol_type = other DNA
ccaaaagagcaggaccccaaat

SEQ ID NO: 65856 - DNA, 22 bp, synthetic construct
  misc_feature 1..22: note = chemically synthesized
  source 1..22: mol_type = other DNA
tgagccccttacttgcctcacc

SEQ ID NO: 65857 - DNA, 22 bp, synthetic construct
  misc_feature 1..22: note = chemically synthesized
  source 1..22: mol_type = other DNA
agccccttacttgcctcacctg

SEQ ID NO: 65858 - DNA, 22 bp, synthetic construct
  misc_feature 1..22: note = chemically synthesized
  source 1..22: mol_type = other DNA
acttgcctcacctgctcccacc

SEQ ID NO: 65859 - DNA, 22 bp, synthetic construct
  misc_feature 1..22: note = chemically synthesized
  source 1..22: mol_type = other DNA
cttgcctcacctgctcccaccc

SEQ ID NO: 65860 - DNA, 22 bp, synthetic construct
  misc_feature 1..22: note = chemically synthesized
  source 1..22: mol_type = other DNA
gcctcacctgctcccacccatg

SEQ ID NO: 65861 - DNA, 22 bp, synthetic construct
  misc_feature 1..22: note = chemically synthesized
  source 1..22: mol_type = other DNA
cctcacctgctcccacccatgc

SEQ ID NO: 65862 - DNA, 22 bp, synthetic construct
  misc_feature 1..22: note = chemically synthesized
  source 1..22: mol_type = other DNA
acctgctcccacccatgctttc

SEQ ID NO: 65863 - DNA, 22 bp, synthetic construct
  misc_feature 1..22: note = chemically synthesized
  source 1..22: mol_type = other DNA
ctcccacccatgctttcttcat

SEQ ID NO: 65864 - DNA, 22 bp, synthetic construct
  misc_feature 1..22: note = chemically synthesized
  source 1..22: mol_type = other DNA
ccacccatgctttcttcattcc

SEQ ID NO: 65865 - DNA, 22 bp, synthetic construct
  misc_feature 1..22: note = chemically synthesized
  source 1..22: mol_type = other DNA
tcttcattcctcctccaaaagc

SEQ ID NO: 65866 - DNA, 22 bp, synthetic construct
  misc_feature 1..22: note = chemically synthesized
  source 1..22: mol_type = other DNA
cttcattcctcctccaaaagcc

SEQ ID NO: 65867 - DNA, 22 bp, synthetic construct
  misc_feature 1..22: note = chemically synthesized
  source 1..22: mol_type = other DNA
ttcattcctcctccaaaagccc

SEQ ID NO: 65868 - DNA, 22 bp, synthetic construct
  misc_feature 1..22: note = chemically synthesized
  source 1..22: mol_type = other DNA
cattcctcctccaaaagcccca

SEQ ID NO: 65869 - DNA, 22 bp, synthetic construct
  misc_feature 1..22: note = chemically synthesized
  source 1..22: mol_type = other DNA
attcctcctccaaaagccccag

SEQ ID NO: 65870 - DNA, 22 bp, synthetic construct
  misc_feature 1..22: note = chemically synthesized
  source 1..22: mol_type = other DNA
ctcctccaaaagccccagctcc

SEQ ID NO: 65871 - DNA, 22 bp, synthetic construct
  misc_feature 1..22: note = chemically synthesized
  source 1..22: mol_type = other DNA
ctccaaaagccccagctcccca

SEQ ID NO: 65872 - DNA, 22 bp, synthetic construct
  misc_feature 1..22: note = chemically synthesized
  source 1..22: mol_type = other DNA
caaaagccccagctccccactg

SEQ ID NO: 65873 - DNA, 22 bp, synthetic construct
  misc_feature 1..22: note = chemically synthesized
  source 1..22: mol_type = other DNA
cccactgcaatcccttctgcac

SEQ ID NO: 65874 - DNA, 22 bp, synthetic construct
  misc_feature 1..22: note = chemically synthesized
  source 1..22: mol_type = other DNA
caatcccttctgcacccagcca

SEQ ID NO: 65875 - DNA, 22 bp, synthetic construct
  misc_feature 1..22: note = chemically synthesized
  source 1..22: mol_type = other DNA
ctgcacccagccaggtcctatg

SEQ ID NO: 65876 - DNA, 22 bp, synthetic construct
  misc_feature 1..22: note = chemically synthesized
  source 1..22: mol_type = other DNA
tgcacccagccaggtcctatga

SEQ ID NO: 65877 - DNA, 22 bp, synthetic construct
  misc_feature 1..22: note = chemically synthesized
  source 1..22: mol_type = other DNA
cacccagccaggtcctatgaca

SEQ ID NO: 65878 - DNA, 22 bp, synthetic construct
  misc_feature 1..22: note = chemically synthesized
  source 1..22: mol_type = other DNA
tgacacacacctccccagtgca

SEQ ID NO: 65879 - DNA, 22 bp, synthetic construct
  misc_feature 1..22: note = chemically synthesized
  source 1..22: mol_type = other DNA
cccagtgcacacagacctgccc

SEQ ID NO: 65880 - DNA, 22 bp, synthetic construct
  misc_feature 1..22: note = chemically synthesized
  source 1..22: mol_type = other DNA
cccaactgtggggctgcccact

SEQ ID NO: 65881 - DNA, 22 bp, synthetic construct
  misc_feature 1..22: note = chemically synthesized
  source 1..22: mol_type = other DNA
tggggctgcccactgggcattt

SEQ ID NO: 65882 - DNA, 22 bp, synthetic construct
  misc_feature 1..22: note = chemically synthesized
  source 1..22: mol_type = other DNA
cccactgggcatttcataggtg

SEQ ID NO: 65883 - DNA, 22 bp, synthetic construct
  misc_feature 1..22: note = chemically synthesized
  source 1..22: mol_type = other DNA
ggcatttcataggtggctcagt

SEQ ID NO: 65884 - DNA, 22 bp, synthetic construct
  misc_feature 1..22: note = chemically synthesized
  source 1..22: mol_type = other DNA
cataggtggctcagtcctcttc

SEQ ID NO: 65885 - DNA, 22 bp, synthetic construct
  misc_feature 1..22: note = chemically synthesized
  source 1..22: mol_type = other DNA
ataggtggctcagtcctcttcc

SEQ ID NO: 65886 - DNA, 22 bp, synthetic construct
  misc_feature 1..22: note = chemically synthesized
  source 1..22: mol_type = other DNA
agtcctcttccctctgcagctg

SEQ ID NO: 65887 - DNA, 22 bp, synthetic construct
  misc_feature 1..22: note = chemically synthesized
  source 1..22: mol_type = other DNA
ttccctctgcagctggccccag

SEQ ID NO: 65888 - DNA, 22 bp, synthetic construct
  misc_feature 1..22: note = chemically synthesized
  source 1..22: mol_type = other DNA
ccctctgcagctggccccagaa

SEQ ID NO: 65889 - DNA, 22 bp, synthetic construct
  misc_feature 1..22: note = chemically synthesized
  source 1..22: mol_type = other DNA
cctctgcagctggccccagaaa

SEQ ID NO: 65890 - DNA, 22 bp, synthetic construct
  misc_feature 1..22: note = chemically synthesized
  source 1..22: mol_type = other DNA
tgcagctggccccagaaacctg

SEQ ID NO: 65891 - DNA, 22 bp, synthetic construct
  misc_feature 1..22: note = chemically synthesized
  source 1..22: mol_type = other DNA
cagctggccccagaaacctgcc

SEQ ID NO: 65892 - DNA, 22 bp, synthetic construct
  misc_feature 1..22: note = chemically synthesized
  source 1..22: mol_type = other DNA
gccccagaaacctgccagttat

SEQ ID NO: 65893 - DNA, 22 bp, synthetic construct
  misc_feature 1..22: note = chemically synthesized
  source 1..22: mol_type = other DNA
ccagttattggtgccaggtctg

SEQ ID NO: 65894 - DNA, 22 bp, synthetic construct
  misc_feature 1..22: note = chemically synthesized
  source 1..22: mol_type = other DNA
ttggtgccaggtctgtgccagg

SEQ ID NO: 65895 - DNA, 22 bp, synthetic construct
  misc_feature 1..22: note = chemically synthesized
  source 1..22: mol_type = other DNA
gtgccaggtctgtgccaggagg

SEQ ID NO: 65896 - DNA, 22 bp, synthetic construct
  misc_feature 1..22: note = chemically synthesized
  source 1..22: mol_type = other DNA
tgccaggagggcgaggcctgtc

SEQ ID NO: 65897 - DNA, 22 bp, synthetic construct
  misc_feature 1..22: note = chemically synthesized
  source 1..22: mol_type = other DNA
tcatttctagtaatcctctggg

SEQ ID NO: 65898 - DNA, 22 bp, synthetic construct
  misc_feature 1..22: note = chemically synthesized
  source 1..22: mol_type = other DNA
ctagtaatcctctgggcagtgt

SEQ ID NO: 65899 - DNA, 22 bp, synthetic construct
  misc_feature 1..22: note = chemically synthesized
  source 1..22: mol_type = other DNA
tagtaatcctctgggcagtgtg

SEQ ID NO: 65900 - DNA, 22 bp, synthetic construct
  misc_feature 1..22: note = chemically synthesized
  source 1..22: mol_type = other DNA
gtaatcctctgggcagtgtgac

SEQ ID NO: 65901 - DNA, 22 bp, synthetic construct
  misc_feature 1..22: note = chemically synthesized
  source 1..22: mol_type = other DNA
tgggcagtgtgactgtacctct

SEQ ID NO: 65902 - DNA, 22 bp, synthetic construct
  misc_feature 1..22: note = chemically synthesized
  source 1..22: mol_type = other DNA
ggcagtgtgactgtacctcttg

SEQ ID NO: 65903 - DNA, 22 bp, synthetic construct
  misc_feature 1..22: note = chemically synthesized
  source 1..22: mol_type = other DNA
tacctcttgcggcaactcaaag

SEQ ID NO: 65904 - DNA, 22 bp, synthetic construct
  misc_feature 1..22: note = chemically synthesized
  source 1..22: mol_type = other DNA
ttgcggcaactcaaagggagag

SEQ ID NO: 65905 - DNA, 22 bp, synthetic construct
  misc_feature 1..22: note = chemically synthesized
  source 1..22: mol_type = other DNA
gcggcaactcaaagggagaggg

SEQ ID NO: 65906 - DNA, 22 bp, synthetic construct
  misc_feature 1..22: note = chemically synthesized
  source 1..22: mol_type = other DNA
cggcaactcaaagggagagggt

SEQ ID NO: 65907 - DNA, 22 bp, synthetic construct
  misc_feature 1..22: note = chemically synthesized
  source 1..22: mol_type = other DNA
aaagggagagggtgacttgtcc

SEQ ID NO: 65908 - DNA, 22 bp, synthetic construct
  misc_feature 1..22: note = chemically synthesized
  source 1..22: mol_type = other DNA
gtcccgggtcacagagctgaaa

SEQ ID NO: 65909 - DNA, 22 bp, synthetic construct
  misc_feature 1..22: note = chemically synthesized
  source 1..22: mol_type = other DNA
tcccgggtcacagagctgaaag

SEQ ID NO: 65910 - DNA, 22 bp, synthetic construct
  misc_feature 1..22: note = chemically synthesized
  source 1..22: mol_type = other DNA
aaagggcaggtacaacaggtga

SEQ ID NO: 65911 - DNA, 22 bp, synthetic construct
  misc_feature 1..22: note = chemically synthesized
  source 1..22: mol_type = other DNA
tctgagtttatgagggcccagt

SEQ ID NO: 65912 - DNA, 22 bp, synthetic construct
  misc_feature 1..22: note = chemically synthesized
  source 1..22: mol_type = other DNA
agtttatgagggcccagtcttg

SEQ ID NO: 65913 - DNA, 22 bp, synthetic construct
  misc_feature 1..22: note = chemically synthesized
  source 1..22: mol_type = other DNA
atgagggcccagtcttgtgtct

SEQ ID NO: 65914 - DNA, 22 bp, synthetic construct
  misc_feature 1..22: note = chemically synthesized
  source 1..22: mol_type = other DNA
tgagggcccagtcttgtgtctg

SEQ ID NO: 65915 - DNA, 22 bp, synthetic construct
  misc_feature 1..22: note = chemically synthesized
  source 1..22: mol_type = other DNA
gtgtctgccgggcaatgagcaa

SEQ ID NO: 65916 - DNA, 22 bp, synthetic construct
  misc_feature 1..22: note = chemically synthesized
  source 1..22: mol_type = other DNA
tgtctgccgggcaatgagcaag

SEQ ID NO: 65917 - DNA, 22 bp, synthetic construct
  misc_feature 1..22: note = chemically synthesized
  source 1..22: mol_type = other DNA
ccgggcaatgagcaaggctcct

SEQ ID NO: 65918 - DNA, 22 bp, synthetic construct
  misc_feature 1..22: note = chemically synthesized
  source 1..22: mol_type = other DNA
cttcctgtccaagctccccgcc

SEQ ID NO: 65919 - DNA, 22 bp, synthetic construct
  misc_feature 1..22: note = chemically synthesized
  source 1..22: mol_type = other DNA
cctgtccaagctccccgcccct

SEQ ID NO: 65920 - DNA, 22 bp, synthetic construct
  misc_feature 1..22: note = chemically synthesized
  source 1..22: mol_type = other DNA
ctgtccaagctccccgcccctc

SEQ ID NO: 65921 - DNA, 22 bp, synthetic construct
  misc_feature 1..22: note = chemically synthesized
  source 1..22: mol_type = other DNA
tccaagctccccgcccctcccc

SEQ ID NO: 65922 - DNA, 22 bp, synthetic construct
  misc_feature 1..22: note = chemically synthesized
  source 1..22: mol_type = other DNA
cccgcccctccccagcctactg

SEQ ID NO: 65923 - DNA, 22 bp, synthetic construct
  misc_feature 1..22: note = chemically synthesized
  source 1..22: mol_type = other DNA
cccagcctactgcctccacccg

SEQ ID NO: 65924 - DNA, 22 bp, synthetic construct
  misc_feature 1..22: note = chemically synthesized
  source 1..22: mol_type = other DNA
ctgcctccacccgaagtctact

SEQ ID NO: 65925 - DNA, 22 bp, synthetic construct
  misc_feature 1..22: note = chemically synthesized
  source 1..22: mol_type = other DNA
cctccacccgaagtctacttcc

SEQ ID NO: 65926 - DNA, 22 bp, synthetic construct
  misc_feature 1..22: note = chemically synthesized
  source 1..22: mol_type = other DNA
cacccgaagtctacttcctggg

SEQ ID NO: 65927 - DNA, 22 bp, synthetic construct
  misc_feature 1..22: note = chemically synthesized
  source 1..22: mol_type = other DNA
cttcctgggtgggcaggaactg

SEQ ID NO: 65928 - DNA, 22 bp, synthetic construct
  misc_feature 1..22: note = chemically synthesized
  source 1..22: mol_type = other DNA
cctgggtgggcaggaactgggc

SEQ ID NO: 65929 - DNA, 22 bp, synthetic construct
  misc_feature 1..22: note = chemically synthesized
  source 1..22: mol_type = other DNA
ctgggtgggcaggaactgggca

SEQ ID NO: 65930 - DNA, 22 bp, synthetic construct
  misc_feature 1..22: note = chemically synthesized
  source 1..22: mol_type = other DNA
ggtgggcaggaactgggcactg

SEQ ID NO: 65931 - DNA, 22 bp, synthetic construct
  misc_feature 1..22: note = chemically synthesized
  source 1..22: mol_type = other DNA
ggcactgtgcccagggcatgca

SEQ ID NO: 65932 - DNA, 22 bp, synthetic construct
  misc_feature 1..22: note = chemically synthesized
  source 1..22: mol_type = other DNA
tgcccagggcatgcactgcctc

SEQ ID NO: 65933 - DNA, 22 bp, synthetic construct
  misc_feature 1..22: note = chemically synthesized
  source 1..22: mol_type = other DNA
cctccacgcagcaaccctcaga

SEQ ID NO: 65934 - DNA, 22 bp, synthetic construct
  misc_feature 1..22: note = chemically synthesized
  source 1..22: mol_type = other DNA
cacgcagcaaccctcagagtcc

SEQ ID NO: 65935 - DNA, 22 bp, synthetic construct
  misc_feature 1..22: note = chemically synthesized
  source 1..22: mol_type = other DNA
agagtcctgagctgaaccaaga

SEQ ID NO: 65936 - DNA, 22 bp, synthetic construct
  misc_feature 1..22: note = chemically synthesized
  source 1..22: mol_type = other DNA
agctgaaccaagaaggaggagg

SEQ ID NO: 65937 - DNA, 22 bp, synthetic construct
  misc_feature 1..22: note = chemically synthesized
  source 1..22: mol_type = other DNA
aaccaagaaggaggagggggtc

SEQ ID NO: 65938 - DNA, 22 bp, synthetic construct
  misc_feature 1..22: note = chemically synthesized
  source 1..22: mol_type = other DNA
cgaggaaggcctagccgctgct

SEQ ID NO: 65939 - DNA, 22 bp, synthetic construct
  misc_feature 1..22: note = chemically synthesized
  source 1..22: mol_type = other DNA
gccgctgctgctgccaggaatt

SEQ ID NO: 65940 - DNA, 22 bp, synthetic construct
  misc_feature 1..22: note = chemically synthesized
  source 1..22: mol_type = other DNA
ctgctgccaggaattccaggtt

SEQ ID NO: 65941 - DNA, 22 bp, synthetic construct
  misc_feature 1..22: note = chemically synthesized
  source 1..22: mol_type = other DNA
ctgccaggaattccaggttgga

SEQ ID NO: 65942 - DNA, 22 bp, synthetic construct
  misc_feature 1..22: note = chemically synthesized
  source 1..22: mol_type = other DNA
ccaggaattccaggttggaggg

SEQ ID NO: 65943 - DNA, 22 bp, synthetic construct
  misc_feature 1..22: note = chemically synthesized
  source 1..22: mol_type = other DNA
caggttggaggggcggcaacct

SEQ ID NO: 65944 - DNA, 22 bp, synthetic construct
  misc_feature 1..22: note = chemically synthesized
  source 1..22: mol_type = other DNA
gaggggcggcaacctcctgcca

SEQ ID NO: 65945 - DNA, 22 bp, synthetic construct
  misc_feature 1..22: note = chemically synthesized
  source 1..22: mol_type = other DNA
ctgccagccttcaggccactct

SEQ ID NO: 65946 - DNA, 22 bp, synthetic construct
  misc_feature 1..22: note = chemically synthesized
  source 1..22: mol_type = other DNA
ccagccttcaggccactctcct

SEQ ID NO: 65947 - DNA, 22 bp, synthetic construct
  misc_feature 1..22: note = chemically synthesized
  source 1..22: mol_type = other DNA
caggccactctcctgtgcctgc

SEQ ID NO: 65948 - DNA, 22 bp, synthetic construct
  misc_feature 1..22: note = chemically synthesized
  source 1..22: mol_type = other DNA
aggccactctcctgtgcctgcc

SEQ ID NO: 65949 - DNA, 22 bp, synthetic construct
  misc_feature 1..22: note = chemically synthesized
  source 1..22: mol_type = other DNA
tcctgtgcctgccagaagagac

SEQ ID NO: 65950 - DNA, 22 bp, synthetic construct
  misc_feature 1..22: note = chemically synthesized
  source 1..22: mol_type = other DNA
ctgtgcctgccagaagagacag

SEQ ID NO: 65951 - DNA, 22 bp, synthetic construct
  misc_feature 1..22: note = chemically synthesized
  source 1..22: mol_type = other DNA
tgcctgccagaagagacagagc

SEQ ID NO: 65952 - DNA, 22 bp, synthetic construct
  misc_feature 1..22: note = chemically synthesized
  source 1..22: mol_type = other DNA
ccagaagagacagagcttgagg

SEQ ID NO: 65953 - DNA, 22 bp, synthetic construct
  misc_feature 1..22: note = chemically synthesized
  source 1..22: mol_type = other DNA
gaggagagcttgaggagagcag

SEQ ID NO: 65954 - DNA, 22 bp, synthetic construct
  misc_feature 1..22: note = chemically synthesized
  source 1..22: mol_type = other DNA
aggagagcttgaggagagcagg

SEQ ID NO: 65955 - DNA, 22 bp, synthetic construct
  misc_feature 1..22: note = chemically synthesized
  source 1..22: mol_type = other DNA
gaggagagcaggaaaggtggga

SEQ ID NO: 65956 - DNA, 22 bp, synthetic construct
  misc_feature 1..22: note = chemically synthesized
  source 1..22: mol_type = other DNA
aggagagcaggaaaggtgggac

SEQ ID NO: 65957 - DNA, 22 bp, synthetic construct
  misc_feature 1..22: note = chemically synthesized
  source 1..22: mol_type = other DNA
ctgctgctgctcactcagttcc

SEQ ID NO: 65958 - DNA, 22 bp, synthetic construct
  misc_feature 1..22: note = chemically synthesized
  source 1..22: mol_type = other DNA
ctgctgctcactcagttccaca

SEQ ID NO: 65959 - DNA, 22 bp, synthetic construct
  misc_feature 1..22: note = chemically synthesized
  source 1..22: mol_type = other DNA
ctgctcactcagttccacaggt

SEQ ID NO: 65960 - DNA, 22 bp, synthetic construct
  misc_feature 1..22: note = chemically synthesized
  source 1..22: mol_type = other DNA
ctcactcagttccacaggtggg

SEQ ID NO: 65961 - DNA, 22 bp, synthetic construct
  misc_feature 1..22: note = chemically synthesized
  source 1..22: mol_type = other DNA
actcagttccacaggtgggagg

SEQ ID NO: 65962 - DNA, 22 bp, synthetic construct
  misc_feature 1..22: note = chemically synthesized
  source 1..22: mol_type = other DNA
agttccacaggtgggagggaca

SEQ ID NO: 65963 - DNA, 22 bp, synthetic construct
  misc_feature 1..22: note = chemically synthesized
  source 1..22: mol_type = other DNA
cacaggtgggagggacagcagg

SEQ ID NO: 65964 - DNA, 22 bp, synthetic construct
  misc_feature 1..22: note = chemically synthesized
  source 1..22: mol_type = other DNA
agagtgggggtcattgtgcaga

SEQ ID NO: 65965 - DNA, 22 bp, synthetic construct
  misc_feature 1..22: note = chemically synthesized
  source 1..22: mol_type = other DNA
gagtgggggtcattgtgcagat

SEQ ID NO: 65966 - DNA, 22 bp, synthetic construct
  misc_feature 1..22: note = chemically synthesized
  source 1..22: mol_type = other DNA
tgcagatgggaaaacaaaggcc

SEQ ID NO: 65967 - DNA, 22 bp, synthetic construct
  misc_feature 1..22: note = chemically synthesized
  source 1..22: mol_type = other DNA
ccgagggcaggcgacctcaacc

SEQ ID NO: 65968 - DNA, 22 bp, synthetic construct
  misc_feature 1..22: note = chemically synthesized
  source 1..22: mol_type = other DNA
aaccacagcccagtgctggagc

SEQ ID NO: 65969 - DNA, 22 bp, synthetic construct
  misc_feature 1..22: note = chemically synthesized
  source 1..22: mol_type = other DNA
gagctgtgagtggatgtagagc

SEQ ID NO: 65970 - DNA, 22 bp, synthetic construct
  misc_feature 1..22: note = chemically synthesized
  source 1..22: mol_type = other DNA
tgagtggatgtagagcagcgga

SEQ ID NO: 65971 - DNA, 22 bp, synthetic construct
  misc_feature 1..22: note = chemically synthesized
  source 1..22: mol_type = other DNA
agccagctcaggggaaggacag

SEQ ID NO: 65972 - DNA, 22 bp, synthetic construct
  misc_feature 1..22: note = chemically synthesized
  source 1..22: mol_type = other DNA
aggggaaggacaggggccctga

SEQ ID NO: 65973 - DNA, 22 bp, synthetic construct
  misc_feature 1..22: note = chemically synthesized
  source 1..22: mol_type = other DNA
aagccaggggatggagctgcag

SEQ ID NO: 65974 - DNA, 22 bp, synthetic construct
  misc_feature 1..22: note = chemically synthesized
  source 1..22: mol_type = other DNA
cagggaagggagctcagagaga

SEQ ID NO: 65975 - DNA, 22 bp, synthetic construct
  misc_feature 1..22: note = chemically synthesized
  source 1..22: mol_type = other DNA
agagagaaggggaggggagtct

SEQ ID NO: 65976 - DNA, 22 bp, synthetic construct
  misc_feature 1..22: note = chemically synthesized
  source 1..22: mol_type = other DNA
agctcagtttcccgctgcctga

SEQ ID NO: 65977 - DNA, 22 bp, synthetic construct
  misc_feature 1..22: note = chemically synthesized
  source 1..22: mol_type = other DNA
agtttcccgctgcctgaaagga

SEQ ID NO: 65978 - DNA, 22 bp, synthetic construct
  misc_feature 1..22: note = chemically synthesized
  source 1..22: mol_type = other DNA
cccgctgcctgaaaggagggtg

SEQ ID NO: 65979 - DNA, 22 bp, synthetic construct
  misc_feature 1..22: note = chemically synthesized
  source 1..22: mol_type = other DNA
ccgctgcctgaaaggagggtgg

SEQ ID NO: 65980 - DNA, 22 bp, synthetic construct
  misc_feature 1..22: note = chemically synthesized
  source 1..22: mol_type = other DNA
cctgaaaggagggtggtaccta

SEQ ID NO: 65981 - DNA, 22 bp, synthetic construct
  misc_feature 1..22: note = chemically synthesized
  source 1..22: mol_type = other DNA
aaaggagggtggtacctactcc

SEQ ID NO: 65982 - DNA, 22 bp, synthetic construct
  misc_feature 1..22: note = chemically synthesized
  source 1..22: mol_type = other DNA
ctcccttcacagggtaactgaa

SEQ ID NO: 65983 - DNA, 22 bp, synthetic construct
  misc_feature 1..22: note = chemically synthesized
  source 1..22: mol_type = other DNA
ccttcacagggtaactgaatga

SEQ ID NO: 65984 - DNA, 22 bp, synthetic construct
  misc_feature 1..22: note = chemically synthesized
  source 1..22: mol_type = other DNA
cacagggtaactgaatgagaga

SEQ ID NO: 65985 - DNA, 22 bp, synthetic construct
  misc_feature 1..22: note = chemically synthesized
  source 1..22: mol_type = other DNA
acagggtaactgaatgagagac

SEQ ID NO: 65986 - DNA, 22 bp, synthetic construct
  misc_feature 1..22: note = chemically synthesized
  source 1..22: mol_type = other DNA
aatgagagactgcctggaggaa

SEQ ID NO: 65987 - DNA, 22 bp, synthetic construct
  misc_feature 1..22: note = chemically synthesized
  source 1..22: mol_type = other DNA
cctggaggaaagctcttcaagt

SEQ ID NO: 65988 - DNA, 22 bp, synthetic construct
  misc_feature 1..22: note = chemically synthesized
  source 1..22: mol_type = other DNA
gaggaaagctcttcaagtgtgg

SEQ ID NO: 65989 - DNA, 22 bp, synthetic construct
  misc_feature 1..22: note = chemically synthesized
  source 1..22: mol_type = other DNA
ttcaagtgtggcccaccccacc

SEQ ID NO: 65990 - DNA, 22 bp, synthetic construct
  misc_feature 1..22: note = chemically synthesized
  source 1..22: mol_type = other DNA
caagtgtggcccaccccacccc

SEQ ID NO: 65991 - DNA, 22 bp, synthetic construct
  misc_feature 1..22: note = chemically synthesized
  source 1..22: mol_type = other DNA
aagtgtggcccaccccacccca

SEQ ID NO: 65992 - DNA, 22 bp, synthetic construct
  misc_feature 1..22: note = chemically synthesized
  source 1..22: mol_type = other DNA
acacgggggagggagggcagca

SEQ ID NO: 65993 - DNA, 22 bp, synthetic construct
  misc_feature 1..22: note = chemically synthesized
  source 1..22: mol_type = other DNA
tctgggcacacccagtacccgt

SEQ ID NO: 65994 - DNA, 22 bp, synthetic construct
  misc_feature 1..22: note = chemically synthesized
  source 1..22: mol_type = other DNA
ctgggcacacccagtacccgtc

SEQ ID NO: 65995 - DNA, 22 bp, synthetic construct
  misc_feature 1..22: note = chemically synthesized
  source 1..22: mol_type = other DNA
tgggcacacccagtacccgtct

SEQ ID NO: 65996 - DNA, 22 bp, synthetic construct
  misc_feature 1..22: note = chemically synthesized
  source 1..22: mol_type = other DNA
ggcacacccagtacccgtctct

SEQ ID NO: 65997 - DNA, 22 bp, synthetic construct
  misc_feature 1..22: note = chemically synthesized
  source 1..22: mol_type = other DNA
tgagctttccttgaactgttgc

SEQ ID NO: 65998 - DNA, 22 bp, synthetic construct
  misc_feature 1..22: note = chemically synthesized
  source 1..22: mol_type = other DNA
agctttccttgaactgttgcat

SEQ ID NO: 65999 - DNA, 22 bp, synthetic construct
  misc_feature 1..22: note = chemically synthesized
  source 1..22: mol_type = other DNA
tccttgaactgttgcattttaa

SEQ ID NO: 66000 - DNA, 22 bp, synthetic construct
  misc_feature 1..22: note = chemically synthesized
  source 1..22: mol_type = other DNA
ccttgaactgttgcattttaat

SEQ ID NO: 66001 - DNA, 22 bp, synthetic construct
  misc_feature 1..22: note = chemically synthesized
  source 1..22: mol_type = other DNA
cttgaactgttgcattttaatc

SEQ ID NO: 66002 - DNA, 22 bp, synthetic construct
  misc_feature 1..22: note = chemically synthesized
  source 1..22: mol_type = other DNA
gaactgttgcattttaatcctc

SEQ ID NO: 66003 - DNA, 22 bp, synthetic construct
  misc_feature 1..22: note = chemically synthesized
  source 1..22: mol_type = other DNA
aactgttgcattttaatcctca

SEQ ID NO: 66004 - DNA, 22 bp, synthetic construct
  misc_feature 1..22: note = chemically synthesized
  source 1..22: mol_type = other DNA
ttgcattttaatcctcacagca

SEQ ID NO: 66005 - DNA, 22 bp, synthetic construct
  misc_feature 1..22: note = chemically synthesized
  source 1..22: mol_type = other DNA
cattttaatcctcacagcagct

SEQ ID NO: 66006 - DNA, 22 bp, synthetic construct
  misc_feature 1..22: note = chemically synthesized
  source 1..22: mol_type = other DNA
taatcctcacagcagctcaaca

SEQ ID NO: 66007 - DNA, 22 bp, synthetic construct
  misc_feature 1..22: note = chemically synthesized
  source 1..22: mol_type = other DNA
aatcctcacagcagctcaacaa

SEQ ID NO: 66008 - DNA, 22 bp, synthetic construct
  misc_feature 1..22: note = chemically synthesized
  source 1..22: mol_type = other DNA
atcctcacagcagctcaacaag

SEQ ID NO: 66009 - DNA, 22 bp, synthetic construct
  misc_feature 1..22: note = chemically synthesized
  source 1..22: mol_type = other DNA
acagcagctcaacaaggtacat

SEQ ID NO: 66010 - DNA, 22 bp, synthetic construct
  misc_feature 1..22: note = chemically synthesized
  source 1..22: mol_type = other DNA
aacaaggtacataccgtcacca

SEQ ID NO: 66011 - DNA, 22 bp, synthetic construct
  misc_feature 1..22: note = chemically synthesized
  source 1..22: mol_type = other DNA
tacagatagggaaattgaggct

SEQ ID NO: 66012 - DNA, 22 bp, synthetic construct
  misc_feature 1..22: note = chemically synthesized
  source 1..22: mol_type = other DNA
acagatagggaaattgaggctc

SEQ ID NO: 66013 - DNA, 22 bp, synthetic construct
  misc_feature 1..22: note = chemically synthesized
  source 1..22: mol_type = other DNA
cagatagggaaattgaggctcg

SEQ ID NO: 66014 - DNA, 22 bp, synthetic construct
  misc_feature 1..22: note = chemically synthesized
  source 1..22: mol_type = other DNA
aggctcggagcggttaaacaac

SEQ ID NO: 66015 - DNA, 22 bp, synthetic construct
  misc_feature 1..22: note = chemically synthesized
  source 1..22: mol_type = other DNA
ggagcggttaaacaactcacct

SEQ ID NO: 66016 - DNA, 22 bp, synthetic construct
  misc_feature 1..22: note = chemically synthesized
  source 1..22: mol_type = other DNA
aacaactcacctgaggcctcac

SEQ ID NO: 66017 - DNA, 22 bp, synthetic construct
  misc_feature 1..22: note = chemically synthesized
  source 1..22: mol_type = other DNA
acctgaggcctcacagccagta

SEQ ID NO: 66018 - DNA, 22 bp, synthetic construct
  misc_feature 1..22: note = chemically synthesized
  source 1..22: mol_type = other DNA
aggcctcacagccagtaagtgg

SEQ ID NO: 66019 - DNA, 22 bp, synthetic construct
  misc_feature 1..22: note = chemically synthesized
  source 1..22: mol_type = other DNA
acagccagtaagtgggttccct

SEQ ID NO: 66020 - DNA, 22 bp, synthetic construct
  misc_feature 1..22: note = chemically synthesized
  source 1..22: mol_type = other DNA
cctggtctgaatgtgtgtgctg

SEQ ID NO: 66021 - DNA, 22 bp, synthetic construct
  misc_feature 1..22: note = chemically synthesized
  source 1..22: mol_type = other DNA
gtctgaatgtgtgtgctggagg

SEQ ID NO: 66022 - DNA, 22 bp, synthetic construct
  misc_feature 1..22: note = chemically synthesized
  source 1..22: mol_type = other DNA
aatgtgtgtgctggaggatcct

SEQ ID NO: 66023 - DNA, 22 bp, synthetic construct
  misc_feature 1..22: note = chemically synthesized
  source 1..22: mol_type = other DNA
gaggatcctgtgggtcactcgc

SEQ ID NO: 66024 - DNA, 22 bp, synthetic construct
  misc_feature 1..22: note = chemically synthesized
  source 1..22: mol_type = other DNA
tgggtcactcgcctggtagagc

SEQ ID NO: 66025 - DNA, 22 bp, synthetic construct
  misc_feature 1..22: note = chemically synthesized
  source 1..22: mol_type = other DNA
gcctggtagagccccaaggtgg

SEQ ID NO: 66026 - DNA, 22 bp, synthetic construct
  misc_feature 1..22: note = chemically synthesized
  source 1..22: mol_type = other DNA
gtagagccccaaggtggaggca

SEQ ID NO: 66027 - DNA, 22 bp, synthetic construct
  misc_feature 1..22: note = chemically synthesized
  source 1..22: mol_type = other DNA
gtgaatgacagaaggggcaaaa

SEQ ID NO: 66028 - DNA, 22 bp, synthetic construct
  misc_feature 1..22: note = chemically synthesized
  source 1..22: mol_type = other DNA
atccattcactctgcaagtatc

SEQ ID NO: 66029 - DNA, 22 bp, synthetic construct
  misc_feature 1..22: note = chemically synthesized
  source 1..22: mol_type = other DNA
actctgcaagtatctacggcac

SEQ ID NO: 66030 - DNA, 22 bp, synthetic construct
  misc_feature 1..22: note = chemically synthesized
  source 1..22: mol_type = other DNA
tgcaagtatctacggcacgtac

SEQ ID NO: 66031 - DNA, 22 bp, synthetic construct
  misc_feature 1..22: note = chemically synthesized
  source 1..22: mol_type = other DNA
caagtatctacggcacgtacgc

SEQ ID NO: 66032 - DNA, 22 bp, synthetic construct
  misc_feature 1..22: note = chemically synthesized
  source 1..22: mol_type = other DNA
cggcacgtacgccagctcccaa

SEQ ID NO: 66033 - DNA, 22 bp, synthetic construct
  misc_feature 1..22: note = chemically synthesized
  source 1..22: mol_type = other DNA
ccaagcaggtttgcgggttgca

SEQ ID NO: 66034 - DNA, 22 bp, synthetic construct
  misc_feature 1..22: note = chemically synthesized
  source 1..22: mol_type = other DNA
gcgggttgcacagcgggcgatg

SEQ ID NO: 66035 - DNA, 22 bp, synthetic construct
  misc_feature 1..22: note = chemically synthesized
  source 1..22: mol_type = other DNA
cgggttgcacagcgggcgatgc

SEQ ID NO: 66036 - DNA, 22 bp, synthetic construct
  misc_feature 1..22: note = chemically synthesized
  source 1..22: mol_type = other DNA
cacagcgggcgatgcaatctga

SEQ ID NO: 66037 - DNA, 22 bp, synthetic construct
  misc_feature 1..22: note = chemically synthesized
  source 1..22: mol_type = other DNA
atttaggcttttaaagggattg

SEQ ID NO: 66038 - DNA, 22 bp, synthetic construct
  misc_feature 1..22: note = chemically synthesized
  source 1..22: mol_type = other DNA
aggcttttaaagggattgcaat

SEQ ID NO: 66039 - DNA, 22 bp, synthetic construct
  misc_feature 1..22: note = chemically synthesized
  source 1..22: mol_type = other DNA
ggcttttaaagggattgcaatc

SEQ ID NO: 66040 - DNA, 22 bp, synthetic construct
  misc_feature 1..22: note = chemically synthesized
  source 1..22: mol_type = other DNA
ttaaagggattgcaatcaagtg

SEQ ID NO: 66041 - DNA, 22 bp, synthetic construct
  misc_feature 1..22: note = chemically synthesized
  source 1..22: mol_type = other DNA
taaagggattgcaatcaagtgg

SEQ ID NO: 66042 - DNA, 22 bp, synthetic construct
  misc_feature 1..22: note = chemically synthesized
  source 1..22: mol_type = other DNA
aaagggattgcaatcaagtggg

SEQ ID NO: 66043 - DNA, 22 bp, synthetic construct
  misc_feature 1..22: note = chemically synthesized
  source 1..22: mol_type = other DNA
aagggattgcaatcaagtgggg

SEQ ID NO: 66044 - DNA, 22 bp, synthetic construct
  misc_feature 1..22: note = chemically synthesized
  source 1..22: mol_type = other DNA
caatcaagtggggccccactag

SEQ ID NO: 66045 - DNA, 22 bp, synthetic construct
  misc_feature 1..22: note = chemically synthesized
  source 1..22: mol_type = other DNA
gcctcaaccctgtacctcccct

SEQ ID NO: 66046 - DNA, 22 bp, synthetic construct
  misc_feature 1..22: note = chemically synthesized
  source 1..22: mol_type = other DNA
aaccctgtacctcccctcccct

SEQ ID NO: 66047 - DNA, 22 bp, synthetic construct
  misc_feature 1..22: note = chemically synthesized
  source 1..22: mol_type = other DNA
tacctcccctcccctccacccc

SEQ ID NO: 66048 - DNA, 22 bp, synthetic construct
  misc_feature 1..22: note = chemically synthesized
  source 1..22: mol_type = other DNA
ccctcccctccacccccagcag

SEQ ID NO: 66049 - DNA, 22 bp, synthetic construct
  misc_feature 1..22: note = chemically synthesized
  source 1..22: mol_type = other DNA
ccctccacccccagcagtctcc

SEQ ID NO: 66050 - DNA, 22 bp, synthetic construct
  misc_feature 1..22: note = chemically synthesized
  source 1..22: mol_type = other DNA
cacccccagcagtctccaaagg

SEQ ID NO: 66051 - DNA, 22 bp, synthetic construct
  misc_feature 1..22: note = chemically synthesized
  source 1..22: mol_type = other DNA
caaaggcctccaacaaccccag

SEQ ID NO: 66052 - DNA, 22 bp, synthetic construct
  misc_feature 1..22: note = chemically synthesized
  source 1..22: mol_type = other DNA
caacaaccccagagtgggggcc

SEQ ID NO: 66053 - DNA, 22 bp, synthetic construct
  misc_feature 1..22: note = chemically synthesized
  source 1..22: mol_type = other DNA
caagctgtatacggatcacact

SEQ ID NO: 66054 - DNA, 22 bp, synthetic construct
  misc_feature 1..22: note = chemically synthesized
  source 1..22: mol_type = other DNA
tatacggatcacactggttttc

SEQ ID NO: 66055 - DNA, 22 bp, synthetic construct
  misc_feature 1..22: note = chemically synthesized
  source 1..22: mol_type = other DNA
gttttccaggagcaaaaacaga

SEQ ID NO: 66056 - DNA, 22 bp, synthetic construct
  misc_feature 1..22: note = chemically synthesized
  source 1..22: mol_type = other DNA
tccaggagcaaaaacagaaaca

SEQ ID NO: 66057 - DNA, 22 bp, synthetic construct
  misc_feature 1..22: note = chemically synthesized
  source 1..22: mol_type = other DNA
ccaggagcaaaaacagaaacag

SEQ ID NO: 66058 - DNA, 22 bp, synthetic construct
  misc_feature 1..22: note = chemically synthesized
  source 1..22: mol_type = other DNA
caggagcaaaaacagaaacagg

SEQ ID NO: 66059 - DNA, 22 bp, synthetic construct
  misc_feature 1..22: note = chemically synthesized
  source 1..22: mol_type = other DNA
aggctggtcaaaattgaacctc

SEQ ID NO: 66060 - DNA, 22 bp, synthetic construct
  misc_feature 1..22: note = chemically synthesized
  source 1..22: mol_type = other DNA
gtcaaaattgaacctcctcctg

SEQ ID NO: 66061 - DNA, 22 bp, synthetic construct
  misc_feature 1..22: note = chemically synthesized
  source 1..22: mol_type = other DNA
aacctcctcctgctctgagcag

SEQ ID NO: 66062 - DNA, 22 bp, synthetic construct
  misc_feature 1..22: note = chemically synthesized
  source 1..22: mol_type = other DNA
ctcctgctctgagcagcctggg

SEQ ID NO: 66063 - DNA, 22 bp, synthetic construct
  misc_feature 1..22: note = chemically synthesized
  source 1..22: mol_type = other DNA
ctgctctgagcagcctgggggg

SEQ ID NO: 66064 - DNA, 22 bp, synthetic construct
  misc_feature 1..22: note = chemically synthesized
  source 1..22: mol_type = other DNA
ctctgagcagcctggggggcag

SEQ ID NO: 66065 - DNA, 22 bp, synthetic construct
  misc_feature 1..22: note = chemically synthesized
  source 1..22: mol_type = other DNA
tgagcagcctggggggcagact

SEQ ID NO: 66066 - DNA, 22 bp, synthetic construct
  misc_feature 1..22: note = chemically synthesized
  source 1..22: mol_type = other DNA
agcagcctggggggcagactaa

SEQ ID NO: 66067 - DNA, 22 bp, synthetic construct
  misc_feature 1..22: note = chemically synthesized
  source 1..22: mol_type = other DNA
gggggcagactaagcagagggc

SEQ ID NO: 66068 - DNA, 22 bp, synthetic construct
  misc_feature 1..22: note = chemically synthesized
  source 1..22: mol_type = other DNA
agcagagggctgtgcagaccca

SEQ ID NO: 66069 - DNA, 22 bp, synthetic construct
  misc_feature 1..22: note = chemically synthesized
  source 1..22: mol_type = other DNA
tgcagacccacataaagagcct

SEQ ID NO: 66070 - DNA, 22 bp, synthetic construct
  misc_feature 1..22: note = chemically synthesized
  source 1..22: mol_type = other DNA
ctgtgtgccaggcacttcaccc

SEQ ID NO: 66071 - DNA, 22 bp, synthetic construct
  misc_feature 1..22: note = chemically synthesized
  source 1..22: mol_type = other DNA
tgtgccaggcacttcacccgag

SEQ ID NO: 66072 - DNA, 22 bp, synthetic construct
  misc_feature 1..22: note = chemically synthesized
  source 1..22: mol_type = other DNA
cacccgaggcacttcacaagca

SEQ ID NO: 66073 - DNA, 22 bp, synthetic construct
  misc_feature 1..22: note = chemically synthesized
  source 1..22: mol_type = other DNA
acccgaggcacttcacaagcat

SEQ ID NO: 66074 - DNA, 22 bp, synthetic construct
  misc_feature 1..22: note = chemically synthesized
  source 1..22: mol_type = other DNA
cacaagcatgcttgggaatgaa

SEQ ID NO: 66075 - DNA, 22 bp, synthetic construct
  misc_feature 1..22: note = chemically synthesized
  source 1..22: mol_type = other DNA
acaagcatgcttgggaatgaaa

SEQ ID NO: 66076 - DNA, 22 bp, synthetic construct
  misc_feature 1..22: note = chemically synthesized
  source 1..22: mol_type = other DNA
gggaatgaaacttccaactctt

SEQ ID NO: 66077 - DNA, 22 bp, synthetic construct
  misc_feature 1..22: note = chemically synthesized
  source 1..22: mol_type = other DNA
ggaatgaaacttccaactcttt

SEQ ID NO: 66078 - DNA, 22 bp, synthetic construct
  misc_feature 1..22: note = chemically synthesized
  source 1..22: mol_type = other DNA
ccaactctttgggatgcaggtg

SEQ ID NO: 66079 - DNA, 22 bp, synthetic construct
  misc_feature 1..22: note = chemically synthesized
  source 1..22: mol_type = other DNA
caactctttgggatgcaggtga

SEQ ID NO: 66080 - DNA, 22 bp, synthetic construct
  misc_feature 1..22: note = chemically synthesized
  source 1..22: mol_type = other DNA
tttgggatgcaggtgaaacagt

SEQ ID NO: 66081 - DNA, 22 bp, synthetic construct
  misc_feature 1..22: note = chemically synthesized
  source 1..22: mol_type = other DNA
tgggatgcaggtgaaacagttc

SEQ ID NO: 66082 - DNA, 22 bp, synthetic construct
  misc_feature 1..22: note = chemically synthesized
  source 1..22: mol_type = other DNA
gggatgcaggtgaaacagttcc

SEQ ID NO: 66083 - DNA, 22 bp, synthetic construct
  misc_feature 1..22: note = chemically synthesized
  source 1..22: mol_type = other DNA
ggatgcaggtgaaacagttcct

SEQ ID NO: 66084 - DNA, 22 bp, synthetic construct
  misc_feature 1..22: note = chemically synthesized
  source 1..22: mol_type = other DNA
ctggttcagagaggtgaagcgg

SEQ ID NO: 66085 - DNA, 22 bp, synthetic construct
  misc_feature 1..22: note = chemically synthesized
  source 1..22: mol_type = other DNA
gttcagagaggtgaagcggcct

SEQ ID NO: 66086 - DNA, 22 bp, synthetic construct
  misc_feature 1..22: note = chemically synthesized
  source 1..22: mol_type = other DNA
agagaggtgaagcggcctgcct

SEQ ID NO: 66087 - DNA, 22 bp, synthetic construct
  misc_feature 1..22: note = chemically synthesized
  source 1..22: mol_type = other DNA
cctgaggcagcacagctcttct

SEQ ID NO: 66088 - DNA, 22 bp, synthetic construct
  misc_feature 1..22: note = chemically synthesized
  source 1..22: mol_type = other DNA
aggcagcacagctcttctttac

SEQ ID NO: 66089 - DNA, 22 bp, synthetic construct
  misc_feature 1..22: note = chemically synthesized
  source 1..22: mol_type = other DNA
ttctttacagatgtgcttcccc

SEQ ID NO: 66090 - DNA, 22 bp, synthetic construct
  misc_feature 1..22: note = chemically synthesized
  source 1..22: mol_type = other DNA
ctttacagatgtgcttccccac

SEQ ID NO: 66091 - DNA, 22 bp, synthetic construct
  misc_feature 1..22: note = chemically synthesized
  source 1..22: mol_type = other DNA
tttacagatgtgcttccccacc

SEQ ID NO: 66092 - DNA, 22 bp, synthetic construct
  misc_feature 1..22: note = chemically synthesized
  source 1..22: mol_type = other DNA
tacagatgtgcttccccacctc

SEQ ID NO: 66093 - DNA, 22 bp, synthetic construct
  misc_feature 1..22: note = chemically synthesized
  source 1..22: mol_type = other DNA
acagatgtgcttccccacctct

SEQ ID NO: 66094 - DNA, 22 bp, synthetic construct
  misc_feature 1..22: note = chemically synthesized
  source 1..22: mol_type = other DNA
cagatgtgcttccccacctcta

SEQ ID NO: 66095 - DNA, 22 bp, synthetic construct
  misc_feature 1..22: note = chemically synthesized
  source 1..22: mol_type = other DNA
ccccacctctaccctgtctcac

SEQ ID NO: 66096 - DNA, 22 bp, synthetic construct
  misc_feature 1..22: note = chemically synthesized
  source 1..22: mol_type = other DNA
cccacctctaccctgtctcacg

SEQ ID NO: 66097 - DNA, 22 bp, synthetic construct
  misc_feature 1..22: note = chemically synthesized
  source 1..22: mol_type = other DNA
taccctgtctcacggcccccca

SEQ ID NO: 66098 - DNA, 22 bp, synthetic construct
  misc_feature 1..22: note = chemically synthesized
  source 1..22: mol_type = other DNA
ccctgtctcacggccccccatg

SEQ ID NO: 66099 - DNA, 22 bp, synthetic construct
  misc_feature 1..22: note = chemically synthesized
  source 1..22: mol_type = other DNA
tctcacggccccccatgccagc

SEQ ID NO: 66100 - DNA, 22 bp, synthetic construct
  misc_feature 1..22: note = chemically synthesized
  source 1..22: mol_type = other DNA
acggccccccatgccagcctga

SEQ ID NO: 66101 - DNA, 22 bp, synthetic construct
  misc_feature 1..22: note = chemically synthesized
  source 1..22: mol_type = other DNA
acggttgtgtctgcctcagtca

SEQ ID NO: 66102 - DNA, 22 bp, synthetic construct
  misc_feature 1..22: note = chemically synthesized
  source 1..22: mol_type = other DNA
tgtctgcctcagtcatgctcca

SEQ ID NO: 66103 - DNA, 22 bp, synthetic construct
  misc_feature 1..22: note = chemically synthesized
  source 1..22: mol_type = other DNA
cctcagtcatgctccatttttc

SEQ ID NO: 66104 - DNA, 22 bp, synthetic construct
  misc_feature 1..22: note = chemically synthesized
  source 1..22: mol_type = other DNA
agtcatgctccatttttccatc

SEQ ID NO: 66105 - DNA, 22 bp, synthetic construct
  misc_feature 1..22: note = chemically synthesized
  source 1..22: mol_type = other DNA
catttttccatcgggaccatca

SEQ ID NO: 66106 - DNA, 22 bp, synthetic construct
  misc_feature 1..22: note = chemically synthesized
  source 1..22: mol_type = other DNA
ttccatcgggaccatcaagagg

SEQ ID NO: 66107 - DNA, 22 bp, synthetic construct
  misc_feature 1..22: note = chemically synthesized
  source 1..22: mol_type = other DNA
tccatcgggaccatcaagaggg

SEQ ID NO: 66108 - DNA, 22 bp, synthetic construct
  misc_feature 1..22: note = chemically synthesized
  source 1..22: mol_type = other DNA
ccatcgggaccatcaagagggt

SEQ ID NO: 66109 - DNA, 22 bp, synthetic construct
  misc_feature 1..22: note = chemically synthesized
  source 1..22: mol_type = other DNA
catcgggaccatcaagagggtg

SEQ ID NO: 66110 - DNA, 22 bp, synthetic construct
  misc_feature 1..22: note = chemically synthesized
  source 1..22: mol_type = other DNA
gtgtctaaggctgactgggtaa

SEQ ID NO: 66111 - DNA, 22 bp, synthetic construct
  misc_feature 1..22: note = chemically synthesized
  source 1..22: mol_type = other DNA
tgtctaaggctgactgggtaac

SEQ ID NO: 66112 - DNA, 22 bp, synthetic construct
  misc_feature 1..22: note = chemically synthesized
  source 1..22: mol_type = other DNA
aggctgactgggtaactttgga

SEQ ID NO: 66113 - DNA, 22 bp, synthetic construct
  misc_feature 1..22: note = chemically synthesized
  source 1..22: mol_type = other DNA
actgggtaactttggatgagcg

SEQ ID NO: 66114 - DNA, 22 bp, synthetic construct
  misc_feature 1..22: note = chemically synthesized
  source 1..22: mol_type = other DNA
ggtaactttggatgagcggtct

SEQ ID NO: 66115 - DNA, 22 bp, synthetic construct
  misc_feature 1..22: note = chemically synthesized
  source 1..22: mol_type = other DNA
tggatgagcggtctctccgctc

SEQ ID NO: 66116 - DNA, 22 bp, synthetic construct
  misc_feature 1..22: note = chemically synthesized
  source 1..22: mol_type = other DNA
ggatgagcggtctctccgctct

SEQ ID NO: 66117 - DNA, 22 bp, synthetic construct
  misc_feature 1..22: note = chemically synthesized
  source 1..22: mol_type = other DNA
gatgagcggtctctccgctctg

SEQ ID NO: 66118 - DNA, 22 bp, synthetic construct
  misc_feature 1..22: note = chemically synthesized
  source 1..22: mol_type = other DNA
tccgctctgagcctgtttcctc

SEQ ID NO: 66119 - DNA, 22 bp, synthetic construct
  misc_feature 1..22: note = chemically synthesized
  source 1..22: mol_type = other DNA
cgctctgagcctgtttcctcat

SEQ ID NO: 66120 - DNA, 22 bp, synthetic construct
  misc_feature 1..22: note = chemically synthesized
  source 1..22: mol_type = other DNA
tgagcctgtttcctcatctgtc

SEQ ID NO: 66121 - DNA, 22 bp, synthetic construct
  misc_feature 1..22: note = chemically synthesized
  source 1..22: mol_type = other DNA
agcctgtttcctcatctgtcaa

SEQ ID NO: 66122 - DNA, 22 bp, synthetic construct
  misc_feature 1..22: note = chemically synthesized
  source 1..22: mol_type = other DNA
tttcctcatctgtcaaatgggc

SEQ ID NO: 66123 - DNA, 22 bp, synthetic construct
  misc_feature 1..22: note = chemically synthesized
  source 1..22: mol_type = other DNA
cctcatctgtcaaatgggctct

SEQ ID NO: 66124 - DNA, 22 bp, synthetic construct
  misc_feature 1..22: note = chemically synthesized
  source 1..22: mol_type = other DNA
ctcatctgtcaaatgggctcta

SEQ ID NO: 66125 - DNA, 22 bp, synthetic construct
  misc_feature 1..22: note = chemically synthesized
  source 1..22: mol_type = other DNA
atctgtcaaatgggctctaacc

SEQ ID NO: 66126 - DNA, 22 bp, synthetic construct
  misc_feature 1..22: note = chemically synthesized
  source 1..22: mol_type = other DNA
tcaaatgggctctaacccactc

SEQ ID NO: 66127 - DNA, 22 bp, synthetic construct
  misc_feature 1..22: note = chemically synthesized
  source 1..22: mol_type = other DNA
taacccactctgatctcccagg

SEQ ID NO: 66128 - DNA, 22 bp, synthetic construct
  misc_feature 1..22: note = chemically synthesized
  source 1..22: mol_type = other DNA
acccactctgatctcccagggc

SEQ ID NO: 66129 - DNA, 22 bp, synthetic construct
  misc_feature 1..22: note = chemically synthesized
  source 1..22: mol_type = other DNA
tgatctcccagggcggcagtaa

SEQ ID NO: 66130 - DNA, 22 bp, synthetic construct
  misc_feature 1..22: note = chemically synthesized
  source 1..22: mol_type = other DNA
atctcccagggcggcagtaagt

SEQ ID NO: 66131 - DNA, 22 bp, synthetic construct
  misc_feature 1..22: note = chemically synthesized
  source 1..22: mol_type = other DNA
ccagggcggcagtaagtcttca

SEQ ID NO: 66132 - DNA, 22 bp, synthetic construct
  misc_feature 1..22: note = chemically synthesized
  source 1..22: mol_type = other DNA
cagcatcaggcattttggggtg

SEQ ID NO: 66133 - DNA, 22 bp, synthetic construct
  misc_feature 1..22: note = chemically synthesized
  source 1..22: mol_type = other DNA
agcatcaggcattttggggtga

SEQ ID NO: 66134 - DNA, 22 bp, synthetic construct
  misc_feature 1..22: note = chemically synthesized
  source 1..22: mol_type = other DNA
tggggtgactcagtaaatggta

SEQ ID NO: 66135 - DNA, 22 bp, synthetic construct
  misc_feature 1..22: note = chemically synthesized
  source 1..22: mol_type = other DNA
ggggtgactcagtaaatggtag

SEQ ID NO: 66136 - DNA, 22 bp, synthetic construct
  misc_feature 1..22: note = chemically synthesized
  source 1..22: mol_type = other DNA
gggtgactcagtaaatggtaga

SEQ ID NO: 66137 - DNA, 22 bp, synthetic construct
  misc_feature 1..22: note = chemically synthesized
  source 1..22: mol_type = other DNA
agtaaatggtagatcttgctac

SEQ ID NO: 66138 - DNA, 22 bp, synthetic construct
  misc_feature 1..22: note = chemically synthesized
  source 1..22: mol_type = other DNA
gctaccagtggaacagccacta

SEQ ID NO: 66139 - DNA, 22 bp, synthetic construct
  misc_feature 1..22: note = chemically synthesized
  source 1..22: mol_type = other DNA
ctaccagtggaacagccactaa

SEQ ID NO: 66140 - DNA, 22 bp, synthetic construct
  misc_feature 1..22: note = chemically synthesized
  source 1..22: mol_type = other DNA
ccagtggaacagccactaagga

SEQ ID NO: 66141 - DNA, 22 bp, synthetic construct
  misc_feature 1..22: note = chemically synthesized
  source 1..22: mol_type = other DNA
aggattctgcagtgagagcaga

SEQ ID NO: 66142 - DNA, 22 bp, synthetic construct
  misc_feature 1..22: note = chemically synthesized
  source 1..22: mol_type = other DNA
tgcagtgagagcagagggccag

SEQ ID NO: 66143 - DNA, 22 bp, synthetic construct
  misc_feature 1..22: note = chemically synthesized
  source 1..22: mol_type = other DNA
cagtgagagcagagggccagct

SEQ ID NO: 66144 - DNA, 22 bp, synthetic construct
  misc_feature 1..22: note = chemically synthesized
  source 1..22: mol_type = other DNA
agtggtactctcccagagactg

SEQ ID NO: 66145 - DNA, 22 bp, synthetic construct
  misc_feature 1..22: note = chemically synthesized
  source 1..22: mol_type = other DNA
tcccagagactgtctgactcac

SEQ ID NO: 66146 - DNA, 22 bp, synthetic construct
  misc_feature 1..22: note = chemically synthesized
  source 1..22: mol_type = other DNA
ccagagactgtctgactcacgc

SEQ ID NO: 66147 - DNA, 22 bp, synthetic construct
  misc_feature 1..22: note = chemically synthesized
  source 1..22: mol_type = other DNA
tctgactcacgccaccccctcc

SEQ ID NO: 66148 - DNA, 22 bp, synthetic construct
  misc_feature 1..22: note = chemically synthesized
  source 1..22: mol_type = other DNA
actcacgccaccccctccacct

SEQ ID NO: 66149 - DNA, 22 bp, synthetic construct
  misc_feature 1..22: note = chemically synthesized
  source 1..22: mol_type = other DNA
acgccaccccctccaccttgga

SEQ ID NO: 66150 - DNA, 22 bp, synthetic construct
  misc_feature 1..22: note = chemically synthesized
  source 1..22: mol_type = other DNA
caccttggacacaggacgctgt

SEQ ID NO: 66151 - DNA, 22 bp, synthetic construct
  misc_feature 1..22: note = chemically synthesized
  source 1..22: mol_type = other DNA
ggacacaggacgctgtggtttc

SEQ ID NO: 66152 - DNA, 22 bp, synthetic construct
  misc_feature 1..22: note = chemically synthesized
  source 1..22: mol_type = other DNA
gacacaggacgctgtggtttct

SEQ ID NO: 66153 - DNA, 22 bp, synthetic construct
  misc_feature 1..22: note = chemically synthesized
  source 1..22: mol_type = other DNA
tggtttctgagccaggtacaat

SEQ ID NO: 66154 - DNA, 22 bp, synthetic construct
  misc_feature 1..22: note = chemically synthesized
  source 1..22: mol_type = other DNA
ctgagccaggtacaatgactcc

SEQ ID NO: 66155 - DNA, 22 bp, synthetic construct
  misc_feature 1..22: note = chemically synthesized
  source 1..22: mol_type = other DNA
tgagccaggtacaatgactcct

SEQ ID NO: 66156 - DNA, 22 bp, synthetic construct
  misc_feature 1..22: note = chemically synthesized
  source 1..22: mol_type = other DNA
agccaggtacaatgactccttt

SEQ ID NO: 66157 - DNA, 22 bp, synthetic construct
  misc_feature 1..22: note = chemically synthesized
  source 1..22: mol_type = other DNA
ctttcggtaagtgcagtggaag

SEQ ID NO: 66158 - DNA, 22 bp, synthetic construct
  misc_feature 1..22: note = chemically synthesized
  source 1..22: mol_type = other DNA
tcggtaagtgcagtggaagctg

SEQ ID NO: 66159 - DNA, 22 bp, synthetic construct
  misc_feature 1..22: note = chemically synthesized
  source 1..22: mol_type = other DNA
cggtaagtgcagtggaagctgt

SEQ ID NO: 66160 - DNA, 22 bp, synthetic construct
  misc_feature 1..22: note = chemically synthesized
  source 1..22: mol_type = other DNA
ggtaagtgcagtggaagctgta

SEQ ID NO: 66161 - DNA, 22 bp, synthetic construct
  misc_feature 1..22: note = chemically synthesized
  source 1..22: mol_type = other DNA
tacactgcccaggcaaagcgtc

SEQ ID NO: 66162 - DNA, 22 bp, synthetic construct
  misc_feature 1..22: note = chemically synthesized
  source 1..22: mol_type = other DNA
cccaggcaaagcgtccgggcag

SEQ ID NO: 66163 - DNA, 22 bp, synthetic construct
  misc_feature 1..22: note = chemically synthesized
  source 1..22: mol_type = other DNA
agatcccagccagtggacttag

SEQ ID NO: 66164 - DNA, 22 bp, synthetic construct
  misc_feature 1..22: note = chemically synthesized
  source 1..22: mol_type = other DNA
agcccctgtttgctcctccgat

SEQ ID NO: 66165 - DNA, 22 bp, synthetic construct
  misc_feature 1..22: note = chemically synthesized
  source 1..22: mol_type = other DNA
gcccctgtttgctcctccgata

SEQ ID NO: 66166 - DNA, 22 bp, synthetic construct
  misc_feature 1..22: note = chemically synthesized
  source 1..22: mol_type = other DNA
tttgctcctccgataactgggg

SEQ ID NO: 66167 - DNA, 22 bp, synthetic construct
  misc_feature 1..22: note = chemically synthesized
  source 1..22: mol_type = other DNA
gctcctccgataactggggtga

SEQ ID NO: 66168 - DNA, 22 bp, synthetic construct
  misc_feature 1..22: note = chemically synthesized
  source 1..22: mol_type = other DNA
ctcctccgataactggggtgac

SEQ ID NO: 66169 - DNA, 22 bp, synthetic construct
  misc_feature 1..22: note = chemically synthesized
  source 1..22: mol_type = other DNA
ctccgataactggggtgacctt

SEQ ID NO: 66170 - DNA, 22 bp, synthetic construct
  misc_feature 1..22: note = chemically synthesized
  source 1..22: mol_type = other DNA
cgataactggggtgaccttggt

SEQ ID NO: 66171 - DNA, 22 bp, synthetic construct
  misc_feature 1..22: note = chemically synthesized
  source 1..22: mol_type = other DNA
gggtgaccttggttaatattca

SEQ ID NO: 66172 - DNA, 22 bp, synthetic construct
  misc_feature 1..22: note = chemically synthesized
  source 1..22: mol_type = other DNA
ggttaatattcaccagcagcct

SEQ ID NO: 66173 - DNA, 22 bp, synthetic construct
  misc_feature 1..22: note = chemically synthesized
  source 1..22: mol_type = other DNA
gttaatattcaccagcagcctc

SEQ ID NO: 66174 - DNA, 22 bp, synthetic construct
  misc_feature 1..22: note = chemically synthesized
  source 1..22: mol_type = other DNA
atattcaccagcagcctccccc

SEQ ID NO: 66175 - DNA, 22 bp, synthetic construct
  misc_feature 1..22: note = chemically synthesized
  source 1..22: mol_type = other DNA
accagcagcctcccccgttgcc

SEQ ID NO: 66176 - DNA, 22 bp, synthetic construct
  misc_feature 1..22: note = chemically synthesized
  source 1..22: mol_type = other DNA
ccccgttgcccctctggatcca

SEQ ID NO: 66177 - DNA, 22 bp, synthetic construct
  misc_feature 1..22: note = chemically synthesized
  source 1..22: mol_type = other DNA
cccctctggatccactgcttaa

SEQ ID NO: 66178 - DNA, 22 bp, synthetic construct
  misc_feature 1..22: note = chemically synthesized
  source 1..22: mol_type = other DNA
tggatccactgcttaaatacgg

SEQ ID NO: 66179 - DNA, 22 bp, synthetic construct
  misc_feature 1..22: note = chemically synthesized
  source 1..22: mol_type = other DNA
gatccactgcttaaatacggac

SEQ ID NO: 66180 - DNA, 22 bp, synthetic construct
  misc_feature 1..22: note = chemically synthesized
  source 1..22: mol_type = other DNA
cttaaatacggacgaggacagg

SEQ ID NO: 66181 - DNA, 22 bp, synthetic construct
  misc_feature 1..22: note = chemically synthesized
  source 1..22: mol_type = other DNA
aaatacggacgaggacagggcc

SEQ ID NO: 66182 - DNA, 22 bp, synthetic construct
  misc_feature 1..22: note = chemically synthesized
  source 1..22: mol_type = other DNA
aatacggacgaggacagggccc

SEQ ID NO: 66183 - DNA, 22 bp, synthetic construct
  misc_feature 1..22: note = chemically synthesized
  source 1..22: mol_type = other DNA
tctcctcagcttcaggcaccac

SEQ ID NO: 66184 - DNA, 22 bp, synthetic construct
  misc_feature 1..22: note = chemically synthesized
  source 1..22: mol_type = other DNA
ctcagcttcaggcaccaccact

SEQ ID NO: 66185 - DNA, 22 bp, synthetic construct
  misc_feature 1..22: note = chemically synthesized
  source 1..22: mol_type = other DNA
agcttcaggcaccaccactgac

SEQ ID NO: 66186 - DNA, 22 bp, synthetic construct
  misc_feature 1..22: note = chemically synthesized
  source 1..22: mol_type = other DNA
caggcaccaccactgacctggg

SEQ ID NO: 66187 - DNA, 22 bp, synthetic construct
  misc_feature 1..22: note = chemically synthesized
  source 1..22: mol_type = other DNA
aggcaccaccactgacctggga

SEQ ID NO: 66188 - DNA, 22 bp, synthetic construct
  misc_feature 1..22: note = chemically synthesized
  source 1..22: mol_type = other DNA
acctgggacagtgaatcgtaag

SEQ ID NO: 66189 - DNA, 22 bp, synthetic construct
  misc_feature 1..22: note = chemically synthesized
  source 1..22: mol_type = other DNA
ggacagtgaatcgtaagtatgc

SEQ ID NO: 66190 - DNA, 22 bp, synthetic construct
  misc_feature 1..22: note = chemically synthesized
  source 1..22: mol_type = other DNA
tcactgcgagaggttctggaga

SEQ ID NO: 66191 - DNA, 22 bp, synthetic construct
  misc_feature 1..22: note = chemically synthesized
  source 1..22: mol_type = other DNA
cactgcgagaggttctggagag

SEQ ID NO: 66192 - DNA, 22 bp, synthetic construct
  misc_feature 1..22: note = chemically synthesized
  source 1..22: mol_type = other DNA
actgcgagaggttctggagagg

SEQ ID NO: 66193 - DNA, 22 bp, synthetic construct
  misc_feature 1..22: note = chemically synthesized
  source 1..22: mol_type = other DNA
cgagaggttctggagaggcttc

SEQ ID NO: 66194 - DNA, 22 bp, synthetic construct
  misc_feature 1..22: note = chemically synthesized
  source 1..22: mol_type = other DNA
tggagaggcttctgagctcccc

SEQ ID NO: 66195 - DNA, 22 bp, synthetic construct
  misc_feature 1..22: note = chemically synthesized
  source 1..22: mol_type = other DNA
gagaggcttctgagctccccat

SEQ ID NO: 66196 - DNA, 22 bp, synthetic construct
  misc_feature 1..22: note = chemically synthesized
  source 1..22: mol_type = other DNA
ctgagctccccatggcccaggc

SEQ ID NO: 66197 - DNA, 22 bp, synthetic construct
  misc_feature 1..22: note = chemically synthesized
  source 1..22: mol_type = other DNA
tgagctccccatggcccaggca

SEQ ID NO: 66198 - DNA, 22 bp, synthetic construct
  misc_feature 1..22: note = chemically synthesized
  source 1..22: mol_type = other DNA
agctccccatggcccaggcagg

SEQ ID NO: 66199 - DNA, 22 bp, synthetic construct
  misc_feature 1..22: note = chemically synthesized
  source 1..22: mol_type = other DNA
cccatggcccaggcaggcagca

SEQ ID NO: 66200 - DNA, 22 bp, synthetic construct
  misc_feature 1..22: note = chemically synthesized
  source 1..22: mol_type = other DNA
gggcaggaggggggttgtggag

SEQ ID NO: 66201 - DNA, 22 bp, synthetic construct
  misc_feature 1..22: note = chemically synthesized
  source 1..22: mol_type = other DNA
tggagtgggtatccgcctgctg

SEQ ID NO: 66202 - DNA, 22 bp, synthetic construct
  misc_feature 1..22: note = chemically synthesized
  source 1..22: mol_type = other DNA
ctgaggtgcagggcagatggag

SEQ ID NO: 66203 - DNA, 22 bp, synthetic construct
  misc_feature 1..22: note = chemically synthesized
  source 1..22: mol_type = other DNA
aggtgcagggcagatggagagg

SEQ ID NO: 66204 - DNA, 22 bp, synthetic construct
  misc_feature 1..22: note = chemically synthesized
  source 1..22: mol_type = other DNA
cagctgagctcctattttcata

SEQ ID NO: 66205 - DNA, 22 bp, synthetic construct
  misc_feature 1..22: note = chemically synthesized
  source 1..22: mol_type = other DNA
agctcctattttcataataaca

SEQ ID NO: 66206 - DNA, 22 bp, synthetic construct
  misc_feature 1..22: note = chemically synthesized
  source 1..22: mol_type = other DNA
ctattttcataataacagcagc

SEQ ID NO: 66207 - DNA, 22 bp, synthetic construct
  misc_feature 1..22: note = chemically synthesized
  source 1..22: mol_type = other DNA
ttttcataataacagcagccat

SEQ ID NO: 66208 - DNA, 22 bp, synthetic construct
  misc_feature 1..22: note = chemically synthesized
  source 1..22: mol_type = other DNA
tcataataacagcagccatgag

SEQ ID NO: 66209 - DNA, 22 bp, synthetic construct
  misc_feature 1..22: note = chemically synthesized
  source 1..22: mol_type = other DNA
cataataacagcagccatgagg

SEQ ID NO: 66210 - DNA, 22 bp, synthetic construct
  misc_feature 1..22: note = chemically synthesized
  source 1..22: mol_type = other DNA
ataataacagcagccatgaggg

SEQ ID NO: 66211 - DNA, 22 bp, synthetic construct
  misc_feature 1..22: note = chemically synthesized
  source 1..22: mol_type = other DNA
tgtcctgtttcccagtcctgcc

SEQ ID NO: 66212 - DNA, 22 bp, synthetic construct
  misc_feature 1..22: note = chemically synthesized
  source 1..22: mol_type = other DNA
tttcccagtcctgcccggtccc

SEQ ID NO: 66213 - DNA, 22 bp, synthetic construct
  misc_feature 1..22: note = chemically synthesized
  source 1..22: mol_type = other DNA
cccagtcctgcccggtcccccc

SEQ ID NO: 66214 - DNA, 22 bp, synthetic construct
  misc_feature 1..22: note = chemically synthesized
  source 1..22: mol_type = other DNA
ccagtcctgcccggtcccccct

SEQ ID NO: 66215 - DNA, 22 bp, synthetic construct
  misc_feature 1..22: note = chemically synthesized
  source 1..22: mol_type = other DNA
cccggtcccccctcggtacctc

SEQ ID NO: 66216 - DNA, 22 bp, synthetic construct
  misc_feature 1..22: note = chemically synthesized
  source 1..22: mol_type = other DNA
ggtacctcctggtggatacact

SEQ ID NO: 66217 - DNA, 22 bp, synthetic construct
  misc_feature 1..22: note = chemically synthesized
  source 1..22: mol_type = other DNA
ctggtggatacactggttcctg

SEQ ID NO: 66218 - DNA, 22 bp, synthetic construct
  misc_feature 1..22: note = chemically synthesized
  source 1..22: mol_type = other DNA
gtggatacactggttcctgtaa

SEQ ID NO: 66219 - DNA, 22 bp, synthetic construct
  misc_feature 1..22: note = chemically synthesized
  source 1..22: mol_type = other DNA
gttcctgtaagcagaagtggat

SEQ ID NO: 66220 - DNA, 22 bp, synthetic construct
  misc_feature 1..22: note = chemically synthesized
  source 1..22: mol_type = other DNA
ctgtaagcagaagtggatgagg

SEQ ID NO: 66221 - DNA, 22 bp, synthetic construct
  misc_feature 1..22: note = chemically synthesized
  source 1..22: mol_type = other DNA
taagcagaagtggatgagggtg

SEQ ID NO: 66222 - DNA, 22 bp, synthetic construct
  misc_feature 1..22: note = chemically synthesized
  source 1..22: mol_type = other DNA
ggtctgcagtcctggcacccca

SEQ ID NO: 66223 - DNA, 22 bp, synthetic construct
  misc_feature 1..22: note = chemically synthesized
  source 1..22: mol_type = other DNA
cagtcctggcaccccaggatgg

SEQ ID NO: 66224 - DNA, 22 bp, synthetic construct
  misc_feature 1..22: note = chemically synthesized
  source 1..22: mol_type = other DNA
gcaccccaggatgggggacacc

SEQ ID NO: 66225 - DNA, 22 bp, synthetic construct
  misc_feature 1..22: note = chemically synthesized
  source 1..22: mol_type = other DNA
ctttctgtttgcacagctcctc

SEQ ID NO: 66226 - DNA, 22 bp, synthetic construct
  misc_feature 1..22: note = chemically synthesized
  source 1..22: mol_type = other DNA
tttctgtttgcacagctcctct

SEQ ID NO: 66227 - DNA, 22 bp, synthetic construct
  misc_feature 1..22: note = chemically synthesized
  source 1..22: mol_type = other DNA
tctgtttgcacagctcctctgt

SEQ ID NO: 66228 - DNA, 22 bp, synthetic construct
  misc_feature 1..22: note = chemically synthesized
  source 1..22: mol_type = other DNA
ctgtttgcacagctcctctgtc

SEQ ID NO: 66229 - DNA, 22 bp, synthetic construct
  misc_feature 1..22: note = chemically synthesized
  source 1..22: mol_type = other DNA
tgtttgcacagctcctctgtct

SEQ ID NO: 66230 - DNA, 22 bp, synthetic construct
  misc_feature 1..22: note = chemically synthesized
  source 1..22: mol_type = other DNA
tttgcacagctcctctgtctgt

SEQ ID NO: 66231 - DNA, 22 bp, synthetic construct
  misc_feature 1..22: note = chemically synthesized
  source 1..22: mol_type = other DNA
gcacagctcctctgtctgtcgg

SEQ ID NO: 66232 - DNA, 22 bp, synthetic construct
  misc_feature 1..22: note = chemically synthesized
  source 1..22: mol_type = other DNA
cacagctcctctgtctgtcggg

SEQ ID NO: 66233 - DNA, 22 bp, synthetic construct
  misc_feature 1..22: note = chemically synthesized
  source 1..22: mol_type = other DNA
ctctgtctgtcgggggctcctg

SEQ ID NO: 66234 - DNA, 22 bp, synthetic construct
  misc_feature 1..22: note = chemically synthesized
  source 1..22: mol_type = other DNA
tgtctgtcgggggctcctgtct

SEQ ID NO: 66235 - DNA, 22 bp, synthetic construct
  misc_feature 1..22: note = chemically synthesized
  source 1..22: mol_type = other DNA
tctgtcgggggctcctgtctgt

SEQ ID NO: 66236 - DNA, 22 bp, synthetic construct
  misc_feature 1..22: note = chemically synthesized
  source 1..22: mol_type = other DNA
tcgggggctcctgtctgttgtc

SEQ ID NO: 66237 - DNA, 22 bp, synthetic construct
  misc_feature 1..22: note = chemically synthesized
  source 1..22: mol_type = other DNA
ctgtctgttgtctcctataagc

SEQ ID NO: 66238 - DNA, 22 bp, synthetic construct
  misc_feature 1..22: note = chemically synthesized
  source 1..22: mol_type = other DNA
tctgttgtctcctataagcctc

SEQ ID NO: 66239 - DNA, 22 bp, synthetic construct
  misc_feature 1..22: note = chemically synthesized
  source 1..22: mol_type = other DNA
ttgtctcctataagcctcacca

SEQ ID NO: 66240 - DNA, 22 bp, synthetic construct
  misc_feature 1..22: note = chemically synthesized
  source 1..22: mol_type = other DNA
tctcctataagcctcaccacct

SEQ ID NO: 66241 - DNA, 22 bp, synthetic construct
  misc_feature 1..22: note = chemically synthesized
  source 1..22: mol_type = other DNA
ctataagcctcaccacctctcc

SEQ ID NO: 66242 - DNA, 22 bp, synthetic construct
  misc_feature 1..22: note = chemically synthesized
  source 1..22: mol_type = other DNA
taagcctcaccacctctcctac

SEQ ID NO: 66243 - DNA, 22 bp, synthetic construct
  misc_feature 1..22: note = chemically synthesized
  source 1..22: mol_type = other DNA
accacctctcctactgcttggg

SEQ ID NO: 66244 - DNA, 22 bp, synthetic construct
  misc_feature 1..22: note = chemically synthesized
  source 1..22: mol_type = other DNA
tcctactgcttgggcatgcatc

SEQ ID NO: 66245 - DNA, 22 bp, synthetic construct
  misc_feature 1..22: note = chemically synthesized
  source 1..22: mol_type = other DNA
ctactgcttgggcatgcatctt

SEQ ID NO: 66246 - DNA, 22 bp, synthetic construct
  misc_feature 1..22: note = chemically synthesized
  source 1..22: mol_type = other DNA
ctgcttgggcatgcatctttct

SEQ ID NO: 66247 - DNA, 22 bp, synthetic construct
  misc_feature 1..22: note = chemically synthesized
  source 1..22: mol_type = other DNA
cttgggcatgcatctttctccc

SEQ ID NO: 66248 - DNA, 22 bp, synthetic construct
  misc_feature 1..22: note = chemically synthesized
  source 1..22: mol_type = other DNA
gggcatgcatctttctcccctt

SEQ ID NO: 66249 - DNA, 22 bp, synthetic construct
  misc_feature 1..22: note = chemically synthesized
  source 1..22: mol_type = other DNA
ggcatgcatctttctccccttc

SEQ ID NO: 66250 - DNA, 22 bp, synthetic construct
  misc_feature 1..22: note = chemically synthesized
  source 1..22: mol_type = other DNA
tctccccttctatagatgagga

SEQ ID NO: 66251 - DNA, 22 bp, synthetic construct
  misc_feature 1..22: note = chemically synthesized
  source 1..22: mol_type = other DNA
ctccccttctatagatgaggag

SEQ ID NO: 66252 - DNA, 22 bp, synthetic construct
  misc_feature 1..22: note = chemically synthesized
  source 1..22: mol_type = other DNA
tccccttctatagatgaggagg

SEQ ID NO: 66253 - DNA, 22 bp, synthetic construct
  misc_feature 1..22: note = chemically synthesized
  source 1..22: mol_type = other DNA
cccttctatagatgaggaggtt

SEQ ID NO: 66254 - DNA, 22 bp, synthetic construct
  misc_feature 1..22: note = chemically synthesized
  source 1..22: mol_type = other DNA
ctatagatgaggaggttaaggt

SEQ ID NO: 66255 - DNA, 22 bp, synthetic construct
  misc_feature 1..22: note = chemically synthesized
  source 1..22: mol_type = other DNA
tatagatgaggaggttaaggtc

SEQ ID NO: 66256 - DNA, 22 bp, synthetic construct
  misc_feature 1..22: note = chemically synthesized
  source 1..22: mol_type = other DNA
tagatgaggaggttaaggtcca

SEQ ID NO: 66257 - DNA, 22 bp, synthetic construct
  misc_feature 1..22: note = chemically synthesized
  source 1..22: mol_type = other DNA
aggtccagagaggggtggggag

SEQ ID NO: 66258 - DNA, 22 bp, synthetic construct
  misc_feature 1..22: note = chemically synthesized
  source 1..22: mol_type = other DNA
acattctccatcccctccagat

SEQ ID NO: 66259 - DNA, 22 bp, synthetic construct
  misc_feature 1..22: note = chemically synthesized
  source 1..22: mol_type = other DNA
tccatcccctccagatatgacc

SEQ ID NO: 66260 - DNA, 22 bp, synthetic construct
  misc_feature 1..22: note = chemically synthesized
  source 1..22: mol_type = other DNA
catcccctccagatatgaccag

SEQ ID NO: 66261 - DNA, 22 bp, synthetic construct
  misc_feature 1..22: note = chemically synthesized
  source 1..22: mol_type = other DNA
cagatatgaccaggaacagacc

SEQ ID NO: 66262 - DNA, 22 bp, synthetic construct
  misc_feature 1..22: note = chemically synthesized
  source 1..22: mol_type = other DNA
tgccaggcctcagccttacatc

SEQ ID NO: 66263 - DNA, 22 bp, synthetic construct
  misc_feature 1..22: note = chemically synthesized
  source 1..22: mol_type = other DNA
agccttacatcaaaatgggcct

SEQ ID NO: 66264 - DNA, 22 bp, synthetic construct
  misc_feature 1..22: note = chemically synthesized
  source 1..22: mol_type = other DNA
acatcaaaatgggcctccccat

SEQ ID NO: 66265 - DNA, 22 bp, synthetic construct
  misc_feature 1..22: note = chemically synthesized
  source 1..22: mol_type = other DNA
catcaaaatgggcctccccatg

SEQ ID NO: 66266 - DNA, 22 bp, synthetic construct
  misc_feature 1..22: note = chemically synthesized
  source 1..22: mol_type = other DNA
cccatgcaccgtggacctctgg

SEQ ID NO: 66267 - DNA, 22 bp, synthetic construct
  misc_feature 1..22: note = chemically synthesized
  source 1..22: mol_type = other DNA
tgggccctcctgtcccagtgga

SEQ ID NO: 66268 - DNA, 22 bp, synthetic construct
  misc_feature 1..22: note = chemically synthesized
  source 1..22: mol_type = other DNA
ggccctcctgtcccagtggagg

SEQ ID NO: 66269 - DNA, 22 bp, synthetic construct
  misc_feature 1..22: note = chemically synthesized
  source 1..22: mol_type = other DNA
ctgtcccagtggaggacaggaa

SEQ ID NO: 66270 - DNA, 22 bp, synthetic construct
  misc_feature 1..22: note = chemically synthesized
  source 1..22: mol_type = other DNA
tcccagtggaggacaggaagct

SEQ ID NO: 66271 - DNA, 22 bp, synthetic construct
  misc_feature 1..22: note = chemically synthesized
  source 1..22: mol_type = other DNA
tgaggggcactgtcacccaggg

SEQ ID NO: 66272 - DNA, 22 bp, synthetic construct
  misc_feature 1..22: note = chemically synthesized
  source 1..22: mol_type = other DNA
tcacccagggctcaagctggca

SEQ ID NO: 66273 - DNA, 22 bp, synthetic construct
  misc_feature 1..22: note = chemically synthesized
  source 1..22: mol_type = other DNA
aagctggcattcctgaataatc

SEQ ID NO: 66274 - DNA, 22 bp, synthetic construct
  misc_feature 1..22: note = chemically synthesized
  source 1..22: mol_type = other DNA
gcattcctgaataatcgctctg

SEQ ID NO: 66275 - DNA, 22 bp, synthetic construct
  misc_feature 1..22: note = chemically synthesized
  source 1..22: mol_type = other DNA
ctgaataatcgctctgcaccag

SEQ ID NO: 66276 - DNA, 22 bp, synthetic construct
  misc_feature 1..22: note = chemically synthesized
  source 1..22: mol_type = other DNA
aataatcgctctgcaccaggcc

SEQ ID NO: 66277 - DNA, 22 bp, synthetic construct
  misc_feature 1..22: note = chemically synthesized
  source 1..22: mol_type = other DNA
tgcaccaggccacggctaagct

SEQ ID NO: 66278 - DNA, 22 bp, synthetic construct
  misc_feature 1..22: note = chemically synthesized
  source 1..22: mol_type = other DNA
caccaggccacggctaagctca

SEQ ID NO: 66279 - DNA, 22 bp, synthetic construct
  misc_feature 1..22: note = chemically synthesized
  source 1..22: mol_type = other DNA
agctcagtgcgtgattaagcct

SEQ ID NO: 66280 - DNA, 22 bp, synthetic construct
  misc_feature 1..22: note = chemically synthesized
  source 1..22: mol_type = other DNA
agtgcgtgattaagcctcataa

SEQ ID NO: 66281 - DNA, 22 bp, synthetic construct
  misc_feature 1..22: note = chemically synthesized
  source 1..22: mol_type = other DNA
agcctcataaccctccaaggca

SEQ ID NO: 66282 - DNA, 22 bp, synthetic construct
  misc_feature 1..22: note = chemically synthesized
  source 1..22: mol_type = other DNA
ataaccctccaaggcagttact

SEQ ID NO: 66283 - DNA, 22 bp, synthetic construct
  misc_feature 1..22: note = chemically synthesized
  source 1..22: mol_type = other DNA
caaggcagttactagtgtgatt

SEQ ID NO: 66284 - DNA, 22 bp, synthetic construct
  misc_feature 1..22: note = chemically synthesized
  source 1..22: mol_type = other DNA
ctagtgtgattcccattttaca

SEQ ID NO: 66285 - DNA, 22 bp, synthetic construct
  misc_feature 1..22: note = chemically synthesized
  source 1..22: mol_type = other DNA
gtgtgattcccattttacagat

SEQ ID NO: 66286 - DNA, 22 bp, synthetic construct
  misc_feature 1..22: note = chemically synthesized
  source 1..22: mol_type = other DNA
ccattttacagatgaggaagat

SEQ ID NO: 66287 - DNA, 22 bp, synthetic construct
  misc_feature 1..22: note = chemically synthesized
  source 1..22: mol_type = other DNA
tacagatgaggaagatggggac

SEQ ID NO: 66288 - DNA, 22 bp, synthetic construct
  misc_feature 1..22: note = chemically synthesized
  source 1..22: mol_type = other DNA
acagatgaggaagatggggaca

SEQ ID NO: 66289 - DNA, 22 bp, synthetic construct
  misc_feature 1..22: note = chemically synthesized
  source 1..22: mol_type = other DNA
cagatgaggaagatggggacag

SEQ ID NO: 66290 - DNA, 22 bp, synthetic construct
  misc_feature 1..22: note = chemically synthesized
  source 1..22: mol_type = other DNA
gccccaaatcacacaccatcca

SEQ ID NO: 66291 - DNA, 22 bp, synthetic construct
  misc_feature 1..22: note = chemically synthesized
  source 1..22: mol_type = other DNA
gggctcaggcacctggctccag

SEQ ID NO: 66292 - DNA, 22 bp, synthetic construct
  misc_feature 1..22: note = chemically synthesized
  source 1..22: mol_type = other DNA
aggcacctggctccagtcccca

SEQ ID NO: 66293 - DNA, 22 bp, synthetic construct
  misc_feature 1..22: note = chemically synthesized
  source 1..22: mol_type = other DNA
gctccagtccccaaactcttga

SEQ ID NO: 66294 - DNA, 22 bp, synthetic construct
  misc_feature 1..22: note = chemically synthesized
  source 1..22: mol_type = other DNA
cagtccccaaactcttgaacct

SEQ ID NO: 66295 - DNA, 22 bp, synthetic construct
  misc_feature 1..22: note = chemically synthesized
  source 1..22: mol_type = other DNA
ttgaacctggccctagtgtcac

SEQ ID NO: 66296 - DNA, 22 bp, synthetic construct
  misc_feature 1..22: note = chemically synthesized
  source 1..22: mol_type = other DNA
gaacctggccctagtgtcactg

SEQ ID NO: 66297 - DNA, 22 bp, synthetic construct
  misc_feature 1..22: note = chemically synthesized
  source 1..22: mol_type = other DNA
aacctggccctagtgtcactgt

SEQ ID NO: 66298 - DNA, 22 bp, synthetic construct
  misc_feature 1..22: note = chemically synthesized
  source 1..22: mol_type = other DNA
gccctagtgtcactgtttctct

SEQ ID NO: 66299 - DNA, 22 bp, synthetic construct
  misc_feature 1..22: note = chemically synthesized
  source 1..22: mol_type = other DNA
gtgtcactgtttctcttgggtc

SEQ ID NO: 66300 - DNA, 22 bp, synthetic construct
  misc_feature 1..22: note = chemically synthesized
  source 1..22: mol_type = other DNA
tttctcttgggtctcaggcgct

SEQ ID NO: 66301 - DNA, 22 bp, synthetic construct
  misc_feature 1..22: note = chemically synthesized
  source 1..22: mol_type = other DNA
ctcttgggtctcaggcgctgga

SEQ ID NO: 66302 - DNA, 22 bp, synthetic construct
  misc_feature 1..22: note = chemically synthesized
  source 1..22: mol_type = other DNA
tcttgggtctcaggcgctggat

SEQ ID NO: 66303 - DNA, 22 bp, synthetic construct
  misc_feature 1..22: note = chemically synthesized
  source 1..22: mol_type = other DNA
ttgggtctcaggcgctggatgg

SEQ ID NO: 66304 - DNA, 22 bp, synthetic construct
  misc_feature 1..22: note = chemically synthesized
  source 1..22: mol_type = other DNA
gggtctcaggcgctggatgggg

SEQ ID NO: 66305 - DNA, 22 bp, synthetic construct
  misc_feature 1..22: note = chemically synthesized
  source 1..22: mol_type = other DNA
ggtctcaggcgctggatgggga

SEQ ID NO: 66306 - DNA, 22 bp, synthetic construct
  misc_feature 1..22: note = chemically synthesized
  source 1..22: mol_type = other DNA
aggcgctggatggggaacagga

SEQ ID NO: 66307 - DNA, 22 bp, synthetic construct
  misc_feature 1..22: note = chemically synthesized
  source 1..22: mol_type = other DNA
gatggggaacaggaaacctggg

SEQ ID NO: 66308 - DNA, 22 bp, synthetic construct
  misc_feature 1..22: note = chemically synthesized
  source 1..22: mol_type = other DNA
ggctggacttgaggcctctctg

SEQ ID NO: 66309 - DNA, 22 bp, synthetic construct
  misc_feature 1..22: note = chemically synthesized
  source 1..22: mol_type = other DNA
gacttgaggcctctctgatgct

SEQ ID NO: 66310 - DNA, 22 bp, synthetic construct
  misc_feature 1..22: note = chemically synthesized
  source 1..22: mol_type = other DNA
gaggcctctctgatgctcggtg

SEQ ID NO: 66311 - DNA, 22 bp, synthetic construct
  misc_feature 1..22: note = chemically synthesized
  source 1..22: mol_type = other DNA
aggcctctctgatgctcggtga

SEQ ID NO: 66312 - DNA, 22 bp, synthetic construct
  misc_feature 1..22: note = chemically synthesized
  source 1..22: mol_type = other DNA
tctgatgctcggtgacttcaga

SEQ ID NO: 66313 - DNA, 22 bp, synthetic construct
  misc_feature 1..22: note = chemically synthesized
  source 1..22: mol_type = other DNA
tgatgctcggtgacttcagaca

SEQ ID NO: 66314 - DNA, 22 bp, synthetic construct
  misc_feature 1..22: note = chemically synthesized
  source 1..22: mol_type = other DNA
atgctcggtgacttcagacagt

SEQ ID NO: 66315 - DNA, 22 bp, synthetic construct
  misc_feature 1..22: note = chemically synthesized
  source 1..22: mol_type = other DNA
ggtgacttcagacagttgctca

SEQ ID NO: 66316 - DNA, 22 bp, synthetic construct
  misc_feature 1..22: note = chemically synthesized
  source 1..22: mol_type = other DNA
cagacagttgctcaacctctct

SEQ ID NO: 66317 - DNA, 22 bp, synthetic construct
  misc_feature 1..22: note = chemically synthesized
  source 1..22: mol_type = other DNA
agacagttgctcaacctctctg

SEQ ID NO: 66318 - DNA, 22 bp, synthetic construct
  misc_feature 1..22: note = chemically synthesized
  source 1..22: mol_type = other DNA
ctcaacctctctgttctcttgg

SEQ ID NO: 66319 - DNA, 22 bp, synthetic construct
  misc_feature 1..22: note = chemically synthesized
  source 1..22: mol_type = other DNA
aacctctctgttctcttgggca

SEQ ID NO: 66320 - DNA, 22 bp, synthetic construct
  misc_feature 1..22: note = chemically synthesized
  source 1..22: mol_type = other DNA
tctgttctcttgggcaaaacat

SEQ ID NO: 66321 - DNA, 22 bp, synthetic construct
  misc_feature 1..22: note = chemically synthesized
  source 1..22: mol_type = other DNA
tgttctcttgggcaaaacatga

SEQ ID NO: 66322 - DNA, 22 bp, synthetic construct
  misc_feature 1..22: note = chemically synthesized
  source 1..22: mol_type = other DNA
ttctcttgggcaaaacatgata

SEQ ID NO: 66323 - DNA, 22 bp, synthetic construct
  misc_feature 1..22: note = chemically synthesized
  source 1..22: mol_type = other DNA
tcttgggcaaaacatgataacc

SEQ ID NO: 66324 - DNA, 22 bp, synthetic construct
  misc_feature 1..22: note = chemically synthesized
  source 1..22: mol_type = other DNA
ttgggcaaaacatgataacctt

SEQ ID NO: 66325 - DNA, 22 bp, synthetic construct
  misc_feature 1..22: note = chemically synthesized
  source 1..22: mol_type = other DNA
gggcaaaacatgataacctttg

SEQ ID NO: 66326 - DNA, 22 bp, synthetic construct
  misc_feature 1..22: note = chemically synthesized
  source 1..22: mol_type = other DNA
ggcaaaacatgataacctttga

SEQ ID NO: 66327 - DNA, 22 bp, synthetic construct
  misc_feature 1..22: note = chemically synthesized
  source 1..22: mol_type = other DNA
tgacttctgtcccctcccctca

SEQ ID NO: 66328 - DNA, 22 bp, synthetic construct
  misc_feature 1..22: note = chemically synthesized
  source 1..22: mol_type = other DNA
gacttctgtcccctcccctcac

SEQ ID NO: 66329 - DNA, 22 bp, synthetic construct
  misc_feature 1..22: note = chemically synthesized
  source 1..22: mol_type = other DNA
acttctgtcccctcccctcacc

SEQ ID NO: 66330 - DNA, 22 bp, synthetic construct
  misc_feature 1..22: note = chemically synthesized
  source 1..22: mol_type = other DNA
ctgtcccctcccctcaccccac

SEQ ID NO: 66331 - DNA, 22 bp, synthetic construct
  misc_feature 1..22: note = chemically synthesized
  source 1..22: mol_type = other DNA
tgtcccctcccctcaccccacc

SEQ ID NO: 66332 - DNA, 22 bp, synthetic construct
  misc_feature 1..22: note = chemically synthesized
  source 1..22: mol_type = other DNA
tcccctcccctcaccccacccg

SEQ ID NO: 66333 - DNA, 22 bp, synthetic construct
  misc_feature 1..22: note = chemically synthesized
  source 1..22: mol_type = other DNA
ccctcaccccacccgaccttga

SEQ ID NO: 66334 - DNA, 22 bp, synthetic construct
  misc_feature 1..22: note = chemically synthesized
  source 1..22: mol_type = other DNA
accccacccgaccttgatctct

SEQ ID NO: 66335 - DNA, 22 bp, synthetic construct
  misc_feature 1..22: note = chemically synthesized
  source 1..22: mol_type = other DNA
gatctctgaagtgttggaagga

SEQ ID NO: 66336 - DNA, 22 bp, synthetic construct
  misc_feature 1..22: note = chemically synthesized
  source 1..22: mol_type = other DNA
atctctgaagtgttggaaggat

SEQ ID NO: 66337 - DNA, 22 bp, synthetic construct
  misc_feature 1..22: note = chemically synthesized
  source 1..22: mol_type = other DNA
tgaagtgttggaaggatttaat

SEQ ID NO: 66338 - DNA, 22 bp, synthetic construct
  misc_feature 1..22: note = chemically synthesized
  source 1..22: mol_type = other DNA
aagtgttggaaggatttaattt

SEQ ID NO: 66339 - DNA, 22 bp, synthetic construct
  misc_feature 1..22: note = chemically synthesized
  source 1..22: mol_type = other DNA
gaaggatttaatttttcctgca

SEQ ID NO: 66340 - DNA, 22 bp, synthetic construct
  misc_feature 1..22: note = chemically synthesized
  source 1..22: mol_type = other DNA
aatttttcctgcactgagtttt

SEQ ID NO: 66341 - DNA, 22 bp, synthetic construct
  misc_feature 1..22: note = chemically synthesized
  source 1..22: mol_type = other DNA
atttttcctgcactgagttttg

SEQ ID NO: 66342 - DNA, 22 bp, synthetic construct
  misc_feature 1..22: note = chemically synthesized
  source 1..22: mol_type = other DNA
ttcctgcactgagttttggaga

SEQ ID NO: 66343 - DNA, 22 bp, synthetic construct
  misc_feature 1..22: note = chemically synthesized
  source 1..22: mol_type = other DNA
tcctgcactgagttttggagac

SEQ ID NO: 66344 - DNA, 22 bp, synthetic construct
  misc_feature 1..22: note = chemically synthesized
  source 1..22: mol_type = other DNA
cctgcactgagttttggagaca

SEQ ID NO: 66345 - DNA, 22 bp, synthetic construct
  misc_feature 1..22: note = chemically synthesized
  source 1..22: mol_type = other DNA
ctgcactgagttttggagacag

SEQ ID NO: 66346 - DNA, 22 bp, synthetic construct
  misc_feature 1..22: note = chemically synthesized
  source 1..22: mol_type = other DNA
cactgagttttggagacaggtc

SEQ ID NO: 66347 - DNA, 22 bp, synthetic construct
  misc_feature 1..22: note = chemically synthesized
  source 1..22: mol_type = other DNA
agttttggagacaggtcaaaaa

SEQ ID NO: 66348 - DNA, 22 bp, synthetic construct
  misc_feature 1..22: note = chemically synthesized
  source 1..22: mol_type = other DNA
tggagacaggtcaaaaagatga

SEQ ID NO: 66349 - DNA, 22 bp, synthetic construct
  misc_feature 1..22: note = chemically synthesized
  source 1..22: mol_type = other DNA
ggagacaggtcaaaaagatgac

SEQ ID NO: 66350 - DNA, 22 bp, synthetic construct
  misc_feature 1..22: note = chemically synthesized
  source 1..22: mol_type = other DNA
gagacaggtcaaaaagatgacc

SEQ ID NO: 66351 - DNA, 22 bp, synthetic construct
  misc_feature 1..22: note = chemically synthesized
  source 1..22: mol_type = other DNA
cctatagaacgcctctaaaaga

SEQ ID NO: 66352 - DNA, 22 bp, synthetic construct
  misc_feature 1..22: note = chemically synthesized
  source 1..22: mol_type = other DNA
ctatagaacgcctctaaaagac

SEQ ID NO: 66353 - DNA, 22 bp, synthetic construct
  misc_feature 1..22: note = chemically synthesized
  source 1..22: mol_type = other DNA
tagaacgcctctaaaagacctg

SEQ ID NO: 66354 - DNA, 22 bp, synthetic construct
  misc_feature 1..22: note = chemically synthesized
  source 1..22: mol_type = other DNA
taaaagacctgcagcaatagca

SEQ ID NO: 66355 - DNA, 22 bp, synthetic construct
  misc_feature 1..22: note = chemically synthesized
  source 1..22: mol_type = other DNA
aaagacctgcagcaatagcagc

SEQ ID NO: 66356 - DNA, 22 bp, synthetic construct
  misc_feature 1..22: note = chemically synthesized
  source 1..22: mol_type = other DNA
cagcaatagcagcaagaactgg

SEQ ID NO: 66357 - DNA, 22 bp, synthetic construct
  misc_feature 1..22: note = chemically synthesized
  source 1..22: mol_type = other DNA
gtattctcgagaacttgctgcg

SEQ ID NO: 66358 - DNA, 22 bp, synthetic construct
  misc_feature 1..22: note = chemically synthesized
  source 1..22: mol_type = other DNA
tcgagaacttgctgcgcagcag

SEQ ID NO: 66359 - DNA, 22 bp, synthetic construct
  misc_feature 1..22: note = chemically synthesized
  source 1..22: mol_type = other DNA
gagaacttgctgcgcagcaggc

SEQ ID NO: 66360 - DNA, 22 bp, synthetic construct
  misc_feature 1..22: note = chemically synthesized
  source 1..22: mol_type = other DNA
gctgcgcagcaggcacttcttg

SEQ ID NO: 66361 - DNA, 22 bp, synthetic construct
  misc_feature 1..22: note = chemically synthesized
  source 1..22: mol_type = other DNA
ctgcgcagcaggcacttcttgg

SEQ ID NO: 66362 - DNA, 22 bp, synthetic construct
  misc_feature 1..22: note = chemically synthesized
  source 1..22: mol_type = other DNA
cgcagcaggcacttcttggcat

SEQ ID NO: 66363 - DNA, 22 bp, synthetic construct
  misc_feature 1..22: note = chemically synthesized
  source 1..22: mol_type = other DNA
cttggcattttatgtgtattta

SEQ ID NO: 66364 - DNA, 22 bp, synthetic construct
  misc_feature 1..22: note = chemically synthesized
  source 1..22: mol_type = other DNA
ttggcattttatgtgtatttaa

SEQ ID NO: 66365 - DNA, 22 bp, synthetic construct
  misc_feature 1..22: note = chemically synthesized
  source 1..22: mol_type = other DNA
ggcattttatgtgtatttaatt

SEQ ID NO: 66366 - DNA, 22 bp, synthetic construct
  misc_feature 1..22: note = chemically synthesized
  source 1..22: mol_type = other DNA
gcattttatgtgtatttaattt

SEQ ID NO: 66367 - DNA, 22 bp, synthetic construct
  misc_feature 1..22: note = chemically synthesized
  source 1..22: mol_type = other DNA
tatgtgtatttaatttcacaat

SEQ ID NO: 66368 - DNA, 22 bp, synthetic construct
  misc_feature 1..22: note = chemically synthesized
  source 1..22: mol_type = other DNA
atgtgtatttaatttcacaata

SEQ ID NO: 66369 - DNA, 22 bp, synthetic construct
  misc_feature 1..22: note = chemically synthesized
  source 1..22: mol_type = other DNA
tgtgtatttaatttcacaatag

SEQ ID NO: 66370 - DNA, 22 bp, synthetic construct
  misc_feature 1..22: note = chemically synthesized
  source 1..22: mol_type = other DNA
aatttcacaatagctctatgac

SEQ ID NO: 66371 - DNA, 22 bp, synthetic construct
  misc_feature 1..22: note = chemically synthesized
  source 1..22: mol_type = other DNA
atttcacaatagctctatgaca

SEQ ID NO: 66372 - DNA, 22 bp, synthetic construct
  misc_feature 1..22: note = chemically synthesized
  source 1..22: mol_type = other DNA
cacaatagctctatgacaaagt

SEQ ID NO: 66373 - DNA, 22 bp, synthetic construct
  misc_feature 1..22: note = chemically synthesized
  source 1..22: mol_type = other DNA
acaatagctctatgacaaagtc

SEQ ID NO: 66374 - DNA, 22 bp, synthetic construct
  misc_feature 1..22: note = chemically synthesized
  source 1..22: mol_type = other DNA
tatgacaaagtccacctttctc

SEQ ID NO: 66375 - DNA, 22 bp, synthetic construct
  misc_feature 1..22: note = chemically synthesized
  source 1..22: mol_type = other DNA
tgacaaagtccacctttctcat

SEQ ID NO: 66376 - DNA, 22 bp, synthetic construct
  misc_feature 1..22: note = chemically synthesized
  source 1..22: mol_type = other DNA
tctcatctccaggaaactgagg

SEQ ID NO: 66377 - DNA, 22 bp, synthetic construct
  misc_feature 1..22: note = chemically synthesized
  source 1..22: mol_type = other DNA
ctcatctccaggaaactgaggt

SEQ ID NO: 66378 - DNA, 22 bp, synthetic construct
  misc_feature 1..22: note = chemically synthesized
  source 1..22: mol_type = other DNA
tcatctccaggaaactgaggtt

SEQ ID NO: 66379 - DNA, 22 bp, synthetic construct
  misc_feature 1..22: note = chemically synthesized
  source 1..22: mol_type = other DNA
atctccaggaaactgaggttca

SEQ ID NO: 66380 - DNA, 22 bp, synthetic construct
  misc_feature 1..22: note = chemically synthesized
  source 1..22: mol_type = other DNA
caggaaactgaggttcagagag

SEQ ID NO: 66381 - DNA, 22 bp, synthetic construct
  misc_feature 1..22: note = chemically synthesized
  source 1..22: mol_type = other DNA
aggttcagagaggttaagtaac

SEQ ID NO: 66382 - DNA, 22 bp, synthetic construct
  misc_feature 1..22: note = chemically synthesized
  source 1..22: mol_type = other DNA
agagaggttaagtaacttgtcc

SEQ ID NO: 66383 - DNA, 22 bp, synthetic construct
  misc_feature 1..22: note = chemically synthesized
  source 1..22: mol_type = other DNA
agtaacttgtccaaggtcacac

SEQ ID NO: 66384 - DNA, 22 bp, synthetic construct
  misc_feature 1..22: note = chemically synthesized
  source 1..22: mol_type = other DNA
gtccaaggtcacacagctaata

SEQ ID NO: 66385 - DNA, 22 bp, synthetic construct
  misc_feature 1..22: note = chemically synthesized
  source 1..22: mol_type = other DNA
tccaaggtcacacagctaatag

SEQ ID NO: 66386 - DNA, 22 bp, synthetic construct
  misc_feature 1..22: note = chemically synthesized
  source 1..22: mol_type = other DNA
atagcaagttgacgtggagcaa

SEQ ID NO: 66387 - DNA, 22 bp, synthetic construct
  misc_feature 1..22: note = chemically synthesized
  source 1..22: mol_type = other DNA
acgtggagcaatctggcctcag

SEQ ID NO: 66388 - DNA, 22 bp, synthetic construct
  misc_feature 1..22: note = chemically synthesized
  source 1..22: mol_type = other DNA
gcctcagagcctttaattttag

SEQ ID NO: 66389 - DNA, 22 bp, synthetic construct
  misc_feature 1..22: note = chemically synthesized
  source 1..22: mol_type = other DNA
agagcctttaattttagccaca

SEQ ID NO: 66390 - DNA, 22 bp, synthetic construct
  misc_feature 1..22: note = chemically synthesized
  source 1..22: mol_type = other DNA
taattttagccacagactgatg

SEQ ID NO: 66391 - DNA, 22 bp, synthetic construct
  misc_feature 1..22: note = chemically synthesized
  source 1..22: mol_type = other DNA
aattttagccacagactgatgc

SEQ ID NO: 66392 - DNA, 22 bp, synthetic construct
  misc_feature 1..22: note = chemically synthesized
  source 1..22: mol_type = other DNA
attttagccacagactgatgct

SEQ ID NO: 66393 - DNA, 22 bp, synthetic construct
  misc_feature 1..22: note = chemically synthesized
  source 1..22: mol_type = other DNA
tagccacagactgatgctcccc

SEQ ID NO: 66394 - DNA, 22 bp, synthetic construct
  misc_feature 1..22: note = chemically synthesized
  source 1..22: mol_type = other DNA
agccacagactgatgctcccct

SEQ ID NO: 66395 - DNA, 22 bp, synthetic construct
  misc_feature 1..22: note = chemically synthesized
  source 1..22: mol_type = other DNA
gccacagactgatgctcccctc

SEQ ID NO: 66396 - DNA, 22 bp, synthetic construct
  misc_feature 1..22: note = chemically synthesized
  source 1..22: mol_type = other DNA
atgctcccctcttcatttagcc

SEQ ID NO: 66397 - DNA, 22 bp, synthetic construct
  misc_feature 1..22: note = chemically synthesized
  source 1..22: mol_type = other DNA
ccctcttcatttagccaggctg

SEQ ID NO: 66398 - DNA, 22 bp, synthetic construct
  misc_feature 1..22: note = chemically synthesized
  source 1..22: mol_type = other DNA
ttcatttagccaggctgcctct

SEQ ID NO: 66399 - DNA, 22 bp, synthetic construct
  misc_feature 1..22: note = chemically synthesized
  source 1..22: mol_type = other DNA
catttagccaggctgcctctga

SEQ ID NO: 66400 - DNA, 22 bp, synthetic construct
  misc_feature 1..22: note = chemically synthesized
  source 1..22: mol_type = other DNA
atttagccaggctgcctctgaa

SEQ ID NO: 66401 - DNA, 22 bp, synthetic construct
  misc_feature 1..22: note = chemically synthesized
  source 1..22: mol_type = other DNA
agccaggctgcctctgaagttt

SEQ ID NO: 66402 - DNA, 22 bp, synthetic construct
  misc_feature 1..22: note = chemically synthesized
  source 1..22: mol_type = other DNA
gccaggctgcctctgaagtttt

SEQ ID NO: 66403 - DNA, 22 bp, synthetic construct
  misc_feature 1..22: note = chemically synthesized
  source 1..22: mol_type = other DNA
cctctgaagttttctgattcaa

SEQ ID NO: 66404 - DNA, 22 bp, synthetic construct
  misc_feature 1..22: note = chemically synthesized
  source 1..22: mol_type = other DNA
tgaagttttctgattcaagact

SEQ ID NO: 66405 - DNA, 22 bp, synthetic construct
  misc_feature 1..22: note = chemically synthesized
  source 1..22: mol_type = other DNA
aagttttctgattcaagacttc

SEQ ID NO: 66406 - DNA, 22 bp, synthetic construct
  misc_feature 1..22: note = chemically synthesized
  source 1..22: mol_type = other DNA
tctgattcaagacttctggctt

SEQ ID NO: 66407 - DNA, 22 bp, synthetic construct
  misc_feature 1..22: note = chemically synthesized
  source 1..22: mol_type = other DNA
ctgattcaagacttctggcttc

SEQ ID NO: 66408 - DNA, 22 bp, synthetic construct
  misc_feature 1..22: note = chemically synthesized
  source 1..22: mol_type = other DNA
tgattcaagacttctggcttca

SEQ ID NO: 66409 - DNA, 22 bp, synthetic construct
  misc_feature 1..22: note = chemically synthesized
  source 1..22: mol_type = other DNA
attcaagacttctggcttcagc

SEQ ID NO: 66410 - DNA, 22 bp, synthetic construct
  misc_feature 1..22: note = chemically synthesized
  source 1..22: mol_type = other DNA
aagacttctggcttcagctttg

SEQ ID NO: 66411 - DNA, 22 bp, synthetic construct
  misc_feature 1..22: note = chemically synthesized
  source 1..22: mol_type = other DNA
ctggcttcagctttgtacacag

SEQ ID NO: 66412 - DNA, 22 bp, synthetic construct
  misc_feature 1..22: note = chemically synthesized
  source 1..22: mol_type = other DNA
tggcttcagctttgtacacaga

SEQ ID NO: 66413 - DNA, 22 bp, synthetic construct
  misc_feature 1..22: note = chemically synthesized
  source 1..22: mol_type = other DNA
gcttcagctttgtacacagaga

SEQ ID NO: 66414 - DNA, 22 bp, synthetic construct
  misc_feature 1..22: note = chemically synthesized
  source 1..22: mol_type = other DNA
cagctttgtacacagagatgat

SEQ ID NO: 66415 - DNA, 22 bp, synthetic construct
  misc_feature 1..22: note = chemically synthesized
  source 1..22: mol_type = other DNA
agctttgtacacagagatgatt

SEQ ID NO: 66416 - DNA, 22 bp, synthetic construct
  misc_feature 1..22: note = chemically synthesized
  source 1..22: mol_type = other DNA
tgtacacagagatgattcaatg

SEQ ID NO: 66417 - DNA, 22 bp, synthetic construct
  misc_feature 1..22: note = chemically synthesized
  source 1..22: mol_type = other DNA
gtacacagagatgattcaatgt

SEQ ID NO: 66418 - DNA, 22 bp, synthetic construct
  misc_feature 1..22: note = chemically synthesized
  source 1..22: mol_type = other DNA
tacacagagatgattcaatgtc

SEQ ID NO: 66419 - DNA, 22 bp, synthetic construct
  misc_feature 1..22: note = chemically synthesized
  source 1..22: mol_type = other DNA
aatgtcaggttttggagtgaaa

SEQ ID NO: 66420 - DNA, 22 bp, synthetic construct
  misc_feature 1..22: note = chemically synthesized
  source 1..22: mol_type = other DNA
tggagtgaaatctgtttaatcc

SEQ ID NO: 66421 - DNA, 22 bp, synthetic construct
  misc_feature 1..22: note = chemically synthesized
  source 1..22: mol_type = other DNA
ggagtgaaatctgtttaatccc

SEQ ID NO: 66422 - DNA, 22 bp, synthetic construct
  misc_feature 1..22: note = chemically synthesized
  source 1..22: mol_type = other DNA
gagtgaaatctgtttaatccca

SEQ ID NO: 66423 - DNA, 22 bp, synthetic construct
  misc_feature 1..22: note = chemically synthesized
  source 1..22: mol_type = other DNA
tttaatcccagacaaaacattt

SEQ ID NO: 66424 - DNA, 22 bp, synthetic construct
  misc_feature 1..22: note = chemically synthesized
  source 1..22: mol_type = other DNA
aatcccagacaaaacatttagg

SEQ ID NO: 66425 - DNA, 22 bp, synthetic construct
  misc_feature 1..22: note = chemically synthesized
  source 1..22: mol_type = other DNA
atcccagacaaaacatttagga

SEQ ID NO: 66426 - DNA, 22 bp, synthetic construct
  misc_feature 1..22: note = chemically synthesized
  source 1..22: mol_type = other DNA
aggattacatctcagttttgta

SEQ ID NO: 66427 - DNA, 22 bp, synthetic construct
  misc_feature 1..22: note = chemically synthesized
  source 1..22: mol_type = other DNA
ggattacatctcagttttgtaa

SEQ ID NO: 66428 - DNA, 22 bp, synthetic construct
  misc_feature 1..22: note = chemically synthesized
  source 1..22: mol_type = other DNA
catctcagttttgtaagcaagt

SEQ ID NO: 66429 - DNA, 22 bp, synthetic construct
  misc_feature 1..22: note = chemically synthesized
  source 1..22: mol_type = other DNA
agttttgtaagcaagtagctct

SEQ ID NO: 66430 - DNA, 22 bp, synthetic construct
  misc_feature 1..22: note = chemically synthesized
  source 1..22: mol_type = other DNA
tgtaagcaagtagctctgtgat

SEQ ID NO: 66431 - DNA, 22 bp, synthetic construct
  misc_feature 1..22: note = chemically synthesized
  source 1..22: mol_type = other DNA
gtaagcaagtagctctgtgatt

SEQ ID NO: 66432 - DNA, 22 bp, synthetic construct
  misc_feature 1..22: note = chemically synthesized
  source 1..22: mol_type = other DNA
taagcaagtagctctgtgattt

SEQ ID NO: 66433 - DNA, 22 bp, synthetic construct
  misc_feature 1..22: note = chemically synthesized
  source 1..22: mol_type = other DNA
tgtgatttttagtgagttattt

SEQ ID NO: 66434 - DNA, 22 bp, synthetic construct
  misc_feature 1..22: note = chemically synthesized
  source 1..22: mol_type = other DNA
tgatttttagtgagttatttaa

SEQ ID NO: 66435 - DNA, 22 bp, synthetic construct
  misc_feature 1..22: note = chemically synthesized
  source 1..22: mol_type = other DNA
ttagtgagttatttaatgctct

SEQ ID NO: 66436 - DNA, 22 bp, synthetic construct
  misc_feature 1..22: note = chemically synthesized
  source 1..22: mol_type = other DNA
tagtgagttatttaatgctctt

SEQ ID NO: 66437 - DNA, 22 bp, synthetic construct
  misc_feature 1..22: note = chemically synthesized
  source 1..22: mol_type = other DNA
agtgagttatttaatgctcttt

SEQ ID NO: 66438 - DNA, 22 bp, synthetic construct
  misc_feature 1..22: note = chemically synthesized
  source 1..22: mol_type = other DNA
gtgagttatttaatgctctttg

SEQ ID NO: 66439 - DNA, 22 bp, synthetic construct
  misc_feature 1..22: note = chemically synthesized
  source 1..22: mol_type = other DNA
tttaatgctctttggggctcaa

SEQ ID NO: 66440 - DNA, 22 bp, synthetic construct
  misc_feature 1..22: note = chemically synthesized
  source 1..22: mol_type = other DNA
aatgctctttggggctcaattt

SEQ ID NO: 66441 - DNA, 22 bp, synthetic construct
  misc_feature 1..22: note = chemically synthesized
  source 1..22: mol_type = other DNA
atgctctttggggctcaatttt

SEQ ID NO: 66442 - DNA, 22 bp, synthetic construct
  misc_feature 1..22: note = chemically synthesized
  source 1..22: mol_type = other DNA
tttggggctcaatttttctatc

SEQ ID NO: 66443 - DNA, 22 bp, synthetic construct
  misc_feature 1..22: note = chemically synthesized
  source 1..22: mol_type = other DNA
tggggctcaatttttctatcta

SEQ ID NO: 66444 - DNA, 22 bp, synthetic construct
  misc_feature 1..22: note = chemically synthesized
  source 1..22: mol_type = other DNA
ggggctcaatttttctatctat

SEQ ID NO: 66445 - DNA, 22 bp, synthetic construct
  misc_feature 1..22: note = chemically synthesized
  source 1..22: mol_type = other DNA
gggctcaatttttctatctata

SEQ ID NO: 66446 - DNA, 22 bp, synthetic construct
  misc_feature 1..22: note = chemically synthesized
  source 1..22: mol_type = other DNA
aatttttctatctataaaatag

SEQ ID NO: 66447 - DNA, 22 bp, synthetic construct
  misc_feature 1..22: note = chemically synthesized
  source 1..22: mol_type = other DNA
ttctatctataaaatagggcta

SEQ ID NO: 66448 - DNA, 22 bp, synthetic construct
  misc_feature 1..22: note = chemically synthesized
  source 1..22: mol_type = other DNA
tctatctataaaatagggctaa

SEQ ID NO: 66449 - DNA, 22 bp, synthetic construct
  misc_feature 1..22: note = chemically synthesized
  source 1..22: mol_type = other DNA
ctatctataaaatagggctaat

SEQ ID NO: 66450 - DNA, 22 bp, synthetic construct
  misc_feature 1..22: note = chemically synthesized
  source 1..22: mol_type = other DNA
tatctataaaatagggctaata

SEQ ID NO: 66451 - DNA, 22 bp, synthetic construct
  misc_feature 1..22: note = chemically synthesized
  source 1..22: mol_type = other DNA
tctataaaatagggctaataat

SEQ ID NO: 66452 - DNA, 22 bp, synthetic construct
  misc_feature 1..22: note = chemically synthesized
  source 1..22: mol_type = other DNA
taaaatagggctaataatttgc

SEQ ID NO: 66453 - DNA, 22 bp, synthetic construct
  misc_feature 1..22: note = chemically synthesized
  source 1..22: mol_type = other DNA
ataatttgcaccttatagggta

SEQ ID NO: 66454 - DNA, 22 bp, synthetic construct
  misc_feature 1..22: note = chemically synthesized
  source 1..22: mol_type = other DNA
gcaccttatagggtaagctttg

SEQ ID NO: 66455 - DNA, 22 bp, synthetic construct
  misc_feature 1..22: note = chemically synthesized
  source 1..22: mol_type = other DNA
caccttatagggtaagctttga

SEQ ID NO: 66456 - DNA, 22 bp, synthetic construct
  misc_feature 1..22: note = chemically synthesized
  source 1..22: mol_type = other DNA
atagggtaagctttgaggacag

SEQ ID NO: 66457 - DNA, 22 bp, synthetic construct
  misc_feature 1..22: note = chemically synthesized
  source 1..22: mol_type = other DNA
tagggtaagctttgaggacaga

SEQ ID NO: 66458 - DNA, 22 bp, synthetic construct
  misc_feature 1..22: note = chemically synthesized
  source 1..22: mol_type = other DNA
tgaggacagattagatgatacg

SEQ ID NO: 66459 - DNA, 22 bp, synthetic construct
  misc_feature 1..22: note = chemically synthesized
  source 1..22: mol_type = other DNA
gaggacagattagatgatacgg

SEQ ID NO: 66460 - DNA, 22 bp, synthetic construct
  misc_feature 1..22: note = chemically synthesized
  source 1..22: mol_type = other DNA
aggacagattagatgatacggt

SEQ ID NO: 66461 - DNA, 22 bp, synthetic construct
  misc_feature 1..22: note = chemically synthesized
  source 1..22: mol_type = other DNA
gatgatacggtgcctgtaaaac

SEQ ID NO: 66462 - DNA, 22 bp, synthetic construct
  misc_feature 1..22: note = chemically synthesized
  source 1..22: mol_type = other DNA
taaaacaccaggtgttagtaag

SEQ ID NO: 66463 - DNA, 22 bp, synthetic construct
  misc_feature 1..22: note = chemically synthesized
  source 1..22: mol_type = other DNA
gtaagtgtggcaatgatggtga

SEQ ID NO: 66464 - DNA, 22 bp, synthetic construct
  misc_feature 1..22: note = chemically synthesized
  source 1..22: mol_type = other DNA
aggctgatgtttgcttagcata

SEQ ID NO: 66465 - DNA, 22 bp, synthetic construct
  misc_feature 1..22: note = chemically synthesized
  source 1..22: mol_type = other DNA
atgtttgcttagcatagggtta

SEQ ID NO: 66466 - DNA, 22 bp, synthetic construct
  misc_feature 1..22: note = chemically synthesized
  source 1..22: mol_type = other DNA
gcttagcatagggttaggcagc

SEQ ID NO: 66467 - DNA, 22 bp, synthetic construct
  misc_feature 1..22: note = chemically synthesized
  source 1..22: mol_type = other DNA
cttagcatagggttaggcagct

SEQ ID NO: 66468 - DNA, 22 bp, synthetic construct
  misc_feature 1..22: note = chemically synthesized
  source 1..22: mol_type = other DNA
agcatagggttaggcagctggc

SEQ ID NO: 66469 - DNA, 22 bp, synthetic construct
  misc_feature 1..22: note = chemically synthesized
  source 1..22: mol_type = other DNA
gcatagggttaggcagctggca

SEQ ID NO: 66470 - DNA, 22 bp, synthetic construct
  misc_feature 1..22: note = chemically synthesized
  source 1..22: mol_type = other DNA
ggcagctggcaggcagtaaaca

SEQ ID NO: 66471 - DNA, 22 bp, synthetic construct
  misc_feature 1..22: note = chemically synthesized
  source 1..22: mol_type = other DNA
gcaggcagtaaacagttggata

SEQ ID NO: 66472 - DNA, 22 bp, synthetic construct
  misc_feature 1..22: note = chemically synthesized
  source 1..22: mol_type = other DNA
gataatttaatggaaaatttgc

SEQ ID NO: 66473 - DNA, 22 bp, synthetic construct
  misc_feature 1..22: note = chemically synthesized
  source 1..22: mol_type = other DNA
aatggaaaatttgccaaactca

SEQ ID NO: 66474 - DNA, 22 bp, synthetic construct
  misc_feature 1..22: note = chemically synthesized
  source 1..22: mol_type = other DNA
atggaaaatttgccaaactcag

SEQ ID NO: 66475 - DNA, 22 bp, synthetic construct
  misc_feature 1..22: note = chemically synthesized
  source 1..22: mol_type = other DNA
gccaaactcagatgctgttcac

SEQ ID NO: 66476 - DNA, 22 bp, synthetic construct
  misc_feature 1..22: note = chemically synthesized
  source 1..22: mol_type = other DNA
ccaaactcagatgctgttcact

SEQ ID NO: 66477 - DNA, 22 bp, synthetic construct
  misc_feature 1..22: note = chemically synthesized
  source 1..22: mol_type = other DNA
agatgctgttcactgctgagca

SEQ ID NO: 66478 - DNA, 22 bp, synthetic construct
  misc_feature 1..22: note = chemically synthesized
  source 1..22: mol_type = other DNA
ttcactgctgagcaggagcccc

SEQ ID NO: 66479 - DNA, 22 bp, synthetic construct
  misc_feature 1..22: note = chemically synthesized
  source 1..22: mol_type = other DNA
actgctgagcaggagccccttc

SEQ ID NO: 66480 - DNA, 22 bp, synthetic construct
  misc_feature 1..22: note = chemically synthesized
  source 1..22: mol_type = other DNA
ctgagcaggagccccttcctgc

SEQ ID NO: 66481 - DNA, 22 bp, synthetic construct
  misc_feature 1..22: note = chemically synthesized
  source 1..22: mol_type = other DNA
agcaggagccccttcctgctga

SEQ ID NO: 66482 - DNA, 22 bp, synthetic construct
  misc_feature 1..22: note = chemically synthesized
  source 1..22: mol_type = other DNA
cctgctgaaatggtcctgggga

SEQ ID NO: 66483 - DNA, 22 bp, synthetic construct
  misc_feature 1..22: note = chemically synthesized
  source 1..22: mol_type = other DNA
ctgctgaaatggtcctggggag

SEQ ID NO: 66484 - DNA, 22 bp, synthetic construct
  misc_feature 1..22: note = chemically synthesized
  source 1..22: mol_type = other DNA
ctgaaatggtcctggggagtgc

SEQ ID NO: 66485 - DNA, 22 bp, synthetic construct
  misc_feature 1..22: note = chemically synthesized
  source 1..22: mol_type = other DNA
aaatggtcctggggagtgcagc

SEQ ID NO: 66486 - DNA, 22 bp, synthetic construct
  misc_feature 1..22: note = chemically synthesized
  source 1..22: mol_type = other DNA
gggagtgcagcaggctctccgg

SEQ ID NO: 66487 - DNA, 22 bp, synthetic construct
  misc_feature 1..22: note = chemically synthesized
  source 1..22: mol_type = other DNA
tccgggaagaaatctaccatct

SEQ ID NO: 66488 - DNA, 22 bp, synthetic construct
  misc_feature 1..22: note = chemically synthesized
  source 1..22: mol_type = other DNA
cgggaagaaatctaccatctct

SEQ ID NO: 66489 - DNA, 22 bp, synthetic construct
  misc_feature 1..22: note = chemically synthesized
  source 1..22: mol_type = other DNA
ccatctctcgggcaggagctca

SEQ ID NO: 66490 - DNA, 22 bp, synthetic construct
  misc_feature 1..22: note = chemically synthesized
  source 1..22: mol_type = other DNA
tcgggcaggagctcaacctgtg

SEQ ID NO: 66491 - DNA, 22 bp, synthetic construct
  misc_feature 1..22: note = chemically synthesized
  source 1..22: mol_type = other DNA
gggcaggagctcaacctgtgtg

SEQ ID NO: 66492 - DNA, 22 bp, synthetic construct
  misc_feature 1..22: note = chemically synthesized
  source 1..22: mol_type = other DNA
aacctgtgtgcaggtacaggga

SEQ ID NO: 66493 - DNA, 22 bp, synthetic construct
  misc_feature 1..22: note = chemically synthesized
  source 1..22: mol_type = other DNA
tgtgcaggtacagggagggctt

SEQ ID NO: 66494 - DNA, 22 bp, synthetic construct
  misc_feature 1..22: note = chemically synthesized
  source 1..22: mol_type = other DNA
cctcacctggtgcccactcatg

SEQ ID NO: 66495 - DNA, 22 bp, synthetic construct
  misc_feature 1..22: note = chemically synthesized
  source 1..22: mol_type = other DNA
ctcacctggtgcccactcatgc

SEQ ID NO: 66496 - DNA, 22 bp, synthetic construct
  misc_feature 1..22: note = chemically synthesized
  source 1..22: mol_type = other DNA
acctggtgcccactcatgcatt

SEQ ID NO: 66497 - DNA, 22 bp, synthetic construct
  misc_feature 1..22: note = chemically synthesized
  source 1..22: mol_type = other DNA
gtgcccactcatgcattacgtc

SEQ ID NO: 66498 - DNA, 22 bp, synthetic construct
  misc_feature 1..22: note = chemically synthesized
  source 1..22: mol_type = other DNA
atgcattacgtcagttattcct

SEQ ID NO: 66499 - DNA, 22 bp, synthetic construct
  misc_feature 1..22: note = chemically synthesized
  source 1..22: mol_type = other DNA
cgtcagttattcctcatccctg

SEQ ID NO: 66500 - DNA, 22 bp, synthetic construct
  misc_feature 1..22: note = chemically synthesized
  source 1..22: mol_type = other DNA
ttcctcatccctgtccaaagga

SEQ ID NO: 66501 - DNA, 22 bp, synthetic construct
  misc_feature 1..22: note = chemically synthesized
  source 1..22: mol_type = other DNA
ctcatccctgtccaaaggattc

SEQ ID NO: 66502 - DNA, 22 bp, synthetic construct
  misc_feature 1..22: note = chemically synthesized
  source 1..22: mol_type = other DNA
atccctgtccaaaggattcttt

SEQ ID NO: 66503 - DNA, 22 bp, synthetic construct
  misc_feature 1..22: note = chemically synthesized
  source 1..22: mol_type = other DNA
tccaaaggattcttttctccat

SEQ ID NO: 66504 - DNA, 22 bp, synthetic construct
  misc_feature 1..22: note = chemically synthesized
  source 1..22: mol_type = other DNA
ttttctccattgtacagctatg

SEQ ID NO: 66505 - DNA, 22 bp, synthetic construct
  misc_feature 1..22: note = chemically synthesized
  source 1..22: mol_type = other DNA
ttctccattgtacagctatgaa

SEQ ID NO: 66506 - DNA, 22 bp, synthetic construct
  misc_feature 1..22: note = chemically synthesized
  source 1..22: mol_type = other DNA
tctccattgtacagctatgaag

SEQ ID NO: 66507 - DNA, 22 bp, synthetic construct
  misc_feature 1..22: note = chemically synthesized
  source 1..22: mol_type = other DNA
ctccattgtacagctatgaagc

SEQ ID NO: 66508 - DNA, 22 bp, synthetic construct
  misc_feature 1..22: note = chemically synthesized
  source 1..22: mol_type = other DNA
tccattgtacagctatgaagct

SEQ ID NO: 66509 - DNA, 22 bp, synthetic construct
  misc_feature 1..22: note = chemically synthesized
  source 1..22: mol_type = other DNA
cattgtacagctatgaagctag

SEQ ID NO: 66510 - DNA, 22 bp, synthetic construct
  misc_feature 1..22: note = chemically synthesized
  source 1..22: mol_type = other DNA
tacagctatgaagctagtgctc

SEQ ID NO: 66511 - DNA, 22 bp, synthetic construct
  misc_feature 1..22: note = chemically synthesized
  source 1..22: mol_type = other DNA
tgaagctagtgctcaaagaagt

SEQ ID NO: 66512 - DNA, 22 bp, synthetic construct
  misc_feature 1..22: note = chemically synthesized
  source 1..22: mol_type = other DNA
gtgctcaaagaagtgaagtcat

SEQ ID NO: 66513 - DNA, 22 bp, synthetic construct
  misc_feature 1..22: note = chemically synthesized
  source 1..22: mol_type = other DNA
aaagaagtgaagtcatttaccc

SEQ ID NO: 66514 - DNA, 22 bp, synthetic construct
  misc_feature 1..22: note = chemically synthesized
  source 1..22: mol_type = other DNA
accccaggccccctgccagtaa

SEQ ID NO: 66515 - DNA, 22 bp, synthetic construct
  misc_feature 1..22: note = chemically synthesized
  source 1..22: mol_type = other DNA
ccccaggccccctgccagtaag

SEQ ID NO: 66516 - DNA, 22 bp, synthetic construct
  misc_feature 1..22: note = chemically synthesized
  source 1..22: mol_type = other DNA
ccagtaagtgacagggcctggt

SEQ ID NO: 66517 - DNA, 22 bp, synthetic construct
  misc_feature 1..22: note = chemically synthesized
  source 1..22: mol_type = other DNA
gtcacacttgggtttatttatt

SEQ ID NO: 66518 - DNA, 22 bp, synthetic construct
  misc_feature 1..22: note = chemically synthesized
  source 1..22: mol_type = other DNA
gggtttatttattgcccagttc

SEQ ID NO: 66519 - DNA, 22 bp, synthetic construct
  misc_feature 1..22: note = chemically synthesized
  source 1..22: mol_type = other DNA
ggtttatttattgcccagttca

SEQ ID NO: 66520 - DNA, 22 bp, synthetic construct
  misc_feature 1..22: note = chemically synthesized
  source 1..22: mol_type = other DNA
atttattgcccagttcaacagg

SEQ ID NO: 66521 - DNA, 22 bp, synthetic construct
  misc_feature 1..22: note = chemically synthesized
  source 1..22: mol_type = other DNA
tttattgcccagttcaacaggt

SEQ ID NO: 66522 - DNA, 22 bp, synthetic construct
  misc_feature 1..22: note = chemically synthesized
  source 1..22: mol_type = other DNA
attgcccagttcaacaggttgt

SEQ ID NO: 66523 - DNA, 22 bp, synthetic construct
  misc_feature 1..22: note = chemically synthesized
  source 1..22: mol_type = other DNA
ttgcccagttcaacaggttgtt

SEQ ID NO: 66524 - DNA, 22 bp, synthetic construct
  misc_feature 1..22: note = chemically synthesized
  source 1..22: mol_type = other DNA
cccagttcaacaggttgtttga

SEQ ID NO: 66525 - DNA, 22 bp, synthetic construct
  misc_feature 1..22: note = chemically synthesized
  source 1..22: mol_type = other DNA
aacaggttgtttgaccataggc

SEQ ID NO: 66526 - DNA, 22 bp, synthetic construct
  misc_feature 1..22: note = chemically synthesized
  source 1..22: mol_type = other DNA
tttgaccataggcgagattctc

SEQ ID NO: 66527 - DNA, 22 bp, synthetic construct
  misc_feature 1..22: note = chemically synthesized
  source 1..22: mol_type = other DNA
gaccataggcgagattctcttc

SEQ ID NO: 66528 - DNA, 22 bp, synthetic construct
  misc_feature 1..22: note = chemically synthesized
  source 1..22: mol_type = other DNA
accataggcgagattctcttcc

SEQ ID NO: 66529 - DNA, 22 bp, synthetic construct
  misc_feature 1..22: note = chemically synthesized
  source 1..22: mol_type = other DNA
tcttccctgcaccctgccgggt

SEQ ID NO: 66530 - DNA, 22 bp, synthetic construct
  misc_feature 1..22: note = chemically synthesized
  source 1..22: mol_type = other DNA
ttccctgcaccctgccgggttg

SEQ ID NO: 66531 - DNA, 22 bp, synthetic construct
  misc_feature 1..22: note = chemically synthesized
  source 1..22: mol_type = other DNA
ccctgcaccctgccgggttgct

SEQ ID NO: 66532 - DNA, 22 bp, synthetic construct
  misc_feature 1..22: note = chemically synthesized
  source 1..22: mol_type = other DNA
cctgcaccctgccgggttgctc

SEQ ID NO: 66533 - DNA, 22 bp, synthetic construct
  misc_feature 1..22: note = chemically synthesized
  source 1..22: mol_type = other DNA
caccctgccgggttgctcttgg

SEQ ID NO: 66534 - DNA, 22 bp, synthetic construct
  misc_feature 1..22: note = chemically synthesized
  source 1..22: mol_type = other DNA
ccgggttgctcttggtccctta

SEQ ID NO: 66535 - DNA, 22 bp, synthetic construct
  misc_feature 1..22: note = chemically synthesized
  source 1..22: mol_type = other DNA
ctcttggtcccttattttatgc

SEQ ID NO: 66536 - DNA, 22 bp, synthetic construct
  misc_feature 1..22: note = chemically synthesized
  source 1..22: mol_type = other DNA
ttggtcccttattttatgctcc

SEQ ID NO: 66537 - DNA, 22 bp, synthetic construct
  misc_feature 1..22: note = chemically synthesized
  source 1..22: mol_type = other DNA
ggtcccttattttatgctcccg

SEQ ID NO: 66538 - DNA, 22 bp, synthetic construct
  misc_feature 1..22: note = chemically synthesized
  source 1..22: mol_type = other DNA
gtcccttattttatgctcccgg

SEQ ID NO: 66539 - DNA, 22 bp, synthetic construct
  misc_feature 1..22: note = chemically synthesized
  source 1..22: mol_type = other DNA
attttatgctcccgggtagaaa

SEQ ID NO: 66540 - DNA, 22 bp, synthetic construct
  misc_feature 1..22: note = chemically synthesized
  source 1..22: mol_type = other DNA
ttttatgctcccgggtagaaat

SEQ ID NO: 66541 - DNA, 22 bp, synthetic construct
  misc_feature 1..22: note = chemically synthesized
  source 1..22: mol_type = other DNA
tatgctcccgggtagaaatggt

SEQ ID NO: 66542 - DNA, 22 bp, synthetic construct
  misc_feature 1..22: note = chemically synthesized
  source 1..22: mol_type = other DNA
atgctcccgggtagaaatggtg

SEQ ID NO: 66543 - DNA, 22 bp, synthetic construct
  misc_feature 1..22: note = chemically synthesized
  source 1..22: mol_type = other DNA
tgctcccgggtagaaatggtgt

SEQ ID NO: 66544 - DNA, 22 bp, synthetic construct
  misc_feature 1..22: note = chemically synthesized
  source 1..22: mol_type = other DNA
ccgggtagaaatggtgtgagat

SEQ ID NO: 66545 - DNA, 22 bp, synthetic construct
  misc_feature 1..22: note = chemically synthesized
  source 1..22: mol_type = other DNA
ggcagggagtggctcgcttccc

SEQ ID NO: 66546 - DNA, 22 bp, synthetic construct
  misc_feature 1..22: note = chemically synthesized
  source 1..22: mol_type = other DNA
gcttccctgtccctggccccgc

SEQ ID NO: 66547 - DNA, 22 bp, synthetic construct
  misc_feature 1..22: note = chemically synthesized
  source 1..22: mol_type = other DNA
ccctgtccctggccccgcaaag

SEQ ID NO: 66548 - DNA, 22 bp, synthetic construct
  misc_feature 1..22: note = chemically synthesized
  source 1..22: mol_type = other DNA
cctgtccctggccccgcaaaga

SEQ ID NO: 66549 - DNA, 22 bp, synthetic construct
  misc_feature 1..22: note = chemically synthesized
  source 1..22: mol_type = other DNA
tccctggccccgcaaagagtgc

SEQ ID NO: 66550 - DNA, 22 bp, synthetic construct
  misc_feature 1..22: note = chemically synthesized
  source 1..22: mol_type = other DNA
gccccgcaaagagtgctcccac

SEQ ID NO: 66551 - DNA, 22 bp, synthetic construct
  misc_feature 1..22: note = chemically synthesized
  source 1..22: mol_type = other DNA
ccacctgccccgatcccagaaa

SEQ ID NO: 66552 - DNA, 22 bp, synthetic construct
  misc_feature 1..22: note = chemically synthesized
  source 1..22: mol_type = other DNA
ccccgatcccagaaatgtcacc

SEQ ID NO: 66553 - DNA, 22 bp, synthetic construct
  misc_feature 1..22: note = chemically synthesized
  source 1..22: mol_type = other DNA
cattcttttggtttaaagcttg

SEQ ID NO: 66554 - DNA, 22 bp, synthetic construct
  misc_feature 1..22: note = chemically synthesized
  source 1..22: mol_type = other DNA
attcttttggtttaaagcttgg

SEQ ID NO: 66555 - DNA, 22 bp, synthetic construct
  misc_feature 1..22: note = chemically synthesized
  source 1..22: mol_type = other DNA
ttttggtttaaagcttggcctc

SEQ ID NO: 66556 - DNA, 22 bp, synthetic construct
  misc_feature 1..22: note = chemically synthesized
  source 1..22: mol_type = other DNA
ttggtttaaagcttggcctcag

SEQ ID NO: 66557 - DNA, 22 bp, synthetic construct
  misc_feature 1..22: note = chemically synthesized
  source 1..22: mol_type = other DNA
tggtttaaagcttggcctcagt

SEQ ID NO: 66558 - DNA, 22 bp, synthetic construct
  misc_feature 1..22: note = chemically synthesized
  source 1..22: mol_type = other DNA
ggtttaaagcttggcctcagtg

SEQ ID NO: 66559 - DNA, 22 bp, synthetic construct
  misc_feature 1..22: note = chemically synthesized
  source 1..22: mol_type = other DNA
gtttaaagcttggcctcagtgt

SEQ ID NO: 66560 - DNA, 22 bp, synthetic construct
  misc_feature 1..22: note = chemically synthesized
  source 1..22: mol_type = other DNA
aaagcttggcctcagtgtccgt

SEQ ID NO: 66561 - DNA, 22 bp, synthetic construct
  misc_feature 1..22: note = chemically synthesized
  source 1..22: mol_type = other DNA
aagcttggcctcagtgtccgta

SEQ ID NO: 66562 - DNA, 22 bp, synthetic construct
  misc_feature 1..22: note = chemically synthesized
  source 1..22: mol_type = other DNA
ggcctcagtgtccgtacaccat

SEQ ID NO: 66563 - DNA, 22 bp, synthetic construct
  misc_feature 1..22: note = chemically synthesized
  source 1..22: mol_type = other DNA
gcctcagtgtccgtacaccatg

SEQ ID NO: 66564 - DNA, 22 bp, synthetic construct
  misc_feature 1..22: note = chemically synthesized
  source 1..22: mol_type = other DNA
agtgtccgtacaccatggggta

SEQ ID NO: 66565 - DNA, 22 bp, synthetic construct
  misc_feature 1..22: note = chemically synthesized
  source 1..22: mol_type = other DNA
ggccagatggcgactttctcct

SEQ ID NO: 66566 - DNA, 22 bp, synthetic construct
  misc_feature 1..22: note = chemically synthesized
  source 1..22: mol_type = other DNA
gccagatggcgactttctcctc

SEQ ID NO: 66567 - DNA, 22 bp, synthetic construct
  misc_feature 1..22: note = chemically synthesized
  source 1..22: mol_type = other DNA
tctcctctccagtcgccctccc

SEQ ID NO: 66568 - DNA, 22 bp, synthetic construct
  misc_feature 1..22: note = chemically synthesized
  source 1..22: mol_type = other DNA
ctcctctccagtcgccctccca

SEQ ID NO: 66569 - DNA, 22 bp, synthetic construct
  misc_feature 1..22: note = chemically synthesized
  source 1..22: mol_type = other DNA
tcctctccagtcgccctcccag

SEQ ID NO: 66570 - DNA, 22 bp, synthetic construct
  misc_feature 1..22: note = chemically synthesized
  source 1..22: mol_type = other DNA
ctctccagtcgccctcccaggc

SEQ ID NO: 66571 - DNA, 22 bp, synthetic construct
  misc_feature 1..22: note = chemically synthesized
  source 1..22: mol_type = other DNA
tccagtcgccctcccaggcact

SEQ ID NO: 66572 - DNA, 22 bp, synthetic construct
  misc_feature 1..22: note = chemically synthesized
  source 1..22: mol_type = other DNA
cagtcgccctcccaggcactag

SEQ ID NO: 66573 - DNA, 22 bp, synthetic construct
  misc_feature 1..22: note = chemically synthesized
  source 1..22: mol_type = other DNA
ccaggcactagcttttaggagt

SEQ ID NO: 66574 - DNA, 22 bp, synthetic construct
  misc_feature 1..22: note = chemically synthesized
  source 1..22: mol_type = other DNA
gcttttaggagtgcagggtgct

SEQ ID NO: 66575 - DNA, 22 bp, synthetic construct
  misc_feature 1..22: note = chemically synthesized
  source 1..22: mol_type = other DNA
ttaggagtgcagggtgctgcct

SEQ ID NO: 66576 - DNA, 22 bp, synthetic construct
  misc_feature 1..22: note = chemically synthesized
  source 1..22: mol_type = other DNA
taggagtgcagggtgctgcctc

SEQ ID NO: 66577 - DNA, 22 bp, synthetic construct
  misc_feature 1..22: note = chemically synthesized
  source 1..22: mol_type = other DNA
aggagtgcagggtgctgcctct

SEQ ID NO: 66578 - DNA, 22 bp, synthetic construct
  misc_feature 1..22: note = chemically synthesized
  source 1..22: mol_type = other DNA
ggagtgcagggtgctgcctctg

SEQ ID NO: 66579 - DNA, 22 bp, synthetic construct
  misc_feature 1..22: note = chemically synthesized
  source 1..22: mol_type = other DNA
cctctgatagaagggccaggag

SEQ ID NO: 66580 - DNA, 22 bp, synthetic construct
  misc_feature 1..22: note = chemically synthesized
  source 1..22: mol_type = other DNA
tgatagaagggccaggagagag

SEQ ID NO: 66581 - DNA, 22 bp, synthetic construct
  misc_feature 1..22: note = chemically synthesized
  source 1..22: mol_type = other DNA
atagaagggccaggagagagca

SEQ ID NO: 66582 - DNA, 22 bp, synthetic construct
  misc_feature 1..22: note = chemically synthesized
  source 1..22: mol_type = other DNA
tggagtcctgatgttataagga

SEQ ID NO: 66583 - DNA, 22 bp, synthetic construct
  misc_feature 1..22: note = chemically synthesized
  source 1..22: mol_type = other DNA
ggagtcctgatgttataaggaa

SEQ ID NO: 66584 - DNA, 22 bp, synthetic construct
  misc_feature 1..22: note = chemically synthesized
  source 1..22: mol_type = other DNA
gagtcctgatgttataaggaac

SEQ ID NO: 66585 - DNA, 22 bp, synthetic construct
  misc_feature 1..22: note = chemically synthesized
  source 1..22: mol_type = other DNA
atgttataaggaacagcttggg

SEQ ID NO: 66586 - DNA, 22 bp, synthetic construct
  misc_feature 1..22: note = chemically synthesized
  source 1..22: mol_type = other DNA
taaggaacagcttgggaggcat

SEQ ID NO: 66587 - DNA, 22 bp, synthetic construct
  misc_feature 1..22: note = chemically synthesized
  source 1..22: mol_type = other DNA
gggaggcataatgaacccaaca

SEQ ID NO: 66588 - DNA, 22 bp, synthetic construct
  misc_feature 1..22: note = chemically synthesized
  source 1..22: mol_type = other DNA
ggaggcataatgaacccaacat

SEQ ID NO: 66589 - DNA, 22 bp, synthetic construct
  misc_feature 1..22: note = chemically synthesized
  source 1..22: mol_type = other DNA
gagaccaatgtcacagcccaat

SEQ ID NO: 66590 - DNA, 22 bp, synthetic construct
  misc_feature 1..22: note = chemically synthesized
  source 1..22: mol_type = other DNA
agaccaatgtcacagcccaatt

SEQ ID NO: 66591 - DNA, 22 bp, synthetic construct
  misc_feature 1..22: note = chemically synthesized
  source 1..22: mol_type = other DNA
tgacattcatcatctgagatct

SEQ ID NO: 66592 - DNA, 22 bp, synthetic construct
  misc_feature 1..22: note = chemically synthesized
  source 1..22: mol_type = other DNA
acattcatcatctgagatctga

SEQ ID NO: 66593 - DNA, 22 bp, synthetic construct
  misc_feature 1..22: note = chemically synthesized
  source 1..22: mol_type = other DNA
atcatctgagatctgaggacac

SEQ ID NO: 66594 - DNA, 22 bp, synthetic construct
  misc_feature 1..22: note = chemically synthesized
  source 1..22: mol_type = other DNA
agatctgaggacacagctgtct

SEQ ID NO: 66595 - DNA, 22 bp, synthetic construct
  misc_feature 1..22: note = chemically synthesized
  source 1..22: mol_type = other DNA
aggacacagctgtctcagttca

SEQ ID NO: 66596 - DNA, 22 bp, synthetic construct
  misc_feature 1..22: note = chemically synthesized
  source 1..22: mol_type = other DNA
tctcagttcatgatctgagtgc

SEQ ID NO: 66597 - DNA, 22 bp, synthetic construct
  misc_feature 1..22: note = chemically synthesized
  source 1..22: mol_type = other DNA
agttcatgatctgagtgctggg

SEQ ID NO: 66598 - DNA, 22 bp, synthetic construct
  misc_feature 1..22: note = chemically synthesized
  source 1..22: mol_type = other DNA
atgatctgagtgctgggaaagc

SEQ ID NO: 66599 - DNA, 22 bp, synthetic construct
  misc_feature 1..22: note = chemically synthesized
  source 1..22: mol_type = other DNA
agtgctgggaaagccaagactt

SEQ ID NO: 66600 - DNA, 22 bp, synthetic construct
  misc_feature 1..22: note = chemically synthesized
  source 1..22: mol_type = other DNA
ggaaagccaagacttgttccag

SEQ ID NO: 66601 - DNA, 22 bp, synthetic construct
  misc_feature 1..22: note = chemically synthesized
  source 1..22: mol_type = other DNA
gttccagctttgtcactgactt

SEQ ID NO: 66602 - DNA, 22 bp, synthetic construct
  misc_feature 1..22: note = chemically synthesized
  source 1..22: mol_type = other DNA
ttccagctttgtcactgacttg

SEQ ID NO: 66603 - DNA, 22 bp, synthetic construct
  misc_feature 1..22: note = chemically synthesized
  source 1..22: mol_type = other DNA
cagctttgtcactgacttgctg

SEQ ID NO: 66604 - DNA, 22 bp, synthetic construct
  misc_feature 1..22: note = chemically synthesized
  source 1..22: mol_type = other DNA
tgtcactgacttgctgtatagc

SEQ ID NO: 66605 - DNA, 22 bp, synthetic construct
  misc_feature 1..22: note = chemically synthesized
  source 1..22: mol_type = other DNA
gtcactgacttgctgtatagcc

SEQ ID NO: 66606 - DNA, 22 bp, synthetic construct
  misc_feature 1..22: note = chemically synthesized
  source 1..22: mol_type = other DNA
tcactgacttgctgtatagcct

SEQ ID NO: 66607 - DNA, 22 bp, synthetic construct
  misc_feature 1..22: note = chemically synthesized
  source 1..22: mol_type = other DNA
acttgctgtatagcctcaacaa

SEQ ID NO: 66608 - DNA, 22 bp, synthetic construct
  misc_feature 1..22: note = chemically synthesized
  source 1..22: mol_type = other DNA
gctgtatagcctcaacaaggcc

SEQ ID NO: 66609 - DNA, 22 bp, synthetic construct
  misc_feature 1..22: note = chemically synthesized
  source 1..22: mol_type = other DNA
ctgtatagcctcaacaaggccc

SEQ ID NO: 66610 - DNA, 22 bp, synthetic construct
  misc_feature 1..22: note = chemically synthesized
  source 1..22: mol_type = other DNA
tatagcctcaacaaggccctga

SEQ ID NO: 66611 - DNA, 22 bp, synthetic construct
  misc_feature 1..22: note = chemically synthesized
  source 1..22: mol_type = other DNA
aacaaggccctgaccctctctg

SEQ ID NO: 66612 - DNA, 22 bp, synthetic construct
  misc_feature 1..22: note = chemically synthesized
  source 1..22: mol_type = other DNA
accctctctgggcttcaaactc

SEQ ID NO: 66613 - DNA, 22 bp, synthetic construct
  misc_feature 1..22: note = chemically synthesized
  source 1..22: mol_type = other DNA
tctgggcttcaaactcttcact

SEQ ID NO: 66614 - DNA, 22 bp, synthetic construct
  misc_feature 1..22: note = chemically synthesized
  source 1..22: mol_type = other DNA
tgggcttcaaactcttcactgt

SEQ ID NO: 66615 - DNA, 22 bp, synthetic construct
  misc_feature 1..22: note = chemically synthesized
  source 1..22: mol_type = other DNA
ggcttcaaactcttcactgtga

SEQ ID NO: 66616 - DNA, 22 bp, synthetic construct
  misc_feature 1..22: note = chemically synthesized
  source 1..22: mol_type = other DNA
caaactcttcactgtgaaagga

SEQ ID NO: 66617 - DNA, 22 bp, synthetic construct
  misc_feature 1..22: note = chemically synthesized
  source 1..22: mol_type = other DNA
aaactcttcactgtgaaaggag

SEQ ID NO: 66618 - DNA, 22 bp, synthetic construct
  misc_feature 1..22: note = chemically synthesized
  source 1..22: mol_type = other DNA
ttcactgtgaaaggaggaaacc

SEQ ID NO: 66619 - DNA, 22 bp, synthetic construct
  misc_feature 1..22: note = chemically synthesized
  source 1..22: mol_type = other DNA
cactgtgaaaggaggaaaccag

SEQ ID NO: 66620 - DNA, 22 bp, synthetic construct
  misc_feature 1..22: note = chemically synthesized
  source 1..22: mol_type = other DNA
actgtgaaaggaggaaaccaga

SEQ ID NO: 66621 - DNA, 22 bp, synthetic construct
  misc_feature 1..22: note = chemically synthesized
  source 1..22: mol_type = other DNA
tgaaaggaggaaaccagagtag

SEQ ID NO: 66622 - DNA, 22 bp, synthetic construct
  misc_feature 1..22: note = chemically synthesized
  source 1..22: mol_type = other DNA
ctcccagctgtcaccccctcgc

SEQ ID NO: 66623 - DNA, 22 bp, synthetic construct
  misc_feature 1..22: note = chemically synthesized
  source 1..22: mol_type = other DNA
ccagctgtcaccccctcgccac

SEQ ID NO: 66624 - DNA, 22 bp, synthetic construct
  misc_feature 1..22: note = chemically synthesized
  source 1..22: mol_type = other DNA
tcaccccctcgccaccctccct

SEQ ID NO: 66625 - DNA, 22 bp, synthetic construct
  misc_feature 1..22: note = chemically synthesized
  source 1..22: mol_type = other DNA
gccaccctccctgcaccagcct

SEQ ID NO: 66626 - DNA, 22 bp, synthetic construct
  misc_feature 1..22: note = chemically synthesized
  source 1..22: mol_type = other DNA
cctgcaccagcctctccacctc

SEQ ID NO: 66627 - DNA, 22 bp, synthetic construct
  misc_feature 1..22: note = chemically synthesized
  source 1..22: mol_type = other DNA
caccagcctctccacctccttt

SEQ ID NO: 66628 - DNA, 22 bp, synthetic construct
  misc_feature 1..22: note = chemically synthesized
  source 1..22: mol_type = other DNA
tccacctcctttgagcccagaa

SEQ ID NO: 66629 - DNA, 22 bp, synthetic construct
  misc_feature 1..22: note = chemically synthesized
  source 1..22: mol_type = other DNA
cacctcctttgagcccagaatt

SEQ ID NO: 66630 - DNA, 22 bp, synthetic construct
  misc_feature 1..22: note = chemically synthesized
  source 1..22: mol_type = other DNA
ctttgagcccagaattcccctg

SEQ ID NO: 66631 - DNA, 22 bp, synthetic construct
  misc_feature 1..22: note = chemically synthesized
  source 1..22: mol_type = other DNA
tgagcccagaattcccctgtct

SEQ ID NO: 66632 - DNA, 22 bp, synthetic construct
  misc_feature 1..22: note = chemically synthesized
  source 1..22: mol_type = other DNA
gagcccagaattcccctgtcta

SEQ ID NO: 66633 - DNA, 22 bp, synthetic construct
  misc_feature 1..22: note = chemically synthesized
  source 1..22: mol_type = other DNA
agcccagaattcccctgtctag

SEQ ID NO: 66634 - DNA, 22 bp, synthetic construct
  misc_feature 1..22: note = chemically synthesized
  source 1..22: mol_type = other DNA
ccctgtctaggagggcacctgt

SEQ ID NO: 66635 - DNA, 22 bp, synthetic construct
  misc_feature 1..22: note = chemically synthesized
  source 1..22: mol_type = other DNA
tctaggagggcacctgtctcat

SEQ ID NO: 66636 - DNA, 22 bp, synthetic construct
  misc_feature 1..22: note = chemically synthesized
  source 1..22: mol_type = other DNA
ggagggcacctgtctcatgcct

SEQ ID NO: 66637 - DNA, 22 bp, synthetic construct
  misc_feature 1..22: note = chemically synthesized
  source 1..22: mol_type = other DNA
tctcatgcctagccatgggaat

SEQ ID NO: 66638 - DNA, 22 bp, synthetic construct
  misc_feature 1..22: note = chemically synthesized
  source 1..22: mol_type = other DNA
atgcctagccatgggaattctc

SEQ ID NO: 66639 - DNA, 22 bp, synthetic construct
  misc_feature 1..22: note = chemically synthesized
  source 1..22: mol_type = other DNA
gccatgggaattctccatctgt

SEQ ID NO: 66640 - DNA, 22 bp, synthetic construct
  misc_feature 1..22: note = chemically synthesized
  source 1..22: mol_type = other DNA
tccatctgttttgctacattga

SEQ ID NO: 66641 - DNA, 22 bp, synthetic construct
  misc_feature 1..22: note = chemically synthesized
  source 1..22: mol_type = other DNA
catctgttttgctacattgaac

SEQ ID NO: 66642 - DNA, 22 bp, synthetic construct
  misc_feature 1..22: note = chemically synthesized
  source 1..22: mol_type = other DNA
ttttgctacattgaacccagat

SEQ ID NO: 66643 - DNA, 22 bp, synthetic construct
  misc_feature 1..22: note = chemically synthesized
  source 1..22: mol_type = other DNA
tgctacattgaacccagatgcc

SEQ ID NO: 66644 - DNA, 22 bp, synthetic construct
  misc_feature 1..22: note = chemically synthesized
  source 1..22: mol_type = other DNA
gctacattgaacccagatgcca

SEQ ID NO: 66645 - DNA, 22 bp, synthetic construct
  misc_feature 1..22: note = chemically synthesized
  source 1..22: mol_type = other DNA
ctacattgaacccagatgccat

SEQ ID NO: 66646 - DNA, 22 bp, synthetic construct
  misc_feature 1..22: note = chemically synthesized
  source 1..22: mol_type = other DNA
cattgaacccagatgccattct

SEQ ID NO: 66647 - DNA, 22 bp, synthetic construct
  misc_feature 1..22: note = chemically synthesized
  source 1..22: mol_type = other DNA
aacccagatgccattctaacca

SEQ ID NO: 66648 - DNA, 22 bp, synthetic construct
  misc_feature 1..22: note = chemically synthesized
  source 1..22: mol_type = other DNA
taaccaagaatcctggctgggt

SEQ ID NO: 66649 - DNA, 22 bp, synthetic construct
  misc_feature 1..22: note = chemically synthesized
  source 1..22: mol_type = other DNA
accaagaatcctggctgggtgc

SEQ ID NO: 66650 - DNA, 22 bp, synthetic construct
  misc_feature 1..22: note = chemically synthesized
  source 1..22: mol_type = other DNA
gctgggtgcaggggctctcgcc

SEQ ID NO: 66651 - DNA, 22 bp, synthetic construct
  misc_feature 1..22: note = chemically synthesized
  source 1..22: mol_type = other DNA
ggtgcaggggctctcgcctgta

SEQ ID NO: 66652 - DNA, 22 bp, synthetic construct
  misc_feature 1..22: note = chemically synthesized
  source 1..22: mol_type = other DNA
tcgcctgtaaccccagcacttt

SEQ ID NO: 66653 - DNA, 22 bp, synthetic construct
  misc_feature 1..22: note = chemically synthesized
  source 1..22: mol_type = other DNA
gcctgtaaccccagcactttgg

SEQ ID NO: 66654 - DNA, 22 bp, synthetic construct
  misc_feature 1..22: note = chemically synthesized
  source 1..22: mol_type = other DNA
taaccccagcactttgggaggc

SEQ ID NO: 66655 - DNA, 22 bp, synthetic construct
  misc_feature 1..22: note = chemically synthesized
  source 1..22: mol_type = other DNA
tgggaggccaaggcaggcggat

SEQ ID NO: 66656 - DNA, 22 bp, synthetic construct
  misc_feature 1..22: note = chemically synthesized
  source 1..22: mol_type = other DNA
gggaggccaaggcaggcggatc

SEQ ID NO: 66657 - DNA, 22 bp, synthetic construct
  misc_feature 1..22: note = chemically synthesized
  source 1..22: mol_type = other DNA
ggaggccaaggcaggcggatca

SEQ ID NO: 66658 - DNA, 22 bp, synthetic construct
  misc_feature 1..22: note = chemically synthesized
  source 1..22: mol_type = other DNA
aagacctgcctggccaacacgg

SEQ ID NO: 66659 - DNA, 22 bp, synthetic construct
  misc_feature 1..22: note = chemically synthesized
  source 1..22: mol_type = other DNA
cctggccaacacggtgaaacct

SEQ ID NO: 66660 - DNA, 22 bp, synthetic construct
  misc_feature 1..22: note = chemically synthesized
  source 1..22: mol_type = other DNA
gccaacacggtgaaacctcagc

SEQ ID NO: 66661 - DNA, 22 bp, synthetic construct
  misc_feature 1..22: note = chemically synthesized
  source 1..22: mol_type = other DNA
agctctactaaaaatacaaaaa

SEQ ID NO: 66662 - DNA, 22 bp, synthetic construct
  misc_feature 1..22: note = chemically synthesized
  source 1..22: mol_type = other DNA
tactaaaaatacaaaaattagc

SEQ ID NO: 66663 - DNA, 22 bp, synthetic construct
  misc_feature 1..22: note = chemically synthesized
  source 1..22: mol_type = other DNA
ctaaaaatacaaaaattagcca

SEQ ID NO: 66664 - DNA, 22 bp, synthetic construct
  misc_feature 1..22: note = chemically synthesized
  source 1..22: mol_type = other DNA
aaaatacaaaaattagccaggc

SEQ ID NO: 66665 - DNA, 22 bp, synthetic construct
  misc_feature 1..22: note = chemically synthesized
  source 1..22: mol_type = other DNA
gccaggcgtggtggcacacgcc

SEQ ID NO: 66666 - DNA, 22 bp, synthetic construct
  misc_feature 1..22: note = chemically synthesized
  source 1..22: mol_type = other DNA
taatcccagctatttgggaagc

SEQ ID NO: 66667 - DNA, 22 bp, synthetic construct
  misc_feature 1..22: note = chemically synthesized
  source 1..22: mol_type = other DNA
tttgggaagctgagacagaaga

SEQ ID NO: 66668 - DNA, 22 bp, synthetic construct
  misc_feature 1..22: note = chemically synthesized
  source 1..22: mol_type = other DNA
gggaagctgagacagaagaatt

SEQ ID NO: 66669 - DNA, 22 bp, synthetic construct
  misc_feature 1..22: note = chemically synthesized
  source 1..22: mol_type = other DNA
ggaagctgagacagaagaattt

SEQ ID NO: 66670 - DNA, 22 bp, synthetic construct
  misc_feature 1..22: note = chemically synthesized
  source 1..22: mol_type = other DNA
agacagaagaatttcttgaacc

SEQ ID NO: 66671 - DNA, 22 bp, synthetic construct
  misc_feature 1..22: note = chemically synthesized
  source 1..22: mol_type = other DNA
cttgaacccgggaggtggaggt

SEQ ID NO: 66672 - DNA, 22 bp, synthetic construct
  misc_feature 1..22: note = chemically synthesized
  source 1..22: mol_type = other DNA
ttgaacccgggaggtggaggtt

SEQ ID NO: 66673 - DNA, 22 bp, synthetic construct
  misc_feature 1..22: note = chemically synthesized
  source 1..22: mol_type = other DNA
gaacccgggaggtggaggtttc

SEQ ID NO: 66674 - DNA, 22 bp, synthetic construct
  misc_feature 1..22: note = chemically synthesized
  source 1..22: mol_type = other DNA
aacccgggaggtggaggtttca

SEQ ID NO: 66675 - DNA, 22 bp, synthetic construct
  misc_feature 1..22: note = chemically synthesized
  source 1..22: mol_type = other DNA
cagtgagccgagatcacgccac

SEQ ID NO: 66676 - DNA, 22 bp, synthetic construct
  misc_feature 1..22: note = chemically synthesized
  source 1..22: mol_type = other DNA
agtgagccgagatcacgccact

SEQ ID NO: 66677 - DNA, 22 bp, synthetic construct
  misc_feature 1..22: note = chemically synthesized
  source 1..22: mol_type = other DNA
cactccaccctggcagataaag

SEQ ID NO: 66678 - DNA, 22 bp, synthetic construct
  misc_feature 1..22: note = chemically synthesized
  source 1..22: mol_type = other DNA
caccctggcagataaagcgaga

SEQ ID NO: 66679 - DNA, 22 bp, synthetic construct
  misc_feature 1..22: note = chemically synthesized
  source 1..22: mol_type = other DNA
gcagataaagcgagactctgtc

SEQ ID NO: 66680 - DNA, 22 bp, synthetic construct
  misc_feature 1..22: note = chemically synthesized
  source 1..22: mol_type = other DNA
tgtctcaaaaaaaacccaaaaa

SEQ ID NO: 66681 - DNA, 22 bp, synthetic construct
  misc_feature 1..22: note = chemically synthesized
  source 1..22: mol_type = other DNA
tctcaaaaaaaacccaaaaacc

SEQ ID NO: 66682 - DNA, 22 bp, synthetic construct
  misc_feature 1..22: note = chemically synthesized
  source 1..22: mol_type = other DNA
aaaaaaaacccaaaaacctatg

SEQ ID NO: 66683 - DNA, 22 bp, synthetic construct
  misc_feature 1..22: note = chemically synthesized
  source 1..22: mol_type = other DNA
tgttagtgtacagagggcccca

SEQ ID NO: 66684 - DNA, 22 bp, synthetic construct
  misc_feature 1..22: note = chemically synthesized
  source 1..22: mol_type = other DNA
gtgtacagagggccccagtgaa

SEQ ID NO: 66685 - DNA, 22 bp, synthetic construct
  misc_feature 1..22: note = chemically synthesized
  source 1..22: mol_type = other DNA
ctcccagccccactttgcacaa

SEQ ID NO: 66686 - DNA, 22 bp, synthetic construct
  misc_feature 1..22: note = chemically synthesized
  source 1..22: mol_type = other DNA
tcccagccccactttgcacaac

SEQ ID NO: 66687 - DNA, 22 bp, synthetic construct
  misc_feature 1..22: note = chemically synthesized
  source 1..22: mol_type = other DNA
ccagccccactttgcacaactg

SEQ ID NO: 66688 - DNA, 22 bp, synthetic construct
  misc_feature 1..22: note = chemically synthesized
  source 1..22: mol_type = other DNA
tgcacaactggggagagtgagg

SEQ ID NO: 66689 - DNA, 22 bp, synthetic construct
  misc_feature 1..22: note = chemically synthesized
  source 1..22: mol_type = other DNA
gcacaactggggagagtgaggc

SEQ ID NO: 66690 - DNA, 22 bp, synthetic construct
  misc_feature 1..22: note = chemically synthesized
  source 1..22: mol_type = other DNA
cacaactggggagagtgaggcc

SEQ ID NO: 66691 - DNA, 22 bp, synthetic construct
  misc_feature 1..22: note = chemically synthesized
  source 1..22: mol_type = other DNA
gggagagtgaggccccaggacc

SEQ ID NO: 66692 - DNA, 22 bp, synthetic construct
  misc_feature 1..22: note = chemically synthesized
  source 1..22: mol_type = other DNA
ttgctaaaggccaagtggatag

SEQ ID NO: 66693 - DNA, 22 bp, synthetic construct
  misc_feature 1..22: note = chemically synthesized
  source 1..22: mol_type = other DNA
gctaaaggccaagtggatagtg

SEQ ID NO: 66694 - DNA, 22 bp, synthetic construct
  misc_feature 1..22: note = chemically synthesized
  source 1..22: mol_type = other DNA
ctaaaggccaagtggatagtga

SEQ ID NO: 66695 - DNA, 22 bp, synthetic construct
  misc_feature 1..22: note = chemically synthesized
  source 1..22: mol_type = other DNA
aaggccaagtggatagtgatgg

SEQ ID NO: 66696 - DNA, 22 bp, synthetic construct
  misc_feature 1..22: note = chemically synthesized
  source 1..22: mol_type = other DNA
ccagggctagaagccacaacct

SEQ ID NO: 66697 - DNA, 22 bp, synthetic construct
  misc_feature 1..22: note = chemically synthesized
  source 1..22: mol_type = other DNA
gaagccacaacctctggccctg

SEQ ID NO: 66698 - DNA, 22 bp, synthetic construct
  misc_feature 1..22: note = chemically synthesized
  source 1..22: mol_type = other DNA
tggccctgaggccactcagcat

SEQ ID NO: 66699 - DNA, 22 bp, synthetic construct
  misc_feature 1..22: note = chemically synthesized
  source 1..22: mol_type = other DNA
gccctgaggccactcagcatat

SEQ ID NO: 66700 - DNA, 22 bp, synthetic construct
  misc_feature 1..22: note = chemically synthesized
  source 1..22: mol_type = other DNA
aggccactcagcatatttagtg

SEQ ID NO: 66701 - DNA, 22 bp, synthetic construct
  misc_feature 1..22: note = chemically synthesized
  source 1..22: mol_type = other DNA
agcatatttagtgtccccaccc

SEQ ID NO: 66702 - DNA, 22 bp, synthetic construct
  misc_feature 1..22: note = chemically synthesized
  source 1..22: mol_type = other DNA
agtgtccccaccctgcagaggc

SEQ ID NO: 66703 - DNA, 22 bp, synthetic construct
  misc_feature 1..22: note = chemically synthesized
  source 1..22: mol_type = other DNA
gtgtccccaccctgcagaggcc

SEQ ID NO: 66704 - DNA, 22 bp, synthetic construct
  misc_feature 1..22: note = chemically synthesized
  source 1..22: mol_type = other DNA
cagaggcccaactccctcctga

SEQ ID NO: 66705 - DNA, 22 bp, synthetic construct
  misc_feature 1..22: note = chemically synthesized
  source 1..22: mol_type = other DNA
cctcctgaccactgagccctgt

SEQ ID NO: 66706 - DNA, 22 bp, synthetic construct
  misc_feature 1..22: note = chemically synthesized
  source 1..22: mol_type = other DNA
ctgaccactgagccctgtaatg

SEQ ID NO: 66707 - DNA, 22 bp, synthetic construct
  misc_feature 1..22: note = chemically synthesized
  source 1..22: mol_type = other DNA
accactgagccctgtaatgatg

SEQ ID NO: 66708 - DNA, 22 bp, synthetic construct
  misc_feature 1..22: note = chemically synthesized
  source 1..22: mol_type = other DNA
agccctgtaatgatgggggaat

SEQ ID NO: 66709 - DNA, 22 bp, synthetic construct
  misc_feature 1..22: note = chemically synthesized
  source 1..22: mol_type = other DNA
taatgatgggggaatttccata

SEQ ID NO: 66710 - DNA, 22 bp, synthetic construct
  misc_feature 1..22: note = chemically synthesized
  source 1..22: mol_type = other DNA
ccataagccatgaaggactgca

SEQ ID NO: 66711 - DNA, 22 bp, synthetic construct
  misc_feature 1..22: note = chemically synthesized
  source 1..22: mol_type = other DNA
cataagccatgaaggactgcac

SEQ ID NO: 66712 - DNA, 22 bp, synthetic construct
  misc_feature 1..22: note = chemically synthesized
  source 1..22: mol_type = other DNA
cacaaagttcagttgggaagtg

SEQ ID NO: 66713 - DNA, 22 bp, synthetic construct
  misc_feature 1..22: note = chemically synthesized
  source 1..22: mol_type = other DNA
agttgggaagtgaaagagaaat

SEQ ID NO: 66714 - DNA, 22 bp, synthetic construct
  misc_feature 1..22: note = chemically synthesized
  source 1..22: mol_type = other DNA
ggaagtgaaagagaaattaaag

SEQ ID NO: 66715 - DNA, 22 bp, synthetic construct
  misc_feature 1..22: note = chemically synthesized
  source 1..22: mol_type = other DNA
aagggagatggaaatatacagc

SEQ ID NO: 66716 - DNA, 22 bp, synthetic construct
  misc_feature 1..22: note = chemically synthesized
  source 1..22: mol_type = other DNA
attttagcaccgtctttagttc

SEQ ID NO: 66717 - DNA, 22 bp, synthetic construct
  misc_feature 1..22: note = chemically synthesized
  source 1..22: mol_type = other DNA
tagcaccgtctttagttctaac

SEQ ID NO: 66718 - DNA, 22 bp, synthetic construct
  misc_feature 1..22: note = chemically synthesized
  source 1..22: mol_type = other DNA
agcaccgtctttagttctaaca

SEQ ID NO: 66719 - DNA, 22 bp, synthetic construct
  misc_feature 1..22: note = chemically synthesized
  source 1..22: mol_type = other DNA
gcaccgtctttagttctaacaa

SEQ ID NO: 66720 - DNA, 22 bp, synthetic construct
  misc_feature 1..22: note = chemically synthesized
  source 1..22: mol_type = other DNA
tagttctaacaacactagctag

SEQ ID NO: 66721 - DNA, 22 bp, synthetic construct
  misc_feature 1..22: note = chemically synthesized
  source 1..22: mol_type = other DNA
agttctaacaacactagctagc

SEQ ID NO: 66722 - DNA, 22 bp, synthetic construct
  misc_feature 1..22: note = chemically synthesized
  source 1..22: mol_type = other DNA
gttctaacaacactagctagct

SEQ ID NO: 66723 - DNA, 22 bp, synthetic construct
  misc_feature 1..22: note = chemically synthesized
  source 1..22: mol_type = other DNA
taacaacactagctagctgaag

SEQ ID NO: 66724 - DNA, 22 bp, synthetic construct
  misc_feature 1..22: note = chemically synthesized
  source 1..22: mol_type = other DNA
acaacactagctagctgaagaa

SEQ ID NO: 66725 - DNA, 22 bp, synthetic construct
  misc_feature 1..22: note = chemically synthesized
  source 1..22: mol_type = other DNA
gctagctgaagaaaaatacaaa

SEQ ID NO: 66726 - DNA, 22 bp, synthetic construct
  misc_feature 1..22: note = chemically synthesized
  source 1..22: mol_type = other DNA
gctgaagaaaaatacaaacatg

SEQ ID NO: 66727 - DNA, 22 bp, synthetic construct
  misc_feature 1..22: note = chemically synthesized
  source 1..22: mol_type = other DNA
aagaaaaatacaaacatgtatt

SEQ ID NO: 66728 - DNA, 22 bp, synthetic construct
  misc_feature 1..22: note = chemically synthesized
  source 1..22: mol_type = other DNA
tgtaatgtgtggtctgttccat

SEQ ID NO: 66729 - DNA, 22 bp, synthetic construct
  misc_feature 1..22: note = chemically synthesized
  source 1..22: mol_type = other DNA
ttccatttggattacttagagg

SEQ ID NO: 66730 - DNA, 22 bp, synthetic construct
  misc_feature 1..22: note = chemically synthesized
  source 1..22: mol_type = other DNA
catttggattacttagaggcac

SEQ ID NO: 66731 - DNA, 22 bp, synthetic construct
  misc_feature 1..22: note = chemically synthesized
  source 1..22: mol_type = other DNA
ggattacttagaggcacgaggg

SEQ ID NO: 66732 - DNA, 22 bp, synthetic construct
  misc_feature 1..22: note = chemically synthesized
  source 1..22: mol_type = other DNA
gattacttagaggcacgagggc

SEQ ID NO: 66733 - DNA, 22 bp, synthetic construct
  misc_feature 1..22: note = chemically synthesized
  source 1..22: mol_type = other DNA
cttagaggcacgagggccagga

SEQ ID NO: 66734 - DNA, 22 bp, synthetic construct
  misc_feature 1..22: note = chemically synthesized
  source 1..22: mol_type = other DNA
agaggcacgagggccaggagaa

SEQ ID NO: 66735 - DNA, 22 bp, synthetic construct
  misc_feature 1..22: note = chemically synthesized
  source 1..22: mol_type = other DNA
gaggcacgagggccaggagaaa

SEQ ID NO: 66736 - DNA, 22 bp, synthetic construct
  misc_feature 1..22: note = chemically synthesized
  source 1..22: mol_type = other DNA
tgcacttcatttgttgctttat

SEQ ID NO: 66737 - DNA, 22 bp, synthetic construct
  misc_feature 1..22: note = chemically synthesized
  source 1..22: mol_type = other DNA
gcacttcatttgttgctttatt

SEQ ID NO: 66738 - DNA, 22 bp, synthetic construct
  misc_feature 1..22: note = chemically synthesized
  source 1..22: mol_type = other DNA
cacttcatttgttgctttattg

SEQ ID NO: 66739 - DNA, 22 bp, synthetic construct
  misc_feature 1..22: note = chemically synthesized
  source 1..22: mol_type = other DNA
catttgttgctttattggaagg

SEQ ID NO: 66740 - DNA, 22 bp, synthetic construct
  misc_feature 1..22: note = chemically synthesized
  source 1..22: mol_type = other DNA
atttgttgctttattggaagga

SEQ ID NO: 66741 - DNA, 22 bp, synthetic construct
  misc_feature 1..22: note = chemically synthesized
  source 1..22: mol_type = other DNA
gttgctttattggaaggaaact

SEQ ID NO: 66742 - DNA, 22 bp, synthetic construct
  misc_feature 1..22: note = chemically synthesized
  source 1..22: mol_type = other DNA
ttgctttattggaaggaaactt

SEQ ID NO: 66743 - DNA, 22 bp, synthetic construct
  misc_feature 1..22: note = chemically synthesized
  source 1..22: mol_type = other DNA
ctttattggaaggaaactttta

SEQ ID NO: 66744 - DNA, 22 bp, synthetic construct
  misc_feature 1..22: note = chemically synthesized
  source 1..22: mol_type = other DNA
tattggaaggaaacttttaaaa

SEQ ID NO: 66745 - DNA, 22 bp, synthetic construct
  misc_feature 1..22: note = chemically synthesized
  source 1..22: mol_type = other DNA
attggaaggaaacttttaaaag

SEQ ID NO: 66746 - DNA, 22 bp, synthetic construct
  misc_feature 1..22: note = chemically synthesized
  source 1..22: mol_type = other DNA
ttggaaggaaacttttaaaagt

SEQ ID NO: 66747 - DNA, 22 bp, synthetic construct
  misc_feature 1..22: note = chemically synthesized
  source 1..22: mol_type = other DNA
gaaggaaacttttaaaagtcca

SEQ ID NO: 66748 - DNA, 22 bp, synthetic construct
  misc_feature 1..22: note = chemically synthesized
  source 1..22: mol_type = other DNA
ttaaaagtccaagggggttgaa

SEQ ID NO: 66749 - DNA, 22 bp, synthetic construct
  misc_feature 1..22: note = chemically synthesized
  source 1..22: mol_type = other DNA
taaaagtccaagggggttgaag

SEQ ID NO: 66750 - DNA, 22 bp, synthetic construct
  misc_feature 1..22: note = chemically synthesized
  source 1..22: mol_type = other DNA
aaaagtccaagggggttgaaga

SEQ ID NO: 66751 - DNA, 22 bp, synthetic construct
  misc_feature 1..22: note = chemically synthesized
  source 1..22: mol_type = other DNA
aaagtccaagggggttgaagaa

SEQ ID NO: 66752 - DNA, 22 bp, synthetic construct
  misc_feature 1..22: note = chemically synthesized
  source 1..22: mol_type = other DNA
aagaatctcaatatttgttatt

SEQ ID NO: 66753 - DNA, 22 bp, synthetic construct
  misc_feature 1..22: note = chemically synthesized
  source 1..22: mol_type = other DNA
aatatttgttatttccagcttt

SEQ ID NO: 66754 - DNA, 22 bp, synthetic construct
  misc_feature 1..22: note = chemically synthesized
  source 1..22: mol_type = other DNA
gttatttccagctttttttctc

SEQ ID NO: 66755 - DNA, 22 bp, synthetic construct
  misc_feature 1..22: note = chemically synthesized
  source 1..22: mol_type = other DNA
ttatttccagctttttttctcc

SEQ ID NO: 66756 - DNA, 22 bp, synthetic construct
  misc_feature 1..22: note = chemically synthesized
  source 1..22: mol_type = other DNA
tttccagctttttttctccagt

SEQ ID NO: 66757 - DNA, 22 bp, synthetic construct
  misc_feature 1..22: note = chemically synthesized
  source 1..22: mol_type = other DNA
ccagctttttttctccagtttt

SEQ ID NO: 66758 - DNA, 22 bp, synthetic construct
  misc_feature 1..22: note = chemically synthesized
  source 1..22: mol_type = other DNA
cagctttttttctccagttttt

SEQ ID NO: 66759 - DNA, 22 bp, synthetic construct
  misc_feature 1..22: note = chemically synthesized
  source 1..22: mol_type = other DNA
tttttctccagtttttcatttc

SEQ ID NO: 66760 - DNA, 22 bp, synthetic construct
  misc_feature 1..22: note = chemically synthesized
  source 1..22: mol_type = other DNA
ttttctccagtttttcatttcc

SEQ ID NO: 66761 - DNA, 22 bp, synthetic construct
  misc_feature 1..22: note = chemically synthesized
  source 1..22: mol_type = other DNA
tttctccagtttttcatttccc

SEQ ID NO: 66762 - DNA, 22 bp, synthetic construct
  misc_feature 1..22: note = chemically synthesized
  source 1..22: mol_type = other DNA
ttctccagtttttcatttccca

SEQ ID NO: 66763 - DNA, 22 bp, synthetic construct
  misc_feature 1..22: note = chemically synthesized
  source 1..22: mol_type = other DNA
tctccagtttttcatttcccaa

SEQ ID NO: 66764 - DNA, 22 bp, synthetic construct
  misc_feature 1..22: note = chemically synthesized
  source 1..22: mol_type = other DNA
ctccagtttttcatttcccaaa

SEQ ID NO: 66765 - DNA, 22 bp, synthetic construct
  misc_feature 1..22: note = chemically synthesized
  source 1..22: mol_type = other DNA
tccagtttttcatttcccaaat

SEQ ID NO: 66766 - DNA, 22 bp, synthetic construct
  misc_feature 1..22: note = chemically synthesized
  source 1..22: mol_type = other DNA
cagtttttcatttcccaaattc

SEQ ID NO: 66767 - DNA, 22 bp, synthetic construct
  misc_feature 1..22: note = chemically synthesized
  source 1..22: mol_type = other DNA
ttcatttcccaaattcaaggac

SEQ ID NO: 66768 - DNA, 22 bp, synthetic construct
  misc_feature 1..22: note = chemically synthesized
  source 1..22: mol_type = other DNA
tcatttcccaaattcaaggaca

SEQ ID NO: 66769 - DNA, 22 bp, synthetic construct
  misc_feature 1..22: note = chemically synthesized
  source 1..22: mol_type = other DNA
catttcccaaattcaaggacac

SEQ ID NO: 66770 - DNA, 22 bp, synthetic construct
  misc_feature 1..22: note = chemically synthesized
  source 1..22: mol_type = other DNA
atttcccaaattcaaggacacc

SEQ ID NO: 66771 - DNA, 22 bp, synthetic construct
  misc_feature 1..22: note = chemically synthesized
  source 1..22: mol_type = other DNA
cccaaattcaaggacacctttt

SEQ ID NO: 66772 - DNA, 22 bp, synthetic construct
  misc_feature 1..22: note = chemically synthesized
  source 1..22: mol_type = other DNA
ccaaattcaaggacaccttttt

SEQ ID NO: 66773 - DNA, 22 bp, synthetic construct
  misc_feature 1..22: note = chemically synthesized
  source 1..22: mol_type = other DNA
aaggacacctttttctttgtat

SEQ ID NO: 66774 - DNA, 22 bp, synthetic construct
  misc_feature 1..22: note = chemically synthesized
  source 1..22: mol_type = other DNA
tttctttgtattttgttaagat

SEQ ID NO: 66775 - DNA, 22 bp, synthetic construct
  misc_feature 1..22: note = chemically synthesized
  source 1..22: mol_type = other DNA
ttctttgtattttgttaagatg

SEQ ID NO: 66776 - DNA, 22 bp, synthetic construct
  misc_feature 1..22: note = chemically synthesized
  source 1..22: mol_type = other DNA
tctttgtattttgttaagatga

SEQ ID NO: 66777 - DNA, 22 bp, synthetic construct
  misc_feature 1..22: note = chemically synthesized
  source 1..22: mol_type = other DNA
ctttgtattttgttaagatgat

SEQ ID NO: 66778 - DNA, 22 bp, synthetic construct
  misc_feature 1..22: note = chemically synthesized
  source 1..22: mol_type = other DNA
tttgtattttgttaagatgatg

SEQ ID NO: 66779 - DNA, 22 bp, synthetic construct
  misc_feature 1..22: note = chemically synthesized
  source 1..22: mol_type = other DNA
tgtattttgttaagatgatggt

SEQ ID NO: 66780 - DNA, 22 bp, synthetic construct
  misc_feature 1..22: note = chemically synthesized
  source 1..22: mol_type = other DNA
gtattttgttaagatgatggtt

SEQ ID NO: 66781 - DNA, 22 bp, synthetic construct
  misc_feature 1..22: note = chemically synthesized
  source 1..22: mol_type = other DNA
tattttgttaagatgatggttt

SEQ ID NO: 66782 - DNA, 22 bp, synthetic construct
  misc_feature 1..22: note = chemically synthesized
  source 1..22: mol_type = other DNA
tgttaagatgatggttttggtt

SEQ ID NO: 66783 - DNA, 22 bp, synthetic construct
  misc_feature 1..22: note = chemically synthesized
  source 1..22: mol_type = other DNA
gttaagatgatggttttggttt

SEQ ID NO: 66784 - DNA, 22 bp, synthetic construct
  misc_feature 1..22: note = chemically synthesized
  source 1..22: mol_type = other DNA
ttaagatgatggttttggtttt

SEQ ID NO: 66785 - DNA, 22 bp, synthetic construct
  misc_feature 1..22: note = chemically synthesized
  source 1..22: mol_type = other DNA
agatgatggttttggttttgtg

SEQ ID NO: 66786 - DNA, 22 bp, synthetic construct
  misc_feature 1..22: note = chemically synthesized
  source 1..22: mol_type = other DNA
tggttttgtgactagtagttaa

SEQ ID NO: 66787 - DNA, 22 bp, synthetic construct
  misc_feature 1..22: note = chemically synthesized
  source 1..22: mol_type = other DNA
ggttttgtgactagtagttaac

SEQ ID NO: 66788 - DNA, 22 bp, synthetic construct
  misc_feature 1..22: note = chemically synthesized
  source 1..22: mol_type = other DNA
gttttgtgactagtagttaaca

SEQ ID NO: 66789 - DNA, 22 bp, synthetic construct
  misc_feature 1..22: note = chemically synthesized
  source 1..22: mol_type = other DNA
tgtgactagtagttaacaatgt

SEQ ID NO: 66790 - DNA, 22 bp, synthetic construct
  misc_feature 1..22: note = chemically synthesized
  source 1..22: mol_type = other DNA
gtgactagtagttaacaatgtg

SEQ ID NO: 66791 - DNA, 22 bp, synthetic construct
  misc_feature 1..22: note = chemically synthesized
  source 1..22: mol_type = other DNA
tgactagtagttaacaatgtgg

SEQ ID NO: 66792 - DNA, 22 bp, synthetic construct
  misc_feature 1..22: note = chemically synthesized
  source 1..22: mol_type = other DNA
gtagttaacaatgtggctgccg

SEQ ID NO: 66793 - DNA, 22 bp, synthetic construct
  misc_feature 1..22: note = chemically synthesized
  source 1..22: mol_type = other DNA
acaatgtggctgccgggcatat

SEQ ID NO: 66794 - DNA, 22 bp, synthetic construct
  misc_feature 1..22: note = chemically synthesized
  source 1..22: mol_type = other DNA
ccgggcatattctcctcagcta

SEQ ID NO: 66795 - DNA, 22 bp, synthetic construct
  misc_feature 1..22: note = chemically synthesized
  source 1..22: mol_type = other DNA
tcctcagctaggacctcagttt

SEQ ID NO: 66796 - DNA, 22 bp, synthetic construct
  misc_feature 1..22: note = chemically synthesized
  source 1..22: mol_type = other DNA
ctcagctaggacctcagttttc

SEQ ID NO: 66797 - DNA, 22 bp, synthetic construct
  misc_feature 1..22: note = chemically synthesized
  source 1..22: mol_type = other DNA
agctaggacctcagttttccca

SEQ ID NO: 66798 - DNA, 22 bp, synthetic construct
  misc_feature 1..22: note = chemically synthesized
  source 1..22: mol_type = other DNA
ggacctcagttttcccatctgt

SEQ ID NO: 66799 - DNA, 22 bp, synthetic construct
  misc_feature 1..22: note = chemically synthesized
  source 1..22: mol_type = other DNA
agttttcccatctgtgaagacg

SEQ ID NO: 66800 - DNA, 22 bp, synthetic construct
  misc_feature 1..22: note = chemically synthesized
  source 1..22: mol_type = other DNA
tcccatctgtgaagacggcagg

SEQ ID NO: 66801 - DNA, 22 bp, synthetic construct
  misc_feature 1..22: note = chemically synthesized
  source 1..22: mol_type = other DNA
cccatctgtgaagacggcaggt

SEQ ID NO: 66802 - DNA, 22 bp, synthetic construct
  misc_feature 1..22: note = chemically synthesized
  source 1..22: mol_type = other DNA
ccatctgtgaagacggcaggtt

SEQ ID NO: 66803 - DNA, 22 bp, synthetic construct
  misc_feature 1..22: note = chemically synthesized
  source 1..22: mol_type = other DNA
tgaagacggcaggttctaccta

SEQ ID NO: 66804 - DNA, 22 bp, synthetic construct
  misc_feature 1..22: note = chemically synthesized
  source 1..22: mol_type = other DNA
tacctagggggctgcaggctgg

SEQ ID NO: 66805 - DNA, 22 bp, synthetic construct
  misc_feature 1..22: note = chemically synthesized
  source 1..22: mol_type = other DNA
cctagggggctgcaggctggtg

SEQ ID NO: 66806 - DNA, 22 bp, synthetic construct
  misc_feature 1..22: note = chemically synthesized
  source 1..22: mol_type = other DNA
gggggctgcaggctggtggtcc

SEQ ID NO: 66807 - DNA, 22 bp, synthetic construct
  misc_feature 1..22: note = chemically synthesized
  source 1..22: mol_type = other DNA
caggctggtggtccgaagcctg

SEQ ID NO: 66808 - DNA, 22 bp, synthetic construct
  misc_feature 1..22: note = chemically synthesized
  source 1..22: mol_type = other DNA
gtggtccgaagcctgggcatat

SEQ ID NO: 66809 - DNA, 22 bp, synthetic construct
  misc_feature 1..22: note = chemically synthesized
  source 1..22: mol_type = other DNA
ggcatatctggagtagaaggat

SEQ ID NO: 66810 - DNA, 22 bp, synthetic construct
  misc_feature 1..22: note = chemically synthesized
  source 1..22: mol_type = other DNA
gagtagaaggatcactgtgggg

SEQ ID NO: 66811 - DNA, 22 bp, synthetic construct
  misc_feature 1..22: note = chemically synthesized
  source 1..22: mol_type = other DNA
tggggcagggcaggttctgtgt

SEQ ID NO: 66812 - DNA, 22 bp, synthetic construct
  misc_feature 1..22: note = chemically synthesized
  source 1..22: mol_type = other DNA
tgtgttgctgtggatgacgttg

SEQ ID NO: 66813 - DNA, 22 bp, synthetic construct
  misc_feature 1..22: note = chemically synthesized
  source 1..22: mol_type = other DNA
tgttgctgtggatgacgttgac

SEQ ID NO: 66814 - DNA, 22 bp, synthetic construct
  misc_feature 1..22: note = chemically synthesized
  source 1..22: mol_type = other DNA
ctgtggatgacgttgactttga

SEQ ID NO: 66815 - DNA, 22 bp, synthetic construct
  misc_feature 1..22: note = chemically synthesized
  source 1..22: mol_type = other DNA
tggatgacgttgactttgacca

SEQ ID NO: 66816 - DNA, 22 bp, synthetic construct
  misc_feature 1..22: note = chemically synthesized
  source 1..22: mol_type = other DNA
actttgaccattgctcggcaga

SEQ ID NO: 66817 - DNA, 22 bp, synthetic construct
  misc_feature 1..22: note = chemically synthesized
  source 1..22: mol_type = other DNA
tgaccattgctcggcagagcct

SEQ ID NO: 66818 - DNA, 22 bp, synthetic construct
  misc_feature 1..22: note = chemically synthesized
  source 1..22: mol_type = other DNA
gaccattgctcggcagagcctg

SEQ ID NO: 66819 - DNA, 22 bp, synthetic construct
  misc_feature 1..22: note = chemically synthesized
  source 1..22: mol_type = other DNA
accattgctcggcagagcctgc

SEQ ID NO: 66820 - DNA, 22 bp, synthetic construct
  misc_feature 1..22: note = chemically synthesized
  source 1..22: mol_type = other DNA
ctcggcagagcctgctctcgct

SEQ ID NO: 66821 - DNA, 22 bp, synthetic construct
  misc_feature 1..22: note = chemically synthesized
  source 1..22: mol_type = other DNA
ggcagagcctgctctcgctggt

SEQ ID NO: 66822 - DNA, 22 bp, synthetic construct
  misc_feature 1..22: note = chemically synthesized
  source 1..22: mol_type = other DNA
ctctcgctggttcagccacagg

SEQ ID NO: 66823 - DNA, 22 bp, synthetic construct
  misc_feature 1..22: note = chemically synthesized
  source 1..22: mol_type = other DNA
tcgctggttcagccacaggccc

SEQ ID NO: 66824 - DNA, 22 bp, synthetic construct
  misc_feature 1..22: note = chemically synthesized
  source 1..22: mol_type = other DNA
gctggttcagccacaggcccca

SEQ ID NO: 66825 - DNA, 22 bp, synthetic construct
  misc_feature 1..22: note = chemically synthesized
  source 1..22: mol_type = other DNA
gttcagccacaggccccaccac

SEQ ID NO: 66826 - DNA, 22 bp, synthetic construct
  misc_feature 1..22: note = chemically synthesized
  source 1..22: mol_type = other DNA
agccacaggccccaccactccc

SEQ ID NO: 66827 - DNA, 22 bp, synthetic construct
  misc_feature 1..22: note = chemically synthesized
  source 1..22: mol_type = other DNA
cctattgtctcagccccgggta

SEQ ID NO: 66828 - DNA, 22 bp, synthetic construct
  misc_feature 1..22: note = chemically synthesized
  source 1..22: mol_type = other DNA
ttgtctcagccccgggtatgaa

SEQ ID NO: 66829 - DNA, 22 bp, synthetic construct
  misc_feature 1..22: note = chemically synthesized
  source 1..22: mol_type = other DNA
tctcagccccgggtatgaaaca

SEQ ID NO: 66830 - DNA, 22 bp, synthetic construct
  misc_feature 1..22: note = chemically synthesized
  source 1..22: mol_type = other DNA
agccccgggtatgaaacatgta

SEQ ID NO: 66831 - DNA, 22 bp, synthetic construct
  misc_feature 1..22: note = chemically synthesized
  source 1..22: mol_type = other DNA
ctcactggcctatcacctgaag

SEQ ID NO: 66832 - DNA, 22 bp, synthetic construct
  misc_feature 1..22: note = chemically synthesized
  source 1..22: mol_type = other DNA
actggcctatcacctgaagcct

SEQ ID NO: 66833 - DNA, 22 bp, synthetic construct
  misc_feature 1..22: note = chemically synthesized
  source 1..22: mol_type = other DNA
gcctatcacctgaagcctttga

SEQ ID NO: 66834 - DNA, 22 bp, synthetic construct
  misc_feature 1..22: note = chemically synthesized
  source 1..22: mol_type = other DNA
tcacctgaagcctttgaatttg

SEQ ID NO: 66835 - DNA, 22 bp, synthetic construct
  misc_feature 1..22: note = chemically synthesized
  source 1..22: mol_type = other DNA
aagcctttgaatttgcaacacc

SEQ ID NO: 66836 - DNA, 22 bp, synthetic construct
  misc_feature 1..22: note = chemically synthesized
  source 1..22: mol_type = other DNA
tgaatttgcaacacctgccaac

SEQ ID NO: 66837 - DNA, 22 bp, synthetic construct
  misc_feature 1..22: note = chemically synthesized
  source 1..22: mol_type = other DNA
gaatttgcaacacctgccaacc

SEQ ID NO: 66838 - DNA, 22 bp, synthetic construct
  misc_feature 1..22: note = chemically synthesized
  source 1..22: mol_type = other DNA
aatttgcaacacctgccaaccc

SEQ ID NO: 66839 - DNA, 22 bp, synthetic construct
  misc_feature 1..22: note = chemically synthesized
  source 1..22: mol_type = other DNA
gcaacacctgccaacccctccc

SEQ ID NO: 66840 - DNA, 22 bp, synthetic construct
  misc_feature 1..22: note = chemically synthesized
  source 1..22: mol_type = other DNA
caacacctgccaacccctccct

SEQ ID NO: 66841 - DNA, 22 bp, synthetic construct
  misc_feature 1..22: note = chemically synthesized
  source 1..22: mol_type = other DNA
ccaacccctccctcaaaagagt

SEQ ID NO: 66842 - DNA, 22 bp, synthetic construct
  misc_feature 1..22: note = chemically synthesized
  source 1..22: mol_type = other DNA
cctcaaaagagttgccctctca

SEQ ID NO: 66843 - DNA, 22 bp, synthetic construct
  misc_feature 1..22: note = chemically synthesized
  source 1..22: mol_type = other DNA
aaaagagttgccctctcagatc

SEQ ID NO: 66844 - DNA, 22 bp, synthetic construct
  misc_feature 1..22: note = chemically synthesized
  source 1..22: mol_type = other DNA
ccctctcagatccttttgatgt

SEQ ID NO: 66845 - DNA, 22 bp, synthetic construct
  misc_feature 1..22: note = chemically synthesized
  source 1..22: mol_type = other DNA
tcagatccttttgatgtaaggt

SEQ ID NO: 66846 - DNA, 22 bp, synthetic construct
  misc_feature 1..22: note = chemically synthesized
  source 1..22: mol_type = other DNA
agatccttttgatgtaaggttt

SEQ ID NO: 66847 - DNA, 22 bp, synthetic construct
  misc_feature 1..22: note = chemically synthesized
  source 1..22: mol_type = other DNA
ttgatgtaaggtttggtgttga

SEQ ID NO: 66848 - DNA, 22 bp, synthetic construct
  misc_feature 1..22: note = chemically synthesized
  source 1..22: mol_type = other DNA
tgatgtaaggtttggtgttgag

SEQ ID NO: 66849 - DNA, 22 bp, synthetic construct
  misc_feature 1..22: note = chemically synthesized
  source 1..22: mol_type = other DNA
gatgtaaggtttggtgttgaga

SEQ ID NO: 66850 - DNA, 22 bp, synthetic construct
  misc_feature 1..22: note = chemically synthesized
  source 1..22: mol_type = other DNA
atgtaaggtttggtgttgagac

SEQ ID NO: 66851 - DNA, 22 bp, synthetic construct
  misc_feature 1..22: note = chemically synthesized
  source 1..22: mol_type = other DNA
ggtgttgagacttatttcacta

SEQ ID NO: 66852 - DNA, 22 bp, synthetic construct
  misc_feature 1..22: note = chemically synthesized
  source 1..22: mol_type = other DNA
gtgttgagacttatttcactaa

SEQ ID NO: 66853 - DNA, 22 bp, synthetic construct
  misc_feature 1..22: note = chemically synthesized
  source 1..22: mol_type = other DNA
agacttatttcactaaattctc

SEQ ID NO: 66854 - DNA, 22 bp, synthetic construct
  misc_feature 1..22: note = chemically synthesized
  source 1..22: mol_type = other DNA
atttcactaaattctcatacat

SEQ ID NO: 66855 - DNA, 22 bp, synthetic construct
  misc_feature 1..22: note = chemically synthesized
  source 1..22: mol_type = other DNA
tttcactaaattctcatacata

SEQ ID NO: 66856 - DNA, 22 bp, synthetic construct
  misc_feature 1..22: note = chemically synthesized
  source 1..22: mol_type = other DNA
cactaaattctcatacataaac

SEQ ID NO: 66857 - DNA, 22 bp, synthetic construct
  misc_feature 1..22: note = chemically synthesized
  source 1..22: mol_type = other DNA
actaaattctcatacataaaca

SEQ ID NO: 66858 - DNA, 22 bp, synthetic construct
  misc_feature 1..22: note = chemically synthesized
  source 1..22: mol_type = other DNA
aattctcatacataaacatcac

SEQ ID NO: 66859 - DNA, 22 bp, synthetic construct
  misc_feature 1..22: note = chemically synthesized
  source 1..22: mol_type = other DNA
tcatacataaacatcactttat

SEQ ID NO: 66860 - DNA, 22 bp, synthetic construct
  misc_feature 1..22: note = chemically synthesized
  source 1..22: mol_type = other DNA
atacataaacatcactttatgt

SEQ ID NO: 66861 - DNA, 22 bp, synthetic construct
  misc_feature 1..22: note = chemically synthesized
  source 1..22: mol_type = other DNA
tatgtatgaggcaaaatgagga

SEQ ID NO: 66862 - DNA, 22 bp, synthetic construct
  misc_feature 1..22: note = chemically synthesized
  source 1..22: mol_type = other DNA
atgtatgaggcaaaatgaggac

SEQ ID NO: 66863 - DNA, 22 bp, synthetic construct
  misc_feature 1..22: note = chemically synthesized
  source 1..22: mol_type = other DNA
tgtatgaggcaaaatgaggacc

SEQ ID NO: 66864 - DNA, 22 bp, synthetic construct
  misc_feature 1..22: note = chemically synthesized
  source 1..22: mol_type = other DNA
gtcctggctcatacacctggaa

SEQ ID NO: 66865 - DNA, 22 bp, synthetic construct
  misc_feature 1..22: note = chemically synthesized
  source 1..22: mol_type = other DNA
tcctggctcatacacctggaaa

SEQ ID NO: 66866 - DNA, 22 bp, synthetic construct
  misc_feature 1..22: note = chemically synthesized
  source 1..22: mol_type = other DNA
gctcatacacctggaaagtgac

SEQ ID NO: 66867 - DNA, 22 bp, synthetic construct
  misc_feature 1..22: note = chemically synthesized
  source 1..22: mol_type = other DNA
atacacctggaaagtgacagag

SEQ ID NO: 66868 - DNA, 22 bp, synthetic construct
  misc_feature 1..22: note = chemically synthesized
  source 1..22: mol_type = other DNA
gaaagtgacagagtcagattag

SEQ ID NO: 66869 - DNA, 22 bp, synthetic construct
  misc_feature 1..22: note = chemically synthesized
  source 1..22: mol_type = other DNA
gatcccaggtctatctgaagtt

SEQ ID NO: 66870 - DNA, 22 bp, synthetic construct
  misc_feature 1..22: note = chemically synthesized
  source 1..22: mol_type = other DNA
tctgaagttaaaagaggtgtct

SEQ ID NO: 66871 - DNA, 22 bp, synthetic construct
  misc_feature 1..22: note = chemically synthesized
  source 1..22: mol_type = other DNA
aagttaaaagaggtgtcttttc

SEQ ID NO: 66872 - DNA, 22 bp, synthetic construct
  misc_feature 1..22: note = chemically synthesized
  source 1..22: mol_type = other DNA
aaagaggtgtcttttcacttcc

SEQ ID NO: 66873 - DNA, 22 bp, synthetic construct
  misc_feature 1..22: note = chemically synthesized
  source 1..22: mol_type = other DNA
ttcacttcccacctcctccatc

SEQ ID NO: 66874 - DNA, 22 bp, synthetic construct
  misc_feature 1..22: note = chemically synthesized
  source 1..22: mol_type = other DNA
tcacttcccacctcctccatct

SEQ ID NO: 66875 - DNA, 22 bp, synthetic construct
  misc_feature 1..22: note = chemically synthesized
  source 1..22: mol_type = other DNA
cacttcccacctcctccatcta

SEQ ID NO: 66876 - DNA, 22 bp, synthetic construct
  misc_feature 1..22: note = chemically synthesized
  source 1..22: mol_type = other DNA
acttcccacctcctccatctac

SEQ ID NO: 66877 - DNA, 22 bp, synthetic construct
  misc_feature 1..22: note = chemically synthesized
  source 1..22: mol_type = other DNA
cccacctcctccatctacttta

SEQ ID NO: 66878 - DNA, 22 bp, synthetic construct
  misc_feature 1..22: note = chemically synthesized
  source 1..22: mol_type = other DNA
ccacctcctccatctactttaa

SEQ ID NO: 66879 - DNA, 22 bp, synthetic construct
  misc_feature 1..22: note = chemically synthesized
  source 1..22: mol_type = other DNA
ctccatctactttaaagcagca

SEQ ID NO: 66880 - DNA, 22 bp, synthetic construct
  misc_feature 1..22: note = chemically synthesized
  source 1..22: mol_type = other DNA
catctactttaaagcagcacaa

SEQ ID NO: 66881 - DNA, 22 bp, synthetic construct
  misc_feature 1..22: note = chemically synthesized
  source 1..22: mol_type = other DNA
ctttaaagcagcacaaacccct

SEQ ID NO: 66882 - DNA, 22 bp, synthetic construct
  misc_feature 1..22: note = chemically synthesized
  source 1..22: mol_type = other DNA
taaagcagcacaaacccctgct

SEQ ID NO: 66883 - DNA, 22 bp, synthetic construct
  misc_feature 1..22: note = chemically synthesized
  source 1..22: mol_type = other DNA
aaagcagcacaaacccctgctt

SEQ ID NO: 66884 - DNA, 22 bp, synthetic construct
  misc_feature 1..22: note = chemically synthesized
  source 1..22: mol_type = other DNA
aagcagcacaaacccctgcttt

SEQ ID NO: 66885 - DNA, 22 bp, synthetic construct
  misc_feature 1..22: note = chemically synthesized
  source 1..22: mol_type = other DNA
ctttcaaggagagatgagcgtc

SEQ ID NO: 66886 - DNA, 22 bp, synthetic construct
  misc_feature 1..22: note = chemically synthesized
  source 1..22: mol_type = other DNA
tcaaggagagatgagcgtctct

SEQ ID NO: 66887 - DNA, 22 bp, synthetic construct
  misc_feature 1..22: note = chemically synthesized
  source 1..22: mol_type = other DNA
caaggagagatgagcgtctcta

SEQ ID NO: 66888 - DNA, 22 bp, synthetic construct
  misc_feature 1..22: note = chemically synthesized
  source 1..22: mol_type = other DNA
aaggagagatgagcgtctctaa

SEQ ID NO: 66889 - DNA, 22 bp, synthetic construct
  misc_feature 1..22: note = chemically synthesized
  source 1..22: mol_type = other DNA
taaagcccctgacagcaagagc

SEQ ID NO: 66890 - DNA, 22 bp, synthetic construct
  misc_feature 1..22: note = chemically synthesized
  source 1..22: mol_type = other DNA
aagcccctgacagcaagagccc

SEQ ID NO: 66891 - DNA, 22 bp, synthetic construct
  misc_feature 1..22: note = chemically synthesized
  source 1..22: mol_type = other DNA
acagcaagagcccagaactggg

SEQ ID NO: 66892 - DNA, 22 bp, synthetic construct
  misc_feature 1..22: note = chemically synthesized
  source 1..22: mol_type = other DNA
ggacaccattagtgacccagac

SEQ ID NO: 66893 - DNA, 22 bp, synthetic construct
  misc_feature 1..22: note = chemically synthesized
  source 1..22: mol_type = other DNA
gtgacccagacggcaggtaagc

SEQ ID NO: 66894 - DNA, 22 bp, synthetic construct
  misc_feature 1..22: note = chemically synthesized
  source 1..22: mol_type = other DNA
actgcaggagcatcagcctatt

SEQ ID NO: 66895 - DNA, 22 bp, synthetic construct
  misc_feature 1..22: note = chemically synthesized
  source 1..22: mol_type = other DNA
caggagcatcagcctattcttg

SEQ ID NO: 66896 - DNA, 22 bp, synthetic construct
  misc_feature 1..22: note = chemically synthesized
  source 1..22: mol_type = other DNA
ttcttgtgtctgggaccacaga

SEQ ID NO: 66897 - DNA, 22 bp, synthetic construct
  misc_feature 1..22: note = chemically synthesized
  source 1..22: mol_type = other DNA
ttgtgtctgggaccacagagca

SEQ ID NO: 66898 - DNA, 22 bp, synthetic construct
  misc_feature 1..22: note = chemically synthesized
  source 1..22: mol_type = other DNA
gtgtctgggaccacagagcatt

SEQ ID NO: 66899 - DNA, 22 bp, synthetic construct
  misc_feature 1..22: note = chemically synthesized
  source 1..22: mol_type = other DNA
tgtctgggaccacagagcattg

SEQ ID NO: 66900 - DNA, 22 bp, synthetic construct
  misc_feature 1..22: note = chemically synthesized
  source 1..22: mol_type = other DNA
ggaccacagagcattgtgggga

SEQ ID NO: 66901 - DNA, 22 bp, synthetic construct
  misc_feature 1..22: note = chemically synthesized
  source 1..22: mol_type = other DNA
tggggacagccccgtctcttgg

SEQ ID NO: 66902 - DNA, 22 bp, synthetic construct
  misc_feature 1..22: note = chemically synthesized
  source 1..22: mol_type = other DNA
ttgggaaaaaaaccctaagggc

SEQ ID NO: 66903 - DNA, 22 bp, synthetic construct
  misc_feature 1..22: note = chemically synthesized
  source 1..22: mol_type = other DNA
gggaaaaaaaccctaagggctg

SEQ ID NO: 66904 - DNA, 22 bp, synthetic construct
  misc_feature 1..22: note = chemically synthesized
  source 1..22: mol_type = other DNA
ggaaaaaaaccctaagggctga

SEQ ID NO: 66905 - DNA, 22 bp, synthetic construct
  misc_feature 1..22: note = chemically synthesized
  source 1..22: mol_type = other DNA
agggctgaggatccttgtgagt

SEQ ID NO: 66906 - DNA, 22 bp, synthetic construct
  misc_feature 1..22: note = chemically synthesized
  source 1..22: mol_type = other DNA
aggatccttgtgagtgttgggt

SEQ ID NO: 66907 - DNA, 22 bp, synthetic construct
  misc_feature 1..22: note = chemically synthesized
  source 1..22: mol_type = other DNA
gtgagtgttgggtgggaacagc

SEQ ID NO: 66908 - DNA, 22 bp, synthetic construct
  misc_feature 1..22: note = chemically synthesized
  source 1..22: mol_type = other DNA
tgagtgttgggtgggaacagct

SEQ ID NO: 66909 - DNA, 22 bp, synthetic construct
  misc_feature 1..22: note = chemically synthesized
  source 1..22: mol_type = other DNA
ggtgggaacagctcccaggagg

SEQ ID NO: 66910 - DNA, 22 bp, synthetic construct
  misc_feature 1..22: note = chemically synthesized
  source 1..22: mol_type = other DNA
ccaggaggtttaatcacagccc

SEQ ID NO: 66911 - DNA, 22 bp, synthetic construct
  misc_feature 1..22: note = chemically synthesized
  source 1..22: mol_type = other DNA
aatcacagcccctccatgctct

SEQ ID NO: 66912 - DNA, 22 bp, synthetic construct
  misc_feature 1..22: note = chemically synthesized
  source 1..22: mol_type = other DNA
atcacagcccctccatgctctc

SEQ ID NO: 66913 - DNA, 22 bp, synthetic construct
  misc_feature 1..22: note = chemically synthesized
  source 1..22: mol_type = other DNA
catgctctctagctgttgccat

SEQ ID NO: 66914 - DNA, 22 bp, synthetic construct
  misc_feature 1..22: note = chemically synthesized
  source 1..22: mol_type = other DNA
tctagctgttgccattgtgcaa

SEQ ID NO: 66915 - DNA, 22 bp, synthetic construct
  misc_feature 1..22: note = chemically synthesized
  source 1..22: mol_type = other DNA
tagctgttgccattgtgcaaga

SEQ ID NO: 66916 - DNA, 22 bp, synthetic construct
  misc_feature 1..22: note = chemically synthesized
  source 1..22: mol_type = other DNA
gctgttgccattgtgcaagatg

SEQ ID NO: 66917 - DNA, 22 bp, synthetic construct
  misc_feature 1..22: note = chemically synthesized
  source 1..22: mol_type = other DNA
ttgccattgtgcaagatgcatt

SEQ ID NO: 66918 - DNA, 22 bp, synthetic construct
  misc_feature 1..22: note = chemically synthesized
  source 1..22: mol_type = other DNA
ccattgtgcaagatgcatttcc

SEQ ID NO: 66919 - DNA, 22 bp, synthetic construct
  misc_feature 1..22: note = chemically synthesized
  source 1..22: mol_type = other DNA
tgcaagatgcatttcccttctg

SEQ ID NO: 66920 - DNA, 22 bp, synthetic construct
  misc_feature 1..22: note = chemically synthesized
  source 1..22: mol_type = other DNA
cccttctgtgcagcagtttccc

SEQ ID NO: 66921 - DNA, 22 bp, synthetic construct
  misc_feature 1..22: note = chemically synthesized
  source 1..22: mol_type = other DNA
ccttctgtgcagcagtttccct

SEQ ID NO: 66922 - DNA, 22 bp, synthetic construct
  misc_feature 1..22: note = chemically synthesized
  source 1..22: mol_type = other DNA
ctgtgcagcagtttccctggcc

SEQ ID NO: 66923 - DNA, 22 bp, synthetic construct
  misc_feature 1..22: note = chemically synthesized
  source 1..22: mol_type = other DNA
tgtgcagcagtttccctggcca

SEQ ID NO: 66924 - DNA, 22 bp, synthetic construct
  misc_feature 1..22: note = chemically synthesized
  source 1..22: mol_type = other DNA
tgcagcagtttccctggccact

SEQ ID NO: 66925 - DNA, 22 bp, synthetic construct
  misc_feature 1..22: note = chemically synthesized
  source 1..22: mol_type = other DNA
ccctggccactaaatagtggga

SEQ ID NO: 66926 - DNA, 22 bp, synthetic construct
  misc_feature 1..22: note = chemically synthesized
  source 1..22: mol_type = other DNA
cctggccactaaatagtgggat

SEQ ID NO: 66927 - DNA, 22 bp, synthetic construct
  misc_feature 1..22: note = chemically synthesized
  source 1..22: mol_type = other DNA
gccactaaatagtgggattaga

SEQ ID NO: 66928 - DNA, 22 bp, synthetic construct
  misc_feature 1..22: note = chemically synthesized
  source 1..22: mol_type = other DNA
aatagtgggattagatagaagc

SEQ ID NO: 66929 - DNA, 22 bp, synthetic construct
  misc_feature 1..22: note = chemically synthesized
  source 1..22: mol_type = other DNA
gatagaagccctccaagggctt

SEQ ID NO: 66930 - DNA, 22 bp, synthetic construct
  misc_feature 1..22: note = chemically synthesized
  source 1..22: mol_type = other DNA
caagggcttccagcttgacatg

SEQ ID NO: 66931 - DNA, 22 bp, synthetic construct
  misc_feature 1..22: note = chemically synthesized
  source 1..22: mol_type = other DNA
ccagcttgacatgattcttgat

SEQ ID NO: 66932 - DNA, 22 bp, synthetic construct
  misc_feature 1..22: note = chemically synthesized
  source 1..22: mol_type = other DNA
cagcttgacatgattcttgatt

SEQ ID NO: 66933 - DNA, 22 bp, synthetic construct
  misc_feature 1..22: note = chemically synthesized
  source 1..22: mol_type = other DNA
gacatgattcttgattctgatc

SEQ ID NO: 66934 - DNA, 22 bp, synthetic construct
  misc_feature 1..22: note = chemically synthesized
  source 1..22: mol_type = other DNA
acatgattcttgattctgatct

SEQ ID NO: 66935 - DNA, 22 bp, synthetic construct
  misc_feature 1..22: note = chemically synthesized
  source 1..22: mol_type = other DNA
ttgattctgatctggcccgatt

SEQ ID NO: 66936 - DNA, 22 bp, synthetic construct
  misc_feature 1..22: note = chemically synthesized
  source 1..22: mol_type = other DNA
gattctgatctggcccgattcc

SEQ ID NO: 66937 - DNA, 22 bp, synthetic construct
  misc_feature 1..22: note = chemically synthesized
  source 1..22: mol_type = other DNA
attctgatctggcccgattcct

SEQ ID NO: 66938 - DNA, 22 bp, synthetic construct
  misc_feature 1..22: note = chemically synthesized
  source 1..22: mol_type = other DNA
tgatctggcccgattcctggat

SEQ ID NO: 66939 - DNA, 22 bp, synthetic construct
  misc_feature 1..22: note = chemically synthesized
  source 1..22: mol_type = other DNA
atctggcccgattcctggataa

SEQ ID NO: 66940 - DNA, 22 bp, synthetic construct
  misc_feature 1..22: note = chemically synthesized
  source 1..22: mol_type = other DNA
gcccgattcctggataatcgtg

SEQ ID NO: 66941 - DNA, 22 bp, synthetic construct
  misc_feature 1..22: note = chemically synthesized
  source 1..22: mol_type = other DNA
ctggataatcgtgggcaggccc

SEQ ID NO: 66942 - DNA, 22 bp, synthetic construct
  misc_feature 1..22: note = chemically synthesized
  source 1..22: mol_type = other DNA
gataatcgtgggcaggcccatt

SEQ ID NO: 66943 - DNA, 22 bp, synthetic construct
  misc_feature 1..22: note = chemically synthesized
  source 1..22: mol_type = other DNA
ctcttcttgtgcctcattttct

SEQ ID NO: 66944 - DNA, 22 bp, synthetic construct
  misc_feature 1..22: note = chemically synthesized
  source 1..22: mol_type = other DNA
ttcttgtgcctcattttcttct

SEQ ID NO: 66945 - DNA, 22 bp, synthetic construct
  misc_feature 1..22: note = chemically synthesized
  source 1..22: mol_type = other DNA
cttgtgcctcattttcttcttt

SEQ ID NO: 66946 - DNA, 22 bp, synthetic construct
  misc_feature 1..22: note = chemically synthesized
  source 1..22: mol_type = other DNA
ttgtgcctcattttcttctttt

SEQ ID NO: 66947 - DNA, 22 bp, synthetic construct
  misc_feature 1..22: note = chemically synthesized
  source 1..22: mol_type = other DNA
gtgcctcattttcttcttttgt

SEQ ID NO: 66948 - DNA, 22 bp, synthetic construct
  misc_feature 1..22: note = chemically synthesized
  source 1..22: mol_type = other DNA
tgcctcattttcttcttttgta

SEQ ID NO: 66949 - DNA, 22 bp, synthetic construct
  misc_feature 1..22: note = chemically synthesized
  source 1..22: mol_type = other DNA
attttcttcttttgtaaaacaa

SEQ ID NO: 66950 - DNA, 22 bp, synthetic construct
  misc_feature 1..22: note = chemically synthesized
  source 1..22: mol_type = other DNA
tcttcttttgtaaaacaatggc

SEQ ID NO: 66951 - DNA, 22 bp, synthetic construct
  misc_feature 1..22: note = chemically synthesized
  source 1..22: mol_type = other DNA
cttcttttgtaaaacaatggct

SEQ ID NO: 66952 - DNA, 22 bp, synthetic construct
  misc_feature 1..22: note = chemically synthesized
  source 1..22: mol_type = other DNA
ttcttttgtaaaacaatggctg

SEQ ID NO: 66953 - DNA, 22 bp, synthetic construct
  misc_feature 1..22: note = chemically synthesized
  source 1..22: mol_type = other DNA
cttttgtaaaacaatggctgta

SEQ ID NO: 66954 - DNA, 22 bp, synthetic construct
  misc_feature 1..22: note = chemically synthesized
  source 1..22: mol_type = other DNA
ttttgtaaaacaatggctgtac

SEQ ID NO: 66955 - DNA, 22 bp, synthetic construct
  misc_feature 1..22: note = chemically synthesized
  source 1..22: mol_type = other DNA
ttgtaaaacaatggctgtacca

SEQ ID NO: 66956 - DNA, 22 bp, synthetic construct
  misc_feature 1..22: note = chemically synthesized
  source 1..22: mol_type = other DNA
tgtaaaacaatggctgtaccat

SEQ ID NO: 66957 - DNA, 22 bp, synthetic construct
  misc_feature 1..22: note = chemically synthesized
  source 1..22: mol_type = other DNA
gtaaaacaatggctgtaccatt

SEQ ID NO: 66958 - DNA, 22 bp, synthetic construct
  misc_feature 1..22: note = chemically synthesized
  source 1..22: mol_type = other DNA
taaaacaatggctgtaccattt

SEQ ID NO: 66959 - DNA, 22 bp, synthetic construct
  misc_feature 1..22: note = chemically synthesized
  source 1..22: mol_type = other DNA
taccatttgcatcttagggtca

SEQ ID NO: 66960 - DNA, 22 bp, synthetic construct
  misc_feature 1..22: note = chemically synthesized
  source 1..22: mol_type = other DNA
gcatcttagggtcattgcagat

SEQ ID NO: 66961 - DNA, 22 bp, synthetic construct
  misc_feature 1..22: note = chemically synthesized
  source 1..22: mol_type = other DNA
catcttagggtcattgcagatg

SEQ ID NO: 66962 - DNA, 22 bp, synthetic construct
  misc_feature 1..22: note = chemically synthesized
  source 1..22: mol_type = other DNA
agggtcattgcagatgtaagtg

SEQ ID NO: 66963 - DNA, 22 bp, synthetic construct
  misc_feature 1..22: note = chemically synthesized
  source 1..22: mol_type = other DNA
gggtcattgcagatgtaagtgt

SEQ ID NO: 66964 - DNA, 22 bp, synthetic construct
  misc_feature 1..22: note = chemically synthesized
  source 1..22: mol_type = other DNA
cagatgtaagtgttgctgtcca

SEQ ID NO: 66965 - DNA, 22 bp, synthetic construct
  misc_feature 1..22: note = chemically synthesized
  source 1..22: mol_type = other DNA
ctgtccagagcctgggtgcagg

SEQ ID NO: 66966 - DNA, 22 bp, synthetic construct
  misc_feature 1..22: note = chemically synthesized
  source 1..22: mol_type = other DNA
tccagagcctgggtgcaggacc

SEQ ID NO: 66967 - DNA, 22 bp, synthetic construct
  misc_feature 1..22: note = chemically synthesized
  source 1..22: mol_type = other DNA
ggtgcaggacctagatgtagga

SEQ ID NO: 66968 - DNA, 22 bp, synthetic construct
  misc_feature 1..22: note = chemically synthesized
  source 1..22: mol_type = other DNA
gatgtaggattctggttctgct

SEQ ID NO: 66969 - DNA, 22 bp, synthetic construct
  misc_feature 1..22: note = chemically synthesized
  source 1..22: mol_type = other DNA
tggttctgctacttcctcagtg

SEQ ID NO: 66970 - DNA, 22 bp, synthetic construct
  misc_feature 1..22: note = chemically synthesized
  source 1..22: mol_type = other DNA
gttctgctacttcctcagtgac

SEQ ID NO: 66971 - DNA, 22 bp, synthetic construct
  misc_feature 1..22: note = chemically synthesized
  source 1..22: mol_type = other DNA
tgctacttcctcagtgacattg

SEQ ID NO: 66972 - DNA, 22 bp, synthetic construct
  misc_feature 1..22: note = chemically synthesized
  source 1..22: mol_type = other DNA
ctacttcctcagtgacattgaa

SEQ ID NO: 66973 - DNA, 22 bp, synthetic construct
  misc_feature 1..22: note = chemically synthesized
  source 1..22: mol_type = other DNA
cttcctcagtgacattgaatag

SEQ ID NO: 66974 - DNA, 22 bp, synthetic construct
  misc_feature 1..22: note = chemically synthesized
  source 1..22: mol_type = other DNA
cctcagtgacattgaatagctg

SEQ ID NO: 66975 - DNA, 22 bp, synthetic construct
  misc_feature 1..22: note = chemically synthesized
  source 1..22: mol_type = other DNA
ctcagtgacattgaatagctga

SEQ ID NO: 66976 - DNA, 22 bp, synthetic construct
  misc_feature 1..22: note = chemically synthesized
  source 1..22: mol_type = other DNA
agtgacattgaatagctgacct

SEQ ID NO: 66977 - DNA, 22 bp, synthetic construct
  misc_feature 1..22: note = chemically synthesized
  source 1..22: mol_type = other DNA
aatagctgacctaatctctctg

SEQ ID NO: 66978 - DNA, 22 bp, synthetic construct
  misc_feature 1..22: note = chemically synthesized
  source 1..22: mol_type = other DNA
acctaatctctctggctttggt

SEQ ID NO: 66979 - DNA, 22 bp, synthetic construct
  misc_feature 1..22: note = chemically synthesized
  source 1..22: mol_type = other DNA
atctctctggctttggtttctt

SEQ ID NO: 66980 - DNA, 22 bp, synthetic construct
  misc_feature 1..22: note = chemically synthesized
  source 1..22: mol_type = other DNA
tctggctttggtttcttcatct

SEQ ID NO: 66981 - DNA, 22 bp, synthetic construct
  misc_feature 1..22: note = chemically synthesized
  source 1..22: mol_type = other DNA
tggctttggtttcttcatctgt

SEQ ID NO: 66982 - DNA, 22 bp, synthetic construct
  misc_feature 1..22: note = chemically synthesized
  source 1..22: mol_type = other DNA
gctttggtttcttcatctgtaa

SEQ ID NO: 66983 - DNA, 22 bp, synthetic construct
  misc_feature 1..22: note = chemically synthesized
  source 1..22: mol_type = other DNA
tggtttcttcatctgtaaaaga

SEQ ID NO: 66984 - DNA, 22 bp, synthetic construct
  misc_feature 1..22: note = chemically synthesized
  source 1..22: mol_type = other DNA
ggtttcttcatctgtaaaagaa

SEQ ID NO: 66985 - DNA, 22 bp, synthetic construct
  misc_feature 1..22: note = chemically synthesized
  source 1..22: mol_type = other DNA
gtttcttcatctgtaaaagaag

SEQ ID NO: 66986 - DNA, 22 bp, synthetic construct
  misc_feature 1..22: note = chemically synthesized
  source 1..22: mol_type = other DNA
cttcatctgtaaaagaaggata

SEQ ID NO: 66987 - DNA, 22 bp, synthetic construct
  misc_feature 1..22: note = chemically synthesized
  source 1..22: mol_type = other DNA
ttcatctgtaaaagaaggatat

SEQ ID NO: 66988 - DNA, 22 bp, synthetic construct
  misc_feature 1..22: note = chemically synthesized
  source 1..22: mol_type = other DNA
catctgtaaaagaaggatatta

SEQ ID NO: 66989 - DNA, 22 bp, synthetic construct
  misc_feature 1..22: note = chemically synthesized
  source 1..22: mol_type = other DNA
atctgtaaaagaaggatattag

SEQ ID NO: 66990 - DNA, 22 bp, synthetic construct
  misc_feature 1..22: note = chemically synthesized
  source 1..22: mol_type = other DNA
taaaagaaggatattagcatta

SEQ ID NO: 66991 - DNA, 22 bp, synthetic construct
  misc_feature 1..22: note = chemically synthesized
  source 1..22: mol_type = other DNA
gcattagcacctcacgggattg

SEQ ID NO: 66992 - DNA, 22 bp, synthetic construct
  misc_feature 1..22: note = chemically synthesized
  source 1..22: mol_type = other DNA
gcacctcacgggattgttacaa

SEQ ID NO: 66993 - DNA, 22 bp, synthetic construct
  misc_feature 1..22: note = chemically synthesized
  source 1..22: mol_type = other DNA
acgggattgttacaagaaagca

SEQ ID NO: 66994 - DNA, 22 bp, synthetic construct
  misc_feature 1..22: note = chemically synthesized
  source 1..22: mol_type = other DNA
ttacaagaaagcaatgaattaa

SEQ ID NO: 66995 - DNA, 22 bp, synthetic construct
  misc_feature 1..22: note = chemically synthesized
  source 1..22: mol_type = other DNA
caagaaagcaatgaattaacac

SEQ ID NO: 66996 - DNA, 22 bp, synthetic construct
  misc_feature 1..22: note = chemically synthesized
  source 1..22: mol_type = other DNA
acacatgtgagcacggagaaca

SEQ ID NO: 66997 - DNA, 22 bp, synthetic construct
  misc_feature 1..22: note = chemically synthesized
  source 1..22: mol_type = other DNA
ggcatatggtaagcactacgta

SEQ ID NO: 66998 - DNA, 22 bp, synthetic construct
  misc_feature 1..22: note = chemically synthesized
  source 1..22: mol_type = other DNA
gcatatggtaagcactacgtac

SEQ ID NO: 66999 - DNA, 22 bp, synthetic construct
  misc_feature 1..22: note = chemically synthesized
  source 1..22: mol_type = other DNA
cgtacattttgctattcttctg

SEQ ID NO: 67000 - DNA, 22 bp, synthetic construct
  misc_feature 1..22: note = chemically synthesized
  source 1..22: mol_type = other DNA
tgctattcttctgattctttca

SEQ ID NO: 67001 - DNA, 22 bp, synthetic construct
  misc_feature 1..22: note = chemically synthesized
  source 1..22: mol_type = other DNA
gctattcttctgattctttcag

SEQ ID NO: 67002 - DNA, 22 bp, synthetic construct
  misc_feature 1..22: note = chemically synthesized
  source 1..22: mol_type = other DNA
ctattcttctgattctttcagt

SEQ ID NO: 67003 - DNA, 22 bp, synthetic construct
  misc_feature 1..22: note = chemically synthesized
  source 1..22: mol_type = other DNA
ttcttctgattctttcagtgtt

SEQ ID NO: 67004 - DNA, 22 bp, synthetic construct
  misc_feature 1..22: note = chemically synthesized
  source 1..22: mol_type = other DNA
ttctgattctttcagtgttact

SEQ ID NO: 67005 - DNA, 22 bp, synthetic construct
  misc_feature 1..22: note = chemically synthesized
  source 1..22: mol_type = other DNA
ctgattctttcagtgttactga

SEQ ID NO: 67006 - DNA, 22 bp, synthetic construct
  misc_feature 1..22: note = chemically synthesized
  source 1..22: mol_type = other DNA
tgattctttcagtgttactgat

SEQ ID NO: 67007 - DNA, 22 bp, synthetic construct
  misc_feature 1..22: note = chemically synthesized
  source 1..22: mol_type = other DNA
attctttcagtgttactgatgt

SEQ ID NO: 67008 - DNA, 22 bp, synthetic construct
  misc_feature 1..22: note = chemically synthesized
  source 1..22: mol_type = other DNA
tttcagtgttactgatgtcggc

SEQ ID NO: 67009 - DNA, 22 bp, synthetic construct
  misc_feature 1..22: note = chemically synthesized
  source 1..22: mol_type = other DNA
tcagtgttactgatgtcggcaa

SEQ ID NO: 67010 - DNA, 22 bp, synthetic construct
  misc_feature 1..22: note = chemically synthesized
  source 1..22: mol_type = other DNA
cagtgttactgatgtcggcaag

SEQ ID NO: 67011 - DNA, 22 bp, synthetic construct
  misc_feature 1..22: note = chemically synthesized
  source 1..22: mol_type = other DNA
agtgttactgatgtcggcaagt

SEQ ID NO: 67012 - DNA, 22 bp, synthetic construct
  misc_feature 1..22: note = chemically synthesized
  source 1..22: mol_type = other DNA
ctgatgtcggcaagtacttggc

SEQ ID NO: 67013 - DNA, 22 bp, synthetic construct
  misc_feature 1..22: note = chemically synthesized
  source 1..22: mol_type = other DNA
atgtcggcaagtacttggcaca

SEQ ID NO: 67014 - DNA, 22 bp, synthetic construct
  misc_feature 1..22: note = chemically synthesized
  source 1..22: mol_type = other DNA
ggcacaggctggtttaataatc

SEQ ID NO: 67015 - DNA, 22 bp, synthetic construct
  misc_feature 1..22: note = chemically synthesized
  source 1..22: mol_type = other DNA
gcacaggctggtttaataatcc

SEQ ID NO: 67016 - DNA, 22 bp, synthetic construct
  misc_feature 1..22: note = chemically synthesized
  source 1..22: mol_type = other DNA
gtttaataatccctaggcactt

SEQ ID NO: 67017 - DNA, 22 bp, synthetic construct
  misc_feature 1..22: note = chemically synthesized
  source 1..22: mol_type = other DNA
aataatccctaggcacttccac

SEQ ID NO: 67018 - DNA, 22 bp, synthetic construct
  misc_feature 1..22: note = chemically synthesized
  source 1..22: mol_type = other DNA
ataatccctaggcacttccacg

SEQ ID NO: 67019 - DNA, 22 bp, synthetic construct
  misc_feature 1..22: note = chemically synthesized
  source 1..22: mol_type = other DNA
ggcacttccacgtggtgtcaat

SEQ ID NO: 67020 - DNA, 22 bp, synthetic construct
  misc_feature 1..22: note = chemically synthesized
  source 1..22: mol_type = other DNA
ccacgtggtgtcaatccctgat

SEQ ID NO: 67021 - DNA, 22 bp, synthetic construct
  misc_feature 1..22: note = chemically synthesized
  source 1..22: mol_type = other DNA
cacgtggtgtcaatccctgatc

SEQ ID NO: 67022 - DNA, 22 bp, synthetic construct
  misc_feature 1..22: note = chemically synthesized
  source 1..22: mol_type = other DNA
atcactgggagtcatcatgtgc

SEQ ID NO: 67023 - DNA, 22 bp, synthetic construct
  misc_feature 1..22: note = chemically synthesized
  source 1..22: mol_type = other DNA
ggagtcatcatgtgccttgact

SEQ ID NO: 67024 - DNA, 22 bp, synthetic construct
  misc_feature 1..22: note = chemically synthesized
  source 1..22: mol_type = other DNA
gactcggggcctggccccccca

SEQ ID NO: 67025 - DNA, 22 bp, synthetic construct
  misc_feature 1..22: note = chemically synthesized
  source 1..22: mol_type = other DNA
actcggggcctggcccccccat

SEQ ID NO: 67026 - DNA, 22 bp, synthetic construct
  misc_feature 1..22: note = chemically synthesized
  source 1..22: mol_type = other DNA
ggggcctggcccccccatctct

SEQ ID NO: 67027 - DNA, 22 bp, synthetic construct
  misc_feature 1..22: note = chemically synthesized
  source 1..22: mol_type = other DNA
gcccccccatctctgtcttgca

SEQ ID NO: 67028 - DNA, 22 bp, synthetic construct
  misc_feature 1..22: note = chemically synthesized
  source 1..22: mol_type = other DNA
tgtcttgcaggacaatgccgtc

SEQ ID NO: 67029 - DNA, 22 bp, synthetic construct
  misc_feature 1..22: note = chemically synthesized
  source 1..22: mol_type = other DNA
tcttgcaggacaatgccgtctt

SEQ ID NO: 67030 - DNA, 22 bp, synthetic construct
  misc_feature 1..22: note = chemically synthesized
  source 1..22: mol_type = other DNA
gcaggacaatgccgtcttctgt

SEQ ID NO: 67031 - DNA, 22 bp, synthetic construct
  misc_feature 1..22: note = chemically synthesized
  source 1..22: mol_type = other DNA
caggacaatgccgtcttctgtc

SEQ ID NO: 67032 - DNA, 22 bp, synthetic construct
  misc_feature 1..22: note = chemically synthesized
  source 1..22: mol_type = other DNA
ctgtctcgtggggcatcctcct

SEQ ID NO: 67033 - DNA, 22 bp, synthetic construct
  misc_feature 1..22: note = chemically synthesized
  source 1..22: mol_type = other DNA
tgtctcgtggggcatcctcctg

SEQ ID NO: 67034 - DNA, 22 bp, synthetic construct
  misc_feature 1..22: note = chemically synthesized
  source 1..22: mol_type = other DNA
tctcgtggggcatcctcctgct

SEQ ID NO: 67035 - DNA, 22 bp, synthetic construct
  misc_feature 1..22: note = chemically synthesized
  source 1..22: mol_type = other DNA
gtggggcatcctcctgctggca

SEQ ID NO: 67036 - DNA, 22 bp, synthetic construct
  misc_feature 1..22: note = chemically synthesized
  source 1..22: mol_type = other DNA
ctgctggcaggcctgtgctgcc

SEQ ID NO: 67037 - DNA, 22 bp, synthetic construct
  misc_feature 1..22: note = chemically synthesized
  source 1..22: mol_type = other DNA
ctggcaggcctgtgctgcctgg

SEQ ID NO: 67038 - DNA, 22 bp, synthetic construct
  misc_feature 1..22: note = chemically synthesized
  source 1..22: mol_type = other DNA
gcaggcctgtgctgcctggtcc

SEQ ID NO: 67039 - DNA, 22 bp, synthetic construct
  misc_feature 1..22: note = chemically synthesized
  source 1..22: mol_type = other DNA
tgctgcctggtccctgtctccc

SEQ ID NO: 67040 - DNA, 22 bp, synthetic construct
  misc_feature 1..22: note = chemically synthesized
  source 1..22: mol_type = other DNA
cctggtccctgtctccctggct

SEQ ID NO: 67041 - DNA, 22 bp, synthetic construct
  misc_feature 1..22: note = chemically synthesized
  source 1..22: mol_type = other DNA
gtccctgtctccctggctgagg

SEQ ID NO: 67042 - DNA, 22 bp, synthetic construct
  misc_feature 1..22: note = chemically synthesized
  source 1..22: mol_type = other DNA
tctccctggctgaggatcccca

SEQ ID NO: 67043 - DNA, 22 bp, synthetic construct
  misc_feature 1..22: note = chemically synthesized
  source 1..22: mol_type = other DNA
cctggctgaggatccccaggga

SEQ ID NO: 67044 - DNA, 22 bp, synthetic construct
  misc_feature 1..22: note = chemically synthesized
  source 1..22: mol_type = other DNA
gctgaggatccccagggagatg

SEQ ID NO: 67045 - DNA, 22 bp, synthetic construct
  misc_feature 1..22: note = chemically synthesized
  source 1..22: mol_type = other DNA
aggatccccagggagatgctgc

SEQ ID NO: 67046 - DNA, 22 bp, synthetic construct
  misc_feature 1..22: note = chemically synthesized
  source 1..22: mol_type = other DNA
cccagaagacagatacatccca

SEQ ID NO: 67047 - DNA, 22 bp, synthetic construct
  misc_feature 1..22: note = chemically synthesized
  source 1..22: mol_type = other DNA
caacaagatcacccccaacctg

SEQ ID NO: 67048 - DNA, 22 bp, synthetic construct
  misc_feature 1..22: note = chemically synthesized
  source 1..22: mol_type = other DNA
aacaagatcacccccaacctgg

SEQ ID NO: 67049 - DNA, 22 bp, synthetic construct
  misc_feature 1..22: note = chemically synthesized
  source 1..22: mol_type = other DNA
gctgagttcgccttcagcctat

SEQ ID NO: 67050 - DNA, 22 bp, synthetic construct
  misc_feature 1..22: note = chemically synthesized
  source 1..22: mol_type = other DNA
agttcgccttcagcctataccg

SEQ ID NO: 67051 - DNA, 22 bp, synthetic construct
  misc_feature 1..22: note = chemically synthesized
  source 1..22: mol_type = other DNA
gccttcagcctataccgccagc

SEQ ID NO: 67052 - DNA, 22 bp, synthetic construct
  misc_feature 1..22: note = chemically synthesized
  source 1..22: mol_type = other DNA
cagcctataccgccagctggca

SEQ ID NO: 67053 - DNA, 22 bp, synthetic construct
  misc_feature 1..22: note = chemically synthesized
  source 1..22: mol_type = other DNA
agcctataccgccagctggcac

SEQ ID NO: 67054 - DNA, 22 bp, synthetic construct
  misc_feature 1..22: note = chemically synthesized
  source 1..22: mol_type = other DNA
taccgccagctggcacaccagt

SEQ ID NO: 67055 - DNA, 22 bp, synthetic construct
  misc_feature 1..22: note = chemically synthesized
  source 1..22: mol_type = other DNA
gcacaccagtccaacagcacca

SEQ ID NO: 67056 - DNA, 22 bp, synthetic construct
  misc_feature 1..22: note = chemically synthesized
  source 1..22: mol_type = other DNA
cttctccccagtgagcatcgct

SEQ ID NO: 67057 - DNA, 22 bp, synthetic construct
  misc_feature 1..22: note = chemically synthesized
  source 1..22: mol_type = other DNA
ttctccccagtgagcatcgcta

SEQ ID NO: 67058 - DNA, 22 bp, synthetic construct
  misc_feature 1..22: note = chemically synthesized
  source 1..22: mol_type = other DNA
ctccccagtgagcatcgctaca

SEQ ID NO: 67059 - DNA, 22 bp, synthetic construct
  misc_feature 1..22: note = chemically synthesized
  source 1..22: mol_type = other DNA
tccccagtgagcatcgctacag

SEQ ID NO: 67060 - DNA, 22 bp, synthetic construct
  misc_feature 1..22: note = chemically synthesized
  source 1..22: mol_type = other DNA
cccagtgagcatcgctacagcc

SEQ ID NO: 67061 - DNA, 22 bp, synthetic construct
  misc_feature 1..22: note = chemically synthesized
  source 1..22: mol_type = other DNA
cagcctttgcaatgctctccct

SEQ ID NO: 67062 - DNA, 22 bp, synthetic construct
  misc_feature 1..22: note = chemically synthesized
  source 1..22: mol_type = other DNA
tgcaatgctctccctggggacc

SEQ ID NO: 67063 - DNA, 22 bp, synthetic construct
  misc_feature 1..22: note = chemically synthesized
  source 1..22: mol_type = other DNA
gcaatgctctccctggggacca

SEQ ID NO: 67064 - DNA, 22 bp, synthetic construct
  misc_feature 1..22: note = chemically synthesized
  source 1..22: mol_type = other DNA
caatgctctccctggggaccaa

SEQ ID NO: 67065 - DNA, 22 bp, synthetic construct
  misc_feature 1..22: note = chemically synthesized
  source 1..22: mol_type = other DNA
tccctggggaccaaggctgaca

SEQ ID NO: 67066 - DNA, 22 bp, synthetic construct
  misc_feature 1..22: note = chemically synthesized
  source 1..22: mol_type = other DNA
cctggggaccaaggctgacact

SEQ ID NO: 67067 - DNA, 22 bp, synthetic construct
  misc_feature 1..22: note = chemically synthesized
  source 1..22: mol_type = other DNA
gggaccaaggctgacactcacg

SEQ ID NO: 67068 - DNA, 22 bp, synthetic construct
  misc_feature 1..22: note = chemically synthesized
  source 1..22: mol_type = other DNA
acactcacgatgaaatcctgga

SEQ ID NO: 67069 - DNA, 22 bp, synthetic construct
  misc_feature 1..22: note = chemically synthesized
  source 1..22: mol_type = other DNA
acgatgaaatcctggagggcct

SEQ ID NO: 67070 - DNA, 22 bp, synthetic construct
  misc_feature 1..22: note = chemically synthesized
  source 1..22: mol_type = other DNA
gagggcctgaatttcaacctca

SEQ ID NO: 67071 - DNA, 22 bp, synthetic construct
  misc_feature 1..22: note = chemically synthesized
  source 1..22: mol_type = other DNA
aatttcaacctcacggagattc

SEQ ID NO: 67072 - DNA, 22 bp, synthetic construct
  misc_feature 1..22: note = chemically synthesized
  source 1..22: mol_type = other DNA
caacctcacggagattccggag

SEQ ID NO: 67073 - DNA, 22 bp, synthetic construct
  misc_feature 1..22: note = chemically synthesized
  source 1..22: mol_type = other DNA
aacctcacggagattccggagg

SEQ ID NO: 67074 - DNA, 22 bp, synthetic construct
  misc_feature 1..22: note = chemically synthesized
  source 1..22: mol_type = other DNA
acggagattccggaggctcaga

SEQ ID NO: 67075 - DNA, 22 bp, synthetic construct
  misc_feature 1..22: note = chemically synthesized
  source 1..22: mol_type = other DNA
cggaggctcagatccatgaagg

SEQ ID NO: 67076 - DNA, 22 bp, synthetic construct
  misc_feature 1..22: note = chemically synthesized
  source 1..22: mol_type = other DNA
agatccatgaaggcttccagga

SEQ ID NO: 67077 - DNA, 22 bp, synthetic construct
  misc_feature 1..22: note = chemically synthesized
  source 1..22: mol_type = other DNA
ccaggaactcctccgtaccctc

SEQ ID NO: 67078 - DNA, 22 bp, synthetic construct
  misc_feature 1..22: note = chemically synthesized
  source 1..22: mol_type = other DNA
caggaactcctccgtaccctca

SEQ ID NO: 67079 - DNA, 22 bp, synthetic construct
  misc_feature 1..22: note = chemically synthesized
  source 1..22: mol_type = other DNA
ctccgtaccctcaaccagccag

SEQ ID NO: 67080 - DNA, 22 bp, synthetic construct
  misc_feature 1..22: note = chemically synthesized
  source 1..22: mol_type = other DNA
cgtaccctcaaccagccagaca

SEQ ID NO: 67081 - DNA, 22 bp, synthetic construct
  misc_feature 1..22: note = chemically synthesized
  source 1..22: mol_type = other DNA
aaccagccagacagccagctcc

SEQ ID NO: 67082 - DNA, 22 bp, synthetic construct
  misc_feature 1..22: note = chemically synthesized
  source 1..22: mol_type = other DNA
cagctgaccaccggcaatggcc

SEQ ID NO: 67083 - DNA, 22 bp, synthetic construct
  misc_feature 1..22: note = chemically synthesized
  source 1..22: mol_type = other DNA
accaccggcaatggcctgttcc

SEQ ID NO: 67084 - DNA, 22 bp, synthetic construct
  misc_feature 1..22: note = chemically synthesized
  source 1..22: mol_type = other DNA
ttcctcagcgagggcctgaagc

SEQ ID NO: 67085 - DNA, 22 bp, synthetic construct
  misc_feature 1..22: note = chemically synthesized
  source 1..22: mol_type = other DNA
ctcagcgagggcctgaagctag

SEQ ID NO: 67086 - DNA, 22 bp, synthetic construct
  misc_feature 1..22: note = chemically synthesized
  source 1..22: mol_type = other DNA
agcgagggcctgaagctagtgg

SEQ ID NO: 67087 - DNA, 22 bp, synthetic construct
  misc_feature 1..22: note = chemically synthesized
  source 1..22: mol_type = other DNA
aagctagtggataagtttttgg

SEQ ID NO: 67088 - DNA, 22 bp, synthetic construct
  misc_feature 1..22: note = chemically synthesized
  source 1..22: mol_type = other DNA
gtggataagtttttggaggatg

SEQ ID NO: 67089 - DNA, 22 bp, synthetic construct
  misc_feature 1..22: note = chemically synthesized
  source 1..22: mol_type = other DNA
ttggaggatgttaaaaagttgt

SEQ ID NO: 67090 - DNA, 22 bp, synthetic construct
  misc_feature 1..22: note = chemically synthesized
  source 1..22: mol_type = other DNA
tggaggatgttaaaaagttgta

SEQ ID NO: 67091 - DNA, 22 bp, synthetic construct
  misc_feature 1..22: note = chemically synthesized
  source 1..22: mol_type = other DNA
ggaggatgttaaaaagttgtac

SEQ ID NO: 67092 - DNA, 22 bp, synthetic construct
  misc_feature 1..22: note = chemically synthesized
  source 1..22: mol_type = other DNA
gaggatgttaaaaagttgtacc

SEQ ID NO: 67093 - DNA, 22 bp, synthetic construct
  misc_feature 1..22: note = chemically synthesized
  source 1..22: mol_type = other DNA
aaaagttgtaccactcagaagc

SEQ ID NO: 67094 - DNA, 22 bp, synthetic construct
  misc_feature 1..22: note = chemically synthesized
  source 1..22: mol_type = other DNA
taccactcagaagccttcactg

SEQ ID NO: 67095 - DNA, 22 bp, synthetic construct
  misc_feature 1..22: note = chemically synthesized
  source 1..22: mol_type = other DNA
agaagccttcactgtcaacttc

SEQ ID NO: 67096 - DNA, 22 bp, synthetic construct
  misc_feature 1..22: note = chemically synthesized
  source 1..22: mol_type = other DNA
cactgtcaacttcggggacacc

SEQ ID NO: 67097 - DNA, 22 bp, synthetic construct
  misc_feature 1..22: note = chemically synthesized
  source 1..22: mol_type = other DNA
actgtcaacttcggggacaccg

SEQ ID NO: 67098 - DNA, 22 bp, synthetic construct
  misc_feature 1..22: note = chemically synthesized
  source 1..22: mol_type = other DNA
tcaacttcggggacaccgaaga

SEQ ID NO: 67099 - DNA, 22 bp, synthetic construct
  misc_feature 1..22: note = chemically synthesized
  source 1..22: mol_type = other DNA
cggggacaccgaagaggccaag

SEQ ID NO: 67100 - DNA, 22 bp, synthetic construct
  misc_feature 1..22: note = chemically synthesized
  source 1..22: mol_type = other DNA
ggggacaccgaagaggccaaga

SEQ ID NO: 67101 - DNA, 22 bp, synthetic construct
  misc_feature 1..22: note = chemically synthesized
  source 1..22: mol_type = other DNA
cgtggagaagggtactcaaggg

SEQ ID NO: 67102 - DNA, 22 bp, synthetic construct
  misc_feature 1..22: note = chemically synthesized
  source 1..22: mol_type = other DNA
aagggaaaattgtggatttggt

SEQ ID NO: 67103 - DNA, 22 bp, synthetic construct
  misc_feature 1..22: note = chemically synthesized
  source 1..22: mol_type = other DNA
tggatttggtcaaggagcttga

SEQ ID NO: 67104 - DNA, 22 bp, synthetic construct
  misc_feature 1..22: note = chemically synthesized
  source 1..22: mol_type = other DNA
ggtcaaggagcttgacagagac

SEQ ID NO: 67105 - DNA, 22 bp, synthetic construct
  misc_feature 1..22: note = chemically synthesized
  source 1..22: mol_type = other DNA
gtcaaggagcttgacagagaca

SEQ ID NO: 67106 - DNA, 22 bp, synthetic construct
  misc_feature 1..22: note = chemically synthesized
  source 1..22: mol_type = other DNA
gacagagacacagtttttgctc

SEQ ID NO: 67107 - DNA, 22 bp, synthetic construct
  misc_feature 1..22: note = chemically synthesized
  source 1..22: mol_type = other DNA
acagagacacagtttttgctct

SEQ ID NO: 67108 - DNA, 22 bp, synthetic construct
  misc_feature 1..22: note = chemically synthesized
  source 1..22: mol_type = other DNA
ttgctctggtgaattacatctt

SEQ ID NO: 67109 - DNA, 22 bp, synthetic construct
  misc_feature 1..22: note = chemically synthesized
  source 1..22: mol_type = other DNA
tgctctggtgaattacatcttc

SEQ ID NO: 67110 - DNA, 22 bp, synthetic construct
  misc_feature 1..22: note = chemically synthesized
  source 1..22: mol_type = other DNA
gctctggtgaattacatcttct

SEQ ID NO: 67111 - DNA, 22 bp, synthetic construct
  misc_feature 1..22: note = chemically synthesized
  source 1..22: mol_type = other DNA
ctctggtgaattacatcttctt

SEQ ID NO: 67112 - DNA, 22 bp, synthetic construct
  misc_feature 1..22: note = chemically synthesized
  source 1..22: mol_type = other DNA
tggtgaattacatcttctttaa

SEQ ID NO: 67113 - DNA, 22 bp, synthetic construct
  misc_feature 1..22: note = chemically synthesized
  source 1..22: mol_type = other DNA
gtgaattacatcttctttaaag

SEQ ID NO: 67114 - DNA, 22 bp, synthetic construct
  misc_feature 1..22: note = chemically synthesized
  source 1..22: mol_type = other DNA
catcttctttaaaggtaaggtt

SEQ ID NO: 67115 - DNA, 22 bp, synthetic construct
  misc_feature 1..22: note = chemically synthesized
  source 1..22: mol_type = other DNA
ctttaaaggtaaggttgctcaa

SEQ ID NO: 67116 - DNA, 22 bp, synthetic construct
  misc_feature 1..22: note = chemically synthesized
  source 1..22: mol_type = other DNA
tttaaaggtaaggttgctcaac

SEQ ID NO: 67117 - DNA, 22 bp, synthetic construct
  misc_feature 1..22: note = chemically synthesized
  source 1..22: mol_type = other DNA
taaaggtaaggttgctcaacca

SEQ ID NO: 67118 - DNA, 22 bp, synthetic construct
  misc_feature 1..22: note = chemically synthesized
  source 1..22: mol_type = other DNA
aaaggtaaggttgctcaaccag

SEQ ID NO: 67119 - DNA, 22 bp, synthetic construct
  misc_feature 1..22: note = chemically synthesized
  source 1..22: mol_type = other DNA
aaggtaaggttgctcaaccagc

SEQ ID NO: 67120 - DNA, 22 bp, synthetic construct
  misc_feature 1..22: note = chemically synthesized
  source 1..22: mol_type = other DNA
ctcaaccagcctgagctgttcc

SEQ ID NO: 67121 - DNA, 22 bp, synthetic construct
  misc_feature 1..22: note = chemically synthesized
  source 1..22: mol_type = other DNA
aaccagcctgagctgttcccat

SEQ ID NO: 67122 - DNA, 22 bp, synthetic construct
  misc_feature 1..22: note = chemically synthesized
  source 1..22: mol_type = other DNA
agctgttcccatagaaacaagc

SEQ ID NO: 67123 - DNA, 22 bp, synthetic construct
  misc_feature 1..22: note = chemically synthesized
  source 1..22: mol_type = other DNA
ttcccatagaaacaagcaaaaa

SEQ ID NO: 67124 - DNA, 22 bp, synthetic construct
  misc_feature 1..22: note = chemically synthesized
  source 1..22: mol_type = other DNA
ccatagaaacaagcaaaaatat

SEQ ID NO: 67125 - DNA, 22 bp, synthetic construct
  misc_feature 1..22: note = chemically synthesized
  source 1..22: mol_type = other DNA
tcaaaccatcagttcttgaact

SEQ ID NO: 67126 - DNA, 22 bp, synthetic construct
  misc_feature 1..22: note = chemically synthesized
  source 1..22: mol_type = other DNA
aaaccatcagttcttgaactct

SEQ ID NO: 67127 - DNA, 22 bp, synthetic construct
  misc_feature 1..22: note = chemically synthesized
  source 1..22: mol_type = other DNA
ttgaactctccttggcaatgca

SEQ ID NO: 67128 - DNA, 22 bp, synthetic construct
  misc_feature 1..22: note = chemically synthesized
  source 1..22: mol_type = other DNA
gaactctccttggcaatgcatt

SEQ ID NO: 67129 - DNA, 22 bp, synthetic construct
  misc_feature 1..22: note = chemically synthesized
  source 1..22: mol_type = other DNA
aactctccttggcaatgcatta

SEQ ID NO: 67130 - DNA, 22 bp, synthetic construct
  misc_feature 1..22: note = chemically synthesized
  source 1..22: mol_type = other DNA
tccttggcaatgcattatgggc

SEQ ID NO: 67131 - DNA, 22 bp, synthetic construct
  misc_feature 1..22: note = chemically synthesized
  source 1..22: mol_type = other DNA
cttggcaatgcattatgggcca

SEQ ID NO: 67132 - DNA, 22 bp, synthetic construct
  misc_feature 1..22: note = chemically synthesized
  source 1..22: mol_type = other DNA
ggcaatgcattatgggccatag

SEQ ID NO: 67133 - DNA, 22 bp, synthetic construct
  misc_feature 1..22: note = chemically synthesized
  source 1..22: mol_type = other DNA
gcaatgcattatgggccatagc

SEQ ID NO: 67134 - DNA, 22 bp, synthetic construct
  misc_feature 1..22: note = chemically synthesized
  source 1..22: mol_type = other DNA
tgggccatagcaatgcttttca

SEQ ID NO: 67135 - DNA, 22 bp, synthetic construct
  misc_feature 1..22: note = chemically synthesized
  source 1..22: mol_type = other DNA
ttcagcgtggattcttcagttt

SEQ ID NO: 67136 - DNA, 22 bp, synthetic construct
  misc_feature 1..22: note = chemically synthesized
  source 1..22: mol_type = other DNA
tcagcgtggattcttcagtttt

SEQ ID NO: 67137 - DNA, 22 bp, synthetic construct
  misc_feature 1..22: note = chemically synthesized
  source 1..22: mol_type = other DNA
cagcgtggattcttcagttttc

SEQ ID NO: 67138 - DNA, 22 bp, synthetic construct
  misc_feature 1..22: note = chemically synthesized
  source 1..22: mol_type = other DNA
agcgtggattcttcagttttct

SEQ ID NO: 67139 - DNA, 22 bp, synthetic construct
  misc_feature 1..22: note = chemically synthesized
  source 1..22: mol_type = other DNA
ttcagttttctacacacaaaca

SEQ ID NO: 67140 - DNA, 22 bp, synthetic construct
  misc_feature 1..22: note = chemically synthesized
  source 1..22: mol_type = other DNA
cagttttctacacacaaacact

SEQ ID NO: 67141 - DNA, 22 bp, synthetic construct
  misc_feature 1..22: note = chemically synthesized
  source 1..22: mol_type = other DNA
agttttctacacacaaacacta

SEQ ID NO: 67142 - DNA, 22 bp, synthetic construct
  misc_feature 1..22: note = chemically synthesized
  source 1..22: mol_type = other DNA
tctacacacaaacactaaaatg

SEQ ID NO: 67143 - DNA, 22 bp, synthetic construct
  misc_feature 1..22: note = chemically synthesized
  source 1..22: mol_type = other DNA
ctacacacaaacactaaaatgt

SEQ ID NO: 67144 - DNA, 22 bp, synthetic construct
  misc_feature 1..22: note = chemically synthesized
  source 1..22: mol_type = other DNA
tacacacaaacactaaaatgtt

SEQ ID NO: 67145 - DNA, 22 bp, synthetic construct
  misc_feature 1..22: note = chemically synthesized
  source 1..22: mol_type = other DNA
cacacaaacactaaaatgtttt

SEQ ID NO: 67146 - DNA, 22 bp, synthetic construct
  misc_feature 1..22: note = chemically synthesized
  source 1..22: mol_type = other DNA
aaatgttttccatcattgagta

SEQ ID NO: 67147 - DNA, 22 bp, synthetic construct
  misc_feature 1..22: note = chemically synthesized
  source 1..22: mol_type = other DNA
tccatcattgagtaatttgagg

SEQ ID NO: 67148 - DNA, 22 bp, synthetic construct
  misc_feature 1..22: note = chemically synthesized
  source 1..22: mol_type = other DNA
ccatcattgagtaatttgagga

SEQ ID NO: 67149 - DNA, 22 bp, synthetic construct
  misc_feature 1..22: note = chemically synthesized
  source 1..22: mol_type = other DNA
catcattgagtaatttgaggaa

SEQ ID NO: 67150 - DNA, 22 bp, synthetic construct
  misc_feature 1..22: note = chemically synthesized
  source 1..22: mol_type = other DNA
agtaatttgaggaaataataga

SEQ ID NO: 67151 - DNA, 22 bp, synthetic construct
  misc_feature 1..22: note = chemically synthesized
  source 1..22: mol_type = other DNA
gaggaaataatagattaaactg

SEQ ID NO: 67152 - DNA, 22 bp, synthetic construct
  misc_feature 1..22: note = chemically synthesized
  source 1..22: mol_type = other DNA
aggaaataatagattaaactgt

SEQ ID NO: 67153 - DNA, 22 bp, synthetic construct
  misc_feature 1..22: note = chemically synthesized
  source 1..22: mol_type = other DNA
aactgtcaaaactactgacagc

SEQ ID NO: 67154 - DNA, 22 bp, synthetic construct
  misc_feature 1..22: note = chemically synthesized
  source 1..22: mol_type = other DNA
tcaaaactactgacagctctgc

SEQ ID NO: 67155 - DNA, 22 bp, synthetic construct
  misc_feature 1..22: note = chemically synthesized
  source 1..22: mol_type = other DNA
ctgacagctctgcagaactttt

SEQ ID NO: 67156 - DNA, 22 bp, synthetic construct
  misc_feature 1..22: note = chemically synthesized
  source 1..22: mol_type = other DNA
acagctctgcagaacttttcag

SEQ ID NO: 67157 - DNA, 22 bp, synthetic construct
  misc_feature 1..22: note = chemically synthesized
  source 1..22: mol_type = other DNA
tgcagaacttttcagagccttt

SEQ ID NO: 67158 - DNA, 22 bp, synthetic construct
  misc_feature 1..22: note = chemically synthesized
  source 1..22: mol_type = other DNA
cagaacttttcagagcctttaa

SEQ ID NO: 67159 - DNA, 22 bp, synthetic construct
  misc_feature 1..22: note = chemically synthesized
  source 1..22: mol_type = other DNA
ttcagagcctttaatgtccttg

SEQ ID NO: 67160 - DNA, 22 bp, synthetic construct
  misc_feature 1..22: note = chemically synthesized
  source 1..22: mol_type = other DNA
tcagagcctttaatgtccttgt

SEQ ID NO: 67161 - DNA, 22 bp, synthetic construct
  misc_feature 1..22: note = chemically synthesized
  source 1..22: mol_type = other DNA
cagagcctttaatgtccttgtg

SEQ ID NO: 67162 - DNA, 22 bp, synthetic construct
  misc_feature 1..22: note = chemically synthesized
  source 1..22: mol_type = other DNA
agagcctttaatgtccttgtgt

SEQ ID NO: 67163 - DNA, 22 bp, synthetic construct
  misc_feature 1..22: note = chemically synthesized
  source 1..22: mol_type = other DNA
taatgtccttgtgtatactgta

SEQ ID NO: 67164 - DNA, 22 bp, synthetic construct
  misc_feature 1..22: note = chemically synthesized
  source 1..22: mol_type = other DNA
aatgtccttgtgtatactgtat

SEQ ID NO: 67165 - DNA, 22 bp, synthetic construct
  misc_feature 1..22: note = chemically synthesized
  source 1..22: mol_type = other DNA
atgtccttgtgtatactgtata

SEQ ID NO: 67166 - DNA, 22 bp, synthetic construct
  misc_feature 1..22: note = chemically synthesized
  source 1..22: mol_type = other DNA
gtgtatactgtatatgtagaat

SEQ ID NO: 67167 - DNA, 22 bp, synthetic construct
  misc_feature 1..22: note = chemically synthesized
  source 1..22: mol_type = other DNA
tgtatactgtatatgtagaata

SEQ ID NO: 67168 - DNA, 22 bp, synthetic construct
  misc_feature 1..22: note = chemically synthesized
  source 1..22: mol_type = other DNA
tatatgtagaatatataatgct

SEQ ID NO: 67169 - DNA, 22 bp, synthetic construct
  misc_feature 1..22: note = chemically synthesized
  source 1..22: mol_type = other DNA
agaactatagaacaaattgtaa

SEQ ID NO: 67170 - DNA, 22 bp, synthetic construct
  misc_feature 1..22: note = chemically synthesized
  source 1..22: mol_type = other DNA
gaactatagaacaaattgtaat

SEQ ID NO: 67171 - DNA, 22 bp, synthetic construct
  misc_feature 1..22: note = chemically synthesized
  source 1..22: mol_type = other DNA
tagaacaaattgtaatacactg

SEQ ID NO: 67172 - DNA, 22 bp, synthetic construct
  misc_feature 1..22: note = chemically synthesized
  source 1..22: mol_type = other DNA
taatacactgcataaagggata

SEQ ID NO: 67173 - DNA, 22 bp, synthetic construct
  misc_feature 1..22: note = chemically synthesized
  source 1..22: mol_type = other DNA
cataaagggatagtttcatgga

SEQ ID NO: 67174 - DNA, 22 bp, synthetic construct
  misc_feature 1..22: note = chemically synthesized
  source 1..22: mol_type = other DNA
catggaacatactttacacgac

SEQ ID NO: 67175 - DNA, 22 bp, synthetic construct
  misc_feature 1..22: note = chemically synthesized
  source 1..22: mol_type = other DNA
atggaacatactttacacgact

SEQ ID NO: 67176 - DNA, 22 bp, synthetic construct
  misc_feature 1..22: note = chemically synthesized
  source 1..22: mol_type = other DNA
tacacgactctagtgtcccaga

SEQ ID NO: 67177 - DNA, 22 bp, synthetic construct
  misc_feature 1..22: note = chemically synthesized
  source 1..22: mol_type = other DNA
acacgactctagtgtcccagaa

SEQ ID NO: 67178 - DNA, 22 bp, synthetic construct
  misc_feature 1..22: note = chemically synthesized
  source 1..22: mol_type = other DNA
cacgactctagtgtcccagaat

SEQ ID NO: 67179 - DNA, 22 bp, synthetic construct
  misc_feature 1..22: note = chemically synthesized
  source 1..22: mol_type = other DNA
tagtgtcccagaatcagtatca

SEQ ID NO: 67180 - DNA, 22 bp, synthetic construct
  misc_feature 1..22: note = chemically synthesized
  source 1..22: mol_type = other DNA
gtgtcccagaatcagtatcagt

SEQ ID NO: 67181 - DNA, 22 bp, synthetic construct
  misc_feature 1..22: note = chemically synthesized
  source 1..22: mol_type = other DNA
tgcaatctgaaagacctgggtt

SEQ ID NO: 67182 - DNA, 22 bp, synthetic construct
  misc_feature 1..22: note = chemically synthesized
  source 1..22: mol_type = other DNA
gcaatctgaaagacctgggttc

SEQ ID NO: 67183 - DNA, 22 bp, synthetic construct
  misc_feature 1..22: note = chemically synthesized
  source 1..22: mol_type = other DNA
caatctgaaagacctgggttca

SEQ ID NO: 67184 - DNA, 22 bp, synthetic construct
  misc_feature 1..22: note = chemically synthesized
  source 1..22: mol_type = other DNA
aaagacctgggttcaaatcctg

SEQ ID NO: 67185 - DNA, 22 bp, synthetic construct
  misc_feature 1..22: note = chemically synthesized
  source 1..22: mol_type = other DNA
ggttcaaatcctgcctctaaca

SEQ ID NO: 67186 - DNA, 22 bp, synthetic construct
  misc_feature 1..22: note = chemically synthesized
  source 1..22: mol_type = other DNA
aaatcctgcctctaacacaatt

SEQ ID NO: 67187 - DNA, 22 bp, synthetic construct
  misc_feature 1..22: note = chemically synthesized
  source 1..22: mol_type = other DNA
cctctaacacaattagcttttg

SEQ ID NO: 67188 - DNA, 22 bp, synthetic construct
  misc_feature 1..22: note = chemically synthesized
  source 1..22: mol_type = other DNA
taacacaattagcttttgacaa

SEQ ID NO: 67189 - DNA, 22 bp, synthetic construct
  misc_feature 1..22: note = chemically synthesized
  source 1..22: mol_type = other DNA
acacaattagcttttgacaaaa

SEQ ID NO: 67190 - DNA, 22 bp, synthetic construct
  misc_feature 1..22: note = chemically synthesized
  source 1..22: mol_type = other DNA
gcttttgacaaaaacaatgcat

SEQ ID NO: 67191 - DNA, 22 bp, synthetic construct
  misc_feature 1..22: note = chemically synthesized
  source 1..22: mol_type = other DNA
ttgacaaaaacaatgcattcta

SEQ ID NO: 67192 - DNA, 22 bp, synthetic construct
  misc_feature 1..22: note = chemically synthesized
  source 1..22: mol_type = other DNA
tgacaaaaacaatgcattctac

SEQ ID NO: 67193 - DNA, 22 bp, synthetic construct
  misc_feature 1..22: note = chemically synthesized
  source 1..22: mol_type = other DNA
gacaaaaacaatgcattctacc

SEQ ID NO: 67194 - DNA, 22 bp, synthetic construct
  misc_feature 1..22: note = chemically synthesized
  source 1..22: mol_type = other DNA
acaaaaacaatgcattctacct

SEQ ID NO: 67195 - DNA, 22 bp, synthetic construct
  misc_feature 1..22: note = chemically synthesized
  source 1..22: mol_type = other DNA
tacctctttgaggtgctaattt

SEQ ID NO: 67196 - DNA, 22 bp, synthetic construct
  misc_feature 1..22: note = chemically synthesized
  source 1..22: mol_type = other DNA
cctctttgaggtgctaatttct

SEQ ID NO: 67197 - DNA, 22 bp, synthetic construct
  misc_feature 1..22: note = chemically synthesized
  source 1..22: mol_type = other DNA
tttgaggtgctaatttctcatc

SEQ ID NO: 67198 - DNA, 22 bp, synthetic construct
  misc_feature 1..22: note = chemically synthesized
  source 1..22: mol_type = other DNA
tgaggtgctaatttctcatctt

SEQ ID NO: 67199 - DNA, 22 bp, synthetic construct
  misc_feature 1..22: note = chemically synthesized
  source 1..22: mol_type = other DNA
gaggtgctaatttctcatctta

SEQ ID NO: 67200 - DNA, 22 bp, synthetic construct
  misc_feature 1..22: note = chemically synthesized
  source 1..22: mol_type = other DNA
aggtgctaatttctcatcttag

SEQ ID NO: 67201 - DNA, 22 bp, synthetic construct
  misc_feature 1..22: note = chemically synthesized
  source 1..22: mol_type = other DNA
atttctcatcttagcatggaca

SEQ ID NO: 67202 - DNA, 22 bp, synthetic construct
  misc_feature 1..22: note = chemically synthesized
  source 1..22: mol_type = other DNA
ctcatcttagcatggacaaaat

SEQ ID NO: 67203 - DNA, 22 bp, synthetic construct
  misc_feature 1..22: note = chemically synthesized
  source 1..22: mol_type = other DNA
tcatcttagcatggacaaaata

SEQ ID NO: 67204 - DNA, 22 bp, synthetic construct
  misc_feature 1..22: note = chemically synthesized
  source 1..22: mol_type = other DNA
atcttagcatggacaaaatacc

SEQ ID NO: 67205 - DNA, 22 bp, synthetic construct
  misc_feature 1..22: note = chemically synthesized
  source 1..22: mol_type = other DNA
agcatggacaaaataccattct

SEQ ID NO: 67206 - DNA, 22 bp, synthetic construct
  misc_feature 1..22: note = chemically synthesized
  source 1..22: mol_type = other DNA
gcatggacaaaataccattctt

SEQ ID NO: 67207 - DNA, 22 bp, synthetic construct
  misc_feature 1..22: note = chemically synthesized
  source 1..22: mol_type = other DNA
ttgctgtcaggtttttttagga

SEQ ID NO: 67208 - DNA, 22 bp, synthetic construct
  misc_feature 1..22: note = chemically synthesized
  source 1..22: mol_type = other DNA
gctgtcaggtttttttaggatt

SEQ ID NO: 67209 - DNA, 22 bp, synthetic construct
  misc_feature 1..22: note = chemically synthesized
  source 1..22: mol_type = other DNA
ctgtcaggtttttttaggatta

SEQ ID NO: 67210 - DNA, 22 bp, synthetic construct
  misc_feature 1..22: note = chemically synthesized
  source 1..22: mol_type = other DNA
tcaggtttttttaggattaaac

SEQ ID NO: 67211 - DNA, 22 bp, synthetic construct
  misc_feature 1..22: note = chemically synthesized
  source 1..22: mol_type = other DNA
ttttaggattaaacaaatgaca

SEQ ID NO: 67212 - DNA, 22 bp, synthetic construct
  misc_feature 1..22: note = chemically synthesized
  source 1..22: mol_type = other DNA
tttaggattaaacaaatgacaa

SEQ ID NO: 67213 - DNA, 22 bp, synthetic construct
  misc_feature 1..22: note = chemically synthesized
  source 1..22: mol_type = other DNA
ttaggattaaacaaatgacaaa

SEQ ID NO: 67214 - DNA, 22 bp, synthetic construct
  misc_feature 1..22: note = chemically synthesized
  source 1..22: mol_type = other DNA
taggattaaacaaatgacaaag

SEQ ID NO: 67215 - DNA, 22 bp, synthetic construct
  misc_feature 1..22: note = chemically synthesized
  source 1..22: mol_type = other DNA
aggattaaacaaatgacaaaga

SEQ ID NO: 67216 - DNA, 22 bp, synthetic construct
  misc_feature 1..22: note = chemically synthesized
  source 1..22: mol_type = other DNA
ggattaaacaaatgacaaagac

SEQ ID NO: 67217 - DNA, 22 bp, synthetic construct
  misc_feature 1..22: note = chemically synthesized
  source 1..22: mol_type = other DNA
aacaaatgacaaagactgtggg

SEQ ID NO: 67218 - DNA, 22 bp, synthetic construct
  misc_feature 1..22: note = chemically synthesized
  source 1..22: mol_type = other DNA
tggggatggtgtgtggcataca

SEQ ID NO: 67219 - DNA, 22 bp, synthetic construct
  misc_feature 1..22: note = chemically synthesized
  source 1..22: mol_type = other DNA
ttctgtatctcaggctgccttc

SEQ ID NO: 67220 - DNA, 22 bp, synthetic construct
  misc_feature 1..22: note = chemically synthesized
  source 1..22: mol_type = other DNA
ctgtatctcaggctgccttcct

SEQ ID NO: 67221 - DNA, 22 bp, synthetic construct
  misc_feature 1..22: note = chemically synthesized
  source 1..22: mol_type = other DNA
tgtatctcaggctgccttcctg

SEQ ID NO: 67222 - DNA, 22 bp, synthetic construct
  misc_feature 1..22: note = chemically synthesized
  source 1..22: mol_type = other DNA
tatctcaggctgccttcctgcc

SEQ ID NO: 67223 - DNA, 22 bp, synthetic construct
  misc_feature 1..22: note = chemically synthesized
  source 1..22: mol_type = other DNA
aggctgccttcctgcccctgag

SEQ ID NO: 67224 - DNA, 22 bp, synthetic construct
  misc_feature 1..22: note = chemically synthesized
  source 1..22: mol_type = other DNA
ccttcctgcccctgaggggtta

SEQ ID NO: 67225 - DNA, 22 bp, synthetic construct
  misc_feature 1..22: note = chemically synthesized
  source 1..22: mol_type = other DNA
cctgcccctgaggggttaaaat

SEQ ID NO: 67226 - DNA, 22 bp, synthetic construct
  misc_feature 1..22: note = chemically synthesized
  source 1..22: mol_type = other DNA
ctgcccctgaggggttaaaatg

SEQ ID NO: 67227 - DNA, 22 bp, synthetic construct
  misc_feature 1..22: note = chemically synthesized
  source 1..22: mol_type = other DNA
cccctgaggggttaaaatgcca

SEQ ID NO: 67228 - DNA, 22 bp, synthetic construct
  misc_feature 1..22: note = chemically synthesized
  source 1..22: mol_type = other DNA
aggggttaaaatgccagggtcc

SEQ ID NO: 67229 - DNA, 22 bp, synthetic construct
  misc_feature 1..22: note = chemically synthesized
  source 1..22: mol_type = other DNA
aaatgccagggtcctgggggcc

SEQ ID NO: 67230 - DNA, 22 bp, synthetic construct
  misc_feature 1..22: note = chemically synthesized
  source 1..22: mol_type = other DNA
ggggccccagggcattctaagc

SEQ ID NO: 67231 - DNA, 22 bp, synthetic construct
  misc_feature 1..22: note = chemically synthesized
  source 1..22: mol_type = other DNA
taagccagctcccactgtccca

SEQ ID NO: 67232 - DNA, 22 bp, synthetic construct
  misc_feature 1..22: note = chemically synthesized
  source 1..22: mol_type = other DNA
agccagctcccactgtcccagg

SEQ ID NO: 67233 - DNA, 22 bp, synthetic construct
  misc_feature 1..22: note = chemically synthesized
  source 1..22: mol_type = other DNA
ccactgtcccaggaaaacagca

SEQ ID NO: 67234 - DNA, 22 bp, synthetic construct
  misc_feature 1..22: note = chemically synthesized
  source 1..22: mol_type = other DNA
tcccaggaaaacagcatagggg

SEQ ID NO: 67235 - DNA, 22 bp, synthetic construct
  misc_feature 1..22: note = chemically synthesized
  source 1..22: mol_type = other DNA
cttcctccactctgaggctccc

SEQ ID NO: 67236 - DNA, 22 bp, synthetic construct
  misc_feature 1..22: note = chemically synthesized
  source 1..22: mol_type = other DNA
cctccactctgaggctcccttg

SEQ ID NO: 67237 - DNA, 22 bp, synthetic construct
  misc_feature 1..22: note = chemically synthesized
  source 1..22: mol_type = other DNA
ctccactctgaggctcccttgc

SEQ ID NO: 67238 - DNA, 22 bp, synthetic construct
  misc_feature 1..22: note = chemically synthesized
  source 1..22: mol_type = other DNA
cactctgaggctcccttgctct

SEQ ID NO: 67239 - DNA, 22 bp, synthetic construct
  misc_feature 1..22: note = chemically synthesized
  source 1..22: mol_type = other DNA
tgaggctcccttgctcttgagg

SEQ ID NO: 67240 - DNA, 22 bp, synthetic construct
  misc_feature 1..22: note = chemically synthesized
  source 1..22: mol_type = other DNA
aggctcccttgctcttgaggca

SEQ ID NO: 67241 - DNA, 22 bp, synthetic construct
  misc_feature 1..22: note = chemically synthesized
  source 1..22: mol_type = other DNA
ccttgctcttgaggcaaaggag

SEQ ID NO: 67242 - DNA, 22 bp, synthetic construct
  misc_feature 1..22: note = chemically synthesized
  source 1..22: mol_type = other DNA
gctcttgaggcaaaggagggca

SEQ ID NO: 67243 - DNA, 22 bp, synthetic construct
  misc_feature 1..22: note = chemically synthesized
  source 1..22: mol_type = other DNA
ctcttgaggcaaaggagggcag

SEQ ID NO: 67244 - DNA, 22 bp, synthetic construct
  misc_feature 1..22: note = chemically synthesized
  source 1..22: mol_type = other DNA
ttgaggcaaaggagggcagtgg

SEQ ID NO: 67245 - DNA, 22 bp, synthetic construct
  misc_feature 1..22: note = chemically synthesized
  source 1..22: mol_type = other DNA
gaggcaaaggagggcagtggag

SEQ ID NO: 67246 - DNA, 22 bp, synthetic construct
  misc_feature 1..22: note = chemically synthesized
  source 1..22: mol_type = other DNA
aggcaaaggagggcagtggaga

SEQ ID NO: 67247 - DNA, 22 bp, synthetic construct
  misc_feature 1..22: note = chemically synthesized
  source 1..22: mol_type = other DNA
cagtcagcacagctaaagtcct

SEQ ID NO: 67248 - DNA, 22 bp, synthetic construct
  misc_feature 1..22: note = chemically synthesized
  source 1..22: mol_type = other DNA
aagtcctggctctgctgtggcc

SEQ ID NO: 67249 - DNA, 22 bp, synthetic construct
  misc_feature 1..22: note = chemically synthesized
  source 1..22: mol_type = other DNA
gctctgctgtggccttagtggg

SEQ ID NO: 67250 - DNA, 22 bp, synthetic construct
  misc_feature 1..22: note = chemically synthesized
  source 1..22: mol_type = other DNA
tgctgtggccttagtgggggcc

SEQ ID NO: 67251 - DNA, 22 bp, synthetic construct
  misc_feature 1..22: note = chemically synthesized
  source 1..22: mol_type = other DNA
ctgtggccttagtgggggccca

SEQ ID NO: 67252 - DNA, 22 bp, synthetic construct
  misc_feature 1..22: note = chemically synthesized
  source 1..22: mol_type = other DNA
tggccttagtgggggcccaggt

SEQ ID NO: 67253 - DNA, 22 bp, synthetic construct
  misc_feature 1..22: note = chemically synthesized
  source 1..22: mol_type = other DNA
agtgggggcccaggtccctctc

SEQ ID NO: 67254 - DNA, 22 bp, synthetic construct
  misc_feature 1..22: note = chemically synthesized
  source 1..22: mol_type = other DNA
gtgggggcccaggtccctctcc

SEQ ID NO: 67255 - DNA, 22 bp, synthetic construct
  misc_feature 1..22: note = chemically synthesized
  source 1..22: mol_type = other DNA
tccagccccagtctcctccttc

SEQ ID NO: 67256 - DNA, 22 bp, synthetic construct
  misc_feature 1..22: note = chemically synthesized
  source 1..22: mol_type = other DNA
cagccccagtctcctccttctg

SEQ ID NO: 67257 - DNA, 22 bp, synthetic construct
  misc_feature 1..22: note = chemically synthesized
  source 1..22: mol_type = other DNA
ctccttctgtccaatgagaaag

SEQ ID NO: 67258 - DNA, 22 bp, synthetic construct
  misc_feature 1..22: note = chemically synthesized
  source 1..22: mol_type = other DNA
cttctgtccaatgagaaagctg

SEQ ID NO: 67259 - DNA, 22 bp, synthetic construct
  misc_feature 1..22: note = chemically synthesized
  source 1..22: mol_type = other DNA
ctgtccaatgagaaagctggga

SEQ ID NO: 67260 - DNA, 22 bp, synthetic construct
  misc_feature 1..22: note = chemically synthesized
  source 1..22: mol_type = other DNA
tgtccaatgagaaagctgggat

SEQ ID NO: 67261 - DNA, 22 bp, synthetic construct
  misc_feature 1..22: note = chemically synthesized
  source 1..22: mol_type = other DNA
tccaatgagaaagctgggatca

SEQ ID NO: 67262 - DNA, 22 bp, synthetic construct
  misc_feature 1..22: note = chemically synthesized
  source 1..22: mol_type = other DNA
ggatcaggggtccctgaggccc

SEQ ID NO: 67263 - DNA, 22 bp, synthetic construct
  misc_feature 1..22: note = chemically synthesized
  source 1..22: mol_type = other DNA
aggcccctgtccactctgcatg

SEQ ID NO: 67264 - DNA, 22 bp, synthetic construct
  misc_feature 1..22: note = chemically synthesized
  source 1..22: mol_type = other DNA
tccactctgcatgcctcgatgg

SEQ ID NO: 67265 - DNA, 22 bp, synthetic construct
  misc_feature 1..22: note = chemically synthesized
  source 1..22: mol_type = other DNA
tgcatgcctcgatggtgaagct

SEQ ID NO: 67266 - DNA, 22 bp, synthetic construct
  misc_feature 1..22: note = chemically synthesized
  source 1..22: mol_type = other DNA
catgcctcgatggtgaagctct

SEQ ID NO: 67267 - DNA, 22 bp, synthetic construct
  misc_feature 1..22: note = chemically synthesized
  source 1..22: mol_type = other DNA
gatggtgaagctctgttggtat

SEQ ID NO: 67268 - DNA, 22 bp, synthetic construct
  misc_feature 1..22: note = chemically synthesized
  source 1..22: mol_type = other DNA
tgttggtatggcagaggggagg

SEQ ID NO: 67269 - DNA, 22 bp, synthetic construct
  misc_feature 1..22: note = chemically synthesized
  source 1..22: mol_type = other DNA
ttggtatggcagaggggaggct

SEQ ID NO: 67270 - DNA, 22 bp, synthetic construct
  misc_feature 1..22: note = chemically synthesized
  source 1..22: mol_type = other DNA
gtatggcagaggggaggctgct

SEQ ID NO: 67271 - DNA, 22 bp, synthetic construct
  misc_feature 1..22: note = chemically synthesized
  source 1..22: mol_type = other DNA
ctcaggcatctgcatttcccct

SEQ ID NO: 67272 - DNA, 22 bp, synthetic construct
  misc_feature 1..22: note = chemically synthesized
  source 1..22: mol_type = other DNA
aggcatctgcatttcccctgcc

SEQ ID NO: 67273 - DNA, 22 bp, synthetic construct
  misc_feature 1..22: note = chemically synthesized
  source 1..22: mol_type = other DNA
catttcccctgccaatctagag

SEQ ID NO: 67274 - DNA, 22 bp, synthetic construct
  misc_feature 1..22: note = chemically synthesized
  source 1..22: mol_type = other DNA
cccctgccaatctagaggatga

SEQ ID NO: 67275 - DNA, 22 bp, synthetic construct
  misc_feature 1..22: note = chemically synthesized
  source 1..22: mol_type = other DNA
ccctgccaatctagaggatgag

SEQ ID NO: 67276 - DNA, 22 bp, synthetic construct
  misc_feature 1..22: note = chemically synthesized
  source 1..22: mol_type = other DNA
ccaatctagaggatgaggaaag

SEQ ID NO: 67277 - DNA, 22 bp, synthetic construct
  misc_feature 1..22: note = chemically synthesized
  source 1..22: mol_type = other DNA
gaggatgaggaaagctctcagg

SEQ ID NO: 67278 - DNA, 22 bp, synthetic construct
  misc_feature 1..22: note = chemically synthesized
  source 1..22: mol_type = other DNA
tcaggaatagtaagcagaatgt

SEQ ID NO: 67279 - DNA, 22 bp, synthetic construct
  misc_feature 1..22: note = chemically synthesized
  source 1..22: mol_type = other DNA
aggaatagtaagcagaatgttt

SEQ ID NO: 67280 - DNA, 22 bp, synthetic construct
  misc_feature 1..22: note = chemically synthesized
  source 1..22: mol_type = other DNA
gccctggatgaataactgagct

SEQ ID NO: 67281 - DNA, 22 bp, synthetic construct
  misc_feature 1..22: note = chemically synthesized
  source 1..22: mol_type = other DNA
ccctggatgaataactgagctg

SEQ ID NO: 67282 - DNA, 22 bp, synthetic construct
  misc_feature 1..22: note = chemically synthesized
  source 1..22: mol_type = other DNA
gatgaataactgagctgccaat

SEQ ID NO: 67283 - DNA, 22 bp, synthetic construct
  misc_feature 1..22: note = chemically synthesized
  source 1..22: mol_type = other DNA
agctgccaattaacaaggggca

SEQ ID NO: 67284 - DNA, 22 bp, synthetic construct
  misc_feature 1..22: note = chemically synthesized
  source 1..22: mol_type = other DNA
ccaattaacaaggggcagggag

SEQ ID NO: 67285 - DNA, 22 bp, synthetic construct
  misc_feature 1..22: note = chemically synthesized
  source 1..22: mol_type = other DNA
acaaggggcagggagccttaga

SEQ ID NO: 67286 - DNA, 22 bp, synthetic construct
  misc_feature 1..22: note = chemically synthesized
  source 1..22: mol_type = other DNA
agacagaaggtaccaaatatgc

SEQ ID NO: 67287 - DNA, 22 bp, synthetic construct
  misc_feature 1..22: note = chemically synthesized
  source 1..22: mol_type = other DNA
gacagaaggtaccaaatatgcc

SEQ ID NO: 67288 - DNA, 22 bp, synthetic construct
  misc_feature 1..22: note = chemically synthesized
  source 1..22: mol_type = other DNA
atgctccaacattttatttgta

SEQ ID NO: 67289 - DNA, 22 bp, synthetic construct
  misc_feature 1..22: note = chemically synthesized
  source 1..22: mol_type = other DNA
caacattttatttgtaatatcc

SEQ ID NO: 67290 - DNA, 22 bp, synthetic construct
  misc_feature 1..22: note = chemically synthesized
  source 1..22: mol_type = other DNA
tatttgtaatatccaagacacc

SEQ ID NO: 67291 - DNA, 22 bp, synthetic construct
  misc_feature 1..22: note = chemically synthesized
  source 1..22: mol_type = other DNA
atttgtaatatccaagacaccc

SEQ ID NO: 67292 - DNA, 22 bp, synthetic construct
  misc_feature 1..22: note = chemically synthesized
  source 1..22: mol_type = other DNA
tttgtaatatccaagacaccct

SEQ ID NO: 67293 - DNA, 22 bp, synthetic construct
  misc_feature 1..22: note = chemically synthesized
  source 1..22: mol_type = other DNA
gtaatatccaagacaccctcaa

SEQ ID NO: 67294 - DNA, 22 bp, synthetic construct
  misc_feature 1..22: note = chemically synthesized
  source 1..22: mol_type = other DNA
taatatccaagacaccctcaaa

SEQ ID NO: 67295 - DNA, 22 bp, synthetic construct
  misc_feature 1..22: note = chemically synthesized
  source 1..22: mol_type = other DNA
aaataaacatatgattccaata

SEQ ID NO: 67296 - DNA, 22 bp, synthetic construct
  misc_feature 1..22: note = chemically synthesized
  source 1..22: mol_type = other DNA
caataaaaatgcacagccacga

SEQ ID NO: 67297 - DNA, 22 bp, synthetic construct
  misc_feature 1..22: note = chemically synthesized
  source 1..22: mol_type = other DNA
ttagcctgacatcgccacgatg

SEQ ID NO: 67298 - DNA, 22 bp, synthetic construct
  misc_feature 1..22: note = chemically synthesized
  source 1..22: mol_type = other DNA
agcctgacatcgccacgatgta

SEQ ID NO: 67299 - DNA, 22 bp, synthetic construct
  misc_feature 1..22: note = chemically synthesized
  source 1..22: mol_type = other DNA
gcctgacatcgccacgatgtag

SEQ ID NO: 67300 - DNA, 22 bp, synthetic construct
  misc_feature 1..22: note = chemically synthesized
  source 1..22: mol_type = other DNA
acatcgccacgatgtagaaatt

SEQ ID NO: 67301 - DNA, 22 bp, synthetic construct
  misc_feature 1..22: note = chemically synthesized
  source 1..22: mol_type = other DNA
tgcatcttcctctagttttgaa

SEQ ID NO: 67302 - DNA, 22 bp, synthetic construct
  misc_feature 1..22: note = chemically synthesized
  source 1..22: mol_type = other DNA
catcttcctctagttttgaatt

SEQ ID NO: 67303 - DNA, 22 bp, synthetic construct
  misc_feature 1..22: note = chemically synthesized
  source 1..22: mol_type = other DNA
cctctagttttgaattatcccc

SEQ ID NO: 67304 - DNA, 22 bp, synthetic construct
  misc_feature 1..22: note = chemically synthesized
  source 1..22: mol_type = other DNA
ctctagttttgaattatcccca

SEQ ID NO: 67305 - DNA, 22 bp, synthetic construct
  misc_feature 1..22: note = chemically synthesized
  source 1..22: mol_type = other DNA
tagttttgaattatccccacac

SEQ ID NO: 67306 - DNA, 22 bp, synthetic construct
  misc_feature 1..22: note = chemically synthesized
  source 1..22: mol_type = other DNA
gttttgaattatccccacacaa

SEQ ID NO: 67307 - DNA, 22 bp, synthetic construct
  misc_feature 1..22: note = chemically synthesized
  source 1..22: mol_type = other DNA
tgaattatccccacacaatctt

SEQ ID NO: 67308 - DNA, 22 bp, synthetic construct
  misc_feature 1..22: note = chemically synthesized
  source 1..22: mol_type = other DNA
gaattatccccacacaatcttt

SEQ ID NO: 67309 - DNA, 22 bp, synthetic construct
  misc_feature 1..22: note = chemically synthesized
  source 1..22: mol_type = other DNA
aattatccccacacaatctttt

SEQ ID NO: 67310 - DNA, 22 bp, synthetic construct
  misc_feature 1..22: note = chemically synthesized
  source 1..22: mol_type = other DNA
tccccacacaatctttttcggc

SEQ ID NO: 67311 - DNA, 22 bp, synthetic construct
  misc_feature 1..22: note = chemically synthesized
  source 1..22: mol_type = other DNA
tttcggcagcttggatggtcag

SEQ ID NO: 67312 - DNA, 22 bp, synthetic construct
  misc_feature 1..22: note = chemically synthesized
  source 1..22: mol_type = other DNA
ttcggcagcttggatggtcagt

SEQ ID NO: 67313 - DNA, 22 bp, synthetic construct
  misc_feature 1..22: note = chemically synthesized
  source 1..22: mol_type = other DNA
tcggcagcttggatggtcagtt

SEQ ID NO: 67314 - DNA, 22 bp, synthetic construct
  misc_feature 1..22: note = chemically synthesized
  source 1..22: mol_type = other DNA
cggcagcttggatggtcagttt

SEQ ID NO: 67315 - DNA, 22 bp, synthetic construct
  misc_feature 1..22: note = chemically synthesized
  source 1..22: mol_type = other DNA
ggcagcttggatggtcagtttc

SEQ ID NO: 67316 - DNA, 22 bp, synthetic construct
  misc_feature 1..22: note = chemically synthesized
  source 1..22: mol_type = other DNA
ggatggtcagtttcagcacctt

SEQ ID NO: 67317 - DNA, 22 bp, synthetic construct
  misc_feature 1..22: note = chemically synthesized
  source 1..22: mol_type = other DNA
gatggtcagtttcagcaccttt

SEQ ID NO: 67318 - DNA, 22 bp, synthetic construct
  misc_feature 1..22: note = chemically synthesized
  source 1..22: mol_type = other DNA
cagcaccttttacagatgatga

SEQ ID NO: 67319 - DNA, 22 bp, synthetic construct
  misc_feature 1..22: note = chemically synthesized
  source 1..22: mol_type = other DNA
agcaccttttacagatgatgaa

SEQ ID NO: 67320 - DNA, 22 bp, synthetic construct
  misc_feature 1..22: note = chemically synthesized
  source 1..22: mol_type = other DNA
ttacagatgatgaagctgagcc

SEQ ID NO: 67321 - DNA, 22 bp, synthetic construct
  misc_feature 1..22: note = chemically synthesized
  source 1..22: mol_type = other DNA
tacagatgatgaagctgagcct

SEQ ID NO: 67322 - DNA, 22 bp, synthetic construct
  misc_feature 1..22: note = chemically synthesized
  source 1..22: mol_type = other DNA
acagatgatgaagctgagcctc

SEQ ID NO: 67323 - DNA, 22 bp, synthetic construct
  misc_feature 1..22: note = chemically synthesized
  source 1..22: mol_type = other DNA
cagatgatgaagctgagcctcg

SEQ ID NO: 67324 - DNA, 22 bp, synthetic construct
  misc_feature 1..22: note = chemically synthesized
  source 1..22: mol_type = other DNA
agcctcgagggatgtgtgtcgt

SEQ ID NO: 67325 - DNA, 22 bp, synthetic construct
  misc_feature 1..22: note = chemically synthesized
  source 1..22: mol_type = other DNA
gagggatgtgtgtcgtcaaggg

SEQ ID NO: 67326 - DNA, 22 bp, synthetic construct
  misc_feature 1..22: note = chemically synthesized
  source 1..22: mol_type = other DNA
agggcttctcagggaggggact

SEQ ID NO: 67327 - DNA, 22 bp, synthetic construct
  misc_feature 1..22: note = chemically synthesized
  source 1..22: mol_type = other DNA
ctcagggaggggactcatggtt

SEQ ID NO: 67328 - DNA, 22 bp, synthetic construct
  misc_feature 1..22: note = chemically synthesized
  source 1..22: mol_type = other DNA
tcagggaggggactcatggttt

SEQ ID NO: 67329 - DNA, 22 bp, synthetic construct
  misc_feature 1..22: note = chemically synthesized
  source 1..22: mol_type = other DNA
agggaggggactcatggtttct

SEQ ID NO: 67330 - DNA, 22 bp, synthetic construct
  misc_feature 1..22: note = chemically synthesized
  source 1..22: mol_type = other DNA
atggtttctttattctgctaca

SEQ ID NO: 67331 - DNA, 22 bp, synthetic construct
  misc_feature 1..22: note = chemically synthesized
  source 1..22: mol_type = other DNA
ctttattctgctacactcttcc

SEQ ID NO: 67332 - DNA, 22 bp, synthetic construct
  misc_feature 1..22: note = chemically synthesized
  source 1..22: mol_type = other DNA
tttattctgctacactcttcca

SEQ ID NO: 67333 - DNA, 22 bp, synthetic construct
  misc_feature 1..22: note = chemically synthesized
  source 1..22: mol_type = other DNA
tattctgctacactcttccaaa

SEQ ID NO: 67334 - DNA, 22 bp, synthetic construct
  misc_feature 1..22: note = chemically synthesized
  source 1..22: mol_type = other DNA
attctgctacactcttccaaac

SEQ ID NO: 67335 - DNA, 22 bp, synthetic construct
  misc_feature 1..22: note = chemically synthesized
  source 1..22: mol_type = other DNA
ttctgctacactcttccaaacc

SEQ ID NO: 67336 - DNA, 22 bp, synthetic construct
  misc_feature 1..22: note = chemically synthesized
  source 1..22: mol_type = other DNA
tgctacactcttccaaaccttc

SEQ ID NO: 67337 - DNA, 22 bp, synthetic construct
  misc_feature 1..22: note = chemically synthesized
  source 1..22: mol_type = other DNA
ctacactcttccaaaccttcac

SEQ ID NO: 67338 - DNA, 22 bp, synthetic construct
  misc_feature 1..22: note = chemically synthesized
  source 1..22: mol_type = other DNA
cactcttccaaaccttcactca

SEQ ID NO: 67339 - DNA, 22 bp, synthetic construct
  misc_feature 1..22: note = chemically synthesized
  source 1..22: mol_type = other DNA
ttccaaaccttcactcacccct

SEQ ID NO: 67340 - DNA, 22 bp, synthetic construct
  misc_feature 1..22: note = chemically synthesized
  source 1..22: mol_type = other DNA
ccaaaccttcactcacccctgg

SEQ ID NO: 67341 - DNA, 22 bp, synthetic construct
  misc_feature 1..22: note = chemically synthesized
  source 1..22: mol_type = other DNA
caaaccttcactcacccctggt

SEQ ID NO: 67342 - DNA, 22 bp, synthetic construct
  misc_feature 1..22: note = chemically synthesized
  source 1..22: mol_type = other DNA
cactcacccctggtgatgccca

SEQ ID NO: 67343 - DNA, 22 bp, synthetic construct
  misc_feature 1..22: note = chemically synthesized
  source 1..22: mol_type = other DNA
actcacccctggtgatgcccac

SEQ ID NO: 67344 - DNA, 22 bp, synthetic construct
  misc_feature 1..22: note = chemically synthesized
  source 1..22: mol_type = other DNA
acccctggtgatgcccaccttc

SEQ ID NO: 67345 - DNA, 22 bp, synthetic construct
  misc_feature 1..22: note = chemically synthesized
  source 1..22: mol_type = other DNA
gtgatgcccaccttcccctctc

SEQ ID NO: 67346 - DNA, 22 bp, synthetic construct
  misc_feature 1..22: note = chemically synthesized
  source 1..22: mol_type = other DNA
cccctctctccaggcaaatggg

SEQ ID NO: 67347 - DNA, 22 bp, synthetic construct
  misc_feature 1..22: note = chemically synthesized
  source 1..22: mol_type = other DNA
ccctctctccaggcaaatggga

SEQ ID NO: 67348 - DNA, 22 bp, synthetic construct
  misc_feature 1..22: note = chemically synthesized
  source 1..22: mol_type = other DNA
tctccaggcaaatgggagagac

SEQ ID NO: 67349 - DNA, 22 bp, synthetic construct
  misc_feature 1..22: note = chemically synthesized
  source 1..22: mol_type = other DNA
tccaggcaaatgggagagaccc

SEQ ID NO: 67350 - DNA, 22 bp, synthetic construct
  misc_feature 1..22: note = chemically synthesized
  source 1..22: mol_type = other DNA
caggcaaatgggagagaccctt

SEQ ID NO: 67351 - DNA, 22 bp, synthetic construct
  misc_feature 1..22: note = chemically synthesized
  source 1..22: mol_type = other DNA
tgaagtcaaggacaccgaggaa

SEQ ID NO: 67352 - DNA, 22 bp, synthetic construct
  misc_feature 1..22: note = chemically synthesized
  source 1..22: mol_type = other DNA
gaagtcaaggacaccgaggaag

SEQ ID NO: 67353 - DNA, 22 bp, synthetic construct
  misc_feature 1..22: note = chemically synthesized
  source 1..22: mol_type = other DNA
aagtcaaggacaccgaggaaga

SEQ ID NO: 67354 - DNA, 22 bp, synthetic construct
  misc_feature 1..22: note = chemically synthesized
  source 1..22: mol_type = other DNA
ccacgtggaccaggtgaccacc

SEQ ID NO: 67355 - DNA, 22 bp, synthetic construct
  misc_feature 1..22: note = chemically synthesized
  source 1..22: mol_type = other DNA
cacgtggaccaggtgaccaccg

SEQ ID NO: 67356 - DNA, 22 bp, synthetic construct
  misc_feature 1..22: note = chemically synthesized
  source 1..22: mol_type = other DNA
tgatgaagcgtttaggcatgtt

SEQ ID NO: 67357 - DNA, 22 bp, synthetic construct
  misc_feature 1..22: note = chemically synthesized
  source 1..22: mol_type = other DNA
aggcatgtttaacatccagcac

SEQ ID NO: 67358 - DNA, 22 bp, synthetic construct
  misc_feature 1..22: note = chemically synthesized
  source 1..22: mol_type = other DNA
ggcatgtttaacatccagcact

SEQ ID NO: 67359 - DNA, 22 bp, synthetic construct
  misc_feature 1..22: note = chemically synthesized
  source 1..22: mol_type = other DNA
aacatccagcactgtaagaagc

SEQ ID NO: 67360 - DNA, 22 bp, synthetic construct
  misc_feature 1..22: note = chemically synthesized
  source 1..22: mol_type = other DNA
acatccagcactgtaagaagct

SEQ ID NO: 67361 - DNA, 22 bp, synthetic construct
  misc_feature 1..22: note = chemically synthesized
  source 1..22: mol_type = other DNA
taagaagctgtccagctgggtg

SEQ ID NO: 67362 - DNA, 22 bp, synthetic construct
  misc_feature 1..22: note = chemically synthesized
  source 1..22: mol_type = other DNA
tccagctgggtgctgctgatga

SEQ ID NO: 67363 - DNA, 22 bp, synthetic construct
  misc_feature 1..22: note = chemically synthesized
  source 1..22: mol_type = other DNA
ggtgctgctgatgaaatacctg

SEQ ID NO: 67364 - DNA, 22 bp, synthetic construct
  misc_feature 1..22: note = chemically synthesized
  source 1..22: mol_type = other DNA
ctgatgaaatacctgggcaatg

SEQ ID NO: 67365 - DNA, 22 bp, synthetic construct
  misc_feature 1..22: note = chemically synthesized
  source 1..22: mol_type = other DNA
atgaaatacctgggcaatgcca

SEQ ID NO: 67366 - DNA, 22 bp, synthetic construct
  misc_feature 1..22: note = chemically synthesized
  source 1..22: mol_type = other DNA
ggcaatgccaccgccatcttct

SEQ ID NO: 67367 - DNA, 22 bp, synthetic construct
  misc_feature 1..22: note = chemically synthesized
  source 1..22: mol_type = other DNA
cttcctgcctgatgaggggaaa

SEQ ID NO: 67368 - DNA, 22 bp, synthetic construct
  misc_feature 1..22: note = chemically synthesized
  source 1..22: mol_type = other DNA
ttcctgcctgatgaggggaaac

SEQ ID NO: 67369 - DNA, 22 bp, synthetic construct
  misc_feature 1..22: note = chemically synthesized
  source 1..22: mol_type = other DNA
cctgcctgatgaggggaaacta

SEQ ID NO: 67370 - DNA, 22 bp, synthetic construct
  misc_feature 1..22: note = chemically synthesized
  source 1..22: mol_type = other DNA
ctgcctgatgaggggaaactac

SEQ ID NO: 67371 - DNA, 22 bp, synthetic construct
  misc_feature 1..22: note = chemically synthesized
  source 1..22: mol_type = other DNA
cctgatgaggggaaactacagc

SEQ ID NO: 67372 - DNA, 22 bp, synthetic construct
  misc_feature 1..22: note = chemically synthesized
  source 1..22: mol_type = other DNA
atgaggggaaactacagcacct

SEQ ID NO: 67373 - DNA, 22 bp, synthetic construct
  misc_feature 1..22: note = chemically synthesized
  source 1..22: mol_type = other DNA
cagcacctggaaaatgaactca

SEQ ID NO: 67374 - DNA, 22 bp, synthetic construct
  misc_feature 1..22: note = chemically synthesized
  source 1..22: mol_type = other DNA
gaaaatgaactcacccacgata

SEQ ID NO: 67375 - DNA, 22 bp, synthetic construct
  misc_feature 1..22: note = chemically synthesized
  source 1..22: mol_type = other DNA
acccacgatatcatcaccaagt

SEQ ID NO: 67376 - DNA, 22 bp, synthetic construct
  misc_feature 1..22: note = chemically synthesized
  source 1..22: mol_type = other DNA
ctggaaaatgaagacagaaggt

SEQ ID NO: 67377 - DNA, 22 bp, synthetic construct
  misc_feature 1..22: note = chemically synthesized
  source 1..22: mol_type = other DNA
gaaaatgaagacagaaggtgat

SEQ ID NO: 67378 - DNA, 22 bp, synthetic construct
  misc_feature 1..22: note = chemically synthesized
  source 1..22: mol_type = other DNA
cccaacctgagggtgaccaaga

SEQ ID NO: 67379 - DNA, 22 bp, synthetic construct
  misc_feature 1..22: note = chemically synthesized
  source 1..22: mol_type = other DNA
agggtgaccaagaagctgccca

SEQ ID NO: 67380 - DNA, 22 bp, synthetic construct
  misc_feature 1..22: note = chemically synthesized
  source 1..22: mol_type = other DNA
cccacacctcttagccatgttg

SEQ ID NO: 67381 - DNA, 22 bp, synthetic construct
  misc_feature 1..22: note = chemically synthesized
  source 1..22: mol_type = other DNA
ttagccatgttgggactgaggc

SEQ ID NO: 67382 - DNA, 22 bp, synthetic construct
  misc_feature 1..22: note = chemically synthesized
  source 1..22: mol_type = other DNA
agccatgttgggactgaggccc

SEQ ID NO: 67383 - DNA, 22 bp, synthetic construct
  misc_feature 1..22: note = chemically synthesized
  source 1..22: mol_type = other DNA
gccatgttgggactgaggccca

SEQ ID NO: 67384 - DNA, 22 bp, synthetic construct
  misc_feature 1..22: note = chemically synthesized
  source 1..22: mol_type = other DNA
ggactgaggcccatcaggactg

SEQ ID NO: 67385 - DNA, 22 bp, synthetic construct
  misc_feature 1..22: note = chemically synthesized
  source 1..22: mol_type = other DNA
aggcccatcaggactggccaga

SEQ ID NO: 67386 - DNA, 22 bp, synthetic construct
  misc_feature 1..22: note = chemically synthesized
  source 1..22: mol_type = other DNA
gccagagggctgaggagggtga

SEQ ID NO: 67387 - DNA, 22 bp, synthetic construct
  misc_feature 1..22: note = chemically synthesized
  source 1..22: mol_type = other DNA
aggagggtgaaccccacatccc

SEQ ID NO: 67388 - DNA, 22 bp, synthetic construct
  misc_feature 1..22: note = chemically synthesized
  source 1..22: mol_type = other DNA
ggtcactgctactctgtataaa

SEQ ID NO: 67389 - DNA, 22 bp, synthetic construct
  misc_feature 1..22: note = chemically synthesized
  source 1..22: mol_type = other DNA
ctactctgtataaacttggctt

SEQ ID NO: 67390 - DNA, 22 bp, synthetic construct
  misc_feature 1..22: note = chemically synthesized
  source 1..22: mol_type = other DNA
ctctgtataaacttggcttcca

SEQ ID NO: 67391 - DNA, 22 bp, synthetic construct
  misc_feature 1..22: note = chemically synthesized
  source 1..22: mol_type = other DNA
tgtataaacttggcttccagaa

SEQ ID NO: 67392 - DNA, 22 bp, synthetic construct
  misc_feature 1..22: note = chemically synthesized
  source 1..22: mol_type = other DNA
tataaacttggcttccagaatg

SEQ ID NO: 67393 - DNA, 22 bp, synthetic construct
  misc_feature 1..22: note = chemically synthesized
  source 1..22: mol_type = other DNA
ggcttccagaatgaggccacca

SEQ ID NO: 67394 - DNA, 22 bp, synthetic construct
  misc_feature 1..22: note = chemically synthesized
  source 1..22: mol_type = other DNA
gcttccagaatgaggccaccac

SEQ ID NO: 67395 - DNA, 22 bp, synthetic construct
  misc_feature 1..22: note = chemically synthesized
  source 1..22: mol_type = other DNA
ccagaatgaggccaccactgag

SEQ ID NO: 67396 - DNA, 22 bp, synthetic construct
  misc_feature 1..22: note = chemically synthesized
  source 1..22: mol_type = other DNA
cagaatgaggccaccactgagt

SEQ ID NO: 67397 - DNA, 22 bp, synthetic construct
  misc_feature 1..22: note = chemically synthesized
  source 1..22: mol_type = other DNA
agttcaggcagcgccatccatg

SEQ ID NO: 67398 - DNA, 22 bp, synthetic construct
  misc_feature 1..22: note = chemically synthesized
  source 1..22: mol_type = other DNA
aggcagcgccatccatgctcca

SEQ ID NO: 67399 - DNA, 22 bp, synthetic construct
  misc_feature 1..22: note = chemically synthesized
  source 1..22: mol_type = other DNA
catgaggaggacagtacccagg

SEQ ID NO: 67400 - DNA, 22 bp, synthetic construct
  misc_feature 1..22: note = chemically synthesized
  source 1..22: mol_type = other DNA
gtccctggggacttcccactcc

SEQ ID NO: 67401 - DNA, 22 bp, synthetic construct
  misc_feature 1..22: note = chemically synthesized
  source 1..22: mol_type = other DNA
gggacttcccactccagtgtgg

SEQ ID NO: 67402 - DNA, 22 bp, synthetic construct
  misc_feature 1..22: note = chemically synthesized
  source 1..22: mol_type = other DNA
cccactccagtgtggacactgt

SEQ ID NO: 67403 - DNA, 22 bp, synthetic construct
  misc_feature 1..22: note = chemically synthesized
  source 1..22: mol_type = other DNA
ccactccagtgtggacactgtc

SEQ ID NO: 67404 - DNA, 22 bp, synthetic construct
  misc_feature 1..22: note = chemically synthesized
  source 1..22: mol_type = other DNA
cagtgtggacactgtcccttcc

SEQ ID NO: 67405 - DNA, 22 bp, synthetic construct
  misc_feature 1..22: note = chemically synthesized
  source 1..22: mol_type = other DNA
tcccttcccaatatccagtgcc

SEQ ID NO: 67406 - DNA, 22 bp, synthetic construct
  misc_feature 1..22: note = chemically synthesized
  source 1..22: mol_type = other DNA
cccaatatccagtgcccagggc

SEQ ID NO: 67407 - DNA, 22 bp, synthetic construct
  misc_feature 1..22: note = chemically synthesized
  source 1..22: mol_type = other DNA
ccaatatccagtgcccagggca

SEQ ID NO: 67408 - DNA, 22 bp, synthetic construct
  misc_feature 1..22: note = chemically synthesized
  source 1..22: mol_type = other DNA
tggcagaaccaaaaaggaacag

SEQ ID NO: 67409 - DNA, 22 bp, synthetic construct
  misc_feature 1..22: note = chemically synthesized
  source 1..22: mol_type = other DNA
gcagaaccaaaaaggaacagat

SEQ ID NO: 67410 - DNA, 22 bp, synthetic construct
  misc_feature 1..22: note = chemically synthesized
  source 1..22: mol_type = other DNA
cctggcaaaggcagcagtggag

SEQ ID NO: 67411 - DNA, 22 bp, synthetic construct
  misc_feature 1..22: note = chemically synthesized
  source 1..22: mol_type = other DNA
ctggcaaaggcagcagtggagt

SEQ ID NO: 67412 - DNA, 22 bp, synthetic construct
  misc_feature 1..22: note = chemically synthesized
  source 1..22: mol_type = other DNA
gcaaaggcagcagtggagtgtg

SEQ ID NO: 67413 - DNA, 22 bp, synthetic construct
  misc_feature 1..22: note = chemically synthesized
  source 1..22: mol_type = other DNA
aagggtagaatgtccctggggg

SEQ ID NO: 67414 - DNA, 22 bp, synthetic construct
  misc_feature 1..22: note = chemically synthesized
  source 1..22: mol_type = other DNA
gggggacgggggaagagcctgt

SEQ ID NO: 67415 - DNA, 22 bp, synthetic construct
  misc_feature 1..22: note = chemically synthesized
  source 1..22: mol_type = other DNA
tgtggcaaggcccagaaaagca

SEQ ID NO: 67416 - DNA, 22 bp, synthetic construct
  misc_feature 1..22: note = chemically synthesized
  source 1..22: mol_type = other DNA
ggaattggaacagccaggccat

SEQ ID NO: 67417 - DNA, 22 bp, synthetic construct
  misc_feature 1..22: note = chemically synthesized
  source 1..22: mol_type = other DNA
gaacagccaggccatgttcgca

SEQ ID NO: 67418 - DNA, 22 bp, synthetic construct
  misc_feature 1..22: note = chemically synthesized
  source 1..22: mol_type = other DNA
gcagaaggcttgcgtttctctg

SEQ ID NO: 67419 - DNA, 22 bp, synthetic construct
  misc_feature 1..22: note = chemically synthesized
  source 1..22: mol_type = other DNA
gcgtttctctgtcactttatcg

SEQ ID NO: 67420 - DNA, 22 bp, synthetic construct
  misc_feature 1..22: note = chemically synthesized
  source 1..22: mol_type = other DNA
cgtttctctgtcactttatcgg

SEQ ID NO: 67421 - DNA, 22 bp, synthetic construct
  misc_feature 1..22: note = chemically synthesized
  source 1..22: mol_type = other DNA
ctctgtcactttatcggtgctg

SEQ ID NO: 67422 - DNA, 22 bp, synthetic construct
  misc_feature 1..22: note = chemically synthesized
  source 1..22: mol_type = other DNA
tctgtcactttatcggtgctgt

SEQ ID NO: 67423 - DNA, 22 bp, synthetic construct
  misc_feature 1..22: note = chemically synthesized
  source 1..22: mol_type = other DNA
tgtcactttatcggtgctgtta

SEQ ID NO: 67424 - DNA, 22 bp, synthetic construct
  misc_feature 1..22: note = chemically synthesized
  source 1..22: mol_type = other DNA
tcactttatcggtgctgttaga

SEQ ID NO: 67425 - DNA, 22 bp, synthetic construct
  misc_feature 1..22: note = chemically synthesized
  source 1..22: mol_type = other DNA
tatcggtgctgttagattgggt

SEQ ID NO: 67426 - DNA, 22 bp, synthetic construct
  misc_feature 1..22: note = chemically synthesized
  source 1..22: mol_type = other DNA
atcggtgctgttagattgggtg

SEQ ID NO: 67427 - DNA, 22 bp, synthetic construct
  misc_feature 1..22: note = chemically synthesized
  source 1..22: mol_type = other DNA
tcggtgctgttagattgggtgt

SEQ ID NO: 67428 - DNA, 22 bp, synthetic construct
  misc_feature 1..22: note = chemically synthesized
  source 1..22: mol_type = other DNA
ttagattgggtgtcctgtagta

SEQ ID NO: 67429 - DNA, 22 bp, synthetic construct
  misc_feature 1..22: note = chemically synthesized
  source 1..22: mol_type = other DNA
gattgggtgtcctgtagtaagt

SEQ ID NO: 67430 - DNA, 22 bp, synthetic construct
  misc_feature 1..22: note = chemically synthesized
  source 1..22: mol_type = other DNA
ggtgtcctgtagtaagtgatac

SEQ ID NO: 67431 - DNA, 22 bp, synthetic construct
  misc_feature 1..22: note = chemically synthesized
  source 1..22: mol_type = other DNA
tagtaagtgatacttaaacatg

SEQ ID NO: 67432 - DNA, 22 bp, synthetic construct
  misc_feature 1..22: note = chemically synthesized
  source 1..22: mol_type = other DNA
aaacatgagccacacattagtg

SEQ ID NO: 67433 - DNA, 22 bp, synthetic construct
  misc_feature 1..22: note = chemically synthesized
  source 1..22: mol_type = other DNA
aacatgagccacacattagtgt

SEQ ID NO: 67434 - DNA, 22 bp, synthetic construct
  misc_feature 1..22: note = chemically synthesized
  source 1..22: mol_type = other DNA
gtgtatgtgtgtgcattcgtga

SEQ ID NO: 67435 - DNA, 22 bp, synthetic construct
  misc_feature 1..22: note = chemically synthesized
  source 1..22: mol_type = other DNA
gtgattatgcccatgccctgct

SEQ ID NO: 67436 - DNA, 22 bp, synthetic construct
  misc_feature 1..22: note = chemically synthesized
  source 1..22: mol_type = other DNA
tgcccatgccctgctgatctag

SEQ ID NO: 67437 - DNA, 22 bp, synthetic construct
  misc_feature 1..22: note = chemically synthesized
  source 1..22: mol_type = other DNA
ctgatctagttcgttttgtaca

SEQ ID NO: 67438 - DNA, 22 bp, synthetic construct
  misc_feature 1..22: note = chemically synthesized
  source 1..22: mol_type = other DNA
atctagttcgttttgtacactg

SEQ ID NO: 67439 - DNA, 22 bp, synthetic construct
  misc_feature 1..22: note = chemically synthesized
  source 1..22: mol_type = other DNA
gttcgttttgtacactgtaaaa

SEQ ID NO: 67440 - DNA, 22 bp, synthetic construct
  misc_feature 1..22: note = chemically synthesized
  source 1..22: mol_type = other DNA
gttttgtacactgtaaaaccaa

SEQ ID NO: 67441 - DNA, 22 bp, synthetic construct
  misc_feature 1..22: note = chemically synthesized
  source 1..22: mol_type = other DNA
tgtacactgtaaaaccaagatg

SEQ ID NO: 67442 - DNA, 22 bp, synthetic construct
  misc_feature 1..22: note = chemically synthesized
  source 1..22: mol_type = other DNA
gtacactgtaaaaccaagatga

SEQ ID NO: 67443 - DNA, 22 bp, synthetic construct
  misc_feature 1..22: note = chemically synthesized
  source 1..22: mol_type = other DNA
tacactgtaaaaccaagatgaa

SEQ ID NO: 67444 - DNA, 22 bp, synthetic construct
  misc_feature 1..22: note = chemically synthesized
  source 1..22: mol_type = other DNA
taaaaccaagatgaaaatacaa

SEQ ID NO: 67445 - DNA, 22 bp, synthetic construct
  misc_feature 1..22: note = chemically synthesized
  source 1..22: mol_type = other DNA
ataataggaatcgaggctggaa

SEQ ID NO: 67446 - DNA, 22 bp, synthetic construct
  misc_feature 1..22: note = chemically synthesized
  source 1..22: mol_type = other DNA
gaatttctctgttccatgccag

SEQ ID NO: 67447 - DNA, 22 bp, synthetic construct
  misc_feature 1..22: note = chemically synthesized
  source 1..22: mol_type = other DNA
ctctgttccatgccagcacctc

SEQ ID NO: 67448 - DNA, 22 bp, synthetic construct
  misc_feature 1..22: note = chemically synthesized
  source 1..22: mol_type = other DNA
tctgttccatgccagcacctcc

SEQ ID NO: 67449 - DNA, 22 bp, synthetic construct
  misc_feature 1..22: note = chemically synthesized
  source 1..22: mol_type = other DNA
tgttccatgccagcacctcctg

SEQ ID NO: 67450 - DNA, 22 bp, synthetic construct
  misc_feature 1..22: note = chemically synthesized
  source 1..22: mol_type = other DNA
ttccatgccagcacctcctgag

SEQ ID NO: 67451 - DNA, 22 bp, synthetic construct
  misc_feature 1..22: note = chemically synthesized
  source 1..22: mol_type = other DNA
catgccagcacctcctgaggtc

SEQ ID NO: 67452 - DNA, 22 bp, synthetic construct
  misc_feature 1..22: note = chemically synthesized
  source 1..22: mol_type = other DNA
ctgaggtctctgctccaggggt

SEQ ID NO: 67453 - DNA, 22 bp, synthetic construct
  misc_feature 1..22: note = chemically synthesized
  source 1..22: mol_type = other DNA
aggtctctgctccaggggttga

SEQ ID NO: 67454 - DNA, 22 bp, synthetic construct
  misc_feature 1..22: note = chemically synthesized
  source 1..22: mol_type = other DNA
tgctccaggggttgagaaagaa

SEQ ID NO: 67455 - DNA, 22 bp, synthetic construct
  misc_feature 1..22: note = chemically synthesized
  source 1..22: mol_type = other DNA
ctccaggggttgagaaagaaca

SEQ ID NO: 67456 - DNA, 22 bp, synthetic construct
  misc_feature 1..22: note = chemically synthesized
  source 1..22: mol_type = other DNA
caggggttgagaaagaacaaag

SEQ ID NO: 67457 - DNA, 22 bp, synthetic construct
  misc_feature 1..22: note = chemically synthesized
  source 1..22: mol_type = other DNA
agaaagaacaaagaggctgaga

SEQ ID NO: 67458 - DNA, 22 bp, synthetic construct
  misc_feature 1..22: note = chemically synthesized
  source 1..22: mol_type = other DNA
agagggtaacggatcagagagc

SEQ ID NO: 67459 - DNA, 22 bp, synthetic construct
  misc_feature 1..22: note = chemically synthesized
  source 1..22: mol_type = other DNA
cccgctcacaccagaccctgct

SEQ ID NO: 67460 - DNA, 22 bp, synthetic construct
  misc_feature 1..22: note = chemically synthesized
  source 1..22: mol_type = other DNA
acaccagaccctgctcagggtg

SEQ ID NO: 67461 - DNA, 22 bp, synthetic construct
  misc_feature 1..22: note = chemically synthesized
  source 1..22: mol_type = other DNA
ctcagggtggcattgtctcccc

SEQ ID NO: 67462 - DNA, 22 bp, synthetic construct
  misc_feature 1..22: note = chemically synthesized
  source 1..22: mol_type = other DNA
agggtggcattgtctccccatg

SEQ ID NO: 67463 - DNA, 22 bp, synthetic construct
  misc_feature 1..22: note = chemically synthesized
  source 1..22: mol_type = other DNA
tctccccatggaaaaccagaga

SEQ ID NO: 67464 - DNA, 22 bp, synthetic construct
  misc_feature 1..22: note = chemically synthesized
  source 1..22: mol_type = other DNA
cccatggaaaaccagagaggag

SEQ ID NO: 67465 - DNA, 22 bp, synthetic construct
  misc_feature 1..22: note = chemically synthesized
  source 1..22: mol_type = other DNA
agcctggtgtggtcactcttct

SEQ ID NO: 67466 - DNA, 22 bp, synthetic construct
  misc_feature 1..22: note = chemically synthesized
  source 1..22: mol_type = other DNA
gtgtggtcactcttctcttatc

SEQ ID NO: 67467 - DNA, 22 bp, synthetic construct
  misc_feature 1..22: note = chemically synthesized
  source 1..22: mol_type = other DNA
ttctcttatccactaaacggtt

SEQ ID NO: 67468 - DNA, 22 bp, synthetic construct
  misc_feature 1..22: note = chemically synthesized
  source 1..22: mol_type = other DNA
ctcttatccactaaacggttgt

SEQ ID NO: 67469 - DNA, 22 bp, synthetic construct
  misc_feature 1..22: note = chemically synthesized
  source 1..22: mol_type = other DNA
tcttatccactaaacggttgtc

SEQ ID NO: 67470 - DNA, 22 bp, synthetic construct
  misc_feature 1..22: note = chemically synthesized
  source 1..22: mol_type = other DNA
ttatccactaaacggttgtcac

SEQ ID NO: 67471 - DNA, 22 bp, synthetic construct
  misc_feature 1..22: note = chemically synthesized
  source 1..22: mol_type = other DNA
atccactaaacggttgtcactg

SEQ ID NO: 67472 - DNA, 22 bp, synthetic construct
  misc_feature 1..22: note = chemically synthesized
  source 1..22: mol_type = other DNA
tccactaaacggttgtcactgg

SEQ ID NO: 67473 - DNA, 22 bp, synthetic construct
  misc_feature 1..22: note = chemically synthesized
  source 1..22: mol_type = other DNA
aacggttgtcactgggcactgc

SEQ ID NO: 67474 - DNA, 22 bp, synthetic construct
  misc_feature 1..22: note = chemically synthesized
  source 1..22: mol_type = other DNA
tcactgggcactgccaccagcc

SEQ ID NO: 67475 - DNA, 22 bp, synthetic construct
  misc_feature 1..22: note = chemically synthesized
  source 1..22: mol_type = other DNA
ggcactgccaccagccccgtgt

SEQ ID NO: 67476 - DNA, 22 bp, synthetic construct
  misc_feature 1..22: note = chemically synthesized
  source 1..22: mol_type = other DNA
ccaccagccccgtgtttctctg

SEQ ID NO: 67477 - DNA, 22 bp, synthetic construct
  misc_feature 1..22: note = chemically synthesized
  source 1..22: mol_type = other DNA
ctctgggtgtagggccctgggg

SEQ ID NO: 67478 - DNA, 22 bp, synthetic construct
  misc_feature 1..22: note = chemically synthesized
  source 1..22: mol_type = other DNA
tctgggtgtagggccctgggga

SEQ ID NO: 67479 - DNA, 22 bp, synthetic construct
  misc_feature 1..22: note = chemically synthesized
  source 1..22: mol_type = other DNA
tgggtgtagggccctggggatg

SEQ ID NO: 67480 - DNA, 22 bp, synthetic construct
  misc_feature 1..22: note = chemically synthesized
  source 1..22: mol_type = other DNA
ggtgtagggccctggggatgtt

SEQ ID NO: 67481 - DNA, 22 bp, synthetic construct
  misc_feature 1..22: note = chemically synthesized
  source 1..22: mol_type = other DNA
gggatgttacaggctgggggcc

SEQ ID NO: 67482 - DNA, 22 bp, synthetic construct
  misc_feature 1..22: note = chemically synthesized
  source 1..22: mol_type = other DNA
caggctgggggccaggtgaccc

SEQ ID NO: 67483 - DNA, 22 bp, synthetic construct
  misc_feature 1..22: note = chemically synthesized
  source 1..22: mol_type = other DNA
ggggccaggtgacccaacacta

SEQ ID NO: 67484 - DNA, 22 bp, synthetic construct
  misc_feature 1..22: note = chemically synthesized
  source 1..22: mol_type = other DNA
cagggcaagatgagacaggctt

SEQ ID NO: 67485 - DNA, 22 bp, synthetic construct
  misc_feature 1..22: note = chemically synthesized
  source 1..22: mol_type = other DNA
ccaggacacctagaatatcaga

SEQ ID NO: 67486 - DNA, 22 bp, synthetic construct
  misc_feature 1..22: note = chemically synthesized
  source 1..22: mol_type = other DNA
caggacacctagaatatcagag

SEQ ID NO: 67487 - DNA, 22 bp, synthetic construct
  misc_feature 1..22: note = chemically synthesized
  source 1..22: mol_type = other DNA
gaatatcagaggaggtggcatt

SEQ ID NO: 67488 - DNA, 22 bp, synthetic construct
  misc_feature 1..22: note = chemically synthesized
  source 1..22: mol_type = other DNA
caagcttttgtgattcattcga

SEQ ID NO: 67489 - DNA, 22 bp, synthetic construct
  misc_feature 1..22: note = chemically synthesized
  source 1..22: mol_type = other DNA
aagcttttgtgattcattcgat

SEQ ID NO: 67490 - DNA, 22 bp, synthetic construct
  misc_feature 1..22: note = chemically synthesized
  source 1..22: mol_type = other DNA
ttgtgattcattcgatgttaac

SEQ ID NO: 67491 - DNA, 22 bp, synthetic construct
  misc_feature 1..22: note = chemically synthesized
  source 1..22: mol_type = other DNA
tgtgattcattcgatgttaaca

SEQ ID NO: 67492 - DNA, 22 bp, synthetic construct
  misc_feature 1..22: note = chemically synthesized
  source 1..22: mol_type = other DNA
gtgattcattcgatgttaacat

SEQ ID NO: 67493 - DNA, 22 bp, synthetic construct
  misc_feature 1..22: note = chemically synthesized
  source 1..22: mol_type = other DNA
tgattcattcgatgttaacatt

SEQ ID NO: 67494 - DNA, 22 bp, synthetic construct
  misc_feature 1..22: note = chemically synthesized
  source 1..22: mol_type = other DNA
attcgatgttaacattctttga

SEQ ID NO: 67495 - DNA, 22 bp, synthetic construct
  misc_feature 1..22: note = chemically synthesized
  source 1..22: mol_type = other DNA
gatgttaacattctttgactca

SEQ ID NO: 67496 - DNA, 22 bp, synthetic construct
  misc_feature 1..22: note = chemically synthesized
  source 1..22: mol_type = other DNA
acattctttgactcaatgtaga

SEQ ID NO: 67497 - DNA, 22 bp, synthetic construct
  misc_feature 1..22: note = chemically synthesized
  source 1..22: mol_type = other DNA
tttgactcaatgtagaagagct

SEQ ID NO: 67498 - DNA, 22 bp, synthetic construct
  misc_feature 1..22: note = chemically synthesized
  source 1..22: mol_type = other DNA
tgactcaatgtagaagagctaa

SEQ ID NO: 67499 - DNA, 22 bp, synthetic construct
  misc_feature 1..22: note = chemically synthesized
  source 1..22: mol_type = other DNA
gactcaatgtagaagagctaaa

SEQ ID NO: 67500 - DNA, 22 bp, synthetic construct
  misc_feature 1..22: note = chemically synthesized
  source 1..22: mol_type = other DNA
actcaatgtagaagagctaaaa

SEQ ID NO: 67501 - DNA, 22 bp, synthetic construct
  misc_feature 1..22: note = chemically synthesized
  source 1..22: mol_type = other DNA
aatgtagaagagctaaaagtag

SEQ ID NO: 67502 - DNA, 22 bp, synthetic construct
  misc_feature 1..22: note = chemically synthesized
  source 1..22: mol_type = other DNA
aaagtagaacaaaccaaagccg

SEQ ID NO: 67503 - DNA, 22 bp, synthetic construct
  misc_feature 1..22: note = chemically synthesized
  source 1..22: mol_type = other DNA
ccatcttagtgtgggtggagga

SEQ ID NO: 67504 - DNA, 22 bp, synthetic construct
  misc_feature 1..22: note = chemically synthesized
  source 1..22: mol_type = other DNA
agtgtgggtggaggacacagga

SEQ ID NO: 67505 - DNA, 22 bp, synthetic construct
  misc_feature 1..22: note = chemically synthesized
  source 1..22: mol_type = other DNA
gtgtgggtggaggacacaggag

SEQ ID NO: 67506 - DNA, 22 bp, synthetic construct
  misc_feature 1..22: note = chemically synthesized
  source 1..22: mol_type = other DNA
gcactgtggtgggtcccagaag

SEQ ID NO: 67507 - DNA, 22 bp, synthetic construct
  misc_feature 1..22: note = chemically synthesized
  source 1..22: mol_type = other DNA
cactgtggtgggtcccagaaga

SEQ ID NO: 67508 - DNA, 22 bp, synthetic construct
  misc_feature 1..22: note = chemically synthesized
  source 1..22: mol_type = other DNA
tggtgggtcccagaagaacaag

SEQ ID NO: 67509 - DNA, 22 bp, synthetic construct
  misc_feature 1..22: note = chemically synthesized
  source 1..22: mol_type = other DNA
tgccatgccttgaatttctttt

SEQ ID NO: 67510 - DNA, 22 bp, synthetic construct
  misc_feature 1..22: note = chemically synthesized
  source 1..22: mol_type = other DNA
gaatttcttttctgcacgacag

SEQ ID NO: 67511 - DNA, 22 bp, synthetic construct
  misc_feature 1..22: note = chemically synthesized
  source 1..22: mol_type = other DNA
aatttcttttctgcacgacagg

SEQ ID NO: 67512 - DNA, 22 bp, synthetic construct
  misc_feature 1..22: note = chemically synthesized
  source 1..22: mol_type = other DNA
cttttctgcacgacaggtctgc

SEQ ID NO: 67513 - DNA, 22 bp, synthetic construct
  misc_feature 1..22: note = chemically synthesized
  source 1..22: mol_type = other DNA
ttttctgcacgacaggtctgcc

SEQ ID NO: 67514 - DNA, 22 bp, synthetic construct
  misc_feature 1..22: note = chemically synthesized
  source 1..22: mol_type = other DNA
ttctgcacgacaggtctgccag

SEQ ID NO: 67515 - DNA, 22 bp, synthetic construct
  misc_feature 1..22: note = chemically synthesized
  source 1..22: mol_type = other DNA
tctgcacgacaggtctgccagc

SEQ ID NO: 67516 - DNA, 22 bp, synthetic construct
  misc_feature 1..22: note = chemically synthesized
  source 1..22: mol_type = other DNA
ctgcacgacaggtctgccagct

SEQ ID NO: 67517 - DNA, 22 bp, synthetic construct
  misc_feature 1..22: note = chemically synthesized
  source 1..22: mol_type = other DNA
tgcacgacaggtctgccagctt

SEQ ID NO: 67518 - DNA, 22 bp, synthetic construct
  misc_feature 1..22: note = chemically synthesized
  source 1..22: mol_type = other DNA
cacgacaggtctgccagcttac

SEQ ID NO: 67519 - DNA, 22 bp, synthetic construct
  misc_feature 1..22: note = chemically synthesized
  source 1..22: mol_type = other DNA
ccagcttacatttacccaaact

SEQ ID NO: 67520 - DNA, 22 bp, synthetic construct
  misc_feature 1..22: note = chemically synthesized
  source 1..22: mol_type = other DNA
acatttacccaaactgtccatt

SEQ ID NO: 67521 - DNA, 22 bp, synthetic construct
  misc_feature 1..22: note = chemically synthesized
  source 1..22: mol_type = other DNA
catttacccaaactgtccatta

SEQ ID NO: 67522 - DNA, 22 bp, synthetic construct
  misc_feature 1..22: note = chemically synthesized
  source 1..22: mol_type = other DNA
acccaaactgtccattactgga

SEQ ID NO: 67523 - DNA, 22 bp, synthetic construct
  misc_feature 1..22: note = chemically synthesized
  source 1..22: mol_type = other DNA
cccaaactgtccattactggaa

SEQ ID NO: 67524 - DNA, 22 bp, synthetic construct
  misc_feature 1..22: note = chemically synthesized
  source 1..22: mol_type = other DNA
tccattactggaacctatgatc

SEQ ID NO: 67525 - DNA, 22 bp, synthetic construct
  misc_feature 1..22: note = chemically synthesized
  source 1..22: mol_type = other DNA
ctggaacctatgatctgaagag

SEQ ID NO: 67526 - DNA, 22 bp, synthetic construct
  misc_feature 1..22: note = chemically synthesized
  source 1..22: mol_type = other DNA
gaacctatgatctgaagagcgt

SEQ ID NO: 67527 - DNA, 22 bp, synthetic construct
  misc_feature 1..22: note = chemically synthesized
  source 1..22: mol_type = other DNA
tgatctgaagagcgtcctgggt

SEQ ID NO: 67528 - DNA, 22 bp, synthetic construct
  misc_feature 1..22: note = chemically synthesized
  source 1..22: mol_type = other DNA
aagagcgtcctgggtcaactgg

SEQ ID NO: 67529 - DNA, 22 bp, synthetic construct
  misc_feature 1..22: note = chemically synthesized
  source 1..22: mol_type = other DNA
ggtcaactgggcatcactaagg

SEQ ID NO: 67530 - DNA, 22 bp, synthetic construct
  misc_feature 1..22: note = chemically synthesized
  source 1..22: mol_type = other DNA
ggcatcactaaggtcttcagca

SEQ ID NO: 67531 - DNA, 22 bp, synthetic construct
  misc_feature 1..22: note = chemically synthesized
  source 1..22: mol_type = other DNA
aggtcttcagcaatggggctga

SEQ ID NO: 67532 - DNA, 22 bp, synthetic construct
  misc_feature 1..22: note = chemically synthesized
  source 1..22: mol_type = other DNA
cagcaatggggctgacctctcc

SEQ ID NO: 67533 - DNA, 22 bp, synthetic construct
  misc_feature 1..22: note = chemically synthesized
  source 1..22: mol_type = other DNA
agcaatggggctgacctctccg

SEQ ID NO: 67534 - DNA, 22 bp, synthetic construct
  misc_feature 1..22: note = chemically synthesized
  source 1..22: mol_type = other DNA
acctctccggggtcacagagga

SEQ ID NO: 67535 - DNA, 22 bp, synthetic construct
  misc_feature 1..22: note = chemically synthesized
  source 1..22: mol_type = other DNA
tccggggtcacagaggaggcac

SEQ ID NO: 67536 - DNA, 22 bp, synthetic construct
  misc_feature 1..22: note = chemically synthesized
  source 1..22: mol_type = other DNA
cggggtcacagaggaggcaccc

SEQ ID NO: 67537 - DNA, 22 bp, synthetic construct
  misc_feature 1..22: note = chemically synthesized
  source 1..22: mol_type = other DNA
aagctctccaaggtgagatcac

SEQ ID NO: 67538 - DNA, 22 bp, synthetic construct
  misc_feature 1..22: note = chemically synthesized
  source 1..22: mol_type = other DNA
tccaaggtgagatcaccctgac

SEQ ID NO: 67539 - DNA, 22 bp, synthetic construct
  misc_feature 1..22: note = chemically synthesized
  source 1..22: mol_type = other DNA
caaggtgagatcaccctgacga

SEQ ID NO: 67540 - DNA, 22 bp, synthetic construct
  misc_feature 1..22: note = chemically synthesized
  source 1..22: mol_type = other DNA
acgaccttgttgcaccctggta

SEQ ID NO: 67541 - DNA, 22 bp, synthetic construct
  misc_feature 1..22: note = chemically synthesized
  source 1..22: mol_type = other DNA
gttgcaccctggtatctgtagg

SEQ ID NO: 67542 - DNA, 22 bp, synthetic construct
  misc_feature 1..22: note = chemically synthesized
  source 1..22: mol_type = other DNA
ttgcaccctggtatctgtaggg

SEQ ID NO: 67543 - DNA, 22 bp, synthetic construct
  misc_feature 1..22: note = chemically synthesized
  source 1..22: mol_type = other DNA
caccctggtatctgtagggaag

SEQ ID NO: 67544 - DNA, 22 bp, synthetic construct
  misc_feature 1..22: note = chemically synthesized
  source 1..22: mol_type = other DNA
gtatctgtagggaagaatgtgt

SEQ ID NO: 67545 - DNA, 22 bp, synthetic construct
  misc_feature 1..22: note = chemically synthesized
  source 1..22: mol_type = other DNA
tagggaagaatgtgtgggggct

SEQ ID NO: 67546 - DNA, 22 bp, synthetic construct
  misc_feature 1..22: note = chemically synthesized
  source 1..22: mol_type = other DNA
cagctctgtcctgaggctgagg

SEQ ID NO: 67547 - DNA, 22 bp, synthetic construct
  misc_feature 1..22: note = chemically synthesized
  source 1..22: mol_type = other DNA
tgtcctgaggctgaggaagggg

SEQ ID NO: 67548 - DNA, 22 bp, synthetic construct
  misc_feature 1..22: note = chemically synthesized
  source 1..22: mol_type = other DNA
tcctgaggctgaggaaggggcc

SEQ ID NO: 67549 - DNA, 22 bp, synthetic construct
  misc_feature 1..22: note = chemically synthesized
  source 1..22: mol_type = other DNA
aggctgaggaaggggccgaggg

SEQ ID NO: 67550 - DNA, 22 bp, synthetic construct
  misc_feature 1..22: note = chemically synthesized
  source 1..22: mol_type = other DNA
aggaaggggccgagggaaacaa

SEQ ID NO: 67551 - DNA, 22 bp, synthetic construct
  misc_feature 1..22: note = chemically synthesized
  source 1..22: mol_type = other DNA
agctcctgaagatgcccgtgat

SEQ ID NO: 67552 - DNA, 22 bp, synthetic construct
  misc_feature 1..22: note = chemically synthesized
  source 1..22: mol_type = other DNA
ctgaagatgcccgtgattcact

SEQ ID NO: 67553 - DNA, 22 bp, synthetic construct
  misc_feature 1..22: note = chemically synthesized
  source 1..22: mol_type = other DNA
aagatgcccgtgattcactgac

SEQ ID NO: 67554 - DNA, 22 bp, synthetic construct
  misc_feature 1..22: note = chemically synthesized
  source 1..22: mol_type = other DNA
actgacacgggacgtggtcaaa

SEQ ID NO: 67555 - DNA, 22 bp, synthetic construct
  misc_feature 1..22: note = chemically synthesized
  source 1..22: mol_type = other DNA
acacgggacgtggtcaaacagc

SEQ ID NO: 67556 - DNA, 22 bp, synthetic construct
  misc_feature 1..22: note = chemically synthesized
  source 1..22: mol_type = other DNA
ctgtgcagctggcactttcggg

SEQ ID NO: 67557 - DNA, 22 bp, synthetic construct
  misc_feature 1..22: note = chemically synthesized
  source 1..22: mol_type = other DNA
tgcagctggcactttcggggcc

SEQ ID NO: 67558 - DNA, 22 bp, synthetic construct
  misc_feature 1..22: note = chemically synthesized
  source 1..22: mol_type = other DNA
gcactttcggggcctcccttga

SEQ ID NO: 67559 - DNA, 22 bp, synthetic construct
  misc_feature 1..22: note = chemically synthesized
  source 1..22: mol_type = other DNA
tcggggcctcccttgaggttgt

SEQ ID NO: 67560 - DNA, 22 bp, synthetic construct
  misc_feature 1..22: note = chemically synthesized
  source 1..22: mol_type = other DNA
cggggcctcccttgaggttgtg

SEQ ID NO: 67561 - DNA, 22 bp, synthetic construct
  misc_feature 1..22: note = chemically synthesized
  source 1..22: mol_type = other DNA
ggggcctcccttgaggttgtgt

SEQ ID NO: 67562 - DNA, 22 bp, synthetic construct
  misc_feature 1..22: note = chemically synthesized
  source 1..22: mol_type = other DNA
ccttgaggttgtgtcactgacc

SEQ ID NO: 67563 - DNA, 22 bp, synthetic construct
  misc_feature 1..22: note = chemically synthesized
  source 1..22: mol_type = other DNA
gaggttgtgtcactgaccctga

SEQ ID NO: 67564 - DNA, 22 bp, synthetic construct
  misc_feature 1..22: note = chemically synthesized
  source 1..22: mol_type = other DNA
aggttgtgtcactgaccctgaa

SEQ ID NO: 67565 - DNA, 22 bp, synthetic construct
  misc_feature 1..22: note = chemically synthesized
  source 1..22: mol_type = other DNA
tgtcactgaccctgaatttcaa

SEQ ID NO: 67566 - DNA, 22 bp, synthetic construct
  misc_feature 1..22: note = chemically synthesized
  source 1..22: mol_type = other DNA
accctgaatttcaactttgccc

SEQ ID NO: 67567 - DNA, 22 bp, synthetic construct
  misc_feature 1..22: note = chemically synthesized
  source 1..22: mol_type = other DNA
aatttcaactttgcccaagacc

SEQ ID NO: 67568 - DNA, 22 bp, synthetic construct
  misc_feature 1..22: note = chemically synthesized
  source 1..22: mol_type = other DNA
caactttgcccaagaccttcta

SEQ ID NO: 67569 - DNA, 22 bp, synthetic construct
  misc_feature 1..22: note = chemically synthesized
  source 1..22: mol_type = other DNA
aactttgcccaagaccttctag

SEQ ID NO: 67570 - DNA, 22 bp, synthetic construct
  misc_feature 1..22: note = chemically synthesized
  source 1..22: mol_type = other DNA
tgcccaagaccttctagacatt

SEQ ID NO: 67571 - DNA, 22 bp, synthetic construct
  misc_feature 1..22: note = chemically synthesized
  source 1..22: mol_type = other DNA
gcccaagaccttctagacattg

SEQ ID NO: 67572 - DNA, 22 bp, synthetic construct
  misc_feature 1..22: note = chemically synthesized
  source 1..22: mol_type = other DNA
cccaagaccttctagacattgg

SEQ ID NO: 67573 - DNA, 22 bp, synthetic construct
  misc_feature 1..22: note = chemically synthesized
  source 1..22: mol_type = other DNA
ctagacattgggccttgattta

SEQ ID NO: 67574 - DNA, 22 bp, synthetic construct
  misc_feature 1..22: note = chemically synthesized
  source 1..22: mol_type = other DNA
tagacattgggccttgatttat

SEQ ID NO: 67575 - DNA, 22 bp, synthetic construct
  misc_feature 1..22: note = chemically synthesized
  source 1..22: mol_type = other DNA
gacattgggccttgatttatcc

SEQ ID NO: 67576 - DNA, 22 bp, synthetic construct
  misc_feature 1..22: note = chemically synthesized
  source 1..22: mol_type = other DNA
ggccttgatttatccatactga

SEQ ID NO: 67577 - DNA, 22 bp, synthetic construct
  misc_feature 1..22: note = chemically synthesized
  source 1..22: mol_type = other DNA
gatttatccatactgacacaga

SEQ ID NO: 67578 - DNA, 22 bp, synthetic construct
  misc_feature 1..22: note = chemically synthesized
  source 1..22: mol_type = other DNA
atttatccatactgacacagaa

SEQ ID NO: 67579 - DNA, 22 bp, synthetic construct
  misc_feature 1..22: note = chemically synthesized
  source 1..22: mol_type = other DNA
atccatactgacacagaaaggt

SEQ ID NO: 67580 - DNA, 22 bp, synthetic construct
  misc_feature 1..22: note = chemically synthesized
  source 1..22: mol_type = other DNA
tccatactgacacagaaaggtt

SEQ ID NO: 67581 - DNA, 22 bp, synthetic construct
  misc_feature 1..22: note = chemically synthesized
  source 1..22: mol_type = other DNA
acacagaaaggtttgggctaag

SEQ ID NO: 67582 - DNA, 22 bp, synthetic construct
  misc_feature 1..22: note = chemically synthesized
  source 1..22: mol_type = other DNA
gggctaagttgtttcaaaggaa

SEQ ID NO: 67583 - DNA, 22 bp, synthetic construct
  misc_feature 1..22: note = chemically synthesized
  source 1..22: mol_type = other DNA
ggctaagttgtttcaaaggaat

SEQ ID NO: 67584 - DNA, 22 bp, synthetic construct
  misc_feature 1..22: note = chemically synthesized
  source 1..22: mol_type = other DNA
agttgtttcaaaggaatttctg

SEQ ID NO: 67585 - DNA, 22 bp, synthetic construct
  misc_feature 1..22: note = chemically synthesized
  source 1..22: mol_type = other DNA
tttcaaaggaatttctgactcc

SEQ ID NO: 67586 - DNA, 22 bp, synthetic construct
  misc_feature 1..22: note = chemically synthesized
  source 1..22: mol_type = other DNA
caaaggaatttctgactccttc

SEQ ID NO: 67587 - DNA, 22 bp, synthetic construct
  misc_feature 1..22: note = chemically synthesized
  source 1..22: mol_type = other DNA
aaaggaatttctgactccttcg

SEQ ID NO: 67588 - DNA, 22 bp, synthetic construct
  misc_feature 1..22: note = chemically synthesized
  source 1..22: mol_type = other DNA
ctgactccttcgatctgtgaga

SEQ ID NO: 67589 - DNA, 22 bp, synthetic construct
  misc_feature 1..22: note = chemically synthesized
  source 1..22: mol_type = other DNA
tgactccttcgatctgtgagat

SEQ ID NO: 67590 - DNA, 22 bp, synthetic construct
  misc_feature 1..22: note = chemically synthesized
  source 1..22: mol_type = other DNA
actccttcgatctgtgagattt

SEQ ID NO: 67591 - DNA, 22 bp, synthetic construct
  misc_feature 1..22: note = chemically synthesized
  source 1..22: mol_type = other DNA
cttcgatctgtgagatttggtg

SEQ ID NO: 67592 - DNA, 22 bp, synthetic construct
  misc_feature 1..22: note = chemically synthesized
  source 1..22: mol_type = other DNA
cgatctgtgagatttggtgtct

SEQ ID NO: 67593 - DNA, 22 bp, synthetic construct
  misc_feature 1..22: note = chemically synthesized
  source 1..22: mol_type = other DNA
gatctgtgagatttggtgtctg

SEQ ID NO: 67594 - DNA, 22 bp, synthetic construct
  misc_feature 1..22: note = chemically synthesized
  source 1..22: mol_type = other DNA
tgagatttggtgtctgaattaa

SEQ ID NO: 67595 - DNA, 22 bp, synthetic construct
  misc_feature 1..22: note = chemically synthesized
  source 1..22: mol_type = other DNA
ggtgtctgaattaatgaatgat

SEQ ID NO: 67596 - DNA, 22 bp, synthetic construct
  misc_feature 1..22: note = chemically synthesized
  source 1..22: mol_type = other DNA
gtgtctgaattaatgaatgatt

SEQ ID NO: 67597 - DNA, 22 bp, synthetic construct
  misc_feature 1..22: note = chemically synthesized
  source 1..22: mol_type = other DNA
aattaatgaatgatttcagcta

SEQ ID NO: 67598 - DNA, 22 bp, synthetic construct
  misc_feature 1..22: note = chemically synthesized
  source 1..22: mol_type = other DNA
atgaatgatttcagctaaagat

SEQ ID NO: 67599 - DNA, 22 bp, synthetic construct
  misc_feature 1..22: note = chemically synthesized
  source 1..22: mol_type = other DNA
cagctaaagatgacacttattt

SEQ ID NO: 67600 - DNA, 22 bp, synthetic construct
  misc_feature 1..22: note = chemically synthesized
  source 1..22: mol_type = other DNA
agctaaagatgacacttatttt

SEQ ID NO: 67601 - DNA, 22 bp, synthetic construct
  misc_feature 1..22: note = chemically synthesized
  source 1..22: mol_type = other DNA
aagatgacacttattttggaaa

SEQ ID NO: 67602 - DNA, 22 bp, synthetic construct
  misc_feature 1..22: note = chemically synthesized
  source 1..22: mol_type = other DNA
attttggaaaactaaaggcgac

SEQ ID NO: 67603 - DNA, 22 bp, synthetic construct
  misc_feature 1..22: note = chemically synthesized
  source 1..22: mol_type = other DNA
ttttggaaaactaaaggcgacc

SEQ ID NO: 67604 - DNA, 22 bp, synthetic construct
  misc_feature 1..22: note = chemically synthesized
  source 1..22: mol_type = other DNA
tggaaaactaaaggcgaccaat

SEQ ID NO: 67605 - DNA, 22 bp, synthetic construct
  misc_feature 1..22: note = chemically synthesized
  source 1..22: mol_type = other DNA
ggaaaactaaaggcgaccaatg

SEQ ID NO: 67606 - DNA, 22 bp, synthetic construct
  misc_feature 1..22: note = chemically synthesized
  source 1..22: mol_type = other DNA
gaaaactaaaggcgaccaatga

SEQ ID NO: 67607 - DNA, 22 bp, synthetic construct
  misc_feature 1..22: note = chemically synthesized
  source 1..22: mol_type = other DNA
aaggcgaccaatgaacaactgc

SEQ ID NO: 67608 - DNA, 22 bp, synthetic construct
  misc_feature 1..22: note = chemically synthesized
  source 1..22: mol_type = other DNA
cagttccatgaatggctgcatt

SEQ ID NO: 67609 - DNA, 22 bp, synthetic construct
  misc_feature 1..22: note = chemically synthesized
  source 1..22: mol_type = other DNA
catgaatggctgcattatcttg

SEQ ID NO: 67610 - DNA, 22 bp, synthetic construct
  misc_feature 1..22: note = chemically synthesized
  source 1..22: mol_type = other DNA
cattatcttggggtctgggcac

SEQ ID NO: 67611 - DNA, 22 bp, synthetic construct
  misc_feature 1..22: note = chemically synthesized
  source 1..22: mol_type = other DNA
tcttggggtctgggcactgtga

SEQ ID NO: 67612 - DNA, 22 bp, synthetic construct
  misc_feature 1..22: note = chemically synthesized
  source 1..22: mol_type = other DNA
ggggtctgggcactgtgaaggt

SEQ ID NO: 67613 - DNA, 22 bp, synthetic construct
  misc_feature 1..22: note = chemically synthesized
  source 1..22: mol_type = other DNA
gggtctgggcactgtgaaggtc

SEQ ID NO: 67614 - DNA, 22 bp, synthetic construct
  misc_feature 1..22: note = chemically synthesized
  source 1..22: mol_type = other DNA
ggcactgtgaaggtcactgcca

SEQ ID NO: 67615 - DNA, 22 bp, synthetic construct
  misc_feature 1..22: note = chemically synthesized
  source 1..22: mol_type = other DNA
tgaaggtcactgccagggtccg

SEQ ID NO: 67616 - DNA, 22 bp, synthetic construct
  misc_feature 1..22: note = chemically synthesized
  source 1..22: mol_type = other DNA
ccagggtccgtgtcctcaagga

SEQ ID NO: 67617 - DNA, 22 bp, synthetic construct
  misc_feature 1..22: note = chemically synthesized
  source 1..22: mol_type = other DNA
aaggagcttcaagccgtgtact

SEQ ID NO: 67618 - DNA, 22 bp, synthetic construct
  misc_feature 1..22: note = chemically synthesized
  source 1..22: mol_type = other DNA
caagccgtgtactagaaaggag

SEQ ID NO: 67619 - DNA, 22 bp, synthetic construct
  misc_feature 1..22: note = chemically synthesized
  source 1..22: mol_type = other DNA
aagccgtgtactagaaaggaga

SEQ ID NO: 67620 - DNA, 22 bp, synthetic construct
  misc_feature 1..22: note = chemically synthesized
  source 1..22: mol_type = other DNA
gaaaggagagagccctggaggc

SEQ ID NO: 67621 - DNA, 22 bp, synthetic construct
  misc_feature 1..22: note = chemically synthesized
  source 1..22: mol_type = other DNA
gaggcagacgtggagtgacgat

SEQ ID NO: 67622 - DNA, 22 bp, synthetic construct
  misc_feature 1..22: note = chemically synthesized
  source 1..22: mol_type = other DNA
ttccctgttctgagttgtgggt

SEQ ID NO: 67623 - DNA, 22 bp, synthetic construct
  misc_feature 1..22: note = chemically synthesized
  source 1..22: mol_type = other DNA
ccctgttctgagttgtgggtgc

SEQ ID NO: 67624 - DNA, 22 bp, synthetic construct
  misc_feature 1..22: note = chemically synthesized
  source 1..22: mol_type = other DNA
cctgttctgagttgtgggtgca

SEQ ID NO: 67625 - DNA, 22 bp, synthetic construct
  misc_feature 1..22: note = chemically synthesized
  source 1..22: mol_type = other DNA
ttctgagttgtgggtgcacctg

SEQ ID NO: 67626 - DNA, 22 bp, synthetic construct
  misc_feature 1..22: note = chemically synthesized
  source 1..22: mol_type = other DNA
tgagttgtgggtgcacctgagc

SEQ ID NO: 67627 - DNA, 22 bp, synthetic construct
  misc_feature 1..22: note = chemically synthesized
  source 1..22: mol_type = other DNA
agttgtgggtgcacctgagcag

SEQ ID NO: 67628 - DNA, 22 bp, synthetic construct
  misc_feature 1..22: note = chemically synthesized
  source 1..22: mol_type = other DNA
tgggtgcacctgagcaggggga

SEQ ID NO: 67629 - DNA, 22 bp, synthetic construct
  misc_feature 1..22: note = chemically synthesized
  source 1..22: mol_type = other DNA
agcagggggagaggcgcttgtc

SEQ ID NO: 67630 - DNA, 22 bp, synthetic construct
  misc_feature 1..22: note = chemically synthesized
  source 1..22: mol_type = other DNA
gtcaggaagatggacagagggg

SEQ ID NO: 67631 - DNA, 22 bp, synthetic construct
  misc_feature 1..22: note = chemically synthesized
  source 1..22: mol_type = other DNA
tcaggaagatggacagagggga

SEQ ID NO: 67632 - DNA, 22 bp, synthetic construct
  misc_feature 1..22: note = chemically synthesized
  source 1..22: mol_type = other DNA
gaggaggagcaaggcctatgtg

SEQ ID NO: 67633 - DNA, 22 bp, synthetic construct
  misc_feature 1..22: note = chemically synthesized
  source 1..22: mol_type = other DNA
aggaggagcaaggcctatgtga

SEQ ID NO: 67634 - DNA, 22 bp, synthetic construct
  misc_feature 1..22: note = chemically synthesized
  source 1..22: mol_type = other DNA
tgtgacagggagggagaggatg

SEQ ID NO: 67635 - DNA, 22 bp, synthetic construct
  misc_feature 1..22: note = chemically synthesized
  source 1..22: mol_type = other DNA
cctgggaggtgtccacgtgagc

SEQ ID NO: 67636 - DNA, 22 bp, synthetic construct
  misc_feature 1..22: note = chemically synthesized
  source 1..22: mol_type = other DNA
ctgggaggtgtccacgtgagcc

SEQ ID NO: 67637 - DNA, 22 bp, synthetic construct
  misc_feature 1..22: note = chemically synthesized
  source 1..22: mol_type = other DNA
ggaggtgtccacgtgagccttg

SEQ ID NO: 67638 - DNA, 22 bp, synthetic construct
  misc_feature 1..22: note = chemically synthesized
  source 1..22: mol_type = other DNA
gctcgaggcctgggatcagcct

SEQ ID NO: 67639 - DNA, 22 bp, synthetic construct
  misc_feature 1..22: note = chemically synthesized
  source 1..22: mol_type = other DNA
ctcgaggcctgggatcagcctt

SEQ ID NO: 67640 - DNA, 22 bp, synthetic construct
  misc_feature 1..22: note = chemically synthesized
  source 1..22: mol_type = other DNA
gaggcctgggatcagccttaca

SEQ ID NO: 67641 - DNA, 22 bp, synthetic construct
  misc_feature 1..22: note = chemically synthesized
  source 1..22: mol_type = other DNA
ggatcagccttacaacgtgtct

SEQ ID NO: 67642 - DNA, 22 bp, synthetic construct
  misc_feature 1..22: note = chemically synthesized
  source 1..22: mol_type = other DNA
acaacgtgtctctgcttctctc

SEQ ID NO: 67643 - DNA, 22 bp, synthetic construct
  misc_feature 1..22: note = chemically synthesized
  source 1..22: mol_type = other DNA
caacgtgtctctgcttctctcc

SEQ ID NO: 67644 - DNA, 22 bp, synthetic construct
  misc_feature 1..22: note = chemically synthesized
  source 1..22: mol_type = other DNA
tgcttctctcccctccaggccg

SEQ ID NO: 67645 - DNA, 22 bp, synthetic construct
  misc_feature 1..22: note = chemically synthesized
  source 1..22: mol_type = other DNA
cttctctcccctccaggccgtg

SEQ ID NO: 67646 - DNA, 22 bp, synthetic construct
  misc_feature 1..22: note = chemically synthesized
  source 1..22: mol_type = other DNA
ctctcccctccaggccgtgcat

SEQ ID NO: 67647 - DNA, 22 bp, synthetic construct
  misc_feature 1..22: note = chemically synthesized
  source 1..22: mol_type = other DNA
tctcccctccaggccgtgcata

SEQ ID NO: 67648 - DNA, 22 bp, synthetic construct
  misc_feature 1..22: note = chemically synthesized
  source 1..22: mol_type = other DNA
tcccctccaggccgtgcataag

SEQ ID NO: 67649 - DNA, 22 bp, synthetic construct
  misc_feature 1..22: note = chemically synthesized
  source 1..22: mol_type = other DNA
ccctccaggccgtgcataaggc

SEQ ID NO: 67650 - DNA, 22 bp, synthetic construct
  misc_feature 1..22: note = chemically synthesized
  source 1..22: mol_type = other DNA
caggccgtgcataaggctgtgc

SEQ ID NO: 67651 - DNA, 22 bp, synthetic construct
  misc_feature 1..22: note = chemically synthesized
  source 1..22: mol_type = other DNA
tgctgaccatcgacgagaaagg

SEQ ID NO: 67652 - DNA, 22 bp, synthetic construct
  misc_feature 1..22: note = chemically synthesized
  source 1..22: mol_type = other DNA
accatcgacgagaaagggactg

SEQ ID NO: 67653 - DNA, 22 bp, synthetic construct
  misc_feature 1..22: note = chemically synthesized
  source 1..22: mol_type = other DNA
aagctgctggggccatgttttt

SEQ ID NO: 67654 - DNA, 22 bp, synthetic construct
  misc_feature 1..22: note = chemically synthesized
  source 1..22: mol_type = other DNA
ctggggccatgtttttagaggc

SEQ ID NO: 67655 - DNA, 22 bp, synthetic construct
  misc_feature 1..22: note = chemically synthesized
  source 1..22: mol_type = other DNA
gggccatgtttttagaggccat

SEQ ID NO: 67656 - DNA, 22 bp, synthetic construct
  misc_feature 1..22: note = chemically synthesized
  source 1..22: mol_type = other DNA
ttagaggccatacccatgtcta

SEQ ID NO: 67657 - DNA, 22 bp, synthetic construct
  misc_feature 1..22: note = chemically synthesized
  source 1..22: mol_type = other DNA
tagaggccatacccatgtctat

SEQ ID NO: 67658 - DNA, 22 bp, synthetic construct
  misc_feature 1..22: note = chemically synthesized
  source 1..22: mol_type = other DNA
agaggccatacccatgtctatc

SEQ ID NO: 67659 - DNA, 22 bp, synthetic construct
  misc_feature 1..22: note = chemically synthesized
  source 1..22: mol_type = other DNA
gaggccatacccatgtctatcc

SEQ ID NO: 67660 - DNA, 22 bp, synthetic construct
  misc_feature 1..22: note = chemically synthesized
  source 1..22: mol_type = other DNA
tcccccccgaggtcaagttcaa

SEQ ID NO: 67661 - DNA, 22 bp, synthetic construct
  misc_feature 1..22: note = chemically synthesized
  source 1..22: mol_type = other DNA
aacaaaccctttgtcttcttaa

SEQ ID NO: 67662 - DNA, 22 bp, synthetic construct
  misc_feature 1..22: note = chemically synthesized
  source 1..22: mol_type = other DNA
tgtcttcttaatgattgaacaa

SEQ ID NO: 67663 - DNA, 22 bp, synthetic construct
  misc_feature 1..22: note = chemically synthesized
  source 1..22: mol_type = other DNA
gtcttcttaatgattgaacaaa

SEQ ID NO: 67664 - DNA, 22 bp, synthetic construct
  misc_feature 1..22: note = chemically synthesized
  source 1..22: mol_type = other DNA
tcttcttaatgattgaacaaaa

SEQ ID NO: 67665 - DNA, 22 bp, synthetic construct
  misc_feature 1..22: note = chemically synthesized
  source 1..22: mol_type = other DNA
cttaatgattgaacaaaatacc

SEQ ID NO: 67666 - DNA, 22 bp, synthetic construct
  misc_feature 1..22: note = chemically synthesized
  source 1..22: mol_type = other DNA
ttaatgattgaacaaaatacca

SEQ ID NO: 67667 - DNA, 22 bp, synthetic construct
  misc_feature 1..22: note = chemically synthesized
  source 1..22: mol_type = other DNA
aatgattgaacaaaataccaag

SEQ ID NO: 67668 - DNA, 22 bp, synthetic construct
  misc_feature 1..22: note = chemically synthesized
  source 1..22: mol_type = other DNA
atgattgaacaaaataccaagt

SEQ ID NO: 67669 - DNA, 22 bp, synthetic construct
  misc_feature 1..22: note = chemically synthesized
  source 1..22: mol_type = other DNA
aacaaaataccaagtctcccct

SEQ ID NO: 67670 - DNA, 22 bp, synthetic construct
  misc_feature 1..22: note = chemically synthesized
  source 1..22: mol_type = other DNA
ccctcttcatgggaaaagtggt

SEQ ID NO: 67671 - DNA, 22 bp, synthetic construct
  misc_feature 1..22: note = chemically synthesized
  source 1..22: mol_type = other DNA
ttcatgggaaaagtggtgaatc

SEQ ID NO: 67672 - DNA, 22 bp, synthetic construct
  misc_feature 1..22: note = chemically synthesized
  source 1..22: mol_type = other DNA
catgggaaaagtggtgaatccc

SEQ ID NO: 67673 - DNA, 22 bp, synthetic construct
  misc_feature 1..22: note = chemically synthesized
  source 1..22: mol_type = other DNA
atgggaaaagtggtgaatccca

SEQ ID NO: 67674 - DNA, 22 bp, synthetic construct
  misc_feature 1..22: note = chemically synthesized
  source 1..22: mol_type = other DNA
cctctcgctcctcaacccctcc

SEQ ID NO: 67675 - DNA, 22 bp, synthetic construct
  misc_feature 1..22: note = chemically synthesized
  source 1..22: mol_type = other DNA
tcgctcctcaacccctcccctc

SEQ ID NO: 67676 - DNA, 22 bp, synthetic construct
  misc_feature 1..22: note = chemically synthesized
  source 1..22: mol_type = other DNA
gctcctcaacccctcccctcca

SEQ ID NO: 67677 - DNA, 22 bp, synthetic construct
  misc_feature 1..22: note = chemically synthesized
  source 1..22: mol_type = other DNA
ctcaacccctcccctccatccc

SEQ ID NO: 67678 - DNA, 22 bp, synthetic construct
  misc_feature 1..22: note = chemically synthesized
  source 1..22: mol_type = other DNA
aacccctcccctccatccctgg

SEQ ID NO: 67679 - DNA, 22 bp, synthetic construct
  misc_feature 1..22: note = chemically synthesized
  source 1..22: mol_type = other DNA
ccctccatccctggccccctcc

SEQ ID NO: 67680 - DNA, 22 bp, synthetic construct
  misc_feature 1..22: note = chemically synthesized
  source 1..22: mol_type = other DNA
catccctggccccctccctgga

SEQ ID NO: 67681 - DNA, 22 bp, synthetic construct
  misc_feature 1..22: note = chemically synthesized
  source 1..22: mol_type = other DNA
gccccctccctggatgacatta

SEQ ID NO: 67682 - DNA, 22 bp, synthetic construct
  misc_feature 1..22: note = chemically synthesized
  source 1..22: mol_type = other DNA
cctggatgacattaaagaaggg

SEQ ID NO: 67683 - DNA, 22 bp, synthetic construct
  misc_feature 1..22: note = chemically synthesized
  source 1..22: mol_type = other DNA
gatgacattaaagaagggttga

SEQ ID NO: 67684 - DNA, 22 bp, synthetic construct
  misc_feature 1..22: note = chemically synthesized
  source 1..22: mol_type = other DNA
aagaagggttgagctggtccct

SEQ ID NO: 67685 - DNA, 22 bp, synthetic construct
  misc_feature 1..22: note = chemically synthesized
  source 1..22: mol_type = other DNA
agctggtccctgcctgcatgtg

SEQ ID NO: 67686 - DNA, 22 bp, synthetic construct
  misc_feature 1..22: note = chemically synthesized
  source 1..22: mol_type = other DNA
gtccctgcctgcatgtgactgt

SEQ ID NO: 67687 - DNA, 22 bp, synthetic construct
  misc_feature 1..22: note = chemically synthesized
  source 1..22: mol_type = other DNA
cctgcatgtgactgtaaatccc

SEQ ID NO: 67688 - DNA, 22 bp, synthetic construct
  misc_feature 1..22: note = chemically synthesized
  source 1..22: mol_type = other DNA
catgtgactgtaaatccctccc

SEQ ID NO: 67689 - DNA, 22 bp, synthetic construct
  misc_feature 1..22: note = chemically synthesized
  source 1..22: mol_type = other DNA
taaatccctcccatgttttctc

SEQ ID NO: 67690 - DNA, 22 bp, synthetic construct
  misc_feature 1..22: note = chemically synthesized
  source 1..22: mol_type = other DNA
ccatgttttctctgagtctccc

SEQ ID NO: 67691 - DNA, 22 bp, synthetic construct
  misc_feature 1..22: note = chemically synthesized
  source 1..22: mol_type = other DNA
tctctgagtctccctttgcctg

SEQ ID NO: 67692 - DNA, 22 bp, synthetic construct
  misc_feature 1..22: note = chemically synthesized
  source 1..22: mol_type = other DNA
ctctgagtctccctttgcctgc

SEQ ID NO: 67693 - DNA, 22 bp, synthetic construct
  misc_feature 1..22: note = chemically synthesized
  source 1..22: mol_type = other DNA
tctgagtctccctttgcctgct

SEQ ID NO: 67694 - DNA, 22 bp, synthetic construct
  misc_feature 1..22: note = chemically synthesized
  source 1..22: mol_type = other DNA
tgagtctccctttgcctgctga

SEQ ID NO: 67695 - DNA, 22 bp, synthetic construct
  misc_feature 1..22: note = chemically synthesized
  source 1..22: mol_type = other DNA
agtctccctttgcctgctgagg

SEQ ID NO: 67696 - DNA, 22 bp, synthetic construct
  misc_feature 1..22: note = chemically synthesized
  source 1..22: mol_type = other DNA
cctttgcctgctgaggctgtat

SEQ ID NO: 67697 - DNA, 22 bp, synthetic construct
  misc_feature 1..22: note = chemically synthesized
  source 1..22: mol_type = other DNA
tgcctgctgaggctgtatgtgg

SEQ ID NO: 67698 - DNA, 22 bp, synthetic construct
  misc_feature 1..22: note = chemically synthesized
  source 1..22: mol_type = other DNA
gcctgctgaggctgtatgtggg

SEQ ID NO: 67699 - DNA, 22 bp, synthetic construct
  misc_feature 1..22: note = chemically synthesized
  source 1..22: mol_type = other DNA
cctgctgaggctgtatgtgggc

SEQ ID NO: 67700 - DNA, 22 bp, synthetic construct
  misc_feature 1..22: note = chemically synthesized
  source 1..22: mol_type = other DNA
ctgaggctgtatgtgggctcca

SEQ ID NO: 67701 - DNA, 22 bp, synthetic construct
  misc_feature 1..22: note = chemically synthesized
  source 1..22: mol_type = other DNA
aggctgtatgtgggctccaggt

SEQ ID NO: 67702 - DNA, 22 bp, synthetic construct
  misc_feature 1..22: note = chemically synthesized
  source 1..22: mol_type = other DNA
tatgtgggctccaggtaacagt

SEQ ID NO: 67703 - DNA, 22 bp, synthetic construct
  misc_feature 1..22: note = chemically synthesized
  source 1..22: mol_type = other DNA
caggtaacagtgctgtcttcgg

SEQ ID NO: 67704 - DNA, 22 bp, synthetic construct
  misc_feature 1..22: note = chemically synthesized
  source 1..22: mol_type = other DNA
tcttcgggccccctgaactgtg

SEQ ID NO: 67705 - DNA, 22 bp, synthetic construct
  misc_feature 1..22: note = chemically synthesized
  source 1..22: mol_type = other DNA
cgggccccctgaactgtgttca

SEQ ID NO: 67706 - DNA, 22 bp, synthetic construct
  misc_feature 1..22: note = chemically synthesized
  source 1..22: mol_type = other DNA
gggccccctgaactgtgttcat

SEQ ID NO: 67707 - DNA, 22 bp, synthetic construct
  misc_feature 1..22: note = chemically synthesized
  source 1..22: mol_type = other DNA
aactgtgttcatggagcatctg

SEQ ID NO: 67708 - DNA, 22 bp, synthetic construct
  misc_feature 1..22: note = chemically synthesized
  source 1..22: mol_type = other DNA
tgttcatggagcatctggctgg

SEQ ID NO: 67709 - DNA, 22 bp, synthetic construct
  misc_feature 1..22: note = chemically synthesized
  source 1..22: mol_type = other DNA
atggagcatctggctgggtagg

SEQ ID NO: 67710 - DNA, 22 bp, synthetic construct
  misc_feature 1..22: note = chemically synthesized
  source 1..22: mol_type = other DNA
gctgggtaggcacatgctgggc

SEQ ID NO: 67711 - DNA, 22 bp, synthetic construct
  misc_feature 1..22: note = chemically synthesized
  source 1..22: mol_type = other DNA
ggtaggcacatgctgggcttga

SEQ ID NO: 67712 - DNA, 22 bp, synthetic construct
  misc_feature 1..22: note = chemically synthesized
  source 1..22: mol_type = other DNA
ggcttgaatccaggggggactg

SEQ ID NO: 67713 - DNA, 22 bp, synthetic construct
  misc_feature 1..22: note = chemically synthesized
  source 1..22: mol_type = other DNA
gaatccaggggggactgaatcc

SEQ ID NO: 67714 - DNA, 22 bp, synthetic construct
  misc_feature 1..22: note = chemically synthesized
  source 1..22: mol_type = other DNA
aatccaggggggactgaatcct
